United States Patent Application Publication US 2004/0029129 A1 - sequence listing, part 4

SEQ ID NO: 11786 - DNA, 1440 bp, Burkholderia cepacia
atgacttaccgcaacgaatctgcctggatccagccggccgcaccgaccgccacggccgccgcgccgcgcgcgacgcaggcacgctcgaccgccgaataccgcgcgctcgacgccgcgcaccacatccatccgttctcggacatgggcgcgctcaatcgtgccggcagccgcgtgatcgtgaaggccgacggcgtctacctgtgggactcggacggcaacaaggtgatcgacgggatggccggcctgtggtgcgtgaacgtcggttacgggcgcaaggaactcgccgacgccgcgtatcgccagatccaggaactgccgttctacaacacgttcttcaagaccacgcacccgccggtgatcgagctttccgcgatgctcgcggaagtgacgccggccggcttcaaccacttcttctattgcaacagcggctcggaaggcaacgacaccgtgctgcgtctcgtgcatcagtactggcgcgtgcagggcaagccgcagaagaaatacgtgatctcgcgcaagaacggctatcacggctcgacgatcgcgggcggcacgctcggcgggatgggctacatgcacgagcagatgccgtcgaaggtcgagcacatcgtgcacatcgaccagccgtacttcttcggcgaagcgcaagccggcgaaacgctcgaagcattcggcctcgcgcgcgcgcagcagctcgaagcgaagattctcgaactcggcgcggagaacgtcgcggcgttcatcggcgagccgttccagggcgcgggcggcgtgatcttcccgccgtcgacgtactggccggaaatccagcggatctgccgcaagtacgacatcctgctggtcgccgacgaagtgatcggcggcttcgggcgcaccggcgaatggttcgcgcaccagcacttcggcttcgagccggacctgatcacgatggccaagggcctcacgtcgggttacgtgccgatgggcgcggtcggcattcacgagcgcgtcgcgcgcccgatcatcgacaacggcgaattcaatcacggcctcacgtattcgggtcacccggtggcagccgccgtcgcgatcgcgaacctgaagctgctgcgcgacgagggcatcgtcgagcgcgtgaagaccgataccggcccgtacttccaggcgctgatgcgcgaaaccttcgcgcgtcatccgatcgtcggcgaagtgcatggccacgggatggtcgcgagcctgcaactggccgaagcgccggccgcacgcctccgcttcgcgaacggcggcgacgtcggcacgatctgccgcgacttctgcttcaacggcaacctgatcatgcgcgcgaccggcgaccggatgctgctgtcgccgccgctcgtgatctcgcgccaggaaatcgatgaactcgtgtcgaaggcgaagaaggccgtcgatgccaccgcccagcaactgggtatttcg

SEQ ID NO: 11787 - DNA, 894 bp, Burkholderia cepacia
atgctcgacgggctggcgagcgcgatggaagacaccgcgctgcccgacgtatgggtgctcgaactgtcgagcttccagctcgagacggcacgcacgttcgcgcccgatgcggccgcgatcctcaacatcacgcaggaccacctcgactggcacggcagcttcgacgcgtacgcgcaggcgaagggccggatcttcggcgcgacgacgacgcgcgtgctgaaccgcgacgacgcggccgtgatgaagttcgcgcccgtcgccggcgcggccgacgcgccgcgcacggtcacgttcggtctgaacgaaccgacgcaggacggcgactacggcctgtcgcgcgacaacggcatcgcgtggctggtggaagccgtcgatcgcgacgcgccggatgaagcgacgacgacccgccggcgcaagcgcgacgccgcgcatacgccggacatcgcgcaaaagcgcctgatgccggccgacgcgctgcgcatccgcgggctgcacaacgcggcgaacgcgctggccgcgttcgcgctcgcacgcgcgatcgacctgccggcagcgccgctgctgcacgcactgcgcgaataccgcggcgaagcgcatcgcgtcgaagtgatcgcgacgatcgacgacgtggactacgtcgacgacagcaagggcacgaacgtcggcgcgacggtggccgcgctcgacgggctcgcgcagaagatcgtgctgatcgcgggcggcgacggcaaggggcaggatttcgcgccgctggtcgcgccggtcgcgcgctggtgccgcgcggtgatgctgatcggccgcgacgcgccggcgatccgcgacacgctcgccgaaaccggcgtgccgctcgtggaccacgcgacgctcgaaggcgcggtgcacgcggcggccgac

SEQ ID NO: 11788 - DNA, 231 bp, Burkholderia cepacia
atgaagaagacgctcgcttcgatcatcgccgcagcattcgctctcgcatcggtttcggcattcgcacaggcgtccgcgccggcagccgacacgtcggccgccgctccggcaccggccaagaaggatcacagcaagccgaagcaccagctgaagcaccacggttcgaagaagggccaggcgaaggctgcagccgcatcggccgccggcacgaacgacgcaggcacgcagaac

SEQ ID NO: 11789 - DNA, 1579 bp, Burkholderia cepacia
caatacgttttcacgatgaaccgggtcggcaagatcgtgccgcccaagcgccagatcctgaaggacatctcgctgtcgttctttcccggcgcgaagatcggcgtgctcggcctgaacggctcgggcaagtcgacgctgatccgcatcatggcgggcgtcgacaaggacatcgagggcgaaccacgccgatgccgaacctgaacatcggctacctgccgcaggagccgcatctctacccgacgaagaccgtgcgcgaagccgtcgaggaaggcctcggcgacctgttccaggcgaacaagaagctggaagaaatctacgcggcctacgccgaaccggacgccgacttcgacgcgctcgcggccgaacaggcgaaatacgaagcgatcctcgcgtcgagcgacggcggcagccccgagcagcagctcgaagtggccgccgacgcgctgcgcctgccgccgtgggacgcaaagatcgagcacctgtcgggcggtgagaagcgccgcgtcgcgctgtgcaagctgctgctcgagaagcccgacatgctgctgctcgacgaaccgaccaaccacctcgacgccgaatcggtcgactggctcgagcagttcctggtgcggttcccgggcaccgtggtcgccgtcacgcacgatcgctacttcctcgacaacgcggccgagtggattctcgaactcgaccgcggccacggcattccgtggaagggcaactacagcagctggctcgaccagaaggaagagcgcctgaagcaggaagaagcgtcggaatcggcacgccagaaggcgatcaagaaggaactggagtgggtgcgccagaacccgaaggggcgtcaggcgaagtcgaaggcgcgtatcgcgcgcttcgaggaactgagcagccaggaataccagaagcgcaacgaaacgcaggaaatcttcattccggccggcgaacgcctcggtaacgaagtgatcgagttcaagaacgtcagcaagtcgttcggcgatcgcctgctgatcgacaacctgagcttcaagatcccggccggcgcgatcgtcggcatcatcggcccgaagggcgccggcaagtcgacgctgttcaagatgctgaccggcaaggaacagccggattcgggcgaagtcgtaatgggcccgacggtgaagctcgcgtacgtcgaccagagccgcgacgcgctcgacggttcgaagacggtgttcgaggaaatctcgggcggcgccgacgtgctgacggtcggcaagtacgaaacgccgtcgcgtgcatacatcggccgcttcaacttcaagggcggcgaccagcagaagatcgtcggcaacctgtccggcggtgagcgcggccgcctgcacctcgcgaagacgctgatctcgggcggcaacgtgctgctgctcgacgaaccgtcgaacgacctcgacgtcgaaacgctgcgcgcgctggaagacgcgctgctcgaattcgcgggctcggtgatggtgatctcgcacgatcgctggttcctcgaccggatcgcgacgcacatcctcgcgttcgaaggcgattcgcaggtcacgttcttcgacggcaactaccagga

SEQ ID NO: 11790 - DNA, 1092 bp, Burkholderia cepacia
atgcagcgcgcgctcgcgctcgccgcgcgcggcatgtacacgaccgcgccgaatccgcgcgtcggctgcgtgatcgtcaaggacggcgacgtgatcggcgaaggcttcacgcagccggccggccaggaccacgcggaagtccaggcgctgaaggacgcgcgctcgcgcggctacgacgtcgcgggctcgaccgtctacgtgacgctcgaaccgtgcagccatttcggccgcacgccgccgtgcgcgaacgcgctgatcgacgcgcgcgtcgcgaaggtggtcgcggcgatggaagacccgaacccgcaggtgtcggggcgcggcctcggaatgctgcgcgacgccggcatcgacgtgcgctgcgggctgctcgcgcatgaggccggcgaactgaacatcggcttcgtgtcgcggatgacgcgtggccgcccgtgggtgcggatgaagaccgccgcgtcgctcgatggccgcaccgcactgccgtccggcgaaagccagtggatcaccggcgaggccgcgcgcctcgacggccacgcgtggcgcgcccgggcgtgcgcgatcctcaccggtatcggcaccgtgcgcgaggacaatccgctgctgaccgtgcgcggtatcgacacgccgcgtcagccgcaacgcatcctggtggacagccgcctcgacctgccgctcgacgcgcggctgctcgaaggcgcgccgctgctgatcttctgcggccggctcgacgccgcaggcgaggtacgcgcgaacgtgctgaagtcgcgcggcgcggaaatcgtgccgctcgcgaatgcgcacggcaaggtcgacctgcccgcgatgctggcggcgctcggcgcgcgcggcgtcaacgagctgcacgtcgaggccggccacaagctgaacggttcgctgctgcgcgagcggtgcgtcgacgaattgctggtatatctggcgccgagcctgctgggcgccgacgcggccggcatgttcgatctcgccgcgccggccagcctcgatgcgcgtacccggttgtcgttccacggtatcgagcggatcggcgacgatctgcggatcctcgcgcgtatcgcgccgcccgacgcctctcac

SEQ ID NO: 11791 - DNA, 1713 bp, Burkholderia cepacia
atgcctcatgacgtcagcctgattgcgttgctcgcggccggtttcggtctcgcgatgatcttcggttacctcgcgtcgctgctgaaaatgccgccgctcgtcggctatctgcttgccgggatcgtgatcggccccggcacgcccggtttcgtcggcgatctgtcgctcgcgcagcagctcgcggaagtcggcgtgatgctgctgatgttcggcgtcggcctgcatttttcgctcggcgatctcctcgcggtgcgcaagatcgcgctgccgggcgccatcgtgcagatcaccgtcgcgacgctgctcggcggcgggctcgcgctcacctggggctggagcctcggtgcggcgctggtgttcgggctggcgctgtcggtcgcgagcaccgtcgtgctgctgcgcgcgctcgaggggcgcgggctcgtcgaaacggtcaacgggcgtatcgcggtgggctggctggtcgtcgaggatctcgtgatggtgctcgtgctggtgctgctgccgcccgtggcggggctgctcggcggcacgccgcccggtgacgcgcacgcggccggcggcagcgtgtggagcacgctcggcgtcacgatgctgaaggtcgccgcgttcatcgcgctgatgctggtggtcggcaagcgcgtgttcccgcgcattctgtggctcgtcgcgcgcacgggctcgcgcgagctgttcacgctttgcatgattgcggcggcggtcggcatcgcgttcggcgcggcgaagctgttcgacgtgtcgttcgcgctcggcgcgttcttcgccgggatgatgatgcgcgagtcggaattcagccggcgcgcggccgacgagacgctgccgctgcgcgacgcgttctcggtgctgtttttcatctcggtcggcatgctgttcgacccgaaagtattgctcgacgagccgctgcacgtgatcgaggtcgcggcgatcgtgctgatcggcaagacggttgcggccgtcgcgctcgtgatcgcattccgctatccgctgaacaccgcgctgaccgtcggcgcgggcctcgcgcagatcggcgaattctcgttcatcctcgcggggctcggccgtgcgctcgggctgctgtcggccgaagggcagagcctgattctcgcggtcgcgctgatctcgatcgcgatgaacacgctgctgttcgcgatgatcgatccggcgctcgcctggatccgcaagcattcggcgttcgcacgcaagctcgaggcgcgcgacgatccgctcgccgcgctgccgatgtcgacgccgcagacgcatctgactggccaggtcgtgatcgtcggctacggcaaggtcggcacgcggatcgcgcatgcgctggacgagcgggggatcgcgtatgtcgtcgtcgagcagaatcgcgagctcgtcgagaagctgcgcgcggacggtatcgcggccgtgtcgggcgacgcgatcgagccgatcgtgctggtgcaggcgcatatcgcccgcgccgggatgctggtcgtcacgctgcccgacgtgttcgacgtgcggcagatcgtcgagatttcgcgcacgctcaacccgacgcttgaagtcgtgctgtgcacgaacagtagcgacgaggccgcgctgctgtcgaacgaggggatcggcaccgtgttcatgggcgagaccgaactcgcgcgcgggatgaccgagcacgtgctcggccggatggcgaagccggtcgcggccgcgcat

SEQ ID NO: 11792 - DNA, 840 bp, Burkholderia cepacia
atgggtcagatcttgttcatcgtctggcgggagagcgtcgaagcgctgctcgtcgtcggcattctctatgcatggctgaaaaacggcgacgacgacgcgcgccgcggcctgcctttcctctgggccggcgtcgctgtcggcctgctgatggccgtcggcctcggcgccgcgctggtcgggttcaccgaagtgttgtccggcgacgcgcaggactatttccagacggcgatggtgctgatcgcgtgcgtgctgatcgtgcagatggtgctgtggatgcgccggcacgggcgcacgctgaagcgcgacatggagcaatcgctgcagcaaagcacgcgcgattcgaactggtggggcgtcgccgtgctggtcgcgctcgcgatcgcgcgcgaaggcagcgagacggtgatcttcctgtacggcctcggtttcggccagtcgggccacgtcgacggcagccagatgctcgcggtcgtgatcggtctcggtctcgcgttcctcacgttctatctgctgcagctcggcggcaagtacttctcgtggcggcatttcttccgcgtcaccgaagtgatgctgctgttcctcggtgcgggcctgttccagaccggcgtcgacaagctgatcgacaaggaaatcctgccgctcggcatttcgcaggtgtgggatacgtccgcgatcctcgatgattcgggcacgttcggctcgctcgtcgcgacgctgaccggctatcgcgcacacccggcgctgaccaacctggtggcctatgcggtctactgggcggtcgtctggctgctgatgaagcgcgcgagccgccgtccggccgttgctgcgggtcgcgcggca

SEQ ID NO: 11793 - DNA, 204 bp, Burkholderia cepacia
atgttcagcgatcttggcagcgacctgcgcagcgcggggcgttacctcgggcaggcgttgcggctgatggtcggcctgcccgactacgatacctacgtcgcgcacatgcgcgaaacccatccggaccgcgagccgatgacgtacgaggaattcttccgcgagcgtcagaatgcgcgctacgggtcgggtgccgggaagtgttgc

SEQ ID NO: 11794 - DNA, 1143 bp, Burkholderia cepacia
atgcgcgtgaacgattgccacaatttccacgacttccgcgaactcgccaggcggcggttgccgggaccgatcttcaactacatcgacggtgcggccgacgatgaagccacgtatcgacgcaacacgcgtgcgttcgaacgctgcgatctggtgccgaacgtgttgcgcggcgtgcgtgatgtcgacctgtcggtgacggtcatggggcagaagctcggcatgccggtctattgttcgccgacggcgctgcaacgcctgtttcatcatgacggcgagcgcgcggtcgccgccgcggccgcgaaattcgacacgatgttcggcgtgtcgtcgctcggcaccgtgagcctggaagaagcgcgtgcgatcagccagggcccgcaggtctaccagttctactttcacaaggatcgcggcctcaatcgcgagatgatgaaccgctcgagggacgccggcgtgaacgtgatgatgctgacggtggacagcattaccggcggcaatcgcgagcgcgacaagcgcaccggtttttcgattccattccggctgactctcgcggggctgaccgagttcgcgttgaagccggcctgggccatcaactatctgacccacgagcggttccgtttgccgcaactcgaccggcatgtcgacatgggcggcggcgcgatgtcgatcagccgctacttcacggacatgctggatccgtcgatgtcatgggacgacgtcgccgcgatggtgcgggagtggaacgggcagttttgcctgaaaggcgtgatgtcggtcgacgatgcccgccgggcggtggacatcggctgtaccggcatcgtgttgtcgaaccacggcggacggcagctggacggttcgcgcgcggcgttcgatcagcttgccgagatcgtcgacgcggtgggcgaccggatcgacgtgatgatggatggcggcgtgcagcgcggttcgcacgtactgaaggcgctggcgttgggggcgaaggccgtcgggctgggacgctattacctgttcccgctcgccgccgccgggcagcccggcgtcgagcgcgcgttgcaactgatgcgggcggagatcgaacgggacatgcggctgatgggctgcgcgtccgttgcgcagctcgggcgagatcagctgcgctttcgc

SEQ ID NO: 11795 - DNA, 483 bp, Burkholderia cepacia
atgatctcagctgaaggcctgaaggaaatcgatcgagcgttgacgaagtatcccgccgatcagaaacagtccgccgtgatgtcggcgttggccgtggctcaagaagagcacggctggctgtcgcccgaactgatgcagttcgttgcggactatctcggcatgccggccgttgccgtgcaggaagtcgcgacgttctacacgatgtacgagctcaaaccggtcggcaagcacaagatcacgctctgcacgaacctgccgtgccagctcggcccgcacggcggcgcggaagcgactgccgactacctgaaacagaagctgggcatcggcttcggcgagaccacgcccgacggcaagttcacgctgaaggaaggcgaatgcatgggctcgtgcggcgatgcgccggtgctgctggtgaacaatcacagaatgtgcagcttcatgagccgcgagaagatcgaccagctgcttgaggagctctcgaaa

SEQ ID NO: 11796 - DNA, 1047 bp, Burkholderia cepacia
atgcgtcaattgctggaccacgcggcagagcacggttacggcctgccggccttcaacgtgaacaacctggagcaggtccaggcgatcatggcggcggcggaccaggtcggcgcgcccgtgatcatgcaggcatcggccggcgcgcgtaagtatgccggcgagccgttcctgcgccacctgatcgaagcggcggtcgaatcgtatccgcacatcccggtcgtgatgcaccaggatcacggccagtcgccggccgtctgcacggccgcgatccgcagcggcttcacgagcgtgatgatggacggttcgctcgaagccgacggcaagacggtcgcgtcgtacgagtacaacgtcgacgtgtcgcgcaaggtcgtcgagatggcgcactcgatcggcgtgacggtcgaagccgaactcggcgtgctcggctcgctcgagacgatgaagggcgacaaggaagacggccatggcgcggaaggcacgatgacccgcgagcagctgctgaccgatccggagcaggccgccgacttcgtcaagctcacgcagtgcgatgcactcgcgatcgcgatcggtacgtcgcacggcgcgtacaagttctcgaagaagccgacgggcgacatcctgtcgatccagcgcatcaaggaaatccacgcgcgcatcccgaacacgcacctcgtgatgcacggttcgtcgtcggtgccgcaggagctgctggccgagatccgcgaattcggcggcgacatgaaggaaacctacggcgtgccggtcgaggaaatccaggaaggcatcaagcacggcgtgcgcaagatcaacatcgacaccgacctgcgtctcgcgatcaccggcgcgatccgccgctacctgttcgagaacccgggcaagttcgatccgcgcgactacctgaagcccgcgcgcgaagcggcgaagaaggtgtgcgtcgaccgttacctcgcgttcggctgcgaaggccaggccggcaagatcaagccggtgtcgctcgacaagatcgccgagcagtacaagtcgggcgcgctcgcacaggtcgtgcgc

SEQ ID NO: 11797 - DNA, 1581 bp, Burkholderia cepacia
gtgtcgggtgagcgcgtcgggggcgccgtgccgttgtctccggggcgcgctcgcggaggcggcgcgcggtggtctggtgacggcgattgtaggacggaatgcgtaccgtacgagcgccgctggcaagaaacatcaagcgggctgcgcaatttcgcaattgccggccggcaggcgcgcgggcacgatccagccaaccgaattcggccgcgcgcgtcgccgcgacgcgcgttgcgctgcaacaagaacccgcacggagacgccatgtcgtatttcgaacatattcccgcgattcgctacgaaggcccgcagtcggacaacccgctcgcgtatcaccattacgaccccgacaagcgcgtgctgggcaagacgctcgccgagcatctgcggatcgcggtctgctactggcacacgttcgtgtggcccggtcacgacatcttcgggcaggccgcgttccggcggccgtggcagcagccgggcgatgcgctcgagcgggcgcggatgaaggcggatgcggcgttcgaattcttcacgaagctcggtacgccgttctatacgttccacgacaccgacgtcgcgccggaaggcgacagcctgcgcgaatacgcggccaacttcgcgcggatggtcgactatctcggcgagcgccagcaggcaagcggcgtgcggctgctgtggggcaccgcgaacctgttctcgcatccgcgcttcgcggccggcgccgcgacgaacccgaaccccgacgtgttcgcgtgggccgcgacccaggtatgccatgcactcgacgcgacccatcgcctcggcggtgaaaactacgtgctgtggggcgggcgggaaggatacgagacgctgctcaataccgacctgaagcgcgagcgcgaccagttcgcccgcttcctgtcgatggtcgtcgagcacaagcaccggatcggcttcaagggcgcgctgctgatcgagccgaagccgcaggagccgaccaagcaccagtacgactacgacgtcgcgaccgtgcacggctttctcgtgcagtacggactgcagaacgagattcgcgtgaacatcgaggcgaaccacgcgacgctcgccggtcactcgttccatcacgagatcgcgaacgcgttcgcgctcggcgtgttcggcagcgtcgacgcgaaccgcggcgacccgcagaacggctgggacaccgaccagttcccgaacagcgtcgaggaactgacgctcgcgttctacgagatcctgcgtcacggcggtttcacgaccggcgggatgaacttcgacgcgaaggtgcgccgccagagcatcgatccggaagacctgttctacggccacgtcggcgcgatcgacgtgctcgcgctcgcgctcgaacgcgcggcggtgctggtcgagaacgaccggctcgacgcgctgcgccggcagcgttatgcgcaatgggacgacgcgttcggccgcaagatcctggcgggcggctatacgctggagtcgctcgcggccgacgcgctcgcgcgcggcgtggacccgcaacatgcgagcggcgcgcaggagcggctcgagaacatcgtgaaccaggcgatctacgggttgcgc

SEQ ID NO: 11798 - DNA, 372 bp, Burkholderia cepacia
atgcgtcattacgaaatcgtattcatcgtgcaccccgatcaaagcgagcaagtgcccgcgatgatcgagcgttacaagtccacgatcacgtcgcacggcggccagatccaccgtgtcgaagactggggccgtcgccaactggcctacatgatcgagaaactcgcgaaggctcactacgtctgcatgaacatcgagtgcgaccagacgacgctcgacgaactcgaacacgcgttcaagttcaacgacgccgtgctgcgccacctcatcgtcaagatgaagaaggccgaaaccggcccgtcgccgatgatgaaggaagttcagcgcgaagaagccaagaaggcggctgcagctcagccggccgaagcgcaggct

SEQ ID NO: 11799 - DNA, 1311 bp, Burkholderia cepacia
gtgggcgacgcgcccatcacgccggatttcgtattgcgtctcggttatgcggccggcaaggtactggccggctcggccgacgtcgcggcaggctcgcgtccgaccgtgctgatcggcaaggacacgcgcgtgtcgggctacatgctcgaagccgcgctcgaggccggcttctcggcagccggcgtcgacgtgatgctggccggcccgatgccgacgcccggcgtcgcgtacctgacgcgtgcgctgcgcctgtcggccggtgtcgtgatcagcgcgtcgcacaacccgtatcacgacaacgggatcaagtttttctcggctgacggcaacaagctgcccgacgacaccgaagccgcgatcgaagcgtggctcgagaagccgctcgaatgcgcggcatccgacgggctcggcaaggcgcgccgcctcgacgacgcagccggccgctacatcgaattctgcaagagcacgttcccggccgcgttcaacctgcgcggactgaagctcgtgatcgattgcgcgcacggcgccgcgtaccagatcgcgccgcacgtgttccacgaactcggcgcggacgtcattccgatcggcgtcgcgccgaacggcttcaacatcaacgacggcgtcggcgcgaccgcgcccgacgcgctggtgcgcgcggtgcgggcgaaccacgccgatctcggcatcgcgctcgacggcgacgccgatcgcctgcaggtcgtcgacgcggccggccgcctgtacaacggtgacgagctgctctacgtgctggtgaaggaccggatcgtcaccgacggcaaggtcgaaggcgcggtcggcacgctgatgaccaacctcgccgtcgaagtcgcgctgcagcgcgagggcgtgaagttcgtccgtgcggcggttggcgaccgctacgtgctcgagcagttgcgcgagcatggctggcagctcggcgcggaagggtcgggccacatcctgtcgctcgaccggcattcgaccggcgacggcatcgtgtcggcgctgctggtgctggccgcgctgaagcgcagcggccgtacgctcgcgcagatgctcgacggcgtcacgctgttcccgcagaagctgatcaacgtgcggatgaaaccgggcgccgactggaagggcagcgcgtcgattcgcgcggcgatcgacgcagccgaagccgcgcttgccggcagcggccgcgtgctgatccgcgcatcgggcacggagcccgtgctgcgcgtgatggtcgaggcgcagcaggcggccgacgcggtgcgccatgcggagacgatcgccgacgcggtgcgggcggcgacgacc

SEQ ID NO: 11800 - DNA, 414 bp, Burkholderia cepacia
ttgcttttttttttcttttcctgtcctgctgttccttgcctcggcgtttgttcttttcttgtctgtgtctgtttcgctcttgtttcctctgtgggtggttgttcgtcgttgttttcgttgttgtgttttcttgtccctgtgcgtttggtttcgtttataatatttgttgttgtgtgtttattgtcttttatatttggtgttggtggtatggttttttttttttttttttttgtctctttctctgtgtgtttttttttttgtgttttttttgtttcttttttttttttttttttttttgtttttcgtttggtgggttttttttttttttttgttttttctgtgttgtgcagtagtgatggaggtgggggtgggggttcgtgcttttcctttggttgtcttgtgttgttttatctc

SEQ ID NO: 11801 - DNA, 1335 bp, Burkholderia cepacia
gtgtgtcgtgccgccggtgcgaacaggcgccgcccgccaacacggcgcgcgaccgcgaccgcgatcgcaccggttggcccgacgcgcgccgtcgccccgtgccggcgtcacaacgacgaactgatttcgatgcaggaattgaacatgacggatgtagtgatcgtatcggccgcgcggaccgcggtcggcaaattcggcggctcgctggcgaaggttgcggcgcccgaactgggcgcgacggtgatccgcgcagtgctggagcgtgcgggcgtgaagcccgagcaggtcagcgaagtgatcatgggccaggtgctgacggccggctccgggcagaacccggcgcggcagtcgctgatcaaggcggggctgccgaacgccgtgccggggatgacgatcaacaaggtgtgcggctcgggcctgaaggccgtgatgctggcggcgaacgcgatcgtcgcgggcgacgcggagatcgtgatcgcgggtggccaggagaacatgagcgcgtcgccgcacgtgctgccgggctcgcgcgacgggttccggatgggcgacgcgaagctggtcgacacgatgatcgtcgacgggctgtgggacgtgtacaaccagtaccacatggggatcacggcggagaacgtcgcgaaggaatacgggatcacgcgcgaagagcaggacgcgttcgcggcgctgtcgcagaacaaggcggaagccgcgcagaaggccgggcgcttcgacgacgagatcgtgccggtgtcgattccgcaacgcaagggcgagccgctgcagttcgcgacggacgagttcgtgcgtcacggcgtgacggcggagtcgctggcggggctgaagccggcgttcgcgaaggacggctcggtgacggcggcgaacgcgtcggggctgaacgatggagcggcggcggtgctggtgatgtcggcgcagaaggcagccgccttgggcctgacgccgctggcgcggatcaaggcgtatgcgaacgcgggcgtggacccgagcgtgatgggcatgggcccggtgccggcgtcgcgccgtgcgctggagcgcgcgggctggacgccgggcgacctggacctgatggagatcaacgaggcgttcgcggcgcaggcgctggcggtgcacaagcagatgggctgggacacgtcgaaggtgaacgtgaacggcggggcgatcgcgatcggccacccgatcggtgcgtcgggctgccggatcctggtgacgctgctgcacgagatggtcaagcgcgatgcgaagcgcgggctggcgtcgctgtgcatcggcggcgggatgggcgtcgcgctcgcggtcgagcgcgtcggagcagcggcc

SEQ ID NO: 11802 - DNA, 651 bp, Burkholderia cepacia
atgaccgcgccgctgaccctcgccctgtcgaagggccggattttcgaggaaaccctgccgctgctggccgccgccggcgtgcaggtggccgaggacccggaaacgtcgcgcaagctgatcctgccgacgaccgatccgaacctgcgcgtgatcatcgtgcgcgcgagcgacgtgccgacctacgtcgaatacggcgcggccgatttcggcgtggccggcaaggacgtgctggtcgagcacggcggctcgggcctgtaccagccgatcgatctgaacattgcgcgctgccggatgtcggtggccgtgccggccggtttcgactacgcgaacgcagtgcgccagggcgcgcgcctgcgggtcgcgaccaagtacgtcgaaacggcgcgcgaacactttgccgcgaagggcgtgcacgtcgacctgatcaagctgtacggctcgatggagctcgcgccgctggtcgggctggccgacgcgatcgtcgacctcgtcagctcgggcggcacgctgaaggcgaacaatctggtcgaggtcgaggagatcatggcgatctcgtcgcgcctcgtcgtgaaccaggccgcgctgaagctgaagcgcgcggcgctcaagccgatcctcgacgcgttcgaacgcgcgtcgcagaatggcggt

SEQ ID NO: 11803 - DNA, 1328 bp, Burkholderia cepacia
ctgccccccgtgcggccgatgtcgccgcgccggcccggcaccgcctggcactgccggcgctgtgcatcgccgtgctgatcgcgcagatcgacacggcgatcgtcaatctcgcgaccgaaccgatcggcaccgcgttcggcacccgcgtcggtgcgctgcaatgggtgatcgacgcgtacaacctcgcgtatgcggtgctgctgctcacgggcggcctgatcggcgacctgtacggcaggcggcgtgcattcgtgctcggcgcgacggtgttgagcggcgcgtcggtcgtgtgcgcgctcgcgccgacgctgggcgtgctgatcgcgggccgcgcgctcgccggcgcgggcgccgcgctgctgatcctttggtcgttcgcgatcgtccgcgtgctctggcgccatcgggccgaacgcgcacgcgcgctcggcatctgggccgcgtgcggcggcatcgcgatgatcgtcggcccgacgctcggcggcgtgctgatccacgcgctcggctggcgcagcatcttcggcgtcgtgattccgttcggcatcgccgcgatcgcactcaccagcgccgtcgtgccggaatcagccgatccgcggggccggcgcttcgatccggccgcgcaggtgctcggtgcgatcgcgatcggctgcgtcgtattcgcgacgatcgacgcgcgccacgacccgcagcgcgcggcgctgctgatcgggaccggcgcggccgcgatcgcgctgttcgtgcggatcgaacggcggctcggcacggccgcgctcgtgccgctcgacctgttcgcgaatcgcgcgttccgcgggatgctggtcggcaacggcgccatgacgttcggcggctacgggatgctgttcgtgctcccgctcgcatggcaaagccaccacgtgctcgacgccagcggcgccagcctcgcactgctgccgatgtcggtgccgttcgcgctcgtgtcgttcggctccggtgccgttgcggcccgcgtcggcgcacgcacggccggcgcgggcggcgtcgcgctgatggggctcgggctcgccgcgatcggcatcggcgcggccgggtcgacgaatccgcacgcgccgatgctcgcgtgggccgaggcggggctcgcgctgaccgtactggcctcggcctcgcggtcggctcgctggccgcgacggcggtcggcgcagtcgacgccgcgcgcgccggcaccgcggcatcagttgatgaacgtgacgcggatgatcggcgcggtcttcggcgtcgcgctgctgggcgcgctgtacgacgcgtgcggcggcggcgcgtcgggcctgcgggtctctgatgctgacgggcaa

SEQ ID NO: 11804 - DNA, 996 bp, Burkholderia cepacia
gtggccggcaacggtcgcgctgccgggctttgcagtgactcgatgcgggcggcgcatgtcggctgccgcccggcgttcgtgaggtggttccataacaaggagtttggagacatgaaatccgtaacgcgtcgtaccgtattgagttcgctggccggcgccgccgcgctcgcgatcctcgcgctgggcacgccgatcgcccatgcgagcaaggacaagcccgagatcggtttttgcatcgacgacctgcgcgtcgagcgctggtcgcgcgatcgcgactatttcgtcgcggccgcgacgaagctcggcgcgaaggtatcggtgcagtccgccgatgcgagcgaggcgcggcagatttcgcagatcgagaacctgatctcgcgcggcgtcgacgtgatcgtgatcgtgccgttcaactcgaagacgctcggcaacgtcgtcgccgaggcgcggaaggccggcatcaaggtcgtgtcgtacgaccgcctgattctcgatgcggacgtcgacgcgtacatctcgttcgacaacgagaaggtcggcgagctgcaggcgcagggcgtcttcgatgcgaagccgaagggcaactatttcctgctgggcggcgcgccgaccgacaacaacgcgaagatgctgcgcgaaggacaactgaaggtgctgaagccggcgatcgaccgcggcgacatcaaggtcgtcggccagcagtgggtgcccgaatggagcgcatcgaccgcgctgcggatcgtcgaggatgcgctgaccgcgaacaacaacaagatcgatgcgatcgtcgcgtcgaacgacggcacggccggcggcgcgatccaggcgctcgccgcgcagcatctggccggcaaggtgccggtatccgggcaggacgcggatctggccgcggtcaagcgcgtgatcgccggcacgcagacgatgaccgtctacaagccgttgaagctgatcgcgagcgaagccccggaagcttgggggggatgtcgcgaatggtgc

SEQ ID NO: 11805 - DNA, 1311 bp, Burkholderia cepacia
atggggattcatgtcatcaagatgccggatatcggcgaagggatcgccgaggtcgagctggtggcctggcatgtggaagtcgggcagacgatcaaggaagaccagccgctcgccgacgtgatgaccgacaaggcggcggtcgagattccgtcgccggtgacgggcaaggtgatcgagctgggcggccggatcggcgagatgatggcggtcggcagcgagctgattcggctggaagtcgaaggcgacggcaacctgaaggccggggcaccggtgcgggaaacaaaggtagaaaccgcaccggtcgcggtggcggcaccgtcgaaaccggtaaccgacgcatcggtcgagtcgtctgcgcagccggcggcgcctcgtgcaccggcgaaaccgcgccgcgaggaaccggtcgcgcagccgcgcgcggcgctggcaccgggcgaacggccgctcgcgtcgccggccgtgcgtcagcgtgcgtgggacatgggcatcgagctgcgctacgtgcgcggcaccggtgaagccgggcggatcctgcatgcggatctcgatgcatatgcgcgcaccggcggcggctcggcgcacggggcacaaccgcgcggctacgacgaacgccacgacgaaaccgaagtgccggtgatcggcttgcggcgcgcgatcgcgcgcaagatgcaggaagcgaagcgccgcatcccgcacttcagctacgtcgaggaaatcgacgtcaccgagctcgaatcgttgcgcacggagctgaaccgccgccacggcgacacgcgcggcaagctcacgccgctgccgctgctgatccgcgcgatggtgatcgcgctgcgcgacttcccgcagatcaacgcgcggttcgacgacgaagcgggcatcgtcacgcgctacggcgcggtgcacatgggcgtcgcgacgcagacggacggcggcctcacggtgcccgtgctgcgtcatgcggaggcgcgtgacgtgtggtcgatctcggcggaaatcgcgcggcttgccgacgcggtgcgcgcgaaccgggcgcagcgcgacgagctgagcgggtcgacgatcacgatctcgagcctcggcgcgctcggcggcatcgtgtcgacgccggtgatcaatcatccggaggtgggcatcgtcggcgtcaaccggatcgtcgagcggccgatgattcgcgacggcgcgatcgtcgcgcgcaagatgatgaacctgtcgtcgtcgttcgatcatcgcgtcgtcgacggcgcggatgcggccgaattcatccaggccgtgcgcgcggcgctcgaacgcccggcactgctgttcgtggag

SEQ ID NO: 11806 - DNA, 639 bp, Burkholderia cepacia
atgcagatcctgctcgccgccctcgttgcctacctgatcggttcggtgtcgttcgccgtcgtcgtcagttccgtgatgggcctggccgacccgcgttcgtacggatccaagaatcccggcgcgaccaacgtgctgcgcagcggcaacaagaaggccgcgatcctgacgctcgtcggcgacgcgttcaagggctggatcgccgtctggctcgcccgtcacttcggcctgcccgacgtcgcggtcgcgtgggtcgcgatcgccgtgttcctcggccacctgtacccggtgttcttccgcttccagggcggcaagggcgtcgcgaccgcggccggcgtgctgctcgccgtgcacccggtgctcgggctcgcgaccgcgctgacctggctgatcgtcgcgttcttcttccgctattcttcgctcgcggcgctggtggcggccgtgttcgcgccggtgttcgacgtgttcctgttcggcacgccgggccataacccggtcgcgtgggccgtgctcgcgatgagcgtgctgctcgtgtggcgccaccgcggcaacatttcgaagctgctcgcggggcaggagagccggatcggcgacaagaagaaggcggccgcggacggcggcgcgcaggacggcgggaaggcc

SEQ ID NO: 11807 - DNA, 828 bp, Burkholderia cepacia
atgaacgccgatctccactgccattccaatgtttccgacgggttgctgtcgcctgccgacgtcgcgcgccgcgcgcatgcgggcggcgtgaccctgtgggcgctgaccgaccacgacgagatcggcggccaggcggcggcgcgcagcgaggcggaagcgctcggcatgcgctacctgagcggcgtcgagatctcggtcacgtgggcatcgcgcaccgtgcacatcgtcggcctgcacatcgatcccgcccatccggcgctggtcgacggcctgtaccgcacgcgccacggccgcgcggcgcgcgcgctggcgatcgcggagcagctcgcgacgctcggcattcccggcgcgtacgaaggcgcgctgaaatacgtatcgaatcccgacctgatttcgcgcacgcacttcgcgcgctttctcgttgaaaacggccatgccgaatcgacgtcggacgtattcgaccgcctgctcggcgacggcaagcccggcttcgtcccgcatcgctgggcgtccctgtccgacgcggtcggctggatccgcgcggcgggcggcgaagcggtggtcgcgcacccgggccgctatcgctatacgccggtcgaattcgacgcgttcttcggcgagttcatcgatctcggcggccgcgcgatcgaggtcatcacgggcagccacacgcccgaccagtaccgcgaatacgcggacgtggcgcgccgcttcggcttcgaagtgtcgcgcggctcggatttccatgcgcccggcgagggccgcatcgagctcggcagcctgccgccgttgccgcccgacctgacaccggtctgggagcgctggctc

SEQ ID NO: 11808 - DNA, 525 bp, Burkholderia cepacia
atgactgactccatcacgccggccgtcgggccggatacgatcgacgcggcagccggcctgcgggaaggcgacgccgtcgccgcgctgcgccgcgcccgcgacaaggtgctgctgccgacgcaactgagcgaagccgcgctgttcgatcccgcgttgcccgatctttcgctgatcgagcggctgcatgcggcgcggtatgtcgcacggcagtcgaatgcgcacgcgctggccgacatctatcgcgcccgattgctcgacgcgggcggcacgctcgacgacatcgaacgggcggatgccgacgcgctcgacgcactgccgcgccgcctcggcgcgatcctgttgcacgcgaagcgcctgacgcacgccccggccgacgcgcgcgcatccgatctcgacgcgctgaaatcggccgggctcacgacatccgcgatcgtcgcgctgtcgcagctcgtcgcgttcgtcgcgtatcagttgcgcgtcgccgcggccgcgcgggcgcttcaggcacgtgccgcggaggccgca

SEQ ID NO: 11809 - DNA, 753 bp, Burkholderia cepacia
ttgattctttacgagtatccgttcaacgagcgaattcgcacgctgttgcgtctcgaagatctgttcgagcgcttcgcgttctttttggctcaggaggacccgcgtgaacaccacgtcgcgctgacgacgctgttcgaaatcgccgaggtaacgggccgcgcggacctgaaatcggatctgatgaaggagctcgaacgtcagcgccagacgctcgccccctttcgcggcaatccgggcatcgagcagaacgcgctcgaagccgtgctcggtgaaatcgagcaaacgctcgcgaatcttgcgcagatgcagggcaagaccggccagcacctcgtcgacaacgagtggctcgccagcatccgcagccgcgcggtgattccgggcgggacatgcaagttcgacctgccgtcgtactacgcgtggcagcaatggcccgccgagcagcggcgccaggacatcgcgaagtgggtcctgccgatgctgccgttgcgcgacgccgcggcgatcgtgctgcggcttgcgcgcgaatcaggccaggcgtcgaaggtcatggcgatgcagggcagctaccagcagatgctgtccggccgcacctatcaactgatgcaggtgcgggtagcgccggagctgcgcgtcattcccgaagcgagcgcaaacaaatacatgctgtgggtacggttcaccatgcaggacggcgacgtgcggccgcgtgcggtggacatcgacgtgccgttccatctgaccctgtgtaatctg

SEQ ID NO: 11810 - DNA, 1155 bp, Burkholderia cepacia
gtgacgccggtgccggacgtgccggaggtgccggacgtgcctgaggtaccggaagtgccggacgtgccggaagtgcccgaggtgccggacgtacccgaggtgccggacgtacccgaagtgccggacgtacccgaagtgccggacgtgcccgaggtgccggacgtacccgaggtgccggaagtgcccgaggtgccggacgtgcccgaagtaccggaggtgcccgaggtaccggaggtgcccgaggtgccggaggtgcccgaggtgccggaggtgcccgaggtgccggaggtgcccgaggtgcccgaggtgcccgaggtgcccgaggtgccggaggtgccggaggtgcccgacgtaccggaggtgcccgaggtaccggaagtacccgaagtacccgaagtacccgaagtacccgaagtacccgaagtacccgaagtacccgaagtacccgaagtaccggaggtgcccgaggtgccggaagtgcccgaggtgccggaagtacccgaggtaccggaagtacccgacgtaccggaggtgcccgacgtaccggaagtacccgaggtaccggaagtacccgaggtaccggaagtacccgacgtaccggaagtgcccgaggtgccgaaagtacccgaggtgccggaagtacccgacgtaccggaagtacccgacgtaccggaagtacccgaggtaccggaagtccccgacgtaccggaagtccccgacgaccccgacgaccccgaagtccccgaactaccgccacccgaagtccccgacgaaccgccgcccgacgtacccgaagtccccgacgtgccgctcgtcccggacgtgctcggcttgatcgtcggcggggtcgtcggtccatcgaccgagccgcaaccgtacagcgcgagcagtgacgagacggccatcgttaccgtcgtcttcttgaagagattctgcatgttggcctcgacattggaagtgtgtccaggccttctctgcaaattccgcgccacgacatgtttggcgaaacggtgtcgcgatttgttgcggaaatcgggactatcgacgcgatttaaacggaggaaaggcggtttcgcgcgacaggcacgtgcggtgcgcgaacgtcgcggctgcgatgttcccgtaaggcgccgtaacgcgcggccggatgttacg

SEQ ID NO: 11811 - DNA, 2109 bp, Burkholderia cepacia
atgcaaatgtccgaaattgcgagcttcttccagctccagagcaatcgcctgtttacgattgaaacgccattgaaaggtcgatcggatctcgtgctcgtcgatttccattgtaccgaggggttatctcagaatttcgagatgcatgtccggctcgcgtcgcaagacaagaatatcgagctgaagaagttgatcggccaacctgtgacaatcacgttgcagttgaccgatgcgctcgccagctcggaagagcgttacttccacggatacgtcgcggcgttttcgcatctcgacaccgatggtggttttgcgatgtatagcgcaacgatcctgccgtggctctggatgctctctcgccgacaggacattcggatctttcaggaagagaacacagaggcgattctcgcgcgcgtgtttcgggagtacggcaagctcgcgtcgttcgaattccggctctcgaaaggaacgcagaatcgcagctattgcacgcagtaccgtgagacggatcttgctttcgtcgaacggctgatgcgagaggatggcttgttctattacttcgagcatgcgaaggatgggcacaagctgatcatcgccgataactcggtgaccgcgaagccgatcgacgggcgcagtccatcgctgcaatacaatcagggcgaggcgatggacaatctcgccgtcatcacgtcatttcaagcacagcgtcagcttgcaccggacacggtcggactgaaaacgttcgactacaaaattcctcatgcccggcgattcgtgtcgggcggcacggaagtcaatcaaggcgacgtaccgtcctacgagatctacgactacctcggcgagcatggtttcgctgacagtgatcggggcgaagagctcgcgcgcttccggacggaagcgctggctgcacacagcaaaacgttcgtcggggtgacgacgggtcggcggatgatgccgtgccgatacttcgagctggacgaccactacgatcacgccagtaccaaacaggaagaccggcaattcctgttgctgactgtgtcgcacacaggcacgaacaactacgagcctggcgaggggacttctgcgtattcatgcagcttcacctgcattcgcaagaaaattccgtaccgtccggcattcgagggcgagcgtccgacgatcgtcgggccgcagacggcgatcgtcgtaggtccgaaaggcgaggagatttatacggatagtctcggccgggtgaaggtgcagttccactgggatcgtctcggcaaacgcgaccaagggagttcctgctgggtgcgcgtgagccagccgtgggcgggtagcggtttcgggatgattcagatcccgcgaatcggggatgaggtggtcgtgagtttccttgatggaaatccggaccgtcccctcgtgacgtcgcgcgtttacaactcgcagaacatgccgccgtgggcgttgccagccaacgcgacacagagcgggattctgacgcgttcgaccaagaccggtaacgtcaacacggccaatgcgatccgcttcgaggacaagaagggtgaggaagaggtctggcttcacgccgagaaggatcagcgcatcgaggtcgagcacgatgagtcgcattgggttggcaacgatcgcaccaagaacatcgatcacgatgagacggtgcatgttggtcatgaccgaaccgagacggtcgacaacaacgagacgattcacgttggggtggatcgcaccgagaccgttggcaacaacgagacgctgacggtcggcggcaaccggaacgagacgatcgaggggatggagaatctcctgattgcactgacgtcgacggagacggtggggctggcgaaagccctgaccattggcggcgcgtatacggtgacggtagcgggcgcgatcaacacggcggccgggcttgccagcgccgaggaagtggggctgtcgaaaaccacgatggtgggcaagacctatacggttactgcgggcgatcgtattgagttgcgaaccggtaaagcgtcgatcgttctcgaaagcagcggacacatcacgattagcgggacgagcatcgacattctcggttccgacgcggtgaaggtcgacggcaagaccgtcgatctgaac

SEQ ID NO: 11812 - DNA, 1875 bp, Burkholderia cepacia
ttgaggctggcccaagaagcccgcccttcaaactggacgcgccgcttgaacccgagccacaagcccggcagagagcacccgatcaattttttgccgaaaattcgaaaggtcaaaatgaacatgcccagcgcggaattctccacgtcggaacccctttcccctcccgatagcgactccatcggcggcaccgtgctcatgaaggcactggccgacgaaaacgtcgaattcatctggggctaccccggcggctcggttctctacatctacgacgagctgtacaagcaggacaagattcagcacgtgctggtgcgccatgaacaggcggccgtgcacgcagccgatgcgtatgcgcgctccaccggcaacgtcggcgtctgcctcgtgacgtcgggccccggtgtcaccaatgcggtgaccggcatcgcaacggcctacatggattcgatcccgatggtcgtgatcagcggccaggtgccgacggccgcgatcggtcaggatgcgttccaggaatgcgacaccgtcggcatcacgcgtccgtgcgtgaagcacaacttcctcgtgaaggacgtgcgcgacctcgcggaaaccgtcaagaaggcgttctatatcgcccgcaccggccgtccgggcccggtgctgatcgacatcccgaaggacatctcgaagacgccgtgccagtacgagccgatcaagagcgtgtcgctgcgttcgtacaaccccgtcacgaagggccattcgggtcagatccgcaaggccgtgtcgctgctgctgacggcgaagcgtccgtacatctacacggggggcggcatcatcctcgccgacgcgtcgcgtgaactgaaccagttcgcggacctgctcggctacccggtcacgaacacgctgatgggcctcggcggctatcgcgcgtcggacaagaaattcctcggcatgctcggcatgcacggcacctacgaagcgaacatggcgatgcagcactgcgacgtgctgatcgcgatcggcgcccgcttcgacgaccgcgtgatcggcgacccggcgcacttcgcgtcgcgcccgcgcaagatcattcacatcgacatcgacccgtcgtcgatctcgaagcgcgtgaaggtcgacatcccgatcgtcggcgacgtgaaggaagtgctgaaggagctgatcgagcagttgcagacggccgagcatggccccgacaccgaagcgctcgcgcaatggtggaaggacatcgaaggctggcgcgcgaaggactgcctgaagtacgaccgcgaaagcgagatcatcaagccgcagtacgtggtcgagaaggcgtgggagctgacggacggcaatgcgttcgtgtgctcggacgtcggccagcaccagatgtgggccgcgcagttctaccgtttcaacaagccgcgtcgctggatcaactccggcggcctcggcacgatgggcttcggcctgccggcggcgatgggcgtcaagatggcccatccggacgacgacgtgctgtgcatcacgggcgaaggctcgatccagatgtgcatccaggaactgtcgacctgcctgcagtacgacacgcccgtgaagatcatttcgctgaacaaccgctacctcggcatggtccgccagtggcagcagatcgaatacagcaagcgctattcgcattcgtacatggatgcgctgccggatttcgtgaagctcgccgaagcgtacggccatgtcggcatgcggatcgaaaagacttcggatgtggagccggcgctgaaggaagcgctgcgcctgaaggaccgcaccgtgtttctcgacttccagaccgatccgaccgaaaacgtctggccgatggtacaggccggcaagggcatcaccgagatgctgctcggatcggaagatctg

SEQ ID NO: 11813 - DNA, 1062 bp, Burkholderia cepacia
ttgacccaaccgatcccccaatcccgcccaggacaggaaaacgaaatgacccaagcccagaccgtcgccgtgcaatccgacgcgattcccatggctgcaccggcgccgcagcgctggcgcgtcgccgacgtcgtcgcgctgttcgaactgccgttcaacgacctgatgttccgcgcgcagcaggtgcatcgcgagcacttcgacgcgaacgcggtgcagctgtcgacgctgctgtcgatcaagacgggcggctgcgaggaagattgcgggtactgctcgcagtcgtcgcatcacgacacgggcctgaaggccgagaagctgatggacgtcgacacggtgctcgacgccgcgcgcgcggcgaaggcgaacggcgcgagccgcttctgcatgggcgccgcgtggcgcaacccgaaggagcgccacatgccggcgctgaccgagatggtgcgcggcgtgaaggagctcggcctcgagacctgcatgacgctcggcatgctcgaagacgagcaggctcggcagctcgccgacgcgggcctcgactactacaaccacaacctcgacacgtcgccggagttctacggccaggtgatctcgacgcgcacctaccaggatcgcctcgacacactcgaccgcgtgcgcgacgcgggcatcaacgtgtgctgcggcggcatcatcgggatgggcgaatcgcgtcgcgaacgcgcgggcctgatctcgcagctcgcgaacctgaacccgtatccggaatcggtgccgatcaacaacctcgtcgcgatcgaaggcacgccgctcgaaggcaccgcgccgctcgatccgttcgaattcgtgcgcaccatcgcggtcgcgcgcatcacgatgccgaaggccgtcgtgcgcctgtcggccgggcgcgagcagctcgacgacgcgatgcaggcgatgtgcttcctcgccggtgcgaactcgatgttctacggcgaccagctgctgacgacgagcaacccgcagacgcagcgcgaccgcgcgctgttcgagcgcctcggcatccgcgcgagccaggccgacgcgctgtcggacaacgcg

SEQ ID NO: 11814 - DNA, 1077 bp, Burkholderia cepacia
atggcattgacgcttgaggaactcgtaaaacggttcggcggcgagatcgccggcgatgcacagtgcaaggtgggcgggctcgcaccgctcgaccaggcgggccctcaacagctcgcgttcctcgcgaacccgaagtacctgtcgcaggtcgaatcgacccgtgccggtgcggtcctgatcgcaccgaaggatctggaaaagctgggcgcggccgccgccggtcgcaatttcatcgtgacgccgaatccgtacgcgtacttcgcgcgcgtcgcgcagatgttcatcgatctggccacgccgccgcgcgcggccggcgtgcatccgagcgcgacgatcgatccggccgcgacggtcgccgcgaccgcggtgatcggcccgcacgtgacgatcgaggccggtgcggtgatcgaagacggcgtgcagctcgacgcgaacgtattcgtcggccgcggcacgacgatcggcgccggctctcatttctatccgaatgcatcggtgtaccacggctgcaagatcggcccgcgcgcgatcgtccatgcgggcgccgtgatcggctccgacggcttcggcttcgcaccggatttcgtcggcgacggcgacgcgcgcaccggcagctgggtcaagatcccgcaggtcggtggcgtgacgatcggcccggacgtcgaaatcggcgcgaacacgacgatcgatcgcggcgcgatggcggataccgtcatcgaggaatgcgtgaagatcgacaaccaggtccagatcggccacaactgccggatcggcgcgtacaccgtgatcgccggcagcgccggcatcgcgggcagcacgacgatcggccgccactgcatgatcggtggcgcggccgggatcgccggccacgtgacgctcggcgactacgtgatcatcaccgcgaagtcgggcgtatcgaagtcgctgccgaaagccggcatctacaccagcgcgttcccggccgtcgaccacggcgaatggaacaagagcgccgcgctcgtgcgcaacctcgacaagctgcgcgagcgcatcaaggcgctcgaagccgcgctcgccgcccagggcggcacccacgcc

SEQ ID NO: 11815 - DNA, 2160 bp, Burkholderia cepacia
gtgaaaacggccatgcgggatgcgtcaggtcagggtgtcggcacgcgggcggcgtgcatcgcgacaacaggtgaaggggcggcgcggcgcccggtgcgccacgccacggaatcagtagcgcaggttcagcgacggcaggcgcgtgatcgggatgcccgcatcgtgcggcttcggcgacgtgtcgggcgtcgagctcatctggtagcgcgtgccgaagttcgatttcacgtcgatctcgaccggcttgccgcggtcgcggtactcggtgacttcggtgccgttcttgctcttttcgtggaagctcggcgtgcggcggatgtcggcgaagtccactttcgacgtgacttcggcgcccggccggttgatcttgcggagatcgggcaggccggcggcttcgttggcctcggcccgggcctgcgcgtcggcgtcaggcgtgccgccggcggcgtgagcgacgccggcggcggcaaacgcgacggcagcggcgacgaaaatgagcggcttcatgatgagtctccagtgaacctaccgattttagcaaatactgcgcgccatccggcccctgcgtgcgcaggggcggccataagggcgaccgggttccgtggtaatgtcgtcggatctgacgaggtgatgaaaatgaaaaacgatttgagccgccggcaccgtgtgctgtcgcccgaaagcccgtcggtcgaggctttcgacgatccggtcgccgccgtcgcgcggctgtccgccatttacgacacgaatacgggcttcctgcgcgatgcgttcgcgcgctatcgccgccacgaagcgattaccgagcacgtgcgcgcgtgctacccgttcgtgcggatccggaccgacgtcaacacgcacgtcgattcgcgccgctcgtacggcttcgtcgcgggtcccggcgtattcgagacgaccgtcacgcgccccgatctcttcgcgaactactaccgcgagcaactgcgtctgctgtcgaagaaccaccatgtcaagatcgagatcggcgtgtcgtcgcagccgattccgatccatttcgcgtttccggaaggcatccatctcgagggcgaactcgatcgcgaccgcctgctcgcgatgcgcgacatcttcgacacgcccgacctgtcgtatctcgatgaccgcatcgtcaacggcacgttcgagccggcgccgggtgagccgcatccgctcgcgctgttcacggcggcccgcgtcgacttctcgctgcaccggctgcgtcactacacggcgacgtcgcccacgcatttccagaactacgtgctctacacgaactaccagttctacatcgacgagttcgtgaagctcggccgcacgctgatgaccgaaagcgacgatcccgaggtgcgcgcgtaccgcagcgagtacagcgcgttcgtcgagccgggcgacgtcgtcacgtacaacgcgaacctcggcagcgagccggccgagggcaccgcgccgccgcgcctgccgcagatgcccgcgtatcacctgaagcgtgcggacggcagcgggatcacgatggtcaacatcggcgtcggcccgtcgaacgcgaagacgatcaccgatcacatcgcggtgctgcgtccgcacgcttgggtgatgctcggtcactgcgcggggctgcgcaacacgcagcgcctcggcgactacgtgctcgcgcacggttacgtgcgggaagatcacgtgctcgacgccgacctgccgctgtgggtgccgattccggcgctggccgaagtgcagctcgcgctcgagcgcggcgtggccgaggtcacgcggctggagggcgcggaactgaagcgggtgatgcgcacgggcacggtcgcgagcgtcgacaaccgcaactgggaactgcgcgaccatcgcgagcccgtgcagcggctgtcgcagagccgcgcgatcgcgctcgacatggaaagcgcgacgatcgcagccaacggcttccgcttccgggtgccgtacggcacgttgctgtgcgtatcggacaagccgctgcacggcgagctgaaactgccgggcatggccgacacgttctatcgcgggcaggtcgatcagcatctgcagatcggcgtgaaagcgatggagatcctgcgcacgaacgggctcgacaagctgcatagccgcaagctgcggagctttgcggaagtggcgtttcag

SEQ ID NO: 11816 - DNA, 1671 bp, Burkholderia cepacia
ttgaccacacaggacttgctcgcgcaatacggcccgcgcgaatcgatggaatacgacgtcgtgatcgtcggcggcggccccgccgggctgtcggcggcgatccggctcaagcagctggccgccgagaaaggcgccgagatcggcgtgtgcgtgctcgagaagggttccgagatcggcgcgcacatcctgtcgggcgcggtgatggacccgcgcgcgatcaccgagctgtttcccgactggaaggagcgcggcgcgccgctcgacgtcgaggtgacggaagaccgcttcctgttcctgtccgagaagagcgcggtcacgacgccgaactgggcgctgcccgacaacttcaagaatcacggcaactacgtgatctcgctgggcaacgtcacgcgctggctgggccagcaggcggaagccttgggcgtcgagatcttccccggcttccccgccgcggagattctctacaacgacgacggctcggtcaaaggcgtcgcgaccggcaacatgggcgtgggcaaggacggcgagccgaccgagaacttccagctcggcatggagctgcacgcgaagtacacgctgttcgccgaaggctgccgcggccatctcggccgccagctgatctcgaaattcaagctcgacgcgaacgccgatccgcaggcgtacgggatcggcatcaaggaactgtgggaaatcgatccggccaagcacaagcccggcctcgtgatccacacggccggctggccgctgaagtccgatacgtacggcggctcgttcctgtatcacatggacaacaaccaggtcgtggtcggcttcgtggtgggcctgggctacacgaacccgtacctgtcgccgttcgaggaattccagcgctacaagacgcacccgtcgatccgcgcattcctcgaaggcggcaagcgcgtgtcgtacggcgcgcgggcgatcacggccggcggcctgctgtcgctgccgaagacggtgttctttgttggcgcgctgatcggcgacgacgcgggtttcctgaacgcgtcgcggatcaagggcagccacgctgcgatcaagaccggcatgctggcggctgatgcggcattcgacgcggtgcaagccggccgtcagtcggacgagctcaatgcgtatccggatgcgttcaagcaatcgtggctgtacacggagctgtaccgcgcgcgcaacttcaagcagtggatggccaagggcctgtatctgggcacgctgatggtcgggctcgagcagaaggtgatgggcggcaacgtgccgtggacgctgcatcaccagcatgcggaccacgagatgctgaagccggcgtcgcagtgcgagccgatcgcgtatccgaagccggacggcaagctgacgttcgaccggctgtcgtcggtgttcatctcgaacacgaaccacgaggagaaccagccggcgcacctgacgctgaaggacgcgagcgtgccggtgaacgtgaacctgcgcacgtacgcggggccggaggcgcgcttctgcccggcggcggtgtacgagttcgtgaagaacgacgacggcggcgagcgcctcgtgatcaacgcgcagaactgcgtgcactgcaagacctgcgacatcaaggacccgacgcagaacatcgtgtgggtcacgccggaaggcggcggtgggccgaattacccgaacatg

SEQ ID NO: 11817 - DNA, 1353 bp, Burkholderia cepacia
atggatttcgactacgacctgttcgtcatcggcgccggctcgggcggcgtgaggctcgcacgcatggcggcgtcctacggcgcacgcgtcggcatagcggaagaagagcagatcggcggcacctgcgtgctgcgcggctgcatcccgaagaaactgctggtctatgcgtcgcactatccgcacgaggtcgacgacgcgaagggcttcggctggaccttcggcgccggcacgctcgactggtccgcgctgatcgccgcgaaggatcgcgagatcaaccggctgagcgacatctacgtcaacctgctgcggcagtcgggcgtcgacatgcacgccggccgcgcgacgctcgtcgatgcgcacacggtcgcgatcggcacgcgcacgatccgcgcgcgccacctcgcgatcgcgaccggctcgcggccgtcgctgccgccgcggcccggcatcgagcacgcgatcacgtcgcgcgaggcgctgtcgctcgcggcgctgcccaaacgcatcgcggtggtcggcggcggctatatcgcggtcgagttcgcgggcatcttcaacggtttcggcagccacgtcgacgtgttctatcgcggcgaaaaaatcctgcgcggcttcgacgacgacgtgcgccagttcctgaccgacgagatgacgaagcagggcgtcacgattcacgcgcgcgcggtgatcgaatcgatcgaacgcgtggacgacggcgcactgttcgtgcgcgtcggcgacgcgcggcacgggccgtacgatcaggtgctctatgcgacggggcgcgtgccgaacgtcgacggaatcgggctcgagcaggcgggcatcctgctcgatgcacgcggcgcgattgccgtcgatgcgtattcggcgacgtcggtgccgtcgatccacgcgatcggagacgtcacgtcgcggccgcagctcacgccggtcgcgacgcgcgacggcgcgctgctcgcgcgcacgctgttcggcgggtcgcgcgtggcggtcgatcacgcgtacgtgccgtcggccgtgttcatccagccggaggtcgcgacggtcggcctgaccgaagccggtgcgcggcacgcgcacggcgacgtcgacatctaccgcacgtcgttcaaggcgttgcgccacacgctgtcgggccgcgacgagcgcacgctgatgaagctcgtcgtcgcgcgcgacagccagcgcgtggtcggcgcgcacatggtcggtcgcgatgcgggcgagatcatccagggcatcgcgatcgcgattcgcgcgggcgcgacgaaggcgcagttcgacgacacgatcggcattcatccgaccgcggccgaggagttcgtaacgatgcggcagaaggtggccgat

SEQ ID NO: 11818 - DNA, 594 bp, Burkholderia cepacia
atgaaacagccgtccgccctgtccgccctcgtcgaagcgttgcgcgtgctgcccggcgtcgggccgaaatccgcgcagcgcatggcggttcacctgatgcagcacgaccgtgagggcgcggagcggctcggccggtcgctgctgttcgcgaccgagcacctgcagcactgcgagaagtgcaacacgttcaccgaagcgcagatctgcgaggtctgcagcgacgaggagcgtgatccgacgctgctgtgcgtcgtcgagacgcctgccgaccagatcatgctcgagcagacgatgacctaccgcgggttgtatttcgtgctgatggggcgactgagcccgctcgacgggatcggcccgaaggaaatccatttcgaccgcctcgtgcggcgcgcgtccgacggcgtcgtcaaggaagtcgtgctcgcgaccaacttcacgaacgaaggcgaagccaccgcccactacctcggccagacgctcaaggcgcgcgggctggcggtcacgcgcctcgcgcgcggcgtgccggtgggcggcgagctcgagtacgtcgacgcgggcaccatcgcccgcgcgatgctcgaccgccgcacgatg

SEQ ID NO: 11819 - DNA, 1020 bp, Burkholderia cepacia
gtgaacggcgcgtcgcagtggcgcatggcgaccggcacgatcaacggcagccgcttcggcctgcgcggcaccgaggatctcggcggcggcctgaaagcgctgttcgtgctcgaaaacggcttcaacgtgaacaacggcgggctcggccaggacggcaagctgttcggccgccacgcgtatgtcggcctgagccgcgccggctacggcacgctgacgctcggccgccagtacgacacgatggtcgacttcgtcgcgccgctgtccgcgacggccggcgatctcggcgatgcgggcttcgcgcatccgttcgacaacgacaacctgaaccactcgctgcgcatcaacaacgcggtcaagtacacgagcgacacgatcgcgggcttcaaggtcggcgcgctgtacgcgttctccaactcggcgaatttcagcgccaaccgcgcgtacagcgtggccgcgagctacacgaacggcccgctgaagctggccggcgcctacctgcagatgaacggcacgaagggctcgacgagcgcgagccccggcgcgaccgattcggccgaggcgaagagcctgaaccaggggggctggtcgatcggctcggaccgcatgcgcacgtacggcggcggcgtcagctacgtattcgggccggcgaccgtcggcttcgtctacacgcgctcgcagtacgacaacaccggctcgttcggctccagcggccagatcgcgttcaacaactacgacgtgaacgtgcgctatgcggtcacgccggccgtcagcctcggcgccgcctatgtgtacacggacgccagcgtgtcgaatcccgacagcaagcacggcaccgatccgaagtggcatcaggtcgacctgcaggccgtgtacaagctgtcgcgccgcaccgacctgtacgcggaagcgatgttccagcatgcgtccggccgcggctaccaggcgttcatcaacacgtcgggcggcgcatcgagcacggcgaaccaggtcgtcggcacgatcggcatgcgcacgcgcttc

SEQ ID NO: 11820 - DNA, 1839 bp, Burkholderia cepacia
gacagccgcaccgactggtatgcggcgctgcgcggcttcacgccgacgctgtatgtcgacggcctgccggcgccgaataccgccgtgatcgcgaactggcgcgtcgatccgtacacgatcgactcgatcgcggtgctgcgcgggccgacgtcggtgaagataggcgcgggcgagcccggcgcgatcgtcgacgcgcacacgaagctcgccgacggcgagcgcgtgcgcgaagccggcgtgcagatcggcaacgatgcgcgcaagcaagcgatgctcgacgtcggcgaccggctcgatccggatggcaggtacgcctaccgcttcgtcggcgtcgcgcgcgacggcaacgcggtgaccggcccgaacggcgaccggcgcgtcgcgctcgcgccgtcgttccggtggcggccgaacgcggatacgtcgttgacattttccgcgacgttcctgcaggacagcggcgacatctcgtcgaacttcctgcccgcgtcgggtacggtgctgccgaacccgaacggccgtctgtcgcaggacctctacatgggcgacccgtcgttcaacgactaccgcaagaagcaatggtcgctcggctacgcgctggaacaccgcgtgaatgcgatctggacgctgcgtcaggacgtgcgctggtcgcacctgtcgctcgacgacgcgacggtgttcggcaacggcctcgcgccccgcagtacgacgaacatgatgcgtttcgcggggctgttccagctcaactacagccggctcgacatcgacaaccacgcgcaggcgcgcttcggcaccgggccgctcgaacacacgctgctgttcggcgcgcaattcgaccggcagacgacgaccaacagcgtatggcttgcgctcgcgccgtcgctcgacctgtaccaccccgtctatcggcccgtgacggccgcgatcttctccggcccgacgtcgctcggccacgtcgaccagtacacggcgatgaacgcgttcggcgtgtatgcgcaggatcagatccgctggcggcgctggacgctgacgctcggcggccgcgaggatgtcgtgaatgcgcggttcgacgaccggtcggcgggcacgcacgtgcagcaggacgtcagtgcgttttcggggcgcgtcgggctcacctatcgcggcgacgccgggtggtcgccttacgtcagctattcgacgtcgttcgatcccgtcatcggcgtgcggatgttcggcggcggcttgccgaaaccgacgcgcggcgcgcagacggaggtcgggctgcgctggcagccgcccggccggaacctgatgctgaacgcggccgtgtatcagatcgaccagaccaacgtcgtgacgccgacgccggtgaatctcgatccgactgccacgacgtcggtgcagaccggcaaggtgcgctcgcgcggcatcgagctgagtgcggtcggcaaggtgacgcgcgagctgtcgatcgtcgcgtcgtatctctatcaggacgtcaagaacgtgcaggcgaacgacgcgtcgctgaaccactggccggtgtccgtgccgctgccgcggcagatggcgtcgatgtgggccgactggacctggcacacgggcgcgctggcgggcgtcggcgtcggcggcggcgtgcgctaccagagcgcgtcggccggcgcgccggacaattcgctgacggtgccgagcgcgacgctttacgatctcgcgatccattacgacctgccgcgctggcgtttcgcggtgaacgtcgcgaacctgttcgaccggcgttatgtcagcggatgccagtcgtacgcggtgtgcgtgttcggcaacgagcggaccgtgctggccagcgcgaaatacagctgg

SEQ ID NO: 11821 - DNA, 687 bp, Burkholderia cepacia
atgtttctacaaggttacggcccgctgatcctcgctggcacctggcaaaccgtcaagctggcggtgctttcgcttgcgctgtcgttcctgctggggctgctcggcgccggcgcgaagctgtcgcgcaaccgcgtgacgaacggcgtcggcaccgtctacacgacgctgatccggggcgtccccgatctggtgctgatgctgctgctgttctacagcctgcagatctggctgaacatggcgaccgacgcactcggctgggaccagatcgatatcgacccgttcctcgccggcgtgctcgtgctcggcttcatctacggcgcgtacttcaccgagacgttccgcggcgcattcctgtccgtgccgcgcggccagctcgaggccggcagcgcgtacgggatgacgaactggcaggtgttcacgcggatcatgttcccgcagatgatgcgcttcgcgctgccgggcatcggcaacaactggcaggtgctcgtgaagtcgaccgcgctcgtgtcgatcatcggcctggcggacgtcgtgaaggcgtcgcaggacgccggcaagggcacgctgcggttcttcttcttcacgctgatcgcgggagcggtctacctcgccatcacgacgatctcgaatttcgtgctgatgtggctcgaaaagcgctactcgaccggtgtccgcaaggctgaccta

SEQ ID NO: 11822 - DNA, 1359 bp, Burkholderia cepacia
atgggggccgtccaaggcagcatgctgctcgtattcacgctgatcgcgattgccgcgctgatcctgatgatcgcgcgctacaagatctacccgttcctggtgctgatcatcgtctcgctcggcctcggtctcgtcgtcggcatgccgatggacaagatcgtcaagtcgttcgaaacgggcaccggcggcacgctcggccacattgcgatcgtcgtcggcctcggcacgatgctcggcaagatgatggccgaatcgggcggcgccgaacggatcgcgaccacgctgatcgactggttcggtgaaaagaacatccactgggcgatgatgttcgtcgcgatcatcgtcggcctgccggtgttcttcgaagtcggcttcgtgctgctgatcccgatcgcgttcaacgtcgcgaagcgcaccggcaagtcgctgctcgtcgtcggcctgccgatggtggccggcctgtcggtcgtgcacgggctgatcccgccgcacccggccgcgctgctggccgtccagcaatacggcgccgatatcggcaagacgatcgccttcggtctcgtcgtcggcgtgccgaccgcgatcatcgcgggcccgctgttcgcgctgacgatctcgaagttcgtgaagctgccggaaaacaacccgctcgcgtcgcaattcgtcgattcgaacgcggatggccgcaagcgcgaactgccgagcttcggcatcacgctgttcacgatcctgctgcccgtcgtgctgatgctcgtcggcagctgggccgacctggtgttcgcaccgaagtcgctgccgaacaacctgctgcgctttgccggcaactcggacgtcgcgctgctgatcgccgtgctcgtgagcttcttcacgttcggcaagctgcagggcttcaaccgcgaccagatccagaagttctgcggcgagtgcctggcgccgatcgccgggatcacgctgatcgtcggcgcgggcggcggcttcggcggtgtcctgcgcgacagcgggatctcgcagcagatcgtcgagaccgccaagcatgcgcacctgtcgccgctgctgctcggctggttcgtcgcggcgctgatgcgtctcgcgacgggttcggcgacggtcgcgatgacgacggcctgcggtatcgtcgcgccgatcgcggcggcgtcgggcgcgtcggtcagcccggagctgctggtgctcgcgacgggctcgggctcgctgatcttctcgcacgtgaacgacggcgggttctggctgatcaaggaatacttcgggatgacggtgggtcagacgttcaagacctggtcgctgcttgaaaccatcatctcggtgctcggtctcagtttcacgttgctgctgagcatggttctg

SEQ ID NO: 11823 - DNA, 1101 bp, Burkholderia cepacia
atgctgactggaaacatcctcacccccgacggctggattcacggttcgctcgatagcgagaacggccgcatcaccacgctcgacggcgcgcccgtcgatcccgcgaagaacgacgcgccgtacatcctgcccggcttcatcgacctgcacgtgcatggcggcggcggcgccgacgtgatggaaggcggcgacgcgatcgaaacgatcgtccgcacgcatgcgcaattcggcacgacgagcctgctcgcgacgacgatgaccgcgccgcgcgacgaactgatggaagtcgtcgcgaatctcggcaccgccgcgcgggcccgcacgccgggcggcgcccgcgtgctcggcgtgcatctcgaagggccgtacatcaaccccggcaagctcggcgcgcagcccgacgcggccgtgtcggccgtgctcgacgaggtgctgaagtacctgtcgatcgcgccgatccgcgtcgtcacgctcgcgccggaaatcgcgggccacatcgagatcatcggcgagatggccgcgcgcggcgtgcgcgtgcagctcggccactcgctcgcgacctacgacgacgcggtcgccgcgctcaagcacggcgcatgcggtttcacgcacctgttcaacgcgatgtcgccgctgcatcaccgcaacccgggcctcgtcggcgcggcgctcgcgcatgccgaatacgcggaaatcatccccgatctgctgcacgtccacccgggcgcgattcgtgctgcgctgcgcgcgattccgcgcctgtacgtcgtgaccgacagcacgtccgccaccggcatgcccgacggcgaataccggcttggcagccagcacgtgacgaagtgcctcggcggcgtgcggctcgccgacggcacgctcgccggcagcacgctgacgatggaccaggcgctgcgcaacctcgtgtcgctcggcctgccgatcgccgacgtgtcgaaccggatgtcgcgctacgcggccgactacctcggcgtgaccgatcgcggccgcctcgagcgcggcgcatgggccgacctcgcggtgttcgatcgcgacctgaacctcaccgcgacctacgtcgaaggagaatcgattgtcgaatatgct

SEQ ID NO: 11824 - DNA, 1976 bp, Burkholderia cepacia
atgacaaccggttttctccagaaaatttttggcagccgcaaccagcggctcgtcaagcaataccaaaagaccgtcgcgacgatcaatgcgctcgaaacgcagatcgagaagctgacggacgaccagttgcgcggcaagacggacgaattccgccagcgggtcgcggccggcgagtcgctcgacaagctgctgcccgaggccttcgcggtgtgtcgcgaggcgagccgtcgcgtgctgaagatgcggcacttcgacgtgcagatgatcggcggcatggtgctccactacggcaagatcgcggaaatgcgcaccggcgagggcaagacgctcgtcgcgacgctgcccgtgtacctgaacgcgctggccggccgcggtgtgcacgtcgtgaccgtcaacgactacctcgcgcagcgcgacgccgaatggatggcgcgcctctacaacttcctcggtctgtcggtcggcatcaacctgtccggcatggagcacgaccagaagcagcaggcctacgcggcggacatcacgtacggcacgaacaacgaattcggcttcgactacctgcgcgacaacatggtctacgagaccgacgcgcgcgtgcagcgggccctgaacttcgcggtcgtcgacgaagtggactcgatcctgatcgacgaagcgcgtacgccgctgatcatttcgggccaggccgaggatcacaccgagctgtacgtgcggatgaacgcactgccgccgctgctcgagcgccagatcggcgaagagaaggccgacggcacgggcgtcgagaagccgggcgactacacgctcgacgagaaggcgcgccaggtgttcctgacggaatcgggccacgagaaggccgagcgcctgcttgccgaatggggcctgatcggcgagggcgaaagcttgtacgcgccgcagaacatcacgctgatgcaccacgtgtacgcggcgctgcgcgcccatacgctgttccacaaggatcagcactacgtcgtgcagaacggcgaagtggtcatcgtccacgaattcacgggccgcctgatggccggccgccgctggtccgacggcctgcaccaggccgtcgaggcgaaggaacacgtgaagatccagagcgagaaccagacgctcgcgtcgatcacgttccagaactacttccggatgtacgcgaagctggccggcatgaccggcaccgcggacaccgaagcgtacgaattcaacgagatctacggtctcgagacggtcgtgatcccgaccaaccgcccgccgaagcggatcgacaagcaggaccagatctacaagacggccaaggagcgctacgacgcggtgatccgcgacatccgcgactgctacgagcgcggccagccggtgctggtcggcacgacgtcgatcgagaactccgaactgctgtcgcacctgctgaagcaggccgggctgccgcacgaagtgctgaacgcgaagcagcacgagcgtgaagcggcgatcgtcgcggaagctggccgtccgaagcgcatcacgatcgcgaccaacatggccggccgcgggaccgacatcgtgctcggcggcaatgcggagaagcaggcggcgttcatcgaggccgacgattcgatcccggccgacgaaaaggcgcgccgcatccagaagctgcacgacgagtgggaaacgctgcacgaggaggtgaaggccgcgggcggcctgcacatcatcggcaccgagcgccacgaatcgcgccggatcgacaaccagctgcgcggccgtgcaggccgtcagggcgatccgggctcgtcgcgcttctacctgtcgctcgacgatcccctgctgcgcatctttccgggcttccgccgtctctcgctcctcgcccgtccccgcctccctcatccccttccttcgccacccctcccccccgtccctccccacgccccgacttcctctcgccggcctacactcctcgtccccctgcccatccatacaaccaaacccac

SEQ ID NO: 11825 - DNA, 993 bp, Burkholderia cepacia
atgtcgtcgtccaccgcctcccccaccctcagcgccgcccacctgctcgccccgatcaccagcgacatggagcaggtgaatcgcgttatccggcaaagcctcgcgtccgacgtgctgctgatcaaccagatcgccgagtacatcatcggcgcgggcggcaagcggctgcgtccggcgttgctgctgctcgtcgccggcgcgctcggcgaaacgtcgcaccaacggcacgtgctggccgccgtcgtcgagttcatccacacggccacgctgctgcatgacgacgtcgtcgacgaatccgagctgcgccgcggccgccagaccgccaatgcgctgttcggcaacgcggcgagcgtgctggtaggcgattacctctactcgcgctcgttcgagatgatggtcggcgtcggcaagatgcgcgtgatggagatcctgtccgaagcgacgacgatcatttcggaaggcgaggtgctgcagctcctgaacatgcacgacgcggacgtcgacgaaacgcgctacatgcaggtgatccgctacaagacggccaagctgttcgaggcgtcggcgcgcctgggcgcggtgctcgcgggcgccgatgcgccgaccgaggccgccgccgccgaatacggccgccgggtcggcaccgcgttccagatcatggacgactggctcgactatgcgggcaccgccgaggcaatgggcaagaatgccggcgacgacctgcgcgaaggcaagccgacgctgccgctcatctatctgatcgagcgcggcacgcccgaacagtcggcgctcgcacgcgaggcgatcgaacagggcggcaccgatcgcttcgacacgattttcgaagcgatcacgcgctcgggcgcgctcgatcacacgctcgaatgcgcacgccaggaagcgcaggccgcggcagcggcgattgccgcgttccccgattcgatctacaaggaaagcctgctcgggttgtgctcgtactcgacgtcgcggcagtca

SEQ ID NO: 11826 - DNA, 618 bp, Burkholderia cepacia
atgaccatcgtcaacctcgccgcctaccacttcgtatcgctcgacgcgaacgagcaatggcgcccgctcgtcaccgcccgctgcaacgaactcggcctgcgcggcacgatcctgctcgcgccggaaggcatcaacctgttcatcgccggcacgcgcgaagccaccgacgcattcatcgcgtacatccgccacgatccgctgttcgaaggcaagttcgcgacgctgcagttcaaggaaagcctgtccgactcgcagccgttccgccgcatgctcgtgcgcctgaagcgcgagatcatcacgatgaagaagcccgcgatcaagccggaactcggccgcgcgccgttcgtcgacgcgcgcacgctgaagtcgtggctcgatcgcggccacgacgataccggccgcccggtcgtgatgctcgacacgcgcaacgcgttcgaggtcgacgtcggcacgttcgacaacgcgctcgactaccggatcgacaagttcagcgaattcccggaagtgatcgacgcgaaccgcgccgacctcgaaggcaagacggtcgtgtcgttctgcaccggcggcatccgctgcgagaaggccgcgatccacatgaaggaaatcggcatcgacaac

SEQ ID NO: 11827 - DNA, 1107 bp, Burkholderia cepacia
atggcaagcgtgctcctgcgcaacatcgcgaagcgctacgacgacaccgaagtgctgcgcaacgtgaacctcgacatcgccgacggcgaattcgtcgtgttcgtcggcccgagcggctgcggcaaatccacgctgatgcggatgatcgccggcctcgaggacatctcgagcggcgacctgctgatcgacggcgcgaaggtcaacgacgtgccgagcgcgaagcgcggcatcgcgatggtgttccagtcgtatgcgctgtatccgcacatgacgctgtacgacaacatggcgttcggcctgaagctcgcgggtgcgaagaagcccgagatcgaccaggccgtgaagcaggccgcgaagatcctgcacatcgaccacctgctcgatcgcaagccgaagcagctgtcgggcggccagcggcagcgcgtcgcgatcggccgcgcgatcacgcgcaagccgaaggtgttcctgttcgacgaaccgctgtcgaacctcgacgccgcgctgcgcgtgaagatgcggctggagttcgcgcggctgcacgacgagctgaagacgacgatgatctacgtgacgcacgaccaggtcgaggcgatgacgctcgccgacaagatcgtcgtgctgtcgggcggcgcggtacagcaggtcggcacgccgaacgcgctgtatcacgcaccggcgaacctgttcgtcgcgggcttcatcggctcgccgaagatgaacttcctgaagggcacggtcgaatcggccgatgcgggcggcgtgctggtgcgcttcgacagcggcgagacgcagcgcgtggcggtcgacgcggcggggctgcagcgcggcgcggcggtgaccgtcggcgtgcggcccgagcacctgctggtcgatgcggcggcggcgggcgtcgccgcgcggacgatggcggtcgaatcgctcggcgatgccgcgtacctgtatgcggagtcggccgtcgcgccggacgggctgatcgcgcggattccgccgctcgacacgtaccgcaccggcgaggcgctgcgcgtgcatgcgcagcccgagcactgccacctgttcgacgaaaacgggcaggcgttccggcggctgagcgcgcacgcgaaggcggcg

SEQ ID NO: 11828 - DNA, 663 bp, Burkholderia cepacia
atgctcgacatccagttgctgcgcaaagacctcgacggcgtcgccaagcgcctcgccgatcgcggctacaccctcgacgtcgccgcgttctccgcactcgaagcggaacgccgcgcgatccagacccacaccgaagagctccaggcgcgccgcaacagcctgtcgaagcagatcggcgcgatgaaggggaagggcgaggacacgtcggccgtgatggccgaagtcagcgggatcggcgacgacatgaaggcgtcggaagccaagctcggcgagatccaggcgcgcctgtccgacctgatgctgggcatgccgaacgtcgcgcacgaaagcgtgccggtcggcaaggacgaggccgacaacgtcgaggtgcgccgctggggcacgccgcgccagttcgacttcgaggtgaaggatcacgtcgacgtcggcacgccgctcggcctcgatttcgagacgggcgcgaagctcgccggtgcgcgcttcacgatgctgcgcggcccgatcgcgcgcctgcaccgcgccctcgcgcagttcatgatcgacacgcacacgcagcagcacggctataccgaaacgtacacgccgtacatcgtgaacccggagatcctgtacggcacgggccagttgccgaagttcgcggacgacatgttccgcgtcgagaag

SEQ ID NO: 11829 - DNA, 666 bp, Burkholderia cepacia
atgaaagcttcccgtttctttatcggcaccctgaaagaggcacccgccgacgcagagatcgtcagccacaagctgatggtccgcgccggcatgatccgtcgcgtcgccggcggcatctacaactacctgccggtcggcctgcgttcgattcgcaaggtcgaggcgatcgtgcgcgaggaaatgaaccgggcgggcgccatcgagctgctgatgccggccgtgcaaccggccgagctgtggcaggagtcgggtcgctgggagcagtacggccccgagctgctgcgcttcaaggaccgcaaggacaacgatttcgtgatcgggccgacgcacgaggaagtcgtcaccgacatcgcgcgcaaccagatcaagagctaccggcagatgccggtgaacttctaccagatccagacgaagttccgcgacgagatccgtccgcgcttcggcgtgatgcgcggccgcgaattcatcatgaaggacgcgtattcgttcgacaaggatgcggccggcctgaacgagtcgtaccgcaagatgtacgacgcgtacgtgcgcatcttctcgcgcctcggcctcgagtttcgcgcggtcgcggccgacagcggctcgatcggcggcaacttctcgcacgagttccacgtgatcgccgacaccggcgaggacgcgatcgcg

SEQ ID NO: 11830 - DNA, 1200 bp, Burkholderia cepacia
atgttccgagaacgtattatctccggcatgcgacccaccgggtcgctgcacctcggtcattaccacggcgtgctgaaaaactgggtgaagctgcagtccgagtacccgtgcttcttctgcgtcgtcgactggcacgcgctgacgacgcactacgagacgcccgaggtcatcgagaagaacgtgtgggacgtgctgatcgactggctcgcgtccggcatcgatccggcgcaggcgacgctgttcatccagagcaaggtgcccgagcacgcggaactcgcactgctgctcggcatgagcacgccgctcggctggctcgaacgcgtgccgacctacaaggagcagatggagaagctgaaggacaaggacctgtccacctacggcttcctcggctacccggtgctgatggccgccgacatcctgctgtatcgcggctcgctcgtgccggtcggcgaggaccaggtgccgcacgtcgagatgacgcgcgagatcgcgcgccgcttcaactacctgtacggccgcgagcccggtttcgaggagaaggcgctcgaagccgcgaagaagctcggcggcaagcgcgcgaagctctatcacgaactgcgcaatgcgtaccagcaggagggcgatgacgaggcgctcgaacaggcgcgcgcgatgctgcaggagtcgcaaagcctgtcgatgagcgaccgcgagcgcctgttcggctatctcgaaggcgcgcgcaagatcatcttggtcgagccgcaggcgctgctgaccgaagcgtcgcggatgccgggcctcgacgggcagaagatgtccaagtcgtacggcaacacgattggcctgcgcgaagacgccgagacgatcacgaagaaggtccgcacgatgccgaccgatcccgcgcgcgtgcgccgcaccgatccgggcgatcccgacaagtgcccggtgtggcagcttcaccaggtctacacggacgaagcgacgcacgagtgggtgcagaagggctgtcgctcggcgggtatcggctgcctcgactgcaagcagccggtcgtcgaaggcatcctgcgcgaacagcagccgatgctcgagcgtgcgcagaagtacatggacgatccgtcgctgctgcgcgcgatcgtcgcggacggttgcgacaaggcgcgcaagtacgcgacggaaacgatgcgcgacgtgcgcgacgcgatgggcctgtcgtacaac

SEQ ID NO: 11831 - DNA, 1151 bp, Burkholderia cepacia
aatccgtccctgattgccatcctgaccacggtcctgctcgacgcgatcggcgtcgggatcgtgatgccgatcctgccggggctgctgcgctcgctcgccgacgcgggcagcaccgatacccactacgggatcctgctcgcgctgtacgcgttcgcgcagttcctgtgcgccccgctgctcggcgcgctgagcgaccgctttggccgccggcccgtcctgctcgcgtcgctcgcgggcgctgcgctcgactacctgctgatggcgctcgcgccgaccctcgcgtggctttacatggggcggctgatcgcaggcatcaccggcgcgaacgtcgcggtcgcgactgcctacgtcaccgacgtcaccgccgaacccgatcgcgcacgacgcttcggccagctcggcgcgatgatgggcatcggcttcatcgcgggcccgctgatcggcggcctgctcggcgcgctgcacctgcgtgcaccgttcgtcgcggccgccgtgctcaacgcgctcaatctcgtgctgggctggcgtgcgttgccggaatcacgggcgccttcggcccgcgaaggccatgcagttggcgcgctcaatccgttcgccagcctgcgccggctgaccggcgcgcccgcgctcgcaccgctgatcggcatttacgtgatcgtggcgctggtgtcgcaggcgcccgcaacactgtggatcctgtacggccaggagcatttcggctggtcgacgccgatcgcggggctgtcgctggcgggctacggcgcgtgtcacgcactcgcgcaggcattcgcgatcgggccgctgatcgcgcggctcggcgagcgccgcgcgcttgcactgggcctcgcgggcgacgcgctcgggctcgtggcgatcgcgttcgcgaccgccgcgtgggtgccgttcgcgctgctgccgctgttcgcggcaggcggcagacgttgccggccctgcaggcaatgctggcgcggcaggtcgacgatgcgcgccagggtgaactgcaaggcgcgctcgcgagcgtggccagcctgatcggcgtcgcggggccgctggtcgtcaccgcgacctatgcggcgacacgcgcgacgtggccggggctcgtctgggccgcggccgcgctgctttatctgctcgtcccgccgttgctggcc

SEQ ID NO: 11832 - DNA, 1881 bp, Burkholderia cepacia
atgttgcaatccagagcatcttggctgtccctgagtgctttcctgttcgacctgacggcggttgtcgccgcatggttattcgcctatctcgtccgtttcaacggcagcgttccgcatgacttcttgagcggtgcgttgatggcgctgacttgggtgctacccgtctacgcactgatgttccacgggttcggcctgtatcgcgggctttgggtattcgcgagcctgcccgacctgatgcgtatcgcgaaagcggtgaccggcggcggcatgatcgtgatgatcggcgccgtgatgttccagccggcaccgatcatcccccgctcagtgctgctcgtgtcgccgctgatgctgttcctggcgatgggcggcgcgcgcgcactgtatcgcgcgacgaaggagtactacctgtacggcggactcgtcggcaagggcaagccggtgctggtgctcggcgccggcacggcaggtgcgagcctggcgcgcgaactgtcgcgctccggcgagtggcgcctcgtcggcctgctcgacgacgacgtcacgaagcagggccgcgaaatctacggctacaaggtgctcggctcgttcaacgacctcaaacactggaccgatgcgatgaaggtcgaatacgcgatcatcgcgattccgtcggcgtcggtcgaaacccagcgccgcgtcgcgaccctgtgcgtgcgggccggcgtgaaggcgatggtgctgccgtcgctgaccgcgctgatgccggggcagggcttcctgtcgcaggtacggaacatcgatctcgaggatttgctcggccgcgaggccgtgacgatcgatacgccgcacgtcgaggcgctgctgcgtggccgcgtcgtgatggtgacgggcgcgggtggctcgatcggctccgagctgtgccggcagatcttgcgcttcgcgcctgcacagctcgttgcgttcgacctctcggaatacgcgatgtaccggcttaccgaggaattgcgcgagcggtttccggatttgcccgtgctgccgatcatcggcgacgcgaaagattcgctgctgctcgatcaggtgatgtcgcgccatgcgccgcacatcgtgttccatgcggccgcctacaagcacgtgccgctgatggaagagcacaacgcatggcaggcgctgcgcaacaatgtgctcggcacctatcgcgtggcgcgggcggcgatccgccacgacgtgcgtcacttcgtgctgatctcgaccgacaaggcggtcaatccgaccaacgtgatgggcgcgagcaagcgtctcgccgaaatggcctgccaggcgttgcagcagacgagcgggcgcacgcagttcgagacggtgcgcttcggcaacgtgctcggcagcgcgggcagcgtgattccgaagtttcagcagcagatcgcgaagggcggcccggtcacggtcacgcatccggagatcacgcgtttcttcatgacgatcccggaagcgtcgcagctcgtgctgcaggcgtcgagcatggggcacggcggcgagatcttcattctcgacatgggcgaaccggtgaagatcgtcgatctcgcatgcgacctgatccgcctgtacggtttctcggaagaacagatccggatcgaattcaccgggctgcggccgggcgagaagctttacgaggaactgctcgcggacgacgaggcgacgacgcgcacgccgcacccgaaactgcggatcgcgcgggcgcgcgaagtgccggacaatttcctcgacgaactgctgccgtggctgatgcagcatcgtgtgctgtcggatgacgaagtgcggcgcgacctgcggcgctgggtgccggaataccagacggcggttgctcccgtgttgcagagtgtgccgtcggtgcgcgtcgcatcgaacggg

SEQ ID NO: 11833 - DNA, 1431 bp, Burkholderia cepacia
ttgcgcggcctgatcggccttccgggcaaaatccgtcacgcttgcgtgttgcgtcccagccgtccccctcgtcgtccgtccacagccacaagccgcgtgaccgaacggctacgcggcctgcccagcgcgcccgtgcggtttctcctccagttcagaacgacaatggcactcatcgtacacaaatacggcggcacttcgatgggctcggtcgagcgcatcaagaacgtcgcgaaacgcgtcgcaaaatggcatcaggccgggcaccagatggtggtcgtgccgtcggcgatgtccggcgaaaccaaccgtctgctcggtctcgcgaaagagatttcgagccagccgagcccgcgtgagctcgacatgatcgcgtcgaccggcgagcaggtcagcgtcggcctgctgtcgatcgcgctgcaggaaatcggcgtcgaggccgtgagctatgccggctggcaagtgccgatcaagaccgacagcgcgtttacgaaagcacgcattcactcgatcgacgacgagcgcgtgaaggacgatctgaacgcgggcaaggtcgtgatcatcacgggcttccagggcgtcgatccggacggtcacatcacgacgctgggccggggcggctctgacacgtcggcggtggcggtggcggctgcgctgggtgccgaagagtgcctgatctataccgacgtcgacggcgtctacacgaccgatccgcgtgtcgtcgaagaggcgcgccgcctcgatcgcgtgacgttcgaggaaatgctggaaatggccagcctcggctcgaaggtcctgcagatccgctcggtcgaattcgccggcaaataccaggtgaagacgcgtgtgctgtcgagcctgaccgatccgctgattgcgctcgacgaagaaatgcgctcgggcaccctgattacttttgaagaagacgagaccatggaaaaggcagtcatttccggcatcgcgttccagcgcgacgaagcacgcattgctgtgatgggcgtgcccgacaagccgggcatcgcatatcagatcctcggcccggtggccgatgcgaacgtcgacgtcgacatgatcatccagaaccagagcgtcgaaggcaaaaccgacttcacgtttacggtcggtcgcggcgactaccagaaggcgatggatatcctcaccaaccaggtgcagggccatgtgagcgccgagcgcgtgcagggtgacccgaaggtgtcgaaggtgtcggtcgtcggcgtcggcatgcggtcgcacgtgggcgtcgcgagcaagatgttccgcacgttgtcggaagagggcatcaacatccagatgatctcgacgtccgaaatcaagatttcggtgctgatcgacgagaaatacatggagctggccgtccgcgcgctgcacaaggcattcgaactcgaccaggcatcgtggggtttcgtgatgcat

SEQ ID NO: 11834 - DNA, 750 bp, Burkholderia cepacia
aacgtgctggtcaccggcggaaccggcttcatcggcgaaacgctggtgaaccagttgctcgacgcaggacatacggtcacgttgctggcgcgcgatccgctgcgcgccgcctacctgtttcaggggcgcgtgcgcagcgtgacgtccgtcgaacagttgcagccgcacgcgcgcttcgacacggtgatcaatctcgccggcgcgccggtgctgggtgcacgctggagcaagcgccggcaggcgctgctgctcgccagccgcgtcggcgtcacgcaggcgctgatgcgctgggtcgaaaccgccgaggccaagccgcgcacgtggatccaggcgtccgcgatcggctactacggcgtgcggccgggcgacgaacggctcgacgagcgtagcggcgccggcaccggcttcatgtcggcgctgtgccggcagtgggaggcggccgccgcgccgctcgcacgccacggcgtgcgtgcggtggtgctgcggctgggcgtcgtgttcggcccgggcggcgcgttgcgcccgatgctgctgccgcattacttcgggctgggcggccgattcggcgacggcgcgcaagtgctgagctggattcaccgcgacgacgtgctgcggatcgtggcgcgcgcgatgtcgcaggcgggcatgcacggcgtctacaacgcggtcgcaccggtgccgctgacccagcgcgcgttcgtgcagatcgtgtcgaaggtgctgcgccgccgcgcgtggctgcacgtgccg

SEQ ID NO: 11835 - DNA, 636 bp, Burkholderia cepacia
ttgttgcctcaactgaatgccgcgcgagggcgcggcgccgtttccaggagaaaaggtttgaaaaagcatctgatcatcgccgccggcgcgctggccgcttcgctgtcgttctcggctttcgccgaaagcgccacctaccagttcgacccgagccacacgtacccgagcttcgaggccgaccacttcggcggcctgtcggtctggcgcggcaagttcgacaagtcgagcggcaccgtgacgctcgaccgtgcggcgaagaccggcacggtcgacgtgacgaccgacatcgcgtcgatccacacgggcagcgcgaagctcgacgagcacctgcagacggccgagttcttcgatgcggcgaagttcccgcaggcgaactacaagggcacgatcaagttcgacggcgacaagccggtgtcggtggtcggcaacctgacgctgcatggcgtcacgaagccgctcacgctgaagatcgattcgttcaagtgcatgccgcacccgatgctcaagcgtgaagtgtgcggcgtcgacgcggtcggcgaattcagccgcgacgatttcggcctcgactacggcaagcagtacggcttcaagatgaagacgaagctgctgatcacggccgaagcggtcaagcagcag

SEQ ID NO: 11836 - DNA, 1800 bp, Burkholderia cepacia
atgtcgatgcgtactgaatactgcggtctcgtgaccgaacacctgctgggccaaaccgtgtcgctgtgcggctgggtgcagcgccgccgcgatcacggcggtgtgatcttcatcgacctgcgcgatcgtgaaggcctcgtgcaagtggtgtgcgacccggatcgcgccgagatgttcgcgaccgccgaaggcgtgcgcaacgagttctgcgtgcagatcaagggcctcgtgcgcaaccgtccggaaggcacggtcaacgccggcctgaagagcggcaagatcgaagtcctgtgccacgaactgaacgtgctgaacgcgtcggtcacgccgccgttccagctcgacgacgacaacctgtcggaaacgacgcgtctcacgcaccgcgtgctcgacctgcgccgcccgcagatgcagcacaacctgcgcctgcgctaccgcgtcgcgatcgaggcgcgcaagtacctcgacgagcagggcttcatcgacatcgagacgccgatgctgacgaagagcacgccggaaggcgcgcgcgactacctcgtgccgtcgcgcgtgaacgcgggccagttcttcgcgctgccgcagtcgccgcagctgttcaagcagctgctgatggtcgcgaacttcgaccgttactaccagatcacgaagtgcttccgcgacgaagacctccgcgcggaccgtcagccggaattcacgcagatcgactgcgagacgtcgttcctcggcgagcaggaaatccgtgacctgttcgaagacatgatccgtcacatcttcaagacgacgatcgacgtcgagctcgacgcgaaattcccggtgatgccgtactcggaagcgatggcgcgtttcggttcggacaagccggacctgcgcgtgcagctcgaattcactgagctgaccgacgcgatgaaggacgtcgacttcaaggtgtttagcacgccggccaacgcgaaggacggccgggttgcggcgctgcgcgtgccgaagggcggcgagctgtcgcgcggcgacatcgacggctacacggaattcgtgcgtatctacggcgcgaagggcctcgcgtggatcaaggtcaacgagaaggcgaagggccgcgacggcctgcagagcccgatcgtcaagaacctgcacgatgcatcgatcgcggcgatcctcgagcgcaccggcgccgaagacggcgacatcatcttcttcgcggccgatcgcgcgaaggtcgtcaacgacagcctcggcgcgctgcgcctgaagatcggccattcggaattcggcaaggcgaacggtctcgtccaggccggctggaagccgctgtgggtcgtcgacttcccgatgttcgaatacgacgacgaagatgcacgctacgtcgccgcgcaccatccgttcacgagcccgaaggacgagcacctcgagtacctcgagaccgacccgggccgctgcctcgcgaaggcgtacgacatggtgctgaacggctgggaaatcggcggcggctcggtgcgtatccaccgcgaggaagtgcagagcaaggtgttccgcgcgctgaagatcggtgcggaagaagcgcaggcgaagttcggcttcctgctggacgcgctgcagtacggcgcgccgccgcacggcggtatcgcgttcggtctcgaccgcatcgtcacgatgatggccggcgccgattcgatccgcgacgtgatcgcgttcccgaagacgcagcgtgcgcaggatctgctcacgcaggcgccgagcccggtcgacgagcgtcagctgcgcgagctgcacatccgtctgcgtcagccggagcagccgaaggcg

SEQ ID NO: 11837 - DNA, 2788 bp, Burkholderia cepacia
aagtatccggtcaacctgctcgacacgccgttcccgatgcgtggcgacctgcccaagcgcgagccgcagtgggtcaaggagtgggaagagcgcggcatctacgacaagatccgcgcggccagccagggccggccgaagttcatcctgcacgacggcccgccgtatgcgaacggcgacatccacctcggccacgcggtcaacaagatcctgaaggacatcgtcgtcaagtcgcgcaacatggccggcttcgacgcgccgtacgtgccgggctgggattgccacgggatgccgatcgagatccagatcgagaagcagttcggcaagtcgctgccggcggccgaagtgatgagcaaggcgcgcgcgtacgcgaccgagcagatcgagaagcagaaggtcggcttcaagcgcctcggcgtgctcggcgactgggcgaatccgtacaagacgatgaacttcgtgaacgaggcggaagaaatccgcgcgctcggcaagatcatcgagaagggctacgtgtaccgcgggctgaagccggtgaactggtgcttcgactgcggctcggcgctcgcggaagcggaagtcgagtacaaggaccgcaccgatccgacgatcgacgtgatgttcgcgttcgcggaaccggaaaagaccgcgcaggcgttcggcctgccggcgctgccgcgcgccgacggcggcatcgtgatctggaccaccacgccgtggacgattcccgctaaccaggcgctgaacctccatccggaaatcgtctacgcgctggtcgacaccgagcgcgggctgctgatcatcgcggaagagcgcgtcgaagcctgcatgagcgacttcaagctgacgggccgcatcatcgcgaccacgcccggcgtgaagctcgcgaacctgcgcttccatcacccgctcgcatcggcccatcccggctacaagcgcaccgcgcccgtctacctcggcgactacgtgacgaccgacaccggtaccggcgtcgtgcactcgtcgcccgcgtacggtatcgaggacttcatgtcgtgcaaggcacacgggatgaccgattccgacttcatcaacccggtgatgggcgacggccgctatatcgaatcgctgccgctgttcggcggcctgtcgatctgggatgcgaacccgaagatcgtcgacgcgctgaacgcggccggctcgctgctgcgcagcgagaagtacacgcacagctacatgcactgctggcgccacaagacgccgatcatctaccgcgcgacgtcgcaatggttcgccggcatggacgtgacgccgcgagacggcggcaagacgctgcgcgaaacggcgctcgaaggcgtcgacgcgaccgcgttctacccgtcgtggggcaagcagcgcctgttcagcatgatcgcgaaccgtccggactggacgctgtcgcgccagcgccagtggggcgtgccgatggcgttcttcgtgcacaaggaaaccggcgagctgcacccgcgcacgctcgagctgctcgaggaagtcgcgaagcgcgtcgagcagtcgggtatcgaggcgtggcaatcgctcgacccgcgcgagctgatcggcgacgacgcgaacctgtacgaaaagaaccgcgacacgctcgacgtgtggttcgactcgggcacgacgcactggcacgtgctgcgcggctcgcacaaggatcagctgcagttcccggccgacctgtacctcgaaggctcggaccagcatcgcggctggttccactcgtcgctgctgacggcctcgatgatcgatggccgcgcgccgtacaagggcctgctcacgcacggcttcacggtcgacggcgaaggccgcaagatgagcaagtcgctcggcaacggcatcgacccgcatgaagtcgcgaaccgcctcggcgcggaaatcatccgcctgtggatcgcgtcgaccgactactcgggcgagctcgcgatttccgaggaaatcctgaagcgcgtgaccgaaggctatcgccgcatccgcaacacgctgcgcttcctgctcgcgaacctgtcggacttcgacttcgcgcagcacgcggtgccggtcgacgaatggctcgagatcgaccgctatgcggtcgcgttctcgcagcaactgcagacggaactgctcggccactacgagaagtacgaattccacccggtcgtcgcgaagctgcagacgtactgctcggaagacctcggcggcttctacctcgacgtgctgaaggatcgcctgtacacgagcgccgccgattcgcgcgcgcgccgctccgcgcagaccgcgctgtaccacctgacgcacggcttgctgcgcgtgctcgcgccgttcctgtcgttcacggcggaagaagcgtggaaggtgttccagccggcgagcgacacgatcttcacggagacctactatgcgtatccggaagtcgccggctcggccgcgctgatcgacaagtgggcgctgctgcgcgacgtgcgcggcaacgtgacgaaggcgctcgaggaagcgcgcaccgcgaaccgcatcggttcgtcgctgcaggccgaagtcaccgtccatgcgagcggcgcgcgctacgacgcgctaacgagcctcggcgacgacctgaagttcgtgctgatcacgtcggccgcgacggtcgtcaaggtcgacgacgaagcgcaggaaagcgtcgacgtggccgcgtcgaagtaccagaagtgcgagcgctgctggcactaccgcgaagatgtcggcgcgcacgccgagcatccgacgctgtgcggccgctgcttctcgaacctgtttgaaaacggcgaaatcc

SEQ ID NO: 11838 - DNA, 435 bp, Burkholderia cepacia
atgaagaagagcgcccgccgacaatcgcgcgagctggcgacgcagggcctgtatcagtggctgctgtcgaacgcgccctccggcgagatcgacgcgcaactgcgcggcgcgctcggttacgacaaggctgacaaggaactgctcgaagcgatcctgcacggcgtgatccgcgagcatgcgacgctcgtcgaagcgctggcgccgtcgctggaccgtccgatcgatcagctgtcgccggtcgaacgcgcggtgctgctgatcgcgacgttcgaactcacgcaccacgtcgaaacgccgtaccgcgtgatcatcaacgaagccgtcgaactcgcgaagacgttcggcggctccgacggctacaagtacgtgaacggcgtgctcgacaagctggccgcgaagctgcgccccgccgaaacgcacgcgcgtcgcaacggc

SEQ ID NO: 11839 - DNA, 795 bp, Burkholderia cepacia
atgatccagatcgatctgagcgggcaagtggcggtggtgacgggcggttcgtccggcatcggactcgcgacagccgaacggtttctgcaggcaggcgcgtcggtcgcgatctgcggccgcgacgacgaacgcctcgcacgcgccgaggcgatgctgcgcggcaagtacgcggatgcacgactgctggccacgcgctgcaacgtgctcgacgaagccgacgtgaccgcgttcgcgcaagcggtatccgcgcgtttcggctgcgccgacatgctggtcaacaacgccggccagggccgcgtctcgacctttgccgacacgaccgacgacgcctggcgcgaagaactcgaactgaagtacttcagcatcatccgcccgacgcgcgcattcctgccgctgctgcgcgatgcggctgcgccgacgatcacctgcgtgaactcgctgctcgcgctgcagccggagccgcacatggtcgcgacgtcgtcggcgcgtgccggcgtgctgagtctcgtgaagtcgctcgcgaccgaactggcgccgcagcgcatccgcgtgaactcgatcctgatcggcatcgtcgagtcggggcagtggcgccgccgctacgacacgcaggcgcagcccggcgaaagctgggaggactggacgggcgcgctcgcccgcaagaagaacattccgctgaatcgcttcggcaagcctgacgaggcggcctgggcacttttttatctcgcaacgcatctgtcgtcctacacgacgggcagccatatcgacgtttctggaggctttgcacgccatgtc

SEQ ID NO: 11840 - DNA, 1584 bp, Burkholderia cepacia
  misc_feature (24)..(24): n=g, a, t or c
gtgtcggcatttccaggagaaganaacctcgatctgctcgaatcgctgcggcgatcgaagatcaagctcgtgctgacccggcacgagcaggcggccgggttcatggccgccacctacggccgtctcacgggccgcaccggcgtgtgtctcgcgacgctcgggccgggcgcgacgaacttcgtgacggccgccgcgtatgcgcagctcggcgggatgccgatgctgatgatcaccgggcagaagccgatcaagtccagcaagcagggccacttccagatcgtcgacgtggtcgacatgatgcagccgctcacgaagttcacgcggcagatcgtgtcgatcggcaacatcccgtcggccgtgcgcgaggcgttccgccgtgcggaggaggagcgcccgggcgccgcgcacctcgaactgcccgaagacatcgcgcacgaggagggcgacggcaagccgatcccgcgcagctacagccggcggccggtggccgaggagaaggcggtcgcgcatgcggtcgacgcgatccaggccgcgcgccatccgctcttgatgatcggcgcgggcggcaaccgcaagaccacctgcaagatgctgctcgaattcgtcgacaagacgggcattccgttcttcacgacgcagatgggcaagggcgtgatcgacgagacgcacccgctgtggctcggcaacgcgacgctgtccgacggcgatttcgtgcatcgcgcgatcgagcacgcggattgcatcatcaacgtcggccacgacgtgatcgagaagccgccgttcttcatgcgcaccgacgacaagaccgtgatccacgtgaacttcctcggcgcgcaggtcgaccccgtctatttcccgcagatcgaggtggtcggcgacatcgcgaacgcggtgtggcagatgaaggaggcgttgacgccgcaatcgcactgggatttcgagcgcttcaagatgatcaaggcgcatttcgacgcgcacctggaaaagggccagcacgatccgcggttcccgatgtacccggtgcggatcgtcaacgacctgtacaacgcgttgccggtggacggcatcgtctgtctcgacaacgggatgtacaagatctggttcgcacgctactggcgtgcgcatgagccgaactcgctgctgctcgacaacgcgctcgcgtcgatgggcgcgggcctgccgtcggcgatcgcgaccaagatcgtgcatccgcagcgcaaggtgatcgccgtatgcggcgacggcggcttcatgatgaattctcaggagctcgaaacggcggtgcggctgaagctcgacatcgtcgtgatgatcctgcgcgacgacgcgttcgggatgatccgctggaagcaggagaacatgaatttccccgatttcgcgatgacgctgcagaaccccgatttcgtgtcgtacgcgcaaagctacggcgcgcacgggcatcgcgtcgagtcggccgacgatctcgagccgctgctgcgcgagtgcttctcgtcgccgggcgtgcacgtgatcgacgtgccgatcgactactcggacaacgagcgcgtgctgaaccgcgagatcaagcgcctgtcggcgcaactc

SEQ ID NO: 11841 - DNA, 951 bp, Burkholderia cepacia
atgaagcatttcagtaccgacgaagcacccgccgcagagcaagccgactattggtcggcggccttggcaagttccttcgtcaagctcgacttcgaaccgactacctcccggtccggccgcccctttacgggccatatcgatcaaggatccttggcatacgtcgacgtcgcggtcgtcaattcgcgtgctcaggaagtgcatcggacgagcaggctggtgcggcaagaagatgcggacttgtttctgatcagcgtccaggtagcggggcggggagagctggaacaggatggccgtcaagccgtcctttcagctggtgattgttcgctttacgatacgacgcgcccatatcatctcagcttccgggacgacttcgaacagctcgtattgtcgatcccgcgcgaccgcttaaggatacgaatccccgctgcggatcgtctcacggccatccccatacgaggggtcaacggtcttggatcgctgttttttgatttggtgaccagtatcccgcgaaatctcgagtccatgacggcgcaggttcgcgagtccgtctcgaacagcgtccttgatctggttgccacggcactcgctggcctgccgtctccgatccccgcgccagcgtccaatttgaagcagtttcatctcaatcggatcaaatcgtatgtgattgagaacctctcggacgcggagctggacatcgcacgaatcgcacagaccttggggatgtccgtgagttcgctctatcgtgcatttgcatccgaggggtgtccattgtcgcagtggatctgggatcagcgcctgcatgcttgtcgaaaggcgctgctggacgaatcgtgcgccaacctgagcgccaagcagatcgcaatgagctggggatttaacgacccggcgcacttcagccgggcttttcgacggaaattcggcgagagtccgaacgcgttgcgcacgcggaaa

SEQ ID NO: 11842 - DNA, 1574 bp, Burkholderia cepacia
atgaaatccagactcgacagatggatgatgctgctcgccatcgcggcagcaggtacggcacaggcacaaacgcgcgtcggcggtaacccgctcgactcccttccccagatcaacgcgccgaagacgggcccgaacgtcaccgtgcaggtcgcgccgcaggcgccgcaattgcaggagctgctgtcgcggcacctgacgccgaagacgttccaggtcgaaggcgtgaagtcgataccgttcgaagaaatcacgcgccgcttcacaccgctcgtcggcaaggacatcacgatcggcgaactgatcgaaaccgccaacggcgtgacgacgctgtaccaggaacgcggctacgcgctgtcgttcgcgttcgtccccgcgcaaacgttcgagaacggcgtcgtgcgcatcacggtggtcgaaggctatgtgtcggacgtcaaggtcaccggcaagcccggcgcgatggaaccgaagattcgcgcgattgccgcgcacatcacggccgatcgcccgctgcgccgcgcgacgttcgagcgttacgtgaacacgttcggcctgctgcccggcctcacggtgaaggcgaatgtcccgccgccgcagaccaccgacggcgcgacgacgctcgagctcgcggtcgatcgcaagccgttcaacgtcagcacgggtatcgacttcaaccaccccggcgtgcagggcctcatcaccgcgaccgaaaacggcctgacgcggttcggcgagcagttgagcatctcggcgctcgcgccgccgggacgcgacaagcaaacctacttcgcgttcagcggcgcggtgcccgtcggcagcagcggcctgatcacgcgcctcgacgccagcacgtatcgcggcaagccgaccgacaacccggggttgccgtcgtacgtcgagcggacggtcaagaacgaaaaactcggtctttcggcttcctatccgatactgttgaacaatcagcgcagcctgctcggcaccgtgtcgggctatgcgtcgcacaacgaggaccgctaccagaaccagatcaacggtgcgagtctcgatacgcgctcgcaggtccgcgtgctgcagatgcagctcgactacacgagcgtccagccgaaacaggtacagaagctgagcgttaacgtcgcgaaaggcttcaacatcctcggcgcatcgaaagcgcaggacatcaccgtcggcacgaccacgacctcggtggacagcccgatctcgctgaccttcgtgcgcaccggcgcgaccttcacgcagacgaacgaatggccgttccggatcggcacgtcggtctcgctgaccgggcaatacagccccgactcgctgccgacgtccgaacagatctcgttcggctcgacccgttacgcgctcggctaccagccgggcgagacatcgggcgactcgggctgggggatgtcgctggaggtcaaccgcggcttcacgccgggctggacgtatctgaaatcgatcacgccgtacatcgcatacgacatggcgcgcgtgtatctgcactcgggcacgccatcgccgaaccgcatgtcgtcggtcggcatcggcgtgcggctcacggacag

SEQ ID NO: 11843 - DNA, 141 bp, Burkholderia cepacia
atgtacagcacgcaggtgtgtccgtattgcatgcaggccgagcgcctgctgaagctgcgcggcgtcgagcagatcgaaaaggtgctgatcgatcgcgatccggcccgccgcgaggaaatgatgacgcgcacggggcgccgc

SEQ ID NO: 11844 - DNA, 402 bp, Burkholderia cepacia
atgttaatgtggggagtaagggtgggggcgggacggatggggggagggggaaacagaggggggggagacggaggggcaggagggaaagaggaaaggaggaaagggagaagcgaaagagcgacagaaaccgggaggggggggggggagggagaggggaacgaaaaagaaagcaacggagaagagagaaaagggcggacgggggggaaagaaaaagggggagaaagagaaaaaggaaagggaagaaggaggacggaggaaagcggaggaagggggaggcgcagaagaacaggaaaaagaacgggaggaagggggggagaggcggggaagggggaaagaggagggagaggacgaaacaaaaaagaaagagaaagccagcgcaaagaacgggcacgggccaaagaa

SEQ ID NO: 11845 - DNA, 615 bp, Burkholderia cepacia
ccccgcccccgccccggtcccgccgggccgcccccccaccccgccgcccccgccccccccccgccccgccccacacccaccccccccccccccgcccccccccccccccgacacccccccccccccccccccccggcccccccccccgcgcccccccaccccccccccgccccgcgccgacgcccccccccgccccccccccgccccaccccgaccgcccccccccccccccccccccgcccccccccccgcaaaacccccgccccgccccccgccgcgcccccgcccgccccccccccccccggcgggcacgacgccgcccgcgccgcgcccccggcggcgcgcccccgccccccccgccgccgcggccccgccccccccgccccacccgccccccccccccccccccccccccccgccccccgaaacaaaaacgtgccccacgcgacgctcgaaggcgcggtgcacgcggcggccgacctggatgagccgggcgatgcggtgctgttgtcgcctgcatgcgcgagcctcgacatgttcacgaactacgcccatcgcgcggaagtgttccgcgcggcggtcgacgaaatcgccatcgacaaaggagcgacgcca

SEQ ID NO: 11846 - DNA, 324 bp, Burkholderia cepacia
atgcgtacaatcgcggcttcatttcccggaggtgccgcgatggccatgaagaaaaccgatctcgaaaagaacaaggcgctcaaactgacgcacgcgatgaagcagtcgagctccgcgcgtttcggcaagggcgccgacgaagcggccaagctggaccgccgcgcgcagcgcaagctcgaccaggaacagggcctcgtgccgttcgcgtgcaagctcaacgccgcgctcgtcgaacagctgaaggcacgcgcggccacgcacccggaagggatgacgggcctgctgtcggaactgctcgtgaacggcctcgcgcaacgcgacgcg

SEQ ID NO: 11847 - DNA, 1146 bp, Burkholderia cepacia
atgatgcgagatgcggccaatttcgagccggcggacagccgggtgacgcacccggcgttctggaacgcgctgcccgagcgctggacgagcgacgtcgaggaaacgctggtgtgctgccacgtgcggcaggaaacccacgacgtgaagagcttcttcttccgttcgccgcagggccgcacgttttcgttcgagcccgggcagttcatcacgctcgagctcgacatcgacggcgagacgatcaatcgctgctacacgatctcgtcgtcgccggcgcggccgcacacgatctcgatcacggtcaagcgcgtgccgggcggcaaggtgtcgaactggttgcacgacaacctgcagccgggcgcggcggtacgcgtgctcggcccggccggcgaattcacgtgcgcacggcatccggcgcgcaagtacctgttcctgtcggccggctcgggcgtcacgccgctgatgtcgatgagccgcgcgcaccatgatctcgccgaggatcgcgacatcctgttcgtgcacagcgcacgtacgccggacgacatcatcttcgcgcgcgagctcgacctgatcgcgtcgaaccacacgaatttccgcacgtcgttcgtcgtcgagcgcgtcggcgcacgtaccaactggccgggcgtcacgggcttcctgacgctgccgctgctgaagctgatcgcgccggatttcatggagcgcgagatcttcacgtgcggccccgcgccgtacatgaaggcggtgcgcgacctgctcgacgaagccggcttcgatcgcaagcagtatcacgaagaaagcttctcgttcgagacgctcgcgcagaccgcgagcgacgaagtgctcgccgaactcgtgccggccgccgaaggtgtcgacgccacgacgaagcagtacacggtcagcttcgcgaagagcaaccgcgagatcgcgtgcggctcggagcagcacgtgctcgacgcggcgcgccagtcgggcgtgcggctgccggcctcgtgcacgcagggcatgtgcggcacctgcaaggtgaagctggtgtcggggcaggtcgagatgaagcacaacggcggcatccgccagcgcgagatcgatcaggggatggtgctgctgtgctgcagcaagccgctgtcggatctcgtgatcgacaag

SEQ ID NO: 11848 - DNA, 846 bp, Burkholderia cepacia
atgacgcgtagtaccgccgcgcttgccgcgcgcgggctgtcggtgggatatcgcgaccatgtcgtgatcgacgggctggacctgtcgatcgcggccggccgcgtgaccgcgctgtgcggaccgaacggctgcggcaagagcacgctgctgcgcacgctggcgggcctgcaacccgcgcgtgccggccatgtcgaagtgaacggccgaccgctcgcgtcgtttcgccgtcgcgcgctcgcgcgcgagctgacgatgctcgcgcagttcaaccagattccgtcgggcctcacggtgcgtgagctcgtcgcgtacgggcgctatgcgtacggcggcttcctgcgcggcctgtcgcgggccgatcaggcggcgatcgacgaagcgctcgacacgagcggcctcgcggacgatgcggagcgcgacgtcggcgcgctgtcgggcggcgaacgccagcgcgcgtggatcgcgatggcgctcgcgcagcaggcgccgatcgtgctgctcgacgagccgacgacctatctcgacattcatcaccagctcgacatcctcgatgcgctgcgtgcgctgaaccgcgcacgcggactgacgatcgtgtgggtgctgcacgacctgaaccaggcggccgcgtacagcgacgagatcgtgctgatgcgcgcgggccgtctcgtcgcgcagggcacgcccgacgcgatgctcgacccggcgcggttgcgcgcggcgttcggcgtcgagatgctgaagctcgcgcatccgcagacgggcgcgccgatgtgcgtaccggcctacggaccgtcgaccgacggcgcgccgcaggcatccgccgtcttcgaccgggatctcgcggta

SEQ ID NO: 11849 - DNA, 960 bp, Burkholderia cepacia
atgagcatcttgggaatcgagcagatcacgtacggtgtcgacgacctcgccacctgccggcgctttttcgccgactgggggatgaaggaagtcgcgcacgacgacacgcgcgcccgcttcgaaacgctgaacggctgcaccgtgctggccgtcaaggccgacgatccggcgctgccgccggcgttcgaggccggtccgacgctgcgtgaagtcacgtggggcgtcgcgacgcaggccgaactcgacgcgctgcgcacgaagctcgccggccagcccggctattacgcacaggacgatgcggtcggctgcatcgatccgaacgggatggcgattcgcgtcgaagtcacgcgcaagcgcgcactcgacatcgcgggctcgccgtcgaacgtgtggggccagacgctgcgcgtcgaccagccgagcccggtctatgcgcgcgcggagccggtcgaggtcgggcacgtcgtgttcttcacgaactgcctcgacgcgcaggaaaagttctatcacgaactgctcggcttcgagacgtcggatcgttatccgggccgcggcgcattcatgcgctgcgcgccgcacggcggccatcacgacctgttcctgctcgcgctgccgaacggaaaacgcggcctgaaccacgtcgcgttcaccgtgcgcgacatccacgaagtgttcggcggcggcatgcacatcgaccgctgcggctgggaaacgcagctcggcccggggcgtcatccggtgtcatccgcgtacttctggtacttccagaacccggccggcggcctgatcgagtattacgcggacgaagacgtgctcacgcccgaatggcagccgcgcgaattcgagccgggcccgaccgtgttcgccgaatgggccgtcgacggcggcctcgacggcaatacgcgccggcagaagaacgcgaaggcgccggaaggcaagttcatgacggagcgcaaatca

SEQ ID NO: 11850 - DNA, 2007 bp, Burkholderia cepacia
atgaccaaaaccctttctgtaccggccacggcggcagccggcacgctcgtctaccggcccgacattgacggcctgcgcgccttcgcggtgctcgccgttgtcgtcttccatgcatttccgtccgtgctaccgggcggcttcgtcggcgtcgacatcttcttcgtcatctccggctacctgatcaccggcatcctgctcgccgatctagggacagaccgatcctctttccgccatttctacgcacgacggattcgtcggatcttcccggcactggtcgtcgtgctgctcgcgacctacgggatggggtggttcagcctgtacggcgacgagtatcgcgagctcggcaagcacatcgttgctggcgctggatttgtctcgaactgggcgtcgtggaccgaagccgggtatttcgaccagacggccgaagccaagccactgctgcacctgtggtcgctcggtgtcgaggaacagttctacatcgtctggccgctcgtgctgtgggccgcataccgactccgactcatcggatgggtgtgcgccgtcgtcggtctcgcctctttcgcggccaacgtcatcctcatcggacaccacgcgtccgctgccttctactggccagtcacgcggatgtgggaactgctggctggcgccgcgttcgcgataagcgcgggcgcgggtcgaccgatcacgggcaaccgcgcgaatgcgtggtcggccggcggcgcgatgctgtgcgtcgcctcctttgcgctgctcaccgcgcgtgacgcttttccgggctggtgggcggtgttaccggtcgtcggcacagtcgcactcgtcgcggctggtcgagacggctggatcaacaggcacgtgctcgcgcatcccgtatctgtctggctcggcaagatcagttacgcgttgtacctgtggcactggccgctgctgtcgttcgcgttcatcgtggcgggtcggacaccctcgtcggccgtgcgaggcgcgttgctggtcattgccgtcgcactggcgtggttgaccaccaccatcatcgagcggccgatccgcttcggccctccgaagcgctggaaactcatcgggccgtgcatgctgatgatcggcatcgtctatctcggcggcatgacgtacgtacgcggcggcctcggctttcgcaagggctacagcccggacgccgacgtgacgactgccaagctcggtgcgggtcatgagttcgtcaacgccatgtgcggcgtgtcgcctgacgaacagcgattgtttccgttctgcgcgaccgacaagcgcgtgcgctcccatttcgccgtgtggggcgacagtaaagccgacgcgctgtattgggggctcgtgcgtgaatcggcccccggcgaaggctggacgctgattgcgcgcccgagctgcgcaccgatggcgggcgtctggcgcacgtcgtcgaacgctggcgacgatccaagcctgtgccgagacgcaaacatcacggcgctacgtatgctgctgaacacgccggaactcaagacagtggtgctcgtcatgaccgatcgcgacgtgatcggacagaccttcgctgaccgcgaccaaactgcgcctcgcacatccgctgcgctcgatggtctcgaccaggccgtaacggcacttgagcgagctggcaagcgcgtcgcgctggtcctcgacaacccgcgcctacgcgatccacggcagtgcatggatcgccggccgctcgcgtggcccttcgtgcggcatgcgctcggcgtgaccgatatggacgcggcgcagcgctgcgcgatcggctaccgcgaacacgttgcccgaatagcgccattccacgcgctcgtcgacgaactcaagcaacgccacccgaccctgctcgtctacgacccggctgccgcgctgtgcgacgcgaagcgcgatgtctgtccgatgacgctggaccggcactacctctatagctacggcgatcacctgtccgactacggaaacgggctcgtcgccaagcagttcctgccgctcctgcgccgc

SEQ ID NO: 11851 - DNA, 963 bp, Burkholderia cepacia
atgagctatggggagcctgcccgcctgccccagccttggtccctcgatgaagcagcctcccgcccgttttttcggcaagcgctcgaggcgggcatcaacttcttcgacactgccaatatctattcgggcggaagctccgaggagatcacgggccgagcgctcaacgacatggcgcggcgcgaagaggtcgtcgtcgccaccaaggcgttctttccgtggcgcaattcacccaataccgggtttctctcgcggaaagcgctgcttcagtcgatcgacgacagtctgacccgcctcggcatggattacgtcgacctctaccagatccaccgtttcgaccacggcacgcctgtggaggaaacgatggaggcgctgcacgacatagtgaagtcaggcaaagcccgctacatcggtgcatcgtcgatggaggcatggcgcttcgcgaaaatgcagcacgtcgcggaacgcaacggctggacacgcttcatctccatgcaaccgcagtacaacctgctctatcgggaggaggaacgcgaaatgttgcctctttgcgccgaccagggcgtcggggtcattccatggagcccgatggcgcgcggcaggctgacgcgcgactggagcgaaaccacgcgccgcacgcagaacgatgcctttgcgctgcaaatgtatcggaacgctgaaatccaggaccagaaggtggttgacgtcgtcgcgcgtatcgccgaggcgcatcatgtgccgcgcgcgcacgtcgcactggcgtggctgttgacgaagccggcgatcaccgcgccgatcatcggggcaacgaagcccgagcatctggcaaccgccatcggcgcgctcgacttctcgctgacgcaggacgaaatcgccgcgctcgaagcgccgtatgtcccccatccggtggatggcatcgtgccaccgcttccggaacatccgccgacgatttcaatgccgcggaac

SEQ ID NO: 11852 - DNA, 309 bp, Burkholderia cepacia
atgtacgcggtcataaaaaccggcggcaagcagtacaaggttgccgttggcgaaaaactcaaagtagaacagataccggctgacattgacgctgaaatcacgctcgaccaggttctcgcagtgggcgaaggcgaatcgattaagttcggtacgccgctggtcagtggggcttccgtcaaggccaccgttgtgtcgcacggtcgtcatgccaaggtcaccatcttcaagatgcgtcgccggaagcactaccaaaagcacggcggccaccgccagaactacactgagctgcgcatcgacgcgatcaacgcg

SEQ ID NO: 11853 - DNA, 2466 bp, Burkholderia cepacia
gcgtggcgcagcttcttcacgtcgatcggcagcgacggcgtggccgacctcgaccgccgcgccgacgcgctgcaccggcgcatgcgcgagaacggcctgttctaccagttgcacgagcaacgtgccggcgacggcgcggccgggccgtggtcgctcgacctgctgccgctgatcgtcacgcccgaagactgggtcgtgatcgagcgcggcgtgctgcagcgcgtgcggctgctcaacgcgacgctggccgatttgtacgggccgcagacgatcctgcagcgcgggctgctgccgcccgcgctcgtcactggtcatcccggctacctgcgcgcgatgcgcggcgcacgcgtgccgggcgatacgtggctgcacgtcgtcgcgttcgatctcgcgcgcggcccggacgggcagtggcggatcgttgcgcagcacacgcagggcgcggccgggctcggatacctgctcgaaaaccggctgatcgtgtcgcggctctttccgcgcgggtttcgcgggctgcgcgtgcagcggctggcgtccgcctaccgtgcgctgttgcagagcatgcagtcgctcagccccgccgcgaagaactcgcggatcgtgctgctgaccccgggaccgcacagcgcgacctatttcgagcatgcctatctcgcgcgctatctcggcctcacgctcgtcgaaggcggcgacctgaccgcgcgcgacaatcacgtcttcctgaagacgctgagcgggctcgaaccggtgcacggcatcctgcggcgcgtcgacgacgcgtggctcgatccgctcgaactgcggcccgattcgatgctcggcgtgccggggctgctgcaggccgtgcgcgcgggcaacgtgctgctcgcgaacgcgccgggctcgggcttccttgaatcgccggcgatgctcggtttcatgccgcgtctcgcggaaggcctgctcggcgaaacgctgacgctgccagccgtgcattcgtggtggtgcggcgaggcggccgcgtgcgacgacgcgctgccgcaactcgcgcgtggcatcgtcaaggcatcctatccacccgacgtgcaggcaggcggtgcattcgagccggtgatcggcgcgcggctcacgccggcgcaactggcggaatggcgcgcgcggattctcgcgcggcccgaacactacacggtgcaggccgatctgccgctgtcgcaggcgccgacctggccgcggcccgacgcacccgacggcaacggcagcgcgcggatcgtgccgaaaccgctcttgctgcgcgtgttcgcgctcgccgacggcgcgcagcgctggcggctcctgccgggcggactgtcacgggtcggcacgcgcgacacgctgttcaacgcgccgatgccgcgtggcggcagcaccgtcgatacgtgggtgatgaccgagggcatcgtcgattcgacgacgctgttgcagacgcacctcggccccgacgatctcgtcgagcggccgcgtgcgatcgcgagtcgcgcggcggaaaacctgttctggctcggccgttataccgagcgcgcgaccaacctgatgcgcctggcgcgtgccgcgctcgaacggctgcgcggcgaagacgacgtcgacagccccgcgcacctcgaactgatcgacacgctgtgccgcgacaccgggctgatcgcggccgacgcgccgcacgccgtcgatgcgccgcgcgcgttccagcacgcgctggcgacatcgctgacgcgcggcgccgatcgcacgtcggggatcgcgtcgtgcctgttcggcatgcgcggcgcggctgccgcgatccgcgaacggctgtcgagcgatcaatggcggttgatcgacgacgcgacgcaactgttcgcggatagcgcaggacaaccggaagcggaggagcagatcggcaacgacgcgctgcagctgctggaacgcctcggcctgctgctcggcgcgatcaccggtgcgcagaccgacaacatgacgcgcgacgacggctggcgcttgctgtcgatcggccggcagatcgaccggctcgatttcctgtgcagcgtgctgaagttcgcgttcgacgaaggggccgtgcaccggcaggacggtttcgaactcgtgctggaactgttcgacagcacgatcacgtttcgttcgcggttccagcgcggcttcgacgtcgcgccgctgttgtcgctcgtcgtgctcgataccgacaacccgcgctcgctcggctgggtcgtgcaggcgctgcgtggccggctgacgaaggtcgagcgcagcgaaggctatgcgctgtcggagctggccgagacgattccggatgtgcctgcatggtcgctgcacgagctgtgcgagaccaccgaaggcggccggcacgacaaactgctcgcggcgctcgacacgacggcgaaggcggtgtgggaactgtcgaaccggattggcgagcgctatttcagccacgtgcgcgaagcgggcaggacgctatgg

SEQ ID NO: 11854 - DNA, 561 bp, Burkholderia cepacia
atgaacgatcaccgcctcgtcgaaatcacgcccgccacgcatcgcgtcgagatcgatctcgtctacgcgaccgaccgcaacctgaccggcaagccgatctaccgcaacgcgcactgcctgctgctcgagcccgccgaagccgcattgcgccgcgcggtggaggtcgccgcgcaggccggcgtcacgctgcgcctctacgacgcctaccggccgccgcaggcgcagcaggtgctgtgggatttcctgcccgatccgaacttcgtcgccgacctcggccgcggctcgaatcacagccgcggcaccgcgctcgacctgacgctcgtcggcgcgaacggcgcgccgctcgacatgggcaccggcttcgacgcgatggtcgccgcatcgggccactttcacgcggggctgcccgagcacgtgcaacgcaaccgcctgctgctgctcggcgtgatgcatgcggccggcttcgcgcacatcgacagcgaatggtggcactacgaactgcccggctcgcgcgcgttgccgcagatcgacaatgcggcgagcggcccgtggcgcctgatg

SEQ ID NO: 11855 - DNA, 1296 bp, Burkholderia cepacia
atggaaagcaagaccctcgcggcgcccgccgccgagcccgcgagccgcgagcgcagcggcctgttctcgtggtacgcggatgcgcagccgcgcgagcgccgcgcattctggagctgcaaggtcggctacatgctcgacgggatggacacgcagatgctgtcgttcgtgatcccgacgctcgtcgcgacctggggcatctcgctcgccgacgcgggcttcatcggcacgatcacgctgctcgcgtcggcgctcggcggctggatcgccggcatcctgtccgaccggatcggccgcgtgcgcacgctgcaactgacggtgctgtggttcgcggtgttcaccgcgctgtgcgggctcgcgcagaactaccaccagctggtcgcggcgcgcgcgctgatgggcttcggcttcggcggcgaatggacggccggcgcggtgctgatcggcgaagtgatccgcgcgcgcgaccgcggcagggcggtcggcctcgtgcagtcgggctgggcgatcggctgggggctgtgcgcgctgctgtatgcgctgctgttctcggtgctgccggccgagcaggcgtggcgcgcgctgttcctggtcgggctcgcgcccgcgctgctggtcgtcgcgatccgccgctacgtgaaggagccggacgtctacgagaaggagaaggccgcgcaggcgaaggtggccgacgcgccgcgccttaccgagatcttcgcgccgaagctgatcacgacgacgctgcgcgcggcattgctgacgaccggcgcgcagggcggctactacgcgatcacgacgtggctgccgacgttcctgaagaccgaacggcacctcacggtgatgggtaccggcggctatctcgcgatgatcatcttcggctcgtgggtcggctacctgacgagcgcgtacctgaccgaccgcctcggccgcaagccgaacttcatcctgttcgcggtcggctcgatggtgatcgccttcgcgtacacgtcgctgaacctgaccaacgcgtcgatgctgtggctcggctttccgctcggcttcttcgcatcgggcatcttctcggggatgggcgcgttcctcaccgagctgttcccgacccgcgtgcgcggctccggccagggtttctgctacaacgtgggccgcgcgatcggtgcgctgttcccgttcctgatcggcgcgctgtccaagcaatacgggctcggcatgagcatcggcatcttcgcggtcgccgcctacggcgtggtgatcgtcgccgcgctgacgctgcccgagacccgcggccgcgaactcgacgccgcc

SEQ ID NO: 11856 - DNA, 1707 bp, Burkholderia cepacia
atgagcaccgaacgcaacgacgcccccgcggcttccaatttcatccgtaacatcatcgacgacgacaaccgcaccggcaaatggggcggccgcgtcgagacgcgcttcccgcccgagccgaacggctatctgcacatcggtcacgcgaagagcatctgcctgaacttcagcgtcgcgcgcgactacggcggcgtgtgccacctgcgcttcgacgacacgaacccggaaaaggaaagcgtcgaatacgtcgactcgatcgtcgacgcggtgcgctggctcggcttcgactggcgcaaggacgcggtcgatcatcagtatttcgcgagcgactactacgacaagctgtacgagttcgccgagctgctgatcaagcgtggcaaggcgtacgtcgacagccagagcgccgacgaaatgcgcgcgaaccgcggctcgctgaccgagggcggcaagccgtcgccgttccgcgagcgcacgccggaagagaacctcgacctgttccgccggatgaaggccggcgagttcaaggaaggcgagcacgtgctgcgcgcgaagatcgacatggcgtcgccgaacatgaacatgcgcgacccggtgatctaccggatccgctacgcgcaccactaccgcaccggcgacgcatggtgcgtgtatccgatgtacgactacacgcactgcatctcggatgcgctcgaaggcatcacgcattcgctgtgcacgctcgaattcgaggatcaccgcccgctgtacgactgggtgctgaacgaactcgcggaagccggcgtgttcacgcgcccgctgccgcaacagatcgaattctcgcggctgaacctcacgtacgcgatcaccagcaagcgcaagctgctgcaactcgtcaccgaaggccacgtcgacggctgggacgacccgcggatgccgacgatcgtcggcgtgcgccgccgcggcttcacgccggagagcatccacctgttctgcgagcggatcggcgtgacgaagatcgattcgtggatcgacatgagcatcttcgaaggcgcgctgcgcgacgacctcgacgacaaggcggcgcgcacggtcgcggtgctcgatccgctgaagctcgtgatcgacaactatccggaagacctcgaggaagcgtgcacggcgcccgtgcatccgcaccatccggaccgcggcgtgcgcacgttcccgatctcgcgcgaactgtggatcgagcgcgaggatttcgtcgaaaatccgccgaagggctatttccgcctgttcccgggcaacaaggtccgcctgcgctacggctacgtgatcgaatgcacgggcttcgacaaggacgccgacggcaacgtgacggccgtgcactgcaactacttcccggacagcaagtcgggcaccgaaggcgcgaacacgtacaaggtcaagggcaacatccactgggtcagcgcgaagcacgcgcagccggccgaagtgcggatctacgaccgcctgttcaaggagccgcacccggacgcgggcggcgcgaacttcctcgaggcgctgaaccccgattcgaagaagatcgtgcaggcgtacctcgagccgggcaacggcgacgtcgcgccggaaacgcgcctgcagttcgagcgccacggctacttcgttgcagaccgtgtcgattcgaagccgggcaagccggtgttcaaccggatcgtcgggctgcgcgacagctggggcaagccggcc

SEQ ID NO: 11857 - DNA, 270 bp, Burkholderia cepacia
atggctaactccgcacaagcacgcaagcgcgcccgccaggccgcgaaggcaaactcgcacaactcggcgctgcgctcgaaattccgtaccgcgatcaagtcggttcgcaaggctgttgaagccggcgaccaggcaaaggctgccgagctgttcaaggctgccgtgaagacgatcgacacgatcgccgacaagaagatcgttcacaagaacaaggccgctcgcagcaagagccgcctggccgcagccgtcaagggtctgcaggcagcagcg

SEQ ID NO: 11858 - DNA, 231 bp, Burkholderia cepacia
atggcacgcgtatgccaagtaactgggaaagcgccgatgagcggcaacaacgtttcccacgccaacaacaagacgaagcgtcgcttcctcccgaacctgcagaaccgccggttctgggttgagagcgaaaaccgctgggtgcgcctgcgcgtctcgaacgccggcctgcgcctgatcgacaagaacggcatcgattccgtgctcgctgacctgcgcgcacgcggcgaagcc

SEQ ID NO: 11859 - DNA, 114 bp, Burkholderia cepacia
atgaaagtgatggcatcggttaagcgcatttgccgcaattgcaagatcatcaagcgcaaaggcgtcgttcgcgtgatctgcagctcggatccgcgccacaagcagcgccaaggc

SEQ ID NO: 11860 - DNA, 1845 bp, Burkholderia cepacia
atgaagccgtcccagaagcgccagaacgtgaagttctcgtcgagccccgtgctgggcgtgcatctgccgatgtggcgctcgaagctcgtcgtgttcatgctgttcatggcgttcgtcgcgctggccgcccgggcgttctggatccagggtcccggcaacgcgttctatcagaagcagggcgaaagccgctaccagcgcacgatcgaactgcccgcgacgcgcggcaagatcctcgatcgtaacgggctcgtgctcgcgacgagcctgcccgtgcgcgcgatctgggcgattcccgatgcggtgccggacgacctcgacgccgacaagatcaaccagctcggcaagctcctcggcatgacgtcgaaggaactgcgcgtgaagctgtcggaagacaagggtttcgtctacgtgaagcgccaggtgccgatcgacgtcgccgacaaggtcgccgcgctcgacatccccggcatctatcagcgcaacgaatacaagcgcttctacccggaaggcgagatcaccgctcacctgatcggcttcacgaacgtcgaggacgaagggcaggaaggcgtcgaactgggtgaccagaagatgctgtccggcacgtccggcatgcgccgcgtgatcaaggaccggatggggcacatcatcgaggatgtcgccgagcagattccgccgcacaacggcaccgacgtcgacctgtcgatcgacagcaagatccagtacatcgcgtacgcgaacctgaaggccgccgtcgagaagttcaaggcgaaggccggcgcggcgatggtcgtcgacgtgcgtaccggcgaagtgctcgcgctcgtcaactacccgacgtacaacccgaacgaccgctcgcgcatgaccggcgagcagttgcgcaaccggatcatgaccgacgtgttcgagccgggctcgatcatgaagccgtttacggtatcgctcgcgctcgacttgcatcgcgtgacgccgaacacgctcgtcgagacgggcaacgggcatttcgtgctcgacggcgcgccgatcaccgacgacgcgggtttcggtacgctgacggtcggcggcgtgatccagaagtcgagcaacatcggcgcgacgaagatcgcgatgacgatgcggcccgaggaaatgtggaatatgtatacgagcatcggcctcggccaggcgccgaaggtcgggttccccggcgcggtggccggccgcctgcgtccgtggaagagctggcgccgcatcgagcaggcgacgatgtcgtacggctacggcctgtcggtgtcgctgttccagctcgcccgggcgtacacggcgatcgcgcacgacggcgagctgatgcccgtgaccattttcaagaccgaccccaatcagccgatcgccggcacgcaggtgttcaaccccaccaccgcgcgggaagtgcgcgcgatgctcgagacggtggtcgcgccgggcggcacgtcgccggatgcggccgtgccgggctatcgcgtcggcggcaagagcggtaccgcgtacaagcacgaaggtcacggctatacgcgcaagtaccgcgcgtcgttcgtcggaatggcgccgatgccgaatccgcgcgtcgtgatcgcggtgtcggtggacgagccgacggccggcagccacttcggcggccaggtgtccggccccgtattctccgcgatcgccggcgacacgatgcgtgcgctgaacgtgccgccgaacatgccgatcaagcagctcgtcgtgtccgacgattcgccggaatcgcctgccgccaagggcccgcaaaagctggccgcgggtagcggcgcaaagcatatgatcgtgtccagcacgacgcgtaattcaccaggagtagttcga

SEQ ID NO: 11861 - DNA, 681 bp, Burkholderia cepacia
atgcacgcccgcgtgcgtggtcgccgtcatttccgcgagaatcttcgcgccctgcacgttccacggcgtgttgccgctgccgaccggcgccagcttcacccggtagtagccggggctcgcggtttcgtcgtcgtggctgaacgacgcgtcgtaggtgatcgatgcatcggcggcaaccttggccagcgtcgcggtatcgaccggcgcgagcgtcggcaggaaccgcacttcgccgcccgagccgatgccggtccccgacaggtgcgtatgcgtgaagccggtaatgaacggatcgtcgtactggtagccggatgtgcgatcccagttccacggcagcgtatgcgcgccgccggccgtgtccggcccgagctgcaccatgccgaacggcacggtcgcgcccggatacacgtggccgtggccgcgcacgccgctgctccagtccgcgttgatgtcgaggttggccgtgccgatcatcggatcgacgctacgcaacaccgatcgcttgtgcgcgccgccgttttccccctgatcgttctgatcgccctggtcgttctggttgccttgatcgttctggttgcccggtgcgttcgacatctgcgcgagcacgctcgcatccgtcgccccctgatcgcccccgcaccccgacaacacggcaaggcatccgatacccaccacgtgacg

SEQ ID NO: 11862 - DNA, 1267 bp, Burkholderia cepacia
gacgtgctgtgcaccgacaagaccggcacgctcacgcaggacaagatcatcctcgaacatcacctcgacctgtccggccacaagaacgaggacatcctgcggctcggctggctgaacagcttccaccagagcggccagaagaacctgatcgacatcgcggtcgtcgcgcgcgccgacgagatcggcgaacgcgtgaagccgcagggttacaagaagatcgacgaactgccgttcgacttcgtgcggcgccgcctgtcggtcgtcgtcgaggatacgcgcggcacgcatctgctgatctgcaagggcgcggtcgaggaaatgctggcggtgtcgacgcacgtgcaggatgaagacggcgtacgcccgctcgactacgtggcccgcaagcggctgctcgaacaggccaccgcgtacaacgaggacggctttcgcgtgctcgtgctcgccacgcgcacgatcccgcgcggcgacgagcgtgcgcaataccgcaccgccgacgaacacgatctcgtcgtgcgcggcttcctgaccttcctcgatccgccgaaggagtcggccgcgccggcgctcgccgcgctgcgcgagaacggtgtcgcggtgaaggtgctgacgggcgacaacccgaccgtcacgatgaaggtgtgccgccaggtcggcctcgaacccggcaaaccgatgctcggcacggaaatcgaagcgctcgacgacgacacgctcgccaaggtcgtcgaacgcacgaccgtgttcgcgaagctcacgccgctgcagaaggcgcgcatcgtcaaggcgctgcaggcgaacggtcacaccgtcggcttcctcggcgacggcatcaacgatgcgcccgcgctgcgcgacgccgacgtcggcatctcggtcgacagcggcgccgacatcgcgaaggaaaccgccgacatcatcctgctcgaaaagagcctgatggtgctggaggaaggcgtgatcaagggccgcgagacgttcggcaacatcctgaagtacctgaacatgacggccagctccaacttcggcaacgtgttctcggtgctggtcgccagcgcgttcctgccgtgggagccgatgctcgcgacgcaactgctcgtgctgaacctgatctacgacacgtcgcagatgctgctgccgtgggacaagatggaccccgagttcctgaagaagccgtgcaagtgggaagccggcaacactccgccgcctcatgcctcgggtccgcccccccccctgcggtttcgacgtccccactcccccgctcacc

SEQ ID NO: 11863 - DNA, 987 bp, Burkholderia cepacia
atggcccaatcgactctctattcccgcgtgctcggcacgggcagctacctgccgcccgaccgcgtcacgaaccagcagttgaccgatcgtcttgcgaaggaaggcatcgagacgagcgatgaatggatcgtggcgcgcacgggcatccatgcgcgccatttcgccgcaccggacgtcacgacgagcgatctcgcgctcgaggcgtcgcgtcgtgcgatcgaagcggccggtgtcgatccgcagtcgatcgacctgatcatcgtcgcgacttcgacccccgatttcgtgttcccgagcaccgcgtgcctgctgcagaacaagctcggcatcaagaacggcggcgcggcattcgacgtacaggccgtgtgttcgggcttcgcgtacgcgatggcgacggccgacagcttcatccgcagcggccagcatcgtacggcgctcgtggtcggcgcggagacgttctcgcgcattctcgacttcaaggaccgcacgacctgcgtgctgttcggcgacggtgccggcgcggtgatcctgtccgcgtcggaagagccgggcgtgctcggcagcgcgctgcatgcggacggcagctactcgaacatcctgtgtacgccgggcaacgtcaaccgcggcgtgatcgacggcagcgcgttcctgcacatggacggacaagccgtgttcaagctcgcggtcaacgtgctcgaaaaggtcgcgatcgaagcgctcgcgaaggcgaatctcgcgcccgagcaaatcgactggctgattccgcaccaggccaacatccgcatcatgaccagcacctgccgcaagctcggcctgccgcaggagcgcatggtcgtgacggtcgaccagcacggcaatacgtcggccgcgtcgatcccgctggcgctcgacgccgcggtgcgcgacggtcgcatccagcgtggccagcacgtgctgatcgaaggcgtcggcggcggcttcacctggggcgcgtcggtcttccgcttc

SEQ ID NO: 11864 - DNA, 3391 bp, Burkholderia cepacia
tgggttgcggcttcggaacttgaccgggcgcgcgggaagcgggtggcgtcgtcgagaagggtggccgagcacgtcgcgcaggcgggcgccgcggtgcgcccgggcgcgcatgcagggttgtcgccgcggcgtatcgtgatgacgctggcggccgcgtatctcgggctgtttcaggctggcgcgcacgcgcagtattcggcgggcggcggctccgcgaccggcggcgccagttcgatctcggtcggtaacggttcggtggccacgcaggtgaattcaaccgcgttcggtaacctgtccacggcggcaggcacatcggccacggcactgggcccgggtgcgcacgcgatgggtgacggatcgacggccgtcggcatcaatgcgcaagcgaccggcgtcgacagtgcatcgctcggcgtgcaggcgatcggttcgggcgcgtattcggttgccatcggcaacctgtcgagcgcgacccaaagcggtgcggtggcgatgggcagcggcgcggcggcgaccggtgttgccgccatcgggctcggcaacaatgcgttcgcgtccggtcagtatgcggccgcgctgggtctcggggcgagtgcggccggggcgcaaagcgtcgcgctcggctatgcgacgcatgcgactgataccggcaccgtcgcaatcggcaaccaagcgacgagtacgggctcggcaggcgtggccgtcggcagcggtgcactggcgaccggcaattccggcgttgcaatgggcgtcaacagcggcgcaaagggcaccagctcgatcgcgatcggctggggcggcaccgcaggcgtgcccgggtcgggcacgcagtcgctcggcacgagttcgatcgcgatgggctcgaacacgacggccggcgcggacaatgcgctggcattcggcctgaacgcgaacgcgtcgggcgtcagctcgatcgcgatgggcgtgcaatcgaccgcgacggcgctgttcggcgtcgcgctcggcaatctcgcgctcgcgaccggcacgtcggcaaccgcactaggccccggcgcgactgcatccgccgtcggggcaacctcgatcggcatcaacagcgtggcggcggcggactggaccgtcgcgatcggtgcgtccaactcggtcgcggccggcgcgggcgccggttcgatcgccggcggcaacaactcgaaggtgctgggcgggaccggcgccgtggcgctcggccagggccagacggtgagcggtgacggcgccgtcgcgatcggcgatccgagcagcgcgatcggcaccggcgcggtcacgatgggttcgaacaataccgcgaacggcaacggcgcggtggcgatcggcaatacgaacaatgcgcagggcacgggttcactcgcactcggcaacacgtcgaccgccgcagccgcgggcgcgatcgcgttcggtgcgtcggccgtcgcgaacaatgcaaacgatgtcgcgctcggctccggttcagtgacggacgtgccgcatccgacggcgaccggtacgctcggcggcgtcacgtacaactacaacggtacgaatccgacgagcgtcgtcagcgtcggcgcggcgggcaccgagcgccagatcaccaacgtcgcggccgggcgcgtcaattcggcgagcacggatgcgatcaacggttcgcagcttgccgcgacgaacacggcgctcgattcgctatcgacgtcgacggcgtcgagcatcacgtcgttgtcgaccggggtttcgtcgttgtcgacgggcctgagttcgaccaacagcgcggtgacgtcgctgtccacgtcgacgtcgaccggtatcagctcgttgtcgacggggctcagttcgaccaacagcgcggtgacgtcgttgtccacgtcgacgtcgaccggcatcagctcgttgtcgacgggcctcagctcgaccgacagcacggtcacgtcgctgtcgacctccacatcgacgggcctgtcgtcggccaatagttcgatcacgtcgctgtccacgtcgacctcgacgggtatcaattcgctgtccaccgggttgagttcgaccgacagcacggtcacgtcgctgtcgacttccacgtcgacgggcctgtcgtcggccaatagttcgatcacgtcgctgtccacgtcgacgtccacgggtatcggttcgttgtccaccggcctgagttcgaccaatagcgcggtgacgtcgctgtccacgtcgacgtccacgggcatcggttcgttgtccaccggcctcagttcgaccaacagttcggtgacgtcgttgtccacgtcgacctcgacgggcatcagctcgttgtcgacgggcctgagttcgaccaacagcacggtgacgtcgctgtcgacgtcgacctcgacgggcatcagctcgctgtccaccggcctgtcgagcacgaacagttcgatcacgtcgctgtccacgtcgacctcgaccgtcgtcggctcgctgtccaccggcctgagttcgacgaacagcaacctgacgtcgctgtccacgtcgacgtcgaccgtcgtcggctcgttgtccaccggcttgagctcgaccaacagctcgatcacgtcgctgtccacgtcgacctcgacggtcgtcggctcgctgtcgaccggcctgagctcgacgaacagcaacctgacctcgctgtcgaccgccacgtcgaccgggatcagttcgttgtcgacgggcctgagctcgatcgcgaacaacaacacgaacctcggcaacagcacggccggcgcgatcggcggcggggccacctacgatccgaccaccggcacgatctcggcgccgtcgtacgtgacctacaacagcgacgggtcgaccacgatcaacaacaacgtcggctcggcgatcgacaacatcaacgcgcacggcatcaagtacttccacgcgaattcgaccgcgccggacagccaggcggtgggcgtcgacagcgtcgcgatcggcccgaacgcgatttccaaggtcgacggcagcatcgcgctcggctcgggctcggtggccgaccgcgcggtagtgccatcgtcgggcatcctgcgcaacggcagcgcgtcgatcccgttcgacacgaccgaccagacgctgctcggcgcggtgtcggtcggcgatgcgacgaacaagacgtaccgccaaatcaccaacgtcgcggacggcaccggccagcaggacgcggtgacggtgcggcagctgaccggcgcgctgcagtcgttcgcggtcacgggccagaagtacttccacgcgaattcgaccgcggcggattcttttcgcggccggcgcggaatcggtcgcggtggggccgacgacggtcgtcaacggcgaccacggcgtgggcatcggcaacggcgcgatcgtcgaccagaccgcgccgggcggtgtggcgatcggccacgcggcgagc

SEQ ID NO: 11865 - DNA, 539 bp, Burkholderia cepacia
caccgaaccatccgacggcgcgcgagcagcgcctgacgctggcgctcgtcgcggtcggcatgttcatggcggtgctcgattcgacgatcgtcaacgtggcgctgccggcgatgcgcacgagcctcggcgcgacggtcgcggaactcgcgtggatcgtcgacgcgtacacgctcagcttcgccgcgctgatcctcgcgggcggcgcgctgtccgaccggttcggcgcgaagcacgtgtatctggccgggctggcgctgttcgtcgccgcgtcggcggcgtgcgggggcgcgtcgtcggtggcgatcctcgtggtcgcgcgtttcgggcagggcatgggcgccgcgctcttcctgcccgcgtcgctcgcgatcgtgcgcagcaccttcgacgtgccggccgagcgcgcgcgggcgatcgcggtgtgggccggcatcgcgtcggtcgcggtcgccgtggggccggtactcggcggaatcctggtcgacgatttcggttggcgcagcgcgttcctgatcaacgtgcccaccggcgcggtcgcc

SEQ ID NO: 11866 - DNA, 1113 bp, Burkholderia cepacia
atggcactcgaaaccttcgtcaattccgaaccgttcacgttcggcgtcgaactggagatccaggtcgtcaacacgcacaactacgacctgaccaaagcggcatccgacctgatgcgcctgatccagggcgagacctttccgggcaacatcacgccggaaatcaccgaaagcatgatcgagctgtcgaccggcatctgccattcgcacgagcaggccgtcagcgagctgcatgcgatccgcgacgtgctcgtgaaggcggccgaccagctcaacgtcgggctggccggtggcggcacgcatgcgttccagcaatggagcgaccggcagatctacgatgcgccgcgcttccagtacatctccgagctgtacggctatctcgcgaaacagttcaccgtgttcggccagcacgtgcacatcggctgtcccgatcccgacagcgcgctgttcctgctgcactcgatgtcgcgcttcattccgcacttcatcgcgttgtccgcgtcgtcgccgttcgtgcagaacgtcgacacgggcttccattcggcacgcctgaattcggtgttcgcgttcccgctgtcgggccgcgcgccgttcgtgctcacctgggacagcttcgaggagtacttcacgaagatggtgaacacgggcgtcgtcaactcgatgaaggacttctactgggacatccggccgaagcccggctacggcacgatcgaggtgcgcgtgatggacacgccgctgtcggtcgatcgcgccgcggcgatcgcctgctacatccagacgctcgcgcgttacctgctgaccgaccggccgctgaagctgtcggaggacgactatctggtctacacgttcaaccgtttcgaagcgtgccgcttcgggctcgaaggcacctgcgtgaatcctcagacgggcgagcgccgcacgatcgcggaagacatcctcgacacgctcgaccggatcgcgccgcatgcggccgcgctgggctcgcgcgcggcgctcgacgaaatcggtgcgctcgcgaaggcgcgcgtgaacgacgcatcgtggttgagaaccgttttcaaacaggaaaaatcgctgaacgagacggtccggcagcagtgcttacgttggcgtgag

SEQ ID NO: 11867 - DNA, 186 bp, Burkholderia cepacia
ttccgtacgacggacgtgacgggctcgatcgagctccagaaggacaaggaaatggtgatgccgggcgacaacgtgtcgatcacggtgaagctgatcgctccgatcgcgatggaagaaggtttgcgcttcgcaatccgcgaaggcggccgtacggtcggcgccggcgtcgtcgccaagatcatcgag

SEQ ID NO: 11868 - DNA, 1194 bp, Burkholderia cepacia
atgaataccaccgccgattcgctcgtcacgctcgccgcacgcgtcgacgcgatccagccctttcatgtgatggaactgatgaaggaggcacagcggctcgagtccttggggcgcgatgttatccacatgggcatcggcgagcccgatttcaccgcgccggagccggtggtcgaggccgcggcggccgcgctgcgccgcggcgtcacgcaatacacgagcgcgctcgggattgcgccgctgcgcgaggcgatcgccgcgcactatgcacacgcgtacggcctcacgatcagccccgagcggatcgtcgtgacggccggcgcatcggccgcgctgctgctcgcgtgcctcgcgctggtcggccgcgacgacgaagtgctgatgcccgacccgtcatacccgtgcaaccggcacttcgtcgcggcggccgaaggccgtccggtgctcgtgccgagcggcccggacgcgcgcttccagctcaccgagcacgacgtccgcacgcactggaacgaccgcacgcgcggcgtgctgctcgcgtcgccgtcgaacccgaccggcacgtcgctcgaaccggacgaactgaagcggatcgtcgaagcagtgcgcgcacgcggcggcttcacgatcgtcgacgagatctaccaggggctcagctacgacgccgcccccgtgtcggcgctgtcgttcggcgacgacgtgatcaccgtgaacagcttctcgaagtatttcagcatgaccggctggcggctcggctggctcgtcgtgccgcccgccctcgtcggcacgttcgagaagctgtcgcagaacctgttcatctgcccgtccgccctcgcgcaacacgcggcgctcgcctgcttcgaaccggccacgctcgacatctacgaaacgcgccggctcgaattcaagcgccgccgcgatttcatcgcaccggcgctcgagcggctcggctttacggtgccggtaatgccggacggcgcgttctatgtgtatgcgcattgcggcggcgtcgcccacccggcggccggcgacagcgccgcgctcacgcaggcgatgctgcacgacgcaggcgtggtgctggtgccgggcatggacttcggcgtccatgccccgcgcgactatatccgcctgtcgtatgcgacggcctactcgcggctcgaagaggccgtcgaccggctcgcgacgctgttcggcgagcat

SEQ ID NO: 11869 - DNA, 1773 bp, Burkholderia cepacia
atggctgcaatcaaaacttccctcccgcgccgcaagtttgacgtcgtgatcgtcggcgcgggcggctccggcttgcgcgcggcgctgcaactgtcgcgcgcgggcctgtcggtcggcgtgctgtcgaaggtgttcccgacgcgttcgcacacggtggccgcgcaaggcggtatcggcgcgtcgctcggcaacatgagcgaagacaactggcacttccacttctacgacacgatcaagggctccgactggctcggcgaccaggacgcgatcgaattcatgtgccgcgaagcgccgaacgtcgtgtacgagctcgagcatttcggcatgccgttcgaccgcaacgcggacggcacgatctaccagcgtccgttcggcggccacaccgcgaactacggcgagaagccggtccagcgcgcttgcgcggccgccgaccgtaccggccacgcgctgctgcacacgctgtaccagcagaacgtggaagcgaagacgcagttcttcgtcgaatggatggcgctcgacctgatccgcgacgcggacggcgacgtgctcggcgtgacggccctcgagatggagacgggcgacgtctacatcatggaaggcaagacgacgctgttcgcgacgggcggcgcaggccggatcttcgcggcatcgaccaacgcgttcatcaacaccggcgacggcctcggcatggccgcgcgttcgggcatcgcgctgcaggacatggagttctggcagttccacccgaccggcgtggccggcgcgggcgtgctgatcaccgaaggcgtgcgcggcgaaggcgggatcctgcgcaacgcgaacggcgagcgtttcatggagcgctacgcgccgacgctgaaggatctggcgccgcgtgacttcgtgtcgcgttcgatggaccaggaaatcaaggaaggtcgcggcgtcggtccgaacaaggatcacgtgctgctcgacctgtcgcacatcggcgccgagacgatcatgaagcgtctgccgtcgatccgcgaaatcgcgctgaagttcgcgaacgtcgacgcgatcaaggaaccgatcccggtcgtcccgacgatccactaccagatgggcggcatcccgaccaacatccacggtcaggtcgtcggcacgtcgcgcggccacaaggatccggtcaacggtttctacgcagtgggcgagtgctcgtgcgtgtccgtgcacggcgcgaaccgcctcggcacgaattcgctgctggacctcgtggtgttcggccgtgcggccggcaaccacatcgtcgagcacgtgaagaaccagaaggaacacaagccgctgccggccgatgcaggtgaattctcgctggcgcgcctcgcgaagctcgacaagtcgacgtcgggcgaatacacgcaggacgtcgcgaacgacatccgctcgacgatgcagaagcacgcaggcgtgttccgcacgtcggaactgctgaaggaaggcgtcgaccagatggccggcctgaaggcgcgcgtggaaaacatccacctgaaggacaagtcgaaggtgttcaacaccgcgcgcgtcgaagcgctcgagctggagaacctgatcgaagtggcccgcgcgacgatggtgtcggcggaagcgcgcaaggaaagccgcggcgcgcacgcgcacagcgactacgaacaccgtgacgacgagaactggctgcgccacacgctgtggtacagcgaaggcgatcgcctcgactacaagccggttcaaatgaagccgctgacggtcgaatccgtgccgccgaagccgcgcacgttc

SEQ ID NO: 11870 - DNA, 684 bp, Burkholderia cepacia
atgacggcgcgtcgcgcgccggcggttaatcgggacgtactggaacagatgctcgtcgaaggcacggcggcgctcgacctcacgctgacggatgcgcaacgcaaccagctgctcgactacgtcgcgctgctcggcaagtggaacgcggtctacaacctgaccgcgatccgcgacccgaagcagatgctgatccagcacatcctcgattcgctttccatcgtcccgcatctgcgtggtcgtacgtcggcgcgcgtgctcgacgtcggctcgggcggcgggctgcccggtatcgtgctggcgatcgtcgagccgggctggcaggtcacgctgaacgatatcgtgcagaagaagtctgccttccagacgcagatgcgcgcggagctgaagctggtgaacctgtcggtggtcaccgggcgggtcgaatcgctgcagccgggtgtcgaagtgccggaaaaattcgacatgatcgtatcccgcgctttcgcggatctatccgacttcgttaaacttgctcgacatctggtcgcgccgggtggttcgatctgggcgatgaagggcgttcacccggacgacgagattgcgcggttgccggaaggcagccacgtcaagcagacgatccggctggcggtgccgatgctcgatgcggagcggcatctgttcgaagtggccgtcgacgacgcgaat

SEQ ID NO: 11871 - DNA, 5295 bp, Burkholderia cepacia
gtgctgcctgcttccgccgtaccggcaagcgtcggggtcgtgtcgtccgtcgtcgcgccagtcgtcagcagcccgacgatcgagccaacgtcgtccgtgacgctaacaacgatcggtgcggccggcgccgtcaggtctgaaaccgttaccgagccagacgggcccgtgttgcctgccgcatcggtagccgtcacgccgatcaccgtgccgatcggcagcggggtcgatggtgtgtacgtccacgcgccgctggggtcggctgttacggtggcgtccggcgtgccgtcgccattcgtatcgatattgaccgtcgcgccagcttccgccgtgcccgacaacgacgtaccgtcggtcgcattcaccgtcggtaatgcaggagccgtcgtatcgaccgtcagctcgaaagccgtgctcggggtgctcacgttgccggccgtgtccgtggcagtcaccgtgatcgaatgcgcgccttcacccaagcctgtggccggcgtgaacgtccagtttccggacgggtctgccgtcgtcgtacccagcaacgtcgtgccgtcatacacgctcaccgtgctccctgcttccgctgtaccggcaagcgtcggggtcgtgtcgtccgtcgtcgcgccagtcgtcagcaggccaacgatcgagccaacgtcgtccgtgacactaacaacgatcggtgcggccggcgccgtcgtgtctcccgtcaccgttaccgaggcagacgggcccgtgttgcctgccgcatcggtagcagtcacgccgatcaccgtaccagccggcagcggggtcgacggcgtgtacgtccacgcgccgctcgggtcgggtgtcacggtggcgtccggcgtgccgtcgccattcgtatcgatgttgaccgtcgcacccgcttcggccgtacccgacagtgacgtaccgtcggtcgcgttcactgtcggaatcgacggagctgtcgtatcgatcgtcaggttgaaggccgtactcggaacactcacattgccggccgtatccgttgcggtgacggtcaggctgtgcgcgccctctcccaaacccgtggtcggcgtgaacgtccagtttccggacggatctgccgtcgtcgtacccagcaacgtcgtgccgtcatacacgctcaccgtgctccctgcttccgctgtaccggcaagcgtcggggtcgtgtcgtccgtcgttgcgccagtcgtcagcaggccgacggtcgaaccaacgtcgtccgtgacgctaacaacgatcggtgcggccggcgccgtcgtgtcacccgtcaccgttaccgaagcagacgggcccgtattgcccgccgcatcggtagccgtcacgccgatcaccgtcccgatcggcagcggggtcgacggcgtgtacgtccacacgccgctcgggtcggctgtcacggtggcgtccggcgtgccgtcgccattcgtatcgatgttgaccgtcgcacccgcttcggccgtgcccgacaacgacgtaccgtccgtcgcgttcactgtcggaatcgccggagccgtcgtatcgatcgtcacgttgaaggccgtgctcggaacactcacgttgcctgccgtatccgttgcggtgacggtcaggctgtgtgcaccctcgcccagtgcagtagtcggcgtgaacgtccagtttccggatgggtccgctgtcgtcgtgccgagcaacgtcgtgccgtcatacacgctcaccgtgctgcctgcttccgctgtgccgctcaatgtcggcgtcgcatcgtcagtactgccgccggaaatgatcgcaccaacaacagagcccacgtcgtccgtcacggtgccgatgatcggtgccgcaggcgccgtcgtgtcacccgtcaccgttaccgaagcagacgggcccgtattgccggccgcatcggtagccgtcacgccaatcaccgtaccagccggcagcggggttgacggcgtgtacgtccacgcaccgctcgggtcggctgtcacggtggcgtccggcgtgccgtcgccgttcgtatcgatgttgaccgttgcgcccgcttcggccgtgcccgacagcgatgtaccgtcggtcgcgttcacagtcggtaatgcaggagccgtcgtatcgatcgtcaggttgaaggccgtgctcggaacactcacattgccggccgtgtccgtggcggtgacggtcaggctgtgcgcgccctcacccagtgcggtagtcggcgtgaacgtccagtttccggacgggtctgctgtcgtcgtgcccagcaacgtcgtgctgtcatacacgttcactgtgctccctgcttccgccgtaccggcaagcgtcggggtcgtgtcgtccgtcgtcgcgccagtcgtcagcagcccgacgatcgagccaacgtcgtccgtgacactaacaacgatcggtgccgcaggcgccgtcgtgtcgcccgtcaccgtcaccgaggcagacgggcccgtattgcccgccgcatcggtagccgtcacgccaatcaccgtaccagccggcagcggggttgacggcgtgtacgtccacgcgccgctggggtcggctgttacggtggcgtccggcgtgccgtcgccgttcgtatcgatgttgaccgttgcgcccgcttcggccgtgcccgacagcgatgtaccgtcggtcgcgttcacagtcggtaatgcaggagccgtcgtatcgatcgtcaggtcaaaggccgtgctcggggtgctcacattgccggccgcatccgttgcggtgacggtcaggctgtgtgcgccctcacccaaacccgtggtcggcgtgaacgtccagtttccggacggatctgccgtcgtcgtacccaacaacgtcgtgccgtcatacacgctcaccgtgctgcccgcttccgctgtgccgctcaatgtcggcgtcgcgtcatcagtactgcctccggaaatgatcgcaccaacaacagagcctacgtcgtccgtcaccgtaccgatgaccggcgcacccggtgccgtcgtatcccccgtcaccgttaccgaagcagacgggcccgtattgcccgccgcatcggtggccgtcacgccgatcaccgtaccagccggcagcggggtcgagggcgtgtacgtccacgcgccgctcgggtcggctgttacggtggcgtccggcgtgccgtcgccgttcgtgtcgatgttgaccgtcgcacccgcttcggccgtacccgacagcgacgtaccgtcggtcgcgttcaccgtcggtaatgcaggagccgtcgtatcgatcgtcagctcgaaagccgtgctcggaacactcacattgcctgccgtgtccgtggcggtgacggtcaggctgtgcgcgccctctcccaaacccgtggtcggcgtgaacgtccaatttccggacgggtcggccgtcgtcgtacccaacaacgtcgtgccgtcatacacgctcactgtgctgcctgcctccgctgtaccgctcaatgtcggcgtcgcgtcatcagtactgccgccggaaatgatcgcaccaacaacagaacccacgtcatccgtcacggtgccgatgaccggcgcacccggtgccgtcgtgtcacccgtcaccgttaccgaggcagacgggcccgtgttgcctgccgcatcggtggccgtcacgccgatcaccgtaccagccggcagcggggtcgagggcgtgtacgtccacgcgccgctggggtcggctgttacggtggcgtccggcgtgccgtcgccattcgtatcgatgttgaccgtcgcacccgcttcggccgtgcccgacaacgacgtaccgtccgtcgcgttcactgtcggaatcgccggagccgtcgtatcgatcgtcagatcgaaggccgtgctcggaacactcacgttgccggccgtatccgttgcggtgacggtcaggctgtgtgcaccctcacccagtgcagtagtcggcgtgaacgtccagtttccggatgggtccgctgtcgtcgtgccgagcaacgtcgtgccgtcatacacgctcaccgtgctgcctgcttccgctgtgccgctcaatgtcggcgtcgcatcatcagtactgccgccagaggcaatcgcaccaacaacagagcccgcatcgtccgtcaccgtaccgatgaccggcgcacccggcgccgtcgtatcgcccgtcaccgttaccgaagcagacgggcccgtattgcccgccgcgtcggtagccgtcacgccaatcaccgtgccagccggcagcggggtcgagggcgtgtacgtccacgcgccgccggggtcggctgttacggtggcatccggcgtgccgtcgccgttcgtatcgatgttgatcgttgcgcccgcttccgccgtgcccgacagcgacgtaccgtcggtcgcgttcactgtcggaatcgacggagctgtcgtatcgatcgtcaggtcgaaggccgtgctcggaacactcacattgccggccgtgtccgtggcggtgacggtcaggctgtgcgcgccctcttccaaacccgtggtcggcgtgaacgtccagtttccggacgggtcggctgtcgtcgtacccaacaacgtcgtgccgtcatacacgctgaccgtgctgcccgcttccgctgtgccgctcaatgtcggcgtcgcatcatcagtactgccgccagaggcaatcgcaccaacaacagagcccgcatcgtccgtcaccgtaccgatgaccggcgcacccggtgccgtcgtatcgcccgtcaccgttaccgaagcagacgggcccgtattgcccgccgcgtccgtggccgtcacgccgatcaccgtgccgatcggcagtggggtcgacggcgtgtacgtccagacgccgctcgggtcagccgtcacggtggcgtccggcgtaccgtcgccattcgtatcgatgttgaccgtcgcgcccgcttccgccgtgcccgacagcgacgtaccgtccgtcgcgttcaccgtgggcagcgcgggagccgtcgtatcgatcgtcagctcgaaggccgcgctcggggtgctcacgttgccggccgcatccgtcgcagtcaccgtaatcgagtgcgcgccctcgcccaaacccgtggtcggcgtaaatgtccacttcccggacgaatccgctgtcgtcgttcccagcagcgtcgtgccgtcatacacgctcaccctgctacccgcttccgcggtaccgccgagcgtcggcgtcgtatcgctcgtcgcaccgccgatcgtcaccggatgttgtgcatcgtcgctgacggccgtaatcgcaggcgttttctgtacgatcgtatccaccacgatccccaccgtgctcagctcgctcgtattgccgctactgtcggtctgcgtcacggtgatc

SEQ ID NO: 11872 - DNA, 747 bp, Burkholderia cepacia
gtgatcacagatcgcagatcaaacccaggagagcccgccttgccgcctcgtatcgccccgcccgcattgaaggtcatcgaacaggaaacgatggccgacaaggtctaccagcaactgcgcgaagcgctgatgagcggccgcttcgcgcctggccaggcgctgagcctgcgcagcgtggccgaggcggtcggctcgtcgacgatgccggtgcgtgccgcgctcacgcggctgcgcgccgaacgcgcactggtcgacggcccgaatcgggcgctcgtcgtcccgccgatgacgctcgacatgctcgacgaactgcgcgacgtgcggatcgccctcgaaggctgcatcgccgagcgcgcgtgcgcacggatgaccgacgcgcagatcgcggccgtacgcaagacctgcgagacgatgcaggcacacgccgaggccggccgctcgcgcgcctacctgcaaagcaattttgcgttccacagcgcgatctatgcgcacggcgccagcgaaagcacgctcgcgatcgtcgagaacctgtggatgcgcgtcggcccgttcctcaacatggtcgcgctcgacatcccgcacatgcggcgctcgatggatgcgcaccgcgcgatcgtcgatgcgctcgaacggcgcgatggcgcgggcgtgcgggccggcatcgcgctcgacatcggcggcgccgcgcacgacctcgccgagacgctgcgggccgaacagacaccgcggaccgtgaacgcgaagccg

SEQ ID NO: 11873 - DNA, 1582 bp, Burkholderia cepacia
tcgtcggcgcacgccgccgacacgaagaaggtcgacgtcctgctggtgggcggcggcatcatgagctcgacgctcggcgtctggctgcacgaactccagcccgactggtcgatgacgatggtcgagcgcctcgacggcgtcgcgctggaaagctcgaacggctggaacaacgccggcaccggccactcggcgctcgccgagctgaactacacgccggagaaggcggacggcaaggtcgacatctcgaaggccatcgagatcaacgagtcgttccagatctcgcgccagttctgggcgtggcaggtgaagcagggcgtgctgaagaacccgcactcgttcatcaactcgacgccgcacatgagcttcgtctggggcgacgacaacgtccgcttcctgaagaagcgctacgaagcgctgcaggcgagcccgctgttccgcgggatgcagtattcggaagactacgaccagatcaagcagtgggtgccgctgatgatggaaggtcgcgaccgcaaccagaaggtggccgcgacgtggacgccgatcggcaccgacgtgaacttcggcgagatcacgcgccagttcgtcggctacctgaagacgcagccgaacttcacgctgtcgctgtcgagcgaagtgcgcgagatcacgcgcaacgccgacggcacgtggcacgtgtcgtgggtcaagctgcactcggatgaaccgccgcaagccgtcgacgcgaaattcgtgttcatcggcgcgggcggcggtgcgctgcacctgctgcaggcgtcgggcatccccgaagcgaaggactacggcgcgttcccggtcggcggctcgttcctcgtgaccgacaaccccgaggtcgtgaagcagcatctcgcgaaggcctacggcaaggcgtcggtcggctcgccgccgatgtcggtgccgcacctcgacacgcgcatcatcgacggcaagaagatcatcctgttcgggccgttcgcgacgttctcgaccaagttcctgaagaacggctcgtacttcgacctcgcgaagagcaccaacctgcacaacgtcgcgccgatgatgcgcgtgggcgtcgacgaattcccgctggtgcagtacctcgccggccagctgatgctgtccgacgacgaccgcttcaacgcgctgaaggaatacttcccgaacgcgaagaaggaagactggcgcctgtggcaggccggccagcgcgtgcagatcatcaagcgcgacccggtcaagggcggtgtgctgaagctcggcaccgagatcgtcgcgtcgcaggacggcagcatcgcgggtctgctcggcgcatcgccgggcgcgtcgaccgccgcgccgatcatgctgaacctgatgaagaaagtgttcaaggacaaggtcgcgacgcccgagtggcagcagaagatccgacagatcgtgccgagctacggcaccaggctgaacgacagcccggcgaaggtcgtcgaggaatggacctacacgagcgacgtgctgcaactgtcgccgccgccgaagatcgacctcggcgcgccgtcgcaggccaccggagccgtgccggtccccccggcgaacgctttcgccctcatgg

SEQ ID NO: 11874 - DNA, 651 bp, Burkholderia cepacia
atgatgagccttggactcgtaggtcgcaaggttggcatgacccgtatcttcacggcggaaggggattcgattcccgtcaccgtgctggacgtgtcggacaaccgcgtgacgcagatcaagactgttgaaaccgacggctacacggccgtgcaggttgcattcggctcccgccgcgcatcgcgcgtgacgaagccgctggcaggtcatctcgccaaagccggtgtcgaagccggtgaaatcctcaaggaattccgcattgacgcggccaaggcagccgagctgtcgaatggcgccgtggtcggtgcagatcttttcgaagtgggccagaaggtcgacgtgcaaggcgtgtcgatcggtaagggctacgccggtacgatcaagcgttacaacttctcctccggccgtgccacgcacggtaactcgcgctcgcacaacgtgccgggctcgatcggtatggcgcaggatccgggtcgtgttttcccgggtaaacgcatgacgggtcacatgggtgacgtgacggtgacggtgcagaacctcgaaatcgctcgtatcgacgcagagcgcaagctgctgctcgtgaagggtgcgattccgggcgcgaagggcggcaaggtcttcgtgacgccggccgtcaagaccaagggggcgaaa

SEQ ID NO: 11875 - DNA, 1356 bp, Burkholderia cepacia
atgcgttcgatgcggcggcgtcgaacgattcgacttacgtatatcgccggcgcatcggcgagtgaccttgccggccgttcacgagacggccggcgcctgcatgaggccggacaggcggtacaccgcgtgcttcggtcaaccgctttgcatggggccggcgtaagcgctaaagcgctaacgccggtcgataacggagagagacagatgaccctttcgatcaccagtaatttcgacgcgggcgccatcgacgtcgtgtcgtgcgagcgtcccgacgcgatccggctgcgcgtgcgtggcgacaatcggtcggagttcgcgcaatggttttactaccgcttgacgggcgcgcgcggcgagcggtgcgtgatgacgttcgagaacgcagccgaatgcgcatacccgtcgggctggcgcaactatcacgcggtggcaagctacgaccgggtcgactggttccgcgtgccgacgacgttcgacggcaagacgatgaccatcgaccatacgcccgagttcgacagcatctactacgcgtatttcgaaccgtactcggaagagcgtcacgcggcgtttctcggcgcggtccagcagttgccgcaggcgagcgtcgtcgagctcggccgcacggtcgaaggccgtccgatgtcgctgctgacgctcggcacgccggaaaccgacgatgcgccgaagaagaaggtatggatcatcgcgcgccagcatccgggcgagtcgatggccgagtggttcgtcgaaggcctggtcaagcggctggcgggatggggcgactgggccggcgatccggtggcgcgcaagctctacgatcgcgtgacgttttacatcgtcccgaacatgaatccggacggcagcgtgcacggtaacctgcgcaccaatgcggccggcgcgaacctgaaccgcgagtggatggcgcccgatgccgagcgcagccccgaagtgctggccgtgcgcgatgcgatccacgcgatcggctgcgacatgttcttcgacattcacggcgacgaggatctgccgtacgtgttcgtcgccggctcggagatgctgccgagctttaccgagcagcagggcaaggagcaggccgcgttcatcgacgcgttcaaggtcgccagccccgacttccagaccgagcatggctacgcggcgagcaagtacaaggaagatgcgctgaagctcgcgtcgaagtacatcggccatcagttcggctgcctgtcgttgacgctcgaaatgccgttcaaggacaacgcgaacctgcccgacgagcgcgtcggctggaacggcgagcgcagcgcggcgctcggcgcggcgatgctggccgcgatcctggtgcacgtcgacacgttcgcg

SEQ ID NO: 11876 - DNA, 1542 bp, Burkholderia cepacia
gtgcgccgccctccgttttcatccttcgcttccgtttcccgtccgtgcggccgcgcgcggcgcggcggggacgcctgcgcgccgttttcgccggaccggttgcccgccccgacgtcggggcaaccccgcggctcgcatgggccgcggcccagacgtcgtccgctgtttcgctcatcgaggagcacgctcatggccaacctggctcaggcccgcaccgacgaggatctcgacctgtcgacgctcgccattcccgatcacgcacgcatgccgccctttgcgctgacgatggcgtggtgggccgtctgcagcgcggtgttctacatcgtcgtcggcgcgacgctcgcgctcacctacggcgcgcgcaacgcgctgatcgggatggcgctgtcggtcgtctcgtacggcatcgtcaattcgatcatcagccgctacgcgatccgtaccggcctgtcggtcgcgctgttctcgcgcgtgctattcggcagcgcgggcgcggcgctcgcgacgctgatcttcttcgcgacggcgatctactacgcggtgttcgagggctcggtgatcgcggtcgccgcgcatcaccagtttccggcgctcgactacaagtgggccgcgctgatcgtcgtctgctacagcgtgccgctcgtgttcggcagcgtgcagcactggctcgacaagttcaacggcgtgctgctgccgttctacctgttcgggttgctcgcggcggtcgggctcgcgacggccgagtacggctatcacgccgcgtggctcgatttcgggccggcgggcggcgccccggccggcggctggtggcagtgcttcgtctactacatgggcgtatgggtgctgatgatgttcacgttcgactacgcgcgcttcggccgcaaggccgacgcccgctatcacggccgcttcaacttcgggatgccgttctacctcgtcacgttcctcgtcaacggcgcggccggcatctatctcgtcagcacgattcccgggctcggcacgctgtcggaagtgtcggtcgtgctcgcgctgctgaagctgatgggcgtgtgggggctgctgttcgtgtgggtcacgcagtcgcgcatcaataccgcgaactactacctcgcgaccgtcaacatgcaggcgttcttccagaaggtcgcggggctgcgcgcgccgaaattcgtgtgggcggtcgtggtcggcgcggtcgtctatgcgctgatgatggccgacatcttctcgcggatcctgcaagcgctcgcgtaccagggcatcttcgtcgtcgcgtgggtcggcgtcgcgctcgcgcacatcctgtcggcgcgctacgggcagctcgtcggcgacgacgtcgaatgccgcgacgcgcacgtgccggtgttcaatccgggcggcctgaccgcgtggttcgcgggcgcgttcgcggggctcgcgctgaaccaggcgaccgggttcgccgcgtcgctgtcggcgccggccacattcgtcgtgtcgtggctcgtctatcgcgcgctgctcggcaccgcgaagcggacctggttcgtgcgcaacacg

SEQ ID NO: 11877 - DNA, 1365 bp, Burkholderia cepacia
atgaacgccgataccggcctgccgcttccgcaacgctactgggcgatcgtctgcgtcgccctgggcatcacgctcgccgtgctcgacggcgccatcgcgaacgtcgcattgccgaccatcgcgcgcgacctgcacgcatccgacgccgcgtcgatctggatcgtcaacgcataccagctcgcggtcacgatcacgctgctgccgctcgcgtcgctcggcgagcgcatcggctaccgccgcatctacatcgccggactcgcgctgttcaccgcagcgtcgctcggctgcgcactggccggctcgctgccgatgctggccgtgatgcgcgtgatccaggggttcggcgcggccggcatcatgagcgtcaacgcggcgctcgtgcggatgatctacccgtcgtcgttgctcgggcgcgggctgtcgatcaacgcgatggtggtcgcgctgtcgtcggcgatcgggccgacggtcgcgtccgcgatcctgtcgttcgcgtcatggccgtggctcttcgcggtcaacgtgccgatcggcatcgcggccgtgctcggcagcctgcgcgcgctgccggccaatccgctgcacgacgcgccgtacgacttcccgagcgcgctgatgaacgcgtgcgtgttcggcctgctgatcacggccgtcgacgggctcggtcacggcgaaggtcatgcgtacgtcgcggccgaactggccgtcgcattcgtggtcggctacttcttcgtgaagcgtcagttgtcgcagccggcgccgctcctgccggtcgacctgatgcgcatcccgatgttcgcgctgtcggtctacacgtcgacggcgtcgttcacgtcgcagatgctcgcgttcgtcgcgctgccgttctggctgcagcattcgctcggtttctcgcaggtcgaaaccggcctttacatgacgccgtggccgctcgtgatcgtgttcgccgcgccgctcgcaggcgtgctgtcggaccgctattcggccggcattctcggcgggatcgggcttgcactgttcgccgccggcctgctgtcgctcgcgacgatcggcgcgcacccgggcacggtcgacatcgtgtggcggatggcgctgtgcggcgcgggcttcgggctgttccagtcgccgaacaaccgcgcgatgctgtcgtcggcgccgcgcgagcgcagtggcggcgccggcggcatgctgagcaccgcgcgcctgacgggccagacgctcggcgccgcgctcgtcgcgctgattttcgggctcgcgcccgaccgcgggccgacgatcgcgctctatgtcgccacggtgttcgcggcggtggccgcggtcgtcagcctgctgcgcatcgcatcgccgcggccggacacggcgacc

SEQ ID NO: 11878 - DNA, 789 bp, Burkholderia cepacia
atgtcctatcaggcgatccagctggatatcgatcaggccgcgggcgtggccacgatcacgctcaaccggcccgacaagctgaacagcttcacgcgggcgatgcatcgcgaactgcagtcggcgctcgatgaagtcgaggcggccggcgcgcgtgcgctgattctgacgggtgcgggccgcggcttttgcgcgggccaggatctggccgacctcgacttcacgccgggcgcgtccaccgatctcggcacgctgatcgacgagcatttcaatccgctgatccgccgcctgcagcgtctgccgattccggtgatcgcggccgtcaacggcacggccgccggcgccggcgcgaatctcgcacttgcgtgcgatctggtgtttgccgcccgttcgagcagtttcatccaggccttcgtcaagatcgggctcgtgcccgattcgggcggcacgtggttcctgccgcaacgcgtcggcatggcacgcgcgctggggctcgcactgaccggcgacaagctcggcgccgaacaggccgaacagtggggcctgatctggcgtgcggtcgacgacgaagcgctcgtcgcgacaacccgccagctcgccacccagctcgcgcagcagccgacgctcgccatcgcatcgatcaagcagtcgatgcgggacagcgtcacgaacacgctcgatcagcagctcgacctggaacgcgacctgcagcgcaagctcggccagtcgcacgactatgcggaaggcgtgcaggccttcatcgggaagcgcgcaccgcgcttcgagggacgt

SEQ ID NO: 11879 - DNA, 678 bp, Burkholderia cepacia
atgaccaccactgaactcgtcgcgctgctgcacctcgcgtcgccggcgctgccgatcggcgcatacagctattcgcagggcctcgaagccgcgctcgacgcgaacctgatccgcgatgccgattccgcgcgcgactggattgccagcggcctgaccgacgtgctcgcgcacggcgaactgccgttcctcgcacaccagctcgcgcgctggcagaccgacgacacgcacgcgctcgccgccgagaatgcgtggttcgtcgcgagccgggaatcggccgaactgcgccgcgaaaccgaacagatgggctggtcgctcgcgcagctgtgcgcgtcgctcgaatggggcgacgccgcacgccgcgcgacgctcgcgtcgctgtcgccgatcgcgctgccgaccgcattcgcgtacgcggccgccgcacacgatgccagcgccgacgcgacgctcgccgcgtatgcgttcggctgggtcgagaaccagacgtccgccgcgctgaaggccgtaccgctcggccagctcgccgggcaacgcatcatcgtcgcgctgcgcggcgcgatcgacgcggccgtgcgccgcgcgctcgcgacaccgcccgacgccgtcaacacgttcgcgccgcagctcggcatcctgtccgcgcggcacgaaacccagtactcgcggttgttccgctcc

SEQ ID NO: 11880 - DNA, 1946 bp, Burkholderia cepacia
cgcgcggtcgtcttcgcatatcacaacgtcggcgtgcggtgcctgcaggtgctgctcgcgcgcggcgtcgacgtcgcgctggtcgtcacgcacgaggacaacccgaacgagaacatctggttcggcagcgtcgcgtccgtcgcggccgagcacggcattccggtcgtcacgccggccgacccggccgatccggcgctgcgccgcgcggtggccgacgcgcagcccgatttcatcttctcgttctactaccgccacatgctgccggtggacctgctcgcgatcgcgccgcgcggcgcgtacaacatgcacggttcgctgctgccgaaataccggggtcgggtaccgaccaactgggccgtgctgaacggcgagaccgaaaccggcgcgacgctgcacgagatggccgccaagccggacgcgggcgcgatcatcggccagaccgcggtgccgatcctgccggacgacacggccgcgcaggtgttcgacaaggtcacggtggccgccgagcagacgctgtggcgcgtgctgcccgcgctgctcgcgggcgaggcgtcgcacctgccgaacgatctcgcgaccggcagctactacggcgggcgcaagcccgaggacggccgcgtcgactggtcgaagccggccgcgcaggtctacaacctggtgcgcgcggtcgcgcccccgtatccgggcgcattcacggacatccacggcgcccggttcgtgatcgcgcgcgcgcgcctcgcggcgcccggcagcgcggcagcggccgccgcggcagatttgccgcccggcctgcacgtaagcgataatgcgctattcggcgtctgcggcgacagccgcgccctatccattctcgagctccggcagcagcgcgacggcagcgaaaccgtcgtgacgcccgcggaattcgcgcagttcattcattcttcccgtcattcatgaaagcaaaaaaagtcctgatcctgggtgtgaacggcttcatcggccatcacctgtcgaagcgcattcttgaaaccaccgattgggaagtgttcggcatggacatgcagaccgaccggctgggcgacctcgtcaaccacgagcggatgcatttcttcgaaggcgacatcacgatcaacaaggagtgggtcgagtatcacgtgaagaagtgcgacgtgatcctgccgctcgtcgcgatcgccacgccggccacctacgtccagcagccgctgcgcgtgttcgagctcgacttcgaggcgaacctgccgatcgtccgctcggccgtcaagtacggcaagcacctcgtgttcccgtcgacctccgaggtctacgggatgtgctcggacgagcagttcgacccggatgcgtcggcgctcacctacggcccgatcaacaagccgcgctggatctacgcgtgctcgaagcagctgatggaccgcgtgatctggggctacgggatggaaggcctgaacttcacgctgttccgcccgttcaactggatcggcccgggcctcgactcgatctacacgccgaaggaaggcagctcgcgcgtggtcacgcagttcctcggccacatcgtgcgcggcgagaacatcagcctcgtcgacggcggctcgcaaaagcgcgcgttcaccgatatcggcgacggcatcagcgcgctgatgaagatcatcgagaacaaggacggcgtcgcgtcgggcaagatctacaacatcgggaatccgaagaacaacttctcggttcgcgagctcgcgcacaagatgctcgaactggccgcggaattccccgagtacgccgattcggccaagcaggtgaagctcgtcgaaacgacgtccggcgcctactacggcaacggctaccaggacgtgcagaaccgcgtgccgaagatcgacaacacgatgcaggagctcggctgggcgccgcaggcgacgttcgacgacgcgttgcgcaacatcttcgaagcgtatcgc

SEQ ID NO: 11881 - DNA, 273 bp, Burkholderia cepacia
atggcacgttctgttaaaaaaggtccgttctgcgacgcccatttgctgaagaaagttgaggcggctgcagcttcgcgcgacaaaaagccgatcaagacctggtcgcgtcgctcgacgattctgccggatttcatcggcctgacgatcgctgttcacaacggccgtcaacacgttccggtgtacatctcggaaaacatggtcggccacaagcttggcgagttcgcactgacccgtacgttcaagggtcacgcagccgacaagaaggccaagaaa

SEQ ID NO: 11882 - DNA, 1159 bp, Burkholderia cepacia
gctcgcccgcttcggcgcggactgggccgataccgacaccgacgcgctcgcggcgctcctggccgaggcgcccgcgttcgtgcgcgcatggtatggcgagcgtcggccggtggtgatccgcatcgtgcggcggccgctggtccagcgaccgttgccggcgccgctcgcgggctgcgatgtgccgcaatggccgacgcccggcgatctcgccggctggctcggggtgagcgcgccggagctcgactggctgtccgaccactggcgcgtcgacgcgcgcagcggcgccacgccgctgcatcactacacatacgtcgcggtcgacaagcgcagcggcgggtgccgcctcgtcgaaatcccgaaggggcggctgcgcgaagcgcagcgccgcatcctgcgcgggctgctcgatcgcatcgcgccgcatggcgcggtccacggttttcgcaaggggcacgggatcgtgtcgttcgcgacgccgcatgcggatcgcgatgtcgtcgtgcgtttcgatctcgcggacttcttcgtgtcggtgcgcgccgcgcgcgtccatgcgctgttcgcgacgctcggctatccggccgaagtcgcgcggatcctcaccgggctctgcaccaatcgcgtgccgtcggcgcggctgctcgcgccggacctgcgcgaccggttcgactggatcggccgtcagcgctatcgcgaacggcatctgccgcagggcgcgccgacgtcgccggcgctcgcgaacctgtgcgcgttccggctcgacctgcggctcgccgcgctcgcgcgttcggtcgatgcgacctatacgcgctatgcggacgatctcgcgttttccggcggcggcgcgcttgcgcgcgacgtcgagcggctgcaagtccgggtcgccgcgatcgcgctcgaggaagggttcgcgctgcaattgcgcaagacccgcgtgatgcggcggggcacgcggcagcaactggccggcgtggtcgtcaaccggcatccgaacctgtcgcgcgacgcattcgatcgactgaaagcgatcctgaccaactgcatccggcgcggcccggcgtcgcagaatcgcgatgcgcatccggatttccgtgcgcatctggccgggcgcgtcgcgcatgcgacggcgctgaatgcggcgcgcggcgcgaagctgcgc

SEQ ID NO: 11883 - DNA, 1014 bp, Burkholderia cepacia
atgtggagccacggccggcacgcatcggttgccgggcatcgccgcgccggcgtcccagccatcgatcgagagccacccaccatgaccggcatcgttaccgtcacattgaatcccgccgtcgatgttgctacgtcggtcgagcacatcgtcgatacgcacaagctgcgctgcgcgcggccgcggcgcgaccccggcggcggcggaatcaacgtcgcccggaccgttcaccgactcggaggcgactgcgtcgcgctgtacctggccggcgggccgaccggcgacgtcctgacggcgctgctcgaagccgagcatctgccgagtgagcgaatccggatcgccggcgagacccgcgagaacgtttgcgtgacagagaccgcgaccggacgtgaataccgcttcctgatgccggggccgctggtcacgggtgcggagtggcgcgcctgcgcggcgcgcaccgacgccatgcaaccgtcgccgcgctatctcgtgttgagcggaagcctgccgcccggcgcccccgacgatctctacgcgacgcttgcgcggacggcgaaggcaaggggcagccgcgtggttgtcgacgcggcgggccgggcgctgcaggcggccctcaaggccggtgtccatctcgtcaagcccagtattggcgaactgagcgcgctggccggcgaaccgctcgacgacacgtcggcatgccggaaggcgagcgaactcgtggcgcgcggccaggccgacatcgtcgcgttgacactcggcgcacgcggcgcatgggtcgtcacgcgcgatcgcaccctgcgcctgcccggcaggcccgcagcggtgtgcagcacggtcggcgccggagacagtttcgtcggcggcatggtgtgggcgctggcgtgcggcgtgccgttcgacgatgcgtgccgctacgcgctggcggcatcggcggcgtctgtcgaacgtcccgggacggcgctgtgcacgcgcgacgacgtcgagcggattcacgccgaactggttgcgcaggcaagc

SEQ ID NO: 11884 - DNA, 639 bp, Burkholderia cepacia
atgttcgatatgttcgtgcagtccttctgggagacgctgatcatggtcggcatctccggagcggtcggcgcgctcgtcggcctgccgctcggcgtgctgctctacctgaccgatcgccagggcgtgctgcagaacctcgcggtgaatcgcgtgcttggcggcatcgtgaacgccgtccgctcgacgccgttcatcatcctgctggtcgcggtgattccgttcacgcggctcgtcaccggctcgtcgatcggcacggccgcggcggtcgtgccgctgacgctcgcggccgcgccgttcatcgcgcgtctcgtcgaaacggcgctgcgcgaagtcgaccgcgggctgatcgaggccgcgcaatcgatgggcgcgaccacgtcgcagatcgtattcaaggtgctgttgcccgaatcgctgccgggcgtcgtcgcgggcctgacgatcacgttcgtgtcgctggtcggctattcggcgatggcgggtgcgatcggcggcggcggcctcggcgatctcggcatccgctacggttaccagcgctatttgccggaagtgatgtggacggtcgtcgcgatcctgatcgtgttcgtgcagatcgtgcaatcgttcggcgactggctggtgcgccggctgagccacaaa

SEQ ID NO: 11885 - DNA, 1884 bp, Burkholderia cepacia
atgttttcgaaggcagcggtgtggctggtgatcgcactggtgctgtttacggtgttcaagcagttcgacaagccccgcgtccaggaaggcgtgtcctattcgcagttcatggacgacgccaagaacggcaaggtcaagaacgtcatcgttcaggggcgcaacctcaccgtcactccggctgatggccagaaataccagatcgtgtcgcccggcgacatctggatggtcggcgatctgatgaagtacggcgtgcaggtcagcggcaaggctgacgacgagccgaacgcgctgatgtccgcgctgtactacctcgggccgacgatcctgatcatcgtgttctggttctacatgatgaggcagatgcaggggggcggcaaaggcggcgcattctcgttcgggaaatcgcgtgcgcggctgatcgacgaaaacaacaacgcggtgaacttctccgacgtcgcgggctgcgacgaagcgaaggaagaagtgtccgagctcgtcgacttcctgcgcgatccgcagaaattccagaaactgggcggtcgcattccgcgcggcgtgctgctggtcggccctccgggtaccggcaagacgctgcttgcccgcgcgatcgcgggtgaagcgaaggtgccgttcttcagcatctcgggttcggacttcgtcgaaatgttcgtcggtgtcggcgcggcccgtgtgcgcgacatgttcgagcaggcgaagaagcatgcgccgtgcatcgtgttcatcgacgaaatcgacgcggtcggccgtcatcgcggcgccggcatgggcggcggcaacgacgagcgcgagcagacgctgaaccagatgctcgtcgagatggacggcttcgaggcgaattccggcgtgatcgtgatcgccgccaccaaccgttccgacgtgctcgacaaggcgctgctgcgtccgggccgtttcgaccgccaggtctatgtcggcctgccggatatccgcggtcgcgagcaaatcatgcgcgtgcacctgcgcaaggtgccgatcgcgaacgacgtcgacgcggcagtcatcgcacgcggcacgccgggcttctcgggcgccgatctcgcgaacctcgtgaacgaggccgcgctgttcgccgcacgtcgtggcaagcgcatcgtcgagatgcaggacttcgaggacgcgaaggacaagatcttcatgggtccggagcgcaagtcggccgtgatccgcgaggaagcgaagcgcgcaaccgcctatcacgagtcgggccacgcggtgatcgcgaagctgctgccgaaggccgacccggtgcacaaggtcacgatcatcccgcgcggtcgcgcgctgggcgtcacgtggcagttgccggagcatgacaacgagacgtattcgaaggattacctgctggaccgcctcgcgatcctgttcggtggccgggtggccgaagagctgttcatgaacctggtcagcaccggcgcatcggacgacttcaacaaggccacgcagacggcgcgtgcaatggtcgcccggttcggcatgaccgacgcgctcgggccgatggtctatgtcgacgacgagaacgatgcgtcgccgtttggccggggcttcacgcgcacgatctcggaagcgacgcagcagaaggtcgactcggaaatccgccgcgtgctcgacgaacagtacggcctcgcgcgccgcctgctcgaagagaaccgcgacaaggtcgaagcgatgacggccgcactgatggagtgggagacgatcgacgccgatcagatcaacgacatcatggaaggccgtccgccgcgctcgccgaagagttcgccggctgtcggcggcgattcgtcgggcggcggcagcagcgccgaggtgaaacccggcaacgcgccggcgccggccacgccggcggca

SEQ ID NO: 11886 - DNA, 1548 bp, Burkholderia cepacia
atgaaactgaacgagcgcctgtccaccctgccgcgcgacatcgtcgccggcatcgtcgttttcctcgttgcgctaccgctctgtctcggtatcgccaacgcctccggcgtcgagccgttcgccgggctcgtgtcgggcatcgtcggcggcatcgtcgtcgcgctgctgagcggctcgtcgctgtccgtcagcggaccggccgccggcctcgtcgtgatcgtcgtcgaagggatcgcgcaactcggcagcttctccgcgttcctgctcgcggtgctgctgtccggcgtgctgcagttcggcttcggcatgctgcgcgccggccgcttcgccgcctacgtgccgtcgcccgtcatcaagggcatgctcgccgcgatcggcctgctgctgatcgtgaagcagattccgttcgccttcggcattggcggctcggccgcgcaatcgtttgcgaactggccggggctgccggtcgcatgggccgccacggccatcgcgctcgcgtcgctcgcgttgctggtggcatgggacacccccgcgctgcgccgcttcgcgctggtgcgctcggtgcccgcgccgctcgcggtggtcgtgctcggcatcggcgcgacgctggtgctgggtgtcgtcgcgcccgcggtcgcgccgggcgccgcccaccgcgtcaccttgcccgaactcggatcgttcaccgcattcgcggcatcgctcaagcacgcggagctcggccccaacttcgcgcagctcgtcaatccggacgtgtggcgcgtcgcgatcacgctcgcggtcgtcgccagtctcgaaaccctgctgagcctcgaagcggtcgaacagatcgacccgaagcgccggccggtgcaacccgaccgcgaactgaaggcccagggcgtcggcaatctcgtcgcgggcgcggtcggcggcctgccgatcacgtcggtgatcgtgcgcagctcggtaaacgtcaacgcgggcgcgcaaagccggatgtcggcgatcgtccacggggtgctgctgctcgccagcgtgttcgcgctcaccgggctgatcaacctgatcccgctcgcgagcctcgccgcgatcctgatccacacgggcttcaagctggcgaagccggcgctgtttcgctcggtgatgaaacaggggccggccgcgttcgtgccgttcgccgcgacgatcgtcggcgtgctggcggtcgacctgctgttcggcatcgcgctcggcctcgcgtgcagcgtgctcgccgtcgccgtcgcgaacctgaagagccccgtcacgctcgcgcagcatgacgaccacttcctgctgtcgttccgcaaggacgtgtcgtttctgggcaaggtacaggtcaagcaccatctgcggcacattccggaccgcgcggcggtgatcatcgacgcgacgcgcgccgactacatcgatcacgacgtgctcgaactgctcgatgcgttcgtcgccgatgcgccgcggcgcgggatcgcggtcgagttccgccggcgccagccggcgccacgcacggcggcgcgccgctggctgttccgcgcgccggccgccgaa

SEQ ID NO: 11887 - DNA, 1041 bp, Burkholderia cepacia
atggcctacgaagcagcttccgaacgttatgccggcatgcaataccgcacctgcggcaagtccgggctcaaactgcccgccctgtcgctcggcctgtggcacaacttcggcgattcgacgccgatctcgacgcagcgcgagatcctgcgcaccgcgttcgacctcggcatcaaccacttcgacctcgcgaacaactacgggccgccgtacggcagcgccgaaaccaacttcggccggctgctgaaggaggatttccggccgtatcgcgacgagctgctgatctcgacgaaggccggctgggacatgtggccggggccgtacggcagcggcggcgggtcgcgcaagtacgtgctcgcgagcctcgaccagagcctgcagcggatggggctcgactacgtcgacatcttctattcgcaccgtttcgacgcgcacacgccgctcgaggaaacggcgggcgcgctggcgtcggccgtgcagcagggcaaggcgctctacatcggcatttcgtcgtattcggccgcgaagacgcgcgagatggccgcgctgctcgcgcaatacaaggtgccgctgctgattcaccagccgtcgtacaacatgctgaaccgctggatcgaagaggatctgctcggtacgctcgacgacgtcggcgcgggcagcatcgcgttcacgccgctcgcgcagggcttgctcacgtcgaagtacctgaacggcgtgccggccgacgcgcgcgtgaacaagccgggcggcggctcgctgaagcaggagcacctgagtgcggacaacctcgagcacgtgcgcaagctcaatacgatcgccgaacggcgcgggcagagccttgcgcagatggcgctggcgtgggtgctgcgtaacggccgcgtgacctccgcgctgatcggcgcgagccgggccgagcaggtgcgcgagaacgtcggtgcgttgcagaacctcgaattctcggcggaggaactcgcggagatcgatcgttacgcgacggaaggcggcatcaatctgtgggaaaagccgtccaccgatcaggcgatc

SEQ ID NO: 11888 - DNA, 915 bp, Burkholderia cepacia
atggccgaccgcgacggcaagatctggatggacggcaagctgatcgactggcgcgacgccaagatccacgtcctgacccacacgctgcactacggcatgggcgtcttcgagggcgtgcgcgcgtacaaggcggccgacggcagcaccgcgatctttcgcctgcccgagcacaccaaacgtctgctgaattcggcgaagatcttccagatggacgtgccgttcgaccgcgaaacgctcgaagccgcgcaactcgcggtcgtgcgcgagaaccggctcgagtcgtgctacctgcgcccgatcatctgggtcggctcggaaaagctcggcgtggcggcgaagggcaacacgatccacgtcgcgatcgccgcatggccgtggggcgcgtacctcggcgaagacggcctcgcgaagggcatccgcgtgaagacgtcgtcgttcacgcgccaccacgtgaacgtgtcgatggtgcgcgcaaaggcgtcgggctggtacgtgaactcgatcctggcgaaccaggaagcgacggccgacggctacgacgaagcgctgctgctcgacgtcgacggctacgtgtcggaaggctcgggcgaaaacttcttcctcgtgaacaacggcaagctgtacacgcccgacctgtcgtcgtgcctcgacggcatcacgcgcgacacggtcatcacgctcgcgaaggacgccggcatcgaggtgatcgagaagcgcatcacgcgcgacgaggtctacacggccgacgaagcgttcttcaccggcacggccgccgaagtcacgccgatccgcgagctcgacaaccgcacgatcggcagcggcgcgcgcggcccgatcacggaaaagctccagtcggcgtttttcgatatcgtgtcgggcaagaacgcgaagtacgcgcactggctgacgaaggtc

SEQ ID NO: 11889 - DNA, 960 bp, Burkholderia cepacia
atgagcagccacagccatgatggcctgatggtctttactggcaacgcgaatcccgcgctcgcccaagaagtcgtcaatatccttggtatccccctcggcaaagcaatggtcagccgtttctccgacggcgagatccaggtcgagatccaggaaaacgtgcgcggcaaggactttttttttttgcaatccacgtgcgcaccgacgaacgacaacctgatggaactgatgatcatggtcgatgcgctcaagcgcgcatccgctggccggatcactgctgccatcccctacttcggctatgcccgtcaggatcgccgcccgcgttcggcgcgcgtcgcgatctcggcgaaggtcatcgcgaacatgctggaaatcgccggcgtcgagcggatcatcacgatggatctgcacgccgaccagattcaaggcttcttcgacatcccggtcgacaacatctacgccacgccgatcctgctgggcgacctgcgcaagcagaactactcggatctgctcgtcgtgtcgccggacgtcggcggcgtcgtgcgtgcccgtgcactcgcgaagcagctcaactgcgatctcgcgatcatcgacaagcgtcgtccgaaggcgaacgtcgccgaagtgatgaacatcatcggtgaagtcgaaggccgcacctgcgtgatcatggacgacatggtcgatacggccggcacgctgtgcaaggccgcgcaagtgctgaaggaccgcggtgcgaagcaggtgttcgcgtacgcgacgcatccggtgctgtccggcggcgccgccgatcgcatcgccgcgtcggcactcgacgagctcgtcgtcaccgatacgattccgctgtcggccgaatcgctggcctgctcgaagatccgctcgctgacgagcgcgagcctgctggccgaaacgttctcgcggattcgccgcggcgattcggtgatgtcgctgttcgcggaatcc

SEQ ID NO: 11890 - DNA, 378 bp, Burkholderia cepacia
atgacgcatactcggccagccttccagatggttactgacatgttgcgcaaggctttgcgtcgcctgcaacccgacgaaagacccatgttgcactctgatcaaggctggcattatcaaatgcccggctggcggctcatgctcgagcaacgctcgttggcgcaaagcatgtcgcgtaaaggcaattgcttggacaacgctgccatggaaagcttcttcggcacgctgaaatccgagttcttctacttgaaccacttcagcagcattgaacagctacgcatcggcttgaagcgctacatccggtactacaatcacgagcgcatcaagctcaaactgaaagggctgagtcctgtgcaatacaggactcagcctcatccggcc

SEQ ID NO: 11891 - DNA, 378 bp, Burkholderia cepacia
gtgtcttcccggctcgccagcaggcaggggtttcgctacgatgtgaacctgcagcatgacagcacgaagggagttgcaatgtcggaaatcaacaaggagaaactgatgtcggatatcaaaaccgttctctcggacgccgaagacctgctcaagcaagctgcgagcagcacgggcgaccgtgcggccgagctgcgcgagaaggccatgtcgcgcctcaagcaggccaaggaaaaggcagccgacgtccaggtcgtggtggtcgagaaaggcaagaaggccgcgcgcgcgaccgacgactacgtgcacgagcatccgtggacgtcgatcggcgaggccgccggcgtcggcgtgctgatcggcctgctgatcaaccgcaag

SEQ ID NO: 11892 - DNA, 375 bp, Burkholderia cepacia
acgcatactcggccagccttccatatggttactgacatgttgcgcaaggctttgcgtcgcctgcaacccgacgaaagacccatgttgcactctgatcaaggctggcattatcaaatgcccggctggcggctcatgctcgagcaacgctcgttggcgcaaagcatgtcgcgtaaaggcaattgcctggacaacgctgccatggaaagcttcttcggcacgctgaaatccgagttcttctacttgaaccacttcagcagcattgaacagctacgcatcggcttgaagcgctacatccggtactacaatcacgagcgcatcaagctcaaactgaaagggctgagtcctgtgcaatacaggactcagcctcatccggcc

SEQ ID NO: 11893 - DNA, 747 bp, Burkholderia cepacia
atggacaagactctcgataaacaggttgcgatcgtgaccggcgcgtcgcgcggcatcggccgttcgatcgcgctcgaactcgcgcgcctgggcgcgacggtgatcggcacggcgacgagcgaatcgggcgccaccgcgatcaccgcggcgttcgcggaagcgggcgtcacgggccgcggcgcggtgctgaacgtcaacgacgcggcagccgccgaggcactgatcgatgcgaccgtgaaggaattcggcgcgctgaacgtgctcgtcaacaacgcaggcatcacgcaggatcagctcgcgatgcggatgaaggacgaggactgggacgcggtgatcgacaccaatctgaagtcggtgttccgcctgtcgcgcgcggtgctgcgcccgatgatgaaggcgcgcggcggccgtatcatcaacatcacgtcggtggtcggctcggccggcaatccgggtcaggtcaactacgcggccgcgaaggccggcgtcgcgggcatgacgcgtgcgctcgcgcgcgaaatcggcagccgcggcatcacggtgaactgcgtggcgccgggcttcatcgacaccgacatgacgaagacgctgccggaagaacagcaggccgcgctcaagacccagattccgctcggccgcctcggcagcccggaggacatcgcccatgccgtcgcgttcctcgcatcgccgcaggccggttacatcaccggcacgacgctgcacgtgaacggcggcatgtacatgtcg

SEQ ID NO: 11894 - DNA, 1149 bp, Burkholderia cepacia
gtgggctcgaacgcgggcgcttgcaaaaaggcgcggcgcgtcttgcgcaacctgttagataaacactcgcagcggcgaaaatctttcgacccgatttgcaaaaatcccggcagaagggcgatatttgcagacaaatcgccagacttgccgggaattctggaatcgcgcggcccagccacgggcgccgttcgcgccccgcccccgcaattgcttatccaacaggttgccgctattctaccgtgccggctgccggatgtggcgcgaccttgtcactgggtctggaggcgaacctccagccgcccgcgcaaccgcccttcacgctcgacgcccagattcatgctgcctaccgtattcatcgtctccgacggcaccgggatcactgccgaaaccttcgcgcattcgatcctctcccagttcgaccagaaattccgcctcgtgcgcgtgccgttcgtcgactcgctcgacaaggcctatgcgaccgtcgagaagatcaacgaggccgccgtgcacgacggccgtcgcgcgatcgtattcacgacgctcgtcgacagcgagtcgaacgacatcgtcaaacgctcgaacgcgctcgtgctcgacatgttccagcgcttcgtcgaaccgctcgagcaggaactggagctcaagtcgagccatgcaatgggccgcggccaccagaacgcggacaccgaggaatacaagacgcggatcgaggcgatcaatttctcgctcgcgcacgacgacggccagtcgaaccgcaacctgtcggaagccgacgtgatcctcgtcggcgtgtcgcgcagcggcaagacgccgacgagcctgtacctcgcgatgcagtacggcgtgaaggcggccaactatccgctgattccggaagatttcgagcgcggcaagctgccgtcggcgctgtcgccgtacagcgagaagctgttcgggctgtcgatcgacccgcagcgcctgtcggagatccgcaacgagcgccggccaggcagcaagtacgcggcgcccgagaactgccgctatgagatcaacgaggccgaagcgatgatgcgtcgcgaagggatcaagtggctgtcgtccacgcacaagtcgatcgaggaaatcgcgacgacgatcctgcaggaaatccgtctcgaccggcagtcgtac

SEQ ID NO: 11895 - DNA, 741 bp, Burkholderia cepacia
atgcgtttcgacgattccgacatcgccgccgtctaccgcgccatcttcgaacggcgcgacatgcgccacttcacgccggcgcccgtcgatccggccgtgctcgcgcgcctgctgcgcgcggcgcaccacgcgccgagcgtcggcttcatgcagccgtggcgcttcatccgcatcaccgatcccgccttgcgcaccgcgattcacgcgctggtcgaggccgagcgccgcgcgacggccgacgcgctcggcgagcgccaggacgaattcatgcggctgaaggtcgagggcgtgcgcgaatgcggcgagctgctggtcgtcgcgctcgccgacggccgcgaacgccacgtgttcggccgccgcacgctgccggagatggatctggcctccgccgcgtgcgcgatccagaacatgtggctcgccgcgcgcgcggaagggctcggcatgggctgggtgtcgttgttcgacgtcgatgcggtgcgcacgctgctgcggatgcccgacggcgcgaagccgatcgccgtgctgtgcgtcgggcacgtcgatgcgttctatgcgaagccgatgctcgaggaagaacgctgggccgcgcggatgccgatcgaagcgtgcctgttcgagaacggctgggacgctccggcggccatcgatggggccgattcggctgcgtcgcccgcaggcccggacagcgaaacgaagcacaccccggacgcgatgcccgaccggtcgtccgaacgcatcgcg

SEQ ID NO: 11896 - DNA, 990 bp, Burkholderia cepacia
gtggtctccgtcgaaccggcgcgcgccgaagggcgtgcgccggcgacttcgccgattcatccgtcacaggtcccgccgcccggcatgagcctgccgggcttccatgcgccggccgtctcggacggcacggtgtcgcgcggcaccgtgcgcgtgcagccggcgcgcatgccgttctacgtcgcgaccaagggcaaggtcacgctctacgtgctcggcacgctgcatacgggcgatccgtccgattacccgagcgcgcagccgttccggccgcgcatcctcgcggcgctcgccgcgtcgccgacgctcgcgctcgagctgtcgcccgacgatctgctcgaatcgcaggacgacgtgtcgaaatacggcgtgtgccgctacccgtgcctgcagcgcctgctgccggagccgctgtggcagcggctcgcggcgcgcctgcgcggcaacccggccgcgctcgccgagatccgcaagatgcggccgtggctcgcggcgctcgtcgtcgagacctacgattcgctgtccgccggcctgcagaccgaatacggcaccgaggcgcaactgcagaacgtgttcctgaagaagaaaggcggccgcgtgatcgggctcgagacgctcgccgaacagatgcgcgcgttcaccgggctgacgctggccgagcagcgcgagatgctcgcgcaggacatggtgcagacccccgcgcagaacgccgacgacatcaaggcgctgcaccggctgtggcgaattggcgacgccgatgcgatctcggcgtgggcggtcgcgaagagcgaacggctcgcccgttcgaaggcgttgtcggcgtcgctcgacaacaagatcgtgtacgagcgcaaccggcgcttcgttgcacggatgacggcaatcgccgcgccgaaccggccgctgttcgtcgcgatcggcgcgctgcatctgggtggcccgcgcggcgtgctcgaattgttgcgccagcaaggataccgggtcgacgcgaac

SEQ ID NO: 11897 - DNA, 443 bp, Burkholderia cepacia
gcggcgcgatgcatcgcgcgggggctggcgggcgaacgtcgagatcgaggccgggcccggggcgcgagcgcaaaaccgggcagcgcgtggcggccgatgcggccgcgtactggcgcgatgccgccgtggcgccgctgctgtcgtcgttctcgttcgacgcgctgcggcaggcgcgcgcgacggcgccggcactgccgcgcgggatgctctacgaagtcgtgccggacgactggcatgcgcaggtcatcgatgcgctcgactgcgtatcgttgcatgcagaccacactcggctcgacgaatccctggtgcgcgcgatcaaggcggccgggttgcgcatcctggtttacacggtgaacgacctcgaacgggcgcgcgaactggcgcgttggggcgtcgacgcggtctgcacggaccgcatcgacctgatcgcgcccgacgcgctg

SEQ ID NO: 11898 - DNA, 1050 bp, Burkholderia cepacia
atgatggatcggaggcggcgcccgacgccgcttcgcttcgccgccgcgctcgcgcggcccgtgagaacccggcgccccgcgcgcttcttccgaatcgccatgactaccgcactcgaccagctgaagcagtacacgaccgtcgtcgccgacacgggcgacttccagcagcttgcgcaatacaagccgcaggacgcgaccacgaatccgtcgctgatcctgaaggccgtccagaaggacgcgtacaagccgatcctcgagaaaaccgtccgcgatcatcgcaacgaaagcaccgatttcatcatcgaccgcctgctgatcgcattcggcaccgaaatcctgaagctgatcccgggccgcgtatcgaccgaggtcgacgcgcgcctgtcgttcgacacgcagcgctcgatcgacaagggtcgcgagctcatcaagctgtacgaagcagccggcgtcggccgcgaacgcatcctgatcaagcttgcgtcgacgtgggaaggcatccgcgcggccgaggtgctgcagaaggaagggatcaagtgcaacatgaccctgcttttctcgctcgtgcaggccgccgcgtgcgcggaagccggcgcgcagctgatctcgccgttcgtcggccgcatctacgactggtacaagaagcaggccggcgccgactggaatgaagcgcgggacggcggcgcgaacgatccgggcgtgcaatcggtgcgccgcatctacacgtactacaagaccttcggctacaagaccgaagtgatgggcgcgagcttccgcacgaccagccagatcatcgagctcgccggctgcgacctgctgacgatcagtcccgatttgctgcagaagctgcaggagagcaacgacacggtcgcgcgcaagctgtcgcccgacacgctgcaggacaagccggccgagcgcgtcgcgatcgacgaggcgtcgttccgcttccagctgaacgacgaagcgatggccaccgaaaagctcgccgaaggcatccgcgtgttcgccgccgacgcggtgaagctcgagaagctgatcgacgcgctgcgc

SEQ ID NO: 11899 - DNA, 1477 bp, Burkholderia cepacia
cgccgcagcagatggtccgtccgtttcacatgctgggcgagcttcgccagggcggtttccttcggctcacggttcatctctatggaatcactgcgcatctacaacacgctcgcgcgtgacaagcaagttttcgtgccgcgccagtccggcgaagtgcggatgtacgtatgcgggatcaccgtctacgactattgtcacgtgggccacgcgcgcatgctggtcgtgttcgacctcgtccagcgctggttgcgtgcgatcggctatcgggtcacgtatgtgcgcaacatcaccgacatcgacgacaagatcatccgccgcgcggtcgagaacggcgagacgatcaagtcgctgaccgaccgcttcatcggcgcgatgcacgaggacgaaagcgcgctgggcatccagcggcccgacatcgagccgcgcgcgacgcagttcatcccgcagatgctcggcatgatcgagacgctcgagacgaacggctacgcgtaccaggcgagcgacggcgacgtcaattactcggtgcgcaagttcacgaactacgggaagctgtcgggcaagtcgctcgacgatctgcgcgcgggcgagcgcgtcgccgcgaacgacgcgaaggaagatccgctcgatttcgtgctgtggaagcgtgcgaagccggaagatccggaaggcgcgtcgtgggcgtcgaagtacgggatgggtcgcccgggctggcacatcgagtgctcggcgatgggctgctcgctgctcggcaatcatttcgacatccacggcggcgggcaggatctgcaattcccgcaccacgagaacgagatcgcgcagagcgagggcgcgaccggcgagacgttcgtcaattactggatgcacaacggcttcgtgcaggtcgacaacgagaagatgtcgaaatcgctcggcaacttcttcacgatccgcgaggtgctcgagcgttacgacgcggaagtcatgcgcttcttcatcgtgcgcacgcactatcgttcgccgctcaattacagcgacgtgcatctcgacgatgcgcgcgcgtcgctcacgcgtctgtacacggcgctgaaggacgtcgacgccgatacgctcgcgctcgactggaacgagccgcacgcgcagcgtttcgcggccgcgatgaacgacgatttcaacacgccggtcgcggtggcgacgctgttcgagctggcgggcgaagtcaatcgcacgcgcgacgcgtcgctcgcgcggcaactgaaacagctggcgggcctgctgggcctgctgggccgcgaaccgcgcgcgttcctgcagcaggcgtcgggcgccgcgcaggcgggcgggctcgcggccgacgagatcgaagcgaagatcgccgcgcgcgtcgcggcgaagcaagcgaaggactatgccgaagcggaccggatccgggcggaattgctcgaagccgcgtatcgcacttgaagacaaaccgggcggatcgaccgaatggcgtcgcgta

SEQ ID NO: 11900 - DNA, 963 bp, Burkholderia cepacia
aaggtgctgaccgtgtcgtgcgacgtgtatcgcccggccgcgatcatgcagctgaaaacggtgaccgagcaggtcggcgccgacttcttcccgtccacgccggaccagaagcccgtcgacatcgcgctcgccgccgtcgactgggcgaagcgccactaccatgacgtgctgctcgtcgacacggccggccgcctcggcatcgacgaggcgatgatgcaggaaatcgccgcgctgcacggcacgctgaagccggccgaaacgctgttcgtcgtcgacgcgatgctcggccaggacgcggtcaacaccgcgaaggcgttcaacgacacgctgccgctcaccggcgtcgtgctgaccaagctcgacggcgactcgcgcggcggcgccgcgctgtcggtgcgtcacgtcacgggcaagccgatcaagttcgtcggcgtcgccgagaagctcgacggcctcgaggtgttccaccccgaccggatggcgaaccggatcctcggcatgggcgacatcctcgcgctcgtcgaggaggcgcagcgcggcgtcgatgtccaggccgcgcagaagctcgccgacaaggtcaagaaaggcggcgatttcgacctgaacgatttccgcgcgcagatctcgcagatgaagaacatgggcggcctgtcgtcgctgatggataagcttcccgcgcagttccagcaggcggcggccggcgccgacatgggccaggccgagaagtcgatccgccggatggaagggatcatcagctcgatgacgcccgccgagcgcgcgaaacccgagatcatcaaggcgacgcgcaagcgccgcattgcagccggcgcgggcgtgccggtgcaggaagtcaaccggatgctgaaccagtacgaccagatgcgtacgatgatgaagaagctgaagggcggcaacatgcagaagatgatgcgcggcctgaagggcatgatgcccggcatgcgc

SEQ ID NO: 11901 - DNA, 996 bp, Burkholderia cepacia
atgaaagtagccgttctcggcgccggtgcctggggcaccgcgctcgcgggccatctggccgcgcggcacgatacgcttttgtgggcgcgcgacgccgcgctcatcgccgggctgcaggcccggcacgaaaattcccgctatctggacggcatcgcgttgcctgacgcgctgcgctacgacgccgatctcggcgtcgcgctcgcgcatggcgccgcggacgacgcgctgtgcgtgatcgccgcgccggtggccgggctgcgcacgctgtgtcacgcgatgcgcgatgccggctgcgtgcccgcgcatatcgtctgggtctgcaagggcttcgaggccgacacgcacctgctgccgcatcaggtgatcgcggccgagctgcccggacagcagagcaacggcgtgctgtcgggcccgagtttcgcgcgcgaggtcgggcagtcgctgcccgtcgcattgacggtggcgagcacgtcggccggatgccgcgagcgcacgctcgccgcgttccatcacggcgcgatgcggatctatacgggcgacgacgtggtcggcgtcgaggtcggcggcgcggtgaagaacgtgctggcgatcgcgaccggcatttccgacggcctcggcctcgggctgaacgcacgcgccgcgctgatcacgcgtggcctcgccgaaatgtcgcggctcggcgtggcgctcggcggccgcgcggaaaccttcacgggcctcacgggcctcggcgacctgatcctcaccgcgacgggcgacctgtcgcgcaaccgcacggtcggcctgcaactggcggccggccgcacgctcaacgacatcctcggcgcgctcggccacgtggccgaaggcgtgcgctgcgcgcaggccgtgctggcgctcgcgcgcgcgcaatcgatcgaaatgccgattgcggaagccgtgtgcggggtgctgttcgacggcatcgcgccgcgcgacgccgtcagcggcctgttgcgccgcgacgcgcgcgccgag

SEQ ID NO: 11902 - DNA, 555 bp, Burkholderia cepacia
  misc_feature (473)..(473): n=g, a, t or c
atggcatccgtcaacaaggtcatcctcgtcggcaatctcggcgccgatcctgaagtccgttacctgccgagcggcgacgcggttgcgaacatccgtctcgcgacgaccgatcgctacaaggacaaggcgagcggcgatttcaaggaaatgaccgagtggcatcgcgtcgcgttcttcggccgtctggcggaaatcgtcagcgagtacctgaagaagggttcgtcggtctatatcgaaggccgcatccgcacgcgcaagtggcagggccaggacggccaggaccgttactcgaccgaaatcgtcgccgaacagatgcagatgctcggcggccgcggcggttcgggcggcggcggtggcggcggtgacgaaggcggttatggcggcggctacggtggtggtggtggcggcggtcgcggcgagcaggcggagcgtggcggcggcggtcgtgccggcggcggcggcgcggcgcgtgncggtgcgggtggtggcggccagagccgtccgagcgcaccggcaggcggcggattcgacgagatggacgacgatatcccgttc

SEQ ID NO: 11903 - DNA, 519 bp, Burkholderia cepacia
atgtacggcgtgctgttcctgctgccgctgacgtggcaaagcgtcggccgcctcgattcgaccggcgcggggctcgcgctgctgccgatggcgctcgtgttcgtcgtcgtgtcgccctggtcggggccgttgtcggagcgtatcggcacgcgtgcgacgacggccggcggtgtcgcggtgatcgcgagcgggctcgccgcgatcggcgcatcggccgagtcagcgagcctgctcggcgccgaaatcgggctggcgttgacggggctcgggatggggatcgcgacgggcccgctgatgaccgtcgcggtcggtgcggtcgacgcggcccgttcgggcaccgccagcgcgctcgtcaacgtcgcgcgaatgaccggcgcgacgctcggcatcgcggtgctcggcacggcgttcgcagccgcgcatggcggcgcggccggcctgcgcgtcgcgatgctcgccggcgcggcggttcaactgacgggcgcggcggtatcggcggtcagcgtgcagcgggcggca

SEQ ID NO: 11904 - DNA, 645 bp, Burkholderia cepacia
gggctgccggcgcgcgccgacctgatgctgccgttcctgaagtcgatcagctatccgctcggcgtgtggggcttcatcgtgctgacctacttcgtgatcgtcggcgcgagcaacgcggtgaacctgaccgacgggctcgacggcctcgtgatcatgccggtcgtgctcgtgggcgcgtcgctcggtgtgttcgcgtacgtgatgggcagcgcggtctattcaaaatacctgctgttcccgcacatcccgggcgcgggcgaactgctgatcttctgttccgcgatgggcggggccgggctcgcgttcctctggtacaacacgcaccccgcgcaggtattcatgggcgacgtcggcgcgctggcgctcggcggcgcgctcggcacggtcgcggtgatcgtgcgccaggaaatcgtgctgttcatcatgggcggcatcttcgtcgcggaaacgctgtcggtgatgctgcaggtgtcgtggttcaagtacacgaagaagcgttacggcgaagggcggcgcctgctgaagatggcgccgctgcatcaccatttcgaattgtccggctggaaggaaacgcaggtggtcgtgcgtttctggatcatcacgctgatgctgtgcctgttcggtctgaccaccctcaagctgcgg

SEQ ID NO: 11905 - DNA, 1107 bp, Burkholderia cepacia
atgaccgcactgccgacgcccgataccgaaccgctgcgcatgcgcgccgaatcgctgcacgccttcgtcgcggcactctgggaacgggccggcagccacccgcgcgaggcgacgctcgtcgccgatcacctggtcggcgcgaatctcgcgggccacgattcgcacgggatcgggatgatcccgaattacgtcgcgtcgtggcgcgaagggcagttgcagttgaacgggcacgcgtcgatcgtccgcgacggcggcgcggtgctgacgatcgacggcgggcgcggcttcggccaggtgatcgcgttcgaggcgatggtcgaaggaatcgagcgcgcgcggcgcatgggcatctgcgcgatcgggctgcgcgacgttcatcacctcggccgcatcgggcactgggccgagcagtgcgcgcgcgccgggctcgtgtcgttccatttcgtcaacgtgccgggcgacctgctggtcgcgccgctgcacggcaccgatccgcgtttcggcacgaatccgttatgcgccgcgtatccgcgggcgggcaagccgccgttgctgctcgatttcgcgacgagcgcgatcgcgtacggcaagacgcgtgtcgcgtacaaccagggcaagcgcgtgccggccgggtcgctgatcgaccatcgcggccagccgaccgacgatccggccgtgatgcacgagcagccgttcggcgcgctgctgccgttcgggctgcacaagggctatgcgctcgcggcgatgtgcgagatcttcggcggcgcgctggtgggcgggcatacgacgtacggcgatacgctgcagaagacgagcgcgatcgtcaacgggatgctctcggtgctgatcgatccgaacgcgttcgacgcggccgatgccgaacgcgaagccgatgcgttcgtcgcgtgggcgaaggcgtcgccgcgggccggcgatgcgccggtgcaggtgcccggcgagccggaagaggcgagccgcgccgcacgcggcacggccgggattccggtcgaccgcgcaacgtggcggcagattcgcgagagcgcggcggccgtcggggtcgacgcggccgagttcgatgcgtggacgcagcgctgcgaggcgtccgca

SEQ ID NO: 11906 - DNA, 1564 bp, Burkholderia cepacia
atcttcatcctgccgttcgtgctgttctcggcgacgtccggccagatcgccgacaaatacgacaaggcgaccctcacgcgcttcgtgaagaccttcgagatcgtgctgatgctggtcggcgcggccggcttcgtcacgcacagcgcgacgctgctctatctgtgcacgttcatgatggggatgcactcgacgctgttcggacccgtcaagtattcgtacctgccgcagcatctcggtgagcacgagctggtcggcggcaacgggctcgtcgagatgggcacgttcatcgcgatcctgatcggcacgatcatcggcggcgcggcggctcggcatcgagggcagcggcgagcgcgtgctcgcggtgagcgtcgtcgccatcgcgctggcggggcggctcgtcgcgcagcgcgtgccgtcgacgcccgcgccgcagccggacctcgtgatcaactggaacccgatcagcgagacctggcgcaacctcgggctcgcgcgccagaaccgcacggtgttcctgagcctgctcggcatctcgtggctgtggttcgtcggcgcgacgttcctcacgtcgttcttcaatttcgcgaaggacgtgctgtccgcgagccccgacgtcgtcacgatcctgctcgcgacgttctcggtcggcatcggcctcggttcgctcctgtgcgagcggctgtcgcagcggcgcgtcgagatcggcctcgtgccgctcggctcgatcggcatcagcgtgttcgcgatcgaactgtatttcgcgagccacgcgctgccgtcacccggccatctgctgtcggtcggcgaattcctggccggcgcgcgccactggcgcatccttgccgacctgttcctgctcgcgatgttcggcggtttctacagcgtgccgctgtacgcgctgatccagagccgcagcgcgccgacgcaccgcgcgcggatcatcgccgcgaacaacatcctgaacgcgctgttcatgatcctgtcggccgtgatggcgatggggttgaccaaggccggggtcgacattccggggctgttcctcgtcactgcgctattgaacgtcgtagtcgcgacgtatatctacctgctcgtgcccgagttcctgctgcgcttcgtcgcgtgggtgctcgtacatacgttctaccggatccgcctcgtgcacgcggaacggattccggcggaaggggcggcggtgctcgtgtgcaatcacgtcagctacgtcgatgcgctcgtgctggccgccgcgagcccgcggccgattcgcttcgtgatggatcaccggatcttcaagacgcgtttcgcgagctgggtattccggcatgcgaaggcgatcccgatcgcgccgcgccacgaggatcccgcgatgctcgcgcgggcgtacgacctgtgcgaggccgcgctgaaggacggcgagctcgtgtgcatcttccccgagggcaagctgacgaagacgggcgacatcaacacgttccatcacggcatcaccgagatcctgagccgcacgccggcgccggtgatcccgatggcgctgcgcgggctgtggggcagctatttttcgcgacat

SEQ ID NO: 11907 - DNA, 629 bp, Burkholderia cepacia
atgaagtttcgtttccccgtcgtcatcatcgacgaagatttccgctccgagaacatctcgggctccggcatccgggcgttggccgaagcgatcgagaaggagggcgtcgaagtcctcggcctcacgagctacggcgatctgacgtcgttcgcgcagcaatcgagccgcgcgtcgtgcttcatcctgtcgatcgacgacgacgaactcatgctcggcgaaatcggcccggacggcgagctgcccgagctcgcgaccgcgatcatcgagctgcgcgcgttcgtcaccgaagtgcgccgccgcaacgcggacatcccgatcttcctgtacggcgagacgcgcacgtcgcgccatctgccgaacgacatcctgcgcgaactgcacggcttcatccacatgttcgaggacacgccggaattcgtcgcgcgccacatcatccgtgaagcgaaggtctatctcgattcgctcgcgccgccgttcttcaaggaactcgtcaagtacgcggacgaaggctcgtactcgtggcactgcccgggccactcgggcggcgtcgcgttcctggagaacccgctcggccagatgttcccccagttcttcggcgagaacatgctgcgcgcggccgtgtgccacca

SEQ ID NO: 11908 - DNA, 1074 bp, Burkholderia cepacia
  misc_feature (63)..(66): n=g, a, t or c
  misc_feature (72)..(72): n=g, a, t or c
atgggacacatacgaggggagggcagcgaggggggggagtcggggagcgagcgattttcacannnnaagcangtccgccaaccgccggaatcgcctgaagagcgccgattcgtcggcgcttgttttttggaagaaattttcgtgacacaacgcattctcgaaccgaccgagatctcggcactcgatcattcggccattccgcgctttcgcctgccggagcgcgcgaccgcgttcgcggcgcgcgccgcgcggctgcgcaagcttgccgacctgaacccgatcagcggctacctgcggctgatggccaccgtcgccgacgcgcagcacgcgacgctgcaagcgctggagctgccgctgccgtcgaaggaagcgatcgcacgcgcacaggaacattcgatgccgctcgtgccggcgctcgacggcgagcgcgatgcgcgctggcgcgccgtgctgtatgaactgctcgaccgcgtcgaaagcgcggggctcgtcaatccgcagcttgcgaagctgctcgaccggctgcgcctgatggcgcccgccgagctcgacgcacaggccgacgcgatcctcgcgctgcgcttcgccgaagtcgacccggccaccgcgccgttcctgatggccgcgctgcaggtcgcgtggacggacctcgcgagccgcgtgacgccgaccgatgtcccgtatctcgaccagccggggctgtgcccggtgtgcggcacgcatccggtcgcgagcgtcgtgcgggtcggcggccagtatcagggctaccgtttcctccagtgcgggctgtgcacgaccgagtggcacatggtgcgtaccaagtgctcgcactgcgattcgacgaaaggcatcgcgtatcacgggatcgaaggcggcagcgaagcgatcaaggccgaatcgtgcgacgagtgcaagacctatcgcaagatcggctatcaggagaaggactacgagttcgagccgctggccgacgatctcgcgagtctcacgctcgacctgctgatgaacgaggccggctaccagcgcagctcgccgaacccgctgctgtggccggacgtgtcgcgcgaagcggac

SEQ ID NO: 11909 - DNA, 1335 bp, Burkholderia cepacia
atgaagctcgtcaacgtgctcgcgaccggctccgaggccagccccgacgcgaagacgtacacgatcaagctgcgcccgggcgtgaagttccacgacggcaccgatttcaacgcggcggccgtgaaggccaacttcgaccgcgtgaccgatcccgcgaaccacctgaagcgctacaacatgttccgcgtgatcgagaagaccgaggtcgtcgatccgaccacggtgaaggtcacgttgcgcgagccgttctcggcgttcatcaacacgctcgcgcacccgtcggccgtgatgatctcgccggccgcgctgaagaagtggggccgcgacatcgcgctgcatccggtcggcaccgggccgttcgagttcgtcgaatggaagcagaccgacgacctgaaggtgaagaagttcgccggctactggaagaagggctatccgaagatcgacgcgatcgactggaagccggtggtcgacaacaacacgcgcgcggcgctgatgaagacgggcgaagccgatttcgcgtttcgcattccgttcgagcaggcggccgacctgaagggcaacgcgaaggtcgacgtcgtcgagcggccgtcgatcgtgcagcgctacgtctcgctgaacatgctgcagaagccgttagccaaccagaaggtgcgccaggcgctgaactacgcggtgaacaaggaagcgctcgcgaaggtcgcgttctccggcttcgcgacgccatcgaccggcgtggtgccgcagggcgtcgattacgcgacgaagctcggcccctggccgtacgatccggcgaaggcgcgtgcgctgctgaaggaagccggctatccgaacggtttcgagacgacgctgtggtccgcctataacaactcgacgtcgcagaaggcgatccagttcgtgcagcagcagctcgcgcaggtcggcgtgaaggtgcaggtgcaggcgctggaagccggcgagcgcgtcgcgaaggtcgagagcgctccggatccggcgaaggcgccggtgcggatgtactacatcggctggtcgtcgtcgacgggcgaggcgaactgggcgatcacgccgctgctggccggcgcgtcggcgccgccgaagctcgtcaacaccgcgtactacaagaacgacacggtcgacggcgacctgacgaaggcgctcgagacggtcgaccgcacgaagaaagccgagctctacgccgacgcgcagaagcagatctgggccgatgcgccgtggatattcctcgtgcaggagaagatcgtgtatgcgcgcagcaagcggttgcagggcgcgtacgtgatgccggacggctcgttcaacttcgacgagatctcgctgaaa

SEQ ID NO: 11910 - DNA, 561 bp, Burkholderia cepacia
atgagcgcaacccgtctcgacacgaacacggcgctggtcgtcatcgacctgcagaaaggcatcgtcgccctccccaccgcgcacccggtcgcaccggtgatcgcccgcacccgcgaactgctcgacgcgttccgcagccgcggcctgccggtcgtgctggtcaacgtcgcgggcggcgcaccgggccgcaccgagcaagcgccacgcacggcgcagcttccggccgactggaccgaactcgtgcccgagctgaaccgccagccgaccgaccacgtcgtgacgaagcagacctggggcgccttcaccggcaccggtctcgacgcgcacctgaaggcagccggcgtcacgcagatcgtgctgaccggcgtcgcgaccagcatcggcgtcgaatccaccgcgcggcaggcgcacgaactcggctacaacgtgacgctcgccgtcgacgcgatgaccgacctcaacgcggacgcgcacgtcaacagcgtcgagcggctgttcccgcgtctcggcgaaacgggcacgactcaggacatcgtcgcgctgctcgaccggcgcggcgcg

SEQ ID NO: 11911 - DNA, 1560 bp, Burkholderia cepacia
atgaacatcatctgggcgcgcttcctggtgtcgctcgtgctgctcgtgctgatcggcgtattggtcggcgtcttcgccggcccgaccgcgggcctcgtgttcgtggtcgtgatgctggtcgcgcagggctttttcagcaccttccatacgcagcgtctgtggcgcctgctcgatgcgcccgtctacggcgaagtgccgagcgcgccgggcatttggggcgagatctactatcggctgcacaagctcgcgaaacagtggcatgcgcaggtgcggcaggtcgaacagcagcattcgcgcttcatccaggcgatccaggcgtcgccgaacggcgtcgcgatgctcgacgaccacgaccagatcgagtggtgcaacgcgatcgccgaggtgcatttcggcctcgatgcgaagcgcgacctgcgccagcacatcacgaacctcgtgcgtcatcccgatttcgtccgctacctgaacgcgcagcattacgacgagacgctgttgatgcgcggcatgggcgactcgcggcagaacgtgctggccgtgcaggtgtttccgtacggcgagaaccgcaagctgctgctcacgcaggacatcaccgagctcgagcgtaccgacgcgatgcggcgtgacttcgtcgcgaacgtgtcgcacgagctgaagacgccgctcaccgtgctgtcgggcttcctggagacgatgcgcgagctgccgctgaacgaggaggaccgcgcgcgctatctcgacatgatggagcagcaggcgtcgcggatgcggcacatcgtgaccgacctgctggtgctcgcgaagctggaaggcgagagcaagccgccggtcgatcacgcgatcgacatgcgtgcggtgttcgaccatctgaaggaggatgcgcagacgctgtcgagcgggcatcacgacatcgcgttctcgatcgacgagacgctcggtgtcaccggtgcgcagacggaattgttcagcgcgttcgcgaatctcgtcacgaacgcgatccgctatacgccggacggcggcaagatcgtcgtgtcgtggcggcgcgagggcgcgcagggcgtgttttccgtcacggacagcggcttcgggattccggccgccgacctgccgcggctcaccgaacgcttctaccgcgtcgatcgcagccgttcgcgcgacacgggcggcacgggcctcggcctcgcgatcgtcaagcacgtgctgcagcggcacgatgcgcatctgtacgtgcagagcgaggaagggcgcggcagtacgttcaccgcgcggttcccgggctcgcgcatcatcgcgatccggcgcggccgcctacgaagcatgatcgcgtcgcgttccggcgttaaaaaagcagcccgcgggctgcttttttcatggcgatgcggtacgtcgcccgcattgcaccgacggctcacgaacagaacttcgcgagcagcccgagttgcgcgttgcgaatcgtcttgcccgcgcggcgccggcgatagtggccgtcgctgtgcatctgccatgccgactggttgtcgccgaggcacaccgacagcccctcggcgatcacgcgccgct

SEQ ID NO: 11912 - DNA, 1296 bp, Burkholderia cepacia
atgactaccccgctaccgctcgagccgatcgagaccgcctcacgcgacgagctgaccgcgctgcagctcgagcgcctcaagtggtcgctccggcatgcgtatgatcactcgcccgtctatcgccgcaagttcgacgaagccggcgtgcatccggacgacctgaagacgctcgccgacctgtcgcgcttcccgttcacgaccaagggcgacctgcgcgacagctatccgttcgggatgttcgcggtgccgcaggaccggatctcgcgcatccacgcgtcgtcgggcacgaccggcaagccgacggtcgtcggctatacggctgccgacatcgatacgtgggcgaatctcgtcgcccgctcgatccgcgccgccggcgcacgccgcggcgacaaggtgcacgtcagctacggctacgggctgttcacgggcgggctcggcgcgcactacggcgcagaacgcgcgggcctcaccgtgatcccgttcggcggcggccagaccgaaaagcaggtacagctgatccaggatttccggcccgacatcatcatggtcacgccgagctacatgctgtcgatcgccgacgagatcgagcgccagggcctcgatcccgtgcaaagctcgctgcgcatcggcatcttcggcgcggagccgtggaccaacgacatgcgcgtcgccatcgaacagcggatgggcatcgacgcagtcgacatctacggactgtccgaagtgatgggccccggcgtggcgtccgaatgcgtcgagaccaaggacggcccgaccatctgggaagatcacttctatccggaaatcatcgatccggaaaccggcgaagtgctcccggacggcgaactcggcgagctcgtgttcacgtcgctgacgaaggaagcgctgccgatcatccgctatcgcacgcgcgacctcacgcgcctgctgccgggcaccgcccggacgatgcgccggatggagaagatcaccggccggtcggacgacatgatgatcgtgcgcggcgtcaacgtgttcccgacgcaaatcgaggaacagttgctcaagcagcgcgcgctcgcgccgcactatcagatcgtgctgacgaaggaaggcccgctcgacgtgctgacgctcaacgtcgaaccctgcccggaaaccgcgcccgacaccgcggcgatccaggtggcaaaacaggcgctcgcgtacgacatcaagtcgctgatcggcgtgacggccgtgatcaacgtgctgcccgtgaacggcatcgagcggtcggtcggcaaggcgcgccgggtcgtcgacaagcgcaagggc

SEQ ID NO: 11913 - DNA, 1011 bp, Burkholderia cepacia
atgcgcgcttgccgccccgcgctttccgacgcgccgggcgcctcgacatatcccccccgcccgcgagggcaccagacggcgagacgaaccatgatctacagcatgacgggctacgcgagcgcgacgcgcgaactcgtgacggccaccggcaacggcggcaccagcgtgtcggtcgaactgcgcaccgtgaactcgcgcttcctcgatctcaatttccggatgccggacgacgtgcgcgcgtgcgaacccgcgctgcgcgaaatgctgatgaacaagctgtcgcgcggcaaggtcgacgtgcgcatcaacctgcagcgcggcgagcagagcatcggcgcgggcgcgctgaaccagtcggcgctcggccagcttgccgagctcgagcgcgcggtgctcgattcgttcccgggcgtcggccgcctgcgcgcgggcgaaatcctgcgctggcccggcgtgctcgccgagagcggcgtgtccgcggaagcgatccgcgacgcggtgctcgcctgcggcaaggaagcgatcggcgagctcgtcgtcgtgcgttcgcgcgaaggcgcgcaactggcgacgatgctgctgtcgaacgttaccgagatggaggcgatcgtcgcgcgcatcacgccgctcgtgccggagctgatcgcgaagcatcagcagaagatcgtcgagcggctgcaggaagcgctcggcctcgcggcgccggaaggcggctcgacggtcgtcacgcgcgaggaagccgcggagcgcatccgtcaggaagtgacgatgtacgggatccggatcgacatcgcggaagagctgtcgcggctcaccgcgcacctgaacgaaacgcgtcacgtgatcgagaagggcggccgcgtcggcaagcgtctcgacttcatgatgcaggaactgaatcgcgaagcgaacacgctcggctcgaaggcggcggcgaaggaactcgccgatgcgtcgatggcgctgaagctgctgatcgagcagatgcgcgagcaagtgcaaaacctggag

SEQ ID NO: 11914 - DNA, 612 bp, Burkholderia cepacia
  misc_feature (4)..(6): n=g, a, t or c
  misc_feature (8)..(9): n=g, a, t or c
gtgnnncnngccccccccagcgtcgtctacgtgccgcccgaccagcccgagccgatcacgctcgccgacaagatcgtgctgctgcacgccggcgcggataccgcgcagcacggcagcatcgcgcaggtcggtgcaccgctcgacctttacccccccccggccagccgcttcgtcgcgggcttcatcggctcgccgcggatgaacttcctgccggccgtcgtgactgcgtgcgacgcgcagcgcacgaccgtcaagctggtgccgtccggcgaaaccttcgcgctgccgcgtgacggctcggcgctgagcgccggcgccgccgtgacgctcggcgtccgtcccgaacacctgacgctcggcgccgcggccgacgcgacgacgctcgcgcgcgacgtcgcgctcgtcgaacgcctgggcgaacagacctacgtgcacctcgattcgcccggcctgcccgacgcgacgccgctgatcgcgaaggtgcccggcgacgcgcaggtgcgcaccggcgaacgcgtgcacgtgcacgcgccggccgcggcctgccacctgttcaccgaagacggccgcgcggtgcccgcgtgcgccgacgtccacgttcaccactacgca

SEQ ID NO: 11915 - DNA, 381 bp, Burkholderia cepacia
atgcattcgcacggtatcgtcctgttcggccacggcgcccgcgacccgcgctgggccgagccgttcgagcggctggccgcgcggctgcgcggcgccggctcccctgccgcgcaggtgtcgctcgccttcctcgaactgatgacgccgtcgctcggtgacgccgtggccgcgcaagtcgcggccggctgcacgcgcatcaccgtggtgcccgtattcttcggccagggcggccatgtccgccgcgacctgccgcagctcgtcgacgcatgccgcgccgcgcatccgggcgtcgagatccgctgcgcgacggccgtcggcgaagacgacggcgtgctcgacgcggtcgcgcgctattgcgtcgggcaactcggcggcgacgcg

SEQ ID NO: 11916 - DNA, 1200 bp, Burkholderia cepacia
atgccgctgactgacgtcactatccgaaaggcctctccccgcgaaaagccgtaccgcctcgccgatggcggcggcatgtatctcgaagtgtctccatcagggggcaaatactggcgattcaaatatcgctttgctggtaaggagaagcgtctggccctgggtgtctaccccgatgttccgcttgccgccgcgcgagagaagcgagatgaggcgagaaagacacttgccggaggggtcgatcccggtgaggcgaagaaggccgaaaagcgagctgcgcttcttgccgcaaccaattcgttcgaagcagttgcgctgggctggatggaggagcgcaagccctacgtcacatcgggttcgtggggaaaaaccaaggcgcgattcgtcaaggatgtattcccttggttgggcaagcgtccgatagcagaaatcgatgcgcctgaagttctgactgttctcaagcgcatcgacagccgaggtgcccggtttaccgctcacaaggtgcgtagcgagatcagccgagtgttccgctatggaattaaggaagggtactgcaaggtcgacgcggcgcgcgacctgacagacgcaatcccgccggctcaaaccactcactttgcttcgattaccgatcccgagaaggtcggtgccatgttgcgagcgtttgatggcttctctggcacgtttccggtcttatgtgcacttaagctggcgcccatgctcttcactcgaccgggcgaactccgcaaggctgaatgggcgcaatttgacttggataagggcgagtggcgttatctcgtgacaaagaccaagacggagcatctagtgccgcttgcccaacaggctattcagattttgcgagaacttcatgcgctgacgggtagtggacgatacgtgtttccaggggctcgctcagccctgcgtccaatgagcgatgcagctgtcaatgcggcccttcgtcgactgggttatgacacacgtaccgaaatcacggggcacggcttccgagcgatggcgcgcacgattcttcatgaagaactggagcaaaagccggaggtaatcgagcatcagctcgcccacgcggttcccgacaatctcggcaaagcgtacaaccggacgaaattcatcaaggaacggcgagcgatgatgcagaagtgggccgactacctcgaaaaactcaaggcagatattggcgcgcacaccaac

SEQ ID NO: 11917 - DNA, 774 bp, Burkholderia cepacia
atgacgcgattctcggacgaagcgcggcagcgtgccggccccgagcgcggcgacgagcctcggcagcgaagtcagcaacccgtccgcgaacggcgagaggcgccccgacgctccgatgatgcccggcaggaaaaagatcgccgtgtagatggtcaactggtggcagaagtacacgaagatcgcgagccagatctgcggatcgcgcagcgcggcgccgaacgcatggccgccgtgcgcggcgatgcccgcgtcctgttcggcggccagcttgtgctcgagcgcacgaccggtttccggagcgagccacggcgcggcgctcggccggtccggcaatcgcatccatacgacgaacgcgagcaggatcgccggaatgccttcgacgacgaacaaccattgccagccgtggaagccgagcgtgccgtcgagctcgatcagcgcgccggccagcggcccgccgacgatgttggcgatgcacacgccgagcaggaaatagccggtggcgcgcgcacgttcctcgcggccgaaccagtacgtcagatacagcatcacgccgggaaacaggccggcttcggccacgccgagcagcaggcgcatcacgtagaacgacgtttcgccgctgacgaacgccatcgcgaccgacagcgcgccccacgtgatcatgatccgcgtgatccagaagcgtgcgccgacgcgatgcatgatcaggttgctcgggatctcgaagagcgcgtaggtcaggaaaaacaaccccgcgccgagtccgtacgcggccga

SEQ ID NO: 11918 - DNA, 387 bp, Burkholderia cepacia
atgacgacagacacccactcgcagccgtccggtcaaggaccgctgcgccgcctcgtcggctccgccatcggccttctgcagacgcgcctcgaactggtgggcatcgagcttgccgaggagaaggagcgcctgatgggcgtgctgttcctcggtctcgccgcgatgatgctcgcgacgatggcgctcatcagcctgaccgtgctgatcgcgatcgcgttctgggatacctaccgctggcaggcgctcgccgcgatcaccgcactgtatgccgttggcggcatcgtatgcgcgctgaaggcgcgttcgggcctgcgcgacgcgccgaccgtgttcgaggcgacgctcgccgaactcgagaaagaccgcgacctgttccgcggcaagccg

SEQ ID NO: 11919 - DNA, 741 bp, Burkholderia cepacia
atgaatctttctcagcgtctcgctgcagaggtattcggcacgttctggctggtgctcggcgggtgcggaagcgccgtgctggccgccgcctttccgggcctcggcatcggctttgccggcgtcgcactcgccttcggcctgaccgtgctgacgatggcattcgcaatcggccacatctcgggttgccacctgaatccggcggtgagcgtcggcctgacggttgccggccgcttcccggcacgcgacctcgcgccgtacatcgtcgcgcaggtcgtcggcgccacgctcggcgcattcgtgctgtacctgatcgcaaccggcaagccgggtttcgacgttgtcggcagcggctttgcgacgaacggcttcggcgatcgctcgcccggccactactcgctcgccgcgtcgttcatctgcgaagtcgtgatgacgggcttcttcctgttcgtgatcctcggtgcgaccgacaagcgcggggtgccggccggcttcgcgccgatcgcgatcgggctgtgcctgacgctgatccacctgatctcgattccggtcaccaacacgtcggtgaacccggcgcgctcgaccggcccggcgctgttcgtgggcggcgacgcgatcggccagctctggctgttctgggtcgcgccgctgatcggtgcggtactcgcggggatcatctatccgctggtcgccgggcgtgacgacgccgtcgacctgctgccggcatccgctcgcacaagcgaa

SEQ ID NO: 11920 - DNA, 1539 bp, Burkholderia cepacia
atgcaactcaatccctctgagatcagcgagctgatcaagagccggatccagggccttgaagcgagcgcagacgttcgcaaccagggcaccgtgatctccgtgaccgacggtatcgtgcgtatccacggcctgtcggacgtgatgcagggcgaaatgctcgagtttccgggcaacacgttcggtctcgcgctgaacctcgagcgcgactcggtcggcgcggtgattctcggcgaatacgaacacatctcggaaggcgacatcgtcaagacgacgggccgcattctggaagtcccggtgggtccggaactcgtcggccgcgtggtcgacgcgctcggcaacccgatcgacggcaagggcccggtcaacgcgaagctgaccgacgcgatcgaaaagatcgccccgggcgtgatctggcgcaagtcggtgtcgcagccggtgcagacgggcatcaagtcgatcgacgcgatggtgccgatcggccgtggccagcgtgagctgatcatcggcgaccgtcagtgcggcaagaccgcggtggcgctcgacgcgatcatcaaccagaagggcaaggacctgatctgtatctacgtcgcgatcggccagaaggcttcgtcgatcatgaacgtggttcgcaagctcgaagaaacgggcgcgatggaatacacgatcgtcgtcgccgcttcggcatcggattcggctgccatgcagtacctggcgccgtacgccggctgcacgatgggcgaatacttccgcgaccgtggccaagacgcgctgatcatctatgacgacttgaccaagcaggcttgggcataccgtcagatctcgctgctgctgcgccgtccgccgggccgtgaagcgtacccgggcgacgtgttctatctgcactcgcgtctgctggagcgtgcggctcgcgtgtcggaagagtacgtcgagaagttcacgaacggcgaagtgaagggcaagagcggttcgctgacggcactgccggtcatcgaaacgcaggctggcgacgtgaccgcgttcgttccgacgaacgtgatctcgattaccgacggccagatcttcctggaaaccgatctgttcaacgcaggcatccgcccggcaatcaacgccggcgtgtcggtgtcgcgcgtcggtggcgctgctcagacgaaggtcgtgaagaagctgtcgggcggtatccgtaccgacctcgcgcagtaccgtgaactggccgcattcgcgcagttcgcatcggacctcgacgaagcgacccgcaagcagctcgagcgcggccgccgcgtgacggaactgctgaagcagccgcagtaccagccgctgcaggtctgggaactggccgtgtcgctgtacgccgcgaacaacggctacctcgacgacctcgacgtcaagcaagtgctgtcgttcgagaagggcctgcgcgacaacctgaagaccagccacgctgacctcatcaagcgcatcgaagacaccaaggatctctcgaaggacgacgaaggcgcactgcgctcggcgatcgaagccttcaagaagtccggtgcctat

SEQ ID NO: 11921 - DNA, 1266 bp, Burkholderia cepacia
gtgcttcatcaaatcatcgaccgcaggctggccggcaagaacaagagcatcgccaatcgcgaacgctttttgcgtcgcgtcaagaactacattcgtcgtgccgtgtctgacgcggtgcgcgaccgtagcatcaaggatatccagagcacgcagagcatcacgatcccgcgcaaggacatcgcggagccgaatttccggcacgcgccgggcgggcgtcgcgagtacgtgcaccccggcaacgaggactacgtgcgcggcgacaagatcccgcgtccgcagggcggctcgggtggcggaggcagtcaggcgagcaacgagggcgaagggcaggacgacttcgtgttcgagctgtcgcgcgacgagttcatgcagtacttcttcgacgacctcgaactgccgcgcctcgtgaagacgcacctgctgacggtgccgagctggaagaacgtgcgcgcgggctggtcggcggaaggcacgccgaacaacatcgacgtcgtgcgttcgctgcgcagcgcgctcggccggcgcatcgcgctcggctcgccgctcgtcaacgagctgcgcgagctcgaggcgcagctcgaagcgctgaagaacgaccccgaagaccgccgcgccgaaatcgcgacgctcgaggccgagatccatcatctgaaagggcgcatctggcggattccgttcatcgatccgttcgacctgcgctacatcaatcgcgtgaagcagccgcaaccgtcgagccaggccgtgatgttctgcctgatggacgtatccggctcgatggacgagcagcgcaaggatctcgcgaagcgcttcttcatcctgctgtacctgttcctcaagcgcaactacgagcgcatcgaggtggtgttcattcgccaccacacgcgcgccgaggaagtcgacgaggacaccttcttccattcgaccgaaagcggcggcaccgtcgtgtcgagcgcgctcgaactgatgcgcaaggtgatgagcgagcgctactcgccgaccgagtggaacatctatggcgcgcaggcgtccgacggcgacaactggactgacgattcgcccaagtgtcgcaaaatcctggaagaggatatcctcactcagacgcgttacttcgcgtatatccaggtcgcgccggaagagcagaatctgtggctggaatacgcgcaactggccctgtcgcaaccgcatctcgcgatgaaaaaagtggaatcggctgcggacatttacccggtgtttcgcgaattgttcgaaaagcaggtggaaatgtca

SEQ ID NO: 11922 - DNA, 1434 bp, Burkholderia cepacia
gtgcctgcgcgcgatggcgattcatccgcaatgtctcttttccgcaagaaaaacgtcgatcgcatgatcgccggcgcgcaagccgccgggctcaagaaagcgctcggcgcgatcgacctcaccttcctcggcatcggcgcgatcatcggcaccggcatcttcgtgctgaccggcaccggcgccgtccaggccggccccgcgctgatgctgtccttcgtgatcgccgcgatcgcgtgcggcctcgccgcgctgtcgtacgcggagttcgcgtcgacgatccccgtcgccggctcgatctacacgtattcgtacgcgacgctcggcgagctggtcgcgtggatcatcggctgggacctgatgctcgagtacggcctcgcgtcgtcggccgtgtcggtcggctggtcgggctacctgcagtcgctgctgcagggcttcgggctgtcgctgccgaccgtgctgacggccgcgcccggcgcggtgccgggcgtcaccacgtggttcaacctgcccgcgttcctcgtgatgatcgtgatcacgacgctgctgtcgatcggcatccgcgaatcgacccgcatcaccaacatcatggtgttcatcaaggtgtcggtcgtgctgctggtgatcgcggtcggcctgttccacgtgacgcccgcgaactggaagccgttcatgccgcacggctggaacggcgtgttcggcgcggccgccgtgatgttcttcgcgttcatcggcttcgacgcggtgtcgtcggcggccgaggaagtgaagaacccgaagcgcgatttgccgatcggcatcatcgcgtcgctcgcggtgtgcgcggtgctgtacgtgacggtcgccgcggtcgcgaccggcatcgtgccgtcggcccagtacgcgaacatctcgcacccgatctcgtacgcgctgcaggtcgccggcgagaagtgggtcgcgggcttcatcgatctcggcgcggtgctcggcatgctcaccgtgatcctcgtgatgagctacggccagacgcgcgtgatcttcgcgatgtcgcgcgacgggctgctgccggccgcgctgtcgcgcgtgcatccgcgctatgcgacgccgttcctgaccacctggctggtcggcctgttcttcgggctgatcgccgcgctcgtgccgctcaatgtgctcgccgagctgatcaacatcggcacgctcgcggcgttctcgatggtgtcgatcgccgtgctcgtgctgcgtcgcacccaccccgagctgccgcgcgcgttccgctgcccgggcgtgccggtggtgccgatcctcgcggtcgcatcgtgcctgttcctgatgctgaacctgcagcccgtcacgtgggccgcgttcggcatctggctcgtgatcggcctggtgatctacgcgctgtactcgcgacaccactcgaagctcgcgcacggccaccccgacgcgcac

SEQ ID NO: 11923 - DNA, 1095 bp, Burkholderia cepacia
gtggccgcgttcgcgggccttgcgcagttcgtagatcgtgcggcgcgtcagcacttcgcgtcggtgcgacaggaagcactgcaggatttccttcaggttcagcagcttcggctgaccgtcgaccagcgcgaccatgttcatgccgaacgtgtcctgcagctgcgtcgccttgtacaggttgttcagcaccacttccggcacttcgccgcgcttgagctcgatcacgacacgcatgccgctcttgtcggactcgtcgcggatgtcggaaatgccttcgagcttcttctcgttgacgagctcggcgatccgctcgagcagcgagcgcttgttcacctggtacggcagctcgtcgacgatgatcgccatccgctggccgcggtcgatctcctcgaagtgcgtggccgcgcgcatcacgacgcggccgcgcccggtgcggtagccgtcgcgcacgccggcgacgccgtagatgatgccggccgtcgggaagtccggcgccgggatgatctcgatcagctcgtcgatcgtcgcttccgggttgcccagcaggtgctggcacgcgtcgacgacttcgttcaggttgtgcggcgggatgttggtcgccatgccgaccgcgatgcccgacgagccgttgatcagcaggttcgggatgcgcgacggcaggaccgacggctgcatttcgttgccgtcgtagttcggctcgaaatcgaccgtttccttgtcgatgtcggcgagcagctcgtgaccgatcttcgccatgcgaatttcggtgtaacgcatcgccgcggcattgtcgccgtcgatcgagccgaagttgccctgcccgtcgatcagcatgtagcgcagcgagaaatcctgcgccatccgcacgatcgtgtcgtagaccgcggtatcgccgtgagggtggtatttaccgatcacgtcaccgacgatacgcgccgacttcttgtacgcacggttccagtcgttgttcagttcgtgcatcgcgaacaacacgcgccggtgcacgggcttcaggccatcgcggacatcagggagggcacgtccgacgatcacgctcatcgcgtaatcgagatacgaacggcgcatttcctcctc

SEQ ID NO: 11924 - DNA, 928 bp, Burkholderia cepacia
gtgagccgccgtcgtgttgtcgttacaggcctggggctgatttcgcctgttggcaataatgttgccgacggctgggccaatctcgtcgccggcaagtccggtatcgccaccgtcacgaagttcgatgcgtcgaacctcgcctgccatttcgcgggcgaagtgaagggcttcagcgccgaggagtacatcccggcgaaggaagcccggaacatggatacgttcatccattacggcatcgccgccggcgtccaggccatcaaggacagcgggctggaagtgaccgaagccaacgcggaacgcatcggcgtgctggtcggttccggcatcggcggcctgccgatgatcgaagacacgcaccagacctacgtcgatcgtggcgcgcgccggatttcgccgttcttcgtgccgggctcgatcatcaacatgatctcgggtcacctgagcatcatgttcggcctgaagggcccgaacctcgcggccgtcacggcctgcacgaccggcctgcacagcatcggcctcgccgcgcgcctgatccaggccggcgacgccgacgtgatggtcgcgggcggcgccgaatcgacggtgtcgccgctcggcatcggcgggttcgccgccgcgcgcgcgctgtcgacccgcaacgacgatccggccaccgcgtcgcgtccgtgggacaaggaccgcgacggcttcgtgctgggcgagggctcgggcgtgatggtgctcgaggagtacgaggcggcgaaagcgcgcggcgcgaagatctacgcggaagtcgtgggcttcggcatgacgggtgacgcgtaccacatgaccgcgccgaacatggacggtccgcgccgctgcatggtcgcggcgctgcgcgacgccggcctgaatgccgacgaggggcagtacctgaacgcgcatggcacgtcggacgccgctggga

SEQ ID NO: 11925 - DNA, 432 bp, Burkholderia cepacia
atggcgatctacggcatcggtaccgacatcgcgcaggtgagccgcgtcgcggccgtgctcgaacgcacgggcggccggtttgccgagaaggtgctcggccccgacgaactgcgcgtgttccacgcccggcgcgcccgctccgaggcgcgcggcatcgcgtttctcgcgacgcgcttctccgcgaaggaagcgttctcgaaggcgatcgggctcggcatgcattggccgatgacgtggcgcgcgctgcagacgctcaatcatccaagcggcgagccgtacgtggtcgcatccggcgagctggctgaatggctggccgcgcgcggcatcacggcacgtgtgacggtcagcgacgaacgcgactacgcggtgtcgttcgtggtcgccgaaacggacgccgcgcctggcactgcacctgtttcccgaacttcttcc

SEQ ID NO: 11926 - DNA, 2601 bp, Burkholderia cepacia
atggatcaattcgccaaagagaccctgcccacctccctagaggaggaaatgcgccgttcgtatctcgattacgcgatgagcgtgatcgtcggacgtgccctccctgatgtccgcgatggcctgaagcccgtgcaccggcgcgtgttgttcgcgatgcacgaactgaacaacgactggaaccgtgcgtacaagaagtcggcgcgtatcgtcggtgacgtgatcggtaaataccaccctcacggcgataccgcggtctacgacacgatcgtgcggatggcgcaggatttctcgctgcgctacatgctgatcgacgggcagggcaacttcggctcgatcgacggcgacaatgccgcggcgatgcgttacaccgaaattcgcatggcgaagatcggtcacgagctgctcgccgacatcgacaaggaaacggtcgatttcgagccgaactacgacggcaacgaaatgcagccgtcggtcctgccgtcgcgcatcccgaacctgctgatcaacggctcgtcgggcatcgcggtcggcatggcgaccaacatcccgccgcacaacctgaacgaagtcgtcgacgcgtgccagcacctgctgggcaacccggaagcgacgatcgacgagctgatcgagatcatcccggcgccggacttcccgacggccggcatcatctacggcgtcgccggcgtgcgcgacggctaccgcaccgggcgcggccgcgtcgtgatgcgcgcggccacgcacttcgaggagatcgaccgcggccagcggatggcgatcatcgtcgacgagctgccgtaccaggtgaacaagcgctcgctgctcgagcggatcgccgagctcgtcaacgagaagaagctcgaaggcatttccgacatccgcgacgagtccgacaagagcggcatgcgtgtcgtgatcgagctcaagcgcggcgaagtgccggaagtggtgctgaacaacctgtacaaggcgacgcagctgcaggacacgttcggcatgaacatggtcgcgctggtcgacggtcagccgaagctgctgaacctgaaggaaatcctgcagtgcttcctgtcgcaccgacgcgaagtgctgacgcgccgcacgatctacgaactgcgcaaggcccgcgaacgcggccacgtgctcgaaggtctcgcggtcgcgctcgcgaacatcgacgagttcatcgcgatcatcaaggccgcgccgacgccgccgatcgcgaagcaggaactgatggccaagccgtgggattcgtcactcgtgcgcgagatgctgacgcgcgccgagagcgagaacgcggcggccggcggccgttccgcgtaccgtccggaaggcctgaacccggcgttcgggatgcaggccgacgggctgtaccgcctgtccgacacgcaggcgcaggaaatcctgcagatgcgcctgcagcgcctgaccggcctcgagcaggacaagatcatcggcgagtaccgcgacgtgatggcgcagatcgccgacctgctggacatcctcgcgcgccccgagcggatcacgacgatgatcggcgaggagctgaccgcggtgaaggccgaattcggcgacgcgcgccgctcgaggatcgagctgaacgcgaccgagctgaacaccgaggatctgatcacgccgcaggacatggtcgtcacgatgtcgcatgcgggctacgtgaagtcgcagccgctgtccgagtaccgcgcgcagaagcgcggcggtcgcggcaagcaggcgacgcagatgaaggaagacgactggatcgagacgctgttcatcgcgaacacgcacgactacatcctgtgcttctcgaaccgcggccgcgtgtactgggtcaaggtctatgaggtgccgcaaggctcgcgcaactcgcgcggccgtccgatcgtcaacatgttcccgctgcaggaaggcgagaagatcaacgtcgtgctgccggtcaaggaattctcggccgacaagttcatcttcatggcgacgtcgctcggcaccgtgaagaagacgccgctcgaagcgttcagccgcccgatgaagaagggcatcatcgcggtcggcctcgacgagggcgactacctgatcggcgcgtcgatcaccgacggtgcgcacgacgtgatgctgttctcggactccggcaaggccgtgcgtttcgacgagaacgacgtgcgcccgatggggcgcgaggcgcgaggcgtgcgcggcatgcagctcgaggacgggcagcaggtcatcgcgctgctggtcgcgggcagcgaggagcagaccgtgctcaccgctaccgaaaacggctacggcaaacgcacgccgatcaccgagtacacgcgccatggccgcggcacgaagggtatgatcgcgatccagacgtccgagcgcaacggcaaggtcgtggctgcaacgctcgtcgacgccgaggatcagatcatgctgatcacgacggccggcgtgttgattcgcacccgcgtatccgagattcgcgagatggggcgcgccacgcaaggtgttacactcatcagtctcgatgagggtaccaagctctctggcctgcagcagatcgccgaggccgaagagggagagggcgaggccgacgaggcgtcggacggcgaagcc

SEQ ID NO: 11927 - DNA, 834 bp, Burkholderia cepacia
gtgcgcgagctcagacagcatcatccggtagcagcacttctgaaggtggccggtttggcgcgcagcacgttctattaccagctcgggacgctgaatgccgacgatcgtcacgctgatctgaaggcaaagatccggacggtgttcgaccatcacaagggacgctacggctatcgacgcgtcacggccgcgattcggcaagccgggcatctcgtcaaccacaaggccgtgcagcggctgatgcagcagttgcaactgaagtccttggtgcgcccgaagaaataccgttcctggcaaggtgaggtcggtcaggccgcgcccaacctgctgcaacgtcagttcagtgccacgcaggccaaccagaagtgggtgacggatgtgacggaattcaacgtcggcgggcagaagctgtatctgtcgccggtgatggatctatacaacggcgagatcgtggcttaccagatggatcaacgtccaaccttcaagttggtcagcgacatgctgaagaaggcgctagccaagctgcgaggcaaggacaaaccgttattgcattcggatcaaggctggcaaggcgcattcaaccggtcgtcgcaacactcgattgttgatcagattttagatattcgttcagagcttctgccggcgtcttccacccgagcgcctttcgaggccttgtgttcagtgtatgtgcaacggcttggatctctcgtgcactccatcgggataggtctgtacccttcggaaagtattgtcgcaataggccgttcgtattctcattcgtgccacgttgccatggactatgtgggtcggcgaaaaatacctgtacaccggactcga

SEQ ID NO: 11928 - DNA, 1914 bp, Burkholderia cepacia
atgaacgacacgactcacgcgaccgacgccgcacacgcgccgcattcgacgcaacaacactcgatgcgggcgctagcgatagcagccatcggcgtcgtgttcggcgacatcggcaccagcccgctgtattcgctcaaggaggcgttcagccccgcgcacggcattccgctgaccgaaggctcgattctcggcgtgatctcgctgctgttctgggcgatcatcctggtggtcggcgtcaagtacctgctgttcgtgatgcgggcggacaacaacggcgagggcggcgtgctcgcgctgatggcgctgtcgctgcgcccgctcgactccaagacccgggtcgcgggcgcgctgatggcgctcgggatattcggcgcctgcatgttctacggggacgcggtgatcacgccggcgatttccgtgatgtcggccgtcgaaggtctcgagatcgcgacgccgcacctgtcccatctcgtgttgccgatcacgatcgtgatcctgatcgcgctgttctggatccagcggcacggtaccgcgctggtcggcaagctgttcggcccgatcatggtgctgtggttcgtcgtgatcgcggcgctcggcgtgtaccacatcgttcgcgtgccgggcatcatcgcggcaatcaatccgtattacgcggcatcgttcatggccgaccacctgctgcaggcctacgtcgtgctcggctcggtcgtgctggtgctgaccggcgcggaagcgctctacgcggacatgggccacttcggtgccaagccgatccggtacgccgcgtacgggctcgtgatgccgtcgctcgtgctgaactacttcgggcagggcgcgctgctgatccagaacccgaaagcgatcgaaaacccgttcttcctgctggcgcccgaatgggggctgctgccgctcgtcgtgctgtcgacggtcgcgaccgtgatcgcgtcccaggccgtgatctcgggcgcgtattcgctgacgtcgcaggcgatccagctcggctacgtgccgcgcatgaaggtgctgcatacgtccgagctcgcgatcggccagatctacgtgccggtcgtgaactggctgctgctggccgtgatcctctgtatcgtcgtcggcttcaagagctcggacaatctcgcggccgcgtacggcatcgcggtgacggcgacgatggtgatcacgaccgtgctcgcgtgcgtcgtgatggtgaaggtgtggaactggaaccggctgctggtcggcgcgatcatcgcggtgttcctcgcgatcgacctcggctttttcggcgcgaacctgctgaaggtcgcgcagggcggctggctgccgctcggtatcggcgcgttgctgttcttcctgctgatgacctggtacaaggggcgtcacatcgtcaaggagcgcacggcggccgacggtattccgctggagccgttcctgcagggcctgctcgcccatccgccgcatcgcgtgtcgggcaccgcgatctacctgaccggcaacgacaagctcgtgcccgtcagcctgctgcacaacctgaagcacaacaaggtgctgcacgaacggaccattttcctgacgttcgtcacgcgcgacattccgtacgtgcgcgacgacaagcgccagagcgcgcgcgatgcgggcggcgggctgtacatcgtcaaggccgagtacggcttcaacgagacgccggacgtgaaggccgtgctcgaggaattcggccgcacgcacgacatgacgttcgagctgatggacacgtcgttcttcctcgcgcgcgaaacggtcgtgccgacgcatctgccagggatgtcgatctggcgcgagcgggtgttcgcatggatgcaccagaacgccgcgaagccgaccgatttcttcgcgattccggcgaaccgcgtcgtcgagctcgggacgaagatcgagatc

SEQ ID NO: 11929 - DNA, 381 bp, Burkholderia cepacia
ggtgcaggaatattgacctgcttcccatcagctacgcatttctgcctcgccttaggggccgactcaccctacgccgatgaacgttgcgtaggaaaccttgggcttacggcgagggggcctttcaccccctttatcgctactcatgtcagcattcgcacttccgatacctccagcaccctttacaaggcaccttcgcaggcttacggaacgctctcctaccatgcgagcaagctcgcatccgcagcttcggtatatagcttagccccgttacatcttccgcgcaggacgactcgatcagtgagctattacgctttctttaaagggtggctgcttctaagccaacctcctgactgttttagccttcccacttcgtttcccact

SEQ ID NO: 11930 - DNA, 852 bp, Burkholderia cepacia
atgggcggacgcatcgaggcggacagcgtgccgggcgtcggctcgaccttcgtcgtcacgctgccgctgccgctcgatcgccagccgggcgcgctccgctcgcgtgccgacggcgacgcaccgaatgcacgcgtgctgttcgtcgacgacaacccggtcaaccgttcgctcatccacgatcagctcgacgtactaggctatcaggccgatgtcgcgtcgaacgtcgcggaagcgctcgatctcgtggatcgccacgactacgcggtggtgttgaccgacctgaacatgccgggcctcgacggctacgcgttcgcgcgcgtgctgcgcgagcgcggacgcgtgcagccgattctggcggtgaccgcgcatgcggaacccgacgagttgaagctggcatgggaagccggcatcgacgagatcgtcacgaagccgacgtcgttgaagtcgctcgaacaggcgatcacgaaacatgcggggacgtggcgccggccggtgcatccgcccgtgccgtcgcgcgcggccggcccgctgccgaaagacctgcacacggtgctcgtcgacgcgacgcgacgctcgaacgccgccatcgcgcgcgcgctccaggacggcgatctgaaggttgcacgctcggagattcacagcatgcgcggtgcgttcgcgatgattggggagcgggacatttcggggctgtgcgcgtcgatcgaagcactagcgctggccggggacgcggcggcgttcgcgcgtgagttcgaacgctatcggcaaagtgcgagcgagattctcgcgcggcgtgcggcaagtgacgcgaagcaagcggccgacacgttttccaacacatcggtgatgaagcga

SEQ ID NO: 11931 - DNA, 537 bp, Burkholderia cepacia
atggccgaacttgcaaccatcgcccgcccttacgcagaagcgctgttccgcgtggccgagggcggtgacatcgccgcctggtccacgctcgtgcaagagctggcccaggttgcgcgtctgccggaagtgctgtcggtcgcgtcgagcccgaaggtgacgcgcacgcaagtagccgagttgctgcttgctgcggccaagtcgccgctcgcggccggcgccgaagcgaagaacttcgtgcagatgctggtcgacaatcatcgcatcgcgctgctgccggaaattgccgagcagttcgaggcgctcaagaacgaacgtgaaggcgcagccgacgccgagatcgtgagcgcgttcccgctgaacggcgcggatctcgacagtctcgtctcgggcctcgaacgcaagttcaagcgcaagctgaaaccgacggtcgaagtcgattcgtcgctgatcggcggcgtgcgcgtgacggtcggcgacgaagtgctcgacacctcggttcgcgcgcgcctcgcatcgatgcaggctgccttgaccgcc

SEQ ID NO: 11932 - DNA, 1371 bp, Burkholderia cepacia
atgagccgaacccggatcgaacacgcccccgacggctattacctgaatcgcacgccgctcttcgcgttcacgctgctgtgctgcctgttcgcgctgtggggcaccgccgcgaacctgaacgacgtgctgatcgcgcagttcaagaaatcgttcttcctgtccgatttcgaatcggcgttcgtgcagtccgcgttctatctcggctacttcttccttgcgattccggccgcgaccgtcgtgaagaagttcagctacaagacgacgatcctcgtcggcctgctgctctacacaaccggctgcctgctgttcttcccggccgcgtcgatggcgaagtacggaatgttcctcgtcgcgctgttcgtgatcgccgcgggcctgtcgttcctcgaaacggcgtcgaactcgtattcgacgctgatgggcccgcgcggcaccagcacccggcgcctgaacatctcgcagacgttctatccgttcggcgcgatggccggcgtctacatgggcagcttcctgatcttcaaggaaggcgacgcgtcgcatgcgcagctcgcggcgatgtcggccgccgacgcgcacacgcatcagctcgcgatgatccaggcgacgctcgagccgtacaagtggctgatcgtcgtgctcgtcgcggtgttcatcgtgtttgcgctcacgccgtacccggcctgcaagggcaacggcacgggcgcggtcacgcaccggatcgacgcgcgcggcacgctcgcgcggctgctcggcaaccggcgcttcgtcgcgggagtcgtcgcgcaattcctgtacgtcggcgcgcaggtcggcgtatggagcttcacgatccggctcgcgatgcagatcggcggcctcaccgagcgcggcgcgtcgcgctacctgctcgcgaccttcttcgcgttcttcgtcggcaagctggtcgcgacgctcgtgatgaaacgcgtcgggccggccaaggtgctgatcgtctacggcatcctgtgcatcgcgctgctcgcgtacacgatcagcgtgcacaacatcacggccgtctatgcggccgtgtgcgtgagcgtcttcctcggcccgtgctggccgacgatctacgggctgacgatcgacggcctcggcaaggacaccgaatacggcggctcgatcctcgtgatgagcatcgtcggcggcgcggtcgtgccgctgatccaggggctgatctcggatcacaccggcggcaacatgcagctcgcgttcgtcgtgccgctcgtctgcttcgtcgtgatcgtctactacggcttctactgcctgcgtcacctgccggcggcgacgcccgacgcggcggccgacggccacgcgtccacgcgctacgccgcgacgcgcaacacgtcgggagcc

SEQ ID NO: 11933 - DNA, 2070 bp, Burkholderia cepacia
atgccgccgtgcccccgtttcctcgactcgttctccggactcgacatgacgacttcgtctcccgcctccaccaccctgatggccaacgcgatccgtgcgctcgcgatggacgccgtccagcaagcgaactccggccaccccggcatgccgatgggcatggccgaaatcggcgtcgcgctgtggtcgcgccatctgaagcacaacccgacgaacccgcactgggccgaccgcgaccgtttcgtgctgtcgaacggccatggctcgatgctgctgtactcgctgctgcacctgaccggctacgacctgccgatcgaggagctgaagaatttccgccagctgcactcgaagacgccgggccacccggaatacgggatcacgccgggcgtcgagacgaccaccggcccgctcggccagggtctcgcgaacgcggtcggcatggcgctcggcgaagcgctgatggccgacgagttcaaccgtgacggcgcgaagatcgtcgatcaccacacgtacgtgttcctcggcgacggctgtctgatggaaggtatctcgcacgaggcctgctcgctcgcgggcacgctgaagctgaacaagctgatcgcgctgtacgacgacaacggcatctcgatcgacggcgacgtcgtcaactggttccacgacgacacgccgaagcgcttcgaagcgtacggctggaacgtgatcccgaacgtgaacggccacgacgtcgacgcggtcgacgcggccatcgcgaaggcgaagctgtcggacaagccgacgctgatctgctgcaagacggtgatcggcaagggcgcggcgaccaaggccggcggccacgacgtgcacggcgcggcgctcggcgcggaagaaatcgcgaagacgcgcgaagcgctcggctggaagtgggagccgttcgtgattccgcaggaagtctatgcggcctgggacgcgaaggaagccggcaagcgcgccgagtccgaatgggacgcgacgttcgccgcttatcgcgcgaagttcccggcggaagccgccgaattcgagcgccggatggcgaacaagctgccggccgactgggccgagaaggcggcagcgatcatcgccggcgcgaacgagcgcgccgagacggtcgcgacccgcaaggcgtcgcagcaggcgatcgaagggctggccgccgcgctgcccgaactgctcggcggctcggccgacctgaccggctcgaacctgaccaactggaaggcgtcgaaggcggtgcgcgcgaatccggaaggcgcgggcgtgctgctcggcaaccacatcaactacggcgtgcgcgaattcggcatgagcgccgcgatcaacggcctcgcgctgcatggcggccacaagccgttcggcggcacgttcctgacgttctccgactacagccgcaacgcgctgcgcgtggccgcgctgatgaaggtgccgtcgatcttcgtgttcacgcacgattcgatcggcctcggcgaagacggcccgacgcaccagtcgatcgagcacgtgtcgagcctgcgcctgattccgaaccacgacgtctggcgtccggccgacacggtcgagacggccgtcgcctggactcacgcggtcgccgcggatcgtccgtcgagcctgatcttcagccgccagaacctcgcgttcaacccgcgtaccgatgcgcagatcgccaacatcgagaagggcggctacgtgctgaaggactgggacgaagaaatcgtcgcgcgcaagatcatcctgatcgcgacgggctcggaagtcgaactcgcgatgaaggccgtcgagccgctcgcgcagcagggcatcgcggcccgcgtcgtgtcgatgccgtcgaccaacgtgttcgaccgccaggacgccgagtaccgcgaacgcgtgctgccgcacggcgtgcgccgcgtcgcgatcgaagcgggcgtgacgagcttctggcacaagtacgtcggcctcgaaggcggcgtcgtcgggatcgacacgttcggcgaatcggcgccggccggcgtgctgttcaagtacttcggcttcaccgtcgagcacgtcgtcgagaccgcgaaggccgtgctggcc

SEQ ID NO: 11934 - DNA, 849 bp, Burkholderia cepacia
gacctcgacggcatgacgctcgtcgatccggccaccgccccgcaacgcgacgcgtatgccgacgcgctgcacgcgttgcgcaaagccaagggcatgacggccgacgccgcgcgcgacgcggtgctcgacccgctctgccatgcgaacctgatggtgcggctcggcgacgcggacggctcggtcgcgggcgccgtgcatgcgacggccgacgtggtgcgcgcggcgatccagctgatcggcgtcgatccggcgttccggatcgtgtcgagcttcttcctgatgatgctgtgcgagccgttccatacgatcaagggcgggctgatcttctccgactgcgcgctcgtcgtcgatccggacgccggccagctcgccgagatcgcgatggccgccgccgacagcgcgcacgcgctgctcggcgaagcaccacgcgtcgcgatgctgtcgttctcgacgagcggcagcgcgcaccatgcggcggtcgacaaggtgacggccgcgaccgcgcgcgtgcgcgaactgcgcccggcgctcgcgatcgacggcgacgtgcagctcgacgcggcgatcgtcgcggaaatcgccgagcgcaagatcgcgcattcgcaggtcggcggccacgcgaacgtgctcgtgttcccgagcctcgaagccggcaacatcggctacaagctcgccgagcggatcggccgcgcaaaggccgtcggcccgctgttgcagggcttgcgccggcctgcgaacgacctgtcgcgcggctgcggcgccgacgacgtgtatcacgtgatcgcggcgaccaccgtgcaggcgcaagcggccatgcaacgggccgcgaccggcgaggtcgcacccgca

SEQ ID NO: 11935 - DNA, 876 bp, Burkholderia cepacia
gtgtattcgttgccgattaatctcttcacgattaataatttcttcaataagactttctctccggacgaggcgaaggaatttgtcgccgagctcggtgataaaactatcgaagatcctcaaacttttgaggagcaggcgctcaggtttgtcgggaaagagctctacggagcattcttcaagggctacacgacgaaacagtggggcttgcatccttcagttctgcctgcgagcattctgaaaagattgccgattcgtttcaattacgacgacaattattacgcaagcaaatttcaagggatgccgaagcacgggtatacgtacatcgtcgagaagatgattgatcacccaagcatcaaggtgcatctcggtacgaaagttgaaaaagatactcttgagagctacgatcacgtattttacagcggcccgttggacgcatggtacggcttcgaatacggtcgcctgggctatcgaacgctcgattttgttaccgagcggcacgaaggggactaccagggaaatgctgtaatcaactactgcgaagaaaatgtgccctggacgcgtatctccgagcacaagcatttttctccgtgggaggagcatgaaaagacggtgatttataaggagcacagtcggacttgcggtccggacgacgtcccttattatcctgtccgcctggtcgacgataaggagttactgaatcgctatgtcgcgttggcgcgaaaggaagaaaatacgaccttcgtcgggagattgggcacctatcgctacctggatatgcacgtaacgattggagaggcgcttgatgtcgcggagcagtatctgtccgcggttaaatcgggagttccgatgtcgccttttgtagtcgacccgctcgcg

SEQ ID NO: 11936 - DNA, 1155 bp, Burkholderia cepacia
gtgcagggcggccagatcacgatccaggtgccggccaacgaaaaggccggcaaggctgcgtacgagaaaacggtcaacctgacccgcgcgcacctcgaggaagatgcgggcaagtcgctgcatgaagacttcgccgggatgaccgggatcgacctgaaccgcgcgggcacgccgctgctcgagatcgtcaccgagccggaaatgcgcagcgcggccgaggccgtcgcgtacgcgaaggcactgcacgggctcgtcgtgtggctcggcatctgcgacggcaacatgcaggaaggctcgttccgctgcgacgcgaacgtgtcggtgcgcccggtcggccaggagaagttcggcacgcgcgcggaaatcaagaacctgaactcgttccggttcctcgaggaagcgatcaattacgaagtgcgtcggcagatcgagctgatcgaggacggcggcgaagtcgtgcaggaaacgcgcctctacgatccggacaagcgcgagacgcgttcgatgcgcagcaaggaagacgcgcacgattaccgctacttccccgatcccgacctgatgccgctcgtgatcggccaggactggatcgagcgcgtgcagtccggcatgccggaactgccggccgcgatgcagcagcgcttcgtcgacgagtacggcgtgtccgcgtacgacgcgggcgtgctgacgtcgagcaaggcgatggccgcgtacttcgaggcggtggtcgcgaaggccggcgcggcgaatgcgaagatcgccgcgaactggctgatgggcgacgtgtcgtcgcaactgaaccgcgacggcatcgagatcgacgcgattcccgtctcggccgcgcagctcgcgctgctgctgcagcgcatcgccgacggcacgatctcgaacaagatcgcgaaggaaatcttcgcgacgatctgggacgagaaggcgaccgacgaaggtgcggccgaccgcatcatcgacgcgaagggcctgaagcagatctccgacaccggcgcgctggaagcgatcatcgacgaagtgctcgcggcgaacgcgaagtcggtcgaggaattccgcgcgggcaaggaaaaggcgttcaacgcgctgatcggccaggcgatgaaggcgaccaagggcaaggccaatccgcagcaggtcaacgagctgcta

SEQ ID NO: 11937 - DNA, 270 bp, Burkholderia cepacia
gtgatgaccgcgaacgtgtcgaagggccgcgcgctgcgcacggtgctcgcgcggctcggcgtcgacaccggtcactgcatcgcgttcggcgacaacatgaacgacatcgacctgctcgaaacggccggccatgcattcatgatgaacaacgcgaaccccgacctgatcgcgcggctgccgcacgtcccgcggatcggcaacaacttcgacgcgggcgtcgcccgccacctgcgcacgctgttctcgctggaagacgacgtcgtcgcgtcc

SEQ ID NO: 11938 - DNA, 981 bp, Burkholderia cepacia
atggccgccccgggagcgccggcggtgccgccgcacgttgcacgtcgcgcggtcgaatggtgggtcgaccggcaatccggccgtaccgacgacgcattcgtcgccgcgctcgcgcgctggcgcgcggaagatccggcgcacgacgcggcgtggcgtcacatcgaagcgatgcagggccggttcggccggctggcggccgggctcgacacgcaagccgcgcacgcggcgctgttgccgaagcgggcaggccgccgcgcggccgcgaaggcgctggccgtgctgctgttcgcgggcggcgccgcatggatggccgaacccgcgcggcgcgcggcgatctggccggccgacctgcgcacggcggtcggcgagcggcgcacggtgacgctcgcggatcgcacggtcgtcgtgctcgataccgacacggcgctcgacgtgcgcttcgacgatgcggcgcgccgcctgcgcctgctgcgcggcacgatcatggtgaccagcggccacgacgatcgtctgcccgcgcggccgctcgtcgtcgtgaccgcgcaaggtgaactgcggccgctcggcacgcgcttcgcggtgcggcagcgcgacggcgcgacgcgcgtcgaggtgttcgccggcgccgtccaggtgcagccggtcgatgcgtcggccggcatgcgcgtgatcgcggccggggagggcgcggatttcacgcgcgatgcgatcgacgcgccggcgccgctcgatccgtatgcagccgcatggacgaacggcatgctcgtcgcgtcgcgcatgcggctggccgatctcgtcgccgagctcgaccgccatcgccgcggcagcctgcgctgcgatccggccgtggccgagctgcgcgtgtcgggcacctatccgctcgacgatccgcagcgcgtgctcgatacgctggcggcgacgctgccgatcgacgtccactacctgacgcgttactgggcgaccgtcgtgccggcccgttcg

SEQ ID NO: 11939 - DNA, 1200 bp, Burkholderia cepacia
  misc_feature (1153)..(1153): n=g, a, t or c
actccgctcgcatcgcccgacctgctcggcgtgacgggcggcgcccagctcggcctgctcgcggcgatgctggtgccggcgctggccggcgtcgcgtcggtgccgctgctgttcgtgtgcgggctcgcggcggctgcgtgcgcgatcgtcgcggcgggtggctggcgcgcgacgccgttgcggctcgtgcttgccggcagtgtgtgcatgctgctgttcgccgcgctgtcgacgctcgtgctcgcgttcttcgaacagaacatcgcgggcgccgcgctgtggaccaacggcagcctgtaccagccgggcgcgacgggccttgcgctcgccgcgcgctggctcgtcgtgccgctcgccgcgctgccgttcgtgatccggccgctgaatccgctcgcgctcggcgacgatgcggcggccgcggccggcgtgcgcgtcgatgcgacgcggctcaccgcgacgatcgtcgcggtcgcgttcacgagcgtggccgtcagcatcgcgggcccgctgtcgtacgtcggcctcgtcgcgccgaacctgctgcgccaggtgcgcggcgcgcgcgcggcgcggctcggcgtgctggtgccgttgtcggcgctcgccggcggcgcgctggtgctggtcaccgacagcgcggtgctcgcgtcgggcctcgacgcgacgctgtcgaccggcgtcgcgatcgcgctggtcggcacgccgctgatgctcgcgatgatccggcgcggcgccgcgtggtcgggcgtgctgcatgcggatgccgaacgcgcggcgggcggcggcgcgacgcggctcgtcggctggctcgaacggctcggctggccgctgcgcaccgcgttgttcgtcgtggcgggcgtgctggtggtatgggtcggcgtgtcggccggccccgagtggctgtcgcccgcgcgctggttcgccgcactgtccggtcacgatgcgctcgcgcgcatgctgatcgacctgcgcatgccgcgcctgctgtgcgcgctgctcgccggcgcgttgctggcggtcagcggcgtcgcgatgcagagcgtcgtgcgcaatccgctcgcgggccccgaagtgctcggcgtcacgcagggcgcggggctcgtcacgctgttcgcgttgtcgacgtggccgctgatgggccacgtgacgctgncggcctttttgggcccggagccccgttttttctactatgacatggtg

SEQ ID NO: 11940 - DNA, 765 bp, Burkholderia cepacia
atgacgacgcgcagcagcgtggggcccaagcggccgtcgcttcccgcgtacgtcgcccgcgcggccgcgctcgcgctgttgctcgtgctgttgttgcgcccggcctggctgcagggtctgttcgcgccgttcgcggacaacggcgcgccggtgatctacgatcgcgcgagcctgctcgatctcacgctcgcgcatctcggcacggtcgcgctgtcgagcctgatcggcacgatcgtcgcggtctcggcgggcatcgcggtcacgcgtccgttcggcgccgatttcctgccggtcgcgcgcagcgtcgtcgatatcggccagaccttcccgccggtcgccgtgctcgcgctcgcggtgccggcagtcggcttcggattgaaacccgtgctgatcgcgctcgtgttgtacgggctcctgccggttttcgaaagcacgatcgcggggctcgaggacgtgccgcgcgacgtcgtcgacgccgcacgcgggatggggatgagcgggtggcagcaactggtgtccgtcgagctgccgctcgcgttcccggtgatcgtcaacggcatccgcctcgcggtcgtgatcaatctcggcaccgcgacgatcggctcgacggtcgccgcgcgcgggctcggcgacgtgatcatcgcgggcctgcagacgtcgaacaccgcgttcgtgctgcaaggcggcgtgatcgtcggcttgcttgcggtgctcgtcagcgatgcgatcggcgcgattgcgcgggtagcgagcgcgcggcgcgcc

SEQ ID NO: 11941 - DNA, 759 bp, Burkholderia cepacia
atgagcacgcctttgatcggaggagacacaatgaaacgaaaactggccattacgggggccgcagcgctcgcattcacgttcgcgggcggtacggcacatgcacaatccgcaggtgatttctacgtcagcaccggctggctgcaccttgcgccgcaggacagcagcgacccgctgttcgtctacggcgtaggcggcacgcccgtcaatcagtcgattcccaacaccggcgccggcatcagcgatgccgacacgctcgcgctggcgaccggttacttcgtgaccgaccatatcgccaccgagttcatcgccggcatcccgccgaagttcgacatcaccggcaagggccagttctcgaagttcggtacgcttggccgcgcgtaccagtggagccctgcgctcctcctcaagtactacttcaacgacgccaacgcgaagttccgtccgtatgtcggcgtcggcgcgacgtatatctggttcaccggcgcgaagatcacgaacagcacgttcgagaacggcgtgctcggcggcccgaccagcgccacgaccagcaaccagtgggcgcccgtgttcaacgccggcttcacgtacaacttcacgaagcactggttcgccggcttctcgatgtcgtacatcccggtcagcgtgaccgcgaccttcacgacggcgcgccggaccccggtcggtacgctgacggaaacgtcgaaggcccacatctcgctgaacccgatcgtgacgtacctgaacgtcggctaccgcttc

SEQ ID NO: 11942 - DNA, 1197 bp, Burkholderia cepacia
atgcgtgatgcctttctcgcccaggtgcgcgggacgctcgaccagatccgcgcggacggtttttacaagaccgagcgcgagatcgcgagtccccaggcggcagccgtgcggctcgccggcggtgccggcgtgctcaatttctgcgcgaacaactatctgggtctggcgaacgatccgcgcctgctcgacgcggcgaaggccggcctcgaccaggacggcttcggcatggcatcggtgcgcttcatctgcggcacgcaaaccgtccacaagcaactggaaagcgcgctggccgcgtttctcggcaccgaggacagcatcctctattcgagctgcttcgatgcgaacggcggcctgttcgaaacattgctcgacgagaacgacgcagtgatcagcgacgagctgaaccacgcgagcatcatcgacggtattcgcctgtgcaaggcgaagcgtttccgctacaagaacaacgatctcgccgacctcgaggcgaagctcaaggaagccgatgccgcgggcgcgcggcacaagctgatcgccaccgacggcgtgttctcgatggacggcatcatcgccgatctcaaaggcatctgcgatctcgccgatcgctacggcgcactggtgatggtcgacgattcgcatgcggtcggcttcatcggcacgcacggccgcggcacgcccgaacactgcggcgtcgaaggccgcgtcgacatcatcacgggcacgctcggcaaggcgctcggcggcgcctcgggcggttatgtcgccgcgcgtcacgaggtgatcgagctgctgcgccagcgctcgcgtccatatctgttctcgaacacgctcacgccgagcatcgccgcggcgtcgctgaaggtgctggaactgctcggcagcgacgaaggcgcgaagctgcgcgagcgcgtgcgcgagaacggcgcgcggttccgcaagcagatgaccgaagccggcttcacgctcgtgcccggcgcgcatccgatcatcccggtgatgctcggcgacgcgcagctcgcgacgaacatggccgacaggctgctcggcgaaggcgtctacgtgatcggcttctcgttccccgtcgtgccgcgcggccgtgcgcgcatccgtacgcagatgagcgccgcgcatacgcccgagcagatcgaccagacggtcgccgcgttcgtgcgcgtcggcaagtcgctcggcatcatc

SEQ ID NO: 11943 - DNA, 1074 bp, Burkholderia cepacia
atgcaaatattttatgaagcacgcgcgtgcggccgccgcttcgccgccggccgccgccgccgcgtgaagttcgaacgattcctcgatagatatttcgcacgcgaaacacattaccgactatatttcgcatacgaaataactgcccgagcgaggacggccatgacctccgaacccatcgaattttccgccgccgacggctacgtactgcacggcacgctgtggtcgccggacgcgccgccgcgcgcgctggtcctgatccatccggcgacggccgtgcccgagcggctgtatgcgggcttcgcgcgcttcctgaccgagcgcggtttcgcggcgctgacctacaactatcgcggcatcggcgcatcgcggcccgcgcggctgcgcacgctgcaggcccgcatgcgcgactggatggagctcgacgtgggcgccgcgaccgcgtgggcccggcacgcgcatgaagggctcccgttgctggcggtcggccacagcgtcggcggacacgcgatcgggctgtccggcgcgacgacgcatctgcgcgcggccgtgctcgtcgccgcgcatgcgggcagcacgcggctgatcgcgcagccggccgaacgcgtgaaggtgcggctgatcctgcgcgtgctcggcccgctgacgtccgcgctgctcggctacgtgcccggcaagcggctcgggctcggcgaggatctgccggccggcgtgttccgcgaatggagccgctggacgacgctgccgcactacttcttcgacgatccgacgctcggtgcggccgagcgcttctcgaagcagcagttgccgatcctcgcgctcggcttcgacgacgatccgtgggcgaatccggccgcgatcggcctgctggtaagctatctgacccgcgcgaaggtcgaacgccgccagatcgatccgcgtgcggcgggcagcggcccggtcgggcacatgggcttctttcgcagccggcccggcaccgtgctgtggcccgacgtcgccgactggctcgcgcaggcgctcgacacgccgcgcgccgcgggccgcccctccctttccattgcagccgggaacccagct

SEQ ID NO: 11944 - DNA, 1014 bp, Burkholderia cepacia
atgtcgacacccgtgaaccgccagctgctgctgaagacgcgcccggaagggcgggtcggccgcgaccatttttcgctcgtcgagacgccggtgccggcgctcgccgacggcgaggtgctcgtgcgcgtgctgtacctgtcgatggacccgaccaaccgcgtgtggatgagcgacgtgccgcagtacctgccgcccgtcgcgatcggcgaggtgatgcgcgcgctcgggatcggccgcgtggtcgcgtcgcgccatgcgggtttcgcggaaggcgatctcgtgcaggggctggtcggctggcaggactacgcggtcgtgccggccgagcaggccgcgcaactcgtgaagctgccggcgcagtcggggctgccgctgccgaccctgctcggcgcgtgcgggatgagcgggctgaccgcgtactacgggctgaccgatatcgcgccggtgcaaccgggcgaaacgctcgtcgtgtcggcggcggccggctcggtcggctcgatcgccgggcagatcggcaagatccacggcgcgcgggtggtcggcatcgcgggcggcgcggacaagtgccgttacctgaccgacacgctcggcttcgatgcggccgtcgactacaaggccgacgatttccgccagcaactgaaggcggcgacgccggacggcgtgcacgtgaacttcgagaacgtcggcggcgaggtgatgcgggcggtgctgtcgcggatggtgatcggcgggcgcgtcgcgctgtgcggcgtgatctcgaactacaacagcggccgcgcggcggacgacgtcggcgtgctgatctcgaagcgattgacgatgcgcggctttctgatcctcgactaccgcaagagccgcgaagccgtgcagacgctcgcgggctggctgcgcgacggccggctcaaggccgaggaaaccgtggccgacggtctcgaaaacgcccctgacgtgctgaaccgcctgttcgacggcgaccatcgcggcaagctcgtgctgcgcgtcgatccgcacgcg

SEQ ID NO: 11945 - DNA, 1767 bp, Burkholderia cepacia
atgcagggcagtggctgcatgtcgcgacaacccaactgtgagggcatcatggcaagacagacgatggcggaatacctggcgaagacgctcgcggcagcgggcgtcgagcgcatctggggcgtgacgggcgacagcctgaacggcctgtcgttcagcctgagccagctcggctcgatccgctggatgcacacgcggcacgaggaaagcgcggcgttcgcggccggggccgacgccgcgtcgaccgggcggctcgcggtgtgcgcgggcagttgcggcccaggcaacctgcacctgatcaacgggctgtacgactgccaccgcaatcaccagccggtgctcgcgatcgccgcgcacatcccgtccaccgagatcggtctcggctatttccaggaaacccatccgcaggagctgttccgcgaatgcagccacttcgccgaactcgtgacgaacgcgtcgcagttcccgcgcgtgctggcgcgcgcgatgcgcaccgcgatcgacgagcgcggcgtggcggtgatcgtgctgccgggcgacatcgcgctcggcgacggccccgacgaagcgcccgcgtggagcgacgcggcgccgccggcgatcctgccggccgatgccgacctcgaccggctcgcggcgctgctcaacgggtcggacgcggtcacgctgctgtgcggcagcggcacgcagggcgcgcacgacgaggtggtcgcgctggccgacacgctcggcgcgccggtcgtgcatgcgctgcgcggcaagcagttcgtcgaatgggacaacccgttcgacgtcgggatgacggggctgatcggtttcagttccggctatcacgcgatggagtcgtgcgacacgttgctgatgctcggcacggatttcccgtaccggccgttctatccggctcacgcgaagatcgcgcagatcgactggaagggctcgcagctcggtcatcgcgcgccgctcgcgctcgggctggtgggcaccgtgaaggaaacgatcgcggcgctgctgccgcggctcacgcgcaagacgcagcggcgcttcctcgagaatgcgctgaagcactacgcggccgcgcgcaaggggctcgacgatctcgcggtggccgagccgccgggccgcgcgatccatccgcagtacctgacgaagatcatcgacgaagtcgcggccgacgatgcgatcttcacggccgacgtcggcacgccgacgctttgggcggcgcgctacctgacgatgaacggcaagcggcaactgcacggctcgttcaaccacgggtcgatggcgaatgcgatgccgcaggcgctcggtgcgcaaggtgcgcatccggggcggcaggtcgtgtcgctgtcgggcgacggcgggctgtcgatgctgctcggcgatctgctgagcgcgcgccagctcaagctgccgatcaagatcgtcgtgtacaacaacagcctgctcggcttcgtgtcgatggagctgaaggcggccggctatctcgacacgaacgtcgacctgagcccgaccgacttcgcggcgatcgcgaagggcgccggcatcttcagcgtgcgcgtcgagcattcggagaacgtcgaacacgcattgcgcaccgcgttcgagcatgacgggccggcggtggtcgacgtcgtcacgtcgaagtacgagctcgcgatgccgccgaagatcgagctcgcgcatgcgaagggcttcagcctattcatgctgcgcgcgattctcagcgggcgcggcgacgagatcgtcgaactggcgagaaccaacttgcgg

SEQ ID NO: 11946 - DNA, 1230 bp, Burkholderia cepacia
atgagcctgtcagagccattgcgtctgcatgtgccggagcccaccgggcgcccgggctgcaagacggacttttcctatctgcatctatcgccggccggcgccgttcgccgcccgccgatcgacgttgccgcggcggacaccgccgatctcgcccgcagcctcgtgcgcgtgctcgacgacaacggcaaggccgttggcccgtgggcacccgatctcgacgatgcgcgactgatcgccgggctgcgcgcgatgctcaagacccgcattttcgacgcgcgcatgatgatcgcgcagcgccagaagaaaatctccttctacatgttgagcctcggcgaagaggcgatcggcaccgcgcacgcgatggcgctgcgcgacggcgacatgtgctttccgacctaccggcagcagagcatcctgatcgcgcgcgacgtgccgctcgagcggatgatctgccagctgatgtcgaacgaaggcgatccgctgaagggccgccagctcccggtgatgtactcggaccgcgaagccggcttcttctcgatttccggcaacctcgcgacgcagttcatccaggcggtcggctgggcgatggcgtcggcgatcaagggcgacacgaagatcgcgtccgcgtggatcggcgacggcgcgacggccgaagccgatttccacaccgcgctcacgttcgcgcacgtgtaccgcgcgccggtcgtgctgaacgtcgtcaacaaccagtgggcgatctcgacgttccaggcgatcgcgggcggcgagggcacgaccttcgccgggcgcggcgtcggctgcgggatcgcatcgctgcgcgtcgacggcaacgacttcctcgcgatctacgcggcgtcgagctgggcggccgaacgcgcacgccgcaatctcggcccgacgctgatcgagtgggtgacctaccgcgcgggcgcgcattcgacgtcggacgatccgaccaagtaccggccgagcgacgactggtcgcatttcccgctcggcgatccgatcgagcgcttcaagcgccacctgatcgtgaagggcatctggtcggacagcgcgcacgacgcgttgacggccgagctcgaggccgaggtgatcgccgcgcagaaggaagcggagaagtacgggacgctcgccgacgaccggattccgtcgccggcctcgatgttcgacgacgtgtacaaggagctgcccgcgcacctgcgccgtcagcgccaggaactgggagcg

SEQ ID NO: 11947 - DNA, 1929 bp, Burkholderia cepacia
gtgatccgtttcaatcagttcagccttgcgcgcggcacgaagccgctgttcgagtcgacctcgttcgtgctcaatcccggcgagaaagccggcctgatcggcgcgaacggcgccggcaagtcgacgctgttttccgtcctgcgcggcgagctgcactcggacgccggcgatttctcgatgccgccgtcgtggcggatcgcccacgtgtcgcaggaaacgcccgcggtcgaccgctcggcgctcgactacacgctcgacggcgataccgcgctgcgcgagatcgaggcccgcatcgccgccgcatcggccgcgcatgacggcgccgccgaagccgacgcgcacgcggcgttcgccgatgccgacggctacaccgcgccggcccgcgccgaagcgctgctgctcggcctcggcttcacgctcgcgcagacgcgcgaatccgtcgcgagcttctccggcggctggcgcatgcggctgaacctcgcgcaggcgctgatgtgccgctccgacctgctgctgctcgacgaaccgacgaaccacctcgacctcgacgcgatcgtctggctcgaagactggctgcatcgctaccccggcacgctcgtcgtgatttcacacgaccgcgaattcctcgattcgatctgcaacgtcacgctgcatctggaaaaccgccaggtgaagcgctacggcggcaactactcgcagttcgaagtgctgcgcgcgcagcaactggcgctgcagcaaagcgcgtacgaaaagcagcagaagacgatcgagcacctgcagagcttcgtcgaccgcttcaaggccaaggcgaccaaggccaagcaggcgcaaagccggatgaaggcgctcgagaagatggagctgatcgcgcccgcgcacatcgcgtcgccgttcacgttcgaattccgcacgcccgatgccgcgccgaacccgatgatggtgatggaggacgtccgctgcggctaccatgccgacgacggaacggacatcccgatagtcgagcgcgtcgcgctgtcgatccagaacggccagcgcatcggcctgttgggcgcgaacggccagggcaagtcgacgctgatcaagacgctggccggcacgctcgcaccgctgtcggggcgcgtgcgcgacggcaaggggctgacgatcggctatttcgcgcagcaccagctcgaaacgctgcgcgaggacgactcgccgctcgcgcatctggcgcggctcgcgcccgacacgcgcgagcaggaattgcgcgacttcctcggcggcttcaatttctcgggcgacatggcgaccagcccggtcgggccgttctcgggcggcgaaaaagcccgcctcgcgctggcgctgatcatctggcagaagccgaacctgctgctgctcgacgaaccgacgaaccacctcgacctcgaaacgcgccacgcgctgacgatggcgctcgcgcagttcgaaggcacgctgatcctcgtgtcgcacgatcgccacctgctgcgcgcgacgaccgaccagttcatgctggtcgcgaagcaccggctgcagccgttcgacggcgacctcgacgactaccgcgactggctgctgcagcacgcggccgagcagcgcgcggccgccaaggccgacagcgcggccgccgcgggcgccgatccgggcgtcaaccgcaaggatcagaaacgccaggcggccgaggaacgccagcggctgtcgcagctgaagaagccgctgcagaaccgcatcacgaagctcgaaaaggaaatggaaacgctgcacgcggagaaggcgcgcctcgatgcgttcgtcgccgatccggccagctacgaggccgcgcgcaagacggagctgaccgaggcaatccgcaagctcggcgaggtcaacacccggctcgagacggtcgaggcggactggctcgccgtgcaggaagaactcgagcagatcggc

SEQ ID NO: 11948 - DNA, 1272 bp, Burkholderia cepacia
atgaaagcagagtcgaatggccggcccgccgccggcgccaagctgtccggccagcccgcgctgcagcagacgctcgggacctgtcaactgtggggcatcgcggtcggcctcgtgatttccggcgaatacttcggctggagctacggctgggcgagcgccggcacgctgggtttcgtaatcaccgcgctgttcgtcgcggcgatgtacaccaccttcatcttcagtttcaccgagctgacgacgtcgattccgcatgcgggcggcccgttcgcgtatgcgcgccgcgcgttcggcccgaccggcggctatctggccggcgccgcgacgctcgtcgagttcgtgttcgcgccgcccgcgatcgcgctcgcgatcggcgcgtacctgcacgtgcagtttccggggctcgaaccgaaacacgcggcgatgggcgcgtatctcgtgttcatggcgctgaacatcgtcggcgtgcagatcgcggcgaccttcgagctcgtcgtcacgctgctcgcgatcttcgagctgctggtgttcatgggcgtcgtgtcgccgggtttcgcgtggagcaatttcacgaagggcggctggtcgggcgccgatcacttcagcctgggcgcgttccacgggatgttcgcggcgattccgttcgcgatctggttctttctcgcgatcgaaggcgtcgcgatggccgccgaggaagcgaagaacccgaagcgctcgattccgatcgcgtacgtggccgggatcctgaccctcgtggcgctcgcgatcggcgtgatggtgttcgccggcggcgcgggcgactggaccaagctcgcgaacatcaacgatccgctgccgcaggcgatgaagtacatcgtcggcgcgaacagcggctggatgcacatgctcgtgtggctcgggctgttcgggctcgtcgcgtcgttccacgggatcatcctcggctattcgcgccagatcttcgcgctggcccgcgaaggctacctgcccgaatggctcgcgaaggtgcatccgcgcttcaagacgccgtaccgcgcgatcctcgcgggcggcgtggtcgggatcgccgcgatctacagcgacgagctgatccagttcggcgggcagacgctcaccgcgaatatcgtgacgatgtcggtgttcggcgcgatcgtgatgtatatcgtgagcatggcggcgctgttcaagctgcgccgctcgcagccgaacctggagcgaccgttccgcgcgccgctgtatccgatcttcccggcattcgcgatcctcgcggcgctg

SEQ ID NO: 11949 - DNA, 192 bp, Burkholderia cepacia
atgaaggcttccgaacttctccagaaagaccaggccgcgctcaacaaggagctggcggacctgctgaaggcgcaattcggcctgcgcatgcaactcgcgacccagcagctcacgaacacgagccagctgaagaaggttcgtcgcgacatcgcacgtgtgcggaccgtcatgactcagaaggcgaaccagaaa

SEQ ID NO: 11950 - DNA, 2321 bp, Burkholderia cepacia
atgaccacgctgtcgcccgaggcctttgccggccacaccccgatgatgcagcagtacctgcgcatcaaggccgatcatccggacacgctcgtcttctaccggatgggcgacttctacgagttgttcttcgaggatgcggaaaaagcggcgcgcctgctcgacctgaccctcacgcagcgcggcgcgtcggccggcacaccgatcaagatggccggcgtcccgcatcacgcggtcgagcaatacctggcgaagctcgtgaagatgggcgaatcggtcgcgatctgcgagcagatcggcgatccggccacgtcgaagggcccggtcgaacgcaaggtcgtgcgcgtcgtcacgcccggcacgctgaccgatgccgcgctgctgtccgacaagaacgacgtctacctgctcgcgatgtgcaccggccacaacaagcgtggcgtcgcggtcaatatcggcctcgcatggctgaacctcgcgagcggcgcattgcggctcgccgaaatcgagtccgagcagcttgccgccgcgctcgaacgcatccggccggccgaaatcctgacgccggacggtgcaaccgacgccattccggccggcgcgggcgccagcaagcgcgtgccggcctggcacttcgacatcgcgtcgggcacgcagcgcctgtgcgaccagctcgatgtcgcgagcctcgacggattcggcgcgcattcgctgacgagcgcgtgcggcgcggccggcgcgctgctgctctatgccgcggccacgcaaggccagcaactgcggcacgtgcgcagcctgaaggtcgagaacgaaaccgaatacatcgggctcgacccggccacgcgccgcaacctcgaattgaccgagacgctgcgcggcaccgagtcgcccacgctgtattcgctgctcgacacctgctgcacgacgatgggcagccgtctgctgcgtcactggctgcatcacccgccgcgtgcgtcggtcgccgcgcagtcgcgccagcaggcgatcggcgcgctgctcgacgcgccggccaacgcgagcctcgatgcgctgcgcagcgcgctgcgccagatcgccgacgtcgaacggatcaccgggcggctcgcgctgctgtccgcgcgcccgcgcgacctgtcgagcctgcgcgacacgttcgccgcgctgccggcgctgcgcgagcgcatcagcgcgatcgtcgcgaacgccgatgcgctcgcgcgcgtcgacgcggcgctcgcgccgcccgccgaatgcctcgacctgctgacgagcgcgatcgccaccgagccggccgcgatggtgcgcgacggcggcgtgatcgcgcgcggctacgatgccgagctcgacgagctgcgcgacatttcggagaactgcggtcagttcctgatcgatctcgaagcgcgcgagcgcgcgcgcaccggcatcgcgaacctgcgtgtcgaatacaacaaggtgcacggcttctacatcgaggtcacgcgcggccagaccgacaaggtgcccgacgattaccgccgccgccagacgctgaagaacgccgagcgctacatcacgccggaactgaagaccttcgaggacaaggcgctgtccgcgcaggaacgcgcgttggcgcgcgagcgcgcgctgtacgactcggtgctgcaggcgctgctgccgttcatccccgaatgccagcgcgtcgcctcggccctcgccgagctcgacctgctcgccgccttcgccgaacgcgcacgcgcgctcgactgggtcgcgccgaccttcaccgacgagatcggcatcgaaatcgaacagggtcgccatccggtcgtcgaagcgcaggtcgagcagttcatcgcgaacgactgccggttcggtcccgaacgcaagctgctgttgatcaccgggccgaacatgggtggtaagtcgacgttcatgcggcagaccgcgctgatcgcgctgatggcgtacgtcggcagctacgtgccggcgaagtcggcctgcttcggcccgatcgaccggatcttcacgcgcatcggcgcggccgacgatctcgcgggcggccgctcgaccttcatggtcgagatgaccgaagccgcggcgatcctcaacgacgcgacgccgcaaagcctcgtgctgatggacgagatcggccgcggcacgtcgaccttcgacggccttgcgctcgcctgggccatcgcgcgccacctgctggcgcacaacgcgtgctacacgctgttcgcgacgcactacttcgagctgacgcaactgccggccgagttcccgcaagcggcgaacgtccatctgtcggccgtcgagcacggccacggcatcgtgttcctgcacgcggt

SEQ ID NO: 11951 - DNA, 1152 bp, Burkholderia cepacia
atgaagaagcacgtcatttttgccgccgcgctcgctgccttcgccgcgccggcctttgccgagaccagcgtgacgctgtacggcctgatcgacgaaggcttcaattacacgaacaacgtcaacgtcaatggggtcggaaagacgaattaccagctcgcgagcgggtatgcgcagggcagccggtggggcctgaagggcagcgaggatctgggcggcgggctgaaggcgatattcacgctggaaaacgggttcgacgtgaacaacggccggctcggccagggcggccgcatgttcggccgtcaggcgttcgtcgggctgtccgaatcgcgcttcggtacgctgacgttcggccgccagtacgattccgtcgtcgactatctcgcaccgctgaccgcgaacggcaactggggcggcacgctgttctcgcacccgttcgacaacgacaacacggacaactcgttccgcgtcaacaacacggtcaagtacgcgagcgccgactggaacggcctgacgttcggcggcacgtacagcttcagcaacagcacgggcttctcgaacaaccgccagtacagcatcggcgcgcagtattcgctggccgggctgcaggtcgcggccgcgtacctgcaggcgaacaacccgggcatcggcagcgcgggcgcgatcgcggccgacgacgcgaacttcgtcgccgaccggctgcgcatcttcggcggcggcgtcaactacacgttcggcccggccacggtcggcttcgtctatacgaagaccgacgtgaagaacccggtatcgacggtctacctgccggcgtcgacgttcgccggcctcgggctgaccgcgacgaagttccagaatttcgaggtcaacggcaagtaccagctcacgcccgatttctatctcggcgcgcagtacgtgtacacggacggcaagtacgatgcggcggccggctcgttcaagccgaagtaccacacggtcggcctgatggccgactacagcctgtcgaagcgcaccgacgtgtacctgcagggtgcttggcagaaggtggccggcgacaagacgggcacggcggccgacggcggctatgtcgtcgggacggatggcccgtcggcatcggcgaaccagttctcggtgcgcgccgcgattcgtcacaagttc

SEQ ID NO: 11952 - DNA, 381 bp, Burkholderia cepacia
atgctgtgggtcagcctcggcgtgatcgtcgtgttcggtggcgccaccctcgtcctgcatgacgagaaattcattcaatggaaaccgactgtgctgtactggctgtttgcgatcgggttgctcgccgcgcgttatgcgttcagcaagaacctgatcgagaagatgatgggcaagcagctcacgctgccgtcccccgtgtgggacaagctgaacctcgcatgggcgctgttcttcgcggtgctcggcgtcgcgaacctgtacgtggtgcacaacttcaccgaatcgcaatgggtgaacttcaagctgttcgggacgacgggcgcgatggtcgtattcatcatcctgcagagcctgtggctcacgaagtacctgaaggacgag

SEQ ID NO: 11953 - DNA, 525 bp, Burkholderia cepacia
gtgaatcgacacggacacattctggaagaagcgaacatgagacacatcatttccgtcctgctggagaacgaaccgggcgcgctgtcgcgcgtggtcggcctgttttccgcacgcggctacaacatcgaaaccttgacggtggcgccgaccgaagatcaatcgctgtcgcggctcaccatcgtttccattggctccgacgacgtgatcgaacagatcacgaagcatctgaaccgccttatcgaggtggtgaaagtggtggacctgaccgacggtgcacacatcgaacgcgagctgatgctgatcaaggtacgtgcagtgggcaaggagcgcgaagaaatgaagcggatgtcggacattttccgcggccgcatcatcgacgtgaccgagaagacctacacgatcgaattgacgggcgcgagcgacaagctcgacgcattcatccaggggctggacgcgggcgcgatcctcgagaccgtgcgcaccggcagctccggcatcggacgcggcgagcgcatcctgaaggtg

SEQ ID NO: 11954 - DNA, 1509 bp, Burkholderia cepacia
atggactttagcataaaaggctgtgattggagcaaaggcgaggccaaggggttcctgaccgggaagtccgactgcatcgtgctcggcatcttcgaggcgcagaccctgtcgggcgcggcgctcgacatcgacacggccaccaagggactgatctcgcgcgtggtgaaggccggcgacatggacggcaagcgcggcaagacgctgttcctgcacgaagtgtcgggcatcggcgcgtcgcgcgtgctgctggtcgggctcggcaagcaggatgctttcaatcagaaagcctataacgatgcggtgacggccgcctggcgcgcgctgctggcgaccaaggtcgtccaggtcacgttctcgctcgcgcaactgccggtcgacgaacgcagctccgactggggcgtgcgcgccgcgatcctcgcgctgcgcaacgagacctaccgcttcacgcagatgaagagcaagccggaaccggcgtcgcacacgctcaagcgggtcgtgttcagcgtcgacccggcggacgaaaaggccgcgaaggtcgcggtcaagcaggccgtcgcgctcgcgaacgggatggatctcacccgcgacctcggcaacctgccgggcaacgtctgcacgccgacctatctcggcaacaccgcgaagaagatcgcgaaggattggggcctgaaggccgaagtcctcgggctcaagcagatccaggcgctgaagatggggtcgttcctgtcggtcgcgcgcgcgtcggtcgagccgccgcagttcatcgtgctgcactaccagggcgccgccgcgaaggccgcgccggtcgtgctggtcggcaagggcatcacgttcgatacgggcggcatctcgctgaagccgggcgagggcatggacgagatgaagtacgacatgtgcggcgcgggctcggtgctcggcacgatccgcgcggtcgccgagatgggcctgaagatcaacgtcgtcgcgatcgtgccgacctgcgagaacatgccgggcggcaatgcgacgaagccgggcgacatcgtcaccagcatgaagggactgacgatcgaggtgctgaacaccgacgccgaaggccgcctgatcctgtgcgacgcactcacgtacgccgagcgtttcaagccggccgccgtgatcgacgtcgcgacgctgacgggcgcctgcgtgatcgcgctgggcggccacaacagcgggctgttctcgacgaacgacgcgctcgcgggcgaactgctcgacgcgtcgcgcgaggcgaacgacccggcatggcgcatgccgctcgacgacgagtaccaggatcagctgaagtcgaatttcgcggatctcgcgaacatcggcgggcgcccggccggcgccgtgacggccgcgtgcttcctgtcgcgcttcaccgagagctacccgtgggcccacctcgacatcgcgggcaccgcgtggaaggccggtcccgcgaagggcgcgacgggccgtccggtgccgttgctcgcgcagttcctgatcgaccgcgccggccag

SEQ ID NO: 11955 - DNA, 366 bp, Burkholderia cepacia
atgatccagaccgaatctcggctcgaagtagccgacaacacgggtgcacgtgaagtcctgtgcatcaaggtgctcggcggctcgaagcgtcgttatgccggcattggcgacatcatcaaggtgagcgtcaaagaggcaacgccgcgcgggcgcgtgaagaaaggcgaaatttacaacgccgtggtggtccgcaccgccaagggcgtgcgccgtcaagacggctcgctgatcaagttcgacggcaacgccgctgtgcttttgaataacaagctcgagccgatcggcacccgtattttcgggccggtgacgcgtgagctgcgtagcgaacgattcatgaagatcgtttcgctggcgccggaagtgctg

SEQ ID NO: 11956 - DNA, 678 bp, Burkholderia cepacia
gccgcggaggacgagcagcagctcttccagcggatcgccgcctattccaagcggctcggattcgaatactgctgttacggcattcgcgtaccgctgcccgtttcgaagccggccgtcgccatcttcgatacctatccggacggctggatggcgcactaccaggcgcagaactacatcgagatcgattcgacggttcgtgacggcgcgctcaacaccaacatgatcgtgtggccggacgtcgaccggatcgatccgtgcccgctgtggcaggacgcgcgcgatttcggattgtcggtgggcgtcgcgcagtcgagctgggcggcgcgcggcgcgttcgggctgctaagcatcgcccgccatgccgaccggctgacgccggccgagatcaacatgctgacgctgcagaccaactggctcgcaaacctgtcgcattcgctgatgagccgcttcatggtgccgaagctgtcgccggcggcgggcgtcacgctgaccgcgcgcgagcgcgaggtgctgtgctggacggccgagggcaagaccgcgtgcgaaatcggccagatcctcagcatctcggagcggacggtcaacttccacgtgaacaacatcctcgagaagctcggcgcgaccaacaaggtccaggcggtcgtcaaggcgatctcggccgggctcatcgaagcaccc

SEQ ID NO: 11957 - DNA, 1242 bp, Burkholderia cepacia
atgggctatcagcagggcttgagcggattggccggtgcgtcgagcaatctcgacgtcatcggcaacaacatcgcgaacgcaaacacggtcggcttcaagcagggacgcgcgaacttcgccgacatgtacgcgaattcggtcgcgacgtcggtcaacacgcagatcggcatcggcacgcggctcgcgtcggtgcagcagaatttcggccaggggacgatcaattcgacgaagtcgtcgctcgacgtcgcgatcaacggcaacggcttcttccagatgtccagcaacggcgtgaccacgtactcgcgcgacggcacgttccatcgcgacaagaacggcgcgatcgtcgacgcgcaaggccgcaacctgatgggctatgcggcgggcgccggcggcgtgatcaacaccgcgcagaccgtgccgctccaggcgccgaccaacaacatcgcgccgcgcgcgacgagcaagatcaccggccagttcaacctgaacgcgcaggacaaggtgccggccaagacgccgttcaacgcgaccgacaacacgacgtacaactacaactcgtcgatccaggtctacgacacgctcggcggctcgcagcaggtcacgatgtacttcgcgaagagcgcggccggcacgtggctggcctacgcgggcgtgcagggccagacgccgacgaatctcggcaccgtcacgttcgatgcgtcgggccggatcagctcgacgacgtcggccgcgaccggccagccgacgccgagcctcggccagttcgcgttctcgatcccgaacacgacgggcggcgccaatccgcagaacctgacgctcgacctgggcggcacgacgcagtacggcggcaaggacggcgtgaccaatctcgcgcaggacggcttcgcgagcggcacgctgacgacgttctcgatcggcaccgacggcaagctgaccggcaactactcgaacggccagagcgcggtgctcggcctgatcgcgctcgcgaacttcaacaacccgaacgggctcgtgaacatcggcggcaaccagtatgcggaaacggccgcgtccggcgtgccgcagatcgccgcgccgggcagcacgaaccacggcacgctgcaggggagcgcgctggaaaattcgaacgtgaacctgacgaccgagctcgtgaacctgatcaccgcgcagcgcaattaccaggcgaacgcgcagacgatcaagacccagcaggcggtcgaccagacgctgctgaacctgcgt

SEQ ID NO: 11958 - DNA, 819 bp, Burkholderia cepacia
atggcagtaagtcaggaggggcggccatcggcgggacggccgtccggggcgcggtcatccggcacgcggcagaccggcgggacgaaggcgcgcattctcgatgcggccgaggatctgttcatcgaacacggcttcgaggcgatgtcgatgcggcagatcacctcgcgcgcggcggtcaacctcgccgcggtcaactaccacttcggcagcaaggaagcgctgatccacgcgatgctgtcgcgccggctcgaccagctgaaccaggagcgcctcggcatcctcgaccgcttcgacgcgcagctcggcacccacatcacctgcgagcacgtgctcggcgcgatgttcattccggcgctgaaggcctcgcgcgatcccgaacgcggcgggcccgggttcctccggctgatcggccgcgcgtataccgacccttcgccgttcgtgcgcaacttcctgaccgcgcactacgcgagcgtcgcgggccgcttcttcgatgcgttccagcgcgcgctgccgcacctgccgcgcaccgaactcggctggcggctgcacttcgcgatcggcgcgctgtccggcgcgctcgcgggtgccgaaaccgaaagcctgatcgacgaattctcgcaaggccgcacgatgaacgacgtgcagatgatcgcgcggctgtcgtcgctgatcgtcgccgcgctgaaggcgccgatgcccgacagcgcgcaactgtcgatcttcgcggcggtgctcgacgatgccggcgccagcgaagcgttcgggctgccgcagtcgggcgcgacggccgccgaggcggcaacgctgcattccacgagc

SEQ ID NO: 11959 - DNA, 1509 bp, Burkholderia cepacia
gtgtcagcggcactgcgttttgacaatatcggcaaggtgtttcctggcgtgcgcgcactcgatggcatttcgttcgacgtgcatgcgggcgaggtgcatggcctgatgggcgagaacggcgcgggcaagtcgacgctgctgaagattctcggcggcgaatatcagcccgatgcgggcagcgtgctggtcgacggccagcccgtgcagttcgcgaatgcggccgcgtcgatcgcggccggcatcgcggtgattcaccaggaattgcagtacgtgcccgacctgacggtcgcggaaaacctgctgctcggccgcctgccgaacgcgttcggctgggtgaggaaacgcgaggcgaagcgttacgtgcgcgagcggctcgccgagatgggcgtcgatctcgatcccgatgcgcggctcgggcggctgtcgatcgcgcagcggcagatggtcgagatctgcaaggcgctgatgcgcaacgcgcgcgtgatcgcgctcgacgaaccgacgagctcgctgtcgcatcgcgagacggaagtgctgttcaagctggtcgacgacctgcgtgcgcagggccgcgcgctgatctacatctcgcaccggatggacgagatctaccggctgtgcgatgcgtgcacgatctttcgcgacggccgcaagatcgcgtcgcacgaagcgctggccgacgtgccgcgcgagcggctcgtcgccgagatggtcgggcgcgagatcgcggacatctaccattacgcgccgcgcgcgctcggcgacgtgcggttttccgccgaaggcattgacgggccggcattgcgcgaaccggcaagcttctcggtgcgcgcgggcgagatcgtcggcttcttcgggctcgtcggcgcgggtcgcagcgagctgatgcggctcgtgtacggcgcggaccgccggcgcgcgggcgtgctgacgctcgacggcgcgcgcatcgacgtgaagcgcacgggcgacgcgatccgccacggcatcgtgctgtgccccgaggaccgcaaggaagaaggaatcatcgcgatcgcgtcggtctcggagaacatcaacatcagctgccgccgccattcgctgcgcgcgggtctgttcatcaacggcaaggccgagagcgaaacggccgaccgcttcatccagcggctgaagatcaagacgccgaaccggcgccagaagatccgcttcctgtcgggcggcaaccagcagaaggcgatcctgtcgcgctggctcgcggagcccgacctgaaggtcgtgatcctcgacgagccgacgcgcggcatcgacgtcggcgcgaagcacgagatctacgacgtgatctaccggctcgcggagcgcggctgcgcgatcgtgatggtgtcgtcggaactgccggaagtgctcggcgtgtccgaccgcgtcgtcgtgatgcgcgaaggccggatcgccggcgagctgccgcgcgcgcaggcgaacgagcacgcggtgctgaacctcgcgctgccgcagacgagcgcggccgaggcggcc

SEQ ID NO: 11960 - DNA, 1530 bp, Burkholderia cepacia
atgacgcacaatcatcccgcccccctgctcgtcgaactgctgaccgaagagctgccgccgaaggccctcgcgcgcctcggcgacgcattcgccgaaggtctcgcgcaacgcctcgcggcgcgcgacctcgtcgaaggcgaactcgtgttcgaacgctacgccacgccgcgccgcctcgcggtcgtcgtgcagaacgtgcgcgccgtcgcgcctgaccggcaggtccgcgaaaaggtcctgcccgtgtcggtcgcgctcgacgccgaaggcaagccgacggccccgctcgcgaagaagctcgcggcgctcggccacccgaacctgtcgatcgccgatctcgagcgcgcgcaggacggcaaggccgaagcgttcttcatcaattactcggcggccggcgccacgctcgccgacggcctgcaggccgcgctcgacgaggcgctcgcgaagctgccgatcccgaaattcatgacgtaccagcgcccggacggctcggacgtgaagttcgtgcgcccggtgcatcgcctgacggtgctgcacgacgaccgcatcgtgcccgtcaccgcgttcggcgtcgacgccggcgacacgacgctcggccaccgcttcctgtccgacggcctggtcgcgatccagcacgcccgcgcgtacgccgacacgctgcgcgacaagggccgcgtgatcgcgcacttcgccgatcgccgcgaaacgatccgcacgcaactgaacgaacatgcgaacggcgacacggtcgtgatgcccgaatcgctgctcgacgaagtcacgtcgctggtcgaatggccggtcgtctacccgtgccgcttcgaggacgaattcctgcaggtgccgcaggaatgcctgatcctcacgatgcagacgaaccagaagtatttcgcgctgaccgacgtcgccggcaagctgcgctcgcgcttcctgatcgtgtcgaacatcgagacgaagacgccgggcgagatcatcgagggcaacgagcgcgtcgtgcgcccgcgcctcgccgatgcgaagttcttcttcgagcaggacaagaagaagccgctcgccgaccgcgtgccgcaactcgcgaacgtcgtctatcacaacaagctcggttcggcgctcgcccgcgtcgagcgcctcgaggcgctggccggcgaaatcgcccctgcgatcggcgccgacaccgcgcacgcgaagcgcgccgcgcgcctcgcgaaggccgacctgctgaccgacatggtcggcgagttcccggaactgcagggcacgatgggcacgtactacgcgcgccacgacggcgaagccgacgacgtcgcgctcgcatgcgccgagcactaccagccgcgcttttccggcgacgcactgccgaccacgccggtgtcgaccgccgtcgcgctcgccgacaagctcgaaacgatcgtcggcatctggggcatcgggctcgcgccgaccggcgagaaggatccgttcgcgctgcgccggcacgcgctcggagtgctgcgcctgctgctcgaaaagcagctgccgctcgatctcgtc

SEQ ID NO: 11961 - DNA, 852 bp, Burkholderia cepacia
atgaagctgtgcgatttcgaggtcggtctcgaccagcctttcttcctgatcgcgggtacctgcgtcgtcgaatcggagcaaatgacgatcgacacggcgggccgcctgaaggagatctgcgagaagctgaacgttccgttcatctacaagtcgtcctacgacaaggcaaaccgcagctcgggcaagtcgtttcgcggcctcggaatggacgagggcctgcggatcctgtccgaggtgaagcgccagctcggcctgccggtgctgaccgacgtgcattcgatcgacgagatcgagcaggtcgcgtcggtcgtcgacgtgctgcagacgccggcgttcctgtgccgccagaccgacttcatccatgcgtgcgcgcgctcgggcaagccggtcaacatcaagaagggccagttcctcgcgccgcacgacatgaagaacgtgatcgacaaggcgcgcgacgccgcacgtgaagccggtctgtcggaagaccgtttcatggcgtgcgagcgcggcgtctcgttcggctacaacaatctcgtgtcggacatgcgttcgctcgcgatcatgcgcgagacgaacgcgccggtcgtgttcgatgcgacccactcggtgcaattgccgggcgggcagggcacgagctcgggcggccaacgcgaattcgtgccggtgctcgcccgtgcggcggtcgcgacgggcgtcgcgggcctcttcatggaaacgcatccgaatccggccgaggcgaagtcggacggcccgaatgcggtgccgctgaaccggatgggcgcgttgctggagaccctcgtcacgctcgaccaggcggtgaagcgcaatccgttcctggaaaacgatttcaat

SEQ ID NO: 11962 - DNA, 1029 bp, Burkholderia cepacia
atgagcttctgggatttcacccggagtccggccagcgcccggctgctggccgatttcggcgacgaacgcggcgtgccgcctgccacgttgctggccggcaccggcctcgcgagcgcacagctcgacgacccgaaagtcgaggtgacggccgcgcaggaactgcggctgaccggcaatctgctgcgcgcgctcggccgggcacagggcctcgggttcgaggtcgggctgcgttatcacttctccgcgtacggcgtgtggggctacgggctgatctcgagcgcgaccgggagcgatgcgctcgcgctggcgatgcgctttttgccgctcacgtatgcgtacaccgtcatcacgtaccgcgaggccgctgacaccggcgtgctcaacttcggcgcgccggaactcgacgccgacctgagccggttcctcgtcgagcgcgacatgacggccgcggccgtgctgctgcaggaaatcgccagcggcgatttcgcgttgtcgcgcttcacgctgcaggcggtgcgttcgccggcgcttgtcgcgccgcgcatcgcgggtatcgagccgacgttcgcggcgcgtgcgaacagcctcgagttcgatcgcgcgtttctcgaccggccactgccgcatgcgaatccgctgacggtgtcgatgtgcgagcagatgtgcggccaactcgtcgaagcgcggcgtgcacgcgtgggcacgtcggagatggtgcgccagtacctgaacgcgacgccgggcagcgcgccgttctcgctcgaggacatggcgcggctgatgaacacgagcccgcgcacgctcaagcgccggcttcaggacgaaggcacgacgtttcgcgcgctgctcgcgcaggcgcgcggcgcgatggccgagacgctgctcgccgatgcgcggctgtcgctcgcggaggtggccgagcggctcggtttcagcgatctgtccagtttctcgcaggcgttcaagcgctggtacggcgtgccgccgggcgcgtatcgcagcgcggcgcggcgaacgggcgacccgcga

SEQ ID NO: 11963 - DNA, 852 bp, Burkholderia cepacia
atgagccgcccgtcgtttctgatcggcctgatcggccagggcatcggcggttcgctgtcgcccgcgatgcacgaggaagagggcttccgccagggcttcggctacgtgtaccggcgcatcgatctcgatgcgctcggcgtgaccgtcgacgcactgccgcaactgctcgaggccgcgcagcggatgggctacaacgggctgaacatcacgcatccgtgcaagcagcgcgtgatcgagcacctcgacgcgctgtcggacgacgcgcgtgcgctcggcgcggtgaacaccgtgctgttcaaggacggcaagcggatcggccacaacaccgactggtcgggctttgcgaaatcgttccgccgcgggctgccggacgcgaagctcgaccgcgtcgtccagctcggcgcgggcggcgcgggcgcggccgtcgcgcacgccgcgctgcagatgggcgcggctgaactgacgattttcgacgtcgacggcacgcgcgccaccgcgctggcgggcgaattgcagcagcgcttccctgccgcccgggtcacgccgggcagcgatctcgcggccgcgatgcgcgcaacgaccggcctgatccactgcacgccgaccggcatggccaagcatccgggcctgccgctgccggccgaactgctccacgcaggcatgtgggtggccgacatcgtgtatttcccgctcgaaaccgaactgatccacgccgcgcgcgcggccggctgcgcgacgctgccgggcggcgggatggccgtgtaccaggccgtcgacgcgttcgagctcttcaccgggcgcacgcccgacgccgagcggatgttcgatcactttcagtcgctcgtcgcgcgc

SEQ ID NO: 11964 - DNA, 507 bp, Burkholderia cepacia
atgatgccgaccccgcccccgttcctgctcgccgtctgcgaaggcaacgtgtgccgcagcccgctcgcggccgcgctgctcgcggcgaagctcccgcacgcgcgaaccggctcggccggcctcgcgccgccgaacggccggccggccgacccgctggcccgcgacatggccgccgcgcgcgggctgaacctcgacgcgcatgcggcccggccggtgacggccgcgctatgcgcgcaggccgacctgatcttcgtgatggacggcgggcagcgccgcgcgctcgaagcgcgccacccgttcctgcgcggccgtgtgttccgtctcggcgaatacgcgcgcatcgccgacggcgcgccgctcggcctcgacatccccgacccctaccgcggcacgcgcgacgacttcgtgcgctgcgcggcgctgatcgatctcgcggtcggcagctggctgccgcggctcgccgcgcgctggccgcacatcaccgcctctttctcaggattccagtca

SEQ ID NO: 11965 - DNA, 363 bp, Burkholderia cepacia
atggataagactcaatctcgcctgcgccgcgctcgccagacgcgtatcaagatcgctgagctgcaggtcgcgcgtctcgccgtgcatcgcacgaacacgcacatctacgctcaagtgttctcgccctgcggcaccaaggtgctggccagcgcgtcgacgctcgaagcggaagtgcgcgcagaactggccgacaagtcgggcaagggcggcaacgtcaatgccgcgacgctgatcggcaagcgtattgccgaaaaggcaaaggctgccggcatcgaatccgtcgccttcgaccgctcgggcttccgctaccacggccgcgtcaaggcgctggctgaggcagctcgcgaagctgggctcaagttc

SEQ ID NO: 11966 - DNA, 6226 bp, Burkholderia cepacia
gcggtgcccgccgcacaaggtctgtacgacccgcaaaacgaacacgacgcctgcggcgtcggcttcgtcgctcacatcaagggcaagaagagccacgagatcatccagcagggtctgaagatcctggagaacctcgatcaccgcggcgcggtcggcgccgatccgctgatgggcgacggcgcgggcatcctgatccagattccggacgcgttctatcgcgaggaaatggcgaagcagggcgtgaacctgccgccggccggcgaatatggggtcgggatgatcttcctgccgaaggagaacgcgtcgcgtctcgcgtgcgagcaggagctcgagcgtacggtgaaggccgaaggccaggtcgtgctcggctggcgcgacgtgccggtcgaccatgcgatgccgatctcgccgacggtcaaggcgagcgagccgctgatccgccagatcttcatcggtcgcggcaaggacatcatggtgacggacgcgctcgagcggaagctgtacgtgatccgcaagaccgcgagccaccgcatccaggcgctgaagctcaagcacggcaaggaatacttcgtgccgtcgatgtcggcgcgcaccgtcgtctacaaggggctgctgctggccggccaggtcggcgtgtactaccgcgacctgcaggacgagcgtgtcgtgtcggcgctcgcgctcgtgcaccagcgcttctcgaccaacacgttcccggcgtgggaactggctcacccgtaccggatgatcgcgcacaacggcgagatcaacaccgtgaagggcaacgtgaactggctgaacgcgcgtaccggcgcgatcgcgtcgcacgtgctcgccgacgatctgccgaagctgtggccgctgatctacccgggccagtcggataccgcatcgttcgacaactgtctcgaactgctggtgatggcaggctacccgctcgtgcacgcggtgatgatgatgatcccggaagcgtgggaacagcacacgctgatggacgagaaccgccgcgcgttctacgaataccacgccgcgatgatggagccgtgggacggcccggccgcgatcgcgttcaccgacggccgccagatcggcgcgacgctcgaccgtaacggcctgcgcccggcgcgctacatcgtcaccgacgacgacctcgtcatcatggcgtcggaagccggcacgctgccgatccccgaatcgaagatcgtcaagaagtggcgcctgcagccgggcaagatgttcctgatcgacatggaacacggccgcatcatcgacgacaaggaactgaaggacaacctcgcgaacgcgaagccgtacaagagctggatcgacgcggtgcgcatcaagctcgacgagatcgagccgaaggccgaggaagtcgcggccggccgcacgcagggcgccgcgctgctcgaccgccagcaggcgttcggctatacgcaggaagacctgaagttcctgatggcgccgatggcggctcagggtgaggaagccgtcggttcgatgggcaacgattcgccgctcgcggtgatgtcgaacaagaacaagacgctctatcactacttcaagcagctgttcgcgcaggtcacgaacccgccgatcgacccgatccgcgagaacatggtcatgtcgctcgtgtcgttcatcggcccgaagccgaacctgctcgacaccaacaacatcaacccgccgatgcgtctcgaagtgtcgcagccggtgctcgacttcaaggacatcgcgaagatccgcgcgatcgaccagtacacgggcggcaagttcagcgcgtacgaactgaacatctgctatccggtcgcgtggggcaaggaaggcatcgaggcgcgcctcgcgtcgctgtgcgcggaagccgtcgacgcggtgaagtcgggctacaacatcctgatcgtgtcggaccgcaagacggacgccgagcacgtcgcgattccggcgctgctcgccacgtcggcgatccacacgcacctcgtgcagcaagggctgcgcacgagcacgggcctcgtcgtcgagacgggttccgcgcgtgagacgcaccacttcgcgctgctcgcgggctacggcgcggaagccgtgcacccgtacctcgcgatggaaacgctcgcgaagatggccgaagggctgccgggcgacctgtcgccggagaaggccgtctacaacttcacgaaggcggtcggcaagggcctgcagaaggtgatgtcgaagatgggcatctcgacgtacatgtcgtacacgggcgcgcagatcttcgaagcgctcggcctgtcgagcgacctcgtcgagaagtacttcaagggcaccgcgtcgaaggtcggcggcatcggcctgttcgaggtcgcggaagaagcgatccgcctgcaccgcgacgcgttcggcgacaacccggtcctgcgcgacatgctcgacgcgggcggcgagtacgcgtaccgcgtgcgcggcgaagaccacatgtggacgccggattcgatcgcgaagctgcagcacgcgacgcgcagcaactcgtaccagacgtacaaggaatacgcgcacctgatcaacgaccagaccaagcgtcacatgacgttccgcggcctgttcgagttcaaggtcgagccgaccaaggcgatcccgatcgacgacgtcgagccggcgaaggagatcgtcaagcgcttcgcgaccggcgcgatgtcgctcgggtcgatcagcaccgaggcgcacgcgacgctcgcgatcgcgatgaaccggatcggcggcaagtcgaacaccggtgaaggcggcgaggacgagaagcgctatcgcaacgaactgcgcggcattccgatcaagtcgggcgagacgctgaagtcggtgatcggcgacgagatcgtcagcgacatcgcgctgaaggacggcgattcgctgcgctcgaagatcaagcaggtcgcgtcggggcgcttcggcgtcaccgccgagtacctggcatcggccgaccagatccagatcaagatggcgcagggcgcgaagccgggcgaaggcggccagctgccgggtcacaaggtgtcggagtacatcggcaagctgcgttattcggtgccgggcgtcggcctgatctcgccgccgccgcaccacgacatctactcgatcgaggatctggcgcagctgatccacgacctgaagaacgtgaacccgagcgcgagcatctccgtgaagctcgtgtcggaagtgggcgtgggcacggtcgcggccggtgtcgcgaaggcgaaggccgatcacgtcgtgatcgccggccacgacggcggcacgggcgcgtcgccgctgtcgtcggtcaagcacgccggcacgccgtgggaactcggcctcgccgaaacgcagcagacgctggtgctgaaccgcctgcgcggccgcatccgcgtgcaggccgacggccagataaagacgggtcgcgacgtcgtgatcggcgcgctgctcggcgcggacgaattcggcttcgcgacggcgccgctcgtcgtcgagggctgcatcatgatgcgcaagtgccacctgaacacgtgcccggtcggcgtcgcgacgcaggatccggtgctgcgtgcgaagttcaagggccagcccgagcacgtcgtgaactacttcttcttcgtcgccgaggaagtgcgcgagatcatggcgcagctcggcgtcgcgaagttcgacgacctgatcggccgcgccgatctgctcgatacgcgcaagggcatcgagcactggaaggcgaagggcctcgacttctcgcgtgtgttctaccagccggaagagtgcgaggacgtcgcgccgcgtcacgtcgacgtgcaggatcacggcctcgagcgcgcgctcgaccacgtgctgatcgagaaggcgaaggccgcgatcgagaacggcgagcatgtgtcgttcatccagccggtgcgcaacgtgaaccgcacggtcggcgcgatgctgtcgggcgtgatcgcgaagaagcacggccacgacggcctggccgacgacgcggtgcacatccagctgaagggcacggccggccagagcttcggcgcgttcctcgcgaagggcgtgacgctcgacctcgtcggcgacggcaacgactacgtcggcaagggcctgtcgggcggccggatcatcatccgtccgaccaacgacttccgcggcaagtccgaggaaaacatcatctgcggcaacacggtgatgtacggcgcgatcgaaggcgaagcgttcttccgcggcgtcgcgggcgagcgcttctgcgtgcgcaactcgggcgcgacggcggtcgtcgaaggcacgggcgaccacggctgcgaatacatgacgggcggcacggtcgtcgtgctcggcgagacggggcgcaacttcgcggccggcatgtcgggcggcctcgcgtacatctacgatccggaaggcacgttcgcggccaagtgcaacaagtcgatggtcgcgctcgagccggtgctgcagcaggccgagcaggagcgcacggtcgaccgcgcgctctggcacgccggcacgacggacgaggcgctgctcaaggggctcgtcgagcgtcatttccagttcacgggttcgccgcgcgcgaagtcgctgctggaaaactgggacgcggcgcgccgccagttcgtgaaggtgttcccgcacgaatacaagcgcgcgctgggcgagatcggtgcgaagaaggcggcgaaggaagtgctggccgcctgagcgacgaacgacatagcgaatgccgcgcgcgcctgatggccgcgcgcggctcccccacccgatacaccgaacagaagagcaccttatgggcaaggcaaccggttttctggagttcgaacgccgccacgaggcgtacgaagcaccgctcacgcgcgtgaagcactacaaggaattcgtcgcggcgctgaccgacgcggacgcgaaggtccagggcgcgcgctgcatggattgcggcatcccgttctgcaacaacggctgcccggtcaacaacatcatcccggacttcaacgatctcgtttaccgccaggactggcagcaggcgatcgaagtcctgcactcgaccaacaacttcccggaattcacgggccgcatctgcccggcgccgtgcgaagcggcctgcacgctcgggatcaacaacgatccggtcggcatcaagtcgatcgagcacgcgatcatcgacaaggcctgggcggaaggctgggtgaagccgctgccggccgaacacaagacgggcaagaaggtcgcggtcgtcggttcgggccccgcgggcctcgctgccgcgcagcagctcgcgcgtgcgggccacgacgtgacggtgttcgagaagaacgaccgcatcggcggcctgctgcgttacgggattcccgacttcaagctcgagaagtggctgatcgatcgccgcatgcgccagatggaagcggaaggcgtgaggttccgtaccagcgtgttcatcggcaaggagccgctgcccgaatcgatcggcagcctcgcgaaggaaaccatctcgccggacacgctgaaggaagaattcgacgcggtcgtgatcgccggcggttcggaaacgccgcgcgacctgccggtaccgggccgcgagctcgcgggcgtccatttcgcgatggacttcctgccgcagcagaaccgcgtgaacgcgggcgacaagctcgccgaccagctgctcgcgaagggcaagcacgtgatcgtgatcggcggcggcgatacgggttcggactgcgtcggcacgtcgaaccgtcacggcgcgaagcaggtcacgcagttcgagctgctgccgcagccgccggaagaggaaaacaagccgctcgtgtggccgtactggccgatcaagctgcgtacgtcgtcgtcgcacgaggagggctgcgagcgtgactgggcggtcgcgacgaagcgtctcgaaggcaagaacggcaaggtcgagaagctgatcgcggtgcgtgtcgagtggaaggacggcaagatgcaggaagtgccgggttccgagttcgagatgaaggccgatctcgtgctgctcgcgatgggcttcacgcagccggccgcgccggtgctcgacgcgttcggcgtcgcgaaggatgcgcgcggcaatgcacgcgcgacgaccgaaggcgaccgttcgtactacacgtcggtcgacaaggtgttcgcggcaggcgacatgcgtcgcggccagtcgctcgtggtgtgggcgatccgcgaaggccgccagtgcgcgcgctcggtcgatacgtacctgatgggccattcggaactgccgcgc

SEQ ID NO: 11967 - DNA, 621 bp, Burkholderia cepacia
atggctgaacgaggccgaccgagaagcttcgacaaggaagcggcgctggatcgcgcgatggaggtgttctggcgtctcggctacgaaggagcgtcgatgacggacctgacgaccgcgatgggcatcgcgtcgccgagcctgtatgcggccttcggcagcaaggaagcgttgttccggcaagcgctcgagcattacggcgcaaccgaggggcgggaaatctgggggggcgtcgaacgggcggccagtgcgcacgacgccgtgcagcgctacctgatggataccgcgcgcgtgttcacgcggcgctcgaagccggccggctgtctgatcgtgctgtcggcgctgcatccggccgaacgttccgatacggtccggcaaacgttgatcgcgatgcgcgagcacacggtcgacgcgctgcgggagcggctcgcgcaaggcgtcgcgaccggcgaaatatccgcgcacgcgaatctcgacgcgatcgcccgctactacgtgacggttcaacagggcatgtcgattcaggcgcgcgacggcgcgagccgccgcgatctggaggccatcgcgcaggccgcgctggccgcctggccggcgctcgtcggcacgagcggcgcggccggtgcg

SEQ ID NO: 11968 - DNA, 1035 bp, Burkholderia cepacia
tactacctcgacgaacacaaccggctcgacgtcgccaatgccgatctcgccgccgacctgcagggcgcgcgcacgacgctgtacggcgcgctcgcggcgctgctcgccgaacgcgtgaagcgcggcgcgggcccgctcacgctgcaaagctgcgacaacctgcgcaacaacggcgctcgctttcgcgccggcatgcgcgaattcctcgaacggcgcggcgaaggcggcctgctcgcgtggttcgatgcgcacgtcgcgacgcccagcgcgatggtcgaccgcatcacgccgcgcccgaccgccgacgtgcgcgagcgcgtcctcgtggccaccggcgtcgacgatgcgtgcccggtgatgggcgaatcgttcatccagtgggtgatcgaggaccgtttcgcggccggccggccacgctgggagctggccggcgccgaactcgtcgacgacgtgcatccgtacgaggaagcgaagatccgcatcctcaacgcgacgcacagctgcatcgcatgggccggcacgctcgcgggccatacctacatccacgaaggcacgcacgacccggcgatccgccgcttcgcgcacgactacgtgacgcaggacgtgatcccgtgcctcacgccgagcccgctcgatctcgcgcgctaccgcgacgtcgtgctggagcgcttcggcaatccgtacgtgctcgacacgaaccagcgcgtcgcggccgacggtttctcgaagatccccggtttcatcgcgccgacgctcgtcgaatcgttcgcgcgcggcgcggcacccatcgccaccgccgtgctgcccgcactgttcctgcgctttctcgaacgctgggcgcgcggcacgctgccgtatgcgtaccaggacggcgtgatggacgacagcagcgcccgcgcgatcgtcggggccgcagaccccgttgtcgcgctcggcgcgaaccgcgcgctgtggggctcgctcgccggcaacgcggcgctgttcgacgcgctgcgcgccgggctcgcgcgcgtcgacgcatggctcgccgcacgc

SEQ ID NO: 11969 - DNA, 537 bp, Burkholderia cepacia
atgtacatgcgcgagatgggcacggtcgagctgctcacgcgcgaaggcgaaatcgagatcgcgaagcggatcgaggacggcctgcgccacatggtgatggccatctccgcgtgcccgggcacgatcgccgcacccgcgcgaaatcgtcgctgcgcatcagatcctcgaaaccgagcgcgatcgcatcgacccagcgcgacgcggcccgcgcatcgggccgccacgcgaagcggccgccgaccgcatcgaatgcgctgcgcccgatcgcatcgcggatcgccaccgcgagccgctccgccgcgcgcgcgcgcgcgctgccgccaccttcagccgtcagatgtgcgatcgcgacgtacgcgtcttcgcgaaagcggcgcagcgccgcgagttcgtcggggccgtcctgccgcggatgacgtagcagccgcgccagatcgtccggcgccggcaaccccgctttcccggcccacgcgcgcacggccggccagtcgacgagcttgtcctcggcgcgcgtcttgcccgtgtcggccaccgtgt

SEQ ID NO: 11970 - DNA, 351 bp, Burkholderia cepacia
ttgcctcggtcagggtcagagttgcgagagatcgcggccgagccgctgcagcgcgccgtcgatccgcttgtaatacgtgaacttgccgacgcgggtcgcctgcacgagcccggcatccgcgaggatgcgcatgtggcgcgtggtcgtggccggcgcgatgccgagcttctcggtgatgtacgtgcagcacacgccgagctcgtcgacgtcaccatgcggctgcggcgggaaatgcttgcgcggttgcctgagccagcgcatcacggccagacggctttcgttggcgagcgcgctgaggcgggtgacgtcgtccatgggggtgcggattcgtttaacgttttgaatattagc

SEQ ID NO: 11971 - DNA, 483 bp, Burkholderia cepacia
atgtccgccactttcgaacgcaagctgatcacccgtgatgccctcgtcgcgctgcgcgcgtcgctgccgtcgcccgtcgtgttcaccaacggcgtattcgacatcctgcaccgtggccacgtcacgtatctcgccgatgcgaaagtgctcggcgcctgtctgatcgtcggcgtgaacagcgatgcgtcggtgcgcatgctcggcaagggcgacgaccggccgatcaaccgcgaagaggatcgcgcggcattgctggcggcgctggaaagcgtcgactgggtcgtgacgttcgcggaaaagacgccggtgtcgctgatcgaggccgtccgtccggacatcctcgtgaagggcggcgattacgacatggatgcgctgccggaatcggcgctcgtgcgcggctggggcggccgtgcgctggcgatcccgttcgagcacgaccgctcgaccaccgcgttgctgaagaaggtgcgcgcgcaacagccc

SEQ ID NO: 11972 - DNA, 978 bp, Burkholderia cepacia
ttgcgcgggccggcccgatccggccccgtcggcgcacagccggttcttttcgtcaacgagctatggtgtaatgccggcatgaaaaccggtaatcagttcaatactgtcgcgctcgtcggccggagcaacacgcccggcatcgccgagccgctcgccacgctggcggacagcatcgccacgctcggcttcgaggtcgtcttcgaaggcgataccgcgcgggaaatcggcatcgccggctacccggcgctcaccccggccgaaatcggggcgcgagcggacgtggcgatcgtgctcggcggcgacggcacgatgctcggcatcggccgccagctcgcgccgtaccggacaccgctgatcgggatcaaccacgggcggctcggcttcatcaccgacatcgcggcatccgacatgcaggcgctcgtccccgtgatgctggccggcaagttcgagcgcgaggagcgctcgctgctcgaggcgcggatcgtgcgcgacggcgaaccgatctaccacgcgctcgccttcaacgacgtcgtcgtgaaccgcagcggcttctccgggatggtcgagctgcgcgcgtcggtcgacggccgctacatgtacaaccagcgctcggacgggctgatcgtcgcgacgcccactggctcgaccgcgtatgcgctgtcgtcggccggcccgatcctccatccgcagctggcgggcatcgtgctcgtgccgatcgcgccgcacgcgctgtcgaaccggccgatcgtgctgcccgacgattcgaagatcgcgatccagatcgtcggcggccgcgacgtcaacgtgaacttcgacatgcagtcgttcacgtcgctcgaactgaacgatacgatcgaggtgcgccgctcgaagcacacggtgccgttcctgcacccgatcggctacagctactacacgacgctgcgcaagaagctgcactggaacgaacacgcatcgaacgaagacgacaaggcgtcc

SEQ ID NO: 11973 - DNA, 942 bp, Burkholderia cepacia
atgccggccgccgcgctgctcgacgactttctcgcgttcacgctggccggtgacgcgccggccgaacaggacggcgcctgcgcgggcggcgcggtgcgctggcaatggctcggcgacgggctgctcgcgttcgaaccggcggcggccgacgccgcggcgcgcgcgagcgtgctcgtgtcggccggcgtgcatggcgacgagacggcgccgatcgaactgctgtcgatgctggtgcgcgatctcgccgcgggtgcgctgccgctcgcatgccggctgctcgtcgtgctcggcaacgtgccggcgatgcgcgcgggcgaacgctatctcgacgacgacctgaaccgcctgttcagcggccgtcacgcgcaggtgcccgcgagccgcgaagcgccgcgcgccgcgcagctcgaagcggccgcggccgcgttcttcgcggcggcgccggcgggcagcgcacgctggcacatcgacatgcatacggcgattcgcgcatcggtgttcgagcagttcgcgctgctgccgcacacgggcacgcctccgacgcgcgcgatgatcgaatggctcggcgatgcacgcatcgcggccgtgctgctgcacacggcgaagggcaatacgtattcgcatttcacggccgagcattgcggcgcgctcgcgtgcacgctggaactcggcaaggtgcggccgttcggccagaacgacctggcgcgcttcgcgccggccgaccgcgcggtgcgcaagctcgtgtcgggtgggagggcggaagtcgacgccggtggcggccatccgtcgctgccgcgcgtcttcacggtgatcgaccagatcacgaagcagagcgacgcgctcgagctgttcgtcgaggccgacgtcgagaacttcaccgcgttcgcgcgcggaacggtgctcgcgcaggactgccactaccagtacactgcgatgcacgac

SEQ ID NO: 11974 - DNA, 2865 bp, Burkholderia cepacia
atgagcgacaacacgcttgcgaagagcttcgagccccataccatcgagtcccaatgggggccggagtgggaaaaacgcggctatgccgccccggcattcgatccgtcccgccccgatttcgcgatccagttgccgccgccgaacgtgacgggcacgctgcacatgggccacgcgttcaaccagacgatcatggacggcctcgcccgctaccaccggatgctcggcgagaacacgctgtgggtgcccggcaccgaccacgcggggatcgcgacccagatcgtcgtcgaacgccagctcgacgcgcagggcgtgtcgcgccacgatctcggccgcgagaagttcgtcgagcgcgtgtgggaatggaagcagaaatccggctcgacgatcaccgaccaggtgcgccgcctcggcgcatcgaccgactggtcgcgcgaatacttcacgatggacgacaagatgtcggccgccgtgcgcgacgtgttcgtcacgctgtacgaacaagggctgatctaccgcggcaagcgcctcgtcaactgggatccggtgctgctcaccgccgtgtcggacctcgaagtcgtcagcgaagaggaaaacggccacctgtggcacatccgctacccgctcgtcgacggctcgggctcgctgaccgtcgccaccacgcgccccgagacgatgctcggcgacgtcgcgctgatggtccatccggaagacgaacgctacgcgcacctgatcggccaacgcgtcacgctgccgctgaccggccgcgagatcccggtgatcgccgacgactacgtcgaccgcgaattcggcacgggcgtcgtgaaggtcacgcccgcgcacgacttcaacgactaccaggtcggcgtgcgccacaagctcgcaccgatcgagatcctgacgctcgacgcgaagatcaacgacaacggccccgagcagtatcgcggcctcgaccgcttcgacgcgcgcaaggcgatcgtcgccgacctcgacgcgcaggggttcctcgactccgtgaagccgcacaagctgatggtgccgcgcggcgaccgcacgggcgtcgtgatcgagccgctgctgaccgaccagtggttcgtcgcgatgacgaagccggcgccggaaggcacgttcaatccgggcaagtcgatcaccgaagtatcgctcgacgtggtgcgcgacggccagatcaagttcgtcccggaaaactggacgaccacgtactaccagtggctcgagaacatccaggactggtgcatctcgcgccagctgtggtggggccaccagattcccgcgtggtacggcgagaacggcgaggtgttcgtcgcgcgcaacgaggaagacgcgcgcgcgcaagccgccgcgaagggttacacgggcgcgctcaagcgtgacgaagacgtgctcgacacgtggttctcgtcggcgctcgtgccgttctcgtcgctcggctggccgaacgaaacgcccgaactgaagcacttcctgccgtcgtcggtgctcgtcaccggcttcgacatcatcttcttctgggtcgcccggatggtgatgatgaccacgcacttcaccggcaaggtgccgttccataccgtctacatgcacggcctcgtgcgcgacgcggaaggccagaagatgtcgaagagcaagggcaacacgctcgacccgatcgacatcgtcgacggcatcgacctcgagtcgctggtcgcgaagcgcacgacgggcctaatgaacccgaagcaggccgcgaccatcgagaagaagacgcgcaaggaattcccggacggcatccccgcgttcggcaccgacgcgctgcgcttcacgatggcgtcgatggcgacgctcggccgcaacgtgaatttcgacctcgcgcgctgcgaaggctatcgcaacttctgcaacaagctgtggaacgcgacgcgcttcgtgctgatgaactgcgaaggccacgactgcggcaacgacaagccggaagtgtgcggcgcgggcgactgcggccccggcggctacctcgacttctccgcggccgaccgctggatcgtgtcgctcttgcagcgcaccgaagccgacatcgcgaagggtttcgccgattaccgcttcgacaacatcgcgagcagcatctacaagttcgtgtgggacgagtactgcgactggtatctcgaactcgcgaaggtacagatccagaacggcacgccggaacagcagcgcgccacccgccgcacgctgctgcgcgtgctggaaacggtgctgcgcctcgcgcacccggtcatcccgttcatcaccgaagcgctctggcagaaggtcgcgccgctcgccggccgctatccgcagggcaaggccgaaggcgaagcgtcgctgatgacgcaggcgtatccggtcgcgaacctgcagaagctcgacgaggcgtccgagcagtgggcggccgacctgaaggcgatcgtcgacgcgtgccgcaacctgcgcggcgagatgaacctgtcgccggccaccaaggtgccgctgctcgcggcgggcgacgccgagcgcctgcgctcgttcgcgccgtacgtccaggcgctcgcgcgcctgtcggaagtacagatcctcgcggacgaagcggcgctcgacaaggaagcgcacggcgcgccgatcgcgatcgtcggcccgaacaagctggtgctgaaggtggaaatcgacgtcgcggccgaacgcgagcgcctgtcgaaggaaatcacgcgcctgacgggcgagatcgcgaagtgcaacgcgaagctcggcaacgaggctttcgtcgcgaaagccccgccggccgtggtcgaacaggagcagaaacgcgtcgcggaattccagcgcacgctcgaaaaactgcgtgcgcagctcgatcggttgcctgcg

SEQ ID NO: 11975 - DNA, 1561 bp, Burkholderia cepacia
  misc_feature (1460)..(1460): n=g, a, t or c
  misc_feature (1474)..(1474): n=g, a, t or c
  misc_feature (1482)..(1482): n=g, a, t or c
  misc_feature (1489)..(1489): n=g, a, t or c
  misc_feature (1524)..(1524): n=g, a, t or c
ctggaggattccgtcatgaggcggctcgtagtactcaccctgttgtcggcgatgagcgtgtgcgcgttcgccgcgtcggacccggcggtcgaagcgaagaacggcatggtcgtgtcgtcgcagcacttcgcatcgcagatcggcgtcgacatcctgaaggcaggcggcaatgcggtggacgcggcagtggccgtcggctatgcgcaggccgtgaccaactcgtgctgcggcaacatcggcggcggcggcttcatgacgatccacctggccgacggtcgcgaccgcttcatcaatttccgcgagaccgcgccggccgcggcgtccgcgaacatgtatctcgatgcggcgggcaacgtgattccggaccagagcctgtacggctaccgtgcggtcggcgtgccgggcacggtggccggcctcgatctcgcgcagcgcaaatacgggaagctgacgcgccggcaggtgatggcgccggcgatccggctcgcgcgcgacggcttcgtgctgacgcgcggcgataccgacatcctcgacacgacggtcgagcgcttcaggaaggatccggaagccgcgcgcatcttcctgcgcccggacggcacggcgctgcagccgggcgatcgcctggtgcagaaggatctggcgcgcacgctcgagcgcatcgcggagcaggggcccgacgcgttctatcacggcgagatcccgaagatcgtggaagcggcggccaagcgcggcggcggcgtgatcacggcggccgatttcgcgtcctatcgcgcgcaggacatggcgccgctgacatgcacgtatcgcggctacgagttcgtgtcggcgccgccgccgagctcgggcggcgtgacgatgtgcgagacgctgaacatcctcgaaggatatgatctgcgcaagctcggctaccactcggccgcggcggtgcactacatgaccgaggcgatgcgccatgcgtacgaagatcgcaacacgctgctcggcgatccggacttcatcgacaacccgatcgcgaagctgacgagcaaggagtacgcggcgcagatccgcaagagcatccatgccgatacggcgacgccgtcggtcgacgtgcagcccggtgtcggcgtgcacgagaagccggaaacgacgcattactcgatcgtcgaccacgacggcaatgcggtgtcgacgacctacacggtcaacggccgcttcggcgccgtggtcatcgcgccgggcacgggcttcttcctgaacgacgagatggacgacttcaccgtgaaggtcggcgcgcagaacctgttcggcctcgtgcagggcacgcgcaactcgatcgcgccgggcaagcgtccgctgtcgtcgatggcgccgaccatcgtgaagaaggacggcaaggtgttcatggtggtcggttcgcccggcggctgcgcgcatcatcacgatcacgctgcagaccgtgctgaacgtgatcgactacnggatgacgccgcangacgcggncgccgcnccgcgcattcatcaccagtggctgcccgacgccgnctattaagaaacctaccgcctagtaccggacacgctt

SEQ ID NO: 11976 - DNA, 417 bp, Burkholderia cepacia
atggcgagatataccgagcagttcaagctatcggtagtgaagcggtgcatcgggggggaagccatacgcgcggtggcgcgaacgcatggcttgagtcactcgacggtttcccagtggtacgccacataccaggctcatggtaaggacggcgtgcgtaggaagtacaactcatacgatgtggcgttcaggctcaaagttgttcagcacatgcgcgagcatggcgtgtcgagcaaggaagcggcggcgcggttcaatattcgcaatccgagcgcggtgctcgaatgggctcgccgctatgatgatggtggtttgactgccctcgcgccgaggcccaaaggccgccgcccaaccgcaatgccaaaaacaccgcctgctcagcctctgaaccctaccgatggcacggatacccgtacccgc

SEQ ID NO: 11977 - DNA, 636 bp, Burkholderia cepacia
atgagcgacgaagccaaactgcgcgaagagatctgcgtggtcggcgcgagcctgtacgcgcgcggccatgcggtcggcagcgccggcaacatcagcgcgcgcctgcatgacggctggctgatcacgccaaccgacgcctgcctcggccggctcgacccgaacgacatcgcgaaagtcggcgccgacgggcagcccgtctcgggcggcaagccgtcgaagacgctcgcgctgcatcgcggcatctatgcgcgcaacgccgcagcaaacggcgtcgtccacacgcattcgacgcacctcgtcgcattgacgctcgcgggcgtgtggcgcgacaccgacgtgctgccgccgatcacgccgtactacgtgatgaaggtcgggcacattccgctgatccgttaccgccgccccggcgacccggccgtcgcggccgaagtcgcggcgctggccgaccaggtgcgcggcgtgctgctcgatcgcctcggccccgtgatgtgggggccgtcggtatcgcacgcgtcgtatgcgctcgaggagctcgaggaaaccgcgcggctgtggctgatgacgcagccgaagccggaaccgctgtccgacgccgcgctcgacgaactgcgccagaccttcggcgcgcgctgg

SEQ ID NO: 11978 - DNA, 2004 bp, Burkholderia cepacia
ctgctcgccaatctgaaccccgaacaactcgccgccgtcacgttgccgaacgaaccggcgctgatcctcgcaggggcgggcagcggcaagacccgcgtgctgatcacgcgcatcgcgtggctgatccagcagggctatgcgtcgccgcccaccgtgctcgccgtcaccttcacgaacaaggccgcgcgcgagatgatggcgcgcctgtcggcgatgatgccgatcgacacgcgcgggatgtggatcggtacgttccacggcttgtgcaaccggatgctgcgtacgcactggcgcgacgccggcctgccgcagaccttccagatcctcgacacggccgaccagctgtccgcgatcaagcggctgatgaaggcggcgaacgtcgacgacgaaaagtacccgccgaagaacgtccagtacttcatcaacaacgcgaaggagcaggggctgcgcccggacaaggtcgacgcgaccgacaacttcaaccgcaagttcgtcgagctgtaccaggcgtacgaccagcagtgccagcgcgaaggcgttgtcgatttccccgagctgctgctgcgctgctacgagctgctcgcgtacaacgcgccgctgcgcgcgcactatcaggcgcgcttccggcacatcctcgtcgacgagttccaggacaccaacaagctgcagtacgcgtggctcaagatgctcgcgggcggcgagaacgcgatcttcgcggtcggcgacgacgaccagtcgatctacgcgttccgcggcgcgaacgtcggcaacatgcgcgacttcgaagacgaattccgcgtgcgcaacctgatcaagctcgagcagaactaccggtcgcacggcaacatcctcgacgcggcgaaccagctgatctcgaacaacgcgcaccgcctcggcaagaacctgcgcaccgacgccggccacggcgaaccggtgcgcgtgtacgaagccagcacggattcgcaggaagccggctggatcgtcgaggagatccgctcgctgatcaataccgggatggcgcgcagcgaagtggccgtcctgtaccgcagcaacgcgcagtcgcgctcgatcgagcacacgctgatgtcgtcgggcattccgtaccgcgtgtacggcggcctgcgctttttcgagcggcaggaagtgaagcacgcgctcgcgtacctgcgcctgatcgacaacccgaacgacgacacggcattcgcgcgcgtcgtgaatttcccgacgcgcggcatcggtgcgcgctcgatcgagcaactggccgacgccgcgcgcctgtacggctgctcgatggccgcggcgattccgtacgtgaccggcaaggccggcacgagcctcggcgggttcgcgaacctgatcgcgaagatgcgggccgacacgcagcacatgaacctgcccgacaccgtcgagcacatcgtacgcgcgagcggtctcgccgatttctaccagggcgagcgcgaagggcaggatcgcctcgagaacttgcaggaactcgtgaacgcggccaccgcgttcatcgccgaggaaggttacgggctcgacacgccggcccgttcgatcccgctgcgcgcgggggcgatcgcggcgcccgaactcggtaccgcgacggacgatccggcggtcgacgtgctcgatcccgcctcgcccgccgaccctgcacagaaccccgacacgatgacgccgctcgccggcttcctgtcgcatgcgtcgctggaggccggcgacaaccaggcgcaggccggccaggacgccgtgcagctgatgacggtgcacgcggcgaaggggctcgagttctcggccgtgttcatcacggggctcgaggaagggttgttcccgcacgagaacagcgtgctcgaatcggacggcctcgaggaagagcgccggctgatgtacgtcgcgatcacgcgcgcgaaggagcggctctacctgtcgttcgcgcaaagccggatgctgcacggccagacccgctacaacgtgcgctcgcgcttctacgacgagttgccc

SEQ ID NO: 11979 - DNA, 1617 bp, Burkholderia cepacia
atgtcagctgtcatgctgtacgacaactggcagcgggaccatggacgcccgtcgatgttcttcccgagcgccacgcacacggctccggccgctgccggcggcgcatcgggcacgggcgcgacgaccgcaggtgacgtgcctgccgccgcagccggcgccgcaccgtcgacgacggccccggccgcgcaggcgcagctcgtgaagttctcgaccgacgtgtacgacggcgaaatcgacacgcgcggcggcacgctcgcgaagctgacgctgaagaagcagggcgacggcaagcagcccgacctgtacatcacgctgttcgaccacacggccggccacacgtatctcgcacgcacgggcctgctcggcggcgatttcccgaaccacaacgacgtctacacgcagctgaaccccggctcgacgtcgctgacgggcgaccagaacacgctgaagctgtcgttcgaatcgccggtgaagggcggcgtgaaggtcgtgaagacctacacgttcacgcgcggcagctacgtgatcggcgtcgacaccaagatcgacaacgtcggcacggcgcccgtcacgccgacggtctacatggaactcgttcgcgacaacacggccgtcgaaacgccgatgttctcgcacacgttcctcgggccggcggtctacacggacgcgaagcacttccagaagatcgacttcagtgacctcgacaagaacaaggcgaacttcgagaagtccgcggacaacggctgggtcgcgatggtgcagcactacttcgcgtcggcgtggattccgcagcagggcgcgaagcgcgacatctacgctgaaaagatcgatccggcgctgtaccgcgtcggcgtgaagcagccggtcgccgcaatcgccccgggccagtcggccgacgtgcaggcgcgcctgttcgccggtccggaagaagagcgcatgctcgaaggcatcgcgccgggcctggagctcgtgaaggactacggctgggtgacgatcatcgcgaagccgctgttctggctgctcgagaagatccacggctatgtcggcaactggggctgggcgatcgtgctgctgacggtgctgatcaaggccgtgttcttcccgctgtcggccgcgagctacaagtcgatggcgcggatgaaggaaatcacgccgcgcatgcaggcgctgcgcgaacgcttcaagagcgatccgcagaagatgaacgccgcgctgatggagttgtacaagaccgagaaggtcaatccgttcggcggctgcctgccggtcgtgatccagatcccggtgttcatctcgctgtactgggtgctgctcgcgtcggtggaaatgcgcggcgcaccgtggattctgtggattcacgacctgtcgcaacgcgatccgttcttcatcctgccggtgctgatggccgtgtcgatgttcgtgcagacgagcctgaacccgacgccgccggacccggtccaggcgaagatgatgaagttcatgccgatcgcgttctcggtgatgttcttcttcttcccggcaggtctcgtgctgtactacgtcgtgaacaacgtgctgtcgatcgcgcagcagtactacatcacgcgcaagctcggcggcgtcaagaagaagccggcc

SEQ ID NO: 11980 - DNA, 1416 bp, Burkholderia cepacia
atggcggcgctgctgtgtgccggcgcctttgcgctggccggatgcggcagcgacgacggcccgaccagctcgacacccgccccggtgaagacggcggcgcgcaacgtgatctttttcctcggcgacgggatggggatgacgacgctgacggcggcacgcatctacggcgtcggtgaagacggcgcgctgacgatcgatacgttgccggaatccgcgttcgtgaagacctattcgaacgatgcgcaggtgacggacagcgcgccgtcgatgtcggcgtacatgaccggggtcaagaccaacaacgaagtgatctcgatgtcgcccgacacgaaggcgatcgagccgagcgcgggcctcaccggcaactgcggcgcgaacaacggcaagtcggtgtcgacgctgctcgaaatcgcgaaggcgaacgggatggcgaccggcgtcgtgacgaccacgcgcgtcacgcacgcgacgcccgccgcgacgtatgcgcacgtgtgccaccgcgatgccgagaacgacatcgccgcgcagctcgtgccgggcggcgcgggctacaacggcgcgctgggcgacggcgtcgacgtcgtgctcggcggcggcgcgcaattcttcgtgccgaaggacggcggcggcaagcgcaccgatggccgcaacctggtcaacgaactgaaggcgaaaggctacgcgttcgcgcagaaccgcgacgacctgctggccgccgatgcgacgaagcgcggcaagctggtcggcctgttcgcgtcgagccacatgagctacgacctcgatcgcggcgcgaccagggagcctagcctcgccgacatggccacgcgtgcgctcgacgtgctgcaggccaacccgaacggctatttcctgatggtcgagggcggccggatcgatcacgcgctgcacgacaccaatgcgaagcgcgcgctgcaggacacgatcgcgttcgacaacgcgatcaaggcgacgctcgacaaggtccgcaagaccgatcccgacctgacgaacacgctgatcgtcgtcacggccgatcacgatcacacgctggtgctgaacggctatgcggcgcgcaccggcaagacggaagcgggcaagcccggcgtgctgggcgtgctgcgcagctaccagacgggcgcgatcgcgaaggacgcggacggcgcgccgtacacgatcatcggcttcggcaacggcgagaaccgcgtgcagggcagccgcgcgggcaccgcgctgaccgatgcggtgacgggcgccgacgactatcgccaggaggcggtcgtgcgaatggacaagggcaacgagacgcacggcggcaccgatgtgttcctcggtgcgatcggtcgcggcgcggatgcgttccacggcgtgatcgagaacaacagggtcttcgagctggtgcgcaacgcggtgcagctt

SEQ ID NO: 11981 - DNA, 2244 bp, Burkholderia cepacia
atgaaaacttcgctgttccggtgttcgacgattgcgtccgcgtgcgcgctcacggtcctgctcgcgtcgtgcggtggcgacgacatccatgcgccgaccgaccccgacgcggcagccgaccagcgcgcggccgcgctcgtcgcgcaactgacgaccgacgagaaactgcagctcgtgcatggcaccggcatgcccgcgctcagcctgggcggcccgtttccggccgacgcgctgaacggcgcgagctacatcccgggcgtgccgcggctcggcattccggccgtcagcagcgccgattcggcaggtggcgtgaacgtgaagaatgcgcgcgtgaccgcgctgcccgcgcccgtcgcgctcgcggcgacgtgggacccggctctcgcgggcacctacggcacgcgcatcgcgctcgaactgcgcgcgctcggtttcgcggaagggctcggcggcggcgtgaacctcgcgcgcgagccgcgcaacggccgcaccttcgaatacatgggcgaggacccggtgctcgcgggcacgctgagcgccgcgcgcacgcaggccacgcaggcgcagaaggtgatcgcgacgatcaagcatttcgcgttcaacgaccaggaaaccaaccggatgacggtcgattcggtcgtcgacgagcggaccatgcgcgaggccgaactcctcgcgttcgagatcggcgtgaaggacggccagccgggcaacgtgatgtgcgcgtacaacaagctgaacggcgtgtatgcgtgcgagaacccgtatttgctgacgacggtgctgaagaacgagtggggcttcaagggcgtcgtgcagtcggactggggcgcgacgcattcgacggtcgcggccgtgcaggccgggctcgacgaggagcagccgggcgcggccgacgacggcaacgcgccgctcggctcgtacttcaattcgaagctgcgcgcggcgctgcaggccggcagcgtgtcggtcgcgcggctgaacgacatggtgcagcgcaagctgcgcacgctgatccgcatcggcgtgatggatgcgccgccgaagccgggcggcgcgatcgacgaggccgccggcaatgccgacgcgctcgcgatcgcgcggcaagcggcggtgctgctgaagaacgcggccgcgccgggcgacacgcagccggtgctgccgctggccgccggcacgctcaagtcggtcgtcgtgatcggcgggcatgcggacgcgggcgtgctgtcgggcggcggctcgggtgcggtgccggcgatcgacggcaacgcggtgacgacctgccagcaaccggccgacacgctgttcggcgggtgcgcgacctggtacaagtccgcgccgctcgcggcgatccgcgcgaaggcgccgaatgcatcggtcagctatctcgacggcaccgacgcgaacgccgcggccagcgcggccgcgcaggccgatgtcgcgatcgtgttcgccacgcagtggcagacggaggggctcgacctcgcgagcctgtcgctgcccgatgcgaaggcggacccgtccaaccagcaatacgaccagaacgcgctgatcgccgcggtcgccgcgaaggccaagcgcgtgatcgtcgtgctcgagaacggcagcccggtgctgatgccgtggctcgcgaacgtgcacggcgtgctggacgcgtggtatccgggcgcgcagggcggccaggcgatcgccgacctgctgttcggcgacgcgaacccgtcgggccggctgccgctgacgttcccgaagcaggaggccgacctgccacagccgacgatcgatccgtcgaacctgcggaacgtctatgcggaagggctcgcgtacggctatcgctggttcgacgcgaaggcgatcgagccgctgttcccgttcggctacgggctgtcgtacacgacgtatgtgttgtcggcgatgtccgcgcaggccgacgcagcgggcaacgtgacggtcggcgtgacggtgacgaacacgggcgcgcgcgccggtatgcaaacggtgcagatctacgcggcgctgcccgcgtcgctcggcgagccgccgaagcggctcgtcggctggaccaaggtcgcgctgcagccgggcgaggcgcgcacggtcagcatcgcggtgccggcgcagcgcttcgcggtgtgggatgcgagcgcgcacgcatggcggatcggcgcgggcacgtatgggttgtcggcggccgcgtcgtcgcgtgacccgcaggcgctgtcgcagacagtgacgctcgccgcgcac

SEQ ID NO: 11982 - DNA, 1407 bp, Burkholderia cepacia
gtgaccgcgcgccccgcgtcgtattcgctgctgcggcgcctgacgctcgcgttcgccgccgtcgcggcgctcgtgttcgcgctgaccggcgcgtatctctatcgttcgctgtccgccgaactgacgcggcgcgacgacatcgagatctccgccaagctcaaccagttcctgcaactggcacgcgccagcggctcgacggccgcgctgcgcgccgacccggccgtgttccatgacgtgctgctgtcacatccgggcgtctatctcggcatctacgatgcgcgacaccagccgctcgtcgagcattccgacgaagccggcaacacgctcgcatcggtgatctcggcgccgcatccggctggcagcgccgatgggccgttcacgtgcgcgccgcccggcatcggcacgtcgcgctgcgtgtacgcgcgcgaaacgctgccgtccggcgaagcgatcgaggtcgcgctcgcgcgcaccgcgaccgatcggcagtcgctgctcgaaagctatcgtgtcgacatctggctcgcggcggccgtcggcgcgctgctggtcggcgcgctcggctacgcggtcgcgtcgcgcggcctgcgcccggtcgaaagcctcggccggcagacgtcgcgcatcgaggcgcacaacctgaacgcacgcctcgacgcgcgcggcggcccggtcgaattgcgcgagttcgccacgtcggtgaaccggatgctcgaccgcctcgaacgcgcgttcgtgcggctgtcgcagttctcgtccgatctcgcgcacgacatgcgcacgccgctcgcgaacgtgatcagctcgtcgcagatcacgctgtcgcgcgcccgcaccgtcgacgaatacgaagcgctgatcgaatcgaacatcgaggaatgcgaacggctgcagcggatgatcgagaacatgctgtttctcgcgcgcaccgacaatgcgcggcagcacctgaagaccgccgaactggacgcgggcagcgaactgcgccgcctcgcgtcgtatttccaggcgttggccgacgaggccggcgtgcgcatcgacgtgcatggcgaagcgccggtcgtcgcggacgcgacgctgttccggcgcgcggtcagcaacctcgcgtcgaatgcgctcgaacacgcggacgccgcgtcgacgatcgagctggccgtgtccgtacaacgcggctacgcggtcgtcgaagtcacgaaccgcggcgccgcgattccgcccgaacaggtcgagcggatcttcgagcgcttctaccggatcgattcgtcgcggcacggcgcggcgcgcaacgcggggctcgggctcgcgatcgtgaagtcgatcatggagctgcatcgcggcaaggtggaggtcgcgagccgcgacgggcgcacgacgttcgcgctttattttccgcgcggcgccgatcgt

SEQ ID NO: 11983 - DNA, 1395 bp, Burkholderia cepacia
ctgctgctggtgtcgggcacgctcgaatcgatcaaccggatcgtcgacaccagcctgtcggtcacgctgttcggtcgcggcatcgtgtcgctcgtcgtcgcgctgacggtcggcgcgtcgctgttgcgcgcgaaccgtgcgcgcgccgcgctcgcggcggcaggcgaggcgcccgagcagcgctcgacgctcgcgggcctgatccacgccggcgtcacgctcgcgatcgtcgcgtcgttgatcgccctcctgatcggttacatcacggtcgcgcgcttcatcacgtacgagctcgtatggttcgagatcgtgctgtgcgcgacctacatcctgatccagttgacgcgcgacgcgagcgaaagcctgttctcgtcgagcctgtcgacgggccagcagatcaagcacctgttcgcgctcgaagaccgccacctcgaccaggcgcgcacggtcctgtccggcttcggcacgagcctgctgatgctgatcgcggcgatcgcgctggtgaccggcggcttcggcacgacgccgggcgacctgctcgacagcgcggtcgcgatgatcggcagccagcggctgcagagtctgaacatcatgcccgaccggatcatgaatgccgtgatcggcttcgcgatcggcttctacctgctgcgctcgctgcgccgctggctcgacggcgagttcatgcccgcgctcggcatggacacgggcatgcgcgtgtcgctgatcacgctgttcaccaatgtcggctacgtgctgctcgtcctgatgacgctcgggctgctcggcgtcagatggaacaatctcgcgtggatcgtcagcgcgttgtcggtcggtatcggcttcggcctgcaggaaatcgtgaagaacttcgtgtcggggctgatcctgctgaccgagcgcccggtgaaggtgggcgacatggtcagcatcgcgggcgtcgaaggcgacatccgccgcatcaacgtgcgcgcgaccgaaatccagctgagcgaccgctcgaccgtgatcgtgccgaactcgcaactgatctcgcagaacgtgcgcaacgtgacgatgggcaacagcacgcagggcgtcgcgacgctggtgctgacgttcccgctgaacaccgatcccgagcaggtgcgcgacctgctgctcgatgcgtatcgcgcgcatcaggcgattctcgagaaaccggcgccgtcggtgacgttcagccagctcgcgccggacgggatcacgctgagcgtgacgggttacgtgtcgagcccgcggatcgcgagttcgacgaagagcgatctgctgttcgagatcctcaagcagttgcgcgcggcggggatcacgctgtcgagcccgcagatgctggtcgtgcagaacatgccggcgaacgatggcgccacgcggcacgaatcg

SEQ ID NO: 11984 - DNA, 834 bp, Burkholderia cepacia
gtgcttgagctaaggcaacaattcccgctggctggcttgctccgggtggccggactggctcgcagcacgttttattaccagtgcaaggcgctggccgctcccgatcgacatgcgagtgtgaaagcgaaaattcgagcactgttcgagcagcacaaggggcgctatggctatcgacgcatcacgctggcgctgcgccgtctggggcagatgattaaccacaagacggttgcacgcctgatgcgcaagatgcagttgaagtcctgcgtgcgggtcaagaagtaccgtgcgtataggggcaacacgtgcaagacggccccgcatctgctccagcgccagttccatgccgcccgtccgaacgagaagtgggttaccgacatcaccgagttcagcgtaggtggccaaaagctgtatctgtcaccagtgctggatctgtacaacggggagatcatcgcgtaccagacgcatactcggccagccttccagatggttactgacatgttgcgcaaggctttgcgtcgcctgcaacccgacgaaagacccatgttgcactctgatcaaggctggcattatcaaatgcccggctggcggctcatgctcgagcaacgctcgttggcgcaaagcatgtcgcgtaaaggcaattgcttggacaacgctgccatggaaagcttcttcggcacgctgaaatccgagttcttctacttgaaccacttcagcagcattgaacagctacgcatcggcttgaagcgctacatccggtactacaatcacgagcgcatcaagctcaaactgaaagggctgagtcctgtgcaatacaggactcagcctcatccggcc

SEQ ID NO: 11985 - DNA, 1092 bp, Burkholderia cepacia
atggcacgcccgttcctcacgacgcctcctatgactgcctcgaacgcttcttccccggcgacgctttcgctcgcccgtcccgacgactggcacctgcacctgcgagacggcgacatgctcgccgccgtgctgccgcacaccgcccgccagttcggccgcgccatcgtcatgccgaacctgaagccgccggtcacgaccaccgcgcaggcgcaggcgtatcgcgagcgcatcctcgccgcgctgccggccgggatgacgttcgagccgctgatgacgctgtacctgaccgacaacacgccgcccgacgaaatccgccgcgcgcgcgaaagcggcttcgtgcacggcgtgaagctgtatccggcaggcgccacgacgaattccgaccatggcgtcaccgatctcgcgaaatgtgcgaagacgctcgaggcgatgcaggaaaccggcatgccgctgctcgtgcacggcgaggtgaccgatgcgtcgatcgacctgttcgaccgcgagaaggtgttcatcgaccgcgtgatgacgccgctgcgccgcgatttcccgggcctgaaggtcgtgttcgaacacatcacgacgaaggacgcggccgactacgtccgcgatgccgacgcggcgcccggcctgctcggcgcgacgatcaccgcgcatcacctgctgtacaaccgcaacgcgctgttcgtcggcgggatccgcccgcattactactgcctgccggtgctgaagcgcgagacgcatcgcgtggcgctggtcgaggccgcgacgtcgggcaacccgcgcttcttcctcggcaccgacagcgcgccgcacgcgcgcgacgcgaaggaaaccgcgtgcggttgcgcgggctgctacacggcgctgcacgcgctcgagctgtacgcggaagcgttcgacacggccggcgcgctcgacaagctggaagggttcgcgagcttcttcggcgccgatttctacgggctgccgcgcagcgccgagacggtcacgctgcgccgcgagccgtgggaactgccgcgcgagatcttcgcgggcgagacgccggtcgtgccgctgcgcggcggcgagacgatcggctggaaactggcg

SEQ ID NO: 11986 - DNA, 397 bp, Burkholderia cepacia
ttcttttacgcgacgctgcacttcacgacctacctgtggttcgacaagtggttcgacgtcgtcgcgatcctgaaggatgtcggcaagcgcccgttcatcacggtcggtttcgcggcgttcgtgctgctgattccgctcgccgcgacgtcgccgcgcgcgatggtgcgccggctcggtcgccactgggcgacgctgcacagcgcaatctacgcgatcgcgctgttcggcgtgctgcacttctggtggatgcgggcgggcaagcacgatcttgcgcagccgaagctctacgcggcgatcgtcgccgcgctgctcggctggcggctggtgacgtggggctggcggcgcgtgcgcgcgtgacggcgccgccgctgaaaaacaaaaggcgatgaccgggaag

SEQ ID NO: 11987 - DNA, 303 bp, Burkholderia cepacia
gtggctaaactggcactgatcgaacgtgaaaagaagcgcgcccgcctggtcgcgaagttcgcagcaaagcgcgaagcgctgaaggcgatcgtcgaagaccaaagcaagtcggaagaagagcgctacgaagcacgcctggagctgcagcaactgccccgcaacgcaaacccgacccgccagcgtaaccgctgcgcgatcacgggccgtccgcgtggcacgttccgtaaattcggcctcgcgcgtaacaagattcgtgaaatcgcattccgtggcgagattcctggcctgaccaaggcgagctgg

SEQ ID NO: 11988 - DNA, 831 bp, Burkholderia cepacia
gtgcagaagatgaagctcgccgcgatcgaatcggaatgggaaacccagccggcgccggcatcgttcacgctgatcggcatcccgaaccagaaggaagaacgcaccgactacgcgatcaagatcccgtacgcgctcggcctgatcgcgacgcgctcgatcgacgagccggtgatcggcctgcgcgagctcgcgaagcacagcgaggaacacatccagagcgggatggtcgcgtacggcgccttgcagaagatcaaggaaggcgacacgagcgacgcgacccgcgcgctgttcgaccagcacaagcagtatctcggctacggactgatgctcaagcagttcacgccgaacgtggtcgatgcgacgcccgagcagatcaaggccgccgcgaagaagacgatcccgccggtcgcgcccgtattcttctcgttccggatcatggtgttcctcggcttcctgttcctcgcgaccttcgtcgccgcgttctggttctgcgcgcgccggcagttgctgcaggacaaccgccgctggttcctgcgctatgcggtgtgggcgatcccgctgccgtggctcgccgcggaattcggctgggtcgtcgccgagctcggccgccagccgtggacgatcgcgggcatcctgccgacgcatctgtccgcgtccagcctgacgtcgacggacctgtacctgagcctcgccggtttcatcgcgttctacacggtactgttcatcatcgagatcaagctgatgttcaagtacgcgcgcctcggcccgtcgtcgctgcataccggccgctatcaccacgaactcgccgccgccggcgagcgggccgcggtc

SEQ ID NO: 11989 - DNA, 455 bp, Burkholderia cepacia
atggcgagatataccgagcagttcaagctatcggtagtgaagcggtgcatcgggggggaagccatacgcgcggtggcgcgaacgcatggcttgagtcactcgacggtttcccagtggtacgccacataccaggctcatggtaaggacggcgtgcgtaggaagtacaactcatacgatgtggcgttcaggctcaaagttgttcagcacatgcgcgagcatggcgtgtcgagcaaggaagcggcggcgcggttcaatattcgcaatccgagcgcggtgctcgaatgggctcgccgctatgatgatggtggtttgactgccctcccgccgaggcccaaaggccgccgcccaaccgcaatgccaaaaaccaccgctgctcagcctctgaaccctaccgatggcaccggtaccccgtacccgcaaggacctgcttcaggaaactgaccacctttccatgg

SEQ ID NO: 11990 - DNA, 990 bp, Burkholderia cepacia
atgactgacgttaccgcttctcccgcaccggccgacacggccgcgacccctgcctacgatccgaccgccaagcagaaggcgcaggcgaagacggcgcgcatcccgatcaaggtcattccgatcgaaaagctgaagaagcccgagtggatccgcgtgaaggcggccaccggcagctcgcgtttcaacgagatcaagacgatcctgcgcgagcacaacctgcacaccgtgtgcgaggaggcgagctgcccgaacatcggcgaatgcttcggcaagggcaccgcgacgttcatgatcatgggcgacaagtgcacgcgccgctgcccgttctgcgacgtcggccacggccgtcccgatccgctcgacgccgacgaaccgaagaacctcgcgcgcacgatcgcggcgctcaagctcaagtacgtggtgatcacgagcgtcgaccgcgacgacctgcgcgacggcggtgcggctcacttcgtcgagtgcatccgcgaagtgcgcgagcagtcgccggacacgcgcatcgaaatcctcacgccggacttccgcggccgtctcgaccgcgcgatctcgatcctgaacgccgcgccgcccgacgtgatgaaccacaacctcgaaacggtgccgcgcctgtacaaggaagcgcgcccgggttcggactatgcgcactcgctgaagctgctgaaggacttcaaggcgcagcatccggacgtcgcgacgaagtcgggcctgatggtcggcctcggcgagacggaagaggaaatcctgcaggtgatgcgcgacctgcgcgcgcacgacgtcgacatgctgacgatcggccagtacctgcagccgtccgagcaccacctgccggtgcgcgcgtacgtgcatccggataccttcaagatgtacgaggaagaggcgtacaagatgggcttcacgcacgcggccgtcggtgcgatggtgcgctcgagctatcacgccgatctgcaggcgcatggggccggggtggtc

SEQ ID NO: 11991 - DNA, 1022 bp, Burkholderia cepacia
gtggatgccgtcatgcggcccgccggccggtccgcggggcggcccccagatccgaaccgaatcgctatcgtgtccaagtcctcagaaaaactcgatctcgccacgcgcgccgcgtggctctattacgtcgcgggcgacacgcagaacgaaatcgccgaaaagctgcaggtgtcgcgccccgtcgcacagcgcctcgtcgcgttcgcggtcgagaagaacctgatccgcgtgcgcgtcgaccatcggctcgccgactgtctcgatctcggcgcgcaactgtcgaaacgctacggcctcgcgatgtgcgaagtcgtgccggtcgacgccgatgcgcccgacgcgatcgaccgcaagctcgcggtcgccggcgcgcaggtgatggagcgctacctgaacgaaacgcggccgatggtgatcgcggtcagcagcggccggacgctgaaggccgcggtcgcgcagatcgcgcaaatcgaccgcccgcagcaccggctcgtatcgatggtcggcgcgatcgcggccgacggctcgtcgaaccgctacgacgtcgcgcagtacatctccgagaaaaccggcagcaagcacttcctgctgcctgcgccgctgttcgcggacagcgacgccgaacgcgcgcagtggtgcaatcaccggctgtaccggatcgtcgaggcgctgtcgggcaaggccgacgtcgcgttcgtcgggatcggcaacatcggcccgcactgcccgctctacgaagacggcttcatcaccgaacaggagcgcgacgagatgaccgcgctcggcgcggtggccgaactgctcggcgtgccgatcgacgcgcagggcacgcagatcaccgtgtcgaccagcgcgcgcgtgacgagcgtcgcgctcgccacgccgccgaagctgcccacgatcgcgttcgccggcggcccgaagaaacacgacgcggtgattgccgcgctgcgcggcggctggctgtcggggctcgtcaccgacgaaacctgcgcgcgcgccgcgctcgccgcgaagggggt

SEQ ID NO: 11992 - DNA, 293 bp, Burkholderia cepacia
aatacatttccggcgagaacgaggaatgcctttcccagtcgcgaacagtgccgggcatcgagccgtcgggagaccgaatactgcagggtcggatgttctcgcacaccgatacgcagatgtaccgcctcggcgcgaacttcaatcagccgccgatcaaccgtccgcgcgtgcgcgtcacgaacaacaaccaggacggtgcgctgaacttcggcgaccgcaagggcgaagcgaactacgagtcgtcaacgctgaacgaactcgcgcagaacccgcgtgacaagtcagaacagcgc

SEQ ID NO: 11993 - DNA, 1263 bp, Burkholderia cepacia
atgatcacgcaatcctcgcccgcctcccgaaccgcacccgaccccgacgtcccgctgtcgctcgccgacgcgcaggcgctcgcgtgccgcttcgcggtgcccgtcgacgcgtgcgacacggtgacgctgcgcgatgcgctcgaccgcgtgctcgcggtcgacgtgagcgcgccgttcgacattcccgcgtacgacaattcggccatggacggctatgcgttcgacggcggcagcgcggcactcgcgtcgccgcagggcgaggtcgcgatgccggtcgccggcaccgcattcgccggccatccgttcgacggcgccgtggcagccggtgcatgcgtgcggatcatgaccggcgcgccgatgccggccggatgcgacaccgtgatcccgcaggaacgcgtgcgcgtcgagggcgacacgatccgcttcgccacgcgcgacgtcgcgcgcggcgcgaactgccgcaaggccggcgaggatctcgcgcgcggcgcctgtgcgctcgccgcgggccgcgtcctgcggccgtctgatctcggtctgctcgcgtcgttcggcgtcaccgacgtcatggtgcgccggcgcgtgcgcgtcgccgtgttctcgaccggcgacgagctgcgcgagcccggcgaaccgctcggccgcggcgcgctgtacgacagcaatcgcgggatgctgatcgcgatgctcgaacgcctgcacgtggatgcgatcgatctcggcatcgtccgcgacgacccggccgcgcaggccgatgcggtcgtcacgtcgggcggcgtgtcggtcggcgaagccgacttcacgcgcgacgtgatggcgcggctcggcgacgtgacgttcgcgagccttgcgctgcggcccggccggccgctcgcgtgcggcacgctcgcacgcgcggccgacggcgccggccacgcgctgttcttcgggctgcccggcaatccggtcgcgtccgccgtgacgttctacgccatcgtgcgccccgcgctgctgacgctggccggcgcgcagacgccgccaccggcgatgtacacggcgcgcagtacgcagccgttgaagacgcgccccggtcgcaccgaatacctgcgcggcatcgcgacgcgcgccgccgacggccaatggcacgtcgtaccggccggatcgcaaagctccgcgtcgctgagcggcctcgcagacgccaactgtttcatcgtcctgggccacgataccgcggcagtcgacgcgggcgccccagtcgacatcctgccgctcgacggcctgatc

SEQ ID NO: 11994 - DNA, 2691 bp, Burkholderia cepacia
atgtccgacaacgcctcctccaccgtgatccgccgcgccgactacacgccgccggccttcctcatcgattccgtcgcactcgaattcgatctcgcgccggcccgcacgatcgtcaggaatacgatgcgcgtgcgccgcaatccggatgccgcgcccgcaccacacctggaactgatgggcgaggcgctcgaattcctcggcgcgcggctggatggcgcaccgcacggcgcggtgcgcgcgcacgagcacgggctgaccgtcgagaacgtgcccgaggcattcgagctgacgctcgaaagcgcgtgcgcccccgaccagaatacgacgctgtcgggcctctacgtgtcgagcggcaacttcttcacgcagtgcgaagccgaaggctttcgccgcatcacctacttcctcgaccgccccgacgtgatggcgtcgtacgtcgtcacgttgcgtgccgacaaggccgcgtacccggtgctgctgtcgaacggcaatctcgtcgattcgggcgacctgcccgacggccgccacttcgcgaaatgggaagacccgttccgcaagccgagctatctgttcgcgctggtcgcgggcaagctcgtcgcgatcgaggaaacgatcaccaccggctccggcaaggaaaagctgctgcaggtgtgggtcgaaccggccgatctcgacaagacgcgtcacgcgatggattcgctgatccactcgatccgctgggacgaaaagcgcttcggcctcgagctcgatctcgaccgcttcatgatcgtcgcggtcggcgacttcaacatgggcgcgatggagaacaaggggctcaacatcttcaacacgaagtacgtgctggcgaaccccgagaccgcgaccgacaccgatttcgcgaacatcgaatcggtggtcggccacgaatacttccacaactggaccggcaaccgcgtgacctgccgcgactggttccagttgagcctgaaggaaggcctgacggtgttccgcgaccaggagttctcggccgacatggccgcgggcgacgcggtcgaatcggcggcccgcgcggtcaagcgcatcgaggacgtgcgcgtgctgcgccagctgcagttcgcggaggacgccggcccgatggcgcacccggtgcgcccggagagctacgtcgagatcaacaacttctacacgatgaccgtctacgagaaaggctcggaagtcgtgcggatgtaccagacgctgttcggccgcgacggcttccgcaaggggatggatctctacttcaagcgccacgacggccacgcggtgacctgcgacgacttccgtcacgcgatggccgacgcgaacgggcgcgacctcgcgcagttcgagcgctggtacagccaggccggcacgccgcgcgtgtcggtacgcaccgcgtacgacgcggccgcgcgccgctatacgatcaccctcgcgcagggctacggcgacgcgtcgccggccgcgcgcgaaacgcagcaagggccgctcctgatcccgttcgcgatcggcctgatcggccgcgacggccgcgacctgccgctgcgtctggacggcgaagccgccgcatcgggcacgacgcgcgtgctcgagttcaccgacaccgagcagaccttcacgttcgtcgacgtgccggaagcgccgctgccgtcgctgctgcgcaacttctcgtcgccggtgatcgtcgagtacgactacagcgacgacgatctcgcgttcctgctcgcgcacgacagcgatcctttcaaccgctgggaggccggccagcgcctcgcgacgcgcgcgctgctgacgctcgccgcgcgggcggccgccaacgcgccgctcacgctcggcgagaacttcgtcgccgcgttccgccgcgtattgaccgatgaaagcctgtcgccggcgttccgcgaactcgcgctgacactgccgtcggaaacctatctcgccgatcagatggccgaggccgatccggccgccgtgcatcgcgcgcgccagttcgtgcgccgccagctcgcgaccgcgctgcgcgccgactggctcgctacgtacgagcagcaccagacgcccggcgcttacgagccgacgcctgaagcctcgggccgccgcgcgctgaagaacctcgcgctcgcgtatctggccgaactcgacgatccggccgatgcggtacgcctcgccacggcccagtacgatgcggcgaacaacatgaccgatcgcgcggctgcgctcggcgcgctgctgtccgcggccgccgcgggcgcgaacgggccggccgagcacgcgctcgacgacttctaccgccgcttcgagaaggaagcgctcgtgatcgacaagtggttcgcgatgcaggcggcgcaacgcggtacgcccgcgcagccgacgctcgcgaaggtgcgcaagctgctcgcgcacccggcgttcaatctgaagaatccgaatcgcgcgcgctcgctgatcttcagcttctgcgcggccaatcccgcgcaattccacgcggcggacggttcgggctacgcgttctgggccgaacaggtgctcgcgctcgacgcgatcaacccgcaggtcgccgcacgcctcgcgcgctcgctcgaactgtggcgccgcttcacaccggcgctgcgcgaccggatgcgcgaagcgctcgaacaggtcgcggccggcgcgaaatcgcgtgacgtgcgcgagatcgtcgagaaggcgctcgcg

SEQ ID NO: 11995 - DNA, 1491 bp, Burkholderia cepacia
atgaccgtattccgtgcggctcgcccgcttgactggcggcaggttgcggcggtggcggccggcgcgccgctggcgttgcccgacgatacgcgcgcgcgcgtcgtggccgctcgcgaactcgtcgacgagatcgtcgcgcgcgggattcgcgcctacggcgtcaataccggcgtcggtgcgctgtgcgacgtgatcgtgtcgccggcgcagcagagcacgctgtcgcacaacatcctgatgagtcacgcggtgggcgtcggcatgccgctcggcgcagccgaaacccgcgcgatcatcgcggccgcgatcaacaactatgcgcacgggcattcgggcgtccgtcccgatgtcgtcgaacagctcgtcgcgctgctcgagcacgattgcctgccggaagtgccggcgcacggctcggtcgggtacttgacccacatggcgcatgtcgcgctcgtgtgcgtcgggcacggccatgcgcgccatcgcggcgaacgcatgcgcggcgacgaggcgctgcggcgtatcggccgcgaaccgctggtgctcggcgcgaaggaggggttgagcctggtcaacggaacgccgtgcgtcacggggctggctgcgctcgcgctcgcccgcgccgaacggttgctcgactgggccgactggatcgcggcgatgagcttcgagaacctgggcgggcaactcgccgcattcgatccggcttcgctcgcgctgcggatttcccccggtatcgggcaggtcggcgcccgtgtgcgtgcgctgctggcggacagcggcatgcttgccgcggcgagcggccggcatacgcaggatccgctcagcctgcgcacgattccgcacgtgcatggcgcggcgcgcgacgtgttcgacgtcacggcggaggtcgtcgatcgcgaactcgcatccgtgaccgacaatccggtcgtggccggcacgcgagacgcgccggccgtgcattcgcaggcgcacgcggtcggcgccggcatcgcgctcgcgatggacagcctcgcggcggcgatggcgcaagtcgccgcgatcgccgagcggcgtctcgaccggctcgtgaatccgctcgtcagcgggctgccggcgtttcttgccgcgccgggcggcagctgttcgggtttcatgatcgcgcagtacacggcggtcgcgctggtcgcgcagaatcagcggcttgccgcgccggcgagtctcgacggcggcatcacgtcggggctgcaggaagatcacctgtgtcatgcgacgccggccgcgctgaaggcgctcgacatcatcgagaatacgacccgcgtgctcgcgatcgagctattggccgccgcgcaggcgtacgacctgcagccgggcgacaccgcgcgggccgcatcgacggacgcgctgtggcggcatgtacgcacgcgcgtgccggtctatcgcgacgaccggccgctcgcggacgatatcgcgatcgcggccggcatcgtcgcaggcgtgccgccttcgttgcag

SEQ ID NO: 11996 - DNA, 939 bp, Burkholderia cepacia
atggatacgttacaaaacatgcgggtattcgtccgcgtggtcgacgcgggcagctttaccgcggccgcccagcagatgaattcgaccaccgcctacgcgtcgcgcgcggtctcggatctcgaggcccacctgcgcacgcgtctcctgaaccgcacgacgcgccggatcgcgctgaccgaggccggcgagcgttatctgcagcgctgcgaacagatcctcgcttacgtcgaccaggccgaagccgaggcgggcgacgcgcacgcgcgcccgtccggcaagctgaaggtccattgcttcacgagcctcggccagcactatctggtgccggccatcgcgcgctaccgcgagcgctatccggacgtgcacgtcgagctgacgctcgcgcagcggatgcccgacctgctcgacgaggggtacgacgtcgcgatcgtcgtcggccgcgacctgcccgattcggggctcgtgtcgcagcggctcggcgagagctacagcgtcgtctgcgcatcgccgggctacgtcgagtcgcacggcgtgccgcagcggccggccgatctcgcacagcacgtgtgcctggggatggtcgcgccgggctttcacttcgacgaatgggcgctggcggggccgaacggcgacgaggtcgtgccgatcacggcgccgccgtttcgcgtgaacgtcgccgaggcgctcgcggtggccgtgcgggaggggatgggcgtcggcgggctgccgctctattcggcgatcggctggctgcgtagcgggcacatcgtgcgcgtgatgcccgagtaccggtcgcacgtgatgaacatctacgcgctgtatccgtcgcgccagtacctcgacgcgaaaatccgcacctgggtcgatttcctgcgcgaaaagctgccgctcacgctcgaagcggacgaagcggcgctcgagcagtacacgcgtgcgaca

SEQ ID NO: 11997 - DNA, 941 bp, Burkholderia cepacia
  misc_feature (737)..(737): n=g, a, t or c
gtggcccataccggagaactggccgcactggccgagcgcgccgtcaaacggcgcggtgtcaccctgctgaccctgtgcctcgccgtactcgtcgcgcaggtcgacacggccgtcgtcaatctcgcgacgcgcgccatcggcgcctatttccacgccggtgtcggtgcattgcaatgggtcgtcgacagctacaacctcacgtacgcggtgctgctgctgaccggcggcctgctcgccgacctgtacggccggcgccgcatcttcatggccggcacggccgttttcacgcttgcgtcgctgctgtgcgcgctcgcgccatcggtatcggtgctgatcgccgcacgtgcgctggccggcgtcggcgcggcgttgttgctgccggcgtcgcttgcgatcgtgcgcgtcgtgtggcgcgatccggtcgcgcgcggccgcgcgctcggcatctgggccgcgtgcaacggcgtcgcgatggcgctcggcccgacgctcggcggcgtgctgatccggcacttcggctggcgcagcatctttttcgtcgtcgtgccgctgagcgtcgccgcgatgctgctcgcgattccggccgtgcccgaatcgtccgatccgcacggccgtcatttcgacggtgcggcgcaagtcgcgggcgcactcgcgctcggcgcgctcgcgtatgcggcgatagtgttccgcgacgcaccggtcgcctgctcgatcgccggctgcatcgcggtgccgtnccgtcgctctgctcgcgtcacgccgtctccgcgctggcgcggcgcggtcgcgcccctgcgtctcctcgtgcccgccctgtgcacccgtcgctttcctccgccccccctgctcctcttggttgtgctctcctctccccctctccctccggctgcgctgtgccggtctccgcggcgtttgcttaagaagaataaaaaaaaaaaaat

SEQ ID NO: 11998 - DNA, 1173 bp, Burkholderia cepacia
atgtcgcgccgcgaatggctgaagctctcggccctgttcaccgcgacgggtgccgccccgttgctgtcgatggccaacgcgcacgccgcggccgagccggatgcgccggttcgcatcggctatctgccgatcaccgacgcggccccgctgctggtcgcccacaacaacggctatttcgcgtccgaagggctgacggtcgagcaaccgaagctgctgcgtagctgggcgcagctcgtcgaggcgttcctgtccggccaggtcaacgtcgtgcacctgctgtcgccgatgacgctgtgggcgcgctacggcagccgcgcgccggcgaaggtggtggcatggaatcacgtgaacggctccgggctgacggtcgcgcccgacatcgactcgctgcgcgatctcggcggcaagaccgtcgcggttccgttctggtactcgattcacaacgtcgtgctgcaggacatgctgcgcgggcaggggctcgtccccgtgctcaagcggcgcggcacgcccgcggcgaacgaggtcaacctcgtcgtcatggcgccgtcggacatgctgcccgcgctcgccgcgcgccagatcgccgggtatatcgtcgcggagccgttcaacgcgaccgcggaattgatgaagatcggcaagatcctgcgtttcaccggcgatgtgtggaagaaccatgcgtgctgcgtcgtgttcatgcacgagcaggatctgacgcagcgccccgcgtggtcgcaaaaggtcgtcaacgcgatcgtgaaggcgcagctgtgggcgcgctcgcatccgcaggaaaccgcgcaactgctgtcgaaggacggcacgcaccgctattcgccgcacacgctcgcgtcgctggaccgcgtgctggtgccgtcggcgtcgctggccgacacctatcgggcgagcggcgcgatccgccacgccgactggcacgcgaagcggatcgacttccagccgtatccgttcccgagctataccgaggcgctggtacagcggctgaagcggacggtggtcgacggcgacagcacattcctcgcgtcgctcgatccggcgttcgcgacccgcgacctggtcgacgaccggttcgtgcgcaagagcatcgacgcggtcggcgggctgaccgcgttcggtcaatcgggcgggttccgccgcgaggagatcgtcgttgtc

SEQ ID NO: 11999 - DNA, 1020 bp, Burkholderia cepacia
atggcgacgtccgtcgccgcgcgcccgcaccggcccattggagtgacgagagtcatggatacgtccagcatcaacgcccagagcatcttcgacgacaacgcagccacgctgaaactgagctggctgacggggcatgaaggctgggaacgcggcttttcggccgacacggtcggcaacgccacgtcgagcgccgacctcgtcggccacctgaacctgatccacccgaaccggatccaggtgctcggcgaagccgaaatcgactactaccagcgccagaccgacgaagaccgctcgcgccacatggccgagctgatcgcgctcgaaccgccgttcctcgtcgtcgccggcggcgccgcggcgccgcccgaactggtgctgcgctgcacgcgctcgtccactccgttgttcacgacgccgatgtcggccgccgcggtgatcgacagcctgcggctctacatgtcgcgcatcctcgcgccgcgcgcgacgctgcacggcgtgttcctcgacatcctcgggatgggcgtgctgctgaccggcgattcgggcctcggcaagagcgagctcggcctcgagctgatcagccgcggccacggcctcgtcgccgacgacgcggtcgatttcgtccgtcttggccccgatttcgtcgaagggcgctgcccgccgttgctgcagaacctgctcgaagtgcgcggcctcggcctgctcgacatcaagacgatcttcggcgaaaccgccgtgcggcggaaaatgaagctgaagctgatcgttcagctcgtgcggcgccccgacggcgaattccagcgcctgccgctcgaaagccagaccgtcgacgtgctcggcttgccgatcagcaaggtcacgatccaggtcgcggccggccgcaacctcgcggtgctcgtcgaggcggccgtccggaacacgatcctgcagttgcgcggaatcgacacgttgcgcgatttcatggatcggcaacgactcgcgatgcaagatcccgacagtcagttccccggcaaactcgtg

SEQ ID NO: 12000 - DNA, 1090 bp, Burkholderia cepacia
ctcgccggcaaatggcattaccggctcggcgcgctgctcggcgaaggcggcaacggcgtggtgtttcgggcgacctgcgacgagacggggcacgccgtcgcgctcaagctgatgcgcgacgacgccgcgctggtcgcgccggagcggatgcgacggcgggcacgctttcggcgcgagacgagcctgtgcgaggcgctgcggcatccgaacatcgtggcgctgctggaccagggcgaggcgcccgacgggcggctgttcgccgtattcgaactggtcgagggccggacggtgcgcgaccggctcgcggcggacgggccgctgtcggccatcgacaccgggcggctgatgacgcaggtgctcgacgcgctcgcggccgcccatcggcgcggcatcgtgcatcgcgatctgaagccgcagaacatcgtgatcgcgatggccgacgacgggccgcacgcgaagctgctcgatttcggcatcggcgcgttgctgcccggcaccgaagacatcgcgcgccagaccgcgacgctcgcgaccgaggtgctcggttcgccgccctactgcgcgcccgagcagttgcgcaacgagccgccgacgcccgccagcgacctgtatgcgtggggcctgatcgtgatcgaatgcctgacgggcgaggtcgtcatgcaaggcgcaagcgtggccgagatcctctatcagcaactgagcccggtggatgtggcgctcccgccgtcgatcgcggcgctgccgctcggcgcggtgctgcggcatgcgctgaacaagaatccgcggcagcgcgccgcgtcggccgaggcgctcgcggcgcagtttcgtgcgctcaacttcgccgcgctcgtcggccagttcgacgccggtcgcgccggccggcacgcgcgttcgcgaccgcttgcgccgcgcggcgagacgatcgcggaggtgggcgagtaccggcagatcaccaccctgtgctgctgcgtgacgatcgccggagagggccgccggcgccatgccggaaccgagcacgggatggtgctcgacggctacgaggaacagtggctgacgaagtgcgccgatatcgccgtcggttacggcgcgc

SEQ ID NO: 12001 - DNA, 1170 bp, Burkholderia cepacia
atgattgacggacagattctgcttggccattcgattcgctggggcatggtcggcggcggcctcggcagccagatcggctacagccaccggtcggccgcgctgcgcgacggcagcttccagctggtcgccggcgcattcgacctcgatcccgaacgcggccgccagttcggcgtgaagctcggcgtcgcggccgagcgctgctatcccgactacgcgacgatgttcgacgccgaggcgcgtcgccccgacggcattcgtgcggtgtcgatcgcgacgccgaacaacacgcacttcgagatctgccgcgccgcgctgaacgcggggctgcacgtggtctgcgagaagccgctgtgcttcacgaccgaggaggccgaggcgctgcagcgtctgtcggtcgagaagaaccggatcgtcggcgtcgcgtacgggtattccggacaccagatgatcgaacaggcgcgcgagatgatcgcgcgcggcgatctcggcgagatccgcatcgtgcagatgcagttcgcgcacggcttccacagcgagggcgtcgaggccgcgagcgcggccgcgcgctggcgcgtcgatccgaagttcgcgggcccgagctacgtgctcggcgacatcggcacgcatccgctgtacatctccgaggtgatggcgccggcactgaagatccggcggctgatgtgttcgcggcagagcttcgtgaagagccgcgcgccgctcgaggacaacgcgttcacgatcatggaatacgacaccggcgcgatcggctacgtatggtcgagcgcggtgaatgccggctcgatgcacgggcagaaggtgcgcgtgatcggctcgaaggcgagcatcgaatggtgggacgagcatccgaaccagttgcgctacgaaatccaggggcagcccgcgcaggtgctcgatcgcgggatgccgtacctccatccgcacgcattgcgcgaagaccgcatcggcgccgggcatccggaagggttgttcgaggcctggtcgaacctctacgcgcgcttcgcgctcgcaatggacgcggccgatcgcggcgacatggcggcggtgaaggccatccgtattccggacgtgcacgccggtgtcgagggcgtacgctgggtcgagaattgcgtgcgttcggccgatgcgggcagcgtgtgggtcgactatcgt

SEQ ID NO: 12002 - DNA, 771 bp, Burkholderia cepacia
ttgacgatccggcgccgcagcggcgcccgccagcctgttgcgagccttccgatgaccgatctttccagcctgcctgccagccgcgacaccgatgccgcggaccgctcctatatcggccttgcgcggcagattcacgcgatggtggccgccggcgcgttcgaagccggtgcgcggctgccgtcggaacgcagcctggccgaccagttcggcgtaagccgcacgcaggtgcgcgaggcgatcatcgcgctcgaggtgcaggggatcgtcgaggtgcggatcggctcgggcatctacgtgtcggcggccgatgccgcgcggccggtgacgttcgaagtcccgcgcggccccgggccgatcgagacgctgcgcgcgcgcgggctgatcgaggcggaagtcgcggcgctcgcggcgaccgaacgcaaggatgccgatctcgaccgcctgtttttctcgctgacgacgatgcgcgagcagatgaacgacaaggccgcctacgacgcggccgatcgccagttccacctgcgaatcgcggaatcgaccggcaacacggtgctgctgcacatggtcacggcgatgtgggattgcgcgcgcagcgatccgctgtgggacaagatcgaggagcactttcactcgaccgcgctgcgcgaagcgtcgcaggaagatcaccagcggatcttcgcggcgatcatggcgcgcgacgcggacggtgcgcgcgacgcgatgcgcgcgcacctgtcgcgcgtgatcgcggaattcacgcaggcctggcgc

SEQ ID NO: 12003 - DNA, 1317 bp, Burkholderia cepacia
gtgcgccgcaactggcgcagttccgactgggtgctgctcgcgcgcgacggcacgccgctgcagcgcacgcgcatcgacctcaccgaacggcgcggcgactgggtgtcgctcgccgacgtatcgcccgcgttccgcgaggcgatcgtcgtgtccgaggacaagcgcttctacgaacacagcggcgtcgactggcgcggcatcgccggcgccgcgtggggcaacctgtggaacgagcgcacgcgcggcgcgtcgaccgtcacgatgcagctcgcgggcctgctcagcgattcgccgcgccgctcgggtcagcgctcgctgccgcagaaagccacgcaggccgtgaacgcgctgtggctcgaacgcagctggcgcaaggaccagatcctcgaggcctacctgaacctggtgccgttccgcggcgagacgatcgggctcggcgcgctgtcgcaggtgctgttcggcaaggcgccgtcgggcctcgacgcgcgcgaggccgcgatcgcggccgccctcgtgcgggcgccgaacgcggcacccgcgaagatcgccgagcgcgcgtgccggatcctgcgcgacatgcatgccgagcaggcatgcgcgtcgctcgacggctacgtgcagctcgtcgtcgcacgcccagccaataccgtccgcgacgacggcgccgccctcgccccgcacttcgcgcggcgcatcgcggccgaggtcaagccggcggccggcgcgcagatccgcacgacgctcgatgcgccgctgcagcgcttcgcgcgcgacacgctgacgcgcgcgctgaccgagctcgacgcgcccgcgcaccggcgcaacgtacaggacggcgcggtggtcgtgatcgacaacgcgaccggcgagatccgcgcgtgggtcggttcgtcgggggcgctgtcgagcgcgcgcgacgtcgatgccgtgctcgcgccgcgtcaggccggctcgacgctcaagccgttcctctatgcacaggcgctcgacgagaagcggctgacggccgcgtcgctgctcgacgatgcgccgatcaacctcgccgccggcggcggcctgtacattccgcagaactacgacaaggatttcaagggctgggtgagcgtgcgcagcgcgctcggtggttcgctgaacgtgccggccgtgcgcgcgctcgtgctcgtcacgccgcaccgcttcgcgcgcacgctgaccgcactcggcctgccgctcgcgcaggaaggcgattactacggcttcagcctcgcgctcggcagtgccgacgtcacgctgctgtcgctgaccaatgcataccgcgcgctcgcgaacggcggcgtc

SEQ ID NO: 12004 - DNA, 630 bp, Burkholderia cepacia
atgccggataccgtttgccgcccgccgcggctgattcttgcttccagttcccgttaccgccgagcgctcctcgagcgcctcggcgtgccgttcgacgtcgtgtcgcccgacctcgacgaaaccccgctcgccggcgaaacgccggccgcgaccgcgctgcgcctcgccgccgcgaaagcacgcgcggtggccgcgacgatcgacgcgccggacggcgtgctcgtgatcgggtcggatcaggtcgcgaccttcgacggccaccagatcggcaagcccggtacgcacgagcgcgcgctcgcgcaactcgtgtcgatgcagggccgcgaagtcgaattccacagcgcgctctgcctgtacgacagccgtacggacgaagcgcaggtcgaggacatcgtcacgcacgtgcgctttcgctcgctgcccgaggccgaactcgacgcctacctgcacgcggaaacgccgtacgacgtggccggcagcgcgaaatccgaagggctcggcatcgccctgctcgacgcgatcgactcggacgaccccaccgcactcgtcggcctgccgctgatcgccctcacgcggatgctgcgcgccgccggctacccgttgtttgcaaccactcgtggagaccgcgca

SEQ ID NO: 12005 - DNA, 880 bp, Burkholderia cepacia
ctcgaagcgctgccgacggtcgtgatcgtgctcgaccgcaagacgctgcggatcgcgttcgcgaacccgtccgcggaggcgatgctcgacatctcgcggcggcagctcgcgcagcggccgtggggcgagatttttccgaacgcgaacgagctggcctcgacgatcaccgcgatcggcgaggaacgctttcacgcgacgcatctcgataccgtgctcgaccggcccggccgcgaaccgctgcacgtgcatgcgatcgtcggcttcctcgagaacgcgcccgatttcgtgctcgtcgagctgttcgagaacgaacggcagtcgcgcaccgatcgggaagagcgcatccacgacctgaccgcggtcaacaagcaactgatccgcaacctcgcgcacgagatcaagaacccgctcggcggcattcgcggcgcagcccagctgctcgaattcgagctgggcgagcgcgagcgcggcgagttgcgcgaatacacgcaggtgatcatcaaggagtccgaccgcctgcagacgctcgtcgaccggttgctggagccgcaccggcatccgcacatcgtcggcgacgtgaacattcatgaagtgtgcgaacgcgtgcgcgcggtgatgctcgcggagttcccgcgcgggctcacgatcgagcgcgactacgacgtgagcgtgccggacctgcgcggcgacaaggagcagttgatccacgcgctgctcaacatcgtgcgcaacgccgcgcaggcgctgcgcgaacggatcgcgcacggcggacccgaacatccacctgcgcacgcgcatcgggcgcaacgcgacgatcccgcagcgcctgtgccggctggcgctggactcgccgccatcgcacacaggcccgggcctccgg

SEQ ID NO: 12006 - DNA, 267 bp, Burkholderia cepacia
atgtctgttgcagatatcaagaagtcggaagtcgttgctcagttcgcccgcggtaccaacgacacggggtcgcccgaagtccaggtcgcactgctgaccgcacgtatcgtcgaactgacgggtcacttcaagacccacgcgaaggatcaccacagccgccgcggcctgctgcgcatggtgagccgccgccgcaagctgctcgactacctcaagggcaaggatgccgaccgttaccgcgcactgatcgagaagctgggtctgcgtaag

SEQ ID NO: 12007 - DNA, 297 bp, Burkholderia cepacia
gtgaacaggttgcaattgacggcgagcgtcgtcgaacgcgcaccggtgcgatatacgccggcaggtgttccgatcgcaagcgccacgttgcatcaccgcacggaagtcgtcgaagcaggcattccccgtcaggtcgaaatgacgatcgaggcggtggcggccggtgaggcgagcggcaagctggaaagccgtgaaatgggcgtcgaaacgctgttcacgggcttcctggccaagaaaagccgcaacgcgagaaccttggtgtttcacatcacagcattgcaggacattggaaaggac

SEQ ID NO: 12008 - DNA, 246 bp, Burkholderia cepacia
atgcgcatcctgaaccgctgcccgcactgccgcacgcgcgccaccgcgcgcagcagccgtgaaatgtcgctgaccttccgcgagatcacgttccagtgctcgaatcccgagtgcggccacacgtacgtcgtcaacatggaattcgcacgcacgctgtcgccgtccgcgatcccgaacctgtcgttgcagctgccgctctcgccgcacgtgcgcgaacgcctcgccgcgcagctcgagctgcccgtc

SEQ ID NO: 12009 - DNA, 996 bp, Burkholderia cepacia
gtgacggccgcggcgatcgaccagacgttctcgatcgcatgggcgtcgcagtacgtgaacaacttcctcgacaccgacggccggatcaagaaggtgtacgtacagtcggacgcgccgttccggatgacgccggaagacatgaacatctggtacgtgcgcaacagcgcgggcgggatggtgccgttcagcgcattctcgaccggccactggatctacggttcgccgaagctcgagcgttacaacggcgtgtcatcgatcgaaatccaggggcaggccgcggaaggcaaatcgaccggccaggcgatggccgcgatggaagcgctcgcgagcaagctgccggaaggcatcggctactcgtggacgggcctgtcgttccaggaaatccagtccggctcgcaggcgccgatcctgtacgcgatctcgatcctcgtcgtgttcctgtgtctcgcggcgctgtatgaaagctggtcgatcccgttctcggtgatcatggtcgtgccgctcggcgtggtcggcgcgctgctcgcgacgatgctgcgcggcctcgagaacgacgtgttcttccaggtcggcctgctgaccaccgtgggcttgtccgcgaagaacgcgatcctgatcgtcgagttcgcgcgcgagctgcaggcgggcgggaacatggggccggtgcgcgcggcgatcgaggcggcgcgcctgcggctgcgtccgatcctgatgacgtcgctcgcgttcatgctgggcgtgctgccgctggcgatcagcaacggcgcggggtcggcgagccagcacgcgatcggcaccggcgtgatcggcgggatgatcacggcgacgttcctcgccattttcatgatcccgatgttcttcgtgcgggttcgcgcgatcttcagcggcgagacggaaaacgtcgacgacgcatggcgtctcgtgcagggcgacctgcacggcggtcacgacgacgcaaacgatccaaattgggtggttctatgcacaaacatgctt

SEQ ID NO: 12010 - DNA, 1065 bp, Burkholderia cepacia
atgtctgagactcccctcgccgcttccgccccgctcgacgcgcgctacacgcgcggcgccgccctgcccgcgctgctgaaatcgcgcatcctgatcctcgacggcgcgatgggcacgatgatccagcgctacaagctcgacgaagccgcgtatcgcggcgagcgcttcaaggatttcccgcgcgacatcaagggcaacaacgagctgctgtcgctcacgcagccgcagatcatccgcgagatccacgatcagtacttcgcggccggcgccgacatcgtcgaaaccaacacgttcggcgcgacgaccgtcgcgcaggccgactacgggatggaagatctcgtcgtcgagatgaacgtcgcatcggcgaagctcgcgcgcgaatcggccgcgaaatacgcgacgccggacaagccgcgcttcgtcgccggcgcgatcgggccgacgccgaagacggccagcatctcgccggacgtcaacgatccgggcgcccgcaacgtcacgttcgacgagctgcgcacggcgtactaccagcaggcgaaggcgctgctcgacggcggcgtcgacctgttcctcgtcgagacgatcttcgacacgctgaacgccaaggccgcgctgttcgcgctcgacgagctgttcgaggacaccggcgagcgcctgccgatcatgatctcgggcaccgtcaccgatgcgtcgggccggatcctgtcgggccagaccgtcgaggcgttctggaattcgctgcgccacgcgaagccgctcacgttcggcctgaactgcgcgctcggcgcggcgctgatgcgcccgtacatcgccgagctcgcgaagctgtgcgacacctacgtgtcgtgctacccgaacgcgggcctgcccaacccgatgagcgacaccggtttcgacgaaacccccgatgtcacgtcgggcctgctgaaggagttcgcgcaggccgggctcgtgaacctcgcgggcggctgctgcggcacgacgcccgagcacatcgccgagatcgcgaaggcgctcgccggcgtgaagccgcgccgctggccgaaccagtacagcgacaacgcc

SEQ ID NO: 12011 - DNA, 345 bp, Burkholderia cepacia
atgctttcagcggttatctcttccgaacatagctacccggcgatgccactggcgtgacaaccggtacaccagaggttcgtccactccggtcctctcgtactaggagcagcccccttcaaatatccaacgcccacggcagatagggaccaaactgtctcacgacgttttaaacccagctcacgtacctctttaaatggcgaacagccatacccttgggaccggctacagccccacgatgagatgagccgacatcgaggtgccaaacaccgccgtcgatatgaactcttgggcgggatcaggctggtatccccagaggacctgttatccgttgagcgatgggccttt

SEQ ID NO: 12012 - DNA, 1140 bp, Burkholderia cepacia
atgacgctcgcctccacgctcgacatcatcgccgagctgaaagccggccggatggtgatcctggtcgacgaagaagaccgcgaaaacgagggcgacctcgtgatcgccgccgaattcgtcacaccggaagcgatcaacttcatggccaagtacggccgcggcctggtttgtctgacgttgacgcaggaacgctgcaagcagcttcacctgccgctgatgacctaccgcaacggcacgcagtacggcaccgcgttcacggtcagcatcgaagcggccgaaggcgtgacgaccggcatctcggccgccgaccgggcgcacacgatcgccacggcggtcgcgcacgacgtgcgccccgagcacatcgtgcagccgggccacgtgttcccgatcctggcgcagccgggcggcgtgctcgtgcgcgccggccacaccgaggccggctgcgacttcaccgcgctcgcgggcctcacgccggccgcggtgatctgcgagatcatcaaggacgacggcacgatggcgcgcctgccggacctgatcgaattcgcgaaggaacacaacctgaagatcggcacgatcgccgacctgatccagtaccgcagccgcaccgaatcgatcatcgagcggatcgccgagcgcacgatgcagaccgcgcacggcacgttccgcgcggtgctgtaccgcgaccagccgagcggctcgccgcacatcgcgctggtgcgcggcgccccgtcgcctgacgtcgatacgccggtgcgcgtgcacgagccgctgtcggtgctcgacctgctcgaaacgggcgtgtcgacccactcgtggacgctcgacgccgcgatgcgcgacatcgcggaacgcgatctcggcgtgatcgtgctgctcaattgcggcgatacgaaggaacacctgatcgacgtcttcaaggcgttcgacgaggaagaaaaggccgctgcgctcaagcgccggccggtcgatttcaagacgttcggcatcggcgcgcagatcctgcgcgatgtcggcgtcggcaagatgcaggtgctgtcgaatccgcgcaagctgggcagcatgtccggctacggcctcgaagtcacgggcttcattccgatgcccggcggcgaagccaagtcctgcccggcgtcccacgcg

SEQ ID NO: 12013 - DNA, 390 bp, Burkholderia cepacia
atgttcccgcaggccgcggccggccagcagcgcgtcgtgatcgcgctgcccgcgctcgagaacgagggcgatgcgcgcgtcgagctgatgatcggcaagacgctgcagaccgactgcaaccagcagtggttcggcggcgagctgaccgccgaggacgtgaagggctggggctacacgtattaccggctcaccgacgtgaaagggccggcatcgacgctgatggcatgcccgggccagacgccgcagcaacgcttcgtgcaggtgcgcggtgacggccagctgctgcgctacaacagccgcctgccgctcgtcgtctatgtgccggacggcttcgacgtgcgctatcgcgtgtggcatgcgtcgaaggacgtgcagcaagctgtgaagcag

SEQ ID NO: 12014 - DNA, 753 bp, Burkholderia cepacia
atgatccggatcgattccatccataaacggtttcagcagcacgcggtgctgaagggcgtgagcctcgacgtgcagccgggtgaagtcgtgtgcctgatcgggccgtccggttccggcaagtcgaccgtgctgcgctgtatcaacggcttcgagacctacgacgaagggtcgatcacgatcgacggcgtgaaggtcgacgcgcattcgaagcggattcacgagctgcggatgcgggtcggcatggtgttccagcgcttcaacctgtttgcccaccgcacggcgctcgagaacgtgatggaagggccggtgcacgtgcggcgcgtgccggtcgcgcaggcgcgcgagcaggcccgcgcgctgctcgacaaggtcggcctcgcgcaccggatgaatgcgtatccgtccgagctgtcgggcgggcagcagcagcgcgtcgcgatcgcccgcgcgctcgcgatggagccgcaggcgatcctgttcgacgagccgacgtcggcgctcgaccccgaactcgtcggcgaagtgctcggcgtgatgcgcgggctcgcccgcgacgggatgaccatggtggtcgtcacgcacgaaatggcgttcgcgcgcgaggtggccgatcgcgtgtgcttcctgcacgacggcacgatctgcgaaagcggaccggcgcgcgacgtgctcacgcagccgactcatccccgcacgcaggaattcctgcgtcgcctgctggcgtcggacggcgccgacaacccggatcgaaca

SEQ ID NO: 12015 - DNA, 345 bp, Burkholderia cepacia; identical to SEQ ID NO: 11238

SEQ ID NO: 12016 - DNA, 468 bp, Burkholderia cepacia
atgccgcgtcgtcgcgaagtccccaagcgggaagtgttgccggatccgaagttcggcaacgttgatgttgccaagttcatgaacatgctgatgctgtccggcaagaagtcggtcgcagagcgcatcgtttatggcgcattcgaacaaatccagaccaagggtggcaaggacccgctggaagtgttcacggttgcgctcaacaacgtgaagccggtggtcgaagtgaagagccgtcgcgttggtggtgccaactatcaagttccggtcgaagtgcgcccgtcgcgtcgtatggcattggcgatgcgctggctgcgtgaggctgcgaagaagcgtagcgagaagtcgatggccctgcgcctggcaggtgaactctccgaagcggccgaaggccgtggcggcgcgatgaagaagcgcgacgaagttcaccgcatggcagaagccaaccgcgcgttctcgcatttccgtttc

SEQ ID NO: 12017 - DNA, 660 bp, Burkholderia cepacia
atgcgtttgatcctgttgggcgcgcccggcgcgggaaagggcacccaggcaaacttcatcaaggaaaaattcggcatcccgcaaatctcgacgggcgacatgctgcgcgcggccgtgaaggccggcacgccgctcggcgtcgaggcgaagggctacatggatgccggcaagctcgtgccggacgcgctgatcatcggcctcgtcaaggagcgcctgaaggaatccgactgcgcgaacggctatctgttcgacggtttcccgcgcacgatcgcgcaggctgacgcgatgaaggaagccggcgtcgcgatcgactacgtgctcgagatcgacgtcccgttctcggaaatcatcgagcgcatgagcggccgtcgcacgcacccggcatcgggccgtacgtaccacgtcaagttcaacccgccgaaggtcgaaggtcacgacgacgtgacgggcgaaccgctgatccagcgcgacgacgacaaggaagaaactgtcaaaaagcgtctcgaagtatacgaagcgcagaccaagccgctgatcacgtactacggcgactgggcgcagcgtggcgaggaaaacggtctgaaggcgccgcagtatcgcaagatctcgggcctcggcaccgtcgacgaaatccgcgagcgagcgttcgacgcactgaag

SEQ ID NO: 12018 - DNA, 1248 bp, Burkholderia cepacia
atgacttactgcgcgatcgatttcggcacgtccaattccgccgtggcgctgcccgacggcgatggcatgcgcctcgcgcccgtcgagggcgaccacctgacgctgcccaccgcgatcttcttcaacaacgacgaagagacggtcgaatacggccgggcggcgctggcctcctatatcgacggtttcgacggccggctgatgcgctcgatgaagagcatcctcggctcgccgctcgcggaaacgacgaccgatctcggtgacggcagcgcgatcgcctacaccgacatcatcgcgcgcttcctgacgcacctgaagcgcaaggccgaagcgcgcgcgggcgcgccgatcggccgcgcggtgctcggccggccggtgttcttcgtcgacgacgatccgcgcgccgaccggctcgcgcaggatcagctcgaggcggctgcgcgctcggtcggcttcgcggacgttcacttccagtacgaaccgatcgccgccgcgttcgactacgagtcgcgccagcaggccgagcgtctcgtgctcgtcgccgacatcggcggcggcacgtccgacttctcgctggtgcgcgtcggcccgcagcggatggcgcggctcgaacgcaaggacgacgtgctggcgcaccacggcgtgcacgtcgcgggcaccgactacgaccggcgggtcgagctggcggcgatcctgcccgcgttcggctaccgttcgctcgacccggaagggcgcgagctgccgaacaagatctacctcgatctcgcgacctggcacctgatcaataccgtctacacgcccaagcgcgtcggcgagctgaagctgatgaagcacctgtaccaggatgtgcggcagtacgaccggctcacgagcgtggtcgagcagcggctcgggcatgcgctgatggcgcgcgcggaagaggcgaagatcggtgtcgcggcgggcggggagacgatgatcgacctgaacgacgtggaagaggatctgctgatcgcgttcgacgcggatcgcctcgtcgacgcgagccaggacgataccgcgcgcatcgtcgatgccgcacgcgaaacggtgcggctcgcgggcgtcgcgccgcgtgacgtcggtgcgctgtatttcaccggcggttcgacggggctcgcgttcctgtcgggtgcgctcgccggcgcgtttccggatgcgcagccggtgttcggcgatcgcttggcgagtgtcgcgacggggctcggcattcacgcgcagcgcctgttcggc

SEQ ID NO: 12019 - DNA, 324 bp, Burkholderia cepacia
atgttgaaaggcaacctcgccggactgatgaagcaagcgcagcaaatgcaggaaaacatgaagaagatgcaggagcagcttgcgctcatcgaagtcgaagggcagtcgggcgccggcctcgtcaaggtgacgatgacgtgccgcaacgaagtgcgccgcgtgtcgatcgacccgagcctgctcgcggacgacaaggacatgctcgaggatctcgtcgccgctgcgttcaacgacgcggtgcgcaaggccgaagccacgtcgcaggaaaagatgagcggcatgacgtcgggcctgccgctgcccccgggcttcaagctgccgttc

SEQ ID NO: 12020 - DNA, 1335 bp, Burkholderia cepacia
atgaccacccagccaaccggcgatatcgccgcgcatcgcctgtcgtccacgcaactctcgtgcgaattcgccgatatcgcgccgctgctcgatccgaccgcggcggcggccgccgcgagccgctgccattactgctacgacgcaccgtgcgtgcacgcgtgcccgacgcagatcgacatcccgagcttcatccgcaagatcggcaacggcaacctcaaaggcgccgcgaccgacatcctgtccgcgaatccgctcggcgggatgtgcgcacgtgtgtgcccgaccgagatcctctgtgaaggcgcttgcgtgcgcaaccatcaggatgcgcagccggtcgcgatcggcgcgctgcagcggcacgcgaccgactgggcgatgcagaccggcgcggtgcagttccggcgcgcgccggagacgggccgccatgtggcggtggtcggcgcggggccggccgggctcgcgtgcgcgcaccggctcgcgctcgccgggcatcgtgtcacgctgttcgacgcgcgcccgaaggccggcggcctcaacgaatacgggatcgccgcgtacaagaccgtcgacgatttcgcgcaacgcgaggtcgagtggttgctgtcggtgggcggcatcacgctgcaaaccggtgcggcgctcggacgcgacgtgacgcttgatgcgctgcgcgagcagcacgacgcggtattcctcgcgatggggctcggtggcgtgcgcgcgctcgcgatcgacggcgagcaactgggcggcgtgatgaacgcggtcgatttcatcgcgcaggtgcggcaggccgacgcgctcgcgaacgtgccggtcgggcggcgcgtggtcgtgatcggcggcggcaatacggcgatcgacgcggcggtgcagagccgcaagctcggcgccgagcgcgtgacgatggtgtaccggcgcggcgtggacgcgatgagcgcgacgtgggccgagcgcgagttcgcgcagaagagcggcgtcacgctcgtcacgcacgcgaagccggtgcgtatcgcgggcacggacgggcaggtgacgggcgtcgaattcgagggcgcatcgggcgagcgcttcaccgtcgacacggacatggtgctgaaagcgatcggccagacgctcgtgccggacggcatcgcggccacgttgctgacttcggaccgcacgcggatcgcggtcgatgcggacgggcgcacggcgctgccggacgtgtgggccggcggcgactgcgcggcgaccgacggcatcgatctcacggtgcaggccgtgcaggacggcaagcgcgcggccgcgtcgatcgacgcgacgctcgccgcgcgcgacgcgaaggcggcc

SEQ ID NO: 12021 - DNA, 1164 bp, Burkholderia cepacia
gtgttccccaaggagcctcccgtgttgccgtctttttctcccgccttgcttgcactcgccgacggcacggtctttcgtggttattcgatcggggccgaaggccatacgatcggcgaagtcgtgttcaataccgcgatcaccggctatcaggaaatcctgactgatccgagctactcgcgccagatcgtcacgctcacctatccgcatatcggcaacgtcggcgtcaacgccgaggacgtcgaagccacgaaagtccatgccgccggcctgatcatccgcgatctgccgacgctcgcatcgaacttccgcatggaccgcacgctcggcgactacctgcgcgacgaaggcgtcgtcgcgatcgccggcatcgatacccgcaagctgacccgcatcctgcgcgacaagggcgcgcagaacggctgcatcctgacgggctccgacgacgaagcgaaggcgatcgagctggcgcgctcgttcccgggcctcgccggcatggatctcgcgaaggtcgtgtcgaccaccaagccgttcgagtggaagcagacggaatggcgtctcgaaggcggctacggcatgcaggaagcgccgaagtaccgcgtcgtcgcgtacgacttcggcgtcaagtacaacatcctgcgcatgctggccgagcgcggctgccatgtgacggtgctgccggcgcaggcgagcgcggaagatgcgctcgcgctgaatccggacggcgtgttcctgtcgaacggccccggcgatccggagccgtgcgattacgcgatcgcggccacgaaggcattcatcgagcgcggcgtgccgaccttcggcatctgcctcggccaccagatcatgggcctcgcggtcggcgcgaagacgctcaagatgaagacgggccaccacggcgcgaaccatccggtgaaggacctcggcgacggccgggtcgtgatcacgtcgcagaaccacggcttcgcggtggacgccgattcgctgccggccaatgcgcgcgtgacccacgtgtcgctgttcgacggcacgctgcagggtttcgagctgaccgacaagccggcgttctgcttccagggccacccggaagcgtcgcctggcccgcacgacatcggctacctgttcgaccgtttcaccgcgctgatggatgcggcgaagcagcgcaacgcc

SEQ ID NO: 12022 - DNA, 1203 bp, Burkholderia cepacia
atgcttagacgcttctggctgttcttcgcgcaggcggtgaccgtactgctcgcgctgatgttcatcgtcgtgacgctcaagccgcaatggctgcaacggcaaggacagctcggcaagcagcttgccacgccgatcgtcgcgctgcgggaagtcgcgccaggcatcggcggcgcaccggcgaccacgtcgtatgccgaagccgcgcagaaggcgatgccggccgtcgtcaacgtgttctccagcaaggacggctcgctgccgcccgacccgcgcgcgaaggatccgctgttccgttacttcttcggcgaccgcaacgcccgcaagcagcaggacgagccggccgccaacctcggctcgggcgttatcgtgagcccggaaggttacattctaacgaaccagcacgtcgtggacggcgccgaccagatcgaagtcgcgctcgccgacggccgcacggccaccgcgaaggtgatcggcagcgatcccgaaaccgatctcgccgtgctcaagatcaacatgacgaacctgccgacgatcacgctcggccgctccgaccagtcgcgcgtcggcgacgtcgtgcttgcgatcggcaacccgttcggcgtcggccagacggtcacgatggggatcatcagcgcgctcggccgcaaccacctcggcatcaacacgttcgagaacttcatccagaccgacgcgccgatcaaccccggcaactccggcggcgcgctggtcgacgtgaacggcaacctgctcggcatcaacacggcgatctactcgcgctccggcggctcgctcggcatcggtttcgcgattccggtttcgaccgcgcgcacggtgctcgaaagcatcatcacgacgggctcggtcacgcgcggctggatcggcgtcgagccgcaggacgtcacgccggagatcgccgagtcgttcgggctccagcagaaatcgggcgcgatcgtcgcgggcgtgctgcagggcggcccggccgacaaggccggcatcaagccgggcgacatcctggtgagcgtcaacggcgaggacatcaccgacaccacgaagctgctgaacgtcgtcgcgcagatcaagccgggcacaccgaccaaggtgcacgtcgtacgcaagggcaagcagttcgacgtgaacatcgtgatcggcaagcgcccgccgccgccgaagcagacgctcgacgagcaggacagcgatagcgaa

SEQ ID NO: 12023 - DNA, 393 bp, Burkholderia cepacia
atggacaagagcatgaaaatcctggtggtggacgatttcccgacgatgcgccggatcgtccgcaacctgctcaaggaactgggctattcgaacgtcgacgaggccgaggacggcctggccggcctcgcgcggctgcgcggcggcggctatgacttcgtgatctccgactggaacatgccgaacctcgacggcctcgcgatgctgaaggaaatccgcgcggacgcgacgctcacgcacctgccggtgctgatggtcacggccgagtcgaagaaggagaacatcatcgcggccgcgcaggccggcgcgagcggctacgtcgtgaaaccgttcacggccgcgacgctcgacgagaagctgaacaagatcatcgacaagatggccaaggccgggagc

SEQ ID NO: 12024 - DNA, 1449 bp, Burkholderia cepacia
atgaactacatttccacgcgcggcgccggcatcggcgagcgccatacgttctccgacatcctgctcggcggtctcgcgaaggacggcgggctctacctgcctgccgagtatccgaaggtgtcggccgacgagctcgcgcgctggcgtacgctgtcgtacgcggatctcgcgttcgagatcctgtcgaagttctgcgacgacgtgccggccgacgacctgcgcgcgatcacgcgccgcacgtacacggccgccgtgtacagcaacacgcgccacggcgagaacgcgtccgacatcacgccgctgaagacgctcggcaccgagcacggcgcggcgctgtcgctgctcgaactgtcgaacggcccgacgctcgcgttcaaggacatggcgatgcagctgctcggcaacctgttcgagtacacgctcgcgaagcacggtgaagcgctgaacatcctcggcgcgacgtcgggcgacaccggcagcgcggccgagtatgcgatgcgcggcaaggccggcgtgcgcgtgttcatgctgtcgccgcacaagaagatgagcgcgttccagacggcgcagatgttcagcctgcaggatccgaacatcttcaacctcgcggtcgaaggcgtgttcgacgattgccaggacatcgtgaaggccgtgtcgaacgatcatgcattcaaggcgcagcagaagatcggcaccgtcaactcgatcaactgggcgcgtgtcgtcgcgcaggtcgtctactacttcaagggctacttcgcggcgacgcagtccaacgacgagcgcgtgtcgttcacggtgccgtcgggcaacttcggcaacgtctgcgcgggccacatcgcgcggatgatggggctgccgatcgcgaagctggtggtcgcgaccaacgaaaacgacgtgctcgacgagttcttccgcacgggcgcgtatcgcgtgcgcagcgccgagaacacctatcacacgagcagcccgagcatggacatctcgaaggcgtcgaacttcgagcgcttcgtgttcgacctgctcggccgcgatccggcccgcgtgatgcagctgttccgcgacgtcgaggagaagggcggcttcgatctcgcggcgagcggcgatttcgcgcgcgtcgccgaattcggtttcgtgtcgggccgcagcagccacaccgaccgcatcgcgacgatccgcgacgtgttctcgcgctacgacacgatgatcgacacacatacggccgacggcgtgaaggtcgcgcgcgagcacctggaagccggcgtgccgatggtcgtgctcgagacggcgcagccgatcaagttcggcgagacgatccgcgaagcgctcgaccgcgaagccgagcggccggccgcattcgacgggctcgaggcgctgccgcagcgcttcgaggtcgtgaaggccgacgcgcagcaggtgaaggacttcatcgccgcccatacgggcgca

SEQ ID NO: 12025 - DNA, 623 bp, Burkholderia cepacia
atgaaactgactccccgcgaaaaggacaagctgctgatcttcacggcggcgctgctcgccgaacgccgccgtgcgcgcggcctgaagctcaactatccggaggcggtcgccttcatcaccgcggcgctgatggaagccgcgcgcgacggcaggacggtggccgaggtgatgcactacggcacgacgctgctcacgcgcgacgacgtgatggacggcgtgccggaaatgattcccgacatccaggtcgaagcgaccttccccgacggcacgaagctcgtgaccgtccaccacccgattccgtgaggccccgcatgatccccggcgaaatcctcaccgacgacggcgaacacgaactgaatgcgggccgcgcgacgcgctcgctcgtcgtcgcgaacaccggcgatcgcccggtgcaggtcggctcgcactatcacttcttcgaagtcaacgacgcgctgtcgttcgaccgcgcggccgcgcgcggcttccggctcaacatcgcggccggcacggccgtgcgcttcgagcccggccagacgcgcaccgtcgagctcgtcgcgctcgcgggcgagcgcgccgtctacggttttcagggcaaggtgatggggccgctgtaagccgcg

SEQ ID NO: 12026 - DNA, 960 bp, Burkholderia cepacia
atggcgcggattgtacctgcccggcatcgggcccgggccgccgccagcggccgcctgccctcgcctgctatactttccggttacgttgacctacctgcggcgcgtccgaaacggcgtgccccgccctcacccatgctcgttctcggcatcgaaagctcctgcgacgaaaccggcctcgcgctctacgacacgcagcgaggcctgctcgcgcacgcgctccattcgcagatcgcgatgcaccgcgactacggcggcgtcgtgcccgagctcgcgtcgcgcgaccacatccgccgcgcgctgccgttgctcgaggaagtgatggcgcaaagcggcacgcgccgcgacgacatcgacgcgatcgcgttcacgcagggccccggcctcgccggcgcgctgctggttggcgcgagcatcgcgaatgcgctcgcgctcgcgtggaacaagccgaccgtcggcatccatcacctcgaaggccatctgctgtcgccgttgctggtcgacgcgccgccgccgttcccgttcgtcgcgctgctggtgtccggcggccacacgcagctgatgcgcgtgaccgacgtcggcgtgtacgagacgctcggcgaaacactcgacgacgcggccggcgaagcgttcgacaaaaccgcgaaactcatcggcctcggctacccgggcggcccggaagtatcgaagctcgccgaaacgggcacgccgggcgcggtcgtgctgccgcgcccgatgctgcattcgggcgatctcgacttcagcttcagcggcctgaagacggccgtgctcacgcagatgaagaaattcgaagcggcgaagttcgacggcgaagcgctcgaacgcgcgaaggccgacctcgcgcgcggcttcgtcgatgcggccgtcgacgtactcgtcgcgaagtcgctcgccgcgctgaagaagacgaagctcaagcgcctcgtggtcgcgggcggcgtc

SEQ ID NO: 12027 - DNA, 1338 bp, Burkholderia cepacia
atgactgaacagaaacgcaagatcgagaagctcaccggcgtcaagggcatgaacgacatccttccgcaggatgccggcctgtgggaattcttcgaagctaccgtgaaatcgctgctgcgcgcgtacggctaccagaacatccgcacgccgatcgtcgaacatacgcagctcttcacgcgcggcatcggcgaagtcaccgacatcgtcgagaaggagatgtacagcttcaccgacgcgctgaacggcgagaacctgacgatgcgcccggaaaacaccgcggccgtcgtgcgtgcgtcgatcgagcacaacatgctgtacgacggcccgaagcgcctgtggtacatcggcccgatgttccgtcacgagcgtccgcagcgcggccgctatcggcagttccaccaggtcggcgtcgaggcgctcggcttcgcgggtcccgatgcggatgccgagatcatcatgatgtgccagcgcctgtgggacgacctcggcctgaccggcatcaagctcgagatcaactcgctcggcctcgccgaagagcgcgccgcgcaccgcgtcgaactgatcaagtacctcgagcagttcgccgacgtgctcgacgaggacgcgaagcgtcgcctgtatacgaacccgctgcgcgtgctcgacacgaagaatccggcactgcaggacatcgcgcagaacgcaccgaagctgatcgacttcctcggcgacgaatcgcgcgcgcacttcgaagggctgcagcgcctgctgctcgcgaacaacattccgttcaagatcaacccgcgtctcgtgcgcgggctcgattactacaacctgaccgtgttcgagtgggtgaccgacaagcttggcgcgcagggcacggtcgcggccggcggccgctacgatccgctgatcgagcagctcggcggcaagccgaccgccgcgtgcggctgggcgatgggcatcgagcgcatcctcgagctgctgaaggaagaggatctcgcgcccgagcaggaaggcgtcgacgtgtacgtcgtgcaccagggcgaaaccgcgcgcgaacaggcgttcatcgcggccgagcgtctgcgcgacacgggcctcgacgtgatcttccactgcagcgccgacggcgcgccggcgagcttcaagtcgcagatgaagcgggccgacgcaagcggcgccgcgttcgcggtgatcttcggcgaagaagaggtcgcgaacggcacggtgggcgtgaaagcgttgcgcggcgcgggtgcggaaggggaaaagaacgttcagcagaccgtaccggtcgaaagcttgaccgaattcctaatcaatgcgatggttgcatccgccgaagacggcgacgac

SEQ ID NO: 12028 - DNA, 264 bp, Burkholderia cepacia
atggctttgatgattaccgacgagtgcatcaattgcgacgtgtgcgagcccgagtgcccgaacggcgcgatttcgatgggcccggacatctacgtgatcgacccgaacaagtgcaccgagtgcgtcggccatttcgacgaaccgcagtgccagcaggtgtgtccggtcgaatgcattccgcgcgatccgcagcatgacgaatcgcatgcgcaattgatggagaagtaccacacgctgatcgccgtgaagggcggcgacgcgtcg

SEQ ID NO: 12029 - DNA, 1146 bp, Burkholderia cepacia
atgccgatcgtggcgcgtcgggtcgattgctgcatccgttccgatgcgttgacgcgtatcaacgtgctccgattccggaaccggatactgagtcgctcatcgaccagacaggagcgacgcatgacccagaccatgaaagcggccgtggtacacgcgttcggcgcgccgttgcgcatcgaggaagtgccgattccggcaccggggcccggccagattctcgtcaacatcaaggcgtcgggtgtttgccataccgatctgcacgcggccgacggcgactggcccgtcaagccgtcgctgccgttcatcccgggccatgaaggcgtggggatcgtcgcggcggtcggcgcgggcgtcacgcacgtgcgcgagggcgatcgcgtcggcgtgccgtggctctatacggcctgcggccattgcgagtactgctgcacgggctgggaaacgctctgccacggtcagcagaacaccggctattcggtgaacggcagctacgcggaatacgtgctggccgatcccgactacgtcggccagttgcccgcgcaggtcgcgttcgacgagatcgcgccgatcctgtgcgcgggcgtcacggtctacaagggcattcgcgtcaccgacacgcgcccgggccagtggctcgcgatttccggcatcggcggcctcgggcacgtggccgtgcagtatgcgcgggcgatgggcctgcacgtcgcggccatcgacatttcccccgacaagctcgcgctggcgcggcaactgggcgcgcacctgacgatcgacgcgtcgatcgacgaccccgcaacagtgatccagaaggaaatcggcggcgcgcacggcgtgctcgtcacggccgtgtcgcgcagcgcgttcgcgcaggcgctcgggatggtccggcgcggcggcacggtggcgctcaacggtttgccgccgggcgatttcccgctgccgatcttctcgaccgtgctgaacggcatcaccgtgcgcgggtcgatcgtcggcacgcggcgcgatctgcaggaatcgctcgatttcgcggcggacggcctggtgcgcgcgcacatccaccgcgaccggctcggcaacatcaacgacgtattcgcgaagctgcgggaagggaaggtcgacgggcgcatcgtgctgaccgacatgcat

SEQ ID NO: 12030 - DNA, 1395 bp, Burkholderia cepacia
atgaaacacatcgtcaaacacattcatttcgtcgggatcggcggcgcggggatgagcggcatcgccgaagtgctggccaacctcggctacgcggtcagcggctcggacctgtcgcgcaatgcggtgaccgaccggctcgaagcgctgggcgcgcggatcgcgatcggtcacgacgcggcgaacatcgagggcgcgaacgcggtcgtcgtgtcgacggccgtgcgctccgacaacccggaagtgctggccgcgcgcgcgaagcgcgtgccgatcgtgcagcgcgcggtgatgctggcggagctgatgcgcctgaagcagggaatcgcgatcgccggcacgcacggcaagaccacgacgacgagcctcgtcgcgagcgtgctcgcggcgggcgggctggacccgaccttcgtgatcggcggccggctgatcagcgccggcgcgaacgcgcggctcggcacgggcgacttcatcgtcgccgaggccgacgagtcggatgcgtcgttcctgaacctgtatccggtgatcgaagtcatcacgaacatcgatgccgaccacatggacacctacggccacgatttcgcgcggctcaagcaggcgttcatcgaattcacgcagcgcctgccgttctacggcagcgcggtggtgtgcgtcgacgatccgaacgtgcggcagatcatcccgttcatctcgaagccggtcgtgcgctacggcctgtcgccggacgcgcaggtgcgcgcggaagacatcgacgcgcgcgacggccggatgcatttcacggtgatccgcgaagggcgcgcgccgctcgcggtggtgctgaacatgccgggcctgcacaacgtgcagaacgcgctcgcggcgatcgcgatcgcgaccgatctcggcgtgtcggacgacgcgatccagctggcgctggcggagttcaacggtgtcggccggcgcttccagcgctacggcgaggtgccgagcgcggacggcggccagtacacgctgatcgacgactacggccatcacccggtcgagatggcggcgacgatcgcggccgcgcgcggagcgttcccgggccgccgcctcgtgctggcgttccagccgcaccgctatacgcgcacacgcgactgcttcgacgatttcgtcaacgtgctgtcgaccgtcgatgcgctggtgctgaccgaagtttatgcggccggcgaggccgcgatcccgacggccagcggcgacgcattgtcgcgcgcgctgcgcgcggcgggcaaggttgacccggtgttcgtcgcgacggtcgacgacgtgccggacgcattggcgaaggtcgcccggaacggcgacgtggtgatcacgatgggagcgggttcgatcggcggcgtgccggcgaagctcgtgcaacacattcaacagaaggca

SEQ ID NO: 12031 - DNA, 372 bp, Burkholderia cepacia
atgtttcacgttcttttagtgtccggcgatgcaatatcgcctcgctcttttcaaggaattgtcatgcagcaacagaaaatccgcattcgcctgaaggctttcgactatcgtctgatcgatcaatcggctgccgaaatcgtcgataccgcgaagcggactggcgcaatcgtccgtggcccggtgccgctgccgacgcgcatccagcgttttgacatcctgcgttcgccgcacgtcaacaagacgtcgcgcgatcagctcgaaatccgtacccaccagcgcctgatggacatcgtcgacccgacggacaagaccgtcgacgcgctgatgaagctcgacctgccggctggcgtcgacgtggaaatcaagctgcag

SEQ ID NO: 12032 - DNA, 1017 bp, Burkholderia cepacia
ttgttaaaattggcgggtacggccgccctcgcggccgaaggaacccgcatgaaacagtatctcgatctcgttcgtaccattctcgataccggcagctggcaggagaaccggacgggaatccgcaccatcagcatgccgggcgcgatgctgcgcttcgacctgcagcaaggcttcccggccgtgacgaccaagaagctcgcgttcaagtccgcgatcggcgaactggttggtttcctgcgcgcgtcgcgcagcgcggccgatttccgtgcgctcggctgcaaggtgtgggatgcgaacgcgaacgagaacgcacagtggctcgcgaacccgtatcgccagggcgtggacgatctcggcgacgtctacggcgtgcaatggcgccagtggccgggctacaaggtgctggatgccggcgcggacgcgcagatcgccgatgcgacccgccgcggcttccggatcgtcacgcgtttcgacgaagacggcgcgccgaaggtgctgctgtacaaggcgatcgatcagttgcgccagtgcctggacacgatcatggagaacccgtccgatcgccgcatcctgtttcacgcatggaatccggccgtgctcgaccagatcgcgctgcccgcgtgccatctgctgtaccagttcctgccgaacgcgacgaagcgagagatctcgctgtgcctgtacatccgcagcaacgacgtcggcctcggcacgccgttcaacctgacggaaggggccgcgctgctgtcgctcgtcggccggctgacgggctacacgccgcgctggttcacgtatttcatcggcgacgcccacatctacgagaaccagctcgacatgctgcagcagcaactcacccgcgagccgtacgaaagcccgcggctggaaattgccgagcgcgtgcccgactacgcgaagacgggcgtctatgcgccggaatggctggagcaggtcgagccgtccgatttctcgctcgtcggctatcggcaccatgagccgctgaccgcgccgatggcggtc

SEQ ID NO: 12033 - DNA, 861 bp, Burkholderia cepacia
atgcaggcccggctgcgcttccgcgaattcgttcgcgagcgccgacgtgatgctgttgcccggcgcgaacagcgacacgctgtcgagcaggttcgtgttgccgatcacgaacgtcacggccatcgtttcgccgagcgcacagacaagaccgagcatcacgccgccgatcacgccggtcttcgtgtagggcagcacgaccttccacatcacttcccaggtcgtgcagccgatcccgtatgccgattccttcagcagcaccggcgtgacttcgaacacgtcgcgcatcaccgatgcgatgtacgggatgatcatgatcgcgaggatcacgccggccgcgaggatgccgatgccgatcggcgggccggacgtcagcgggccgagcacccacacgtccttgaacaggcggccgagcggcttctggaagtattcggcgaagatcggcgcgaacacgagcaggccccacatgccgtacacgatcgacgggatcgcggcgagcagctcgatcgcgatgccgagcggacggcgcagccacacgggcgccagctcggtgaggaacagtgcgatgccgaaactgaccggcaccgcgatgacgagtgcaatgatcgacgtcacgatggtgccgtagatcggcacgagtgcgccgtacacatccgagttcggatcccactcggattgccacaggaagccgatgccgaacttctggatggtcggcatcgacgcaatgatcagggaaacgatgatcccgcccagcagcagcagggtcacgatcgcggcgagccgtgcgaggccgccgaacaggacatccccgagacggctcggcgcgcgctgctgcgcactgtcgggcgatcgggaggacgtgta

SEQ ID NO: 12034 - DNA, 444 bp, Burkholderia cepacia
atgagcatcatcgacaacaggaaagcgcacttcgattatcacatcgaggaacgctacgaggcggggctcgtgctggagggctgggaagtcaaggcgctgcgcgccgggcgcggccagatcaaggagggctacgtcgtggtgaagaacgccgagatcttcctgatcggtacccatatcagcccgctgcccgaagcctccacgcacatcaagcccgacccggtgcgcacgcgcaagctgctgctgcaccgcgaggaaatcaagaagctgatcggcaaggtcgagcagcgcggctacacgctcgtgccgctgaacttccactacaagggcggccgcgtgaagtgcgacatcgcgctcgcgaagggcaagaagctgcacgacaagcgtgaaaccgagaagaaacgcgactgggaacgcgagaaggcacgcatcatgcgcgccggcacc

SEQ ID NO: 12035 - DNA, 732 bp, Burkholderia cepacia
atggaaaccggctgggccgaactggcgcccgatcccctcgacgatacgccgctctatctgcagctcgcccgcaatctggcgagcgcgatccacgcgggcgcgtggcaggccggcgaggcgctgccgtcggagcggctgctgtcggtgtcggtcggcgtgtcgcggatcaccgcgcgtcgcgccctcgcgctgctggtcgagcagggcctgatcaagcgggcgcgcggcgcgggcagcttcatcacgccgcgcgttgccgatccgctgtcgcgcctcgtcggcttcaccgcgaagatgcgccagcgcggcttcgtgcccgattcggtgtggctgtcgcgcacgctgcgcaccgcgagccgcgacgagctcacgcatctcggcctcgcgcccggcgcgacggtggcgcggctcgaacggctgcgccgcgcggacggcatcgtgatggcggtcgagcattcgacgctgcccgcggcggtggtgcccgatccgcaggtgctcggtgcatcgctgtacgaatacctggaggcgcgcggcatgaccgtcgtgcgcgcgctgcagcactttcgcgcggcgaacgcgacgcacgcgatcgcgaaatggatggcggtgaagccgggctcggcgctgctggtgatcacgcggatcggctacggtgtcgaccagcgcgcgatcgaaatgagcgaaacgtattgccgcgacgactattacgacttcgtcgccgaactgaaacgc

SEQ ID NO: 12036 - DNA, 3299 bp, Burkholderia cepacia
ggaggtagcaggacatgaaccgcacataccgctcgatctggaacgaagcgcttggcgcctgggtcgcggcatcggaacacgattcggcacggggcaagccgaacaagtcggccgtcactgccgcagtattggccgccgtcgcaatgctcccgtcgctcgccggcgccaataccttcgttccaggcacgaccaacggtagccaattcaccgtttcgtcgtgtacgtcgagcggtggcaacggcaccgtcggccgcacgacgacaggcaacaccaatgcctatcccgtcgacggatccggcacttactccacggttgcgggctgtaactccagcggcaacaacaatctcgcggccacggcttatggggcattcgcgcaagtcaccggcaccggcggtacggcgacgggcttcctgtcatctgccgcgctctggggcacgtccgccggtctcgagtcgaccgccagcggcgccggttctaccgcgctcggcttcggggcaacggccaacgcattgaattcggtcgcgatcggcggtgcagccggtaatggcaccaccccgctttcatatgcgaactcgaccatcgcttcgggcgccggcgcggtcgcaatcggcagcaacgcgacgaagggcgcgcagtctgccgcgtcggatggcatcgcgatcggcgggcaatcgtccgtcgcgtcggccgccacgtcgggtattgcagttggccgtggtgcgacggtcaatggtgcgtatggcatcgcgcaaggcgacggcgtcgtctccggcgcaacgggccgaaacgtggcaatcggctcgtcgggcacgacggcgaacagcgcgacctcggccggcggcgcggtcgcgatcggccgaggccagagcgcaagcggcgacggcgccgttgcgatcggcgatccgaacagcgccaccggtacgggcgcgctggcaatcggcgcgaacgacacgtcgaacggctccggcgccatcgcgctcggcaacagcagcacggcgaccaacagttccgtcgccatcggcagctcggcctcggcgacgggtaccaacggtgcgattgccgtcggcaatgcggcaaccgcgaacggcaccggcgcaatcgcgctcggtaacgtcggcagctttgccgccaactcgatcgcaagcggcacggacgcactcgcgctcggtaacggctcgacggccagcggcagcgccggcgcggtcgcggtcggcgcggcagccgtggcgtccggaagctacggcacggcactcggttcgaattcgaccgcgagcgtcgcaaactcggtcgccctcggctacaacgcgctgacgaccagtgcggcaacggcgacgtccggcggcaccaccaccgtcagcagcgccacgatcggcggtcagacgttcggcaacttcgccggcgccaattcggcgggcggtgtcgtcagcgtcgggcagtcgggctcggaacgccgtatccagaacgtcgcggcgggcctcgtcacggccaccagcaccgacgcgatcaacggcagccagctctattcggttgcgagcacgacgacgtcgagcatcacgagcctgtcgacgtcggcttcgacgggcctgtcgtcggctaatagctcgatttcgtcgctgtccacgtcgacctcgaccggcatcaattcgctgtccaccggcctcagctcggcaaacagctccgttacgtcgctttcgacttccacgtcgacgggtctctcctcggctaatagctcgatcggctccctgtcgacctcgacttcgaccggcatcaactcgctgtccaccggcctcagctcgacaaacagctcggttacgtcgctttcggcttccacgtcgacgggtctctcctcggctaatagctcgatcggctccctgtcgacctcgacttcgacgggtatcaattcgctgtcgacgggcctcagctcggcaaacagctcggttacgtcgctgtcgacttccacgtcgacgggtctctcgtcggccaacagctcgatctcgtcgctgtccacgtcgacctcgaccggcatcaactcgctgtccaccggcctcagctcggcaaacagctccgttacgtcgctttcgacttccacgtcgacgggtctctcgtcggccaacagctcgatctcgtcgctgtccacgtcgacctcgaccggcatcaactcgctgtccaccggcctcagctcgacaaacagctcggttacgtcgctttcgacttccacgtctaccggcctctcgtcggctaacagctcgatctcgtcgctgtccacgtcgacctcgaccggcatcaactcgctgtccaccggcctcagctcggctaacagctcggttacgtcgctttcgacttcgacgtctaccggcctctcgtcggccaacagctcgatctcgtcactctcgacctcgacctcgaccggcatcaactcgctgtccaccggcctcagctcgacaaacagctcggttacatcgctttcgacttccacgtcgaccggcctctcgtcggctaacagctcgatctcgtcgctgtccacgtcgacctcgaccggcatcaattctttgtccaccggcctcagctcggcaaacagctcgatcacgtcgttgtcgtcttccacgtcgaccggcctctcgtcagctaacagctcgatctcgtcgctgtcgacttcgacctcgaccggcatcaactcgctgtccaccggcctgagcacggtctcgacgaagacggacaacctcggcagcagcaccgcctcggcacttggcggcggttcgacgtacgacccgacgacaggcaaggtttcggccccgtcgtacaccacatacaacgcgaacggcacgacgtcgaccgccaacagcgtcggctcggcgatcaacaacatcaacagccagggcatcaagtacttccacgcgaactcgaccggcgccgacagcaccgcaacgggcaccgacgctgtcgccattggctcgggcgccgtcgccagcacgatcaactccgtcgccatcggcctcggcgcggtcgccagcacagacgactccgtcgcacttggcgccgactcgaagaccgtcgcggcaacgcccacgagcagcgcgaccgtcaacggcgtgacgttcagcggattcgctggcgccaagccagtcggcgtcgtcagcgtgggtgatgccggcaaggaacgacaagtcaccaatgtcgccgcgggtcaagtgacctccaccagtaccgacgcgatcaacggcagccaactgtattcggtcgcccagcaagtcggtactgcgaccagcgccatttcgtcgctgtccacttcgacctcgacc

SEQ ID NO: 12037 - DNA, 1308 bp, Burkholderia cepacia
atgtccgacctgtttcaagtcgagccgcgccgcccgctcgccgaggcgctgcggcccaaaacgctcgccgaggtgatcggccagacgcatttgctgggcgaaggcaagccgctgcggctcgcgttcgaatcgggcaagccgcattcgatgatcctgtgggggccgcccggcgtcggcaagacgacgctcgcgcggctcaccgcgctcgcgttcgactgcgagttcatcgcgctgtccgcggtgctcggcggcgtgaaggacatccgcgagtcgatggagcaggcgaaggacacgctgaaccgcaccggtcgccacacgatcctgttcgtcgacgagatccaccggttcaacaaggggcagcaggacgcgctgctgccgttcgtcgagtcgggtctcgtcaccttcatcggcgcgacgaccgaaaacccgagtttcgaagtcaattcggcgttgctgtcgcgcgcgcaggtgtacgtgctgaaatcgttgaacgatgacgagatgcgtcagttgctcaagcgcgcgcaggaaatcgcgctcgacggcctcgcgttcgacgacaaggcgatcgacacgctggtcggctacgcggacggcgacgcgcgccgcttcctgaacctgctcgaacaggcgcagacggcggcgacgtcggccggggtcgcgacgatcgatgccgatttcgtcagcagcgcgatgacgctgaacgcgcggcgcttcgacaagggcggcgacaacttctacgaccagatttcggcgctgcacaagtcggtccgcggctcgagcccggacggcgcgctgtactggttctgccggatgatcgacggcggcgcggatccgaagtatctcgcgcggcgcatcgtgcggatggcgtgggaagacatcgggctggccgacccgcgcgcgttgcaggtggcgaacgacgcggccgagacctacgaacggctcggctcgccggaaggcgaacttgcgctcgggcaggccgtgatctatctcgcgtgcgcggcgaagagcaacgccggctacaacgcgttcaaccaggcgatggcgttcgtgaagcaggacaagtcgcgcgaggtgcccgtgcacctgcgcaatgcgccgaccaagctgatgaaggaactcggctacggccacgcgtatcgttacgcgcacgacgagccgaacgcgtacgcggccggcgagacgtacctgccggacgggatgcgcgagccgcgctggtatcagccggtgccgcgcgggctcgaatcgaagatcgccgagaagctcgcctggctgcgcgagctcgatcgcgaagccggcaagaaggac

SEQ ID NO: 12038 - DNA, 1269 bp, Burkholderia cepacia
atggcggacaaaaaaggttcgaacagcgagaagctgttgtattgctcgttttgcgggaagagccagcatgaggtgaaaaaactcatcgcgggcccgtcggtgttcatctgcgatgaatgtatcgacctctgcaacgaaatcattcgcgacgaggcggctgccgccggcgtcgaggccagcctgtcccggtcggatctgccgagcccgcaggaaattcgcgacatcctcgatcagtacgtgatcggccaggagcgcgcgaagaaaatcctcgcggtggccgtgtacaaccactacaagcgcctgaagcatctcgacaagaaggacgacgtcgagctgtcgaagagcaacatcctgctgatcggcccgacgggctccggcaagacgctgctcgcgcagacgctcgcgcggttgctcaacgtgccgttcgtgattgccgatgcgacgacgctgaccgaagccggctacgtcggcgaggacgtcgagaacatcatccagaagctgttgcagaactgcaactacgaggtcgacaaggctcagcgcgggatcgtctacatcgacgaaatcgacaagatcagccgcaagtcggacaacccgtcgatcacgcgcgacgtgtcgggcgagggcgtccagcaggcgctgctgaagctcgtcgagggcacgatggcgtcggtgccgccgcagggcggccgcaagcacccgaaccaggatttcatccaggtcgacacgaccaacatcctgttcatctgcggcggcgcgttcgacggtctcgaaaaggtgatcaccgatcgcaccgagaagaccggcatcggcttcggcgcgacggtcaagagcaagcaggaacgcgacgcgggcgaagtgctgcgcgaaacggaaccggaagacctgatcaaattcggtctgatccccgaattgatcggccgcctgccggtggtcgcgacgcttggcaagctggacgaagccgcgctgatgaagatcctggtcgagccgaagaatgcgctcgtcaagcagtatcacaagctgttcgcgatggagcgtgtcgagctggaaatccggccgggcgcgttgcaggcagtcgcccgcaaggcgattcgccgcaagaccggcgcgcgcggtttgcgttcgatcatcgaacaggcgttgctcgacgtgatgtacgagctgccgacgatgaaaggggtcagcaaggtcatcatcgacgagaacgtcatcgatggggacggcaagcccttgctgatctacgaggacacgccgaaggtggcgggttcgaac

SEQ ID NO: 12039 - DNA, 1342 bp, Burkholderia cepacia
atgaaacgctacgaaaccctcgcccatacgatcgccgacgacatccgcaacggcaacctcgccgtcggcacgcgcctgccgtcgttgcgacagatcatcgcgcagcatggcgtgagccagtcgacggtatttcgcgcgtattacctgctcgaacagtgggggctgatccgcgcgcgcgaacgctcgggctactacgtcgcgccgggcgcgcagccggctgcgagcccggcgacgaaacgccgtacgcgccgcaccgacgcaacccgcaaggtcgacatcagcaatctcgtgttctccgtgctcgatgcggccacgcagcccggcatcgtgccgctcggttccgcgttcccggcgccgcagctgtttccgctgccgcgtctggcgaagtcgctcgcgcaggccacgcggctcgtgagcccgtggagcacggtcgtcgacctgccgcccggcaacgaggcgctgcgccagcagatcgtgcggcgctatctcgccaccggcatctcgcagccgatcgacgaactcgtcgtcacgaacggcgcactcgaagcgctgaacctgtgcctgatggccgtcacgcggccgggcgacgtcgtcgccgtcgaagcgcccggtttctacgcggcgctgcaggcgatcgagcggctcgacctgcgcgcggtcgagattcccgtcgatccgcgcaccggcctcgacctcgccgcgctcgcgaacgcgctcgaccggcacgacatccgcgcgtgctggttcatgaccaatttccagaatccgaccggcgtcacgctgaccgtcgacaaaaagcgcgcgctcgtcgaattgctcgcggcgcgcaacgtgccgctgatcgaggacgacgtctacggcgaactgcatttcggcccggactatccgctgcccgcgcgcgcattcgaccgtcacggcctcgtgatgcactgcagctcgttctcgaagacgctcgcgcccggctaccggatcggctgggccgccgcgggccggttcgcggagaaggtgcagcggctcaagctgatgacgacgctgtcggccagcattcccgcgcaggccggcatcgcgaactatctcgagcacggcggctacgaccggcacctgcgcgtgctgcgcggcgcgctgcacgcgcagctcgaccggatggacgacgcgctgcggcgctggctgccggccgacgtcgagtgggtgcggccggaaggcgggtatttcctgtggctcgcgtttcccgacgcgatcgacgcgatggcgctgcatcgcgaggcgatcgcacgcggcatcagcttcgcgccgggtccgctgtttcggccgcgcacggcttcgagcgctgcgtgcgcgtgaa

SEQ ID NO: 12040 - DNA, 1170 bp, Burkholderia cepacia
atgagcgagacgaaagacgcagcagcaccggccgccgcaggcgcattcaagccgaagaagtcggtggcgctgtcgggcgtgacggccggcaacaccgcgctgtgcacggtcggcaagaccggcaacgacctgcactatcgcggctacgacattctcgacgtcgccgaatcgtgcgaattcgaggaaatcgcgcacctgctggtgcacggcacgctgccgaacctgaccgaactggctgcgtacaagaccaagctgcgcgcgctgcgcggcctgccgagcgcgctgaaggccgcgctcgagcagattccggcgtcggcgcatccgatggacgtgatgcgcaccggcgtgtcggtgctcggcaccgtgctgccggagaaggacgaccacaacctgccgggcgcgcgcgacatcgccgaccgcctgatggcgtcgctcggctcgatgctgctgtactggtatcacttctcgcacaacggcaagcgcatcgaaacggaaaccgacgacgattcgatcggcggccacttcctgcacctgctgcacggcaagacgccgtcgaagtcgtgggtcgaggcgatgcacacgtcgctgatcctgtacgcggagcacgaattcaacgcatcgacgttcacggggcgcgtgatcgcgggcacgggctcggacatctactcggcgatcaccggtgcgatcggcgcgctgcgcgggccgaagcacggcggcgcgaacgaagtcgcgtacgaaatccagagccgctacagctcgcctgacgacgccgaagccgacatccgccgccgcgtcgagaacaaggaagtggtgatcggcttcggtcacccggtctatacgatctccgatccgcgcaacaaggtgatcaagggcgtcgcgcacaagctgtcgaaggaagcgggcgacctgaagctgtacgacatcgccgagcgcctcgaatcggtgatgtgggacgcgaagaagatgttcccgaacctcgactggttcagcgccgtgtcgtatcacatgatgggcgtgccgaccgcgatgttcacgccgctgttcgtgatctcgcgtacgtccggctggagcgcgcacatcatcgagcaacgcatcgacaacaagatcatccgcccgagcgcgaactacacgggcccggaagacctgcagttcgtgccgatcgagaagcgc

SEQ ID NO: 12041 - DNA, 168 bp, Burkholderia cepacia
atgaaatcggcaacgttggccgcggcgctcgtcgcggcgctggtgctcgtgctgtcgacgggctgtacgtcgtcgggcagcggcgtgtcgcaaggacccggcatgagccggtatggcggctcgggaggtagcggaggcggcggaggcggcggaggcggcggcggctac

SEQ ID NO: 12042 - DNA, 873 bp, Burkholderia cepacia
atgattctcagaaaactcttcggcttcgtcgcgaccgccgtcatccttctcgtcgcgatcctgatcgggcgctcgctgtgggtgcactacatggacgatccgtggacacgcgacgggcgcgtgcgcgctgagatcgtcaacgtcgcgccggacgtgtcgggcgcgatcgtcgagctgcccgtgcatgacaaccagctcgtgaagaagggcgacctgatcatgcagatcgatccgtcgcattaccagatcgcggtcgagcaggcgcaggcggcggtggccgcccgtcgcgcggaactgcagatgcgccgtgacgacgcggcccgccgcgcggacctcgatgcgctcgtcgtgtcgaaggaaaaccgcgagaatgcggcgcacagcgcgtcgagcgccgacgcgcagtatcagcaggccatcgccgcgctcgacgccgcgaagctgaacctcgcacgcacgcgcgtcgtcgcgccggtcgacggctacatcacgaacctgcagaccttcaagggcaactacgcggtggccggccaggcgaagctcgcgatcgtcgacagccactcgttctgggtctacagctacttcgaggaaaccaagctgccgcgcgtgaagatcggcgcaccggccgaaatgcggctgatgagcggcggcgtgatgaaaggccacgtcgagagcatctcgcgcggcatctacgatcgcgacaacccgcaaagccgcgacctcgtcgcggacgtgaacccgaccttcaactgggtgcgcctcgcgcagcgcgtgccggtgcgcatcaagatcgacgaagtgccggccgacgtggtgctgtcggcgggcacgacctgcacggtcatcatcgaccccgacaagcagaagaagtcg

SEQ ID NO: 12043 - DNA, 450 bp, Burkholderia cepacia
gtgctgattacccgaaaactcgaattcgacgcgggccaccgcatccccgatcaccgcagccagtgcaggaacctgcacggccatcgctacgtgctcgaaatcacgctgcgcggtgatctcgtcgataccgagggggcgcccgaccgcggcatggtgatggatttcgccgacgtgaaggcgctcgcgatggagcacctcgtcagcaagtgggatcacgcgttcctggtctatgcgcgcgacgaggtcgtgcggtcgttcctcgagcagatggccgaccacaagacggtcgtgatcgaccggatcccgaccgtcgagaacctcgcggcgatcgcgttcgacctgctcgcgaacgtgtacgacgcgcactacggcgtgaatctgcgcctcgagcgcgtgcgtctgtacgaaacgccgaactgctgggccgacgtcgagcgccagcccggccgc

SEQ ID NO: 12044 - DNA, 408 bp, Burkholderia cepacia
atgaccgatgtgaatgacgatgcgccgtcgcagccgacggcgttcgagctcgtgggcggcgaagcccgcgtgcgcgaaatggtggaccgcttctacgacctgatggacctcgagccggagttcgcgcagattcgcgcgctgcatccgccgtcgctcgacggttcgcgcgacaagctgttctggttcctgtgcggctggctcggcggccccgaccactacatcagccggttcggccatccgcggctgcgcgcgcggcacctgccgttcccgatcgcgtcggtcgagcgcgaccagtggctgcgctgcatggcgtgggcgatggaggatgtcgggttgccggagccgctgcgcgagcggctcatgcattcgttctacgacacggccgactggatgcgcaaccggcccggt

SEQ ID NO: 12045 - DNA, 816 bp, Burkholderia cepacia
atgacggcagcgcggccttccgccgtgcttcgcgccggctccgatcgccgcccgacaaccgtgaccgagccccgctccgacgtgccgccgcccaccgccatggaccaaccgaaacgtatcctgatcgtcgaggacgatgccgacatcgccgacgtgctgagcctgcacctgcgcgacgagcgctacgaagtcgtgcacagcgcggacggcgccgaagggctgcgcctgctcgaacagggcggctgggacgcgctgatcctggacctgatgctgccgggcgtcgacggcctcgagatctgtcggcgggcgcgcgcgatgacgcgctacacgccgatcatcatcacgagcgcgcgatcgagcgaggtgcacaggatcctcggcctcgaactcggcgccgacgactacctcgcgaagccgttctcggtgctcgaactcgtcgcgcgcgtgaaggcgctgctgcggcgcgtcgatgcgctcgcgcgcgattcgcggctcgacgcgggcacgctcgacgtcgccgggctggcgatcgacccgatcgcgcgcgaagcgagcgtcgacggcgcacgcatcgacctcacgccgcgcgaattcgacctgctgtatttcttcgcgcggcatccgggcaaggtgttctcgcggatggacctgctcaatgcggtgtggggctatcagcacgaaggctacgaacatacggtcaacacccacatcaaccggctgcgcgcgaagatcgaggccgatccggccgagcccgtgcgaatcctcaccgtgtgggggcgcggctacaagctcgccgcgccgggtcagcgggacgca

SEQ ID NO: 12046 - DNA, 1356 bp, Burkholderia cepacia
atggacaacaccacgcccacccttgcaacggaccgcgcaccgcgcgtgccgcgcatcgtgatcgtcggcggcggcgccggcggcctgcagctcgcgacgcgtctcggcgatacggtcggacgccgcgggcagaccgacgtcgtgctcgtcgaccgctatccgacgcacttctggaagccgctgctgcacgaagccgcatcgggccatcgcgatccggcctcccacacgatcgaatacgcggcgcaggcgaagcgtcacggcttccgtttcgtgcagggcgcgctgcggcgggtcgaccgcgcggcccgcacggcgacgatcgcggccgtgcgggatgcggacggcacggaaatcctgccgcagcgggaactcgactatgacgatctcgtgctggcggtcggcagcgtgacgaatttcttcaatgtgccgggcgccgagcgtcatgcgctgccgctcgaaaacctcgaccaggccgaggatttccgccgcaagttcctcgctgcgtgcacgaaggcgaatcacctggccgagcagcagcccgcgcggcggggcgcgccgatctgcatcaacgtgatcggtgcgggcgcgacgggcgtcgagctggccgccgcgctgcggcacgcgatccagcaactgaccacgtaccgcttcaaggcgctggtgtccgcacgcgacgtgcacatccggctgatcgaaggcggcccgcgcatcctgccggcgctcgacgaacggctgtccggcaagatgcacgcgcagcttcgcgcgctgaacgtcgacgtgctgaccgatacgcgcgtggcggaagtcggcgcggatgccgtgacgaccgcggcgggcgaacggctcgcgagcgacatcacgatctgggcggccggcgtcgccggccccgcgatgctgcgggacatcggcgacatcgcgctgaaccgctcgaaccaggtgatcgtgaccgacacgctgcagacgcccgacgatccgcacgtgtatgcgttcggcgattgcgccgcgtgcccgtcgactggtgccggcggattcctgccgccacgcgcgcaggtcgcgcaccagcaggccgtgtatctggtcaacgcgttcgcgcgccgcgtcgccggcaagccggtggccggcttcacgttccgcgatgcgggcacggtcgtgtcgctcgggcatgcgggtgcggtgtaccaggcggacatcggcgtgcgctcgcgctcgctgatcgtcgacgggctggcggcgatcgggctgtacaagttcctgtatcgcaagcacctgttcagcgtggtcggcgtgaagcgcgcgctgttccagtcgctgagccactggctgcaaagccgtaaccagccgtcgatcaagctgcac

SEQ ID NO: 12047 - DNA, 840 bp, Burkholderia cepacia
atgcccgacaccaccgccgacgccctgctgcgcacctcgccgctcgacgcggtcgatgcacgcgtgctgctcgcgcacgcgctcggctggacccgcacgcaactgatcacgcgcggcgacgcgccgctcgacgcggccgcggtcgaacgctaccgcgcgctcgaagcgcgccgcgtcgccggcgaacccgtcgcgcaactggtcgggatgcgcgagttcttcggccgcccgttcgacgtgacgcccgacgtgctgatcccgcgccccgaaaccgagctgctcgtggaagccgcgctcgatgcgatcgacgggctgccgcacgcggccgtgctcgacctcggcaccggcagcggcgcgatcgccgtgtcgatcgcggccgagcgccccgatgcgcgcgtgtgggcgctcgaccgttcgccggccgcgctcgcggtcgcgcaacgcaacgccgacaagctgctcgacgcacagcgccccggcggcccgctgcactggctgcagagcgactggtacgcggcgctcgatcccgcgctcgcgttcgatgcgatcgtcagcaacccgccgtacatcgcgcagcacgatccgcatctcgcccagggcgacctgcgtttcgagccgcgcggcgcgctcaccgacgacgccgacggcctcagcgcgatccgcacgatcgtcgcgggcgccggcgcccatctgaagccgggcggcacgctctggatcgagcacggctacgaccaggccgaagccgtgcgcgcgatcctggtgtcgcacggcttcgtcgcggtcgaatcgctgaccgatctcgccgccatcgaacgcacgaccggcggccgcctgccgggc

SEQ ID NO: 12048 - DNA, 366 bp, Burkholderia cepacia
atgctttcagcggttatctcttccgaacatagctacccggcgatgccactggcgtgacaaccggtacaccagaggttcgtccactccggtcctctcgtactaggagcagcccccttcaaatatccaacgcccacggcagatagggaccaaactgtctcacgacgttttaaacccagctcacgtacctctttaaatggcgaacagccatacccttgggaccggctacagccccaggatgagatgagccgacatcgaggtgccaaacaccgccgtcgatatgaactcttgggcggtatcagcctgttatccccagagtaccttttatccgttgagcgatggcccttccatacagaaccaccggatcac

SEQ ID NO: 12049 - DNA, 1263 bp, Burkholderia cepacia
gtgagcattatcgtgacgtcctataactatgcgcggttcattggtgagaccatccggtccgtcatcgaccaaaccctcgactcgtgggaactgatcatcgtcgacgactgttcgacagacgattcgtggaacgtcattcaggcgtttcaggaccgacgtattcatgcagtccgcttcgacaagaaccgcggtgcatgtgccgcatacaacacggcgctcagccttgcgagaggggagttcattgcaagcctggattccgacgacgtattcaacgaggacaaacttgccgtccaggtggcattcctggaccaacatccggaagtcgatatctgcggtacgtacctcgaagaaatcgacgatgcgggcaatccggtgccgagcgaaagccacatgtacgcgccgtggttcaataaggaactggatctcaattcgcctgattgctggatctgggagaaccatctttgccattccggcgtgctgatgagaaagtctgtgcacgaccgcgtcggctcgtttcgcgaagaactgacgtattcgcctgattggaatttctggttacgcgccttgacggccggggcgacttttcatgtgattccgcaggagcttgtccggtacaggtcccacggaagcaacattacacaccggaatttcgatgccttaatgtgggagtacgcggatacctccgcgcgaacgctgcatccttatctgatgcgtgtgggtcgccccgatctgatcgcgaaaaacgttcagatcttcgtcaagcgattcttcgaggtcgatggcgactggcgccgatatcttgaattgatggatctgctcgattggcgtaatgctcacagtgatcgattcgcgattccgtcgcatctgttcgacgatcccgagttgacggcacttgtcgcgaggcttgcgcgcgggtggtctccgcaaatggttgccggtacgttaccgctgtcgtctgaattcgcggcagagagcgccgatcgcgaacggacgatagccctatccactgtggatgcatcgacgtttttgctgcttgtacgtaacgagcgggatcaggcacgtcgcgacctcgagaatgccgaagcagcggtccgttccggtgccgagcgagaggcgcggcttgaatcggaacaggttgcactcaaggccgaacatgcgaggttgcaggcggagattgcgtcgcttcggactgagctcgaacgtatcggggggacggtttggggcaaggcagacaggttgtatcggcgtctcggcgggcggatt

SEQ ID NO: 12050 - DNA, 825 bp, Burkholderia cepacia
atgccagagttgccagaagtcgaagtcacgcgccggggcatcgagccctttgtcgcgggccgccgcgtcgagcgtgtcgacgtccgtaccgcgatgctgcgctggcccgtgccggcggggctcgccgagcagttgcgcgcgcgcgaggtgctcgccgtcgagcgccgcggcaaatatctgctgttcgaggtcgatgcgggctggttcatcgtccacctcgggatgacgggcacgctgcgcgtgctgcccgcggccggcgtgccggtcgccgcgaagcacgaccacatcgactggatcttcgacgaattcgtgctgcggttccgcgatccgcgccgcttcggcgccgtgctgtggcacccgcgcgaagccggcgacgtgcatgcgcatccgctcctcgcgagcctcggcgtcgagccgttttcgccggcgttcaccggcgcgctgctgcatgcgcgcacgcggggccgcacggtgtcggtcaagcaggcgctgctcgcgggcgacatggtcgtcggcgtcggcaacatctacgcgtcggagagcctgtttcgcgccggcatccggccgacgacggctgccggcaaggtttcgctgccgcgctacgagcggctggccgacgcggtgcgcgcgacgctcgcggacgcgatcgagcgcggcggcagtacattgcgcgatttcgtcggcagcaacggcgaaagcggctacttccagctcgactgtttcgtctacgatcgcgccggccagccgtgccgcgtatgtggcacgccgattcgccagatcgtgcagggccagcggtcgacctattactgcccgacgtgccagcgt

SEQ ID NO: 12051 - DNA, 408 bp, Burkholderia cepacia
atgaaagcccccgccatgaccgattcgaccctcgaactcccgcagaagcagcccgcgctgcgcgtcgtcccgcaaccgcacgacgcgaacgtccacggcgacgtgttcggcggctggatcatgtcgcaggtcgacatcgccggctcgatccccgcgagccagcgcgcgaacggccgcgtcgcgaccgtcgcggtcaactcgttcgtgttcaagcagccggtattcgtcggcgatctgctgagcttctacgccaccatcatgcgcaccggcaacacgtcgatcacggtcgacgtcgaggtatacgcgcagcgcatgcgcctgatgggcgaagtcgtgaaggtcaccgaagcgacgctcacgtacgtcgcgaccggcccggaccgcaagccgcggcaactgccgccgctc

SEQ ID NO: 12052 - DNA, 1152 bp, Burkholderia cepacia
cgcttcgccgaacgcgaagccgacttccggcccgggctcggctgcacgctcgcggtcgggtccccgaccggctcggcggcggccaccttgcccgccgggttgccgcccctccccgatccagcgcccgcgcaacccgatccgcccgcaccggccacaccgcccgccggcatcgacgcacacctgttgcagaccgccatcgaccgcgcgttcgacgaacccgatccggcgcggccgcgccgcacgcgcgcggtcgtcgtgatgtggcgcggccaggtgatcgccgaacgctatgcgcccggcttcacggccgacacgccgctgcccggctggtcgatgacgaagaccgtcacggccgcgctggtcggcacgctggtcgcgcagcacaagctgtcgccggacgcgtcggcgctgctgcccgaatggcgcggcagcggcgatccgcgcgcggccatcacgctcgacgagctgctgcggatgacgagcggcctgcaattcaacgaggactacgacgacccgctgtccgacgtcgcggtgatgctgttcacgcagcccgataccgcgcggttcgcgtcggcgaagccgctggtcgcgacgcccggcacgcaatggtcgtactcgagcggcacgagcgcgatcgtcgcgtgcgtgatgcgcgaggcgctgggcggcaacgccggcgactacctcgcgttgccgcgccgcgcgctgttcgcgccgctcgggatgcgcagcgcggtgttcgagcccgacgcgtccggcacgctcgtcagcgcgtcgtacatgtatgcgagcgcacgcgactgggcgcgcttcggccagctgctgctgcaggacggcgtgtggaacgggcagcggctgctgccggaagggtgggtgggctacctgacgcgcgcgacgccgcaatcgtcgcggcaggaattcggcgcgcagctgtgggtcaaggtgccggagccgttcaacgatcgcgatccgcacgcacgcgcgatgccggccgacgcgtttcacgcggtcggccacgaaggccagttcgtgagcgtggtgccgagccgtcagctggtggtcgtgcggctcgggctgtcgcggccggaagccgcgtggaatcacgaggcgtttctcgcgcgcgtgctcgacgcggtgccggcgcccggtgcg

SEQ ID NO: 12053 - DNA, 906 bp, Burkholderia cepacia
atgaacaagtctccttttctgctccccttctgcgcgatcgcgctgtgggccggcaacgtcgtcgtctcgaagctgtccgcgtcgacgatcgacccgtcggccatcacgttctaccggttgctgctcgccgtcgcgctgatgagcgtcttcacgctgcgccccgcgtggcgcaatcgcgcggtgctcgtcgcgcacctgccgaagctcgcggtgctcggctttctcgcgatggcgctgttccagagcctgtcctacgaggccgcgaaaacgaccagcgcgaccaacatggcgatcatcaccgcgctcgtgccgctgatgacgatgctgctgagctcgctgctgctcggcgatccgccgggcgccggcatgatcggcggcggcgtgctgtcgctcgcgggcgtcgtctacctgatcgccgaagggcacccgacggcgatcgccgcgcgcggcgtgcagctgggcgacctgctgatgctggccgcgtcggccgcgtacgcgctgtacggcgtgctgctcaagcgctggcgcatcggcgcgctgcccgcgtggcagtcgacttacgtgcaggcgctggccgcgctcgtgttcatggcgccgatgctgctgcggctgcctgcgcaggccgcatggccgacgcgcgcgagcgtgccgctgatcctgtatgccggcgtgctggcgtcggtggtgctcccgtatctgtggatgcagggcgtgcggctgctcggcccgagccgctgcgcgatgttcatgaacctgctgcccgtgatgacggccggcggcgcgatcgtgctgctcggcgaatcgctgcggctgtatcacctgatcggcggcggtgtcgcgctgctcggcgtcgcgctcgcgcagcggtttccgtttcaagccggtgcatcgcaaggagcccgccaa

SEQ ID NO: 12054 - DNA, 3531 bp, Burkholderia cepacia
atgtcagatcctcgcttcgtccatcttcgcgttcactccgaattctcgattgccgacggcatcgtgcgcattgacgacatcgtcaaggcggcggccgcggacggtcagggcgcgctcgcgctcaccgatctcggcaacgcattcggcctcgtccgtttctaccaggaagcccgcggcaagggcatcaagccgatcgccggctgcgacgtctggattgccaatccggacgaccgcgacaagccgtcgcggctgctgctgctggtcaaggacaaggtcggttacctgaatctctgcgagctgctgtcgaaggcgtggctcacgaaccagtaccgcggccgcgcggaactcgacgcgagctggctcgacggcgagctcgcgcaggggctgctcgcgctgtcgggcgcgcaacagggcgatatcgggctcgcgctggccgcgggcaacgaagaagccgcgcgccgtcacgccgagcgctgggcgagggtgttcccgggcggcttctacatcgagctgcagcgttacggccagccgggcgccgaggcgtacatccagcaggcggcgacgctcgccgcgtcgctgaagctgccggtcgtcgcgacgcacccgacgcagttcatgaccgacgacgatttcaccgcgcacgaggcgcgcgtgtgcatctcggaaggcgacatcctcgcgaacccgcggcgccagaagcgtttcacgaccgaccagtatttccgcacgcaggacgacatggccgcgctgttcgccgacctgccgtcggcgattgccaatacggtcgagatcgcgaagcgctgcaacctgaagctcgagctcggcaagccgaaactgccgctgttcccgacgccggacggcatgtcgctcgacgactacctggtccagctgtcgaaggaggggctcgaaacccgcctcgcgcagttgtatccggtcgaagccgagcgcgacgcgcagcgcgacacgtactacaagcgcctcgaattcgagtgcgggaccatcacgaagatgggcttccccggctacttcctgatcgtcgcggacttcatcaactgggcgaagaacaacggcgtgccggtcggcccgggccgcggctcgggcgccggttcgctggtcgcgtacgcgctcggcattaccgacctcgatccgctgcgctacaacctgctgttcgagcgcttcctgaatccggaacgcgtgtcgatgcccgacttcgacatcgacttctgccagcacggccgcgatcgcgtgatccagtacgtgaaggagaaatacggcgcggacgccgtctcgcagatcgccacgttcggcacgatggccgcgaaggcggccgtgcgcgacatcggccgcgtgctcgacctcggctacatgtttaccgacggcgtcgcgaagctgattccgttcaagcccggcaagcacgtgacgattgccgacgcgatgaaggaagaaccgcagctgcaggagcgctacgaccacgaggacgaagtccaccagctgctcgatctcgcgcagcgcgtcgagggcctcacgcgtaacgtcgggatgcacgcgggcggcgtgctgatcgcgcccggcaagctgaccgatttctgcccgctgtacacgcagggcgacgacggcggcgtggtcagccagtacgacaaggacgacgtcgaagccgtcggcctcgtgaagttcgactttctgggtctcacgacgctgacgatcctcgactgggccgagcgctacatccgccgtctcgatccgtcgaaggcagactggtcgctcgcgcaggtgccgctcgacgatccggcgtcgttccagatcctgaagaaggccaacacggtcgcggtgttccagctggaaagccgcgggatgcagggcatgctgaaggatgcgcagcccgaccgcttcgaggacatcatcgcgctcgtgtcgttgtaccggccgggcccgatggacctgatcccgagcttctgcgcgcggaagcacggccgcgagaaggtcgaatacccggatccgcgcgtcgaacccgtcctgaaagagacctacggcatcatggtctatcaggagcaggtgatgcagatggcgcagatcatcggcggctactcgctcggcggcgcggacttgctgcgtcgcgcgatgggcaagaagaagcccgaggagatggtcaagcaccgcgagatcttcgccgagggggccgcgaagaacggcctcacgcgcgagaagtccgacgagatcttcgacttgatggagaagttcgcgggctacggcttcaacaagtcgcacgcggccgcgtatgcgctgctcgcgtattacaccgcgtggctgaaggcgcaccatccggccgaattcatggcggccaacatgacgctcgcgatggacgacaccgacaaggtgaagatcctgttcgacgactgcgtcgtgaacaacctcgccgtgctgccgccggacatcaaccagtcgcattaccggttcgagccggtcgcggaagccgacggcaagcgctcgcgcacgatccgctacggcctcggcgcggtgaagggcagcggccagaacgcgatcgaggaaatcctgcgcgcccgcgaggaaaaggcgttcaccgacctgttcgacttctgcgaacggatcgaccggcgcgtcgtcaaccgccgcacggtcgaggcgctgatccgcgccggcgcgttcgattcgctgaatccgaaccgtgcgcaactgatcgcgtcggtgccgctcgcgatggaagcggccgaccaggccgaagcgaacgcgatgcaggccggcctgttcgacatgggcgccgagtcgccgcacgcgcatgcgctcgtcgacgaacccgcgtgggacgacaagcgccgcctgcaggaagaaaaggccgcgctcggtttctatctgtccggccacctgttcgatgcgtatcgcgacgaagtgcggcgcttcgtgcggcagaaggtcggtgacctgaaggaagggcgcgacaagctcgtcgccggcatcatcgcgtcgctgcgcacgcagatgacgcagcgcggcaagatgctgatcgcgctgctcgacgacggcacgggccagtgcgagatcacgatcttcaacgaacagttcgaggcgaacaaggcgctgttcaaggaagacgagctgctgatcgtgcaggggcaggcgcgcaacgacgcgttcaccggcggcattcgcttcacggccgataccgtgatggatctcgaacgcgcgcgcagccgctacgcgcaggccgtgcggctgacgatgaacggcaacgccgacgcgctcgcgctgcgccgtgtgctcgagccgcacgtgtcgaaggacgatccggccgccgcgaacgtgatcgaagcgcccgcgccgcgcggcggcgggcgcgatggcggtcggcgcccgcaggcgccgctgccgaacgggctcgcggtgcagatccactacagcaacgcgcgcgcgcaaggcgaaatgcgtctgggcgatgcctggcgcgtgaaaccgagcgacgtgctgctggcagagctgcgcgcggcgttcgacggtagttccgccgaaatcgtctac

SEQ ID NO: 12055 - DNA, 1809 bp, Bacteroides fragilis
atgtttctggcaagccttttgcaaataggtctgtcggcattagtctttgagttttcgttgtgggtgtggacaacactgttttgtgtaatattcaatgtgtgcttctttcatctgaatcgtacttatgtaggggtcattcgatattcttcctttattgatatttctcgtattttcatttccttaactttgggatatttggttacctgtgtaggcaatttgctttggatggggtggagtggacgagaagtattgccgattagtgttattcttacagcttatatcgtcaatttctccttgatggtctgtttgcgtattttggtgaaaatgatccatgagttgatgactttcgatcgtagacatagtattcgggtgtttgtttatggttcgaagggatctggtattaatattgctaaatcattacgagttagtagaagtaatcattttagattaaaaggatttatttcagacgatacaggctttatagggaagcagacgatggggtgtagggtatatgcgaataatgaatctctgtttgatattttagaagaagagagaattgaagctattattgtttcttctgagaaagtgcaccgacttgaaacctccggtatgattgaccggttgatagccgaggatattcgtattcttacagttcctccattcaatgatctgggaaaggaaggtatgcaaataaaggatattcagatagaagatttgttacagagagaccctattcatgtagatattcgaaaaatatcttcccatatagaaggaaagagaataatgattacgggagctgccggttcaattgggcgtgaaatggtgaggcagatagccggattgaatccatataaattaattttggttgatcaggcagagtcacctttgcataatgtacaattggaactgttggataattggcgggatattgatgctaaaatgctggttgccgatgtgactaaccaaacgcgtatggaatcaatctttaaagactatcgtccgcagtatgttttccatgctgctgcctataaacatgtgcccatgatggaagataatgtatctgaagccatacaggtgaatgtgttgggtactcgtattatggctgacttagctgtcaaatatggtgtggaaaagtttgtgatggtctctacggataaggctgtcaatccgactaacgtaatggggtgtagtaaaagacttgctgagatttatgttcagtctctcgcacatcaattatctaaatatgccaatgatggggcattagtgaaatttatcacaactcgttttgggaatgtgcttggctcgaacggatctgtgatacctagatttaaacaacagatagagaaaggagggccggttactgtaacgcatcctcaggttatacgttattttatgactattccggaagcgtgccaattggtattggaagcgggaagtatgggtaatgggggtgaaatctatatttttgatatgggcaatcctgtgaagattgttgatctagccagaagaatgatctatttgagtgggcagaaaaatataaaaatagagtttactgggttacggcatggtgagaagctatacgaagagttattgaatgtgaaagagttcacttgtcctacctaccatgaaaaaataatgatagccaaagttcgtgaatatgattatgaagaggttaagcaagaaattcaaaagttaatagatttgagctatacttctgacaccatgggaattgtcgcttctatgaaaaagatagttcctgaatttgtaagcaagaattcggagtttgagatattagataaagcctctttt

SEQ ID NO: 12056 - DNA, 981 bp, Bacteroides fragilis
gtgttcggtttcccgttcttcttcatcgatcgtacaggagacagtatcaattggcatgcctatctgcgtcattctgccgtacccctctcttttgtcactgtattctatttaaactatttcctcctcgttcctcatctcctcttccgggaacagaagaataaatacatcatctacaacatcttattggtctgcctcatcggactgctgctgcatatctggcaaagcctgaatgccccggctcccactcttaaaaaaccgcacatgcctcccggatggatttttttcgtaagagacattctaagcctcatcttcaccatcggactgagtgcggccatccgcatgagtgcccgttggggacaagctgaagccgcccgtcgtgaagcggagaaaagtcgcaccgaagcagagttgaagaacttgcgaaaccaacttaacccgcatttcctgctcaacacgctgaataatatttatgcactcatcgcctttgacagcgacaaggcgcagcaggccgtgcaggagctcagcaagttgctacgctatgtgctctatgacaatcagcagaactatgtacccctttgtaaagaggtagacttcattcgcaactacatcgaactgatgcgtatccgtctttcgggaaatgtagaggtcattacacaattcgacatacagccggacagccggacggagattgctccactgatcttcatctcactgatagagaatgcctttaaacacggcatctcccccaccgaactgagtttcatccacatcctcatctctgaaaacaaagaggagatccggtgtgagatacgcaatagttatcatcccaaaaccaacacggataaaagcggatcgggtatcgggctcgaacaggtaaggaagcgcctcgaactctcttatcccggacgttatcaatgggataaagccatctccccggatggcaaagaatatatatcgaaattattaatatttaatcatcca

SEQ ID NO: 12057 - DNA, 606 bp, Bacteroides fragilis
cgcgaactgaataaacacaagctgaattttttcacttatatcacccatgagtttaagactcctttatctatccttatggctgtattcgaagatatatcaatcggacgaaacaatacaattaccggtgaagaaatgaaaatcatcaatcggaatatccaacggcttcaattcctgatcaatcaacttttggaatttcgctctgtagaaaccgaccatgcacgcatcgaatatgtcaaaggagatattatgacttatggacgcagcatcttcgaactgtttattcccgtcttcagacaaaagcagattgtttttcaatatgcaacttcagccgactcttattatacggtattcgatagagacaagatagagaaaatcatcagtaatctgctcagcaatgctttcaaacattctgatcctcaaagtgaaataaacttcaggattgatgtagacaaagcttccggacaattgattctctcctgtcataacagcagttcatatattcacccggaacagcgggaagctgtcatgcagccttttcacaaaaccgattcatccgatcaaaagtattccaatacgggtattggactggctttggtgcatggtcta

SEQ ID NO: 12058 - DNA, 261 bp, Bacteroides fragilis
atgagtgtatttagaagtaacaagcaaatctatgtccagattatcgacgatttgtctggtaagacattggctgctgcctcttcactgggtatgactgagaagttgcctaagaaagaagttgctgctaaagtgggtgagattattgcgaaaaaagctcaggaagcaggtattacgactgttgttttcgaccgtaatggttacttgtatcatgggagagtaaaagaagtagctgatgctgctcgtaacggtggacttaaattt

SEQ ID NO: 12059 - DNA, 897 bp, Bacteroides fragilis
ttgaaaagtgattcttggctccatcgttttttgcataatcagccgctaaagcataagctgtatgtcattatcttcgaatccgatacacccgcagggaaagcattcgacgtaacccttatcatatgtattctgctgagtatcctgcttgctataatcgaaagccttcaaggtctgccttcctggctttccactccctttatcgtgcttgaatatcttttcacagttttttttacctttgaatatgtcacccgcatctattgctcacccaatccacggaaatatattttcagttttttcggtattgtcgatcttctggctacattgccactctaccttgccttcttcctgcccggagcacgctatctgctgattatacgtgctttccggattatccgggtattccgaatattcaagttgttcaacttctggctcgaaggtgaacgtctactcacttccctgcgggaaagcagcaaaaagatcgccgtctttttcctctttgttgtcatcctcgtcgttgccatcggcactttaatgtacatgattgaagggactcaacccaatacacaatttaataacattccgaatagtatctattgggccattgtcaccatgaccaccgtaggctatggagacatcactcctgctaccgctcttggcaaatttctttctgcctgcgtgatgctgatcggttacacaattattgctgtccctacaggtatcgtctctgcatccatgatgaaagaatacaaaaaattaaaagacttacaatgtcccaactgtcataaaacggggcacgaagagaatgccacttattgtaaatactgcggacataaattgaaaaatgatgaaatttaccggcaagaaaacacggcaactgatccggatcggactacttca

SEQ ID NO: 12060 - DNA, 1443 bp, Bacteroides fragilis
atgtcacttaaagaaaatacaatttatggtgtactgtggagttcatttgagaaatttggaactttatcgatacaatttatttacatgattgtgatggcaagattgctatctccttctgattttggtatagttggcatgttgacaatttttatttctgtaggccaagttatacttgatagtggttttggacaggctttaataagattacaaaaatatgatgatttacatttttcttcaatttttataattaatgttattatgggagttctactctatggaatattattttatatggctccatatatttctttattctatagagaacctagcttaacattaatttcaagaatatcttttttgatttttcccatcaattcactaagtatagtccaatatactttattagtgaaaaaaatggattttaaatctatttctaaaatatctttattctcgataattttatctacaatttcaggtattacatatgggtatttttaccctaatatatttgcactattaattcaaaatgtctcattttatttttataggctacttttattatggtattatggaaactggaaattatcatgtcgaatttcatggagtaaattacaagatttgatgccattctcttttacgttattagctacaggctttatttctactgtcgtaggagagttgtattcattgtctattggtaagttcttttcttcatctgttttaggtttatattctcaagcagaaaggttttcgaaaattccatctttttctataacagatgttgttcaacgtgtgacttatcctgcattatcagtgttacaagacgatgatcaaaaattaaagcattcatatagaatggttattatgtgcacattctttatagtattgcctgtaatgctttttctttttattagcgctggcgaaatttttgaattattatttactgaaaaatgggaacaggcgggtacgtatttcaaatatctctgttttgttgctattatgtatccggttaattctatcaatctcaatattttgaaagttaaaggcaggaataaattgatactttctttagaaataattcgtaaattgataatggtaataattttggttttatcaatagggtttggaatggaaggagttctaattggtcagattgttttttcttttattcaattattttttaattgttattttagtgggagacagatttcatataatcttcgatcccaatttttagatatttctccaattctatttttaggagcgggggctatcttggttacatggtatattagttccatttataattctccttacgtatttattaatatattcttaaagtttatttgtttcttttgtacatatttatttcttgctaaattccttaatttgagcgtgttgactatttttaagggagtgctattttcattttttaaaaggagg

SEQ ID NO: 12061 - DNA, 471 bp, Bacteroides fragilis
atgagtttgaacaaaatcatgttaatcgggcgagttggcaaagatcccgatgtaagagcgttagacgggggtgctaaagttgcctcgtttacttttgccactactgataaaggctatacacttgcaaacggaactcaggttcctgagcgtaccgaatggcataatgtaattatgtggaataaaaccgctgatcttgcagaaaggtatatacataaaggagacaagttatacctggaagggaaattgcgaacacgtagttatgataaaaatggagtaaagcattatattgcagaggtttttgtcgattatatggaaatgctcactccaaagcttcaacagccggctgctcctgctccgattcccgctcctgtgcaacagcccacatcgagttaccagtctcctgctccaaagcctacataccagtcttcttcgtatcagcaagattcagtacctttacctgatcttcctttt

SEQ ID NO: 12062 - DNA, 903 bp, Bacteroides fragilis
atgctactattccaaactacacaacaagtcgccgattccctgcaagtggcggctgagaagctggaccaggctatagcccaggcagacgggctcgataagttgggactgatcacccaacaactgatagactcgggcatacaggccggaggacatattctgaaagcggtcattgtatttttggtcggacgttttctgatccggatgctgaaccgtctggtcggccgggtgatggataagagaaacgtggatatcagtatcaagacttttgtaaagagtctcgttaatatccttcttaccgtactattaattgtttccgtggtaggcgcattgggcgtcgagacgacttcgtttgctgctttgctggcttctgccggtgtggctgtcggtatggcgctttccggtaatttgcaaaattttgccggcggactggttattttactgttcaaaccctataaggtaggcgactggatcgaagcacaaagtgtttccggtacggtcaaggaaattcagatattccatacaatcctgacaactgccgacaacaagctcatctatgtgcccaacggggctttaagcagtggagtggtgactaactatagtaaccagaagacccgtcgcgttgaatggatctttggcgtcgattatggtgaagactataataaggtggaaaaagtggtacgtgaggtgctgaccgccgataagcgtattctcaatgatcctgctccgtttatagctctgcatgcgctggatgccagcagtgtgaatgttgtagtccgtgtttgggtggagagtagcgattattggggcgtttatttcgacataaacaagacgatttatgctacgttcaatgagaaaggcatcaattttccctttccgcaacttacggttcatcaggctccgaat

SEQ ID NO: 12063 - DNA, 599 bp, Bacteroides fragilis
gaaaaagaacaggaaatagaacgtctccgttttgaaaacttgcaaagccgttgtgatgcactggccaaccaggtaaacccgcacttcttcttcaactcactgaacggaatatcttcactgatccgaaagaagaacgatgaaaacacgctgacgtatgtcaaccagctatccgatattttccggtatatcttgcagagcgaccgcaaaggagtggttacactgagagaagaactggagttcatccagtccttccgatacgtaatggaggtacgctttgccaataaactgagttttactatcgacgtggatgaagcacagaaggatgtactgacactgcctgtactctcactcctgccattagtagacaacgtcacggtacacaacaggatagacagtgaacataaaatggatatctccatccggctgaacgaacaatacgaactggtggtatccaatcccatttaccccaaactgtcacctcccgacaccaacggaacgggattaagcaaccttgaaaaccgcttcaacttattaatgaataaacaaatccggatagaaactgatgaaaaagtgttccgggtatatttacctctaatata

SEQ ID NO: 12064 - DNA, 732 bp, Bacteroides fragilis
atgttgcaggaagccaaagagaaggccgaagagtccaatcggctgaagtcggcgttccttgccaatatgagccatgaaatacgtacgccgctcaatgccatcatcggtttctccgatctgatttgccagacggacgatgctgaagaaaaagaggagtatatccggattgtcacttcgaacaatgagcttttactgcaattgatagatgatattctcgacctgtcgaaaatagaagcggggacaatggatttctcttatgccccgacggatatcaatgaactgatggaagacatctgtttacagatgcagcagaagaatcaacgcccggaggtgcagatcatgtttactgaaaaagaacccggttgcgtaattaataccgaccgtttgcgcttgtcacaggtcatcatgaatttgatgaacaatgcaatgaagttcacttccgaaggttccattactttgggctatcggctgaccaggcaaaaggacgaactttatttctttgtaaaggatacaggtatcggcatccctgccgatcaggcgggaaaggttttcgagcgttttgtcaaactgaatacttttgtcaaaggtaccggactgggacttgccatctgccgggtgattatcgaacggttgggaggaacgatcggagtggagactcgggaaggaaagggttcctgcttctggttccgtcttcctgtcagagaggatatgctgctcgaaagccctgtccgt

SEQ ID NO: 12065 - DNA, 1230 bp, Bacteroides fragilis
atgcgaagtacattcaaggtcttattttacgtgaagaaaggcagcgagaagcctaacggcaacctgcctttgatgtgccgcctgacggtggacggagagattaaacagttcagttgcaagatggacgttcccctgcggttgtgggacgtgaagaacaaccgtgcttcgggcaagagcgtcgaagcgcagagaatcaacctcgcggtggataaaatccgagtggaggtaaaccgccgctaccaagaactgatgcagacggacgggtatgttaccgccgccaagctcaaagacgcctatctcggtatcggcgtcaagcaggaaaccttgctgaagctcttcgagcagcacaacgccgagttcgccaagaaggtcgggcacagcagggcgcaggggacattccgacgctatcagacggtttgcagccatattcgggagtttctgccccatacctacaagcgtgaggacattccgctaaaggaactcaacctcacgttcatcaatgacttcgagtatttcctgcgcacggagaagaaatgccgcaccaataccgtgtggggctacatgatcgtgttgaaacacgtcgtttccatagcgaggaacgacgggcgtctgccgttcaatccctttgcagggtacatcaactctcccgaaagcgtcgataggggctaccttacccaaaaggagatacagacgctcatggacgcaccgatgaagaacacctgccatgaactcgtacgggacttgttcgtcttttccgtgttcacgggtttggcgtactcggacgtgaagaacctcaccgccgaccgcctgcaaacattcttcgacggcaacctgtggataatcacccgacggaagaaaaccaataccgaatcgaacatccgtcttttggacgttcccaagcgtatcatcgagaaatacaagggacttgcaagggacggtcatgtttttcccgttccgagcaacggcagttgcaacaagatactcaaagagataggcagacaatgcggcttcaaggttcgtttgacctaccatgttgctcgccacacgaacgccacgaccgtacttttgtcgcacggcgtacccatcgaaacggtgagccgcctgttggggcacacgaacatcaagaccacgcagatatacgccaaaatcaccgcccagaagataagccaagacatggaaaccttgtcgcacaagctggaggagatggagaagaatatctgccgagccatt

SEQ ID NO: 12066 - DNA, 797 bp, Bacteroides fragilis
ctgcctgccattctccgtgtcgtgctgaacaacgggatagagatgccgcagttgggtgtcggcacgtctactctcaaggagactgccgcagagtgtgtgaaacacgccatcggactgggataccgtttggtcgatgcggcgcaaggctacgacaacgaggtcgaagtgtggtacggaatcaaggaaagcggtatcggccggagtgaagtgttcattatttcgaaagtctctcccgatgccgtacgtagcggaaaggtacgcgagtcgctcgaccggactattgaagcattcgggggaacgtatgttgacctgatgctgattcattggtcggtagccagaaaggtcaaggagagatggagaatcatggaaaagtatgtcgatgtggggaagatccgtgccatcggggtgagcaacttcaatccgcatcatgtggacgaattgctggcatacgctcgtatcaagcctgtcgtcaaccagatcaagattcatccctacatggaacatcaggaggtcgtgggcaacacttttgccaaaggtattcaagttcagtgatggccccgttgggacagagtaagatcaatgaaatctacgatgacgaagtattgcagtatatcgtcgaccgctatcacaagacggtacgccaagtggtattgcgctttcagatccagtcgggtatggttgttatcccaaaaacgacacacatcgaacgtatgaaggaaaatctcgaaatgttcgataacgaaatggagatactgcgggcccttgacaaaggacagccccttatcgggaatccccaa

SEQ ID NO: 12067 - DNA, 1164 bp, Bacteroides fragilis
atgaacggctacatctgcgacagctgtgcaacccaggcttatgagatcactcaggaagccatgggagccggcaaacagagcgcgggagctacccgactcaacttaaaggaactacccaaaccggtagaaataaagaatttcctcgaccaatatgtgattggccaggacgatgccaaacgctttcttgccgtatcggtgtataaccactataaacgcctgttgcagaaagacagtggcgatgatgtggaaatcgagaagtcgaacattatcatggtgggcagcaccggaaccggtaaaacacttttggcacgtaccatcgccaagctgctgcatgttccatttacaatagtggatgcaaccgtactgacagaggcagggtatgtaggcgaagatatcgaaagcattctgacccgtctgcttcaagtggccgattacaatgtacccgaagcagagcagggcattgtctttatcgacgagatagacaagattgcccgtaaaggagacaacccttccattacccgcgatgtcagcggtgaaggggtgcagcagggattgctcaaactgcttgaaggttctgtggtcaatgttccgcctcagggaggacgcaagcaccccgaccagaagatgattcccgtaaacacgaaaaacatccttttcatttgtggtggtgcattcgatggtatcgagaagaagatcgcccagcgtctcaacacccatgtcgtaggatacaatgcttcccgcaagacggctactatcgacaaaaacaacatgatgcaatatatcgcaccgcaagatttgaagtcgttcggactgattccggagattatcggccgtctgccggtgctgacttatctgaatccgctcgaccggaacgcgcttcgtgccattctgaccgaacctaagaattccattatcaagcaatacatcaagttgttcgagatggacggcgtcaagctgaccttccagcccgaagtttacgagtatatcgtcgacaaggctgtggaatataagctgggtgcccgtggattgcgctctattgtagagaccataatgatggatgtcatgttcgagattccttctgaagaccagaaagaatatgaagtgacattggattatgcgaagcatcaactcgaaaaagcaaatcttgcgagattgcaaactgct

SEQ ID NO: 12068 - DNA, 2493 bp, Bacteroides fragilis
atgtcatatacaattgaatcaatcgttgaaaaaataggtgcacggcgtctgggaaacaagcctgctgccatcgactggctactgactgacagccgttcgttatgctttccggaagagaccctcttttttgccattcccaccaaaagaaacaacggcgcacgctacatccctgacctttatgaacggggagtgcgcaattttgtagtcacaagcgaagatttcaaagggctcaccatggacagtgagcaactaaaagtgacaatggctcaggaatgcaatttccttattgtccccaatactttaaaagcacttcagaaattggccgaacaacaccgtggttccttccagattccggtagtcggcattacgggcagcaatggaaagaccattgtaaaagaatggcttcaccaattgctcagccccgaccgggttatcgtgcgttcaccgcgcagctacaattcgcaaatcggtgtcccgctgtcagtctggcaaatgaacgaggaatccgaactgggcattttcgaagccggcatttcggaaatgggcgaaatgcgtccgttacagaatatgattaagccgacaataggcatcctgaccaacattggcggagcacatcaggaaaacttcttttcactgcaagagaagtgcatggaaaaactaagcctgtttaaagattgcgacgtagtcatttacaatggcgacaacgaaatgataagtaactgcgtaggaaagtcaatgctgactgcccgtgaaatcgcatggagcatgagggatatcgaacgtccgctctatatcagcagggttgagaagaaagaagatcataccgtcatctcctaccgctatctggagatggacaatacattctgtattccctttatcgatgatgcttccatagagaactcactgaactgcctcgctgcctgcctgtacctgatggtaccggccgaccagatcaccgaacgaatggcccggctcgaacctgtagcgatgcgccttgaagtaaaagacggaaagaacaactgtatcttgatcaatgacagctataattcggaccttgcttcgctggatatcgctctcgactttctttaccggcgttcgcagtcaaaaggcctaaagcgcactttgatcctttcggatatcctggaaaccggacaaagcacgacaacactctaccgcaaagtggcacaactggttcacagccgcggcattgaaaagattatcggtgtaggtgccgaaatatcctcatgcgcatcaaagtttgatatagaaaaatatttcttccccgataccaaggcacttctggcatcagatgtaattaagaaactcagaaatgaaatcatcctgataaaaggctcccgcaacttcggtttcgacctcgtttcggaagaactggaactgaaagtacacgaaaccatcctggaagtaaacctgggagctatggtagccaacctgaatcactaccgctcgatgctcaaaccggaaactaaaatggtgtgcatggtgaaagcgtctgcttatggagcaggttcgtacgaaatagccaaaacccttcaggaacatcacgctgactatctggcagtggccgtagccgatgaaggttccgaccttcgcaaagcagggatcacagcctccattatcatcatggatcccgaactgaccgctttcaaaaccatgttcgactataaactggaaccggaagtatacaatttccatttgctcgacgcattgataaaagccgccgaaaaagaaggtatcaccaacttccccattcacgtaaaactggatacgggtatgcaccgattgggattcgaagagaaagacatcccgcaactgattcgccggttaaagaaccagaatgcactgattccccgctctgtcttttcccatttcgtaggcagtgattctgcccagttcgacgcttttacccggcagcaaatagaacgatatgaaaagatgtcaaaggaactgcaagatgcattcccgcacaaaatactgcgccatatctgcaacacagccggtatagaacgcttccccggtgcacagttcgacatggttcgtcttggcatcggattgtatggaatcagtccgatcgataactcaatcatcaacaacgtgagtaccttgaaaacaacgattctccaaatacgggacgtggcggaagaagatactgtaggttatagccgcaaagggcatctgatacgtccctcacgtatcgctgctatacccatcggatatgccgacggcctgaaccgccatttgggatgcggacatggctattgccttgtcaatggcaaaaaagccccatacgtaggaaatatctgcatggatgtgtgcatgatcgacgtaacggatattgattgtagagaaggtgatcaagctatcatcttcggtgacgaattaccgattaccgtcttatcggatgcgctcgaaaccatcccttatgaagtattgacaggtatttcaacccgggtcaagagagtatattatcaagat

SEQ ID NO: 12069 - DNA, 2298 bp, Bacteroides fragilis
atgaacaagaaatattctttactcattctgcttgcacttttactcccgttgggactgcaagcgcaaaaacctcctcaggatatggaccgtttcctcgacaatctgctgaaacggatgaccctggaagagaaaataggtcagcttaacctaccggtaactggtgaaatcaccaccggacaagctaaaagcagcgacatcgccaccaagataaagcgaggtgaagtaggcggattgttcaacctgaaaggggtggataaaattcgtgacgtacagcgtctggccgtagagaactcccggctgggtatccctctgctctttgggatggacgtaattcacggatacgagaccattttccctattcccttgggactttcgtgtacatgggacattccggctatcgaagaatcggcacgcatcgccgccgttgaagccagtgccgacggcatctcgtggactttcagtccgatggtagatatcagtcgcgatccacgctggggacgggtatccgaaggttcgggcgaagatcccttcctcggtgcactgatagcccgggccatggtacgtggataccagggaaaagatatgagtcgcaatgatgaaatcatggcctgcatcaagcactttgctctgtatggggcagccgaggcaggacgggattataacaccgtagacatgagccgccaacggatgttcaacgattatatgctcccctatcaggccggtgtagaagccggagcaggtagtgtaatggcttctttcaacgaagtggaaggtgtgccggcaacagccaataaatggctgatgaccgatgtgttgcgcggtgcatggggatttaatggtttcgtggtaacagacttcaccggaatctccgaaatgatagaacacggaatcggcgacctgcaaaccgtgtcggcacgggccatcaatgccggagtagatatggacatggtcagtgaaggcttcatcggtacattgaagaaatctgtcgaagaaggcaaagtatcggtcgaaacagtcaacacagcttgtcgccgcatcctggaagccaaatacaaactggggttgtttgacaatccctataaatactgcgacccgaaacgtccggcacgtgacatcttcacaaaagagcaccgtgccgcagcccggagaattgcgggagaaagcttcgtgctactgaaaaatgaaggactttcacctaccctcgcacctgtacttcctctctctcctaccggtactattgcagtgatcggccctttggccaacacccgttcgaatatgccgggcacatggagcgtagctgccgtactggacaaaagtccttctctggtagaaggtttgaccgaatgggtgggcaatcagggaaaaatactttatgccaaaggcagtaacctgatcggtgatgctgcttacgaagagagggcaaccatgttcggccgttcgctgaaccgcgacaaccgcaccgatcaacaactgctggacgaagcgctgaaaatagcttcacaagcggacgtgattgttgccgcattgggtgaatcgtcggagatgagcggtgaaagcagtagccgcaccaacctcaatctgccggatgtacagcacactctgctggaggctttgctgaaaacaggaaagcccgtagttctcgtactgtttacgggacgtccgctggtactcaattgggaacaggagcatgtccctgccatcctgaacgtatggttcgggggttcggaagccggtccggctatcggagacgtattgttcggtgcagtcaacccgggcggaaaactgaccatgactttcccgaaaagtgtaggacagatcccactttattatgcacataagaataccggacgaccgctgaaagaaggcaaatggttcgagaaattccgcagtaactatcttgacgtggacaatgatgctctctatccgttcggatacggactgtcgtatacgaccttccgattcagtgacatcacattgaaccgttcgtccatcggaatggacaatgaactggtagcctccgtcaccgtaactaataccggagaccgtgccggcagtgaagtggtgcaactctacatccgtgacttggtgggcagtgtcacccgtccggtcaaggaactgaaaggatttgaaaagatctatctgcaaccgaatgaatcaagaaccgtccgctttacaatagctccggaaatgttgaagttttacaatgccgacttgaagtttgtagctgagccgggcgatttcgacgtgatgataggcccggatagccggaatgtgaaaacagcacggtttacattgcgt

SEQ ID NO: 12070 - DNA, 1848 bp, Bacteroides fragilis
gtgggaaagtctttcaatatagcgcttatagtaatagcagtaaccttatactctgtcactacatatgctgccgataacaaagcaacaaggcacgtgtcagcgctgctggacctgatcgacaacagcctcaactatagtaaagaagctcccaacgacagtattatccaatggggcaacgaattggctcctctcctgaaaaagcagaaagaatataaaactctatttcagttgaaacaactgattgtgacagcttatgcctcacgaggagacatgaatatggccatcgaccatgcccgccggatgtataaggaagccaaagaattgaattcccccatcggtatagctctttccagtcgtgcctttggggatgcctacttgaatgccaatatgcaggaacccgccatcgaatcttataaagaagctctggagttgcttgacaaaataccgggtagcgaaatcctcgaacaagagattcttccgaaattcatcctgaccctgattcagacctcgcacatggacgaggtacgcatctatctgcaaaagtttgaaaacctgtatgccgataaccctaatcctacattccactttttcatatgtgcgtgcaatgcctactataacatcgagtccggtgatcccgaaaagggaaaagccgaactggacaaagccaggaaaatccacgaacaactgaattatctctacctgcgtagtatctacaactatatattggcccagtactatcaagctgtcgggaagtatgaactggccctgcaacaatacgaacgcctgacaaaggtccctaaagcacctgcccccaacaaacacatcggtttgcagcttgagtgtgcccaactgctgactcaaatgggacgaacggaagaagcctatcgtatctatcaaaaggccaaccggcaaaaagactctttgaacgctctgagctatgcccggcaaatcaatgacctacggggaatgtaccagatagaccggatggaaatccggaaccagattcaacgaaaccaaatcatcttgtggatcatcatagcttccatctttatattgatgcttgttttgctgttgattgtccgcatccggcaggagtccaaccggcttctccgctccaaagaagaattggaaatagcccgtaagtatgccgagaactcaatacgtaccaaaagtctgttcctgtcgaacatgagtcacgaaatacggacaccactgaatgcactttccggattctcatccatcctgaccgacgaatccatcgacaatgacacacggtatcaatgcaatgacatcatccagcaaaactccgaactgctgctaaagctgatcaatgatgtaatagacctgtcaaatctcgatcccggcaagctgactttcaattttaaagaatgtgacgccgtcaatatatgccgtaacgtaatcaacaccgtagagaaggtgaagcagacacaagccggagtcagttttgtcacttcactggataaactgactttgcgtacagacgaggcacgcctgcaacaggtattgatcaacctgctgatcaatgccaccaagttcactaccgaaggaagcatcaccctgacattagaaaaagaatcagaaaccatagctctgttcactatgacagataccggatgtggtatcctccgtgaaaaacaggaccagatattcaatcgttttgagaaactgaacgaaggtgcacagggaacaggtctgggactctcgatctgtcaacttatcatcgagcaaatcggagggagaatatggattgacccggactacaccgaaggtgcgcgattccggtttacacaccccgtccggcccgcaaaggaaaaggaggcagaaaga

SEQ ID NO: 12071 - DNA, 1323 bp, Bacteroides fragilis
atgaatatagcaataagtggggcctccggttttataggcaagcatcttacagagtaccttacagaagcgggacaccgggtaatccctctggggaggcctatgttccgtgaaggcacatcggggcatttaattcaggctctgtcacattgcgatgttatcatcaatctggcaggagcacccattggcaagcggtggacaccggaatacaaaaaagaactttatgacagccggattaaggtgacgcactgcatcatcctggcaatggatgcagtaaagacgaagccgcggttaatgatttccgcctctgccgtaggatattatccagaggagggtacattcgatgaatataccaatacccggggaagtggctttctggcggaactttgttatgcatgggagaaagaggcccgccgttgtccgtcgcagacaaggctggtaatcacccgcttcggcattgtgctgtcacccgatggcggggcgatggaacaaatgcttcgtcccctccggataacgcgggtagccggtgtgatcggtccgggtacacagcctttcccctggattgctattcaggatctttgtcgggcgatggagtttattatcagccacgaagaggcaagcggagttttcaacctggtggctccgcaacaagtttcacagtatgcatttactcaggcaatggcagcacgctatcatgtctggatgaaggtggtcgtaccgcgttggttcttccggatgcggtatggtgaggcggcttccttcctggcatcaggacagaatgtgcgtcccacacgtttgctcgaggccggcttccgctttgtgaagccgacgatagaagatttcttcgaaggtacggatcatacagctgtagatcgattggatttgcaccgctacatgggtacgtggtatgagatagcccgtttcgaccaccgctttgagagaggattatcggaggtgacggccacttatacgttgatgcccgacgggacggtccgtgtggagaaccggggatgtaagcataagaaaccctatgatgtttgtaagacagcggaaggacgtgctaagatacccgatccgtctcaaccgggtaaactgaaagtatcgtttttcctgtctttttattcagactattatgtattggagttagatcaggacgaatacaattatgctctgatcggtagcagttctgataaatatttatggatactgagccgtgtaccaattttgccggaagagattaagaagaagttgctggatgctgccactcgcaggggatatgatgtgaagaaactgatctgggtggagcaaagagagaaaaaaataatg

SEQ ID NO: 12072 - DNA, 2307 bp, Bacteroides fragilis
atgaacaatgctaaattattacatttaatggtttacatcttaaccattattttagggcagtcttgtacagaagtggatattacgatgcccaaaggaccgaaaggtgatagaggaatgtcagcttatgaattttggaaagagaatgtagagaatggagtgatttcttggcctaagaaagagactgaaataactgatttttttaagtatttaaaaggtaaggacggtctggatggaaaaagtgcttttgaactgtggaaggaagaagtagctactggtgctctggataatcctcaccgcccgggaagtatgtggcctgtatcccagaataatcttagagatttttggtattatctgacaggagcgagtggcgagaatgggcaaacacctcatattggaaataatatgaattggtggattggcaataaggataccggaatacgtgctcagggtagggatggacagaatggagaagatgctgttccaccggtagttacgatcggggataatggtaattggttgattgatggagtagatacaggaaaaccttccagaggtgaagaaggagttgcaggaacaacacctactgttacaattggagaaaatggaaattgggtaatcaatggaaaagataccggaaaggctgcgataggtaaagatggaagatcgccagaggtaataatcggtaccaatgggaactggtatattaatgggaaagataccggtattcgtgcatatggtaaagatggcattaacggtaaagatggtgccaatggtaaggatggcattaacggtaaagatggtgccaacggaaaagatggtattaacggtaaggacggggctgctggaaaagacggcgctaacggtaaagatggtgctaatgggaaaagtgcctatgaattgtgggtagagagtgttgaggcgggttgtaacaatactggccctaaagtgaaaaatcctcataatccgtctttggattgggattgtggtaaaacaactttaagtgatttttgggagtttttgagaggtgcggatggtaaagatggtgcggacggtaaggatggaaaacccggtgttccgggaaaaccgggtgctgaagttactattatcaaaggagtacctaacgtgattgcactttattcacaacaagaatttggagagtatgttcgtacaaccgatggaggagtagcttatcgtgtgtatgacgaatctggcaataaggctccgaaggctgtggttaagggaattcccggtttggatccggctaaaacttatacagctaatgaagagggagaatttattattccgaaagaagatcttcctcaaattgacgatatagatgcccgatgggggaaagttaaggaggtaactattaataaggtgacaaaggaatctgcagaaaacacttatgtccctaacagaatgcagattagaatgatttatattggtacctctccatatcttgattatgaacataacctgcagtttagagtagagagaaagacagatcctggtgcggaatggaaaacattgcccagctatttgcctaatgtcaatgccggatttacggcatatcaggttacaaatccggaagacccgacatctcttgataaaacgaaaaaaatagaaagtactacacctaatatgagtagtacatcaatgtctattaatcctaatagatatgttaaagagaaccctgccggtataaaaaatggaataactgacttttgggatggaaaagacaactatttctcgatagtaaaagataccccttattatggagaaacgatttattggaatggagtatgtaagatggcaccttatcagatacctcctacacttaaaactctagccttaacaaaggcatctgctgaaagtggagatgatgtattcttgaataaagcccagggggaatttgacttttcgactattgatttcaatatcatatgtaaacgtgaattggtaaaaacagtaaaaccgaacggcatagattacattgaacctgaattttatgctccggaagaggcgaaggaacttctactctgttatgttaagtttacttatacctctccattgggggtacaaacagccacaagcgaacttaataagtcgagttacaagaaacctgagtatgctgcccttagcccgtacttgggagctacaatctattcggtaggagcgagtagcgcttttatctactctaacaatgtgtctttaggagttctcaagaagaaagcagataacggtacgtattatgttgagaatacatataaagatatgcctgaaattagtgtaacctataaagaaaaa

SEQ ID NO: 12073 - DNA, 711 bp, Bacteroides fragilis
atgacaaagaggctgacgaaaattggtgtaaaccctgattttcaggaattatcttcgtttgtacatgagctccctactgtattcgaaacagggggtaaagtgatttacaaaggacgtaacgagcttaaagagtttgatgtagagggtaagaagctgattgtaaagtcctaccaattacctcatctgttgaatcgtattatctataatttttttcgtgcctcaaaggccaaacgttcgtattcctatgctttgatgctccgtaaattgggtatcggatcaccggcgcctgtgggatattattctacaggttcatggcttttgttcggtagaagttattttgtgtgtttgaagtcagattgtccttatacatatcgtgactttgaaaaaacggtgtttccgaatcaggagcagatcttacgtgccatagcccggactacagccatgttgcatgagaatggactgttgcacaaggattactctgccggtaacattctttttcgaacaattgatgaaaaagtagaagtggagatcatcgatttaaaccgtatgcgttttggaaatgtgggtatagaagcgggatgtaaaaattttgagcgtcttcccggtactcatgagatgtttgccatattagccgaagagtacgccaaagcccgtggctttgacgtacaaacttgtttggaacttattgagcaagctcatagtctttcagat

SEQ ID NO: 12074 - DNA, 1590 bp, Bacteroides fragilis
atgaaattcgttaccttatcattgttagccactgcgttgactgttggcggaaatgccgccgagcaggcacgttcctccaagcagcccaatatcttatttattctggctgatgactttggctggagagatctggcatgtacgggcagccgttattatgaatcgcccaatatcgatggaatcgcccgtaatggcgtgaggtttacccaaggatatgcagcctgtcaggtgtccagtccttcccgtgccagcattatgacaggcaagtttaccgcccgccacggaataaccaattggattggtgaaggaagtggagaagagtggcgcaagatgggaagacattccaagcttcttccggcccaatacgtatggcaattgcccaaagaagatattactctgcccgaagcattgaaagcccacggttataaaacgtttatggccggcaaatggcatttgggaggtgagggttcttatcccgaagatcatggtttcgatatcaatataggcgggcatgaagcgggaggtccttatcccggcggctattttgctccctatggcaatccgaaaatgaaagaaggaccggatggtgagaatttatccatgcgtctggcacacgagacagcgtcgtttatcgaaacccatacccgccggaataaaaagcagcctttctttgcttttctctctttctatgccgtgcatgcgccgattgagaccactgaagccaagtggaggcatttccggaataaagcggattcgatggggatcgctccggtggggttcgaagtagatcgtacattgcctgtacgtttgcagcaggataatcccatatatgccggactgatacagcagatggacgatgccgtgggagtggtgcttgccaaactgcatgagttgggtttggatgaaaatacgattatcgtgttcaccagtgataatggcggagtgtcttcgggcgatgcatacgctacctctaactaccctcttcgcggcggaaaagggcggcagtgggaaggtggaatacgcgtaccgttatttattgattttccgggtaatactttaaagggagattcgtgcgtggtgcctgtcaccggtgccgatttgtatcctacttttctcgatatggcaggcatcccattaatgcccggccaacatcaggacggtgtaagcctgcttcctctgttacagggcaagagcatccccgagcgtgctttatactggcattatcctcattatggcaatcagggtggcgaaccttcttccatcatacggcaaggcgactggaagctgattcattattacgaagatggcagggatgaactttataatctgcggatagacgaaaccgagtcggaaccgctgaatgtgcaatatcccgaaaaggtggagttcttgagtaagaagctgtctgtatggctgactgaggtaggggccagatatcctgaacccgatcctcaatacaatccggcagcggaggctctctataagaaaaagactcgcgaaagaatgatgaaaaccttggaagctacccgcaagaagcagttaggcaaagatttcaagcctaatgcagactggtgggggagcgaaacgaaagat

SEQ ID NO: 12075 - DNA, 594 bp, Bacteroides fragilis
atgaaatcgcaataccggatcaatgaacagatccgtgcgaaagaagtccgcattgtaggtgatgatgtagaacctaaagtatatcccatttttcaggctttaaaattggctgaagaaaaagaactggatctcgtggagatttctcccaatgcccaaccacctgtttgtcgtattattgactactctaagtttctgtatcagttaaagaagcgtcaaaaagaacaaaaggctaagcaggtaaaagtaaacgtaaaagagatacgttttggtccgcaaacagatgaccatgactataactttaagttgaaacatgccaaaggatttttggaagatggtgacaaggtgaaagcttatgttttctttaaaggtcgttccattctttttaaagaacagggtgaggtgcttttgttacgctttgccaatgatctggaagattatgcaaaagtagaccagttgccggtgttggaaggcaaacgtatgaccattcaactttctccgaaaaagaaagaaagtgcaacgaaaaagcctgcaactcccaaaccagctactccggctgcagtaaaagctgaaaaaccggctggagataatgaagag

SEQ ID NO: 12076 - DNA, 1416 bp, Bacteroides fragilis
atgataaataactatttagagcggcaaattaaggaaaatttttcttatcagccaacttttgagcaagaaatagctgtaaaatctctttcggagtttctactttctacggctaatgatacggtttttgtgcttcgtggatatgcgggaacaggaaagacttctcttgtcggggccttagtgaaagcgatggataagttacaacagaaatcggttttactggctcctacgggaagagcggctaaagtattttctgcttacgcaggacacccggcttttaccattcataaaaagatatacaggcagcagtctttttcgaatgaagtaagtaatttttcaattaatgataatctgactactcatacattatatattgtagatgaggcttccatgatttcgaatgaaggtttgtccggttcgatgttcggtaccggacgtctgttggatgatttggtggagtttgtctattccggtgtagggtgtcgtttattgttgatgggagatacggctcagttgcctccggtaggagaagagcaaagtccggcacttgctaccgaggcattgaaaggatatggactgaatgtcatagaggttgatctcacacaggtggtacgtcaggttcagtcgtccggtattttatggaatgccactcagattcggcagttgattgctgaagacgagtgtttttcgctgcctaagataaaagtaagcggatttccggatatacaggtggtacgtggcgacgagttgatcgataccctgaccggctgctacgaaaaagacggaatggacgagacgattgtggtatgccgttccaataaacgggctaatatatataataaaggtatacgtgctcagattctttacagggaagatgaactgaatacgggtgacttactcatggtagcgaagaataattacttctggacagagaagtataaagaaatggattttatagcgaacggagagattgctgtggttcgtcgggtgaggcgtactcgtgaactgtatggtttcaggtttgctgaagtacttcttgcgtttcccgatcaaaatgactttgagttggaagctaatttgttgcttgatacgcttcattcggatgcacctgctttacccaaaacagaaaacgaccggcttttttattctgtacttgaagactatgtggacatcaccgtcaagcgggagcgaatgaaaaaaatgaaagctgacccacactacaatgctctacaggtgaagtacgcttatgcggtgacctgtcataaggcgcagggcgggcaatggcaaaatgtttttcttgaccaggggtatatgtcggatgagtatctgacacctgattatttccgttggctgtatacagcttttacgcgtgcatcgaaaactctctatctggtgaattatccggaagagcaaatagag

SEQ ID NO: 12077 - DNA, 1875 bp, Bacteroides fragilis
atgagcgatatcattcatttattacccgattcggttgccaaccagatagctgccggagaggtgatacaacgtccggcatctgtcatcaaagagttagtcgaaaatgccattgatgctgaggcgcagaatattcatgtgttggtcaccgatgcaggtaaaacctgtatacaggtgattgatgacggtaagggaatgtccgaaaccgatgcacgcctctctttcgagcggcatgccacttcaaagatccgtgaagcatccgatctgtttgcccttcgcacgatggggtttcgcggtgaagcattggcttccattgccgccgttgctcaggtcgagctgaaaacacgtcccgaatccgaagagctgggaaccaagattatcattgcgggttccaaagtggagagtcaggaagcggtgtcttgtcccaaaggaagcaatttttctattaagaatctctttttcaatattcctgcccggcgtaagtttctgaaggctaactccaccgagctcagtaatattctggccgaatttgaacgtattgccctggtacatcctgaggttgctttttcactgtatagcaatgactccgaactgttcaatcttcccgcttgccatttgcggcaacgcattctttctgtttttggcaagaaacttaaccaacaactgctaagtgtagaagtcaacactacaatggtgaaagtttcgggttatgtagccaaacccgaaacagcccgtaagaaaggcgcccatcagtatttctttgtgaacgggcgctatatgcgtcatccttatttccataaggcagtgatggatgcttacgaacagttgattcccgcaggcgaacagatttcttatttcatttactttgaagtcgatcctgccaacatcgatgtgaatatccatcctaccaaaacagagatcaaatttgaaaacgagcaggctatctggcagattctttctgcttcgatcaaggagtcattgggcaagttcaatgctgtcccttctatcgatttcgacacggaggacatgcccgatattcctgcttttgaacagaatctgcctcctgcgccgcctaaggtacatttcaattccgatttcaacccgttcaagccctcctcttcttccggtggaggcaactactcccgtccgaaagtggactgggaagatttgtatggcggtcttgagaaagccagtaagatgaatcagcctttctccgactccgatcctgaatcggaagagtttgcggtgatcgaagaagagagcattgctacagcggctcccgaaactctttatgccggtgagccggccgtgattgaaaaaggtacgcagcatttgcagttcaaaggacgcttcatccttacgtccgtgaagtccggattgatgttgatcgatcagcatcgcgcacatatccgtgtgctctttgaccgttatcgtgcccagattcagcagaagcagggattctcacaaggtgttcttttcccggaaatcctgcaacttccggcttccgaggcggctgtgttgcaaagtatcatggacgatttatccgcagtgggctttgatctcagtgatcttggtggcggcagctatgccattaacggagtaccttcaggcatcgacgggctgaatccggtcgatttggtacgtagcatgctgcacaccgctatggagaaaggcaatgatgtcaaagaagaaattcaggatatccttgcgttgactcttgcccgtgcggctgccattgtctatgggcaggtgctgagcaacgaagagatggtcagtttggtcgataatctgtttgcctgtccttcacccaactatacgccggacggacgcgtggtgctgactaccataaaagaagaagagatcgataagcttttccgg

SEQ ID NO: 12078 - DNA, 1623 bp, Bacteroides fragilis
atgagcgagggcttacagaaagtcgcaggtgacagattgcgaggaattctgacagcaatgactacaaaccgggtaacgggagttttaacaggtgtgttgatcaccgcccttatccaatcttcttcggcaacgacggtgatggtggtcagttttgtaaatgccggtctgctgacattggccgaatccattagtgtgataatgggtgctaatatcggtacgacagtcaccgcatggatcatttctatttttgggtttaaagtcgacatggctgcttttgcccttcctcttttagccattgcccttcctcttattttttcgggtaaaagtaaccgtaagtctatcggtgaatttatctttggtttttctttcctctttatggggctttcgtacctcaaagcaaatgcccccgacctgaatgccaacccggaaatgctggcttttgtacagaactatacagatatgggatttttctcggttctgctctttttatttatcggtactattctcactatgatcgtacaggcttccgccgcgacgatggctattactttaattatgtgtgccaacggatggatcagcctggaactgggtgccgcattggtcttgggtgagaatatcggaactactattacagccaacctggctgccctgactgctaattcacaagcaaaacgtgctgctttggctcactttgttttcaatgtttttggtgtgatctgggtgctgattattttccatccttttatggtattcgtcaattgggtggtcgataccttcttccatccgggaagtgcagaggtggctatttcttataagttgtccgctttccactctatttttaatatatgtaacgtctgtctgctgatctggggagtgaaactgattgagcgtaccgtgtgtgccattattcgtcccaaggaagaagatgaagagccacgcttgcgctttattaccggaggtatgctttctacggccgaattatccatacttcaggcccgtaaggagattcatctgttttccgagcgtattcatcgtatgtttggtatggtacaagatctgttgcatactgaaaaggatgatgacttcaataaacttttcagccggattgagaaatacgagaatatcagtgataatatggaattggagattgccaattacttgaatcaggtatctgaagggcgtttgagctcggaaagtaagcttcagatacgtgccatgcttcgtgaggtaaccgagattgaaagtattggtgacagttgctataacctggcacgtaccatcagccggaagcgtcagaccaatcaggatttcacagagaagcaatatgagcacattcatttcatgatgaaactgaccaatgatgctctgtcgcaaatgattgtcgtggtcgagaaacccgaacatcagagtatcgatgttaataagtcattcaatattgagaatgaaattaataactatcgtaaccaactgaagaatcagaatatcctggatgtgaataataaagaatatgattatcagatgggcgtttattacatggatattatcgccgaatgtgaaaaactcggtgactatgtagtaaatgtagtagaagcgagcagtgacgtaaaagaaaagaaagcgtct

SEQ ID NO: 12079 - DNA, 576 bp, Bacteroides fragilis
atggttgtagtggctgtgctcatagtggttggcacacttaaaggactggatatatacacacgccatggcgaagctgtaatagtgcccgacgtaaaaggaatgtctgtaagcgaagcggaaaagatgttccggaatcatggactgacttgtgtggtgtccgactccagttacgtaaaaaataaaccttccggcattatcctggatcttaacccgtcggtcgggcagaaagtgaaagaaggacgaacaatctatctgacaataaataccctcagtactcctttgagtgtggtgcctgatgtggccgataacagttccgtgcgtcaggcgcaggcaaagttgatcgccgcaggctttaaacttaccgaaaaccggatggtgagcggagagaaggactgggtatatggcgtgatctatcagggacgccaattgcagattggagataaagctcccatcggcgctacgctgactctgatggtaggtgacggagtgcagtctaccgcaaccgattctgtcgatatggtggaaaatgctgctatgtctgttgaggattccggaacagatgatgattcctggttt

SEQ ID NO: 12080 - DNA, 942 bp, Bacteroides fragilis
atgaaaaaagaacttttgactcgatttatggagaagcgaatagtcgaactgaaaaaagaacaacgcaatggtactgcccatgtatatcagagtactttgaatcgactgaaaaattttatgaatggacgtgaaatcacctttagccaactgactccggaatggctggctttgtttgagcagaaactattggctgaccagcttaagtggaataccatttctacttacatgcgtatgttgagatctgtatataatcaggctttggaacggggcgtggcaacttacgtgccacgtcttttcaataaagtacataccggtattgattgcccggtgaaaagagctgtttcgccggaagttatatgcagactgatgacagaccgaaaaccgttgcctggaaaattggctttcagccgtgatctgtttgtgcttttgttcctgcttcgagggatgccgtttgtggatcttgctttcttgcgcaggtgtgatttgcagggaaatgtgatcacgtatcaccggcgcaagaccagtcgtaaactgactgtggtggtgggtaaggaagccatggaaattatacagaaatatatgtatgcaattccggactcaccttatcttttccctattatacagaatcccggtaaagatgaatatggacaatatgcccgaatgttacgccttcagaactatcggttgacacaagtggcaaacatattgggaatcagagaccgactcagtacttataccgcccgtcatacctgggcgacaacggccctccggcagaattataattcaagcttgatttgtgatgctatgggacattcttcggttaaagtaaccgaaacctattttcaaccctacagagacgatgaggtaaaccggatgaatagttctcttattacatatattttatcgaagaagaaaagggggacagataaaaaaataagaagc

SEQ ID NO: 12081 - DNA, 996 bp, Bacteroides fragilis
atgaataatctgagcgaagacatattgatgagatatctgacaggcgaatgttctgacgaagattttgccagagtgaacgcttggatcaaagaatcagacgataatgcccgccgacttttccgaatggaagaggtatatcatttgggcagacacgacagctttccggatcagaaaaaagttgcccgggcagaagcacgactatacaagaaactggctcaggaagatgcacatagccgcaaagtgatcagaatgcaccaatggatacgatatgccgctatcatcgtgctcgtactgatgataggcaccggaggcggatacctgtactatcaggccgatccgacccggaatatgataacggcctcgtccacggatggcaaagtgaaagaagtgatgttgcccgatggcacaaaagtatggctcaatcaatcggccaccctgagatatcccaagaaattctcagaatccgaaagagatgtatatctcgatggagaagcttatttcgaagtcactaaaaaccgtcggtgtcctttcgttgtagaaagtgaggctatgcgtatcaaagtgttgggaaccactttcaatttcaagtgcgacaagagtcacaaactggcagaagcaaccttgatcgaaggagaaatagaagtgagaggaaaccacgatgaaggaatgattattctttcgcccggacaaaaggccgaactgaataaaacaacccgcagactggtggtgaagcaagtagatgccaaattggatgccgtatggcacaatgacctgatcccgtttgaacaggcggacatttttgtcatcacccggacattagaacgcttttatgatgtgaaaatcattctttcacccgacattaagtccgacaaaacttactcgggtgtattgaagaaaaaagataatatagagtctgtactccaatcgttggacaactctatacctatcaattataagattgtgggagacaatatctttatttcttcacgtaacaag

SEQ ID NO: 12082 - DNA, 858 bp, Bacteroides fragilis
atggattcaacgattttcaaaagcctgaatgtgaacggtcgtttacttgatctttccattccgcaggttatgggtatactcaatgttacacccgattctttttatgcaggtagccgaagccggacagaagccgatattgctgcacgtgcccgtcagatacttgatgaaggggcctctatgattgatataggagcttattcgtcacgtccgaatgccggacacatctcgcccgaagaagaaatgcggcgtttgcgtaccggtctggaaatattgaaccggaatcatccgagtgctatcatttcagttgacacattccgtgccggagtggctgaggaatgtgtgaaggagtacggagtagctattatcaatgacatttcggcgggtgagatggacgaacagatgtttccgacggtggctcgcctgaatgtaccttacattatgatgcacatgcaaggtactcctcaaaacatgcaaaaggagccccattatgaaaatttgctgaaagaggtcttcatctattttgcccgaaaagtacagcaattgcgtgacttgggagtgaaagacattattctcgatcccggtttcggcttcggcaaaacgttggagcataactacgaactgatggcgcatctggaagagttcggcattttcgaacttcccttgttggtgggagtttcccgcaagtcgatgatttatcgtttgtttggaaccacaccgcaggaagcactcaacgggacaacagtactcgatacggtagctttgatgaaaggtgccgatattctccgtgtacatgatgtgcgtgaagctgtcgagtcggttcggctgatagagaaattaaaaagtgtatcggcttgttcc

SEQ ID NO: 12083 - DNA, 1347 bp, Bacteroides fragilis
atgagatatgatatagctattatcggtggtggacctgccgggtatactgctgccgagagagcaggagctaacggtttgcgtgctgttttgtttgagaaaaaagcaatgggcggtgtgtgtcttaatgaaggatgtattcctaccaaagccctgctttattccgctaaggtgctggacggtattaagagtgcgccgaaatacggtgtctcggtagagggggctcctgcatttgatatggaaaaaatcatcggccggaaaaacaaaacggtgcagaagttgacgggcggagtgagaatgacggtaaactcttacggagtgactattgtagataaggaagcggtgatagagggcgaaggtgaagaaggattccatatccgctgtgatggagaggtatacgaggcaacctatctgttggtttgtaccggatcggataccgtgatccctccgataaaggggctttcggacgtggattactggacttcacgagaggcgctggatagcactgttcttccatcatcgctcgccattattggaggcggagtgatcggaatggagtttgcttcattctttaacagcatgggcgttagggtgaaagtgatcgagatgatgccggagattcttggagcaatggataaagaaaccagtgcgatgttgcgtgctgactatacaaagaaaggggttaatttctatctgaacacgaaagtaaccgaggtgagtgataaaggagtaacagtggaaaaggatggaaagagttcgtttatcgatgccgaccggattttagtgagcgtaggccgtaaagcgaatatcacccaagtaggattggataaactgaatattgagttgcaccggaatggggtcgttgtagatgaacacatgttgacctctcatccacgtgtatatgcttgcggtgatattaccggcttttctttattggcacatacggctattcgtgaagcagaagttgccattaatcatattttgggaatagatgaccggatggattatgattgtgttccgggcgtagtctataccaatcccgaactggccggtgtgggtaaaacggaggaggagctgatagctaagggtatttattaccggatacaaaaactaccgatggtttattcggggcgttttgttgccgaaaacgagttggggaacggactgtgtaaactgattatcgatcataatgatcggattgtcggctgccacatgttgggcaatccggcttcggaaattattgttgtggcaggcattgctatccagagaggatatacggtcgatgaattcagaaagagtgttttcccgcacccgacagtcggtgaaatttatcacgagacactgtttgcc

SEQ ID NO: 12084 - DNA, 1497 bp, Bacteroides fragilis
atggaagaatacctgtcgacggacatatacgttagtaaacggaataacagtctgataaacggcaaaatgatagggcgcgtacttggggtcttactctttatagaggcgggaatgtttgtactctgctccggcatatccgtggtttatggtgaaagcgattacaagtatttcctttatacggcgggtatcaacctcctgtccggtgcgttactgatgttttatggacgtggtgcggaaaatcggttgagccggcgtgacggttactgcattgtgacactttcgtgggtgtttttcacacttttcggtatgttgcctttttatttgagcggaagtattgactcgttgactaatgctttcttcgagaccatgtcgggatttactactacgggagctacgattcttgatgatatcgaatcgctttcgcatggtatgcttttctggcgcagcctgacacaatggattggcgggctggggattgtttttttcacaattgccgtattgcccgttttcaccagtgggggagtacagcttttttccgccgagtctacgggagtaacccacgaccgtacccatcctaagattaatgtgatggccaaatggctatggacagtctacctgatattgacactggcagaaaccattttgctgatgctgggaggtatgagcctttttgatgctgtctgccagtcatttgctacgacggccaccggtggatattctaccaagcaggccagtatttcgtattggaattcaccgtttatcgaatatgtggtcgctatattcatgcttctttcgggagtcaattttgcattattcctgatgtgccttcgcggtaaagtcagtcgtcttttgagggacgaagaattacgttggttcctcggttctgtcgctatcctgacttttctgatcactttcgcactggtctttcaaaatcattatgactgggagacggctttccgtaagtcgctgtttcaggtggctacggcacatacttcttgcggatttgccacagacgactataatctttggcctgcctttacgtggttgttgttgctgattgccatgctctcgggaggatgtaccggttctaccagcggtggtatcaagaacatgcgtttgctgattattgcccgctctatccggaatgaattcaagcatttattgcatcccaatgccgtattgccggtaagagtcaacaagcagagcgtttcaccttcgattgtgtctactgtgggtatgttttttgctttttatcttatcatcgtcattcttggttgggcagttctcctgttcttgggtgtcggcttttccgagtccatcggtacggtgatctccagtatcggtaatgtgggaccgggattgggatcttgtggcccagcctattcgtggaatggattacccgacgctgccaagtgggtactttcatttctgatgctgataggacggttggagctctttagtgtacttttgcttttctatcccggattctggaaaagt

SEQ ID NO: 12085 - DNA, 2001 bp, Bacteroides fragilis
atgatagatcaggcaaccatagaccgtatactcgatgccgcacaaatcgtagaagtggtttcggacttcgtcacgctgcgcaaacgcggtgtgaactacgtgggactttgccctttccataacgagaaaactccctcgttcagcgtgtctccctccaagggactttgcaagtgtttcagttgcggcaagggcggcaacgcggtgcacttcatcatggaacacgaacagatgtcctatcccgaggcactccgctacctggccaagaagtataacatagaaatcaaggaacgggagctgaccaatgaagagaaagaggtgcaaagcaaccgcgaaagtatgttcattgtcaacaacttcgcccgcgactactttcagaatatcctgaaaaaccatgtagacggacgcagcatcggactggcttatttccgccaacggggtttccgtgacgatattattgataagttccagttgggtttcagcaccgaggggcgcgatgcactggcacaggaggcattgcgcaaagggttcaaacaagagttcctggtaaagaccggactctgttatgaaacggacgaccataagttgcgcgaccgcttttggggacgtgtcatgtttcccgttcacacgctttcgggcaaagtggttgccttcggcggacgtgtgctcagcacggagaacaagaaacttgccaagtacgtcaactctcccgaatcggagatctatcataaaagcaacgaactatacggcatctactttgccaagcaggccatcgtaaagcaggaccgctgcttccttgtggaaggatatacggacgttatatcgatgcaccagtcgggagtagagaatgtggtggcctcgtccggtacttctcttacgccggggcagatccggttgatccaccgtttcaccaacaacatcacggtgctttatgacggtgatatggcgggcatcaaagcttctatccgggggatcgacatgctgctcgaagagggaatgaatatcaaagtatgcctcttacccgacggagacgacccggactcttttgcatggaagcacaacgctacggagtttcagaacttcatacaggaacacgagacggactttatacgcttcaaggcacaactgctgatggaggatgccggcaaggacccgatgaaacgtgccgagctgatcaatgacatcgtgcgcagcattgcggtgattcccgaagccatcgtccgggatgtgtacatcaaggagtgcgggcagttgttgcggatagaagataagttactggtatccgaagtggccaagcgcagggaacttcaggccgagaaggggaataaacccatagcctccaataatgccccgacgccgcaaccgggcgaaatgcctcctcctttccctcccgaagaaatggaggcagacacctaccaatcgttcatcccgcaggaaggtaaagagggacaagagttttataaatacgagcgcctgattattcagatgattgtgcgctatggagagaaggtgatgtgtaacttaacggatgaagaaggcaacgaagtcccggtcaccgttgtcgagtatgtcatcaatgacctgaaggaggacgaactggctttccataatcccctccaccgccgtatcctctcggaggcctccgaacatatccacgatcaggagttcgcttccgaacgcttcttcgtggcgcaccccgatccgaaaatcagtacgatagccaccgaactggcgagtgaccggtatcaactgagcaagtatcactccaaaacacagaagttggtgacggatgaggaacggctgtacgagatggtcccgatgctgatgattaacttcaagaacgccattgtcgcagaagagctgaagcacatcatgtatgccctgcaagatccttcgattgcgaatgacaacgcccagtgcgacgctgtcatgcaacggtacaaggagatgaaggagatacagaatctgatggccaaacgactgggcgaccgggtggtgctgcgc

SEQ ID NO: 12086 - DNA, 258 bp, Bacteroides fragilis
atgtcgaagatttgtcaaattaccggaaagaaagccatgattggcaacaatgtttcacactcaaagagaagaactaaaagaacctttgatttgaacttgtttaacaaaaagttctactatgtagaacaggactgctggatcagcctgagcctctgtgctgctggtttgcgtattattaataaaaaaggtttggacgctgctttgaatgatgcggttgccaaagggtattgtgattggaaaaccattaaagttgttggc

SEQ ID NO: 12087 - DNA, 459 bp, Bacteroides fragilis
atgaaagtatatttgggattaggtaccaacttgggtgataaggagctaaatcttcgtgttgccctacaaaaaatagaggagcggatagggaaaatcatttctctttccgctttttatgctactgctccctggggatttcaatcggaaaacaactttctgaatgctgcggtgggagtggagacagtattgtcccctgtcgggatactggaaagtactcaacggatagagcaggaaatagggcgtttgcataaatcacgggacggtgtgtatagtgaccgcctgattgatattgatcttttgctctatggcgataagatactacaggatgaaagtcttatagtgcctcatccgttgatgaccgaccgtaagtttgttctggaaccccttgccgagattgcaccggacgttgttcatccggtgtttcataagacgattaaagagctatttctggctctttcg

SEQ ID NO: 12088 - DNA, 2157 bp, Bacteroides fragilis
atggtaattctgataaccggccttttatatatgtcgtgtaccgacagtatggaggtgtccggagatgcagatagaaataatacagaggatatatcggtaaggttagtgataaccataccggcctccactacatatgcccggacgcgaggaacatttgcgacgaccgatcatgagtctaaaatcagtgagattcaagtgttagtgtttgaagaaggtaaatataagtaccgtgtacccggcatatccatcaacaacacttcatccgctgcttcttttaaagctttattaaaatcaagcagttcgcctttaaaattactcatactggccaatgctaccgatgcggtaatagccaatgggccttcggtggatgatagcgaagatttggtgaaaaagaacatcaatctccggttcaacaatatcacttccgattttccaatgtatggggagtatgaattgcccggaggattagaagcaacggttataaataatattaccggaataaagatgttacgttccattgcccgggtagacgtgaaagctacggaagtggcaaactttaagctgtcaggggtgaaagcatatcgtgccaatgaccacttacagataatacccgatgaaaccggagtcgtcagggttacgcttccgagcgtacctgccggaagttccggaaatgtaaacagtatcctgtatcctgtacctgctgagaacctgaatgaattttcagcccaactttacttgcctgaagccgattcaccaactccggacaaccgggtaagtcaggcaacctgtattgttgtagagggttattatgaagggagtgatcaaccgggttactaccgtatggattttgatcccgataatgttgaaaatgctttcgggaaagtacttcgtaatcataagtacatattcaatataaagaaggtctcaggtccggggtggggtagtccggacgaagcggcgaataatcgttccgcccatatcgtagccgaagtacaggcttgggatgattacaccattgatatgaattttgatggagaacatcattttggagtgtcgacccgggaaattgttctcaagaacaaagcaggttccgcaggcattatcaacgtaagtaccgatcttccggactataccttacaatgggccgatgccgcaggaactcccacaggaaccggaagtcagtcattggcaaatgaatactttactgtaacaaaagctcaaaatggaagtcagttagtgattacggctctgcagagtaattcgacgaatgatactagccgaattcaaaattttgtcatcacagcccaccgttggcgtattctggtgaatattcagcaaaaatatgatgcggccgcttatcagacaattcatcttctaacgttcaataccgggttgggatatctgggaacgaacattattggttccggcagtgccgaagcgcgtgcaaccggtcttcgaggtatattgaataatcaaaataatttcggtccgaccggaactgttgaatgtggaggttataatctgataggtgtaaatgccaactataataacttaaccgatgctctttttgcctcttttgatgttgtctatgtccattatatgggcaatctgttgttcggtacctcggatgcacaaaaagctcataactgggtgaaatcgaaaaagaatcgtgtattgattgtttcttatgatgctctggatgtcagccagaatttattaaaagagatattgggcgggaataacggcatttcttttttaacgagtaataccggtccctatcctttggcaactccagagaatggtaacagctactttagcactaccggtccttttaccagtgccccatatactcctatcaataccgacttctctttacgcaattatgatgcttatcatggcgaaatacagctcaacacggaagcatccaaaggcattactcctatattgatggggcctgcgggaggtattgttttaggcattgattattcaaggagaatcgtttattggggtgatacggatataggtagttcggcgtccagttcgacgtcaactaccgataaccgtataaacaataattccgggaccattaataataatgcgtccaaactcatagctaatgtttttgcctggatagcagaaactgtactatatggagag

SEQ ID NO: 12089 - DNA, 939 bp, Bacteroides fragilis
atgcagataatccgtaatataccgggagttctacccgaaccatgtgttgccaccatcggtttcttcgatggagtacatatggggcatcgctttctgatagaacaagtcagagagttggctgcggctcgtggattgcgttctgcactgattacttttcccattcatcctcgtaaggtgatgaatgcagactatcgtccggagttattgaccacttcggaagagaaactggcgctgcttgaagaaacgggcgtggattattgctttatgcttgattttacacgtgaagtatcacatctgactgcccatgaatttatgtccgatatcctgagagaccgttatcgggtgcagacacttgtcatcggatatgaccaccgcttcggacacaatcgtagtgaaggctttgaggattattgccgttatggctctgaaatgggaatagaggtgattcgtgctcgtgcctgtgtgtgtgatgatcttcatataagctcttctgtcattcgtaagatgttgcatcagggcgaagtagatcgggctgcacgttgtctgggttacgactattttctggatggtacggtggtgagcggttatcaggtaggaaggaaaatcggattccctacggccaatctcagtgtagacgatcctgataagttggttcctgccgatggtgtctatgcagttcatgtcacgttcgacgggtatacttataatggtatgctcaatatcggtactcgtcccacgatagggaatggtcccgaacgttcgatagaagtgaatatcctccattttcattccgatatttacgataaatttatccgcctctcttttgtaaaatatctccgtccggagctgaagttcgatgggattgaaggattgatagcgcagcttcatcaggatgcagccgatgtggaagcgcttttggggaaaatacaaaatgtcaat

SEQ ID NO: 12090 - DNA, 2817 bp, Bacteroides fragilis
atggatacactattatacctaatttttggtattgcctctgctgtgaatatcttatacttttgcgagctaatagaaagtaagatgattcgtaaaattgcatatacatttttttcttttctaatttgctgcaatgtatctcttgcgtggggacagacatttgcattccgaggtactgtattggatgaacagactcataaggcattggattatgccaccattcagttgtttgtggaaaagcaatttgcttatggaggaataacagatgcaaacggacattttggacttcttcatatccatcctgggacctatcggattatcatatcttatttaggatatgattctaccgagaaagaaattaaggttgtgggaaatacttctgatatattttatttaaagccctcgaacatggcgctgaacgaagtggtagtgactgcttccgaatcaaagcgtgcgaccagtgcttccatagttgaccgtaccgccatgaaacatcttcaacccagcagtttcagtgatttgatggaattggtacccggaggaaaatcggctgatcctcagatgggacaggctaatctgatccgtatacgtgaaacgggtaagacggaagatatctcttcattgggagtcggattctatattgatggtatctttcagaatacggatgcgaatctgcaatatatgccgagtagcacttctgccgtaaatgcaacgagtacgatgtcaaaaggggtggacatgcgtactatcccgactgataatattgaaaaggtggagatcattcgtggtattccttcggtagcttacggtaacgtggcaaacggtgcggtgattattcagcgtaaaaccagtgaaagtccgttatccgcacgtttcaaagccgataagaccagtaagctgttttctgtaggcaaaggattccggttggatgggaacggacgttatgttttgaataccgatttgagttatctggattcaaagatagatccccgcaatagtgtgaaaaactatacccgtctcacagcttccgcacgcctggatggaaagtggttatggaatgaacgcaatattcactggaacctcagtaccgattataccggttcgtttgatgatgcaaagagggataaagatgcgacagtaaaggaagactcctataaatcagactttagtagcttcaaaatggcgggaaaatggaatctgaaattttcgaatcattcgtggattcgtgagattcatgcggcaacctctgttagttggcagtgggagaagatgcgtgaaacaaaatccgtctctctgaatcgtccggctgccattgccactcagacagagaccggagaatctgacggtatctatctgccttataattatgtggcacagatggagattgacggtaaacctttatatgtcacggtttccgcacgtacacatttggcttttccactgggtggactgcaaaataggatgaatttgggagtggaatggaactaccagaagaatttggggaaaggccaggtatttgatgtgacacgacctatcagtgaaggtttaagtacgcgtccgcgccgttttaaagatataccgggactgcaaccttttgctttctatgccgaagaggtgttgaatcttcccgtaaaaaggcataaattggcttttacagccggtatccgtttgcagtctttattggggctggaccgcaaatatgagatgcagggtaagatctatccagaccttcgtctggatctgcaatggagtttgcctacatccaacggatggaatattgccttttcgggaggtctgggctggatcagccgtatgccgactaccgcacagctgtatccggacttcaagtatgtggatttgattcaattgaattattatcataaccatccggattatcgccgcatcaatatgatgacgtataaatgggataatactaattatcagttggaaccggcacgtaacatgaaatgggaagtgcgggcggatattggttacaagggaaaccgtttgtcggcgacttatttccgcgaacggatgaataatgcttttgatgacctcacatactataaatcattggcatataagttatatgatccggcaagtatcgatggttcggctttgacagcccctcccgaactttctcagttgacttatgccaatgaatacaacctggatgtgtattccacgcaaggaaatggaatgaaggtgcataaagaaggagtggagtttcagttcgcttccagacgaattgaatcgcttaagactcgcgtcacagtgtatggagcttggataaagacagtttatagttcggattctcccaaatacaaggcctcttctatattgctggacaacaaacagttgaaatatgtgggattgtaccagggggagaacgggacagaaagtcaggcattcaatacgaattttatgtttgatacttatatacagcgtttgggacttactttctccacatcggcacaatgtacttggtataccaacagacggaacttatggaataatggcgttccggtcagctatatcgaccaatccggtgaaacacatctatttcgtgaagaagataaaaacaatattcagttacagcatctggtagagaaatattcggctacctattttgagcgtaccaccgtacctttttatatggatatcaatctgaaggcgagtaagcggatcggtaaatatctgaacctggctttttatgtaaaccggcttttaggtatttatcctgattataccctacggggtgtgttgcagcggagaacctccgagtcgccttatttcggtatggagatgaacctgactttt

SEQ ID NO: 12091 - DNA, 1953 bp, Bacteroides fragilis
gtgatttcagtagaaggattaacagtagaatttaacgccacaccattgtttgaggacgttagttatgtcattaataaaaaagatcgaatagccctggtgggtaaaaacggtgccgggaaatcaactatgttgaagatcttggccggattgcaaagtcctacacgaggtgttatagctattccgcgtgatgtaacgatcggctatttgccacaggtgatgattcttgccgataaccataccgtgatggaagaggcggaattggcatttgaacatatttttgaattacaggccgacctggaacgcatgaatcaggaattggctgaccgaaccgattatgattcggaagagtatcataaactaatagaccgtttcacgcatgagaatgaccgcttcctgatgatgggaggcactaactttcatgcggagatagagcgtacgctgataggattgggattcagccgggaagattttaatcgtccgaccagtgagttttccggaggatggcgtatgagaatcgaactggccaaacttctgctcaggaaaccggatgtgctgcttcttgacgagccgaccaaccatttggacatcgagagtatccaatggctggagactttcctctctacccgtgccaatgcagtggtgctggtcagccatgaccgggcctttttaaacaatgtaaccactcgtaccatcgaaattacttgtgggcagatatacgattataaagtgaaatatgatgagtatatcgttttgcgtcaggagcgtcgtgagcagcagttgcgtgcttatgagaatcagcagaaacagattgaggatacagaggcgtttatcgagcgcttccgttacaaagcaacgaaggctgtgcaggtgcagagccgcatgaagcaactggaaaagatagaacggattgaggttgacgaagtggataactccgcattgagattaaagtttgtctgttccagccgtagcggaaactacccagtgatctgcgaagacgtgaaaaaagcctatggggcacacgttgttttccatgatgtcaacctgaccattaatcgtggtgaaaaagtggcctttgtaggaaagaacggtgaaggtaagtctacccttgtgaagtgtatcatgagtgagattgattatgagggtaaacttacactggggcacaatgtgcagattggatattttgcccagaaccaggcacagatgttggatgagaatctaacggtcttcgatactatcgaccgggtggcagtgggagatatccgtctgaaaatacgtgatattctgggagcctttatgtttggtggagaggcatcggataagaaggtgaaagtgctttcgggaggtgagcgtacacgtctggcaatgataaagttgcttttggaacctgtcaacttcctgattctcgacgagcctaccaatcatttggatatgcgttcgaaggatgtgctgaaagaggctatccgagagtttgacggaacggtgattatagttagtcatgaccgtgattttttggatagacttgcgactaaagtatatgagtttggtggtggcgtggtgaaagagcatttgggaggtatctatgattttcttcaaaagaagaaaatagagaacctgaatgaacttcagaaggcgaatccgtcatccgcctcgcccgcaaacggtaagaaagaggaaggagccgaagaaggaatatccgagaataagttatcatacgaggctcaaaaagaactcaataaaaaaataaagaaactggagcgcctggtagcagactgtgaagctgctatcgaacagacagagtcggctattgctattcttgaagaaaagatggctacgcccgatggtgcttcggacatgtcgctatatgaacaacaccaaaaactgaaacagcaacttgaccatacggtggaagagtgggagcgcgtttcgatggagttggaagagatgaatgaaaaa

SEQ ID NO: 12092 - DNA, 270 bp, Bacteroides fragilis
atgaataaggctgaacttattaatgcaatggcagcggaatccggcttgagtaaagtggattctaagaaagcgcttgaagctttcttttcttcggttacaaaagctttgtcggctggtgacaaaatttccttggttggatttggtacattctctgtagctgaaagatcagcaagaatgggaatcaatccttctaccaagaaggcaattgagattcctgcaaagaaagttgctaaatttaaaccgggtgctgagctgacagatgctataaaa

SEQ ID NO: 12093 - DNA, 255 bp, Bacteroides fragilis
atggaagcaagaaatttaagaaaagaaagaacaggggttgtgctgagcaataagatggaaaaaaccattaccgttgctgctaagttcaaggaaaaacaccctatatatggtaagttcgttagcaaaacgaagaagtaccatgctcacgatgaaaagaatgaatgcaatgtaggtgatactgtacgcatcatggaaactcgtcctttgagcaagactaaaagatggagattagtagaaataattgaaagagctaag

SEQ ID NO: 12094 - DNA, 1017 bp, Bacteroides fragilis
atgagtacaattatattaggaattgaatcttcctgtgacgatacatcagctgcagttattaaagatggttatttgttatcgaatgtggtatctagccaggctgtacacgaagcttatggtggagtagtaccggaattggcatcgcgtgctcaccaacagaatatagtacctgtggtgcatgaagcgttgaagcgtgcaggagtgaccaaggaagagctgagtgcggtagcctttacaagggggcctgggttgatggggtcattgctggttggagtatcttttgcaaagggttttgcacgttcattaaatatcccgatgattgatgttaatcatctgacaggacacgtgttagcgcattttattaaagaggaaggagaagcaaatgaacagcccgattttccattcctttgtttgctggtatccggaggtaattctcaaattatattggtgaaagcatataatgatatggagattctgggacagactattgatgatgctgccggagaagcaattgataaatgttcgaaagtaatgggacttggttatccggggggacctataattgaccgtttggcacgtcagggcaatccgaaggcttatacttttagtaaacctcatatttctggtttggattatagttttagcggattgaaaacgtcgtttctttactctctgcgtgattggatgaaagaggatcccgatttcatcgaacaccataagaacgatttggcagcttcgcttgaagcaacggtagtagacattttgatggataaacttcgtaaagcagccaagcaatataaaattaatgaagtggctgtagcgggcggtgtttctgctaacaacggtttgcgtaatgcctttcgtgagcatgcagagaaatatggttggaaaatttttattcccaagttcagctatactacagataatgccgcaatgatcgctatcaccggatattttaaatatcaggataaagatttctgctctatagaacagcctgcttattcacgtgtaactttg

SEQ ID NO: 12095 - DNA, 699 bp, Bacteroides fragilis
atgaattttaaagaaggagaagtactttattttaataaaccgttgggatggacgtcttttaaagtcgtggggcacgcccgttaccatatgtgccggcggatgaaagtgaagaaattaaaggttggacatgcaggtacactcgatcccttggcaacaggggtgatgattgtttgtacaggcaaggctaccaagagaatagaggagtttcagtatcatacgaaggagtatgtggctaccatacagttgggcgctactactccgtcttacgatctggaacatgaaatagatgctacataccctacggagcatattacccgtgagttggtggaaaagacgttgaaaacgtttgttggtgagatacagcagatacctcccgctttctcggcttgtaaggtagatggtgcacgcgcttacgatttggcccgtaaaggccaggaagtggagttgaaaccgaaattgctggtgattgatgagatagagttgttggagtgtaatttaccggaaattaaaatacgggtggtttgcagcaaggggacttatattcgtgcattggcacgtgacatcggagaggctttgcaaagcggggcgcacttgaccgggctgatacgtacccgtgtgggagacgtcaagttagagcagtgcctggatccggcgaagttcgcggaatggatagatcagcaagatgttgagatatctgat

SEQ ID NO: 12096 - DNA, 672 bp, Bacteroides fragilis
atgaaaggcgatgagattgaggtcatgaaacactttcttttcaatgcccgtactgccgatgaatgctgggcatcatatctgattgccaagcgtcacaagtatcggatagacaacttctccatgtggtgcgactatctgcgtatgctcaacaaactcggtcaagacctccgcaacccgaagaacatctgccccgaagatttcatggcggcacacgacaacgcaactcgaaagattgaagccatacacgagaaggaacgggccgaacaacgccgccgctgggagattgaaaggcgtgagcgtgaacaacagcggcaactgcaaagggaaaaagatgcggaggatttcattgccaacaaatccaaattcttcggattggtaatcactgacgaggaaataatcgtcaaggtacttgaaagcatagacgagtattacagcgagggcaaggcacagaacatctgcgtgttcggcagtgaatactacaagaaagccgacaccctcatactctcggcaaggattggcggtgagataattgaaaccgtagaggtggatttgcggacactcaaggtggtgcagtgccacggcaagtacaaccaagacaccgaataccacgagcgcatcatagaccttgtgaacaagaacgccaaccttatccgtgagcggatgaaagcggca

SEQ ID NO: 12097 - DNA, 1911 bp, Bacteroides fragilis
atggctatggcacacacactggattcattcccggataccggagaccttgagaatttgaaagataattatcagaaaatcacttctgtcctggcaggacatcagattgcattttgggaatatgacattcctacaggagagtgtaatttcacagatgaatatttccatattttagggttgaaggaggccggaatcatattcagagatattaatgacttttatcggtttgcccatccggaggatgttatctcttaccaaacgacttttgcgcggatgcttgaatcggaaaccaaaatctcccaaattgtggtacgttgtgtagggaggcaaggagaaacaatttggcttgaagataattttattgcttataagaagaataaggagaatggctctgataaaattatagcatatactgccaatatcacttcacgttgtgaaaaagaagtccagatcaggcagcttgaggaacgaaaccggaaaattattgaagcactaccggagttcatatttatttttgatgataatttttttattacggatgtattgatggcacccgatacagagttgttgcatccggtggaagtgttaacaggagcagatgggcgatctatttattcttctgaggtcagtgacttgtttattagcagtattcatgaatgcctaaaaagtgggaagttaaaagaaatagagtatcctgtggatgtcgaagccggcagacatttttttcaggcacgcattgctccgtttgagggaaataaggtgctggccttgattcatgatattggtgatcggatgcgacgttcgcaagagctacttgaagccaagcaacgggcagaagaggctgatcggatgaaatcagtatttctggccaatatgagtcatgagatacgtactcctttaaatgccattgtgggcttttcggaaattatagctttgactgaggatgaaaaggagaaagaagagtatttagggatcattcagcagaatagcaatctactgttacaactgattaatgatattctcgatttgtcacgaatcgagtcgggtaagtcggaaatgcattgtcagttgacggaaatgagcggattggtagatgaagtggataaagtacatcgtcttaaaatgaaaaaaggagtcaagctgaatgtgattcgtccatcagaggaaatttggatttcgacagataggaatcgggtgacgcaggtattgttcaatttcttgtcgaatgcaattaaaaataccattgagggtagcattactttcggacttgtaaaagaggaagaatgggttaaactttatgtaacagataccggctgcggtatttccaaagagaaattacctttgatatttacccgctttgagaagttgaatgattttgtacaaggaacagggctgggattacctatctgtaagagtattgtagagcggttgggcggtcggattgaagtggaatccgagcttgggcaggggagtactttcattctttatttgcccaataggcaagtacaggaagttgtggttggcaaaagagaaaacgcagcgggtaatatgggagtggagaaccggcagaagaagatactgattgcggaagatgtggagtccagttatctgcagattaatgcctttctgaaaaaagaatatacgattctttgggtgcctaatggagaagaagctgtgaagagtttcatacgcgagaagcccgacttgattttgatggatatccgaatgccggtgatgaatggtattcaggcaacagcaaaaattcgtgctatctcgcaagagataccgattatagcaattacagcatatgccttttgtccggaaggagagcgggctcttgaagcagggtgtaatgaagtgattgcaaaaccatatcctctggagaagctgaaagaaacgatcgaaacttattta

SEQ ID NO: 12098 - DNA, 4083 bp, Bacteroides fragilis
atgaagaagctaaatctctttttattggttttgtttatatgtaattgtccggtcgtttctggttatgctttttttgatagagatattcgtctgttaaccatgcaggatgggctggcggataatactattacatctatctacaaagatcgggatggctttatgtggtttggtactaataatggcttgagccgttatgatggtaaattaataaaaaacttctcttcttcaccagcgtatatgtatgtttccgaaattgtagagatgtcagatcgatatttgggagttatcgctggaaatactttatattgttttgctcggtcgctggagaaatttataccgatcgtccatgcaacggattatagttctgtacatgtctctcacttattacctatagataataactctttttggggactgtcagggaataaattatatctatatacacaggaagaagttaaaaatgagaaaggagaggttgttcagattaaattgaaatgtgagaaacagtataaagatttgattgattctggtgataatttctgtgcaatgtgttatactgataatcatgaaatgttatgtttggttacacagcaaggaaatttgctattgtttcagcctgaatcttcggagaaatctaaaaagatatctttgtggaaaaataaaacttgggatgcaacttcggtattatatgataaaggagtggtatgggtttctactattggacacggtattctgcgttattacgtttcttctgggtatatagacagaattacttataaggaaaataataaagaaaacagtctatcccatacagatgtttttcaagttattccaattaataataatcgttatcttgcagtgacttggagtgggtatactttattatttcaggataagaatgatccgaaaagaatgatgacagaaatatactataatacagcttcacaacttcaccgcaacttagaaacaagaatgatttcagcgtattacgaccccagtgggattgtttggataggtactaatgggggaggagtgatttattctgatctacggtcacaattttataaccaatttcatcaagagaggcataatgaaatttgtggtatagtcatggataatagaaaatatgtttggatggctacgtttcatcaagggattatgaaaagtgagcaaccttttgaaccaggaagacgaatgaattttactagggttggtactccggatattcaaagtaaaaatacagttctttgtgccattaatgataatagaggttcactttggtttggaaatagggatggaacattaacttcatataatgaggcaacaaaacaatttcgattacattttttacaagatagaggtaaagtgaatactgtgtcaatttgggcattatattgggatactaatcgaaatttatgggtaggtactaatgatggagtttggaaattgaatatagattctggattttgcaaaaaaatccctattgagattttgtttaaggaccctactcctatttgtatacgagctattgccggcacgaaggacggaactatatggttaggtacaagtaatgcaggagtttgcaaattgaaaattgattctagaggagagatgtctttagagacaggctatgagaagaaagcgaatatcaaaaataattcggttcgttctttgttagtatcttctgatggtaatgtatatgtaggttatatggatggtttcgctattctttcacctaaaaaggatgcaatacgtgagtattatacaactagaaatggattatgtagtaattttataggatgtctggtcgaagataaccgaggacatatttggttgggaagtaattcgggagtctctcgttacagtaggcatcagcaccttttttataattattatataagtggaagcaatcgttcggcattacttgctgataatacactattttttggcaataataaatcgctcacttattttgatccggatgacgtgggtggtcatttggatgaagatcaggttcttattactggacttgaggtagatggtcgtcctgtagggattggggataaaataaatgggcagactgtattggcagaaggcatttcatatactagttcgattactttgaataatgaaaatcgtgactttgttttatcttttaataatctttcttatgcagaggaacaacagaagtacaattaccgcttattaccatatcagacgcattggttggtttctaatgatggagagaaggctacttatatgaacttacccgaaggggattatacatttgaagtgaagaatatttatcctgacgggaaagatggaaaggttacatcactccaaatacatattctaccgcattggagtcgtacattgcctttccgattatttattttactgttattggccggtggtgtggcttatttgattcgtcttgtcaaacatcgtcagatgcgtatggaacgtgaaatgcgcatggaacatgaacttctgtcagtaaacttagagcgtgagaaagagcgacagatccggatggagcgtgagaacttttttacaagtgcggcacatgaactacgtacgccgctaaccttgattcttgccccattacaggaattattggaacacataaaggcatccgatccactgtatagcaagctatataccatgtataaaaacagctcctcgctacatacactggtcgatcagttgctctatgtacaaaaaatagaggccgggatggtgaaactgcgtttgtcagaagcggatattgtggagctagtgagagaagtagcagagtcttttcgccaaatggcagggataaaaggatgtacatttcaggtaagacttccggaagatcctgttttcctatggatagatacggagaaaataacttcgtcggtcggaaatctactatctaatgcttttaaatacacttctcccaatggagaggtattgctcactcttacccgtatggaacaggatggaaagcctttttgccagataacagtatcggatacgggtgagggaataccggatgagtttcagaagcgcatttttgactctttcattacgggtgataattcaccggctttctctactaaagtaggcattggactgcggattgtgaaaaatacgatggatctgcatcatggacaggtcattcttgatagtgagccgggaaaaggttctacattcgtattattgataccggaaggtaaatctcactttactggtgatttatatgaaatagtagattatcgcgggcatgaaacggaaccgcagtttcaacctctatctgtacaggaaaaattggaagaaggagttccggtcacaaagaaaacattgctgattgttgaagataatgtagatgtccgtcagtatattcgctctttgtttgtgacaaaatacacggtacttgaagcggctgatggtgaggaaggggtccggattgctaccaatgagatacccgatctgattatctcggatgtaatgatgccggttaaagatgggtttgcctgttgccgggagatacgtgaacggcaagagaccgctcatattcctatcctgatgttgacggccaaggcagaagatgcagatgtattgcaaggatcttatagtggggcggatgactatatgatgaagcctttcaatccggaagtattgaaagcaaaggtagagaacctgattcttcagcgcgaacgtctgaaacgcatttataccaaagcattgatgttgaaacgagaatcggttgaagatgaagaggcagatgacgaatttatacaaaaactcattcacgtggttgagaagaatctgtctaatgagaacttcaacgttaagatgttggccgaacaacttcacatgagccagcctactttataccggaaggtaaagcaacgcagtgagttatctgtggtcgatatgatccggagtgtgcgggtgagtaaggctgcttcgttgattatggagaatcgttactccattcaggagatttccgaaaaagtaggattcagtgatgcccggacattaaggaagcactttacggaacaatttggtgtgcccccttcaaaatatatggagaataaa

SEQ ID NO: 12099 - DNA, 1491 bp, Bacteroides fragilis
atggcaaaagaactgaaagacctgaccaaacgcagcgaaaactattcgcagtggtacaatgatttggtggtgaaagccgatttggcagaacaatcggctgtgcgtggatgtatggtgattaagccttacggatacgctatttgggagaaaatgcagcgtcagctggacgacatgtttaaagaaaccggacacgttaatgcttatttcccgttgctgattccgaaatcatttctgagtcgtgaagctgaacacgtagaaggctttgccaaggagtgtgccgtagtaacacattatcgcctgaaaaatgccgaagatggttcgggtgtggtggtcgatcctgctgcaaaattggaagaagagttgattattcgtccgacttctgaaacaatcatttggaatacttataaaaactggatccagtcatatcgtgatctgcctattttatgtaatcagtgggctaacgttttccgttgggaaatgcgtacgcgattattcctccggactgcggaattcttgtggcaggaaggtcatacagcacacgcaacgcgcgaagaggcggaagaagaggctatccgtatgttgaatgtatacgccgagtttgcagagaagtatatggcagttccggtagttaaaggtgtgaaatcggctaatgagcgctttgccggtgcacttgacacgtataccatcgaggcaatgatgcaggatggtaaggcattgcagagtggtacttcacacttcttgggacagaatttcgcaaaagcattcgatgttcagtttgtaaataaagagaacaagcttgaatatgtatgggctacctcttggggtgtttctacccgtctgatgggggcactgatcatgactcactcggatgataacggtctggtacttcctccgcatctggctccgatccaagtagtgatcgttcctatctataagaatgacgagcagttgaagctgattgatgctaaggtagaaggtattgtggcaagattgaagcaattgggcatttcagtgaaatatgataatgctgacaataaacgtccgggctttaaatttgccgattatgaattgaagggtgtgcctgtccgtctggtgatgggtggacgtgacttggagaacaatacgatggaggtaatgcgtcgtgatactctggagaaagagactgtgacttgcgatggaattgagacgtatgttcagaatctgctggaagagatccaagctaacatctataagaaagcacgtacttatcgtgactcacgtatcactacggtggatagctatgatgagtttaaggagaaaatcgaagaaggcggctttatcctggctcactgggatggaacagtggagacggaggaaaagatcaaagaggagacaaaggcgacgattcgttgcattccgttcgaatcgtttgttgaaggtgacaaagagccgggtaagtgtatggtgacaggaaaaccgtctgcttgccgtgtgatatttgctcgttcttat

SEQ ID NO: 12100 - DNA, 1116 bp, Bacteroides fragilis
atgattgacgccctcgagaacaatgacagcgccattcacttcccagaagagcagataatgcctgagacccgagaggtcaaccgtgcactcaaccgggtcggacgcatattatataatgtaaagtcggaaacggtacaacaagaaaagtattacgaactgataatggactgtgtaaacaccggtgtactcgttctcaatgaaaatggagcggtttatcaaaaaaataatgaagcgcttcgcctgctcggattaaatgtgtttacccatatccgccaactgaacaaagtggatatacagctgatgaagaaaatagaattctgccgtccgggagataaaatacaaactattttcaacaatgaacggggtacaatcaatttatccattcgtgtatcaggcatcactgttcgtgaagaacaattgcgcattctcgcttttaacgacatcaacagtgaattggatgaaaaagaaatcgattcgtggatacgactgacacgtgtattgactcatgaaatcatgaattcggttactcccatcacctctcttagcgaaacactactatcgttggccgatacccgggatgaagaaatacgccggggcttacaaacaatcagtactacgggaaaaggcctgctctccttcgtggaatcctaccgccgttttacccgtatcccgaccccggaaccatccttattttatgtaaaagcttttattgaccgaatggtagaactggcacgccatcaaaacaaatgtgacaacataacgttccatatagatattgctcctgctgatctgattgtgtatgccgacgaaaatctgatttcgcaagtagtaattaatctattgaagaatgccatacaagctatcgatgcacaggccgatggaaagattgaaatacaaggacgatgtaatgctgctgaagaaatattgattgaaataaaaaataatggccctgccattccttcagatatagcagatcatatattcattcctttttttaccaccaaagaaggaggtagtggtatcggattgagcatttcacgtcagatcatgcgtctgtcaggtggaagcatcactctgctgcaaggcaaagaaactaaatttattctgaaatttaaa

SEQ ID NO: 12101 - DNA, 774 bp, Bacteroides fragilis
atgcttgtcgattcacattcccatctttttctggaagagtttgccgaagatttacctttcgttatggaacgtgcccgtgctgccggtgtgacgcatatctttatgcctaacatagatagtacgacgattgaacccatgctgtcggtttgtgatacctatcgggacttttgctttccgatgatcggattgcaccctacctccgtgaacgagtcctatgaaaaagagcttgaaatcgttgccgcaaatctggaaacttccggccggttcgttgctgtgggcgagattggaatcgatctttactgggataaaacctggctgaaagaacagttgattgcttttgaaaaacaagtgcaatgggcccttcattatcaattgcccatagtgattcattgccgcgaagctttcgattatatatataaggtattgcaaccttataaaaatagtggactgaccggaatctttcatagttttacgggaactcccggtgaagctgtccggatgatggagtttccgggatttaagatcggtataaacggtgtggtgactttcaaaaagtcaacgttgccggagacattgaagtctgttccgttggaacgtatcgtattggaaaccgattcgccttacctcactccggttcctaatcgtggaaagagaaatgagagtgcgaatgtgaaagatacattaataaaagttgccgaaatatataacgaagatccggaaaaagttgcggaattgaccgctgttagcgcattaaaagtgtttggaatgctcaaa

SEQ ID NO: 12102 - DNA, 2610 bp, Bacteroides fragilis
atgaacaaacgattatatactatatttcttatatctgtcttcttattactcccgggattttccactgctgcggaacgtatttataatgttctcttcgttcagtcgtatgctccggagacaccttggcataatgacttggttcgggggttgaaagacggtttcggtgaatcgggattgaaagtgaatattacaaccgaatttctggatgccaatttctggacttatcaatccgaaaagctgattatgcgtcgtttttgcgaacgggcccgtgaaaggggaacagacttgattgttaccgtcagtgatgaggcttttcatactttgctgacatgcggagactcgttagccttgcagttgcccgttgtcttttttaatataaaatatccggaaggcagcctgattgattcgttacccaatgtgtgtggatatacggcgaatcccgatttcggagaattactgaggcaggcgagtcgccttttccctacccggacggaggtggtctgtatctccgacaatagcctgctgagttcgaaagggaaagatgattttatgaacgaatgggaaggttttgtggaggagcatccggaatatacggtgaccttttataattcgcagaccgatacaaccaataaaattattgcttctacctgctatccccgcaatacacataagacattgatcatcgctcctaagtggtcgtcttttatgtcctttatcggtcgtaactcaaaagcgcctttcttttcgtgcgagaaccttgcgttgactaatggtgcctttggcgcgtatgatgccgattcgtatgcttcggcgcatgaagtagggcggacggccgccgatgtgctgcgtggcaaatctccctcggaagtgggaatcattgaatctcctttgaagtttatgtacgatttcaagcagcttgtgttttttaaggtagatcccaagcaggcgagtgctatcggcggaaccattattaacgagccatacatggagaaatatcgtatgctgtacatcttgttgtatagttcgatattggctttactggtgttcctgatagtgtggttgtatcgtataaaccgtcgtgaatcccgccgtcgcatccatgcccagacccgcctgctgatacaaaaccggttggtggcccaacgtgatgaatttgataatgtgtttcattccatccgtgatggtgtgatcacttacgacaccgatttccgtattcattttaccaatcgttctttattgaagatgctgcatttgcccaaagatgaagccgctcgaccttacgaaggcttgccggcaggcagtatttttaagatctacaataatggtaaagagattctccgtcctatgctcaagcaagtggtgactgaagaaagcagcgtagtcattccggaaaattcattcatgcaagaggtgcacagtgggagttattttccggtttcaggagaggttgttcctatccgtgcacatggaaaaataacgggaatggccctctctgcccgtaatatatcggatgaagagatgcagaagcgttttttcagaatggcggtagacgagagttctatctacccttggcaatataatatccgcaccggtctgtttactttccctgcgggctttctgacacgttttggttttgcggaaaataagactaccatttcacgtggcgagatggaccggatgattcatccggacgatcaggaatcggcatacgagattttcaaccgggcactggcgggcctcagtcagagtacgcgtatgagtttccgtcagcttagtggtgacggtaattatgagtggtgggaatatcggacgtcggtgcttgcaggattgacaacagatacgccctacagtattttgggagtatgccagagtatacaacgctataagacaaccgaagaggaattaaccgcagcgcgtgataaagcacttcaggcggataaattgaaatcggctttccttgccaatatgagtcatgagatacgtacgccgctgaatgcgattgtaggtttctctgatttgttgagcgataccagcgggtttaccgaagaagaggttaagctatttatagagactatcaataagaattgcggactgttgctggcacttatcaatgatattctcgatttgtcccgtatagaatccggcacaatggattttcagtttgccggtcacaatcttccgttattgatgaagaatgtatacgattcacagcgtttgaatatgcctccgggagtgcagttggtgctgaagttgccggagaatagcaaaaagtatctggtgacggataatgtccgcctccaacaagtggtaaacaacttgatcaacaatgccgttaagtttacgactcaaggttcgattacattcggatataccgaagaagaacccggctacacttctctttttgtcgaagacaccggaaaaggtatttcggaagatggattgaggcatatctttgaacgtttctataaggtagatagctttacccagggtgcggggctcggactgagtatttgccagactatcgtaggacgtctgaacgggacgattaccgtcacttcagaagaagggcacggaacccgtttcactgtccgccttccggatatttgcgaa

SEQ ID NO: 12103 - DNA, 657 bp, Bacteroides fragilis
atgtgtcggactgctttgattgtagccggagggaagggactccgtatggggagcgaacttcccaaacagtttcttcccatcggtggtaaacctgtattgatgcgtacgctggaagcttttcaccgtttcgatgaaaaaatgcagattattcttgtgttacctcgggagcaacaggacttttggcgtgaactttgtgaagagcatggctttgacattaaacatctgattgccgatggaggtgaaacacgtttccattcggtcaagaatggattggctcttgtgaacggtatcggtgtagtgggaatacatgatggtgtccgtcctttcgtttcacaggaagtgattgcccgctgcttccgggaagcagtagtccgaaaagccgtcatacccgtcattgatgtggtagaaactgtgcgtcatctcaccgaatcgggcagtgaaaccgtaagccgtaatgactataaattagtgcagactccccaggtgttcgatgcagatctgctgaagagagcttatgaacaggaatttactcccttttttacagatgatgcttcggtggtagaagccatgggtgttcctgtctacctggtggaggggaatcgtgaaaatataaaaataactactccttttgatttgaaagtagcttcagccttgttg

SEQ ID NO: 12104 - DNA, 2795 bp, Bacteroides fragilis
taccaagaattatatataaaaaataatataaatgaaaggactataaattccgctataaaatattatgtccgtagttgtacaagatgtacaccatacggtatttttgcgggttgtgatatagtacctattagaattgatgataattattctaacataattatgtcagaccttaaaaattataagacatatacacgtatagatatgaactatttatgtgaacttataagaaagttagatttaatgccacagatacagaatgcaattacatatcatgtaaatacaacttcgtattttttaggtaaaaatttgcgctatattgagtatcgcatcaataaatctaaacggaattataccttctctgaaatttctcatacaccatatttaaacaatataataaaagcattaaagaagacccctttaacaaaaaaggaaataattaggctattgataaaaaataaagaaatagaagaggaagaagctttaaattttgttcagacacttattgatgaacaaatcttaattagtaatttggagccatctgtggttggcgaagatttgattcaacaattgcatcataatctttcagaaattaattataatctagaattcattaattctctcatatatttattaaaagaatgtgacaaggaatcactaggaaataaagaatcgattattaataatatataccgtttattatcggatggtatgttatttgagcaagatactctaatgcaagtagatactttaaataaagttaaacaaggcataataggaaataacattactaaagttattgataaatgcatatacttcttttcaaaatttcagccaagccataaatctgagacttttgagctttttaagaggagattttatgaaaagtatgaagagcaggaagtaccactagttgtagcattagacccacaagtaggaattggttatggaaactggactgagaacaatggcgatataaatcctttattacaagggttgcccaatccttttttagaccgatcttataagatcgatatggatctgactccagtcacgatgttgctaataaaaaagtatgaagaggctataaaacaaggattgcatgagattgaaatactagatgaagatttaaatgaattcgaagaacgtgacttaaaacttcctcagtgttcagtcatgctctctgttttatcaaatgatgatacgccatctattttattaaaagggataattgggggtgctacttctagattgatttcaagatttgaatatttagattctaaaattgaaaattttgtaaatgaaataaataaacgtgatgaattatattataaagattgcatagtcgctgaggtaatgcatcttccagaggatagaattggaaatattcaaatgcatcctaataatagacaatatggaatttgctatttatctagtccaaccactaagtatgtaaagaagatcataccaattgatgatataaccatttcagtgtaccatggacaagaagttatattgaaatcaaaaaagaataagaaaagaattattccaatgttatcaactgcacataatacaaaaaatgggcttccaatatatagctttttatcagattatataaatcaagaatccatgtcttactcttttgattggggatcatattttcataataaatcatttctcccaagagttatctattctaatgtaatactaaaaccagctagatggttaattcatcccaatgaatttccacaaaataaaaatttaaatagcgatgaattgtattcttggaaactaaaacagagaataccagacgaaatattaataactttgggggacaatcaattatatataaatttcaacaaagaacatcttgttaaaatttttattagtgagctcaagaaaaagagaccaattattttagaagaatttctatatagttctaaaaatataaatcttgttgagtctcaagaaggtttttttgctaatgaacttataataaatctatataagaaatgacacagcgtatatttataataggaggagaatggatatattttaaaatatattctggaccgaaaacaatagaaaatatttttattaatgatattatgtgcaagataaatcttcttatagaacagagagtgagagattcattcttctttgtaagatatatggatcctaattatcatattaggttaagattacattgcactaatataaataattatgcatttattctccatcttatttatgaaactcttaaccgttatgttaaggatttaatcataactaaagttcaattagacacttatacaagagaattggaaaggtatgaatacaatgagatagttcattttgagacttttttttactacgacagctgtttgattactaagtgtcttaaaagactaaattgtacagaccaagatagatataaaatatcgatgaagtttattgattcgattatggatatatgtaattttagccttgatgaaaaaattaattttacagaaaagaatagtaaagcatattttttagaattatatcaatctgattgtactattgggcatatattaaatttgaaatatagaaaatatagaaatgaaattgagaaatgtttgaatgatgagagtaaacactgttggtggaataaagagataaaaaaaaatatatatattatgagaactattcctctaaacatcttgaccggtaaaaataataaactttctagcataattcacatgcatgtaaatcgtatgtatagaattaaccagagaactgtagaattagtaatttat

SEQ ID NO: 12105 - DNA, 996 bp, Bacteroides fragilis
atgccgtatcttataaagagaacaaggaagaatacacccggaaagtcaaagaatttacagaccgctacattcactgatatgaaacagatactcacatacctgctctttatatggatactcctcccattaaaagcagaagaaaaaatatataccgtagacaacatccctaaagtgcacttgcagaacaagatgcagtatgtttgtaatcctgccggcatcttgtcacagcaagcttgtgacgaaatagatgcaatgctatatgcactggaacagcagacggggattgaaacagttgttgccatagtgccatcgatcggagataaagattgctttgaattctcccatcagctactcaatcaatggggagtaggcaaaaaaggtaaagataacggactggttatcttattggttaccgatcagcgctgtatccagttttataccggatacggattggaaggcattctgcctgatgccatatgcaaacgtatacaaatgcaagagatgatcccctatctcaagaaaggagagtggaaccaaggaatgctggcaggagtaaaagctgtatgccagcgcttggacggctcgatggtaaacgatgatgaaggtcgtggagaagaagggatatctgtctccatgcttctcgttgtcatcttaggttttattacgatagcgggagtggtcggcatactggcagtacgtgcaagtacccgttgccctaaatgtgggaaacatcaactccagcgcagtagcacgaaattgatatcgaaccgtaatggagtaaagaccgaggacattatatatacctgccgcaattgcggacatactgtagtccgacgccaacaatcgtatgacgacaattaccggggacgcggaggaggaggtcctttcatcggaggattcggaggaggaagttttggatccggcggtggaggcggtttcagcggtggaagcttcggaggcggttccggtggcggtggaggtgccggctcacgtttc

SEQ ID NO: 12106 - DNA, 2103 bp, Bacteroides fragilis
atgcaaattattaatttaactctaatgaatatgaatcatataatcaaactattgtttctctgtctgttcttcgcaaccgcctgtagccaggaggagatgaacgaggtgttgaagaatcacgcggaaatggaggggcaggtaaactctatcgaggagttgtgcaaaaatatgaatagggatatcgttgctttgaagctgatcattaattcttctgaatcaggtgattatattaccggtttcaaggaacttgcagatggaagcggctataccatcagttttttcaaaagtggtacgattgtcatcaagaatggcaagaaaggggacgacggtaaaaaaggagaagatggtcaggatggtcagaatggtcagaatggtaccgatggcaaagacggtcaggatggtaccgacggtaaagacggtcaagacggtatcgatgggcaagacggacaggatggtactgacggtaaagacggtcaggacggtaccgatggcaaagatggccaggacggtaccgatggtaaagatggccaggatggaacagacggtacggacggtccggaaggagacaaaggacagaatgggacagctcctgtcgtcactatgaaaatggatacggacggacatctgtattgggctatcaagaatgccgatggaacatcttcttttcttttggacaacaacgggcaaaaggtcagagcttcgggaaccgatggtattgttccggtcattggggtcaatgcggcaggatactggacgcttgattatgggagcggtcctgtcgaattgaaagatgctgcgggcaatccgatgaaagcgaaaggtgtgtccggtgatcctatgttccggaaggtggtcagtgaagacggttatattgtattttatctgactgatggaaccatatttaaagtgccggagtggggaggggcacaggtagaattggcggcttcgggagtgacgtattttcatcggagtgagtctctgacctttacgtttacttgcagtggcgtaaataaaagtattgctccggtatgtacggctccggtcggttggacagttacggcccaatatacgtcggacaccaccggggagatgacggtgattgctcctgataaaagctcggccgatggagccttgtccggtactgctattcttgaactgacagccaaggacggcaagaagttgtcggcaacgctcggagtcactttattgcttgaatttaaagtgcccgattcttcccgttcgtttgtttatgaactttatgttgagggagtgaaagtaggagaactatgtcatgagtttattcccgattattcatttggatcgggtaaaagtgcctcggtcttttatccttataatgtttataacaaagcgtttggcgaaggaatggtattggataacggagggaaagtagactatctgactaccgtttatacgccgggtaccaatacgcaaccattcacctccctgtttacagaagacggagtgagttttataaccggcgattatatcggctactcggatagtcaggcaaacggactccgtccttatctgactactgataatgaaggcaactcatatcgggtgatgaaaatcggtacccaatattggatggcggacaatctgcggacgataacaaacagtgcaggagtcatttcttcggaatggagaaaagatgctaacccgagatatgctgtatatggttttcccgccggcattacggaagatagccggaccattcgcaatcaatatggactgttgtacaatgcaggtgtgttttccggttctacgtctttagttactgaaggctggaaaataccgaatcatttgggcgattgggataaattgcggaatttcctgggtggggattctaaagtggccgaggcattgagtattgccgggtttgtgggaaaacccggtggacggcgtaatgctgatgaaccttttgctttccaggaaaaagatgaagtcgggtattggtggtttagcagtgtcgatgggcataattgctgggcgctctccatcaatccttcgaatgtatccgtaccacaatctacgaatacatatagtcgtggttacggatttagcatacgttttattcgtcag

SEQ ID NO: 12107 - DNA, 216 bp, Bacteroides fragilis
atggcaaagcaatctgcaatagaacaagatggagttatagttgaagcattgtctaatgcaatgtttcgtgttgaattagaaaacggacatgagattactgctcatatttctggtaagatgagaatgcattacattaagatcctaccgggtgataaagtcagagtcgaaatgtctccttacgacttatcgaaaggaagaattgtatttagatataaa

SEQ ID NO: 12108 - DNA, 1089 bp, Bacteroides fragilis
atggccatgccttcgggattgggcaaagtattcgcttcagaagcgaaacaaacggaaacatccgatgtggataccgatgcagcccgtatcaagggacatcgtgtattgggtacgggtaaggctgccttcgaggtgtcagcactcggcttcggcgtgatgggcatgacttacaaccgcagccaacacccggataagaaagagtgtatccgattgttgcatgaagcggtggatcgcggtgtaacgcttttcgatacggctattatctatgggccattgaccaatgagaacctggcaggagaagcgctgtccgaattcaagggacggattaacgtaacgactaaattcgggcatgaagtcatcgacggcaaaggaaccggtcgtcaggacagccgtccggcaaccatccgccgctattgcgaggagtcgcttcgccgattgagactcgaatcactgccgatgttctaccagcaccgtgccgacccgaatactccggccgaggaggtggcggctatcattgccgacttgatcaaggaaggtaaagtgcaacgctggggtatgtgcgaggtcagtgccgaaacaatccgtaaagcccacgctatttgtccgctgacggctatccaaagcgagtaccatctgatgcaccgcctggtggaagagaacggcgttctcgatgtatgccgggagtcgggtatcggcttcgtcccgtacagcccgatcaaccggggttttctgggaggctgcatcaacgaatatacggtcttcgatgtaaacaacgacaaccgtcagaccctgccgcgtttccagccggaagcgatgcgtgcgaatacccgcattgtaaatgcgctgcaagctttcgggcgcacacggggcatgacctcggcacaggtggctcttggctggttgcttcagaaagtaccgtggatcgtaccgattccgggaacgacaaaactgtcgcatctggaagagaacctgcgcacactcgacttcaacatcagctccggggagtggaaagaactggaggatgccgtggctgctattcccgttgtcggagaccgttataatgccgagcagcagaagcaggtaggccga

SEQ ID NO: 12109 - DNA, 441 bp, Bacteroides fragilis
atggaaattatattgaaagaagacgtagtaaacttgggttataagaatgacatcgtaactgttaagtctggttatggtcgtaattacttgatccccactggaaaagctgttattgcttctccttctgcaaagaaaatgttggctgaagaactgaaacaacgtgctcacaaacttgagaaaatcaagaaagatgctgaagcagtggctgctaagttggaaggcgtatcattgactatcgctacaaaagttagctcaaccggtactatcttcggttctgttggtaacatccagatcgctgaggaattggctaaattgggtcacgagatcgacagaaagataatcgttgtaaaagacgctgtgaaagaagttggtgcttacaaagctatcgttaaactgcacaaagaagtttctgtagaaattcctttcgaagtagtagctgaa

SEQ ID NO: 12110 - DNA, 870 bp, Bacteroides fragilis
atgaaatttgccattttcggaaatacataccaagctaagaagtcctcacatgctgccaccctgttcaaattactcgagaaacatggagctgaaatctgcgtatgcagggagtttcatcgttttctgaagtccgatttaaaactgaacgttaaggcagatgatttgttcgatgaaaacaattttgatgccgacatggtgatcagcattggcggtgacggcacttttctgaaggcagcacgccgtgtaggcaataaaggaatccctattttaggcatcaataccggacgattagggtttctggcagatgtatctccggaagaaatggaagaaacgattgaagaggtttatcagaaccattatactgttgaggaacgaagtgtactccagttactttgtgacgataaacatttacaaaattcgccttatgctctcaatgaaatagccattctgaaacgagacagttcatcaatgatcagtatccgtacagcaatcaacggggcacatctcactacttatcaagcagacggtttgattattgctactccaacaggttctactgcctattcattaagcgtaggtggccctattatcgttccacactccaaaacgattgcaatcactcctgtcgccccacacagtttaaatgtaaggcctatagtaatctgtgatgactgggaaattactttagatgtagaaagccgtagtcataactttctggtagcaatagacggtagcagtgaaacctgtaaagagactactcgtctcactatccgtagagcagactatagcattaaggtggtgaaacgctttaaccacatctttttcgataccttgcgtaccaaaatgatgtggggggctgacagtagagtg

SEQ ID NO: 12111 - DNA, 2982 bp, Bacteroides fragilis
atgcaacggcaccaacaaaaacaacatgtatttttaataattttagttttgttacacacaatggtttgttttaatttaaaatttacatataattttgcattattaataaatatgatgttacttatgaaaaaaggtattttggggtgtaatattatatacttgtttatacttatttgcataggaattgccctccctatcaaatcgcaaaacaattacaaagtaaaacttacaggcactgtttatgagtacgaccacaacaacaagcgtttgcctttagaatttgcagctgtgtctattcctgaaattgcactagggacaacctctgatgaaaatggtagatacatactggaaaacgtacctactggtaaaattcgtatgcaaattcaatatttgggcaaagtctccattgacaccttaataaatgtaaataaggatttggttcttaattttacaatgaggaatgaggattttaagttgaaagaagttacagtaactgcaaccaacagccgttcaggcaaatccacatcttctcacatttcccgctctgctatggaccatatgcaagcgaccagtttatatgatgtaatgtcattgatgccaggtggaatttcacagaatcaagatatgagttcggcacaacagattaacatccgtcaagtttccagttccagtggtccggaagctccgatgaatgctatgggcaccgcaataattcgtgatggtgcccccatctcaaataatgctaatctatctgcgatgagccctacggtattaagtggtacggaaacacccgcttcattggccggaggtgcctcgccggctggtggaaccgatgttcgtagtatttctactgaaaatatagagtctatacaaatcgttcgtggtatcccttctgttgaatatggtgatctgacctcaggagcagtaattattaatacaaaagctggtcgtgagccgctacgtgtcaaagcaaaagccaatcccaatatctatcaggtgtctatgggaaccggttttgaacttggaaaaaagaaaggcgctttaaatgtaagtgcagattatgcttataatacgaataatccaatatccagttaccagcactatcagcgtgccacaacaaagttgctctattcaaatactttctttaataataagttacgtaccaattccagctttgattttatttatggtaaggatcaacgtgaacgtaatcctgatgatgaacaaactaaaacagcttcggaaggccgcgatataggttttactttgaataccaatggtacatggaatataaataagggctggttaaaaacactacgctatgtattgtcaggtacgtatatggataaagacagttattatgaaaccgtatacagttctgctacatctccttattccatgaccactacaaacggtgcggtacttagtaactttgcaggtcagcatatctatgatgccaatggtaatcaaattactaattttggaccggaagacataaatcattatgctgtttatctaccaagcagctatttgggacactatgagatcgatagtcgtgaagttaatttgtttgctaaagtgacgagttctctattcaaggcgagcggtcatgtaaacaaccgcatcttgattggtgcggatttccggagtgacggtaacgttggtaaaggaaaaacttatgacccaagtactcctccttatcgtagtcaatacggtcataattcatctttccgtccacgtaactataaggatattcctttcattaaccaatttggtgcatatgtggaagataatttcaaatggtccataagcggtacgcatgatttgaacattcaggctggtgtgcgttatgatcatacctcagtagtaggaggcattttctcgccacgtgtaaatgcatccattgatttgattccgaatctattaagtcttcagggaggttacggtattgctgcaaagatgccttctcttctctatttatatccagaaaatgcatattttgaatatatcaatataaatgagcttaccaatgaaaatattccggaaagccagcgcttgtttatgactaccacagaagttcggcaagtagataactcagatttgaagattgcccaaaatcataaagcagaagtcggttttaatttacgagtgggtaaaaccaatctgaatgtaatagcttataaggagcgtctgaaggatggttatgtaatgagccaaaccttcaacaccttcaatacatttatctacaatgaataccagcgcacagaaaacgggatagagcttagtagtagcctaccggtattgtctacttatgcaaaaccaactaataatttaaatatagaaactaaaggtttagaatttgatttgaatatcggacgtattgatgctatccgtacggccttccaaataaatggctcatggatgcgtactaagagttggcgtcagggttatagcttctatgacaatagcgaagatgctgcttcagcccgtaaaccggtggccatttattctcaagaaggcaatgcaagttacaaacaacaatttgtaacgactttacgtgccactcacaatatcccgcgtatcggttttgttgttacgatgacagcacaagctatttggcagcagtctaattggaatacatttggaaacgattctatacctgtgggctatttagcattggaagatgcgtctgtaaatatgtttcccaaggggaaatataccactacccagcaagtaaaggatgcaggatatggatatatgttgaataatgtaagtcataataatgctataaaagaatcatacagtccttatttttgttttaacttgaatgtaactaaagaaattagcaatatgctacgtgtttctttctttgccaacaatatgttcagaagttatccgcgcagagaatccaaacgtaatccgggttcatatattcaattgaataaccgatttttctttgggctggaattatcactcacttta

SEQ ID NO: 12112 - DNA, 2892 bp, Bacteroides fragilis
atgcacacactatttgagcacaaaagtaataataaaacggttaatacggtatttttttgtacttttaccatgaaaaaactgaaaaatatgaatcaaaacagcaaactattcctcttggatgcttatgctcttatctatcgggcgtactatgcgttcattaaaaatccccgcattaattccaagggttttaatacttcagccatactgggattcgtcaacaccctggaagaggtgctgaagaaagagacccccacccacattggagttgcattcgatccaccgggacccacattccgccacgaagcttttgaacagtacaaagctcaacgagaagaaactccggaagcaatccgtctttcggtacctattataaaagatattatcaaggcttaccgaatccccatcctggaggtagcgggatatgaagcggacgatgtaatcggaactctggcaacagaagccggcaatcagggtatcactacttatatgatgactcctgacaaggactatggtcagttggtaacggatcatgtatttatgtatcgccccaaatatggagacaaagaatttgaagttatgggggtagaacaagtaaaagctaaattcgatattcaatcaccggcacaagtgatagatatgctcggactgatgggcgactcttccgataatattccggggtgtccgggtgtgggagaaaaaactgcccaaaaattaattgccgagtttgggagtatagaaaatctgcttgaacataccgatcagttgaaaggagcactgaagacaaaagtcgagacgaatcgggaaatgattattttctccaaattcctggcaacaatcaaagtggatgtacctatccggctcgatatgaactcactcgtccgggaacaagcagatgaggacacgttgcgtaaaatatttgaagagctggaattccgcacattgatggaacggatattcaaaaaagaatcatcacccgcctcccctatcgccggtacattatttaatcaggaaaacggcccggttcaaggcaatctctttgaagaatttacgcccgatcatacgaatgaagaaaaaaaatcaaatctggaaagcttaaattcattaagctacgactaccaattaattgatacagaggagaaaagaaacgaaattattaaaaaactacttacatccgaaattcttgcgttagatacggaaaccaccggaacggatccaatggatgcagaattggttggaatgagttttagtattaccgaaaatcaggcattttacgttccggtacctgccgaacgggaagaggcaatcaaaatcgttcgggagttcgaacctgtcttcaaaaacgagaagtcactcaaggtcggtcagaatataaagtacgacatgctcgttctgcaaaactatgggattgaagtccgaggtaaactcttcgataccatggtagcacattatgtcctccaacccgaactccgtcataacatggattatctggccgaaatctatctgcattatcaaaccatacatattgaagagttaatagggccaaaaggcaaagggcagaaaaatatgcgcgacctctcccctcaagaagtttatctgtacgcctgcgaagatgcagacgttacactaaaacttaaaaatatactggaacaggaattaaagaaaaatgatgccgagaagttattctatgaaatcgaaatgcctctggtccctgttcttgtcaatatcgagagcaacggagtgcgtttagatacggaggctctgaaacaatcgtcggaacacttcactacgagactgcaaagtatcgaaaaagaaatttatactctcgccgaaggagaattcaacattgcatctcccaaacaggtaggagagatactttttgataaattgaaaatagtagagaaagctaaaaaaacaaaaaccggacagtacgtcacctcagaagaagtattggagagcttgcgaaataagcacgatatcatcggtaagattttggaataccggggacttaagaaactattaagtacttatatcgatgctctgccgcaattgatcaatcccaaaaccggacgtatacacacctcctttaaccagaccgttaccgcaacaggaagattgagttcaagtaaccctaacctgcagaatatcccgatccgggacgaagacggtaaagagatacgcaaagcttttattccggatgatggttgcagtttcttctccgccgactattcacagattgagctacgcataatggcacacctgagtgaagataaaaacatgatcgatgctttcctcagtggctatgatattcatgcggctacagctgccaagatttataaggtagatataaaagaggttaccgccgatatgcgccgtaaggccaagactgccaatttcggtattatctacggtatctccgtatttggcctggcggaacgcatgaatgtcgaccgcaaagaagccaaagagctgatagacggttattttgaaacctatccgcaagtaaaatcctatatggacaagagtatccaggtggcacgcgagcacggttatgtggaaacgattttccatcgcaaacgctttttaccggatattaactcccgtaatgccgtagtacgcggatacgcagagcgaaatgccatcaatgctccgatacagggaagcgcagctgacataatcaaagttgctatggcacgtatttatgaacgtttcaaagcagaaggcctgaaagcaaaaatgattttgcaagtacacgatgagctgaatttcagtgtaccggcaaaagagaaagaaatagtagagcaagtggttattgaggaaatggagaaagcctaccgtatgcatgttcccttaaaagcagattgcggatggggtacaaactggctggaggcacat

SEQ ID NO: 12113 - DNA, 471 bp, Bacteroides fragilis
atgttagttgaagctactttagaccattttgaatctttttatgttttaaaatgtgaaagaaccaatattgagtggactggattttctcaagctccttccaaggatcatttttataaatggtatattaaacaattacgtagtacgaaacggaacatttatttttttttgatagataataatttagccggatactgttacttagatactattgatgaatatactgttgaaatagcctatggtatatctgaactttattcaggaaaagggaaaggtactgagttaatagccgctatcatagatgttttagggaaaagaggagttaggagtgtggtcgcatgggtttctgaagcgaatataggtagctcaaaaatattattgaaaaatggttttataaaaaagtctcaaagtgaatataggcaacttcctttaataaggaatgctgcactattttatctttggcaaagagaaata

SEQ ID NO: 12114 - DNA, 1320 bp, Bacteroides fragilis
atgatggaagacttgttcagcctcatccgtattcccagtatcagtgcattgccggaacaccatgatgatatgctggcatgcgcacaacgctggacacaattgctactcaaggccggagcagacgaagccatcgttatgccttcgaaaggtaatccgattgtatttgggcaaaagatagtggatccgaatgctaaaacagtgttgatatacgctcattatgacgtgatgcctgccgagcccctcgacctgtggaagagccaaccgttcgaaccggaaatacgtgacggacatatttgggcgcgcggagccgacgatgataagggacaagcatttatccaggtgaaagcatttgaatatctcgtaaaatataacctgctggagaataacgtaaagtttatctttgagggagaagaagagattggttcaccaagcctggaagctttctgtgaagagcataaagaattactaaaagccgatgttatcttggtatcagataccagtatgttgggggccgaccttccttcactaaccaccggactgcgtggtctggcttactgggaaatcgaaataacaggtcctaaccgtgacctccattcgggacactttggtggagcggtagccaatccgatcaacgtactttgtggtatgttaagtaaggtaattgataccgacggacgtatcacaatacccggattctatgatgctgtagaagaagttccacaagcagaacgagaaatgattgcccacatcccttttaatgaagaaaaatataaggaagccatcggagtaaaagaacttttcggtgagaaaggatacagcactctcgaaagaaacagttgcaggccttcattcgacatttgtggtatttggggaggttacaccggggaaggttctaaaactgtactcccttccaaagcctatgccaaagtatcatgccgcctggttccccatcaagatcatcatgtgatctcaaaactttttgctgactacatccggcagatcgctcctgctacggtagaagtaaaagtgactgccatgcatggaggccagggatatgtatgtcccatatcactgcctgcttatcaggcagcggaaaaaggatttgaaattgctttcgggaaaaagccattggcagtacgccgaggaggaagtatacctattatatcaactttcgaacaggtgttaggtataaaaactgtattaatgggatttggcctagaatcggatgctatccattctcctaacgaaaacttctctttggatatattcagaaaaggaattgaagctgtagtagaattccatctgatatatggaaagaaa

SEQ ID NO: 12115 - DNA, 1020 bp, Bacteroides fragilis
atgggattattctcttttacacaagaaatagcaatggacctcggtacggccaatactatcattattaccggtggtaagattgtagtagatgagccttcggtggtggcccttgaccgtcggacagacaagatgattgctgtaggtgaaaaggccaagctgatgcacgaaaagacgcacgagaatattcgtaccatccgtccgttgcgcgacggagtgattgccgacttctatgcttgcgagcagatgatgcgcggactgatcaaacaggtaaatactcgtaaccgccttttctctccatcgcttcgtatggtgatcggagtgccttcgggtagtacggaagttgaacttcgtgctgtccgtgactctgccgaacatgccggcggacgtgatgtctatctggtatttgaacctatggctgcggctatcggtatcggtattgatgtagaagcaccggaaggaaacatgattgttgatataggtggtggttctaccgagattgctgtaatttcattgggaggtattgtttcgaacaactctattcgtatagcgggagatgatctgactgccgatattcaggaatacatgagccgtcagcataacgtgaaagtcagtgagcgtatggccgaacgtattaagataaatgtgggtgctgctttgaccgaactgggtgaggatgctcctgaagattatatcgttcacggaccgaaccgtatcactgcacttccgatggaagttccggtatgctaccaggaagtggcacactgtcttgagaaatcaatctcgaagatagaaacagctattctgagtgcgttagagaatacacctcctgaactgtatgccgatattgtgcataatggaatctatttggccggtggtggagcgctgcttcgtggcttggacaaacgtctgactgataagataaatattcctttccacattgcagaagacccgttgcatgcagtagctaaaggtacaggggttgcattgaagaatgtagaccgtttctcattcttgatgaga

SEQ ID NO: 12116 - DNA, 342 bp, Bacteroides fragilis
atgaatcaatacgaaaccgttttcattttaactcccgttttgtctgatgttcagatgaaggaagcggtagaaaaattcaaaggcattcttcaggctgaaggtgctgagattatcaatgaagaaaactggggactgaagaaactggcttatccaatccagaagaagtctacaggattctatcagttgattgagttcaatgcagaacctactgtaattgacaagttggaattaaatttccgtcgtgatgaacgtgtaatccgtttcttgactttcagaatggataaatacgctgcagaatatgctgcaaagagaagaagtgttaaatcaaacaaaaaggaggat

SEQ ID NO: 12117 - DNA, 1776 bp, Bacteroides fragilis
atggaactttttcagtcggtcagtacacatcaccgtttcaaaatcaaagtgaactaccgtccggacaaaccaagcgtgtgggctatcggtcccgatgtgatattcaagcaactgggtgagaaggtatccatcatcatgacccaccatgagagtggagaaaaaacggaatttcacggactgatttctgatattcatgttgaaggtttcgacggtaatcagggatttgtcatactggaagggggaagccctaccatcctgctggacagagaccccgctatggactgctatgtagagcaaaacctgaatacgatagtcagcgacatacttgataagagcggggtgaaaatgaatgtgaccaacaatcccaaacatacggacatcatcccttatgttgcccgctataaagagacaagctacggattcctatcccgtctgctccgctcttatggcgagtggttctattacaacggggaaacgctacagataggagacccagaaatagatacggaaagccgtgcagggtatgatgtagacctgacgggagtcagcatcaatgccactatccgttctctgaatcacagcacctatgagttcgaccccgtcaatgataagttctattacgactacagtggaacacctaagggtgctactcttggttcccgttcggctgagaaatgcagtgaacctatcttccctaccgaggcaaaactaccctcgataagacctgcgtatagcgcaatggatttggaacactacggggatgccggatttcaccgcaactattcccaattgtctcaaatcaaggcttcaagccgttactgcggcatacgactgggagaattggtggttacccgtgtacccgaaagtttcccaggagttaagattaccgatttgggacgttaccgcatcacggagattacccatacggtaaactataaaggacaatatagcaacaccttctgtggcgtaccgggtggtacgcccatcatgccgtggggagatgccgtgatgccggtagcctatccggaaatggcgagagtagtgagcaatgacgaccctaaaaatcagggacgtgtcaaagtacagttcatgtggcaggaggtagatggcggtgagagctactggatgcgagtgcaaagccccgatgcaggcaagagcgagcaagttgccaaaaaccgtggttttgtgtttatccccgagccgggtgatttggtgatggtaggcttcgaacaaggcaatccagaccgtccttatgtgacaggcagccttttctataaggctaattcagagggagcggcaacggataatactgttaagagtatgcggacacgcagcgggcatacgctggagttcaaggatgatgagggtggagactggggtattacccttcgagacattaacggaaatgttatacatctgaatagtaaagacaagaatattgatattactgccccagaaaccatcacattgacagcaaaaaatgtttgcatcaatactgaagagaatgtgcagattacagctaaaaagaacattgatatgacggttgaagcggatattaacagctcagctaaaggcaatctactattgcaggctgacaaagatgtattgactgctgcaaaaggaaatgtcggcatcgaggcaaaatcagatatcaacatggttggaaagaatattgcagtggagggtaattccaagattacactaaacgggggacagacacaagtcgccggacaacagacgacaatacaaggagctgccaataaaatagagattatg

SEQ ID NO: 12118 - DNA, 1005 bp, Bacteroides fragilis
atgaagtgttatttgatcggtttattgagtatgctgtccgtacatgccgctatggggcaacaggcgatagacgtgcattgtcataatatacttcccacattcaaggaactgttggacaggcatggggcaactttggaagagactttcccgcttccggattgggatgtggcttctcatctgaaattcatgaaagaggcgggtatcgaaacatccgtcctttcgatgcctgctccccaactgtggttcggcgatgtggaagagagtcgtcgtgcggtcaggcaatacaacgagacgtgctcccggctgaaagcggattatcccggcaaattcctcttctgtgcttcattgcccctgcccgatgtggacgcggctatcaaggaagcggtctatgtactcgacacgctcggcgcggacggcatcaagctggctaccaacagccggggacagtatgtgggcgatgcggcactcgatacgctgatgcaagttctgaacgagcaccatgccgtcgtgatgctgcatccgcacaaaccttcgcccgtaaacgatggaatcattgcaacagcaccgctagccgtttacgaatatccggccgagacgacccgtaccgtcgtcaatctgattgcgagaaatgttccggcccggtatccgaatctgaagttcgtcgtaccgcattgcggttcatttctgccgctggcccttccgcgcatgaaggcggtatatccggtcatggcggcgaaagggcttatggaaccgattgactgggatgccaatctgaaggcgttctattatgaccttgcaggaggtgcaacacctgaagttgttaaggctctgctgaccataaccacccccgaccggttgctttatggctcggattatccataccagccggcaacagttctgacaggaaatttgaaacaattgcgaacgtggataaccgatgatgccgagctcacaccttttgcggaaaaaatcctgcatgacaacgcccttaaactgtttagcaaa

SEQ ID NO: 12119 - DNA, 990 bp, Bacteroides fragilis
atgggtgcgtttgcacaacaacacgcaacaggcaaagacaaagagatgactgtggacttgaaccctgtagttgtaacaggtaccggtacacaccaaagactgaaaaacacaccggctccggtggaagtagtaactgccaatgaaataaagaaagccggcatcacagactttcagcaggcaatgaccatgctggttccttctctttcgttctctaccaactcaatgggatcttacctgatgatgaacggactctccaataaatatgtgctgattctgatcaacggacgtaaactgaccggagacaccgctaataatatcgacctctcacgcattgatatgagccgtgtgaaacgcatcgaagtgctggatggtgccggttcgtcactctatggctctgacgccattgccggtgtgatcaatatcatcaccaacgaaccgaaagaactgatgcaggtgacttctaccacccgatatgaagatcatcgccaactgacacaaatggtaaatgcggatattgcaacagaaaagtttggctcatatacctcctataaacacgaacaaagtgcaggatggcagaacagcgatctggcatatgttactgataaaaaaggtaatgtatcgacagtaccgaccgtatcagctacatccaatggtttccattctaatctggtaaaccagaaattcacgttcgaaccgactgaaaagctctcgttctatgctaacggaggatactattggaagttgacggaccgccctgtatacacagcggatatcgatggaggttccaagtatgatctacattacgaatcgtataacttcggtttgggaggacgttacaaaatcaacaagcgttcttccatccaactcgatttgatgaatgataactatatgcggaactacaaatatactgtagctgacgataaaaataagattcctattggagattacgccaataccaaagagcagcacttttatggagcagagctaaag

SEQ ID NO: 12120 - DNA, 363 bp, Bacteroides fragilis
atgatacaagtagaatccagacttacagtatgtgacaacagtggagctaaagaagccctgtgtatccgcgttttgggtggtacaggtcgtcgttacgcttcagtgggggatgttattgtcgtttctgtaaagagcgtcatcccttcaagtgatgttaaaaagggtgcagtgtcaaaagctttgatcgtacgtactaagaaagagatccgtcgtcccgatggttcttatatacgttttgatgataatgcttgcgtgttgttgaataatgcaggtgaaattagaggtagtcgtattttcggtcctgtagcaagagaacttcgtgctacaaacatgaaagttgtgtcacttgcgcctgaggtactt

SEQ ID NO: 12121 - DNA, 444 bp, Bacteroides fragilis
atgaacttaagtaatttaaaacctgcagaaggctctactaaaacaagaaaaagaatcggacgtggtccgggttctggcttaggaggtacttctacaagaggtcataaaggtgctaaatcaagatctggatactctaagaaaatcggttttgaaggtggtcagatgcctcttcaacgtcgagtacctaaatttggttttaagaacatcaatagaattgaatataaagctattaacttagaaacaatccagaaattagctgaagctaagaagttggaaaaagtaggtgttaatgactttattgaagctggattcatttcttcaagccagttggttaaagtattaggtaacggaactttgactgctaagctgagtgtagaagctcatgcattctctaagagtgcagttgctgctatcgaggctgctggtggaaatgtagtaaaactc

SEQ ID NO: 12122 - DNA, 1530 bp, Bacteroides fragilis
atgaaggatatggacatcgcagtggaacgcctgaacatggcgatgggaaagaaagagcgcattctgatttatggagattacgatgtggacggtaccacggctgtggcactggtctacaagttcattcaacagttctattcgaaccttgactattacatccctgaccgttataacgaaggatacggaatttccaaaaaaggagttgactacgccgctgaaaccggagtagggcttatcatcgtactggactgcggcattaaagccgtagaagagattgcgtatgccaaagagaagggaattgacttcatcatctgcgaccatcatgtaccggacgacatattgccccctgccgttgccatcctgaatgccaaacgactggataatacatacccatacactcatctttcgggatgtggcgtaggcttcaaattcatgcaggcttttgccatcagtaacggcattgagtttcatcacctgattccgttgctcgacctgaccgccgtaagcattgcatcggatattgtaccgatcatgggcgaaaaccgtatcctggcctatcatgggttgaaacagctgaacggcaatccgagcgtaggactgaaagcgattatcgatgtatgcggattatcggaaaaagaaattacggtgagcgacattgtattcaaaataggtccccgcatcaatgcttccggacgtatacagaacggaaaagaagcggtagacctgttgattgagaaagatttctcggcagcactcgagaaagccggacaaatcaaccaatacaacgaaacccggaaggatctggataaaagcatgacggaagaagccaataaaatcgtagccgaactggaaggcttggcagaccgtcgttcgatagtgctttacaatgaagactggcacaaaggagtgatcggaatcgttgcctcacgattaacggagatttactatcgtccggcagtcgtactgacccggacggatgatatggcaaccggttcggcacgttccgtatccggtttcgatgtttacaaagctatcgaacattgccgtgacttgctcgaaaacttcggagggcatacctatgctgccgggctatcgatgaaagtggaaaacgtacaggcattcaccgagagattcgaaagtttcgtgtcggaacatatactgccggaacagaccagcgcagtgatcgatatcgatgccgaaatagattttaaagatatcacgccgaagttcttcaatgaattgaaacgattcaacccgttcggtcccgacaaccagaaaccggtgttctgcacacatcacgtgtacgattatggaacaagcaaggtggtcggtcgcgatcaggaacacatcaaactggaactggtagacaacaaatcgaacaatgtgatgaacggcatcgccttcggacaaagttcgcacgtgagatatatcaaaaccaagcgatcatttgacatctgctataccattgaagagaacacccacaaacggggggaagtgcagttgcagattgaagatatcaaaccgatagag

SEQ ID NO: 12123 - DNA, 1383 bp, Bacteroides fragilis
atgctgaaacaaaaaactctgaaagagagcttttcactgagaggaaaaggtcttcacactggacttgacctgactgttacgtttaaccccgccccggataaccatggctacaaaatacagcgtacggatctggaagggcaacccattatcgatgccgtagccgacaatgtaggtgaaacgacaagagggaccgtgctgtcaaaaaatggagtaaaagtaagcacagttgaacatggaatggcagctctatatgccttgggcatcgataactgtctgatccaagtcaacggaccggaatttccgattctggacggaagtgcacaatattatgtacaagaaatagagaaagtaggaatcgaagaacaaaatgccgttaaagatttctatatcatcaaatcaaaaatagaattccgtgacgaggagacaggatcgtctatcatcgtacttcctgatgagaacttcagcctgaacgtattggtatcttacgattcaaccatcatccccaaccagtttgccacactggaggatatgaagaagttcaaagatgaaattgcccccagccgtacctttgtatttgtccgtgaaatcgagccactgttgtcggccggactcatcaagggtggcgatctggacaatgccatcgttatctacgaacgtgaaatgtcccaggaaaactatgacaagctggccgatgtcatgagagtccctcacatggatgccaagctgttgggatacattaaccacaaacctctggtatggcccaacgaatgtgcccgccataaattgttggatgtcatcggcgatcttgctctgatcggtaaacccattaaaggaagaatcattgctacgcgtcccggacacaccatcaataataaattcgcacgtcagatgcgcaaagaaattcgcctgcacgagatacaggcgcctacctatgattgcaaccgtgctccgattatggatgtgaaccgcatccgtgaactactcccccaccgttatccattccaattggtagataaggtgatcgaaattggtgccaactacattgttggtgtaaaaaacgtaacctccaacgaacccttctttcagggacacttccctcaggaacctgtgatgccaggtgtactgcaaattgaagcaatggctcaaatcggcggattactcgttctgaattcagtagatgagccggagcgttattctacttatttcatgaaaatcgatggtgtgaagttccgtcagaaggtagttccgggcgataccctgatattccgtgttgagttattggctcctatccgccggggcatttcaaccatgaaaggctatgctttcgttggtgaaaaagtagtctgtgaatgcgaattcatggctcaaatagtaaaaaacaaa

SEQ ID NO: 12124 - DNA, 618 bp, Bacteroides fragilis
gtgaagcttcttcttaaatactttcccgacttgacggaagagcaacgcaaacaattcgctgcgctttacgaactttacattgactggaattctaaaatcaacgtaatctcacgcaaggatatcgagaatctgtacgaacaccatgtgcttcattcgctgggtatcgcccgcatcatccgtttccgggccggcagcagtgtcatggatctcggtaccggaggaggattccccggaataccgttggccattctttttccggacacgaaattccatctggtggacagcatcggcaagaaagtacgtgtggcaaccgaggtagccaatgccatcggacttaaaaatgtcactttccgccatgcacgggccgaagaagagaaacaaacattcgacttcgttgtcagccgtgccgtgatgcccctggccgacctgataaagattatccggaaaaacatctcgcccaaacagcaaaatgctctccccaacggacttatctgcctgaaaggaggcgaactggaacacgaggcgatgccgtttaagcataagacaagtatgcataacctgaatgaagatttcgatgaggagttctttcaaaccaagaaagtggtatatgtaacgatt

SEQ ID NO: 12125 - DNA, 897 bp, Bacteroides fragilis
atgagtccactgaacttcactcacatcctgacacagacagtcgatgagctatcggaaagcgaatcatacaaaggactgtttcaccaacataaagacggtgagccattaccctcgccacgggtattgtgcgatgttatcgaattagcgcgttccattctctttcccggatattacggaaactcaacagtcaacagccggactatcaattaccacattggtgtcaatgtagaaaagctgttcaatctgctaacagagcagattctcgccggtttatgtttcggtaatggtgaccggtgcgatgaatgtaccgaggccaaacgtgaagaagcagcgcgcctggctgccaagtttatcagcaaactaccgcacttgcgccgtgtcctggctacagatgtggaagctgcttacaacggtgacccggctgcacaaagttttggtgaagtgatcttctgctatccggccatcaaagccatcagcaactatcgcatcgcccacgaacttctggaattgggtgtaccgcttatcccccgtatcatcaccgaaatggcacatagcgaaaccggtatcgacatacatccgggagcaagaatcggcacacatttcacgatcgaccatggaaccggtgtagtgattggtgcgacaagtatcatcggtaataatgtgaaactctatcagggagtgacattgggtgccagaagcttccccctggatgctgacggcaaacctattaaaggcattccacgtcatccgattctggaagataacgtgattgtatactccaatgccaccattctgggccggattaccatcgggcgtgatgcgaccgtaggcggtaacatctgggtgacagagaacataccggcaggggcaagaatcgtacagacaaaagcgaaaaaa

SEQ ID NO: 12126 - DNA, 1002 bp, Bacteroides fragilis
atgaaacactaccgactgtttttactattaataggattgttagttttggcctttctggcagatatcgccatcggaagcgttagcttgtctatacgtgacgtatggaatacttttatcggtagcaacgataaccttatctaccgggaaatcatcttgaaccaccgactccctaaagcactgacagccattttggcaggagcctcactctccgttgccggagtgttgatgcaaactctgtttcacaacccactggctggtcccgatgtgttgggagtaacttccggtgccagcttaggagtagccttactgactctcggcacctcttctcttccgttgtggctcattacaggttggggacaagtgactgctgctattattggagctataggggttttattattggttattattgtctctatcaaaattcctcaaaccatctcgttactgattataggtatgatgtttggtaactttgccggtgccatcgtgagtatcctgcaaagtatgagtaatccggataccctgaagctattcatcacctggacttttggaagtctttcttcagtaggctgggaacagatgagcgtgatggcacctgtcattgcctgtggaattctgactgcattactattacaaaaacaactcaacatcttgctgctgggaaaaaactatgccaacggattaggggtctccgttccccggctgcggctttggattatcctggctacagcactcctggcaggaacctccactgcttttaccggtcccatagcctttatcggcatcacgatgcctcacgtagcccgtggcttattcggcagccccaaccaccgcatcattcttccagcctccatgctctgtggtgccataacactgttagtctgcgatttaatttcccaactacccggaatgcaaggtaccctacctatcaacgcggttactgccttgtttggatcccctattatcgtatggatcatactacggaattcatatatcaataaa

SEQ ID NO: 12127 - DNA, 846 bp, Bacteroides fragilis
atgaatcgaatcgaaaaaaacaagacccaaaccgatcaggcgtggaacaaattacacaatcgcctggagacagacggactgttaccaacggtgacagaacgtcgttttgccacacgtccgaccgtatggatcggcatagcagccattgcagctattataagcctatgtgtttacctgcccacggtgttacggaccgaccgccatctttccggcggtgaactattagtcaaagcaaacaaagaagagagcatactggtcaccacgcttgaggatggttccgttgtctatctgtcagagcagacttcactggaatatcccaaacatttttctaaaaaaagaagagaagtgagtttgaaaggaaacgccctttttgacatagcgggcaatcgtgcacgtcctttcttcatcgaaaccggaaaagtacagatcgaggtgataggtaccgcctttcatgtgagaaacagtggcaactctccattcgaattagcagttcagagaggtgaggtaaaagttactcaaaagcagaatggccaggaaatacatgtcaaggccggagagaccgctactttattgggcgatgaatggcagttgactgtgaccgagaattccaaacagtttacccgatacatgcaaaatatgcgtttcaaagacgaacagttggatcacatcctgcatgccatcaaccttcgccagacggaaatacatctgcaaagttccccggaactggggaaacatgtactgacggtttcgttctcagaggattctcctgagaaaatggccgagctaatcggccttgcactgaacctgaagtgcacacgcaatcaaaacataatcaccctctccgag

SEQ ID NO: 12128 - DNA, 1167 bp, Bacteroides fragilis
atgaaacaagaaaaacaaaccgaactgttgcggactcagcagatgctgaatgaagtgaaccgcaagttgttaatgacgcttggggtcgcggaagtttttccatggaagtgggaattggcagagcatatggtatggtttgatgcccgtccgtcggacgatcctgcaggatgggagatttttcataatgattcgtttccggtttctatagcgcgtgtttatcaaggcatctataaggaagaccgccttcgggtgattgaagcttgtcgggggatactgaaaggcaaaatgaagaaagtggtggtcgaacttcgtttctgggctaaaaagagagagggattcgtattggagtggttggaaatgcatgccattcccgggaaagttgatgaaaatggcagactgttgactgtagagggatcgctgatgtccattaccaggcgaaaggttatggaagaagaactgaccgcagctaaagagaaagcagaagaagccaatcggttgaaatcggcattgattgctaatatgaaccatgagatacgtacaccgttgaatgcgattgtaggttttgcatctttgctctctatcatagatgacgaaaaagagcagcaggagtatatcggattgatacagagtaatacggagcatcttttgcgattgatgaacgatgttatcgatctctccaatattgagtcgggcgttatggacatagtcggttcggatgtagtcctcgattcattgatgaaagagatggaattgacgtatgttcccaaagcagaaacgaacaacctggttttggcttgggatcgggagcagtcgaatgctcacatctatacagatcgggacaggctgatacagatattggagcacttattggataatgctattaaatttacaacaaaggggaccgttcgttgggggtatcaagagaaagagaatggtcaaattaggttttatgtgacggataccggatgtggtattcctaacgataaaaaggaagtgatatttgaacgatttgtgaaacttgatagctttacccaagggcttggattgggattgtccctttgtaaaattattattgagcgtatgcacggaacgattggagtggaatcggaagttggagaaggatcgactttctggtttactatccccaatttatccgacaatcatatt

SEQ ID NO: 12129 - DNA, 1293 bp, Bacteroides fragilis
gtggatctattaaagaacatattcaaaggtgataaggtaatctggattattttcctttgcctctgcctcatctctatcatagaggtgtttagtgctgccagtacgctgacttataaaagtggcgaccactggggacccatcacacaacattccatcatcctgatggtaggtgcggtcgtagtggtcctgatgcacaacatcccttataagtggtttcaggtgtttccggttttcctctaccctatttcggtagtattgctggctttcgtaactttgatgggagtcatcacaggtgaccgtgtgaacggagccgcccgctggatgagttttatggggttacagttccagccttcagaactggccaagatggcagtaatcatcgcggtttctttcattctatccaaaaagcaggatgatgaaggggccaatccgaaagcttttaagtatatcatgatactgaccggactggtatgtatgcttatcgctcctgaaaacctttcgacagctatgctgttgttcggagtagtagtattgatgatgttcatcggacgtgttgcattcaagaagttagccatgttattgggcggtctggcattggttggctgtctgggagcagtatttttgctggccataccgaaggataccgacatcccgttcctccaccggtttgacacttggaaaagtcgtattaccaactttacggagaaagaagaagttccggcagccaaattcgatattgacaaagatgcccagatagctcatgcacgcattgccatcgctaccagtaacgtgataggtaaggcaccgggaaattccattcagcgtgacttcctgagccaggcattctccgatttcatctttgccattatcattgaagagttggggctggtaggaggcgcctttgtagtcatactctacatctggctattggtccggacaggccgaatcgcccaaaagtgcgaacgtacattcccggcattcctcgtcatgggtattgccttgatgttggtatcacaagccatattgaacatgatggtagccgtcggactgtttcctgtaacaggacaacctttaccgctaatcagtaaaggaggtacaagtacactgatcaactgtgcctacatcggcatgatactgagtgtcagccgctataccgcttatctggaagagaaaaaagaaaatcctgctcctctgctcacccagagtgaaggaaatgaggcgattgcaagcgaggcacagactgcggccgaacctacagcagaggttttaaacagtgatgctaaatttgaagag

SEQ ID NO: 12130 - DNA, 516 bp, Bacteroides fragilis
atggaaaatgttattcagatacaatattatcaatcgccatgtggagaactgatattgggggcatatcgggaaaaactttgcttatgtgattggaagatagaagaacgcaggatcatcatcgacagaagaatacaaaaagagttgcaagcttcttataaggagggcatatctgaagtaatcacacgaacgatcggtcaactggatgaatattttgccggacgaagaactacattcgatattcctttgcttcttgtaggtactgattttcagaaaactgtttggaatgaactgttgaacattccttatggaaaaacaatctcttatgcagggttgtctcaaaagttggggaatcctaaagctatccgtgccatagcttccgccaacggagcgaaccctatctcgatacttgttccttgtcatcgtgtgatcggcagtgaccgtaaattagtagggtatggcggtgggctgcctgctaagaagatcttgcttgacttggagtcttccgataggttattc

SEQ ID NO: 12131 - DNA, 1242 bp, Bacteroides fragilis
ttagttgcaatcgtaggacgacccaatgtgggcaagtctaccttatttaatcgtttgacgaagacccgtcaggcaattgtgaacgatgaagcgggtactacccgtgataggcagtatggtaaatccgaatggttaggacgggagttttctgttgttgataccggtggatgggtggtgaactctgacgatatattcgaagaggaaatacgcaagcaggtattgatggcagtggacgaggcggacgtaattctgtttgtagtggatgtgacaaacggagtgacagatttggatatgcaggtagccgctatattgcgtcgggccaagagtccggttattatggtagccaataagactgataaccatgagctacgatacaatgcttctgagttttatcggttaggactgggcgatccgtattgtatttctgcgattagtggtagtggtacgggtgatctgatggatttgattgttagtaaattcaagaaagaatctgatgagattctggatgaagatatcccacgttttgcagtggtaggacgtcccaatgccggaaagtcatctatcgtgaatgcttttatcggtgaagaacgtaacattgttacggaaatagccggaacaacccgtgactcaatttatactcgttacaataagttcggtttcgatttctacttggtagatacggccggcattcgtaaaaagaataaagtgaacgaggatctggagtattattctgtagttcgttccattcgtgctatcgagggagccgatgtatgtattttgatggtggatgcgacccgtggtatagaaagtcaagacttaaatatcttttcgttgattcagaaaaactcgaaagggttggtggtagtcgtcaacaaatgggatcttgtagaaaacaagactgataaagtcatgaagactttcgaagaagccattcgttcacgttttgctccttttgttgattttcctatagtatttgcgtcggcattgacaaagcagagaatcctcaaagtgcttgaagaagcacgcaaggtttatgagaatcgaatgattaaaatccctacagcccgcttgaatgaagagatgcttccgttgatcgaggcttatccgcctcctgcaactaagggaaaatacatcaaaattaaatatgtcactcagttgcctaatacgcaagtaccttcgtttgtctttttcgccaatctgccgcagtatgtgaaagagccttatagaaggttcctggaaaac

SEQ ID NO: 12132 - DNA, 234 bp, Bacteroides fragilis
atgtctgaaattgcatcaagagtgaaagcgattatcgtcgataaattgggcgtagaagaatcagaagttacagaaacagcaagcttcactaacgacctgggagctgattctcttgacactgtagaacttatcatggaattcgaaaaagaattcggtatctctattcctgatgaccaagctgaaaagattggcacagtacaggatgctgtagcttacatcgaagaacacgctaag

SEQ ID NO: 12133 - DNA, 459 bp, Bacteroides fragilis
gatgaagaaaacgaagcccggaaaaagaaacggggtgccagtaccatcagccagcaggcagcgaaaagcgtctttctttgccgagaatcttcgtggatacgaaaaggatttgaggtctactttacatttctgattgaaactggctggtcgaaagaacggattatggaagtatatctaaactccatcgagatgggtaaaggtatttacggtgctcaggcaaccgctaaatataaatttaaaacgacagctgccaaactgacccggggacagtgtgccctgatcgcagcaactttaccaaatccaatacgattcgactcggcacacccctcaccttatatcaaacgacgccaaggacaaattctgcgactgatgaatctggttccgaagttccctcctgttgataaggaaaaagcgaaaggacaagatacaaaaaaacaaaagaataagaaaaagaagaaa

SEQ ID NO: 12134 - DNA, 3978 bp, Bacteroides fragilis
ttgagacaattttccaatagagctggtctttcaaatagtgctattctctctcttcatcaggatgatcggggtatcatttggatcggctcttgcgatggcatgaatatctttgatggaaccgacatacatttgtataccccaataaactcttccaaaaccttactttccggaaacttgataaatcaaatcatcgaatcggagaaggatatattatgggtgcagactaattatggattgaatcgcttagataccaagcaacagaccagccagagtttcactgaattcaaagggcaatactttatggctaacaataaggatgacatgctttttattctgaaagatgatggctatctttattattatcagcgagaagcacaatctttcaatagattggaaattcccaatcttgaatttagccatgtactctctatgactgtggattcaaacgatattttatggatatttacctccaatgaagagactcaaagttatcgtattgagaatacaaaacaggggctgatattaacccgtaagaatctttttacgcattcgtgtaaattataccatgcctttgccgagaaagatatggcttactttattgacgaaacctacgctctttacgaatatgattttaataaccggcaagcatactatatagctgacctaagaggtcagattgaagtgcatggggaagtatcttccatcatcaagcaaaaaaacgattactacatcggtttcaaaaacagtggtctcattgttctaaaatatatgtcctctcaaaagatgaaatatcagatacagaaaacagaaatacattccggtattttctgtctgatgaaagataaatttcaagatattgtatggataggaacagacggacaaggtgtatacatgtattataatgacaccttttctattaccaatactcttttagacactcctgtatatcaaataagtaatccggttagggctctttactacgatcaggagcaaacgctttggataggaaccaaaggaagtgggatactccgcattaaaaagtatactccggataacagtatgcctatgtcgtctgatcggattacaccatataatagtgcgctggcagataattccgtctattgttttgctcccggatgcaaagataaattgtggatcggaaccgaaaatggaattaattattattcgtacttaagcaggcaattaaaagaactgcctatcattgccaatggagaaaaagtgaagtatgtgcattctataaaacaaccgaatgatacgaccttatgggtatctacggtaggtgaaggcattgtaaaagttatctttgatgcttctactgctactcctactgtaaaatctgcttcccgtactgttattgataacgggcgtatggcttcgaactatttctttacttcttaccgggaaaacgactccatactttggtttggcaatcgtggttgtggtgcataccgcatgaatgtagagacaggggaaatgattccgcatcgttttgacagtattgtaagcagtcagacagctaacgacatttttgctatttacaaaaacgcaaaaggttattggttaggaactagctcggggttgttgcatcttgaacaagatgattccttatatacgaaagcggacttatttttaaataacactgtacacggagttttagaggaccaccaaggcgatctttggttgagtaccaaccagggattgatacgcttcaaccccgagactcgtacagggcaaacctataacagtggaaatggattggaaatcaccgagttcagtgatggtgctttctataaagatgtcgtttcggaaacactgttttttggaggtacaaatggttttatttccattcagacaaatgactgtatcaccgaagagtatatgccgcaaatcaccctgaaaggactgtctatctttggcaaagaacacaatattcataagtttctttatgaaaaggaaggtaaaacaattcttcaactggattacagtcaaaacttctttcagctaaattttatggctattgattacatcaatggcaacaactattctttttattataagcttgaagaaatgagcaaccaatggatagaaaacggaacatccaccagcgctattttctctaatcttgctccgggtgaatattctttattagtaaaatacaaaaacaatataaacgggcaagaaagccaaacacaatccgtcattatccgtatcactccgccgtggtatctcagtccgctggcctatatggtatatttcattctatttgcactgttgtgcactgcagggatatataggctcatttatatataccgtcgcaaacaacaccgtatgttggacaagatgaaccgggagaagaaagaagaaatctacgaatcaaaattgcgttttttcactaatatcactcatgaattctgtacgccactgaccttgatttatggtccttgtgagaagatacttgccaatccggagattgacgcatacactcagaagtatgcaaagatgatacaacaaaatactgaaaaactgaataatctgattttagagttacttgaatttcgcagattggaaactggcaataaagtactttctattcaacagttatccgtgtcggaaaaggttagaagcatagcggaatctttcgaagaactggctgaaaataaagaaatgaattatcagttgcatatttctccgggcattgaatggaatacggatatcagttgctttaataagattgtcagcaatttaatatccaacgcttttaagtacacgcccgacaaaggaattatcacaatagagttgaaagtggaaaaccagtcgttaattttttgtatatccaattctggaaaagggatagccaaagaaaatttatccaaaatattcgatcgttataaaatattggattctgttgagatgaacggtaagaattctcgtacaggacttggattagctatttgtaagagcatgattacgcagttgaatggggaaatcagcgtaaatagtgttctctatgaaatgacaacattcaccgttaccttgcccaatcttcctataactgaacgggaaactacacaaactacttatgaaaccggactattacatacggctacggaggaacctattgttttagaaaagactgccatagagtttgatacgggtaaacggaccatcatggttattgatgatgataattccatgttatggttcgtttcagaactttttgcagacaaatacaatgtgtgctcttttgataatgcaaaagatgcattgagcagtctggagcagaagcaacccgacttaattatttcagacgtcatgatgcccggtatcgatggactgtcgtttgctcagaagataaagcaacacaaattatggagtcacattccactgatcctcctttccgccctacatcacgaagacgatcaggtaaagggcatcgagtcaggagcagaagcctatgttaccaaaccttttaacgtgaagtatctggagaaaatcgtttatcgtctcatcaaacgggaggcagacttgaaagaatattatagctctattttcagttccttcactatggaacatggcaattgtatacataaagaagatcaggagttcctggataaaatgctcgagattatagagaagaatattgcaaatcccgatttacaagtggaattgctaagtagtgagatggggtatagtacccgccagttctaccggaaactaaaaccgataaccgaacagtctcctgctgatatcattaaggaataccgtctaacaatggcagaacgactgttaatagccaagaatcttactattgaagagattatggaccagaccggattcaacaaccgcggaacattctataaactgttctcgaaaaggtatggcatgcctccgcgacagtatagagagcaacaaaaggaaaatgtaaagaaggagaagatatcgggcatatcagacgaa

SEQ ID NO: 12135 - DNA, 2004 bp, Bacteroides fragilis
atgcgatatataatcctcttagtcttgtgcgcctggaccggaatagcattggccatagattaccatgcaaaagacagtcttttattacaattaaaacaaacgacaatagctgcagaacgaatcaatatttaccgaaacctggcggacatttgttttgaaacccctgaagaaaagacatatttgctcaacatgtatagagaagcccaaaaggctggcgatacatcgggtatgctcaatgccttaaatgatcttgtatgcggagagacaaaagaatatcgtatggattcagcatatcattatatggaactgataaaagcaatccgggagccccaagaaacagcccctgtattggcttaccttcaaatgcgatttttcgatacactatgcagccacaatgaaacagaagaagctatcacaaaagaattgcaatttatagaagaaaagaaatctgatgaagcatcactttacagcaaaatcgcccaagcttacatcaccggtggtagccttcattacaatgacatgataaaggaggcactcccctatctggaaacagcaatgaacttatctaagcaattgcctccggaaaagcaaatcttatttgcatcgatcattgtttggaaattatccaatacatacagtatgctgaataaatgtgattcagccatccggattttagatgagaatctgcaaacccaacaacaatattacaaagatcactatcaaacacaacgtcctttttataatatggcgatacacgaattacgcttttatacatctctattgactaatgccatttcggaagctcccgaaaaaatggattattactggcaacaaatagttaaattgaacgaaaagctaaccaatccgtacgatcgatataactattttctatcgatggataattattatctgaatcaaaagccccaaccccattatgaaaaagcattgatggctaatgatagtctgatacaaattgcacaagaaataatcccaaacaatctaccgggattatacgacattcaatcacaaacctacgaagccatgggtaacttcaaagaggcattggcatacctcagaatagcgactcaatataaagattcgctgactactgaaaatatgcaaaagcaattgggtgaactccagataaaatatgaagtgaataagttgaacaatgaaaagtcacaacttgaaattaaaaacaaacgtattctggtgatatgcctgtctatcattctgatcattgtaatctttgtctgtctgtatttatatcacgacctgaaaaaagagaaaaagatgaagtttcatctccggaacctcaagcaaaaagccgaagaaagtgaaaagatgaagacagctttcataaactctatttgccacgagatacgtacgccactcaattcgattgtaggtttctccgacttgatattcaatgatgagatagataaagaaacccgtgaaggtttttcacaagagatccagaaaagtacaattctacttacttcattaatcgataatatgcttgaaatatccagtctggatgtatcacaagagaagttaccttgcaaagaagcgaatcttaattctatctgtatacaagagatgacattattaaatcggtctcataaacccgatatagactatcggaccgacttgccggaacaccccatcatactgaccacacacgagaaatatttatcattagtcatagagcatctattgaacaatgcaaataagttcactgaaaaaggcattatcaccctccattgtcacatcgacgaagcacgccaacaagttcatataagcgtaacagataccggatgtggtataccggcagacaaacataaggaggttttcgaacgattctccaagctcaatgcattcactccgggtaacggattgggactttatttgtgccaactgatcatccgcagattgtccggaaagataagcattgacccaacatatacaggaggtaccagaataacagtgattttacctgttcaa

SEQ ID NO: 12136 - DNA, 1377 bp, Bacteroides fragilis
atgagagcgtcttcttataatatatctgtaaatgtagataaaaaaaagaatctatacgttattttaaatggatatacacgtgcccttgacattgtgaataaaagcgtttatgactttcttaaaaataatggaaatttgggacatgtgtcagaagatactaaaaataaattaataaaaagaggatacttaacttctctcacacacagtgaagaaatacaactcgtgaaacatttgctcgataaggctcataaggatatgcgctttaaaaaatataattttcatttcatactttcatatgattgtaatttacgttgtatttattgttacgagaatcccattttaaacggttcacattgtttacctaaagccaagatttctaaagaatatattgacagagcctttgagataatatcagaaaaaataaaagatggctcatgttctagaacgattgctttatatggaggagagccattccttgcagacaattatgatatgatttgctatatagtgaaaaaagggaaagaaaataaatgtaatttttctgtaacaaccaatggctatgatattgataaatatcttgattttttgaaagataataagattttctcttttcaaataaccttagatggtgtagaggatgttcagaatgaacgaaagccacattataaaaacaatgattcttttacaaagatcacggagaatattgatgctttattaaaattaggctttcctgttgcagttagaataaatacagattcttatacaattagtcgacttgacgagttgttcttgttctttaaacaaaaagggtggtatcgctaccggacatttgctccatattgcgctttattacgtaaggacattgaggagaattcaatgtttgaaactccattctctcaaatagacttagtaaataccttttatgaaaagaaaaaactcggaaagttagatgaaaaagcagagtgccagaattatgggacatataatattctgaaatctttgttattaggtaaaccattggcttataaaggagctttttgtggatcgcaaacaggtaatattatttttgatccacttggagatatctatccttgttgggatgtagtaggtatatctaaatataagataggacgttatattcctgactttcatcttgaagatgatagacttaaattttggttttatatgaatgtcagtgaatccaattgctgcaagtgtaaatatgccttattttgcggaggtggctgtattataggaagtttgaggaaaaatggaaaagtaaaacctggaaattgcaataattatccacaacttttcattcgtatgattaagattatctatgatgaatatataagaaaggagataagttgtgataaa

SEQ ID NO: 12137 - DNA, 2145 bp, Bacteroides fragilis
atgagaaaagattttaaaaacttagatatctacgcagcattccagcccgctaacggtgcggaatggcaaaaggctaacggaatcgaagccaactggaagactccggaacacatctgcgtaaagcctgtttataccaaagaagaccttgaaggaatggaacacctggactatgctgccggtcttcctccctatttgcgtggtccgtattcagtgatgtatactcttcgtccctggactatccgccagtatgccggattctctacagctgaagagtcaaatgctttctatcgccgtaacttggcttccggacagaaaggtctgtcggttgcgttcgacttggctacacaccgcggctatgaccccgaccacgaacgtgtggtaggtgatgtgggtaaggccggtgtatccatctgttcactcgagaatatgaaagtcttgtttgatggtatccctttgaacaagatgtccgtatctatgactatgaacggtgctgtactcccgatcatggcattctatatcaatgccggactggaacaaggagctaaactcgaggagatggccggtacgatccagaatgatattttgaaagaatttatggtgcgtaatacttatatttatccacctgcattctcaatgaaaatcatctctgatatttttgaatatacctcacagaagatgccgaagttcaactctatctctatctccggttatcatatgcaggaggctggtgcgacagccgatatcgaattggcttacacattggctgacggtttggaatatctccgtgcaggtgttgccgcaggtatcgatattgatgcttttgctccgcgtctctctttcttctgggccattggaacgaatcactttatggaaattgccaaaatgcgtgcagcacgtatgttatgggcgaagattgtgaagcaattcaatccgaagaacccgaaatctctagcactgcgtacgcactctcagacttccggttggtcattgacagaacaagatccgttcaacaatgtgggacgtacttgtatcgaagccatggctgctgcactgggacatacccagtcgttgcataccaatgctctcgatgaagctattgctttgccgacagacttttctgcacgtattgcccgtaatactcagatctatattcaggaagagacttatatctgcaagaacgtagacccgtggggtggatcttattatgtggaatctctgaccaatgaattggctcacagtgcttgggaacatattcaggaaatcgagaagttgggaggtatggcaaaggctatcgagaccggtattccgaaaatgcgtatcgaagaagcggctgcccgtgcacaagcacgtatcgacagcggatcgcagaccattgtcggtgtaaataagtatcgtcttgaaaaagaagatccgattgatattcttgaagtagacaatactgctgttcgtaaagagcagatcgagaacctgaagcgtttgaaagaaggtcgtaatcaggccgaagtggacaaggcactggccgctatcactgaatgtgtgaaaaccggtaagggcaatttgctcgagttggcggtagaagctgcccgtgttcgtgctacattgggtgaaatctcgtatgcttgcgaacaaatagtaggacgttataaagcaataatcagaactatatcaggcgtgtattcatcagaaagcaaaggcgacgctgactttaagcgcgcttgcgaactcactgagaagtttgcaaagaaagagggacgtcaaccccgtattatggttgcaaagatgggccaggacggtcacgatcgtggtgccaaagtagtagctaccggatatgccgattgtggcttcgacgtggatatgggaccgttgttccagactcctgccgaagcagctcgtgaggcggtagagaatgatgttcatgtagtgggagtttcttcgttagctgccggacacaagaccttggttccgcagattattgaagaactgaaaaaactgggacgtgaagatatcgtagtaattgccggtggtgtaatacctgctcaggattacgatttcttgtataaagctggtgtggctgctatttttggtccgggtactccggtggccaaggctgcttgtcagattctggaaatcctgatggatgaggat

SEQ ID NO: 12138 - DNA, 1320 bp, Bacteroides fragilis
atgaaaaagattgtgttattatcgctgtttgccctgtgcctcccactgcttgtgatggcgcaaagcaataatgacgacctttatttcgtaccttctaaggaaaaaaagcaggaagccaaaaagactcctgtgaagaaggaaccggaaaaaaaagttgttaccacgaacatttatacgtctccgggtactacggtagtagttcaggaccgtaaaggaaacaaacgcgatatgcgtgatgtggatgagtataaccgccgttacgatgccaaagataacgagttcgcaatggaggacgatacattatacgtaaaagaaaaagctgtctccgatccggaaggtgaatgggtgaacgggttcaatggctcacaggatgactacgagtacgctgaacgcatcattcgtttccgtaatccccgttttgcggtaagcattagcagcccgctttactgggacattgtttatggaaccaattcctgggattggaatgtttatacagacggtttctatgcttatgcattcccgacatttaccaaccgcttatggtgggattggcgttacaactcttatggttccggatggggctggggatggggctggtcttcaccttattatgcttggggtggctattatcccggttattggggtggctattggggtggttactggggcggctggtatggcggcggctactggggacaccatcatcactatcatcccggatggggtggcggaggacattattgggcgagtcataatacttataccaaccgccgttcttatggtccttctcgtgttagcacctcttccagagtaaacgcctcttctatacggcgtacagattcttatactcgttcaggtaataatatctctccttcgcgtggtggtgatagccgtatgaattatggctcacgtagagtaataagtgttcgagatacagaacgtcctgatgcaacaacccgcacggatgcttcttcatcaagaagatctacttatactcgtccaagtagtacacgtagtagctctagttataatagtaacgttcatccgaatcgttctacaaactctggaacatattcaagaagtactagtaggtcttcttctacttatactcgtggaagttcgacaacaacaccttctcgttcttattcaaatgaaggtacccgtcgttcttatggctcttcttcatcttctcgaagctattcctcaggtagttctactcgctctagtagtagttattcttccggtagcagaagtagtggtagcagttctcgttcgacaagtggtggaggtagctacagcagaagtagcggtggtcgaaga

SEQ ID NO: 12139 - DNA, 582 bp, Bacteroides fragilis
atgaaacgtaaacttgttttcgcaaccaataatgcacataagctggaagaagtatctgctatcttaggggataaagtcgagctactcagcctgaatgacatcaattgtcatacagatattccggagacagcagagactcttgaaggcaatgcatacctcaaatcatcttttatttaccggaactacggattaaactgctttgccgatgacacgggactggaagttgaatcactgggaggtgctccgggtgtctattcggcccgttatgccggtggagaaggacacaatgcggaagccaacatgttgaaactcctccacgaactggaaggaaaagacaaccgtagagcgcagttccgtacggctatttcgctcattctggatgaaaaggagtatctcttcgaaggaatcataaaaggcgaaataatcaaagaaaaaagaggtgattccggattcggatacgatccggtattcgttcctgaaggatacgaccggacctttgccgaattaggtaatgaaattaaaaatcaaatcagtcatcgtgctttggctgtgaacaaactatgtgaatttcttcgttcaatc

SEQ ID NO: 12140 - DNA, 270 bp, Bacteroides fragilis
atggcacaacaagttcaatcagaaatcagatatttaactccgccttcagtagacgttaaaaagaaaaaatactgccgtttcaaaaaaagcggtatcaagtatatcgactacaaagatcctgaattcttgaagaaattcttgaatgaacaaggtaagatccttccgcgccgtatcaccggtacttctttgaagttccagcgtcgtattgcgcaggctgtaaagagagcacgtcacctggcgttacttccatttgtaactgacatgatgaaa

SEQ ID NO: 12141 - DNA, 1035 bp, Bacteroides fragilis
atgaaaaacacattcctgttaacattcgcactgatactcctggcaggcagccccctgaaagcgcaggagaaagaagaggctgctacactgaataaagtggtcaacacactgaaagagcgaatcactctggccggatacgcgcagttgggatatacctatgacgatgcagcaaaaaaaatgaatacgttcgacatcaaacgaatcattttcatggctcacggaaagatcacggaccgctggacctgtgattttatgtacgacttttacaacggcggcatgctgctcgaagtttacaccgattaccggattctacccgggctgaaagtgcgtatcggcgaatttaaggttccttataccatcgaaaatgaattgtcgcccactaccgtagaactgatcaactgctattctcagtcagtctgctatctggcaggggtgagcggcagtgatgtcgcctgtggcatgacatcgggacgcgacatcggggccatggttcatggaggcctgctgaatgatctgctatgctacaaactagccataatgaatggacaaggacttaacatcaaggataaaaacaatcaaaaagatatcatcggcaacctgatggtgaatcccctgaaatggctgtcggtgggtggttcgtttatcaaagggaccggacacgccattgccgactccgaaataaccggcatccgggcaggagaaaactataccaaaaatcgctggagcataggaggcatcatcacgacaacaccgttcagcctccgttccgaatatctggccggaaaggatggaggcgtgaagagtgatggtttttatgccaccggatgctaccggatgctacgcaatttcgaccttgtggcttcgtatgactatttcaatgcaaacaaagccgtcagtaggaaacagaccaattatatagccggactgcaatattggttctatcccaagtgcaggctgcaagcacaatacactttccgcgaccggaataaaggcaaagacagcaatctgtttcaggcgcaggtacaggtaagattc

SEQ ID NO: 12142 - DNA, 483 bp, Bacteroides fragilis
atgagacataataagaaattcaatcatttaggtcgtactgcttctcacagaagtgctatgttatctaacatggcttgttctttgatcaagcacaaaagaatcactacgactgtagcaaaggcgaaagctctgaagaaattcgttgagcctttgatcacaaagtctaaagaagacactacaaactctcgtcgtgttgtatttagcaacttgcaggataaactcgctgtaacagaattgttcaaggaaatctctgtgaagattgctgaccgtccgggtggttatactcgtatcatcaagactggaaaccgtctgggtgacaacgctgaaatgtgcttcattgaactcgttgactacaacgaaaacatggctaaagagaaagttgctaagaaagcaactcgtactcgtcgttcaaagaaaactactgaagctgctcctgctgccgaagtacctgcaactgaagaaccgaaagctgaatcagcagaa

SEQ ID NO: 12143 - DNA, 1038 bp, Bacteroides fragilis
atgaaagaagaaaaatacatgaggcgttgcatccaactggcaaaaaacggtctttgcaacgtatctcccaatccaatggtaggagctgtcatcgtatgtgaaggacaaataatcggtgaaggctatcacatccgttgcggagaagcacatgccgaagtcaatgcgatccgctctgtaaaggatccgtctttactgaaacacagtactatatatgtaagtctcgagccttgctcccaccatggaaaaactcccccatgcgctgatttaatcatagagaaacaaattcctaggattgtaatcggatgccaagacccattttccaaagtagcaggcaaaggaatccaaaagttacgggatgccggatgcgaagtcattgtcggagttctggaaacggaatgtcgcgaacttatacggaaatttatcactttccatacccttcaccgcccttacatcgttttgaaatgggcagaatcagccgatggtttcatcgacctggaacgtacggaaggacaacctgtcatattatcgactcctctcacttccatgctggtacacaaaaaaagagcagagtcggacgctatcatggtcggtacgcgaaccgcactactggacaatccggcactcacggtacgcaactggtacggacacaatccggtgcgaatagtgatggaccgtaatcattcactccctcaaacctcccatttgtcggataacagcgtatctacgctcgtttttacggaacatccccgtgccggaaaagaaaacctggaatacatcacactcaattaccagacagatattctgccacaaatattgtctgccctctatcaacgcaacctacagtcgctgatgatagaaggaggaaggattcttctggagtcatttatccgttccggaatatgggatgaagtcatcatagaaaagagcgataaactgctttattccggtgttaaagcacctgaaataagcgataaaattagttattcggaagaaaaacatttctgtacgaccttcaggcattacttgaagagaaatacc

SEQ ID NO: 12144 - DNA, 1803 bp, Bacteroides fragilis
atgatacagaccctcaaaacttatttcggttatgatagcttccgtcctttgcaggaagagatcatccacaacctgataagtaaaaaagactcactggtattgatgcctacggggggaggcaaatcaatctgctatcagcttccggctctgcttatggaaggcacagccattgttatttcgccccttatttcactgatgaaggatcaggtagaaactctacgtgccaacggaataccagcaggtgcactaaacagcagcaatgacgaaaccgaaaatgccaacttacgcagagcctgcatctcaggacaacttaagctcctctacatctcgcccgagaaattactgtctgaagccgactatctgctgagagacatgactctctcactgtttgcagtggacgaggcccactgtatttcacaatgggggcacgacttccgcccggaatatgcccggatgggattcttacgcaaccagttccccaatgtgcctatgatcgccctgactgctacggcagataaaattaccagggaggatatcgtccgccagttgcaattgagacaaccgcaaatatttatttcatcgttcgaccgccctaacctgagcctgtctgtaaaaagaggctatcaacccaaggagaaaagtaaagcgatcatagatttcattacccgtcacaggggggaaagcggaatcgtctactgcatgagccgtagtaagaccgaaacagtggcacagatgctgcaaaagcacggcatccgttgcggtgtgtatcatgccggattgtccgcccggcaacgggacgagacacaggacgacttcatcaacgaccggatagaggtggtatgtgccactatcgctttcggaatgggtatcgacaaatcaaatgtgcgctgggtgatacattataacctacctaaaagcatcgaaagcttttatcaggaaatcggccgtgccggacgcgacggcatggcaagcgacactatcctgttctactcattgggtgacttgattctactgacaaagtttgcaacggagagtaaccaacagaatatcaatctggaaaaattaaaccggatgcaacaatatgccgaatccgacatctgccggcggcgtatcctcttaagttatttcggcgaaacgactacggaagattgtggcaactgtgatgtatgccgaaatccacccgagcggttcgacggcaccatcatcgtccagaaagccttaagtgccattgcccgcaccaaccagcaggtaagcatcactctcctgatagacattctgaggggaaacccaacgactgaaatcacagaaaaagcatatacagaattgaaaacgttcggagccggaagagacatccccgcacgtgactggcaggattatctgttgcaaatgctgcaaatgggttacttcgagatagcctacaacgaaaacaatcacctgaaaataacagggagcggcagtgacgttcttttcggccgtaaaaaggcaatgctggttgtcatccgcagagaagagcctgcaactgccaaaagaagaaaaaagagtgcagccacccccacacaagcatgggcagaagaaagcagaagcaaagaagaagacctgttcgaagcattgcgcgcattacgcaaacagttggccgatcaggaggcactcccggcttacatcgtattgtcggataaagtattgcatctgctctgtctgtcacgtcccacgacagtcgaagccttcggtaacatcaacgggattggtgaatataaaaagaaaaagtacggaaaagattttgttgccctgatccgtcagttcgta

SEQ ID NO: 12145 - DNA, 735 bp, Bacteroides fragilis
atgaactacccacaagaaaagatcaaaccttatagcaacgatgggaaaaagagcgaacaggtagaacaaatgttcgacaacattgcccctgcatacgaccagttgaatcatactctatcgttagggatcgaccggagttggcggcgaaaggcaatcaattggctcaaacctttccgtccgcaacaaataatggatgtagcaaccggcaccggtgattttgctatcttggcatgccatgaattgcaacccgaacaactgatcggaacagacatttctgaaggaatgatgaatgtgggacgtgaaaaggtaaaaaaggaaggtctttccgaaaaaatatcttttgcaagggaagactgtacctctctctcgtttgccgacaaccgtttcgacgctatcaccgtcgcttttggtatccgtaattttgaagatttggataaaggactttctgaaatgtaccgtgtcctcaaaacaggcggacatttagtcattctcgaactgacaactccggatcgttttccgatgaagcaaatgtttaccatttattctaagatagttatcccgactctcggcaaattattatcaaaagacaacagtgcttacagctatctaccccaaacgatcaaagcttttccccaaggagaagttatgaaaaatgttatttcacgggtgggtttcagccaagttcagttcaggcggctgacatttggtatctgtacactttatacggctacgaaa

SEQ ID NO: 12146 - DNA, 2517 bp, Bacteroides fragilis
atggaaataaccaagaggaacggaacgacggaaccctatgacagggagaaaattgccgtcgccatacgaaaaagttttgccagtacagggcaggaagtaagtaacgaaatcatctattcggtggtagaagaagtggagaattttgtcgggaaagataccgcaaaccgtagtgtcgaacagatacaagacaaagtggagcaaagtctgatggaacacggcttttatgccgaggccaaaaattacatactctaccgctggcaacggactgaacgcagaaaagcactcaacagcataataaatgaattgggcgacggaactgtgatggatgtcctgaaagagattcagaaagacttcaccacccacgaatacagtctcgttgtactctatgaaaaattttcagggttttgcaaacaggaaatgccacattccgaacgtttggcagcattgattaaggctgccgtggaactgaccactcaggaagcacctgactgggagtttatcgcggcccgtctactcaatttccaactatcgaagaaactggaaaagcaggcggcatcggcaggcatccgttcgttttacgacaaactgcgctatctgacggaagaaggactatacggtagttacatactggcggcctactcgcaacaggagattgaagaagcagccggatttatctgccctgacagggacaaactatttaattattccggactggatctgcttgtcaaacgctacttgatccgtacccgactccatgaaccggcagagtccgtacaagaaatgtatctgggtatcgccctccatctggctatgcccgaacagaaagaacggatgacttgggtgaaaaaattctacgacttactaagtcgtttggaggtgacaatggccactcctaccctctcgaatgcccggaaaccttatcatcaactttcaagttgtttcatcgatacggtacccgacagtttagaaggtatctaccgcagtatcgataactttgccatggtaagcaaatttggtggcggcatgggaatgtactttggcaaagtacgtgcggcaggaggaaatatacggggttttaaaggtgtagcaggaggagtaattcgatggatgaagcttgtgaacgatacggctgtagctgttgatcagttgggtatgcgtcaaggtgccgtcgctgtctatctggatgtatggcacaaagacctgccggaattcttacaattgcggaccaacaacggagatgaccggatgaaagctcacgatatttttccttcggtatgttatccggacctgttttggaaaatggctaaggaagaccttaaccaaccatggtacttattctgccctaacgagattatgacaatcaaagggtattgcctggaagactattacggagaagaatgggaaaagagataccatgactgtgtaaacgatacccgactttccaaaagaagtataagcattaaagacattgtcagattggtgttgcgatcggcagtcgaaacaggtactcccttcaccttcaaccgtgacacagtgaaccgggccaaccccaatgctcaccggggcatcatttactgttcgaatctttgtacggaaatagcacaaaatatggcagctatcgagacggtgtccaccgagatacgtacggaagagggtgacacagtagtggtgaagacggtacggcccggcgactttgtagtttgcaatcttgccagcctctcgctggggcatctcccattggaggacgaagaacagataaaggagaaagtaagcaccgtagtgcgtgctctcgacaatgttatcgacctgaatttctatccactcccttttgcgcaaatcaccaaccagcgttaccgcagtatcggactgggagtaagcggttatcaccacgcacttgccatacgcaatatccgctgggaaagcgaagaacatctccggtttgtagaccgagtattcgaacagattaattatgcagccatcgaagccagtgccgacttggcaaaagaaaaaggacgctatgaatacttcgaaggaagcgactggcaaacgggagcatacttcggcaaacggggatatacttcccccgaatggaatcggctggcagccaaagtagcggaaaacggtatgcgaaacgcctatcttctcgctatcgcaccgaccagcagtaccagtatcatcgcgggaaccactgccggtaccgatcctgtaatgaaacgtttcttccttgaagagaaaaaaggggccatgctgccacgtgtggcaccggcactgtcagacaaaaccttctggttatataaagatgcctatacactcgaccaaaaatggagtatccgtgcggcaggcacccggcagttgcacatcgaccagtctcaaagcctaaacctgtatatcaccaatgaatttaccatgcgacaagtactcgatctctacttactggcatgggaatgcggagtaaaaacggtatattacgttcgcagtaaatcattggaagtggaagaatgcgaaagctgtgcatct

SEQ ID NO: 12147 - DNA, 1515 bp, Bacteroides fragilis
atggctgctaccggtcagaagggaggaaaagccaagcaaaaaatcaatgatcggcaacttcctaatgtcgtgtttatctatgccgacgacctcggttatggcgacttggagtgttatggtgcaaagaatgtgcagactccgaatgtaaaccgtttggcagctgaaggtattcgctttaacaatgcgcatgctacggctgctaccagtactccttcgcgttactctatgcttaccggagaatatgcctggcgtcgtccgggcactgatattgcagcaggcaatgcagggatgattatccgtcccgaacgctatacgatggctgatatgtttaagaatgccggttacgctacggcggccatcggcaaatggcatttggggttgggcgataaggatggagaacaggattggaatgctcctctgccgactgctttaggagatataggttttgattattcttatataatggctgcaacagccgatcgtgttccgtgtgtctttatagaaaatggtaaagtggccaattatgacccttctgctccgattgaagtcagctatcgtaagccgatcgagggggaaccgttgggaaaagatcacccggaattgctgttcaatctgaaatcgagccatggacacgacatggccatcgtcaatggtatcggccgtatcggatatatgaaagggggcggcaaggctttgtggaaagatgaaaatattgccgattcaatcacttcacatgccatcggctttatccgtgagcataaagacgaacctttctttatgtattttgctacaaacgatgtacatgttccccgtttcccgcacgaccgttttcgtggaaagaacccgatgggattgcgtggagatgccatcgtgcagttcgactggagtgtaggccagatcatggaaacccttgataaactgggactgtcagaaaatacgctaattattctgtccagtgacaatggtccggttgtcgatgacggctatcgggatcgtgcggaagaattgctgaacggtcatagtcccgcaggaccgttgcgtggtaataagtacagtgcttttgaagggggaactcgtattcctgccattgtaagatggccgaagggagctgcttcatcacaggtttccaacgctttggtctcgcagatcgactggtttgcctctttggcttcattggtaggagccgggctgccgaagggagcggcacccgatagctttaactacctcgatacttggttgggcaaaaaccagtccgaccgttcctgggtgatagagcaggcttccaatcatacattatcagtccgcaccaaggactggaagtacattgagcccaatgacggaccggccatgattacctggggaccgaagatagaaaccggaaatctgagtacaccgcagttatatcacgtggtagacgatgtggcagaacagaagaatgtagcttctctccatccggatctggtttttgaactccagaatatattgagacatgtccggatgaaaaacctgaagccc

SEQ ID NO: 12148 - DNA, 3030 bp, Bacteroides fragilis
atgaaattaaaattcaaacatcagaagtttcaggaagacgcagcaaaagcggtatgtgatgtctttggcgggcagccatacaagacgttcgactatcaagtagagacccggaagaaagacggacagaccagctttgaaaagtttacaggattccgtaaccaccctatcgtacctcaactcacagatgagatcgttctgaaacacatccgggatatccagcgtgcccaacaaatcaaaccgtcggaagcgctggaagggaaatacaatctcaccatcgaaatggagacgggtgtaggtaaaacgtatacctacatcaaaaccatctttgaactgaacaaacgctacggttggtgcaagttcatcattgtcgtacccagtgttgccatccgcgaaggagtccacaaaagcctggagattatgaaggaacactttgcctcggattacagcacccctctgtcttatttcatctacgactccaaacagttgggtgaattgaacgcatttgtcacagacagcaaaatccatgtaatgatcatcaattcacagaagttcaatgcaacaaacaaagatgcccgccgcatctacatgaagctggatgattttggcggaaactgtcccatcgatgtgattgcgcagatgaatccgatactgattatcgacgaacctcagtcagtagaaggagccaaaacaaaagagggattgaaacgattcaatcccctgttcacactgcgttattcggctacacaccgcgaactctataatctggtctatcgcctggacgcaatggaagcttacaacctgcaactggttaagaagatcgctgtcaagggtatctctatcagtgggacaacagctactgaaggattcgtttatctggaaggtttgaacctgtatccggacaaaaacccgactgccaatatcggattcgaagtaaaaagaaccaaagcagtgaatcaggtagtacgagctctgaagataaatgatgacttgtatgctaaatcaaaccatctggaagaataccggaacgactatgtaattacagatatcaacggcgttgaagactccgtcaccttccggaacggcatcaaactttatgcaggtgacgtagcgggtagcgtcaacgaaacccaactacgacgtatccagatacgggaaaccatcttgtcacacatagaaaaagaacaggaactgtttgagaaagacatcaaagttctctcccttttcttcatcgatgaagtagccaaataccgccggtataacccggacggaaagggagaatatgccgagattttcgaacaggaatataccgatatcataaagcacctggatctttcgttattcaatcagccggaatatatcgattacctgaaatcgactgtggcatcgaaagctcacgaaggatacttctccaaagataaaaaaggaaaactgattgacagtaaaaccgagcggggaaccaaagaatcggcagatgaagatgcttacgatttgattatgaagaataaagaacgtctgcttgaccggaaagagccgatccgctttattttctcacattccgctctgcgggaaggatgggacaacccgaatgtctttcagatctgtaccctgaaacaaagttcggcagaggtacgcaagcgtcaggaagtgggacgagggctgcgcctctgtgtaaacggacagggagatcgcatggacgtcaacgttttaggcgaagaagtgcatcgtgtcaacctactgaccgtgatagccagtgaatcgtacgaatcgtttgccaaaggcttacagacagaaatggcggaagccatagccgaccgtccacagaaagtaaccatccaattattcaaggaccagtcgctccgattagctaacggtgaaaccatcatagccaccgaagatatagcacaaagtatctacgactctttacttgaaaacaagtacatcaagaaaggagaactgacagacaaattctatgaagaccgtaaacagggagaagtgattttcgacgacgagctcaccgattataaggcgtctatcatgaccatcctggcctctatctataatccaagggagatgcagccgaacgatgcaaggaaaagtaagataaatcttcggttgtcaaaagataaacttgaaaacagcaaacttcaggaactgttaaagctgctatgcagtaagtcaacctacaccgtaaagtttgacgaaaaagaattggtagagagagcgatcgaaagtttaaatgaaaagttaagagtatcccagctctatctttctgtcattacgggccaaatggaaaaaatcaagtccaaagcagctttaatttcgggagaggcatttaaggtagatgccaatcaggcgcactatgaaaagatagatgccatggcaaacgatcaagtaaaatatgacttactcggtaaactcacagacgccaccaatctgacccgacaggcagttgctcagattctctcccggataaaaccgaatgtattcggccaattcaaaaacaatcccgaggattttattatcaaggcttcggaactgattaacgaagaaaaagcatgtctgatagtaaaacatatcgaatataccccaatcgaccagtactatgatgtatcggtctttacccgggcaactattcagggacgtttgggagtaaacacaataaaagcagataaacatctgtacgatcatgtgagattcgactcccaaaatgaaaaaacattcatggaaagactggaagaaaatgacgaaatagaagcttatgtaaaactacccggcaatttctatatccctactccgatgggaaaataccatccggactgggccatcgtcttcaaacaaaagttatcgaagtatccttattttattgccgaaaccaaagccagcgattcctccctgcaagatcggagaatagaagaggcaaaaatcgaatgtgccaaaaaacattttgcgaagacaaacggtgggaagcttaaatataataaagtaagctccttcgaagaactcttgaaaatcgtcacacaagaatccgtt

SEQ ID NO: 12149 - DNA, 741 bp, Bacteroides fragilis
atgcaaaagtacggtttaattggctatccactgaaacattcgttttctatcggctttttcaatgaaaaattcaaatctgaaggcatagatgccgaatatgtaaacttcgaaattcctgaaatcaatgattttatggaggtgatcgaagagaaccccaatctgtgcggactaaatgtgacaatcccttataaagagcaggtaatccccttccttgatgaattggatagagacactgcaaaaatcggtgcggtcaatgttattaaaataattcgtacccctaaaagaaaaataaagctggtgggatataattctgatattataggattcagccagtccattcagcccttgttgcaaccttatcataaaaaagccttaatcctgggtaccggcggttcgtcaaaagcgatttatcatggcctgaagaatctgggtatcgacagtgttttcgtatcacgcaccaagaaagaaggtatgctgacttacgaagaattgacaccggaagttatggcagagcatacggtgattgtaaactgtaccccggtaggtatgtatccgaaagtagacttctgtcctgccataccttatgagttgctaaccccaaaccatttactctacgatttgttatataatcctaacataactcttttcatgaagaaaggagaagagcatggggcagtaaccaaaaatgggcttgaaatgctactattacaagcgtttgccgcatgggaaatatggaataag

SEQ ID NO: 12150 - DNA, 1029 bp, Bacteroides fragilis
atgggagatgacaaaaacaaacgaatagattttgtggacttaacgaaaggagtctgcatcattctggtagtaatggcacacataggtggagccttcgaaaaacttgattatcactcgatgattgccagttttcgcatgcctctttatttcttcatctcaggcattttcttcaaatcctatgaaggccttttcggcttcttcatccgaaagataaacaagctgatcatccctttcctctttttctatctcagcgcgttctttctgaaatacattgtatggaaaatcgctcccggagtcttccagcttccggtcagctggacggaactcctagttgtgtttcatgaccatgcgctgatcaagttcaaccctcccatctggttcttgctggcactcttcaattgcaacatcttgttctatctggttcacagtttgcgcaaccggcggttaggtctcatgtttgccctcactttgctgatcgggacagccggattctatatgggcaagcatcagatagaattgcccctttatatggacgtagccatgagcgccctgcctttctacgtagccggattctggattcgccgttacaatttcttcctctttccccatcgtttcgacaagctgattcccttatgcatcctggcagccctggcagtgatgtacttcaccgccacattcgtgggcatgcgcaccaacaattatgccggcaacattttccaattttgggcctcagcctttgccggcatatttatgatcatgcttttctgcaagaaattcaagaagctgcccgtcatctcgtatatggggcgttactcggtcataacactgggcatacacgcacctttactccattttgaatatccggttgtcagccggtttatccacaacgaatggggacaggccattgccttactgctgctgacgctgaccgtctgcatcattgcgacccccatattcctgaaactgattccgcaagcagtggcacaaaaagactttattaaaaccaaacaatcgacacaacaaggatca

SEQ ID NO: 12151 - DNA, 685 bp, Bacteroides fragilis
ttgcaaaaggcaaaaaggctggccgaagagtctgtccgtaataagagcgtatttctttccaatatgagccatgagataaaaactcccttaaatgcgttggcaggtttctctgaaattttgattactccgggaattgacgatgaagttcgtgcgcagtgtaatgacgtgatcaggttaaactccgatttattgttgcatttggtaaatgacgtagtcgatgtttcgtgtctggatgtggcaaatatgagattctccgtggttccgcatgaggtggtggctttatgccggaatgtggtggagatgctgagaaatgtcaaacagacttctgcggagatgatttttgagacagaattgtctgctttggaaaatggaaactgatccgtgcaggctccagcaagtattgatcaacctactggtcaatgccacaaaatttacgaaggagggatatatcacattgacactgcggataaatgaagccggggtacctgagtttatggtaacggataccgggtgtggaattccccttgaaaatcaagaggctgtattcagtcggttcgaaaaactcaatgaaggcatccagggtacagggctggggctgtctatctgtaagctgatcattaatcgtatgggaggagacatccgggttgactccacttatagcaaaggggcccgttttatttttact

SEQ ID NO: 12152 - DNA, 1875 bp, Bacteroides fragilis
atggattttaagtacgacgttattgtaattggtgccggacatgcaggctgcgaagcagcagcagcggcagcaaacttaggctcaaaaacctgcttgatcactatggatatgaacaaggtagcgcaaatgagctgtaaccccgccgtaggagggattgctaaaggacaaattgtacgtgagatagacgctttaggcggatatatgggattggtaacagatcagacagctatccagttccgcatactaaaccgctcgaaaggaccggccatgtggagtccccgcgcccaatgtgaccgaaacaagtttatctgggcctggcgcgaaatattagaaaatatcccgaaccttcatatctggcaagatactgtaaaggaaatcatcgttgaaaacggtgaagttgtgggattaaaaacattttgggatgtgacgtttcacgccagatgtattgtattaacagcaggaaccttcttgaacggattgatgcatgtaggaaaaacccaactcccgggtggacgcatggcagaaccggcatcgtataaattaaccgaatccatcgcaaaacatggcattgagtacggccggatgaaaaccggaacccccgtacggattgacggaagaagtgtacactatgagctgatggatacccaagatggagaatgtgactttcacaagttttcattcatgaataccagcgtgcgtcaccttaagcaattgcaatgctggacatgctttactaatgaagaagcacataatgttcttcgtaacggattagcggattctccccttttcaacggacaaatacaaagtatcggcccgcgctattgccctagcatcgaaacgaagatcgtcaccttccccgacaaagagcaacaccagctattccttgaaccggaaggagaaaccacacaagaattatacctgaatggattctcttcttcattgccaatggagatccaaatagaagcactaaaaaagatccctgcttttaaagacctggtgatttatcgtccgggatatgccatcgaatacgattatttcgatccaacgcaactaaaacatacgctggaatcgaagaaaatcaaaaacctcttcttcgccggacaagtaaatggtactaccggatatgaagaagcaggaggacaaggtatcattgcaggtatcaatgctcacatcaactgccacggtggagaacctttcactttagcaagagacgaggcatatatcggcgtattaatagacgacttggtgaccaaaggggtagatgagccttatcgtatgtttacttcacgagcagaatatcgtattctacttcgtatggatgatgcggacatgcgacttacagaaagagcctataaactgggattagtaaaagaagaccgctatgctctattaaagagtaaaagagaagcagtcgaaaatatcgtaaactttacccgcaattattcgatcaaggcagcattaataaacgatgcacttgagaatttaggaacgactcccctgcgtcaaggatgcaaactgatcgacttgattaaccgtccacagattacaatagaaaatatctccgaatatgtaccggcatttaaacgggaactggataaaatcacagatgaacgaaaagaagagattctggaggccgctgagattttaatcaaatatgaaggctatattggacgggaaagaattatagcagacaaactggcacgattggaaagtattaaaataaaaggtaagttcgactatgacagccttcaatcactttcgaccgaagcccggcaaaaactgaagaagatcgaccccgaaacaatagcccaggcaagccgcatccccggcgtgtcaccaagcgacatcaatgtattattggtgctttcgggacga

SEQ ID NO: 12153 - DNA, 174 bp, Bacteroides fragilis
atgtcaactataaagatcaaacaagttaaaagtagaattggtgctccggctgatcagaaaagaactcttgatgcactgggacttcgcaaattgaaccgtgtggttgaacacgaaagcactccttcaattcttggaatggtagataaggttaaacacttggttgccattgttaag

SEQ ID NO: 12154 - DNA, 1587 bp, Bacteroides fragilis
atggacttttcacttgacaaatcaacaatcatatggcttatagcaattgttgctggtacctgttctctatatctatatatcaaaaagctaaaggacaaaaacaaattaatatcaaatcgtcgcttagtcgaaaacatcccttcaattatttctacaatcggtgtactaggtactttctatgggattaccagtggacttctttcatttaattctgatgaccttgatacaagtattcccgcattattagatggtttaaaaacagccttctttacttcgattgctggtatggtatgttcattaattatgtctaagataatcaattcttattttgataaagctgatgatggcatttcagatgcaaatcaagctgcatcacaaatatgtaaagcagtacaagaaatgagccaaaagaacatagctatccttaatgccttaaaagaacaatccgaaaaccaagctaaaaatcaaacagccttttatcgttcagttggtgatatccttattgcccttcaaacatcccataacaacactgaatctgctattaattctatggtgattctatcacgtagtcaagaaactacagtcaatgatctgagaagcaaagttgaaagtatgactctatcccttggagcggtagaagaaaactctaccattcaaacagccactctttcaaacattcaacaacaaacaaaagaactatccaatacagatcgtaatatcagtgaaatgcttgacattctttctggtatgagtaatatacaagaggaaatatcagaagagaccaaggcttttggtggaaaactccattctgaagttgtcgagattgaagataagatggatgctactaatcaactcttaacttccaaatttgacgaattttctgagcttctgaaaaaaagcaatactgaagctcttgttgaagtaatgaagactgtgactgaagagttccaaaaacagatgaactcacttattaataaacttattcaagagaactttgatcaacttaacaagagtgtagaaaaacttaatacttggcaacaagagaacaaagcaatgatttcttcactcactcaacagtataaagaaatggctagtaactttgagagtacttctactacactctcacaagttggtgacgatacaagaactcttgttagtgaaggtggtaaactcaaacaacttattgattctcttaatcaagttatcgttgaagaccaaaaattcattgatgtttccaacaaactccaagaaacagcaaacatatcaaaagaaaatatggagaaatttgatgaatcaacgaaaattcttaatgattgggttcgtaaacaacgtaattttgtggatggcgtccaacttctcattgagaaactagatgaattaaataaaatccgtgattatagtgaacagttttggaaaggtacaaaagaaaagatggaagaaggagttagtataataacacagggttctcagacccttaactcccaattaacttcacttgatcgtcaattttataatcgattaggcgctacgcttgctgagcttgataactgtatcactaaaatggtcgaacacgtaaataatcgcaaa

SEQ ID NO: 12155 - DNA, 1815 bp, Bacteroides fragilis
atgagaaagttattgtatgttattctgttactacttttccgtttattgatgtttccgggggctgtttgtgccgaaatactctctttgccggacagcttgataacagatgataacgtatataaatatactttctccgattttgataaggcacagcagattatggaacaattgagaaagcggaaatctctttccatgttccggatggatgtggtggaaggtgatttatatttcaatgtcggccaatattataaggcgttgaagttctataagcgtgctttggacagtgactcggtgcgcaataatgataagaactatatggaacaggtgcatcgcatgatctcttgttacgactgtttgcataatgaaaataaaaaatcgctgtatgtctatttacttttaaaaagggcagagcagtgcggggataaagccatgcagtccgttgctttgttcaatatgggtaaaatgttgtattatcagggtaataaggagaagggatatgaatatctggaacaggcgattgaaatgatgtcaaagacggactatcggtataaatacgataatctgcgttatgattacaacactttactaatattccagaagtcggacaggtgtaatgaggaggctctcaggacactggctgcgttggaaaaggtggtgaccgaagagaccggcagtgaaactccgatggaggggttgagtgcaaaggagaaaaaagcaatgtatgcccattatgctgtcgttctttttcggttggggcaggcggaagaggccgaacgttactaccggaaattcctggcggcaagtgaggaatatgaccgtgacgattacctgattatgccttatttgttcgacaggaagatgtatgaccaagtgatccggatgaatgccgcccgtgagaagatgtatatcatgcggggggatacggtgaactattacatgactacgatcaagagatctcttggatgggcttatcgtgataagggcgattaccgtactgctgcaagatattttgagcagttggctgtgttgcgcgacagcattaagaatcgtgaacaaaaaagtgcggcattggaattggcagctgtttatgaaacgaatgaaaaggatttgttcatccagcaacaggcggctgatatgcaaaagaggaacctcttattggcatttatcctctgtatcgtttttctgttaggtgtgcttttgtggcggacgatacggcataaccggattatacgtcgcaaaaataaggcgatggtaggcactatcgaagatttgctgatacataaagaagaattgtatcggaaaaaggaggagaatcttattctaaaagagcaattggagagggagcagaatttaaggatgtccgcaggtgggggatcgctatcaaccgataaggacgggaaagcggaaacaactgttgttccggcacctgaagccggagatggaaatgacatacacgataggatattgttcgacaagttggaacatgagattattagccgtcagctctatcttcagccggacttttcgagggaggaactgatcaagacaatctatattcccaaaaataaatttgctcctcttttcaagcagtatgcgggaatgagcttttcgaagtatattaataatcttcgtttggagtatgcggctaagatgttaaagaatcaccccgattatacagtagatacgatagcccaggagtgtggcatgtcaactcaatctctttatcgcctcttttcgggaaagtatggagtgactccgacagattttcaggtgggggtacaacatattaataataagaatattactgaggataag

SEQ ID NO: 12156 - DNA, 696 bp, Bacteroides fragilis
gtgaaattacgttgcgccatagtcgacgacgaacctctggcactcagtctgctggagagttatgtcaacaaaacaccttttctcgaacaggcgggaaagtattccagtgccgtacaggccatgaaagaacttcccgggaaccagatcgacctgttgttccttgacattcagatgccggaactcaacggtctggaattctctaaaatggtatcccctcgtacccgtattgtgttcactactgctttcggtcaatatgccatcgacggataccgggtcaacgcactcgactacctactcaaacccatctcgtatgttgacttcctgcaggcagccaacaaggcgttgcaatggttcgaactggtccagaagcccgaagaagtagacagtatttttgtcaaaagtgactataaactggtgcaggtagaactcaaaaagatattatatatagagggtttgaaggattacatcaaaatctacaccgaagatgcccccaaacccattttgtcacttatgagcatgaagtccatggaagaattgcttccccccgcccgctttatgcgtgtacatcgttctttcatcgtccagaaagacaaaatacgcatcattgaccgcgggcgtatcgtatttgataagacctatatccccgtcagcgatagctacaagcagactttccaaacattcctcgatgagcgaagt

SEQ ID NO: 12157 - DNA, 1398 bp, Bacteroides fragilis
atgaaacgacttttttatttctttctttttgtctgtgtggcagttatagccaatgctcaggcaaaatatgttttctatttcattggtgatggaatgggtgtcaatcaagtgaatggtacggaaatgtatcgtgccgaaatccagaagggccgcattggtgtagagcctttgctttttacacagttcccggtggggacaatggctactactttctctgccactaattccgtgactgattcttcggctgcgggaactgctctttccaccggcgaaaagacttataatggttccattgggatggatgatcagaagaatcctttgcagacagttgccgagaaagcaaagaaagccggtaaaagggtgggagttactaccagtgtcagtgtcgatcatgctactcctgctgctttctacgcacatcagccggatcggaatatgtattatgaaatagctaccgatcttcctaaagcaggttttgatttttatgccggtgccggtttcctgaaaccaaccactacttatgataagaaagaagctccgagcattttcccgatgtttgaagaagccggttacaccattgctcgtgggtataacgattataaagccaaagctgctgcggcaggtaagatgatattgattcaagaagaaggtgccgatacgggctctttgccttatgctatcgatagtaaagaaggagacctgactctggcacagattacagaaagcgccattgactttttgactaaaggcaaaaacaaaggtttctttctgatggtagaagggggtaagatagactgggcttgtcacgggaatgatgccgctacggtgttccacgaagtggcggatatggataatgccatcaaagttgcttatgagttttacaagaaacacccgaaagaaactttgattgtggtaactgccgaccatgaaacaggaggtatcgcattgggaaccggaaagtatgccttgaatctcaaagcacttgagaaccagaaagcatctgccgaagtactctctaaaaagatcagtgatttgcgcaaagctaagaacaatcatgtagcttgggaagacattaagaatctgctgtccgaagagatgggcttctggtctgtacttcctatcacctgggagcaagagaagaaactgcgtgacgaatatgaaaagtcatttgtaagaaataaagtggaatttgccgaaagtatgtatgccaagactgagccgatggctgctaaagccaaagaagtgatggatcaaatcgctatggtaggctggacaagcggcggacattctgcaggatatgtgccggtatttgctatcggtgccggttccgatctgttcatcggtaaaatggataatacggagataccgaaacgcatcgcaaaagccggtgggtataaa

SEQ ID NO: 12158 - DNA, 783 bp, Bacteroides fragilis
atgataaaagccctgtttttcgatatagacgggacgttggttagtttcaacactcacgaaattccttcgtctaccctcgcagccatagccgaagcaaaagctaaaggtatcaagatattcatcgctaccggacgcccgaaagcgattatcaacaacctcaccgccctccaggaacgggaactgatagacggctacatcaccatgaacggagggtattgtttcgttggagatgaggtgatttacaaacattccatcccggtacaagatgttaaggcactggctgcactttcggacgagagaaactttccctgtatctttgtagccgaacataccgtagctgtttgcaataccaacaagctggttaacgaaatctttcatgatttcctgcatgtagatatcctgcccatccaaactacagccgaggctacgcagcccgaaatctttcagatgactccattcatcactaccgaagaggagaaaacggtattgcctttactcccgaactgcgaatccggacgctggtttcctgcatttacagatatcgtagctaaaggtatccgcaaacaaaaaggaatagatgaaatcattcgccatttcggtatcggacaggaagaaacaatggcatttggtgatggaggcaacgatatcagtatgttgcgccatgcagccatcggagtagccatgggcaatgcgaatgacgatgtcaaagaaaccgccgactacataaccacttctgtagacgaagacggaatacaaaaagcattaaaacatttcgggatcatc

SEQ ID NO: 12159 - DNA, 1056 bp, Bacteroides fragilis
atgaaactgtcgcaatttaaatttaagttacccgaagaaaagattgctttgcaccctacaaagtacagagatgagtcgcgcttgatggtactccacaagcgtacgggagagattgagcacaagatgtttaaagacatcctgaattattttgatgataaagacgtgtttgtattcaacgataccaaggtgtttcctgcacgcttatacggaaataaggaaaaaacaggtgcgcgtatcgaagtgttcttgttgcgcgagttgaacgaggaattgcgtttgtgggatgtattggtagatccggcacgtaaaatccgtatcggcaataagctttactttggggatgatgactcaatggttgctgaagtaattgataatactacttcacgtgggcgtacacttcgttttctgtatgacggacctcatgatgaatttaaaaaagcattgtatgcattaggagaaactccattgccacatacgattctgaaccgtccggttgaagaggaggatgcagaacgtttccagtctatcttcgctaaaaacgaaggggctgtgacagcaccgactgcaagtctgcacttcagccgtgagctgatgaaacgtatggaaattaagggaatagactttgcatatatcacattgcatgcaggactcggaaacttccgtgatatcgatgtagaagacctgacaaagcataaaatggactctgagcagatgtttgtgacggaggaggctgtcaagatagtgaatcgtgctaaagatctgggtaagaatgtatgtgctgtgggaacaactgtaatgcgtgctattgaaagtacggtaagtacagacggacatttgaaggaatacgaaggatggacgaacaagtttatcttccctccatacgactttactgtggcaaatgccatggtatcaaacttccatatgccgctttctacgttattgatgattgtggctgcttttggtggctacgatcaggtgatggatgcatatcacatagcgttgaaggagggttaccgctttggtacttatggagatgcgatgctgattttggataag

SEQ ID NO: 12160 - DNA, 1083 bp, Bacteroides fragilis
atgaaaaccactccatttaccgagaaacatattgcacttggtgctaagatgcacgagtttgcaggatataacatgcctattgagtattcgggtatcatcgacgaacaccttacagtttgtaacggtgtcggtgtttttgatgtgtcacacatgggcgaattttgggtgaaaggtcctcatgcgttggattttttgcagaaagtgacttcaaataatgtggcagctttggtgccgggtaaaattcaatatacttgttttccaaatgaagacgggggtatcgttgatgacttactggtctatcaatatgaaccggaaaaatatcttttggttgttaatgcttcgaatatagagaaggactggaactggtgcatttctcacaatacggaaggtgctgagttggaaaactcttcagataatatggcacaacttgccgtacaaggtccgaaagccattcaagctctgcaaaaattgacggatattaatcttgccgatattccttattatacgtttaaagtcggtgagtttgccggtgagaagaatgtgattatttccaatacgggatataccggagcaggtggatttgaactatatttttatccggatgctgccatgaagatttgggatgcagtttttgaagccggagctgagtttggcataaaaccgatagggcttggtgcgcgtgatactcttcgtcttgaaatgggattctgtctgtacggtaatgacttggacgatactacgtctcctattgaagccggactgggatggatcactaaatttgtggacggcaagaactttacaaatcgttcgatgcttgaaaaacaaaaagctgaaggcaccgttcgcaaattagtgggctttgaaatgattgaccgggggattcctcgtcatggttacgagttgacaacagcggaaggtgataaaatcggggtagtaacatcaggtacaatgtctcctattcgtaagattggtattggtatgggatacgtgaaacctgaatatagtaagatcggtacagaaatatgtattgatatgcgtggacgtaagttgaaagctgtagtagtaaaaccgcctttccgtaaa

SEQ ID NO: 12161 - DNA, 1398 bp, Bacteroides fragilis
atgagcacagaaaacgaagaatggcgcgaagactccaagagtgagaatacggacgccggccgtgatggtaacagaagttttaacagagaaggcggatacagtcgtccttcatacaatcgtgaaggtggcgaccgtccttatcgtccgagatttaatagtaatagtgaagatcgtcctcagcgttcttatggtgatcgtccgcaacgtccttcatataatcgtgaaggtggcgaccgtccctatcgtccgcgttttaacagcgagggtggtgaccgtcctcagcgttcctatggcgaccgtccgcaacgtccttcatataatcgtgaaggtggtgaccgtccctatcgtccgcgttttaacagcgaaggtggtgaccgtcctcagcgttcttatggcgaccgtccgcaacgtccttcatataaccgtgaaggtggcgaccgtccctaccgtccgcgctttaacagcgaaggtggtgatcgtcctcagcgttcctatggcgaccgtccgcaacgtccttcatacaatcgtgaaggcggtgaccgtccctatcgtccgagatacaataacgataacagatcgcagggattctcacgtccgatacgtcgtacgggggattacgatccgaatgctaaatacagtaagaaaaaacagattgaatacaaagaacaatttgttgatccgaatgaaccgatccgtctgaataagttcctggctaatgcaggagtctgctctcgtcgtgaagctgatgaatttatcacggcaggtgtagtttctgtcaatggagaggttgttacagagttgggtacaaagatcaagcgcgctgatgtggtgaagtttcacgatgaaaccgttagtattgagcgtaaggtgtatgtgttgctgaacaagccgaaagattgtgtaactacttcagatgatcctcaggctcgtctgactgttatggatctggtaaaaggggcctgcgctgagcgtatttatccggtaggacgtctggaccgtaacacaacaggggtattgctgttgactaatgatggtgatttagcttctaaactgacacatccgaaatacctgaagaaaaaaatctatcatgtatatttggataagaatctgactaaggcagatatggaccagattgcagccggtattcagctggaagatggtgaaatccatgcggatgccatcagttattctgacgaggtgaaacgtgatcaagtgggtatcgaaatccactccggaaagaatcgtatcgtccgtcgtatatttgaatcgttgggttacaaggtggtgaaacttgaccgtgtattctttgccggactgactaaaaaaggattgcgccgtggtgagtggcgttatcttacagaacaggaagttaacttcctccggatgggatcttttgaa

SEQ ID NO: 12162 - DNA, 819 bp, Bacteroides fragilis
atggctggttatatatcagatgacacaagaaaagtgacgactcatcgcctaatcgaaatgaagcaaagaggcgaaaaaatatctatgcttacatcgtatgactacacaatggcacagattgtcgacggtgccggtatcgatgtaattcttgtaggcgattccgcatcgaatgtgatggcaggtaatgtgactacacttcctattaccctggatcagatgatctatcatggaaaatcggttgtacgtggtgtaaagcgtgcaatggtagtagtggatatgccttttggctcttatcagggtaatgaaatggaagggcttgcttcagctatccgcataatgaaggagagtcatgccgatgcattgaaactggaagggggtgaagagattatagatactgtgaaacgtattctgagtgccggtatccccgtgatgggacatcttggactgatgccacaatctatcaataaatatggtacatacacggttcgtgccaaggatgatgccgaagcagagaaattgattcgtgatgcacatttactagaggaggccggatgtttcggacttgttcttgaaaagattcctgcagcattggcatcacgtgtcgcaagcgaactgaccattccggtgatcggtatcggtgccggtggagatgtagacggacaggtattggtaattcaggatatgttgggtatgaataacggtttccgcccgcgcttccttcgtcgttatgccgatctttatacggtaatgaccgatgctatcagtcactatgtttcagatgtaaagaactgcgacttcccgaacgagaaagaacaatat

SEQ ID NO: 12163 - DNA, 717 bp, Bacteroides fragilis
ttgttggataatcctgaagatccgaatatgcgggtagaagtagtgggtacggaagcgttgctggacagtaagaaagtgaaggaacagaagatagacgtggccgctctgccgatgaaggtaaagttggtcaatgaatcaccctctttctataaacagtaccggtatcagatttgggtgggcgtaggtgtcctctgcattctggtgataggattgctggtttctatctatttctatctgcggacaaagcggctgaaagacgatctggagtgttcgcaagttgctttgtatgaagcgaaggaccgggcggaggagtcgaaccggctgaagagtgcttttcttgccaatatgagtcatgagatacgaacacccctgaatgcgattgagggattcgcggatgtgctggcttcgggtgggagctcggaagaggatcagcggaattatttcagaattatccagtcgaactccgacctgctgttacgactgattaatgatatactcgatctgtcgaggctggaggcgaacaaggtgatactgacaccggaagactgcgatgtggttcaactgtgcagacaggcattatcgtcggtggagatgtcccgcagggaatcgggtaaccggtttgtttttgagacaaagaccgactcctttgttcttcagacagatattcaacgcttacagcaagtgcttatcaatctgctgaccaatgcggcgaagttc

SEQ ID NO: 12164 - DNA, 282 bp, Bacteroides fragilis
ttgattcgtgcttatgtcgcagaacatcagcatgtgtggccagaaattaaagccggtatccgtgaagtcgggatactcgatatgcagatttatatccacgaacatacactctttatgattgtcgatacggtagatgaattcgattggataaaagataacgagcgcttggctaaacttccccggcaggcagaatgggaggcttatatgtctcgctttcagcgttcattgcccggacaagcgtcacatgagaagtggaaaatgatggaacgtatatttaaactc

SEQ ID NO: 12165 - DNA, 3990 bp, Bacteroides fragilis
atgaaaaaaattctttttcttctgctcttattgcctcttatggtctctgcacaaacttacaaatatatcggtgtagaggatgggttaagcaaccggagggtatattacatccaaaaagataaaaagggttatatgtggtttctgacccacgaaggtgtggacagatatgatggcaaagagttcaaacgatataaattaatggatgacggtgaagaactcaattcactgcttaacctgaattggctatatctggaccacgagagcaccttgtgggaaataggaaagaaaggaaaagtgtttcgttacgacccgttacgagatcagttcacgctggtctacaaactaccagaagagaaaatcaaagaccgccccgctcccatcagttacagcttcatcgatcggaataacaacatctggctgtgtaacgaggagactctctatttatacaatacccatacactacagaccctccagatcaagaacgaaatcggagaagacatcactgatatcgaacagatagacgatactcacttctttatcggtacggaacaaggtatccatcatgcggagttgaagaatcaagggctacatttgcttccttgcgacaaactggataatcttccgatacaaatcaatgaactttatttccaccgtccctcacgtaaactattcatcgggacgtttgaacgcggtatttatgtctatgacatgaataccaaacaaagcactcagccccatatgagcctgaccgacgtcagcatcacgcggataaagccgttgaataataaagaactgcttgtcgctacagacggtgctggagtgtataagataaacataaactcttatctgactactccttatatagttgccgattacaaccagtacaatgaaatgaacggtaacaacatctctgacttttacgtagacgatgaacaacgtatctggctcgccaattatccaatcggtatcacggtacgcaataaccgccattcaagctataactggataaaacattctatcggtaacaaacaatcacttattaacgaccaggtaaattctattattgaggacagtgaaagagatttgtggtatgccaccaataacggaatcagttattacaattccgaaaccggagtatggcattcgttcatgagttcttttgaaaagaatggaggcaacaagaatcacatattcgttacactatgcgaggtagagccgggaattatctgggctaccggatatagttcgggcatctatcaaataaacaaacggaccttatctgtcgagtatatcactccatcttcactgtatggagtcaacatccggccggataagtacatccgttcgatcataaaaacagccgatggagacatctggtcgggaggttactacaacctgaaacgcattgattttcataaaaagactcttcgcctataccccaagctgaactcgataacttccatcatggaaaaagacagtaagcagatgtggataggtacggccacaggactatacttattagagaaagaatccggtaagtaccaacgtatcgaacttcctgtagaatcaatgtatatttattctctgtaccaagcacggaacgggcttctttacatcggaacaagtggctccggattattgatatacgacccggaaaagagaactttcacccactaccacagagacaactgcgcgctgatttccaataacatatataccattctttcggataccgacgatgacattatcatgagtaccgaaaatgggctcagcagttattatccggcagaaaaattgttccataactggaccaaagatcaaggactaatggccagccatttcaatgccggctcaggtacattgcgtaaaaacggtaactttatattcggcagctcagacggtgccatcgagtttaacaaggagatgaagatacccaggaagtacagttctaaaatggtactcagtgatctgacaattttttatcaaacggtctatcccggtgacgaaaactccccgttaagtacggatatcgatgataccaaagaactggaactcagttacagccaaaatatcttttcgctgaaagtgtcctccatcaactacgattatccgtcgaatattctatattcatggaagttggaaggattttacgaccagtggagccgccccggaaatgaaaacatcatccgtttcaccaatctgagtccgggagagtatacccttcatatccgtgcggtctctaacgaagataaacgtatcgtactcgaagaacgtaccatgaaaatcagtattgcccaacccatttggctcagtttctgggccatgctggtctatgcaatcgtactggcagtaattgccatcattactctccgcatcattattttgagaaaacaaagaaaagtatcggacgagaaaatccatttcttcatcaacacggcgcatgacatccgtactccgctgacactgatcaaggcaccgctcgaagagatacgcgaacgggaagcgttgacaaaagatggcatcagcaacatgaatacggcactgcgaaacgtaaatgccctactgcgtctgaccaccaacctgatcaactttgaacgggcagacgtatattcgtcagaactttatatttcggaatatgaactgaatacctatctgacggagactttcaacgcattccgtccatacgcaagcgtgaagcatattaacttcacctacgaaagcaatttccgttacctgaatgtatggattgacaaagagaagatggattcaatcctgaaaaatatcatctcgaatgccttgaaatatacaccggagaacggtagcgtacatatttatgcttcggagaccaatgacagttggaatgtagaggtaaacgatacaggtatcggaatacctgccaatgagcagaagaagttatttaaaatacatttccggggaagcaatgcgatcaactctaaagtaaccggaagtggtatcggactcatgcttgtatggaaactggttcatctgcacaaaggtaaaatcaatctgagcagcgtggaacatcagggatcgtctatcaaagtaagttttccgaaggacagtaagcactttcataaagcacacctggcaacccgtacccgtgaactcagcacagagcaagtgccccacgtgtctccggccgagatttatgaaaaggcgaaaaagcaacacgaccagaacctgcaacgcctgttgatcgttgaggacaatgatgaactgcggaattatctgactcatacattatcggataattacaccattcagacatgttccaacggtaaggaagcactgacgatcgtaaaagagtacatgcccgaactgattatttcggatatcatgatgccggaaatgcggggagacgagttgtgcgccgccattaaaaatgatatcgaaacctcgcacatccccatcatcctgcttacagcattgaatgacgaaaagaatatcctggaaggattgaaaataggagcagacgaatatatcgtgaaaccattcaacattggtatcttgaaagcaactattgctaacttgctgacaaaccgtgcattattgaaaagcaagtatgccaatcttgaagtcagcgaggaagaggaggtatctccaaactgtgctacagatctcgattggaaattcatcgctacggtcaagaagagtgttgaagagaatatagacaatccggcattcaatgtagatgtactctgcaatctgttgaacatgagccgcacaagtttctataataaactgaaagcactgactgatcaggcccctgctgactatatcagattaatccgcctgaaacgggcggcggcattattaaagaccggtcagcactctgtcaccgaaatatccgaactgacgggattcaacgatgtcaaatacttccgggaagtgtttaagaaacatttcaaagtgagccccagcaaatattgtaaagagggcggaaaagaggatgtagaggaacaacaagaa

SEQ ID NO: 12166 - DNA, 3663 bp, Bacteroides fragilis
atgagatacctgaataagattatttttatcaatagtgcccgtatccaatatgccgaaatacagatagacggcaatgttcattttatcggtacacagggagtggggaaaagtacggcgttgcgtgcattactcttcttttacaatgccgataagacaaagctgggcatttcaaaagagaaaaagagttttgatgaatactattttccgtacgtcaattcatacattatttatgaagtggtggtggatgatgcttcgtattgcgtattggctttccgttcgcagggaagggtctgcttccgctttctgggcacgggctataagaaagaatatttcatttcacccgagggaaaagcatacgaagagtgggatcagatacgtgatgcgcttggcagttttgtctataagagccgtcgtatagagacgtatgaggagtatcgagacattattttcggtaatggccgggggcttcctccggagtttcggaagtttgctattaccgaaagccggcagtaccagaatatacctcggacgattcagaatgtttttctgaactcaaaacttgatgcagagtttatcaagcaaaccattatcatgtctctgaacgaagaagatgtgcgtatcgatctggggcagtatgcccatcatctgcgccggttcgatgaagaagtgaccgacatcagtaagtggttccggaaaaataagaacggtgaggtaactgtccgcaggcaagccgaccgggtgattgaactttatcgggaaatgcattatctggagcaacaggcccgtacattggccggagaattgaattacgcttttcggacagcgcgggaagtactcccttctctgcaaaaacagaaagaagagctgttgaaagaagtggcaaaggagaaacgccagttggaagaactttccgggaaatttcagagtgagcgtgaccgattgttgggagtggtcaaagtgcagaacgaaaatctgaaaacagcacgggagcgaaaagaacggtacgaatcgcaggatattcatcatgtacgggaacgggtgaatgcggagtccgaagctgtgcttcacaagcaaatgctggaagagcagctgaccatgctgactgcacgctttgacgacatcaacagccagtataaactgctgaaagaacaggcggccagtgcctttgagcgtttccgtaacgggaaaaacgccgagttgaataccctccatctgcgtgccatcgagcgtaaggaagccatacgtaaggagttcgataaaatattgaaagaggtaagggaacaggaagttgggaaactgacccttctgcgtgagcagacagaaaagaaaaaggaaggcatctatcagttgaaaatggaacgggagaagtgtttgcaccggactctttatgaagaggagttgcaagcctgccggacggagcgtgccgcactggaaaaggagaaccatgagcataggctgaagcagaaagaagctgaacaacagatggagctggtgcgccgccggtgggaattggatcagactgcctgtgagcagcagttcactgcccgccaaaaggatatcgaacagcagattacacttgctaaagagagggtagcggagatagatcgtttgctcgacaaccgtcagggttcattctacgaatggctgagtcagaactgtcaggggtgggaagataccattggcaaggtcgtggacgagaaacaggttttgttcagcaaggaactgaagcctcagtctgttccggatgccggtcaagactctttctatggcattaaactcgacctctcggctatccgtaaggaggtgaaaagtgtacaagagtatgcggcggatcaggaaatagccggtaaggaagtatcagagtggcaacagcagcttgagaagttgggagaggaaaaagaaaaggaactagccttgattcggaaaagacatcaggccacgcttagtacctgtaaggaggatgtggctcaatccacttattgtatggagcagaacgataagcgtatccggctcctgaaagcggatgaaatcaggtgggaacagaaggcaggggaggagaagcgtgtcctgctggaacaattggataaacagttggccgaggctacccgtagcctgcaggggacagtggcggaattggaacagttcaatcatctgctcgaaactcgtgtacgtcaaaaggagaaggaacgtaaccagagaatgcaagaagaggatgccctgatccgtaacaaacaagaagaaattcacctgtccattgcttccgaaaagcagaaaaccgatgaactgctggcaaccatggacaaagacttgctgcacgaactctccgggaaaggagtggatacggagcgtatcactgctttgcgtaatgaagtggcccgtacggaacaggagctggtgtttattgaccaacatcgtcgcctggtctacgattacgagaaggacaagagagaattctttgaccggatggacgaattcagaaacgaaaagcagttggccgagaaagaactggaaggcgagaaagaaaagttccgtttgaaagaggaagaattgaatctgaaagtaacgggactgaacaagcagctggctgagacaaacacccgcctgaaacatttggacgaggatattcgggagacggagaacttcaaaacgctcaatatctgtccgcctgtgttacaaacgggggtggaaacagagaatgccaagcgctgtaagaaggtgattgaggaactgactcaaaaccattaccggcagattgaacaggaaaaagacttcagggaggccgtcggtcggttttccggtaatttttccgagcagaatacgttcaatttccgtacgcggcttacgaagcgggaagagtttatgacttttgccgccgatctgaaagaatttattgataatgataagattattgattttgaacgtcgttcaaacgaggcatacaccgacttgattcatcggattggaaaagaaacgacggacatgctttcaaaagagggactgattcgtaagaccataagcgatatcaacagtgactttgtggaacgcaattttgccggagttatcaagagtatagccttgcagattgtgccgagcggtaatcgtatcatgcaacattttgtcacgatcaaagagttctgcgaccggaatcagccgggtggcccgggcatgttcagcctgttcggacaagaggattttgtagaacggaatcggcaggcggtaagtttattgcagtcattggtgaaagaactggcattgaataaagaaaaagaacttaccctttccgataccttcgaactccagttccgtattgtggagaacgacaacgatagcggatgggtggagaaactggcaaacgtgggttccgatggaacggatatcctggtgaaggccatgattaatatcatgttactaaatgtgtttaaggagaaagcatcgcatcagttcaacgactttaagttgcactgtatgatggatgaaatcggaaaacttcaccctaataatattaaggggattctggactttgccaataaccggaatattatcctggtgaatagttcgcctacctcttatcgggcaagcgattataaatatacttatattctgaacaaggataagcggaacatcacaagtgtgacacggttgataaagcaggaagtgagggaa

SEQ ID NO: 12167 - DNA, 2343 bp, Bacteroides fragilis
atgcagaaaaaccttgtcattgtcgaatctccagcaaaagcaaaaacgattgaaaagtttcttgggaaagattttaaagtcctctcaagttacggacatattcgcgacctgaagaaaaaagaattttctatcgatatagaaaagaatttcaaacccaaatacgaaatacccgcagagaaacaagagctggttaataaactgaaagaagaagcaagcaaagcagaaaccgtatggctcgcatccgatgaggaccgggagggagaagccatttcatggcacctttacgaagtcctgaaattaaaacctgaaaatacgaaacgtatcgtttttcacgaaatcaccaaaacagctatactgaaggctatcgaacagccacgcgacattgacatcaacctggtgaatgctcagcaggcacgccgtatcttagaccgtatcgtgggtttcgaactttcacctgttttgtggaaaaaggtaaaacctgcactttctgccggtcgggtacaatcggttgccgtacgtctgatcgtagaacgcgaacgtgagatacaggctttcaagagcgaagcttcttatcgtgtcacagctgttttcctcgtaccggatgctgacggcaagctggtagagatgaaagcagaactggcacgccgcctgaagacaaagaaggaagcccaaaaattccttgaatcatgcaaggcagccacattctctatcgaagatatcgtaacccgcccggtaaagaaaagcccggcagccccatttaccacctcaaccctacaacaggaagctgcccgcaaactcggcttcactgtagcgcaaaccatgatggttgcacagaagctttacgaatcgggattaatcacctatatgcgtaccgactcggtaaatctgtctgaatacgccacagagggaagcaaagttgccatcgcacagatgatgggcgaccaatatgtgcatccacgccatttcgctacgaagaccaaaggagctcaggaagcgcacgaagctatccgcccgacttacatggaaaaccagaccatcgaaggatcggctcaggaaagaaaactatacgacctggtttggaaacgtaccatagcctcacaaatggcagacgccgaactggaaaagacaacggcaaccatcggtatcagcaacggtaacgataaatttaccgctaccggagaggtgatcaaattcgatggttttctgcgtgtatacaaagaatcgtatgatgacgacaatgaacaagaagacgaaagccacctgctgccacccctgaagaaaggacaaatgctggaacatcagggaatcgtagctaccgaacgtttcacacaacgtccgtcacgctataccgaagccagcctggtgcgcaagctggaggaactgggaatcggacgtccgtcaacctacgcaccgaccatctctaccatccagcaacgcgaatatgtggagaagggggataaaccgggagaagagcgctcgttcgatatactgaccttaaaagataatcagattacggatatcaaacatacggaaattgtcggagcagagaaatcaaaactattgccaacggacatcggcactgtagtcaatgacttcctgaccgaatacttccccaatatcctggattataactttacggcaaacgttgaaaaacaattcgacgagatagctgaaggcgataagaaatggacaagcatcatgaaggatttctataaggacttccatccttcagtagaaacgacactggctaccaaaaccgaacacaaagtaggtgaacggattctgggagaggaacctaaaaccggaaagcccgtatcggtgaagatcggacgtttcggcccggtagtacagatcggtacggccgatgacacagacaagccacgctttgcacagatgaagaaaggacagtctatggagaccatcactctggaagaggcactggacttattcaaactgccgcgcaaagtcggagaatttgaagataaaaccgtaacaatcggtaccggacgcttcggaccttatgtatatcataattctaaatatgtgtctttgcccaaaacttatgacccgctggaggtcacactggacgaagctatcgagctaatcctggctaaacgtgaagcggaagcgaaaaagcacatcaagaagtttgatgaagatgcagaaatggaaatcctcaacggcagatacggaccatacatcgcttacaaaggaaataactacaaaatacccaaagacgtggtaccggtcgatctgaattaccagacctgcctggaaatcataaaactgcaaagcgaaaaagcagaaaacgctccgaaacgcggacgctacgctaagaaaaaa

SEQ ID NO: 12168 - DNA, 3771 bp, Bacteroides fragilis
atgcacaggtccgaaatcgttagagaagtgacacaacaaaacttgaagatcgttagtgcaaagaaaatcaatccgacaacgattgaagtattattctctaataatcagagaatgacattcgatttctacggggaaaacatcttcagagtatttcaggacaatgccggaggaatcatccgtgatccggaagcaaaacctgaagcacaaattctggtaaacaatcccagaaacacagtttctacactcaacttgaatgatggcagcaatctcatctctatcactacggggaaaatcaaagtggaaatcgacaagaatacttctttgatgaaagtgattgacttggaaaagaatactgttgcctttgaagaggtagaacccgtactgttcgataagggaaaagtgactgtaaccctgaaagaaaatcccaatgaatatttttatggtggcggtgtgcagaacggacgtttttcacacaaaggaaaagccattaatattgtaaacgagaatagttggactgacggtggagtagcttctcctgcgccattctattggtcgaccaatggctatggtatgatgtggtataccttcaaaccgggtaaatatgatttcggtgcagacgagaagggaaaagtgaaacttacacatgattctccatatctcgatctcttttatatggttagcgacggagctgtgggcgtgttgaatgatttctatcagttgaccggtaatccggtgttgctgcccaagttcggtttctatcagggacatttgaatgcttacaatcgcgactattggaaagaagacgaaaaaggaatcttgttcgaagatggaaagcgttataaagaaagtcagaaagataatggcggaatcaaagaatcattgaacggtgaaaagaataattatcagttctcggcccgtgcagtgattgaccgttacaagaatcacgatatgccgttgggctggctcctgccgaatgatggatatggtgccggatacggacagacggagacactcgacggaaacattcagaatctgaaaagtctgggtgactatgcccgtaagaatggcgttgaaattggattgtggacacaatcggatttacatccgaaagaaggcgtcagtgcattgctgcaaagagatatcgtgaaagaagttagagatgccggtgtgcgtgtgttgaaaacagacgtagcatgggtcggttggggatattcgttcggattgaatggagtggcagatgtgggtcacattatgccttattacggtaacgatgcacgtccgttcattatttcacttgacggttgggccggtacgcaacgatatgccggaatctggtcgggtgaccagacaggcggtgtatgggagtacatccgtttccatatcccgacctatatcggttcaggcctgtcaggccaacctaatatttcttcggatatggatggcatctttggcggcaagaatatgattgtcaacaccagagacttccagtggaaaactttcactccgatgcagttgaatatggacggatggggatctaatgaaaagtatcctcacgctctgggcgaacctgccacttctatcaatcgctggtatctgaaactgaaatcggaattactgccttacacttatagttttgcaaaagaggctgtaaccggtatgccgcttatccgtgccatgttcctggaatatccgaatgcttacaccttgggaacagctacgcagtatcagtttatgtatggtaccgattttttagtagcccccatttacaaagctaccaaagcagatgctgaaggcaatgatatccgtgatggcatttatttgcccgaaggagagtggatcgattattttaccggagagaaatatcagggtaactgtgttctcaacaattttgccgctcctctctggaagcttccggtattcgtaaagaacggagctatcatcccgatgaccaatcctaataataacgttgctgaaattaataagggacttcgtatctacgaaatctatccgtataagcacatgatgaccgttgaatatgacgatgacggtatatctgaagcatataaagagggtaaaggaaccactactttcattgaatcgaatgttgattcaaagaataatgtgaagatttctattcgtcctacacagggtgatttcgacggctttgtaaaagagaaagccacagaattcagagtaaatgttactgctaagccgaagaaagtttctgctcagataggtaaaggcaaagtgaagttgaccgaagtgtcttctatggatgatttccggaaaggtgaaaacgtatacttctatgacgctgctcctaatttgaataagtttgctacaaagggcagtgaatttgagaagaaggttatcactaagaatcctcaagttcttgtgaaactggccgctaccgatattactaaaaatcaagttgtaatggatatcgaaggcttccaatatgcacctgccgataattacagagtaacctccggttcgttgaccgctcctgctgcccgaattgctgccgaagatattgaggcttataccttgaagccgacatggaacaaagtgccgaatgctgatttttatgaaatagaattcaatggcatgctgtatacaacaataaaggatactgagttgctgtttgacggactggctgctgaaacagactatacatttaagattcgtgccgtaaacaaggatggctattcggattgggctgaattcggtgctaagacaaaagctaatccgctggaatttgctcttcacggaatcaagggtgaaacaactgcgaagaatcaggaaggatttgatatcgatcgtttgttcgactttgccgagctgggtgatatgtggcatacgaagtatggagcaaaagcactgccttatgatatgattatcgatctgagaacagtgaaccagctggataaattcgaatacctgccacgtaccgatggtggtaacggaacgatcctgaaaggtactgtatattatagtatggataaggaaaactggaccgaggccggagcaatcgactggaaacgtaatggtgatgtgaaagtatttacatttactgaacgtccgactgcacgctatatcaaactggctgtaacagaaggtgtaaacaactatggttcgggtagggaattgtatgtatttaaggttcccggaaccgagagccgtttgcagggtgatatcaataacgatggtaagatcgacaataacgatttaacctcgtataccaactataccggtctgagaaaaggtgattccgactatgaaggctatatcagtgtaggcgacattgatcagaatggtttgattgacgcttatgatatttctgtagtggcaacacaattggaagatggtgtaagtgaagagccgattgagaaactggatggtaccattgaaatcagtactgctaaacggaattacagtaagggtgatgttgttgaagtgcttgtaaaaggtgtcaacctccgctctgtaaatgcgttgagttttgcgttgccatacaatcagcaggattatgaattcgtgggtgtagaacctctgaacctcaaagctatggaaaatctgacttatgacagactccataccaatggtacaaaagcactctatcctacatttgttaacctcggagctaaagaagccctcgaaggaacaaacgatctgtttattctgaagctgaaagcgaaacgcgctgtgaagtttgatctgaaagctattgatggcgttttggttgacaagaacctgaacacacgtaagttt

SEQ ID NO: 12169 - DNA, 984 bp, Bacteroides fragilis
atgaaaaagataataatagtttctgcattagttcttttatggactgcaggagcaaatgctcaaactgcatatgatgctgcaaaattggttagcaaagatttaaatggaacagctcgttttgttggtatgggaggtgcaatgggagcattaggaggagatatatctactatggggacaaatccggctggcataggtatttatcgaagtaatgatgttatgacttcttttagtttttctacttatgggacggaaagtaaatatggtggaaagacatttgataataataataatcgatggtcttatgataacattggaattgtctttgcttctaaaataggtaatcacactccattacgttatgtgaattttgggtttaattatcatcgtgcaaaatctttctataaaaatatgtttatggagggcgctttgaattattcgcaaatcgattatatgactggacaagctaatgggatgttggccaatggcgtgagtcttaaggaactgtcagataataaattgaatccttatagtgataatggcgttggctggttaggtgctttaggctgggatgggcttttgttcgattttaagaatggtgagtatattggtgtcttgccacaaactccatattctacttttcgttcaagagaaaaagggggaattgatcagtatgattttaatatagcctttaatattagtgacagagtttatctgggactgacaattggagcttatgatgtagactatactaaatcatattactattcagaagactatggtgataaacagaactataatataggaagtatgaatcgcattagtggttccggttttgactttaagatgggagctattattcgtccgtttgaagattctccttttcggatcggtcttgcagtacatacacctactttttacagattgacgtatacaacaagtgcttatttggaatctaatatctggatgcataataatgatacaggg

SEQ ID NO: 12170 - DNA, 1953 bp, Bacteroides fragilis
atgaagcgactgatacttatcatcatagtatgttgccgggccttaggatggtgtcatgcaaatacacaaacggaaacggacagcctgtatcgggtggcacagtcacttccgcatgactcgactcgtctggaaatgttcaagagactggcacaaatagagcagctgactcccaggtgtatcaccttctcgggtctgttgcgcgaggaagccaccttgcagaagaatgacagatacaacgccatagccgcctatctgcacacagtgtactactataaccaaaacaaccgggacagcgtaaaaaaatggcttgacacaatggagccttatgcccgcaaatcgcaaacctgggatctctatttcgatgcgctccgctttcagatagacctctgcacctacgaagagcagtatgaacttgccatcaacgaagcgaacctgatgtacgaaagagcccaaaaagtgaactgtgcccgcggactgatcggagcaaaacaatgcctgggcaacgcctatatcagtacagagcgatgggacgaaggaatgaaagcattggaagctgcctatcaactctctttacaaacagataatgcggtagtacgaatctcgattctctgtcaactgatttccataaccaaggatcagaaaaacaaccaattactctccgaataccttgcgaagctaaaagaaacactgcatcaccatacctccacgaacccgatgctcaaagaggcattttatgatgtttacctgttctgcgaagtatattacacctattactatctatatgcaggccagccggaacaagcacataaaaatctggttaacgcaggcaaatttctcaatggcaacaccttctttctctacagggtgctctattacgatgcctatgcagcatacttccgggcttgcaaagcgtatgaccgggcacttgccaagatagactccaccatcatactgctgcaagaggacttcaacagcaattacatccaccaaaaattgacaaaagccgacctcctggcagaagccggacgaagtgcagaagccattcccctgtacatcgaaacgctccatcttaaagactctatcgaaacgaccgttctcgacaaacagatgcaacagataaaagctaaatacaacatcgacaaagtggcattggaagaggaacggctgaaaagctacatccaactcggcaccttaatagtggtggtcattgtcctgataattctggttgctttcatgctccgcatttcacacgtacgcaaggctttggaacaatcggaaaaagaaacacgggaaacaacccgcatggcggaagaagccaacgaaatgaaaaatcgctttttgtcgaacataagctatcacatccgcatcccgctgaacggtgtagtgggtttctcgcaactgatagcctctgagcccaacatgcctgatgagctccgtaaagaatactcttccatcattcagaagaactccgaagaattgatgcgcctggttaatgatgtactcgatttatcacggctcgaagccggtatgatgaagttcaacattcaggagtacggactggcggaactctgcaatgaagctacctatatggcacgcatgcatagtgaagggtgtaccgtcatccggttggaaaacgaaattgaaacagacctgaacatccgggtagacaccgtccgtttcacacaggcgttgatgagtgcactgacgtatccgcagaagtacaaagaaaaacgggaaatcgactttaaggtgactctcgacacggagaagcacttcatcaacttccgcatcaccaactctccgctggctgacgaaagatttacttcgcaagaggtatgcatccgtcacgaaatcaaccgcctgctatttgagtatttcggaggaagctacaaagtacagacaaatccggacggaaagccggccatcctcttcacgtttccctcaggaagaaat

SEQ ID NO: 12171 - DNA, 1134 bp, Bacteroides fragilis
atggaattaaaaaagaaagagaatataggttggattgacctgttaagggtactcgcctgtttctttgttgttttctcgcatagttgcgatgcatttatcggccaatttgatgccaatcgggaatcgttcttaacaggagtgtttttgggaagcctgatgcgcccgtgtgttcccatttttgttatgatgaccggggtattgctattacccgtacaaaccgacatggcagcgttctataagaaaaggataggacgcctgatccctccaatgattttctggtcactggtcttgcctgttttgtatttcatatatctgaactatatcaatcccgatactcaaaatccactgatctcgatgccagatcacagtcttgaagctttatggttcaaactatatacatttatatttaatttcaattttgacacagtcccgttgtggtatctttatatgttgattgggttatatttgataatgcctattatcagcggttggttggaaaaagtttcaaagaaggaactaaaattattcttaggcatttggggaatcagcctgattgctccatatgtaaaaatgttcgctccagcactaggctatcagggcaattacgggaatatgggtctatggggagtatgtgactggaatgactatggtaccttttattatttctccggttttatcggatatcttctgctagcttattatctcacaaaatatccactgaaatggagttggaagaaactattgagtattaccatcccaatgtttctgacaggatacctgatcacatcttatgggtacgtcatcacacaaaattacttcccgggaaattatgcttatctggaaattgtatggtactttgcaggtatcaacgtatttatgatgaccttcccggtttttgtaatcgtacagaagataaaagtaccttcaaaccacagattatcacacatggcatcactcgcattcggcatttatctgagccattatgtatttgtattcattgcttacgatttactggatacagagttgctgccgtatactgtacgaattatttgtatggcctgtattgtattcctgacatgttacgccatcgtttggctaatgtcaaaaagcaaattgaccaatcgcttcatccgg

SEQ ID NO: 12172 - DNA, 96 bp, Bacteroides fragilis
atgttggtaggtaaacgtcgtgctttgctcgactacctgaaagcaaaagatatcaccagatatcgtgatatcatcaaagagctcggcttgcgtaag

SEQ ID NO: 12173 - DNA, 762 bp, Bacteroides fragilis
atgaaaaacgtatatttcctttctgatgcccacttggggtcacgtgccatagagcatggacgtacgcaggagcggcgcctggtcaattttctcgacagcattaagcacaaagctgccgcagtatatctgctgggcgatatgttcgacttttggtatgagttccgtttggttgttcccaaaggttatacccgttttttagggaaactctccgaactgactgatatgggagtagaggtgcatttctttacgggaaatcatgatatctggtgcggcgactatctgactaaggagtgtggggtgacgattcatcgtgaaccggttaccactgagatttatggaaaagagttctacctggcacatggtgacgggctgggagatccggataaaaagttcaagttgctacgtactatgttccatagtcgtacgttacagactttgttctctgcgattcatccccgatggagcattgacttgggattgaattgggccaaacacagccggctgaagcgtgagggtggaaaagaaccggattatatgggagaaaataaagagtttttggtgctttataccaaggaatacttgaaaagtcatcctaatattaacttctttatttacggtcatcgccatatcgaacttgacctgatgttgagtgctacggcgcgaatacttatcttgggggactggatcaacttcttctcttatgctgtgttcgatggtgagaacctgtttcttgagaactatatcgaaggagaaacccaactt

SEQ ID NO: 12174 - DNA, 1110 bp, Bacteroides fragilis
atgactgaagataagaatataaataaaacgactccgcaatctgaggaacaagaaattgatctgatagagttggctcagaaagtttgggccggtcgtaaattagtattaaaggtttgtggtgttgccgtgttagtaggacttgtagtggcttttagtattcctaaagagtattctacaagtgtaacactggcaccggaaacaggtagcaagtcttctactggaggcatgggggcattagccgctatggccggtattaatcttggcagttcaaccggagaagatgcactttctcccgaattgtatcctgatattgttagttccacaccttttctattggaaatgttcgatgtgaaggttgctgatcagaaaggcaagattaatacaactctgtatgagtacttggataaatatcaacgggctccttggtggggagcggttgcatcagctcctttcaaagcattaggttgggttgtatctttgtttaaagatgcaccggaggaacagggagatgcaaagatagatcctttctatttgactgcagatcaagctggaatagcggatgctttgagtcatcgtatatctgtttcggtagataagaaaacaggagtgactacacttactgtgacaatgcaggatccattaatttctgcagcattaacagatacggtaatgcattgtttgcaaaattatatcacagattatcgtaccaataaagcgcgtcatgatttggcttttactgagaaactatttaatgaagctcaggagaactactatgaagcgcagcagaaatatgctcgttttatggatggtaatcaaaatatcattatgcaaagtttccgtacagagcaagagcgtttgcagaatgagatgaatttagcttatggagtattcactcaagtgtcgcaacaattgcaattggcgaaagctaaagtacaggaaataactcctgtttatactgtagtacaacctgctacagttcctttgagaccggctaaacctaataaaatcatgattttaattggttttgtattcttagcgggtgtaggtagtataggatggattctctttgttaaagatttattgaacggatggaagaaacagccagaaaaa

SEQ ID NO: 12175 - DNA, 1773 bp, Bacteroides fragilis
atgaaaaaggaaattaaattcagtctcgtatatcgggatatgtggcagtcgtccggtaagtatcaaccccgtgtcgaccagttagtgcgaattgcccctttgattattgaaatgggatgctttgcccgtgtggagaccaatggcggagcgttcgagcaagtcaatttattgtatggtgaaaaccccaataaagcagtgcgggcttttaccaaacctttcaatgatgccggaatacaaacccacatgcttgaccggggactgaatggtttacggatgtatcccgttcctgccgatgtccgtcggttgatgtacaaagtcaagcatgcccagggagtagatatcacccgtatcttttgtgggctgaatgaagtaaggaatattattccttccatacactatgcacttgagggaggaatgattccgcaggcaactttgtgcatcaccttttcaccggtacatacagtagaatattatacggctattgctgataagctgattgaggccggtgctcccgagatttgtctgaaggatatggcaggtgtcggacgtcctgccatgttaggacaattgacaaaagccattaaggaacgtcatcccgaagtgttgattcaatatcatggccatagcgggcccggattgtcaatggcttccattcttgaagtttgtgagaatggtgctgatattattgatgtagccatggaacctatgtcctggggaaaagttcatccggacgtgatctctgtacaggccatgttgaaagatgccggttttcgtgtacctgatattaatatgaaagcctatatgaaggcgcgtgccatgacacaggagttcatcgatgatttccttggttactttatggacccgaccaacaaacatatgtcttctttattgctgaaatgtggcttgcccggaggaatgatggggtctatgatggccgatttgaaaggtgtgcatgccggtattaatatgatattaaagagtaataatcagcctgaactcagcattgacgatctgcttgtgatgttgttcgatgaagtggaatacgtatggcctaagttaggttatcctccactggtaactccattcagccagtatgtgaaaaatgtggcattaatgaatgtaatggcacgtgtgaaaggtgaggaacgctggagcatgatagacaataatacctgggggatgattctaggtaaaagcggtcgtttacccggtccgttggatccggaaattgtagcattggccaaagagaaggggtacgaatttacagatgaagatccgcagaagaactatcccgaccagcttgatgaatatcgtaaagagatgcaggagaatggttgggagtccggacccgatgatgaagaactgtttgaactggccatgcatgacaggcagtatcgtgactataaatcgggagtagccaagaagaggtttgaagaagacctgcaacgtgccaaggatgcggcattggccaaacaaggtttctcagaagaagatgtgaaaaggatgaagcgtgccaaggcagagccaatcactgcgatggaaaagggtaggattatctgggaaatagatgttgaatcgccctccatgcctccggaagtaggccataaatatgaaccggatgatgtattttgttatattgccactccatggaacacttatgatagagtattggctaattttagtggacgcatcattgaggtatgtgccaagcaaggtgctttggtcaataaaggtgatgctttggcttatgtagaaagatgtgaagaaccggca

SEQ ID NO: 12176 - DNA, 2013 bp, Bacteroides fragilis
atgtcctccaaaccataccgtcacttcatagcactcctgctggttttgttttgttcgcgattcgaagcccaagccgaagacctgttcgctaaaacggacagtactcttcaacaatacttgatcagatgtaaggcacaaatcaaagatccggactttctgcaaacaaatgatactcttacgcacatggctcaagaaaaaaatgacaaacggatgcaggtgattgccgtggccctgaaactggattattactactatcaaaacaatccggacagtatccttgtcatggtagaccgcgtgaagaaaatcagccgaaggaataatgaactgaaatatttctactttgcatggggaagccgattgattatctattatatcaaacaacaccaaaccaacactgccatttacgaagcccggaaaatgcttcagtcagcggaggctgataatttcattcccggaatcgtacaatgttaccgtacactggggacgatctacatgactcaatcgaatcctaaactggcttatgaaaacttccggaaacaaatagccctgattgaagaaaatgaaatagaagatatcaatctgcccactcaatatgcttcactcgcccaatgcgctcttgaaatgcaccgccccgacgaagcgctgaaagcactggaaaaaggatcgaaatgtaccaggagttcatatcagatattcactgtacagaaagcctatattctatattatctggaaacaaaagaatacgaaaaagcccggaaaacacttgtggagttggagcaattgttcgaaaaagataaatcactcacactctataaaagcggattattctatatacagatagaatactaccggaacaccggacagtaccggaaagcacttaacgtgatagaagagatcaagaatgattcatcgagcattaacaaatacctggactatacactcacccaaaaacaaggcgacatctattgggaaatgaaccagaaggcccgggctgtccaatattatcgggattatatcctggcaacagactccatccgaagccaggaaatacaaaactcaaccaacgagttctataccattatggaagtagaacagctacacaaagaaaaaaatgaactactgctgcacatgcaggaagaaaaattgcagaaaatcaatatcgcacttgtctcgctggtcattattctggtggcaggaacgatgttacttttccacatctcaaagttgaataaaaaactgaagagatcggaagccaaagtgatacagcagaacaaagaattggtagaaaacggagaagaattacgcaaagccaaagaacaggcggaaaacgcaagccggatgaaaacaacttttatccagagtatgtcacacgaaattcgcactcctcttaattcaatcgtcggattctctcaggtactgagcaactatttcaaagaagaagataatgatgaaatcagagagttcgcctcgatcatcgaaatcagcagcagcaatttactgcggctgatcaatgacgtactcgacatctcttacctagaccagtcggaaatattgccctacgataagcccgaagacatcaacaattgttgcctgctcagcatcgaacgaacccggaacagtataaagaaagaggtatcactccgtttcgaaccgtcatgcggaccacttatgatattgaccaacccggaaagggtagcgcagatactgacccacttgctacacaacgcaattaaattcactgacaaggggaatatcacgctggcttacaccatctcgcccacagaaaaacagattgtatataccgttaccgatacagggaaaggtatcccagtggagcaacaagagtatgtattcgaacgttttgccaagctgaacgatttttcgcaaggaacagggttagggcttcccatctgtcggattattgccgaaaagctaggaggtagcctcatcatagataagacttataccaagggatgccgcttcatacttacattgccgctgataaaagcagac

SEQ ID NO: 12177 - DNA, 4461 bp, Bacteroides fragilis
atgaaagacgtaaagattaaaactacatccattcctgcgaaaccccggtcaaagaactatccggctggggctgttatcacccggacggctggcggcattactgttaacggcggaggcggtggaggtgcttcggttgacattgtaaaggctaccgacacaaagtcgtttaccgatagcaacgtactgtcatcgctccggacgctgttagagatccgttcgcgtatcattgccgaatcggatacaaccacggaattaaccgatgataatacgctttcttcaaagcgcactttgaaggagatagatgcagcgattaaagaggctttgaagaagatagatgatctttatttaagcaaggtaaaagcggatatagctaaagagcctatcactttcctgaaagggctgtttgttggtgatgggcttacatttatcaacgaaagtggcgacacggaattgcaatctttagttgcccagatgaaagttaaagccgctacattggaagtaaccggttcggccaatgttggcacactccattcggaagggaatatttcaacaggtgcggatatttgggctaaaggtgacacgcatactttaaatttactcgttcaggcacttgcaaaaacatacgatctgaatgttgagcacgtcgcaaccctgtttcaaaccatagtcaaggactatatcagttcagaaagattcatccccggactgatgggtgaagggatgaagctatacaaggctatcaatggggattggaaccttgaaatagataatgccgtagtccgtaaggccatgaccatttttgaacttatcatttcgaaagttcgtgcggttaacggcggtctggtgatttcatctgctaacgggcgtgttaagtccgtttcggaaacgtccggcgatccggcttactatgttttaggtatagagggcgacatgatgtttgtcgctgatgacttggtacgttgtcaggtctacacatccggacacgttaaatactactgggttccggttgcctcggttaatgatgattcgattcttatacttaaatccgtatttcccaatggtacaactccggccgttggtgatgatctggttcagatgggtaacctcacgaatccgaacagacagggcattttgtatctcacagcttcggaagatggcaagccgcgcatttctgtactggacggggtaaactccacgtctttggccggaaagaacaaagtgattttgggttgtctcgatggcatgacggatacagactttccggctgacttccaaccctccggatacggcctgtatgcgatgaactgtttcctgaaaggtattttcattctgagaaatggaaagagcattgaacaggagtttagtaatattgctaccgagttagcggctataccgggaaagatcgagcttgccatacgcagtatgaaagtagcggacgttaatctgctttacgactctaaccacaaactaaatgctaacccctatcaaatgggatcgtataagtatgacgttcatttagaagcaggcaaaacctatacccttacagtgtgctataagtgtgcggactctgatgttatcagggcgtataacaatccttcgtacggctggataggcactttgccgaaaagcgcagaagaaacggtactttcgcagcctataacgcctattaatccggatggggcatatttctacttctataagtttccccaacaggaatcaacggagacatacattaaatgggctgtaatcaccgagggtagtgtgggtgtagctaattggataccgtctgcaactgaaagaaaattgaatatcggaggcgaaaacctgatgttacaatcccaacaggcattggatggatcaggcgcacaatatgcgtttcagttatcgaaagcgtggacggatttaaaaggcaaaaccttaacaatctcgttcgactatgcgtatagcaatctaaagatgggatcatcacaaaggttcgggcttgaaaaagctatttataaatcgggcacatcccaatattactatatcggcgcatttaagtatgtagattctaccagccccacggctgacaaaggtaggtacgttcacactatcaaagtccccgaagatatagaggactctttggatactgatattattgcatatatacagttaggcgctggatcagtttgccggatcaataactttcaaatagaaataggagacacggcgaccggatggaagcctgcccctaaagattctttcactgagtcaaaaaagtacaccgacacacaaatacttgccgttgacgggaaaattgaactatccgttaaaactaaggtagaaaatttgggtataggtgctaacaacctgtatagttacacaagttcactgcttaatactttatatccatctcctactattgaaaggcaaatgtctctgcatggtttctatttggttggttcacaaggtaatggaggagctatgcggatacctaatattatcccgcctatccccggtaagtataccgtttccggatggattaaaggtagtcaaaataccccagttggttttactattgatgtgtgtgattctgaaaacgtaattgttaaatcaacagcagataaccaatggagttatttcaagcatacatttaacgtaacgaaaaatacagaggaacaaaaggatgtatataattttgttgatatagaaagaattgattgggcttatatatgggtaaaagactttaaagtagaagcgggtgaaattgcaaccgcatggagtcccaattttcaggatgcagtttacaaaggtgctgaatatactaatagtcaaattagtgtagtcgaaggtaagataacatccaccgttgaaaagataaataccgttgatggacgtgttaccggacttgcttcacgcgtcgaacagaccgaaaaaagtatcacgtctgttgttggtgatattggtgttattaatagtaccaccaataggcatatatcaaagcgaatagatttaagaggatgggacaataataagtttttcccgttggttataagtattccggtttaccacaaaacaagggttgaaataagtaggcctcttgatgcgggatacggaaaaccttcatacggtactcacgatggcggtttttctatgaacttaacgtttgagatgtccggttcgggttggggttcgttgccagcagtaaccaatatctttgactatactaaagcatggacttctgcgggtgcaaagatagttgttgatttgggacaaataactgaaacgtctacgtgtagaatgggtattaggggcggttctatgtatgacgtaaccgtagatgatactattgacccaaacgtaatcaacgtttatcaaaccgattatcacggttcgtataatacatcgttccccgttcgcaccgatggaactgaacccgtccgcacatacggatactataccgaaataaagcagacgcaggaaagcatagctttaactgcgaacaaagtggacgatcaaggtaggcgattaagtgcggctgagttaactctaagttcagaccacgcaaaattaagcgtagtagaacaagcggcaaattccgccaattccttagcaggcacagccaataacaaagccgaagccgcagacggtcgtgtcaccgccacccaaaacggcttagtcgaaaccggaatcaacatcacgtcccgaaaaatcattctgaaagccgataacctgctattccaaaataacacaggtcaacagacagccgccatcaacgcaaacggcaaactgtctgccaatgtgattgaagctgcggaagtggtggcacaggcattttcagcacagaggatcacaaccggaaaccttacggtaactgatggtgcaaagatcggtgcctggaatatatcgggaggctctcttgtttcggcaagcaattcgcaggctaagatcctgttaaacatgtccggtaataaattccttcgtattaacgaagagggggacagccctacaacttcacgcactgcattgatgtccatacgaaacgacaattacagtggtctaagtattgaatcatacggaagttccggttttgctctaagatgtttggctaacgcaggcactgcaaattcgatagaatcgtatggaagtcatattttcgcccaaaggggcggtgaaaagtggaacgctcccggaatgctgtgtaccggatatgtatatcaagcgggtacagtcactaatgaatggggcaacgggtgcaccttaaccagtgcacagaaaatagctactggaaaatacaggatataccacagtttgaagcatctgcagtacgctgttttagtacaaggcttaggggggtatggctgggtattcggtcaggtagagacacaaaacaactcttattttgaggttttaatgcttgacgcaaacaagggtccccgtgattgtccattccgtgtgttcgttgtaggtcgcaatgtttgg

SEQ ID NO: 12178 - DNA, 2412 bp, Bacteroides fragilis
atgaagcaaatttatagtaccctgcttttattagttttactaatattcccatcgttactttttgccacagaaccagagtctgtcgatagagtccctgccatccgtggagtagtctatgacgaaactgatacgccattggcttcggccactgtccaaatagaaggtaccaccatcggaacaacaaccaatagtgaaggccgatttattctgcgtaatctggcacgtaaagtttacaagataaatgtcagctttgtaggatatgtcactcaaacccgtacagtcgatctcacctcgagaagtgtagcgcaactctcgtttacgctcttaccggacgataatttactatcgactgtagaagtgttcggagaacgatataaacaaccgaaaaaactggatgccatcacccgcatgcctttacgtcccagtgaacagatacagagtatttctgtaatctcagaaaaatcgattaccgaacagggggcacttaccgtaaccgatgtcgcaagaaatgtacccggagttactcttttcggatcgtatggcggagtaagagaaagcatgtccatccgcggataccggggagtacctattttaaagaatggagtccggatagattccgatttccgtaccggctctgctttatccgaaatgcagggagtagaaagcatacaggtcatcaaaggttccgcagccgtcacacaaggtatcggaaacgacctcggaagtgcaggcggagtaatcaacgtagtaaccaaaacacccaagttcaccaatgaaggagaagtatctttgcgggcaggcagctggggattgttccgccccacatttgacgtacagtccgttctggataaaaatcagacgatcgctttccgtatgaacggtgccttcgaacgttcggataattatcgtccggtcatccattccaatcgcgtatacatcaacccttcattagaatggcgtccggatgacaaaacaagcgttaccatagaaatggattatctgaatgataaccgtactccttataccagttcagtcaatctatcgaaagatacggaagagaatctgtacgacatgccacacaacaaattcctaggattcaaaaatgataatgtaaacaacaagacgctgacttatgccgcacgcatcacccgccagctgacagataatatcagtgtgcgggcagcatatttcggctcttcatataaagtggataatacaagtacttccgtaaaaaccgtagtcaataaagaatataacatgcgtagaagaacgatttcacgttcattacgcgatgaccgcaactcaactttccagcttgactttatcggcagagatattttcaccggccctgttaaacatacattccaattaggattcgactacaaaaacaccgatctgtcgatcaccaattatacccctgtcaacatagacactatcaacgtactggccccgagcatctcgaatgtgctacctgttgcggttaaatttgttcccgaaaccccagtagaatccaattcttcaagttatggaataatggcacaggaagtaatgacttttaataagtatataaaggctatcctgggactgagatacagttatatcagcagtcaggacggcacaagtgcaggtcccactaccggagatgcctggaatccgatgttaggcatcatgctgactccgataaagaacattaatttgttcggttcatatacaactactaccagccttctccatgcagccagacgaatggagaacggagatgaaataggtccgtcgaagacccgccagtttgaagtgggcatcaagtccgattggctgaataaccgcctgcgctttaacctgacatatttcgatatccttactaaaaacctctcttatagtacttatcatccgggaactactcaacctaccggttattttgataaagcgggaagtctgaaaagaaaaggtattgaaaccgaattaagcggaagtatacttgaaaacctccaagtaatgatgggttacgcttatctggatgcaaaatacgaaaacagcccggcctttaaaaatggttcagccccgatgaataccccgaaacatactgctaacggatggattcaatatcgattcgacaaaggagtattaaaaagactatcagccggtataggagtctatttcgtaggtaaacgtcctgttaatgattttgcaatcaagccggacggacacggctccatgaccaacgaaaagccttttgacatgcccggttatactacaataaacgcccagctggcctatagtatccacaagtttactgcccgtgtatacctgaacaacctgttcgatgcattaggatacaattcgtattatcgcggaggttatatcaatcagatcgatccacgtaatttctcagcagtaatctcttaccatttt

SEQ ID NO: 12179 - DNA, 1203 bp, Bacteroides fragilis
atgaatcctaaaaagattgacgccaatgtttcggtcagttatgtttcgggagtaattgcctattatcaggcagattatgaattggctgaacaacatttacaggacggactgcgtgagttgaagcggatggatgaagagcaggaggtggattactatcatgctttgattgaattctatacactgttggctaaggtatacgagaagcaggaactttataataaggctttggaggcagcccgtaattcactgaaatatgaaactcgcttgtttgacaaaaatagcaataagacgatccagaaattacggacacaatataatctgaatgaaaaggaacgggttgtggagcaattgtccgctattaacgaaaagaaccgacggattaatattctttcggccattcttattgttctggcactggtcactatctttttacttttgaaacgctatcgttcgcgccagcgtattcatgaaggaatgttgcagattgccaaactaaagcagcaggaagctgaacttctggttaagttgcagaagacaaaacttgaggaaagggaacgggagttccagtctttagtgcatgaagcgcaacagcgtaaagttcaatattatctggaaggtcttgaggtggaaagaaagcgattggcgaaggaacttcatgataatgtttccaatgaattattggccatcaagatgaaaatcaccgatggaacaagtagttgtgaggagatcatggacacgttacaaactttgcaagcggaagtacggggcatttcgcatgacctgatgccacctattttcaaatacgcttcgttatcggagattcttcaggattatgtatatcagcataatcagccggggcagaccgaactggagctgttgctcgaaccggaggataactttgacaatttatcgcagaaggtgtcgctggagatctatcgaattgtacaggaagctgttggtaactcgttgaagcatgcacaagccacgttggtgaagattatcctggtgcgggaagataacaaggtgaaattgacggtttcggataatggaagaggatttgagcaacagaccgggaagacgggaattggtcttactatcataaaagagcgtgtggaaaacctgaggggaactctgactttgaactctgctccggaaaaaggaacagagctgatcgtggaaatcgatctggagaatctggaaaaa

SEQ ID NO: 12180 - DNA, 1041 bp, Bacteroides fragilis
atgaagtataagaatatcagagaaggggaacaattgcatttcgatttgcattttcttaaccgcataaagaaacagttcccggggataaaagctatttcgcctgaaataacaggaccttattcgcaagtgatgaataaagctaaaagcggactttttaagattataggaatcaatgaaaactatatgggaattaagatacttaaaatcaacgaagatggacgatattttaataaaggagatgacgagaatacccgtaatgttaccattatcggcgaaaatgtcagtacgaccttatttaataatcaaaaagcgttgggtaagtcgatcaacattgccggtattgattttaaggtgataggcgtactaaagaatgatgatattttcagcgcttcggaaatcaattcggtatatgtgcccttctcaagttacataaactgtattgacaataagactccattgcgcgctttctgtttatatctgaacaaagaagttgattccaagcgatttgagaatgagctgagagccttcatcgctaataaataccaatttgcttatcctgataagcaagccttacagataatcaattttgagacacaaacatctgcttttgagggactctttgatggattgaaaatgtttatctggatcgtaggaatttgttttctgataagtggtattgttggagtaagcaacatcatgtttgtcgtgatcaaagaaaggagtagcgaaataggcatccgtaaggctgtaggagcaactcctaaatccattcttgtgttaatgctgacggaatctgtcatcataactgtaatctctggtatcatcggattgatatcaggtgcaggtattcttgagattataaattggttgctcgaaagtgcccgtcacgcgacaatgataaagcatgtagaaatagatataaatgtagctgttctcgctttggttatcttgattctgtccggtgtcattgccggagcatttccggcaatgaaagcatctgttatacaacccattgacgccattagaaacgaaaatatagga

SEQ ID NO: 12181 - DNA, 414 bp, Bacteroides fragilis
ttgtttactgtttattgtttaccgtttgttattattatggcaaataccctgtgcaaagccgaaaggctgaatagtaagattctgattgagaagatgtttgcgggcggctcaaagtcgttttccatctttccgttgcgtgtggtgtatatgcctgttgaaaatcaagatgttcaggcatctattttactgagcgtttcgaaaaaacgatttaaacgtgcagtaaaaagaaatcgggtgaaacgccagttgcgtgaggcttaccggatgcataaacatcaacttttgcagattcttactgataagcagcaacagttggctattgcctttatctatctttcggacgaattaacgtcctcggccgaaatagaggaaaagatgaagattctactggctcgtattagtgagaaactggta

SEQ ID NO: 12182 - DNA, 1588 bp, Bacteroides fragilis
gatgattgaaataaacggtccttctcttacattgctgtttttgggtttgttcctggcattcatgactttattgaaaacatcgtgctattttgcttcttccgcagtgatgattcctttgcgtacgggagtcgttcgtgatatccgcatcatggtttattctaaagtgatgagtttaccattgggtttcttttcagaagagcgcaagggagacatcattgcccgtatgagtggtgatgtgggtgaggttgaaaactcgattacaagttcattggatatgttgatcaagaatccgattctgattgtcatgtattttggaacgttgattatcaccagttggcaactgactttgtttacattgttagtggttccgggtatgggatggatcatgggtaaagtaggtaaaaaattaaagaggcaatcacttgaggcgcaggctaaatggagtgatacgatgtctcaacttgaagaaactttggggggactccgtattattaaggcttttatcgccgagcaaaaaatgataaatcgttttacggaatgcagtaatgagtttcgtgacgctaccaatagggttgccatgcgtcaggcattagcgcatccgatgagtgaattcttgggcacattgcttattgtggttgtattgtggtttggcggatcactgatattaggaaatcactcttccattgatgctcctacatttatcttttatatggtaattctttatagcgttatcaatcccttgaaggaattttcgaaagccggatataatatccctaagggactggcttctatggagcgtgtcgataagatactgaaagcagaaaataagattgtggagattccgaacccgaaaccgttgaatgggttggaagaacaagttgagttcaaagatatttctttcagttatgatgggaagaaagaagtacttcaacatattaacctgactgtacccaagggtaaaaccgttgctttggttgggcagtccggttcaggaaagtctacgttggtagatttattgccacgctatcacgatgtgcaggaagggacgattactatagacggagtcaatatcaaggatgttcgtatctctgatttgcgcagcctgataggaaatgtcaatcaggaagctattttgttcaatgatacattcttcaataatattgctttcggcgttgagaacgcgactatggagcaggtgattgaggccgccaaaatagccaatgcacacgattttatcatggagaaagaagacggttaccatactaatatcggtgaccggggcagcaagctctccgggggccaacgccagcgcatcagcatagcccgtgccatcttgaagaatcctcccattttgattcttgacgaggctacttccgctttggatactgagtcagagcgtttggtacaggaagcgctggagcgtttgatgaaaacacgtacgacgattgctattgcccaccgcctctctaccatcaaaaatgcagatgaaatttgtgtgctgtacgaaggggaaattgtagaacgcggaaaacacgaagaattattggctaaaaacggatattataaacgactgaatgatatgcagtca

SEQ ID NO: 12183 - DNA, 1260 bp, Bacteroides fragilis
atgaagaaagcattacccaataccaaagtgaccgtcaaactcagaaggtcgaattataaagaagagtggtatctgattatagagtcatacccagtgtataagcgaggttctaaacgggcaagccgtgtggtggaatctatcaacagaactatatccacacccatttgggataagtcatccatagcacgaatcttgccggatggaacattcaactataagcctaaacgtgatttgaatggaattatccaatgccgttcaacgatagaccaagaggcttgcatctatgccgacaatgtgcggaagttacggcagcatgaatacgatagtgccatcctatacactgataaggaaaacgaaatcgctgcacagaatgagcggagcgaacaggattttatcaagtatttcaatcgtattataagcacacgtcatcccaatagttccgattcgattatagtcaactggaggcgtgtaggtgaattattgaaaatgtattcacaagggcaaccaattccattcaaggcgatttccgttaaactgcttgaagatataaagatgttccttctccgtgctccaatgggagggaataagaaaggtactatctcacaaaacacggcatcaacctatttttccatacttaaagccggactgaaacaggcgttcattgatgaatatctgaccgttgatataagcgcgaaagtaaagggaataacaaacatagagaagcctcgtgttgcgcttaccatgaatgaagtgcaaatgttggttgatactccttgcaaggatgatgttttgaaacgtgcgttcttgttctctattctcactggattgcggcatagtgatattcaaactttgaaatggaaacaaattcagcaaacaagcaaaggtacatggcaagcagtagtaattcagcaaaagacaaaaaggcccgattacaagccagtcattcaacaggcacttcaactatgcggcatacgtccagacgatgatgaagcacttgtttttgaaggattgactgatgcctcttggatttctcgcccgttgaaagtctggatagaagcatccggtatcaagaagcacatcaccttccattgtgggcggcatagctatgcttcgctgttgctggaaaatggcgttgacatatacaccatcaagtctttgatgggacatactaacgtcaaaaccacgcagatttatacgcatatcgtaaacgaacaaaaagagaaagccgccaatacactgcatatagaaaatttggattta

SEQ ID NO: 12184 - DNA, 1560 bp, Bacteroides fragilis
atgaaaaaacaatatatgaactatatgaaaagctgcctgctggtaatgatagcctgccttgtaagtatggtgggagcggcacagggcttctctcccgccgctatggaacaattgaaaacaagacgactatggtctcattcacagaatgctgccggtatgccattcgatgatattcagaattattcgaatgttatattgggatatgacttacaggacggaaactattgccgtccgcaagaggggcagaaagaggctatcgtaggtgtatccagtgaaggctttatcaatctgaaaaatgcatatgtgtggggagcatttaattttgcacaaaaaaatctgacagatgccggatataacgcctccattgccgatccattcaggggaatgccttactatgtcgcagaccagcacttaagcaaatggagaaatcaatattacgatctgaagtttcgtgcagctactcctttacttggtaatcattgggcattggggttggaaggtaattatgtagctacattagctgccaaacagcgcgacccgcgtgtggatacccgtttttatacgctgggactgacgccggggattacttacaagttgaataattcacacaagtttggtgcaagtttcaagtatagttctatcaaggaagactcaagaatgagtaatgtcaactcttatgtggatcaggactattatatattatacggtttgggaacagccataaaaggaataggcagcggtgtaaccagcaattatattggagaccgtttcggtggagctctccagtacaacttcagtatgccctctttcaatttactgcttgagggcagttacgatgtaaaagcggaaactgttcagcagagctatacgactcctaaaaaaatagccggtgtaaaagataaaactgctcatgtttctttaacgatgattcaggaaggaaaggactataccaattatatgagaaccacatatacaaatcgtaacatcgatggtattcagtatatttctcaacgcgataactctgaatcacaaagtggctgggtggaattatataataacatccgttctacgtacaaggcacaaaccgcttctcttaattatgcattaagcagaaaccgcgggaatgaatatagttggaaagcagaattaaatgtgaattataccaagcaagacgatgaatatttaatgcctaattctgtacagaatgcagaaaatttatctttaggcttaggtggcaaaaaaaattttgttttaggcaatagtttgaatcgcaggcttttaatagatgttcatgttgcgtataacaataatctgggaggtgaatatgtatatggtggcagccatgcagactatccaactgtaaccgaattacaacaagggctgactaattattatacctgtgattactatcgtattggcgggtcgataacgtattcgcaacaagtcagagaaaacagacgtatgaacttatttgcaaaagttgtattcgatcgtgtaaatacctctgactatgattatgatgggcgtactcatttatcgataagtttaggatgtaatttt

SEQ ID NO: 12185 - DNA, 288 bp, Bacteroides fragilis
atgttgcagattgccaaactaaagcagcaggaagctgaacttctggttaagttgcagaagacaaaacttgaggaaagggaacgggagttccagtctttagtgcatgaagcgcaacagcgtaaagttcaatattatctggaaggtcttgaggtggaaagaaagcgattggcgaaggaacttcatgataatgtttccaatgaattattggccatcaagatgaaaatcaccgatggaaccccattgttatcgggcaagtgggggttattgtgcttggctttgccgatacct

SEQ ID NO: 12186 - DNA, 1170 bp, Bacteroides fragilis
atgacgaaaagaataggaaactccaggctttacatcctgatatttatagggattgtatcagcattcggtccgttcgtgaccgatttttatctgccggccctgccagtgttgagcgaatatttcgatactacggcttcgctggtgcagcttagtctgactttcagtatggtgggattggcagtagggcaattaatcataggtccactgagcgacaaatatggacgtaaactgcctctaatggtctcattagtgatcttctgtatttccacagtaggatgcctttactcgccggagatccatggctttatcttcgcccgtttgttgcaggggttgtccggagccggaggagtcgtgatttccaagtccatagccattgacctttaccagggaaaagaactaacacgttttttcgccatgctgagttccgtacagggattagctcccgtctgtgccccagtattgggcggaatattactcggagcgatggattggaaaggtatcttctggatattattggctataggcatactattgattgtcgccttgtctgccttcaaggaatcgttggagattaagaaacgccaaaaagggaatgtcttttctacattcaaatattatctgccggtactccgtaacaggcaattcatgcgctatgtcttgatacaagcattcgccatgggggtcatgttcacctatatcgcagcatctccctttattttccaaaaccacttcgggacctcaccttttgcttacagcctctgtttcggtgtcaatgcattaggcattatgttgggcagtctggctgtctcccggtttaaagatgcgacagcagctctacgtttcggagtagcaggtttcacaaccatgagtcttccggttgctgctgcactaattttcagtccatccgtctggattgtagaaggaacactgtttttcctccttgcatttttaggattaatccttcccggttccacaacgcttgcacttgatatggaacgtaagaattcgggtaatgcatcggccctgttgggattcctgatgttcgtgtttggagggctgctgtccccgttgacgggaataggcaatatgctttactctaccggtatcattatcgtggcttgctgtgtcgggacatggttctttacttataaagcaaccttatccgcccgc

SEQ ID NO: 12187 - DNA, 3045 bp, Bacteroides fragilis
atggatatcaaagactacatcttaatcattaatgcatataccgaatcattcccttggagtaaccgcttgatctcaacagcaaccaacttcgtaaaagacgaccccaaactggctgtatacaccgaacatatgaacatgataatgatagataatgacagcattctggaccaattcaaagacagtcttttcgacagatacggttcccaccgcccacgtatgctgctgttattaggcaactcttctctcatattgaaagatgatcttagaaaaatgtggggtgacattccaatggttctctgtgccggaaaagactataccgggcctgagcactattatctgacgaaacaacccattcctctttccgaacgtgtaccattggcagaattgtcccaatcctgcaatctcacctacctctatgccaatctctatatccacgagaatgtagaaatgatgttccgtacactcccccggatgaaaagattcatctacgtgggcgacgaacgctttgtcaaccaagtcaacagtcaggagattcaagaaattctacggaccaaacatccggatgtacactataccttcctgtcttcccgtgacataaagaaaaccaaccaactgatcgattcactcaactttgtcgatccccggagcacgggtattctgttttccagctggttccacaaacggcagtttgccggcaacatgatgttgacaatgatcctgcctgaaatcgtttccaccgtatcccctccaatattcgctctcaatatgattgaactgaatgacaaagagagtggaatggtgggtggttacacctacgaccagaatcacttcaatgaaaagctgtccaacatgttttcggaaatcctcagcgggaaatctccacgggatcttccacattatctgcccacagacggtacaccactcatcaactatcaggtattggtccgcaaaggtttgtctcccgacgagtggcccgctcacacccgttttctgaacaaacctatcaccttttgggacaaatataaatatttcctgccgggaacaaccgtttgcatcgccctgctcgtctggtttttcctctatcgtatccgtacgctcacacgtctcagacagatccagttgaaagaaatcgaggctatggctaattataaaaatctgatcgataacatgcctttgctctacatgcaggagaaactaatcgtaaacgaacaaggtgtagccgacgacttgatctacctgaacgtaaatccccatttcgaaaaacattttttccgtagagaggatgtcgtcggtaagcgggccagtgaactgtttcctgaatctctacctgaatttctacacttcatccagatctccctgaaggagaaccgtgccatcacattcccttattacttcacaaagatagacagattctacgacatcgtattaaaaggtgcacatcaggagaatgtcatcgacatcttctgcgtagacagcactgaacttcatcgtgcacagcagaagttgaacgccacaaaccataaactatctatggcgctggaagtagccgacatcattccctggaaatgggacttactcagcaaaaccattctttgcgacatcaataagcccattgaactcagtgcacaaggtaataacgtaagcgaagaacagttggctgtacccgactcacaatacttctcgaaaatatataaggaggaccgcatacgagtggaacaagcttataaagacctgatagaaggacgcttggaaaaagtaaaagaagagtatcgggtgatcaacatccggaatcacactcacaaaatagagtgggtagaagcccaagctgcagtggaaacccgcgacgaaaacggaactccggtgacactggtcggttcttcacaggtaatcaccggacgtaaaaagatggaaatggaactgacttcggccaaagaccgggccgaagaatccaatcgtcttaaatctgcctttcttgccaacatgagtcacgaaatccgtactccgctcaatgccatcgtcggattttcgggaatactggcatccaccgaggaagaagaggagaaacaagaatacgtcagcatcattgagaacaacaatgcattattgttacaactcatcagtgacatcctagacctgtcgaaaatagaagccggtacactcgagttccagtactccgacatcgaactcaacaccgagcttaaaaaactggaaagcaccctaaaactgaaattaaagtcggacgacgtacaactggaatttgttcccggcctccctatgtgcccggtgtgtaccgaaaagaaccggctctcacaactgatcatcaatttggtgaccaatgccatcaagttcacttcccaaggaagtatccgcttcggttacgaacaccgtgacaaagaactctatttctatgtcaccgataccggatgtggcatccctaaggacaaacaggaaagcatcttcggacgttttgtcaaactgaacagtttcgcacagggaacaggcctgggactctccatctgccgtaccctcgtcgagcacatgggcggacatatcggtgtagattcggaagaaggcaaaggttccacgttctggttctccctcccttataaagcggcaagcacttccgccggaacaatgcaaaaaaccgagattcagcccatctcagtagaaaaagacaaactgactatcctaatcgctgaagacaatgaaagcaactaccgcctcttcgaatcgatcctcgggcacgactatcatctgattcatgcctgggacggacgcgaagccgtcgaaagattcaaaagagaaaatccacagattattttgatggatatcaatatgccggttatggacggatacgaagccacgcagaaaatccgtaaatactcagccaaagttcctatcatagcagttacggcctttgcctacgcttcggacgagcaacgggtgatggaaaacggattcgacggatatatgcccaaaccgatcaatgcacggcaattaaaagcacaaatcacggagattatgcaaaaacggatcattttgtta

SEQ ID NO: 12188 - DNA, 1131 bp, Bacteroides fragilis
atgaaatattatctgattgttggcgaggcttcgggcgatttgcatgcttcccacttgatggctgcactgaaagaggaagacccggaagctgaatttcgcttctttggcggtgatttgatggctgccgtgggaggaacaatggtgaagcattataaagagttggcctacatggggtttatccctgtgctgctacatttgccgaccatttttgccaacatgaagagatgcaaggaggacatcgtggcgtggtcgcccgatgtggtcattctggtggattatccgggctttaatctcgatattgctaagtttgtgcatgcgaaaacaaagataccggtttattattatatctctcccaagatttgggcatggaaagagtatcggatcaagaatataaaaagagatgtggacgagcttttttccatacttccttttgaggtaggatttttcaagggacatcgatatcccattcattatgtgggaaatccgacggtagatgaggtgaccgccttcaaggcgtcgcatcaggagtcctttgccgattttattgccgatagtgaattggcagataaacctatcatagctttgcttgcaggtagcagaaaacaggagattaaggataatctgcccgatatgatccgggctgcttcagcttttcccggttatcagcttgtgctggcagctgctccgggcatttctccggaatactatgccaaatttgtaaaaggaacggaactggcggtgatttttgaccggacttatcgtttgctccaacaggcggatgttgccttggttacttccggtacggctactctcgagacagctcttttccgtgttcctcaggtggtttgttatcatactccggtgggcaaattggtgtcttttctccgaaggcatattttgaaggtgaagtttatctcgttggtcaatctgattgccggacgtgaagttgtcagggagttggtggccgatacgatgacggtagagaatatgcgggccgaattggagtgtttgctgtttcgggaggattatcgtcgcaaaatgttggacggttacgaagagatggcacggttactcggaccggccggagccccccggcatgcagctcgtgaaatggtgaaattgcttaaaaaa

SEQ ID NO: 12189 - DNA, 972 bp, Bacteroides fragilis
atggatagcttatctttaataaagtccccgattactacggagctggaagatttcaaaaatctatttgatagttctctgtccagttcaaatcttttgcttaataatgtgattgctcacatccggcagaggaatggtaagatgatgcgccctatccttgtgttgcttgtagcaaagctttacggagaaataaagcctgagacattacatgcggcagtatcccttgaacttcttcatacggcaagtctggtgcacgacgatgtggtagacgaaagtacagaacgtcgcggacagttatcagtgaatgctatttttaataataaagtagcagtgctggtaggcgattttcttttggcaacaagtctggtgcatgccgaacgtactcgtaatcatgatataatcggtgtggtagcgtgtttgggacaagatttggcagaaggggagatacttcaactctctaatgtcagtaaccgggaatactctgagactatttacttcgatgtgatccgtaagaagacggctgccctttttgccgcatgtactaaagctgctgctctttcagtagaagttaccgatgaaaaggctgaatttgcacgtctttttggtgagaacatcggaatttgctttcagattaaagacgatatattcgattattttgagagtaaggagattggaaaaccgaccggaaatgatatgctggaaggtaagcttactctacctgctttatatgtactgaataccacgactgatgcgtgggctcaggaaatggcccttagggtaaaagccggtacggctacagtagacgaaatcacccgtttaattgagtttatcaagcaaaacgggggaatagaatatgctgtgaaagtgatgtatgaatacaaagagcgtgctcttgacctattgcgcactttgccggattcggcagtaaagacctccttgattacctacttggattatgtggtcgatcgtgataaa

SEQ ID NO: 12190 - DNA, 1269 bp, Bacteroides fragilis
atgagtcgcaagaagctacaggaattacaactccaacggcttaaaaaaacaataaatatagcagccaatgccccttattataagaaagtatttcaagagcatggcattactccggagagtatccagtctctagacgacatccgtaaattgccttttaccacaaaggcggatatgcgggcaaattatcctttcggacttgttgcaggaaatatgaaagaagacggagtacgcatccactcttcaagcggcacaacgggaacaccgacagtcattgtccattcacagcatgacttagattcatgggccaatctggttgcgcgatgcttatattgtgtaggtatacgtaatacggatgtttttcaaaacagttcaggttatggtatgtttaccggcggactgggattccaatacggagccgaacgactgggagcattgaccgtacccgctgctgccggcaacagtaagcgtcagatcaagtttatcaccgactttaagacaacagctctgcatgcgatccccagctacgccattcgcttggccgaagtttttcaggaggaaggtatcgatccgcgcagtaccacccttaaaacgctcgtaatcggtgctgaaccgcatacagacgaacagcggaaaaagatcgaacgcatgcttggcgtgaaagcatacaatagctttggcatgactgagatgaacggtccgggtgttgcatttgaatgtaccgagcagaatggcatgcatttttgggaagattgctattatgtggaaatcattaatcccgagacaggtgaacctgtacccgaaggagaaatcggtgaacttgtactcactactcttgatcgtgaaatgatgccactaatacgctatcgcacacgtgaccttacccgcattttaccgggaaactgtccttgtggccgtacccatatccggatagaccgtattaaaggccgtagtgatgatatgttcattatcaagggagtaaatatattccccatgcaagtagaaaagatattggtacaattccccgaactaggaagcaattatctcattacgctcgaaactgtgaacaatcaagacgagatggttgtagaagtagaactgagtgatctttctaccgacaattatatcgaactggaaaagatacgcaaagacattacccgccagctaaaagacgagatacttgttacgcctaaactcaagttggtaaaaaaaggctctttacctcagagcgaaggcaaagctgtcagagtaaaagatctgagaaacaataaa

SEQ ID NO: 12191 - DNA, 2097 bp, Bacteroides fragilis
atgacccgctacttcttcgtcatcctgttaatgggactgataggagtagccattgttgtcaaagcaggcatcacgatgtttgccgaacgacaatactggcaggatgtggccgaccgtttcgtcaaggagaatgtaacggtgaaacccaaccgcggaaacatcatttcgtccgacggcaaactgatggccagttcgctgccggaataccgtatatatatggacttcaaagccggtggagtaaaaaaagacaccatgctgatgaatcatctggacgagatatgcgaaggacttcataaaatattccctgataaaagcgcttcggaatttaaaactcaccttaagaaagggcgcaaacagggaagccgtaactatctgatttatccgaaacgtatttcatatattcaatataaagaagctaaacgccttccggtgtttaacctcaacaaatacaaaggcggattccatgaattggcttataaccaaagaaagaaaccttttggttcacttgctgcccgtacgttgggtgacttatatgccgatacggcccagggagctaaaaacggtatcgagttggcttttgattctatcctcaaaggacatgacggaattactcaccggcaaaaggtgatgaataaatacctgaacattgtggatattcctccggtagacggttgtgacctgctttctaccatcgacgtaggcatgcaggatatctgcgagaaggcattgaccgataaactaaaagagctgaatgccagcgtaggtgtggccgtattgatggaagtggcaaccggcgaagtaaaagccattgtcaacatgacgaaagccggagatggcaattattatgaaatgcggaataacgctatcagcgatatgctcgagccgggatcaacttttaaaacagcttctatcatggtggcccttgaagatggcaagatcactccggaagacggtatagatacgggaaacggtatcaagatgatgcacggtcggcccatgaaagactggaactggtataaaggaggatatggctacctgacggttacgcaaattctggaagtatcttccaatataggaacttcgagcattatcgaaaaatattatggaagtaatccgcaaaagtttgtcgacggactgaaacgaatgagtatcgaccagcccctccaactgcaaatagcaggagaaggcaaacccaacataaaaggtcctaaagagcgctattttgcaaagaccactctgccatggatgagtatcggctatgaaactcaggtacctcccatgaatatactgacattctataacgccattgccaacaacggagttatggtacggccgaagtttgtgaaagcagccattaagaacggagaaatagtgaaagagtatcctacggaaatcatcaatccgaaaatctgttcggagcggaccttgaagcagattcaggaaattctctataaggtggtacacgaaggtctggctgccccggcaggttccaagcaatttgccgtttcgggtaaaactggtacggcacagatctcacaaggtgccgccggatataaatcgggacgggtgaactatctggtcagcttctgcggatatttcccttcggaagctccgaaatacagctgcatcgtttctatacagaaaccgggacttcccgcttcgggaggtttaatggcaggtagcgtattcagcaaaatagccgaaagagtgtatgccaaagatttacgcctggacatcaggaatgcaatcgataccaatacggtagtgattcccgatgtaaaagcaggcgaaatgatagaagcaaggcaagtattggaaggcctaaacatccagacacaggctgaatttaaggctaaaaagaacaaagaggtgtggggacatgcacaggcagcccccaaagcagtaatcctgcagggaaaagaacaattacgcaactttgtgcccagcgtaataggtatgggtgccaaagacgctgtatacctgctggaaagtaaaggattgaaagtaaccctgtcgggagtcggcaaagtaaagagccagtcgttgccccagggaactaccatcaagaagggacaaaccatcagtatccatctgaat

SEQ ID NO: 12192 - DNA, 1317 bp, Bacteroides fragilis
atgcgcgaatttaataatataaaaattgccgtagccggaaccggttatgtcgggatgagtattgccactttactggcacagcatcacgaagtggtggcagttgatgtactgcctgagaaagtagagaaaatcaatcagaagatttctcccattcaagatgattatatcgaacaatatatggccgagaaaccgttgcgtctctcagcgacccttgatggaaccgtagcatactctaaggccgactttgtggttattgctgctcctacaaactacgatccggtaaagaactacttcgacactcaccacatagaggatgtcatcgaccttgtgctcagagtcaatcctgatgccataatggttatcaaatctaccatacctgtaggctactgtcgcagtctatacgttaagtatgcacagcgaggagtcaagcagcttaacttgcttttctctcccgagtttcttcgcgagagcaaggcactttacgataatctctatcccagccgcatcattgtggggactcccaaaatgatgaatagtaatcagtttgatgcagaaaacgaagctatccggactatcgctaatctgcccatgctcgtgcaagccgccaaaacgtttgcagctttgctgcaagaaggagcaataaaagaagatatccctaccctttttatgggcatcaaggaagcggaagcggtgaaactttttgctaacacatatttggcgctacgtgtcagttattttaatgaacttgatacttatgccgaagtaaaaggattggatgcacaatctattatagaaggtgtagggctcgacccgcgcattggtactcactataacaatcccagtttcggttacggtggctactgcctgcccaaagatactaagcagttgcttgccaactatgccgatatacctcagaacatgatgactgctattgtggagagtaaccgtacccgcaaagattttatcgccgatcaggtgttgcggaaagccggttactacactgcttccagtcaatgggatgcccagaaagaacaagatgtcgttgttggtgtcttccgccttaccatgaaatccaactctgataactttcgtcagtcatctatacaaggtatcatgaagcgcatcaaggccaaaggtgcccaaattatcatctacgagcctgcgctcgaagatgatacttctttctttggtagtacggtagtaaacgatctagccaagttcaaacagatgagcgatgccgttattgctaatcgttacgatgcttgtttggatgatgtggcagataaagtattcactcgcgatattttctgcagagac

SEQ ID NO: 12193 - DNA, 1425 bp, Bacteroides fragilis
atgggctggcaagatacatccctgcctttctggacccaaaagacacactacaacgaggtatacgaaactcctaatatggagcgccttgccaaacaaggtatgatgttcacccaagcctatgccagcagtatcagttcgcccacccgctgtagcctgattacaggaactaacgccgcgcgtcaccgggtaaccaactggacatatcccaaaggccagcaaacagaccgcccgagcgatgtattcaatgtagcggactggaatgtaaacggggtttgccaggttcccaatatcgaccacacgtttcaggcaacctcactggcagaaatcctgaaagacaatggctaccacacgattcattgtgggaaagcacatttcggcgccgtcaacactccgggagaaagtccttatcacatgggctttgaagtaaacatagccggacatgcaggaggcggattggcaagctacctgggtgaaaataattacggaaaccggacggacggtaaaccgaatccctggtttgccgttccgggattagagaaatactggggaaccgatactttcgtcagtgaagctctgacgctcgaagctatcaaagcactcgatcatgccaaagaatacaatcagcctttcttcctctacatggctcactacgctatccatgttccgatcgataaagacaaacgcttctatcaaaaatatatcaataaaggattgactcccaaagaagctgcttatgcggccctgatcgaaggtatggacaaaagtctgggtgacctgatggactggctggataaaaacggagaagcagacaataccatcgtcatctttatgagcgacaacggcggtctgtcgagcgaaccggaatggcgtgacggaaaactgcacacgcagaactctcctctcaacagtgggaaaggatcggcttacgaaggcggtgtacgcgaaccgatgatcgtccgctggccgggagttgtaaaaccggataccaaatgtgataaatatttaattatcgaggacttctatccgaccatactcgagatggcacaaatcaaacattataagacggtacagccgatcgatggaattagttttatgcctctgctgacgcataccggtgatccgtccaaaggacgcagcctgcactggaacttccctaatcattggggaaacgacggtcccggcatcggcccgacttgtaccgtacgcaaaggtgactggaagttgatttactactatgacagcggtaaaaaagagttgttcaatattccggaagatataggagaaaagaatgacctggcagccctacatccggacattgtgaaaagcttatctaaagagctgggtgactatttgcgcaaagtaggcggccaacgcccttcattcaaagcaaccggaaagccatgcccatggccggacgaaatcaaa

SEQ ID NO: 12194 - DNA, 864 bp, Bacteroides fragilis
atgacgggatatggcaaagcaactgccgaacttcccgataagaagattaacgtagagataaaatcgcttaatagcaaagcgatggatttgtcggcacgtatcgcaccggcataccgtgaaaaagagatggaaatccgcaatgaaattgcacgtgtgctggaacgtggaaaagttgacttcagcctttgggtggaaaagaaagagtgtgcagacgctgccactcccatcaaccaagtattggtagaaggatattacaaccaaatcaaagctatctccgaaaacctccacattgcagtacctactgactggtttcagactttactccgtatgccggatgtaatgacccgcaccgaaacacaggagttgagtgaggaagaatggggaatagtgtacgcagcagtcaaagaggctgtttcacatttagtcgatttccgaaaacaagagggtgctgctctggaaaaaaagttccgggaaaaaatcgcgaatatccatcgtctgctcgaatcggtaaccccttatgaaaaagaacgggtagataaggttaaagaacgtatcaccgatgcactggagaaaacactcaatgtggactatgataaaaaccgtctcgaacaggaactgatctactacatcgagaaactcgatatcaacgaggagaaacaacgtttgggcaatcatctgaaatacttcatcagtacgcttgaaagtggcagcggacaaggtaaaaagctgggattcatcgctcaggaaatgggacgggagatcaatacactcggcagtaaatcgaaccacgctgaaatgcaaaaaatcgtggtacagatgaaagacgaactggagcagatcaaagaacaggtgctgaatgtgatg

SEQ ID NO: 12195 - DNA, 588 bp, Bacteroides fragilis
atgagtccacgtaaattaatgttttggttgtttgcctgtatctttttagtttgtgccctgcgggccgggttattgacaagtgctgatcaatatatctatcatttacgtaatatgcatgcttctacttttgcatatcggtatgatgattttttgccataccttccgattgttgctatgttcgtgttaaaacttacaggagtaaagagccgtagtaactggaaacgaatgctcgtctctactgcattttcttatatattaatggggaccatagtgcttacaatgaaatcactggcgggggttcttcgtcccgacggttccgatttcctttcattcccttcggggcatacagctacggcttttacggctgccacactactgtataaagaatatggtttcaagacccccctagcgggtattgctaccttcttgccggcagttgtcaccggattcacaaggcagttgaataatcgccattggctgagcgacgttttggcaggtgccattatcggtatcatgatggtagagttagcctattttcttaccgataggctcttaatgaaaaccggtgcacagacttgttccaaatca

SEQ ID NO: 12196 - DNA, 1017 bp, Bacteroides fragilis
atgcttaatttaattaactctatcgttgcgcgtgcgcaagcaaatcgtcagcgcattgtccttcccgaaggtacggaagaacgtactttaaaagctgctaaccagattttgacagatgaagttgcagatttgattcttttgggtaacccggaagaaattaatgcagctgctgccaaatggggactcggaaatattaatagggctactattatagatcctgagaaccatccgaagaaagaagaatatgcgcagttattgtgcgagcttcgtaagaaaaaaggtatgactatcgaagaagcccgtaagttggtgctcgatccgttgtacttgggttgtctgatcattaaaagtggcgatgctgacggtcagttggcaggtgcccgcaacactacgggtgatgtacttcgtccggcacttcagattattaagacttctccgggaattacatgcgtttcgggtgctatgttgttgttgacacatgctccggaatgtggtcagaatggtttgctggtgatgggtgacgtagccgtaactccggttccggatgcttcgcagttggcacagatcgctgtttgtactgcacgtacggcacaggctgtagcaggaattgctgaaccgaaagtggcaatgcttagtttctctactaaaggttcggcaaaacatgagaacgtggataaggtggtagaggcattgaaattagctaaagaaatggcaccggatttgaatatcgacggtgaaatgcaggcagacgctgcattagtgccttcggtaggtgcaagcaaagctccggggtctccggttgccggcgaggctaatgtactgattgttcctagtttggaagttggtaacatttcttataaactggttcagcgcttggggcatgccgatgcggtaggaccgattcttcaaggtattgcacgtccggtgaacgacctttcacgcggatgctctattgaagacgtatacagaatgattgcaatcacagctaatcaggcgattgctgcaaagaatggtaaa

SEQ ID NO: 12197 - DNA, 1533 bp, Bacteroides fragilis
atgtcgaattcttctattaaatcaaaaacggcgctactccgaaacggggaaactcaaaaaggaaatggctatccggaagccaatgattattccgccaggattcttgaaaccatgcagaccggtgtggtctttttcaataccgaacaaatcatttccggcatcaacaacttggcatgcgaggatttacagatcccccgggatccttccggacataaaataacagacatcatttcaatcatccaccaagaaaaagatatcttcccggaactgatcgcccgattgaagtcttcggaaacggatatggagaaattgccaatagacactttgatacgttctctggaaacgaaggtgcaattctttgccagtgggtgtatcatgcagttggagaccggacgttatttattagcattccgtaatacgatggatgaagtaacgcatgaacaccttctgagcatgattctggcaaggacaaagatctttccatggtttttcgacttgaaacgtaataaaatgttaatcgatgcccactggttttcttatctgggtatcccggcaggagactgtgagataacaatcgagaagttcttctccagagtacatcccaacgaacgggatatgcttgcagatgctttgcaaaaacagttatcagaaaaagaaatacccgattcattctcctatcggctgcaacggggcgatggaagttgggagtggttttctgaacagtcgatgtatctcagcaaaaccaatgacggttcaccttatcgtattgtaggcgtatgccatagcattcaggagcataaaaatactgaagataaattgcgcgctgcacgcaataaagcccaagaaagcgacagactcaaaagtgcatttctggctaacatgagtcatgaaatacgaactcccctgaatgctattgtcggtttctccaatcttattgcaggcgggattgtcgacttggatacagaggaagccagagattactcggcattaatcagtaaaaactgtaattatctgctcacactggtctcggatgtccttgatctttcatgtatagagtccgacacgatgacttttaagtttacagtatatccacttacccgacttctgacagaaatctatcagaaatatgaaaacagaatacctcaggaggtacagtttaatttgctgctacccacagataatgttgaaatagaaacagatgctgtgcgcctacggcaagtgatagagcacttgttggataatgcggcaaaatttacagtaaaagggcatatagatatcggatatgccctgtcggatcatggtgagaaaatatatgtattcgttgccgataccggttgcggtattccaagcgatcaatataaaaaagtattcgagcgcttttataaaatcaattcattcgtacagggtgccggtttaggactttcagtctgcaaaactattgtagaaggtctgggaggtacgattaatgtatattcgcaactgaaagaaggttctcgtttttccgtgatcctaccgctaaacagactccataaa

SEQ ID NO: 12198 - DNA, 2649 bp, Bacteroides fragilis
atgatttggagaaagaaagaaaaaaagaaagcgcagtatcaatttaattccgaacgggtattcctggttgccacccaacctgctaagactgcatattcttatttccagacttcgagtgtgggactgagtgaagaagagatcgggcaacgacaatccgcctatggtaaaaatgaaatctcacgagagcaaaagaagaatccactcgtacttttcatccgtacgttcatcaatccgtttatcggtgtgttgacggcgctggctgtcatctctctggtcattgatgtagtaatggcccgtcctgaagaccgtgagtggacggctgttctgattattatctcgatggtagtttgcagtgccattctccgcttctggcaggagtggaaagcaagtgaagctactgactcattgatgaagatggtcaaaaatacctgtttcgtaaagcggttttcgggaagtgaggaggttgatattatggaattggtaccgggtgatgttgtttgccttgctgccggtgacatgattccggcagacatccgcatcattgaatcgaaggatctgtttgtcagccaggcatcacttaccggtgagtccgatccagtagagaaatttcctgaaataaacggtaggagacacagtcacggaagcgtcatcgagcttgacaatatctgctacatgggttctactgttatcagcggatctgccaaaggaatcgttttcgggacgggtaacgatacctatctcggaacgatagcccgaagtttagtgggtgaacgtgcgactaccgctttcgacaagggaatcagtaaggtcagtttcttactgatacgctttatgctggtgatggttccattcgtcttctttgtcaacggtttcacaaaaggcgattggttcgaggcattcatatttgccttatcggtggctgtgggattgactcctgagatgcttccgatgatagtcacagcaaacctctcgaaaggtgctgtatcaatgtcgaagaaaaaaacggtcgtgaagaatctcaatgccatccagaacttcggggccatgaacattctttgtaccgacaagaccggtacgctgacctgcgataaaatcgtattggagaagtatatcaatgcggatggcagcgatgatcattcccgaaggatattgcgccacgcattccttaacagttactttcagacaggtctcaagaacctgatggacaaagctatccttgcccacgtacgcgaagaaaatctggaacatctgacggaaggttacacgaagatagatgagataccgtttgatttcagtcgacgtcggatgtcggtagttattgaagatcagcagggaaaaaggcaaatcatcacgaagggagctgtggaggagatgctgaatatttgctctcatgccgagttcaacggtcaggtatatgaattgaccgataaactcagaagtaaggcaaagagaatcagtgatgatatgaatcgtaacgggatgcgggtacttgccatcgcacaaaaaagctttatcagcaaggcacgggactttgccgtcaccgacgaggacgagatggtacttattggttacctggcgtttcttgatccccccaagccctcttctgccgaggctatccgccaattgcgcgaatatggtatcgaggttaagatactttccggtgataatgatgtaatcgtgaacgccattgcccggcagataggcattgatacgtgccattcggtaacaggggttgagcttgaaggcaaggacggggaagaattacgtgaaatagtgggacaagccactctcttttccaggctgacgcctttgcagaagagcgagataatcatgattcttcagcaaaatggcaacacggtaggatttttgggtgacggggtgaatgatgccggagcattgaggcagtcggacattggtatttccgtagattctgccgtggacattgcgaaggagagtgccgatatcattcttttggacaaagatttgagtgtgctcaaagagggtgtcttggaagggcgtaagacctttggcaatatcaccaaatacataaagatgaccgccagttccaatttcggcaatatgttcagtgtgatgttcgccagtgcatttctgccgtttctgcccatgttgccgatacatctgctcattcagaaccttttgtatgatatctcgcaaactaccattccgtttgaccggatggatgccgagtttctgaagcaaccccagaagtgggacgcatccgatctgagtcggtttatgatttacatcgggccgataagttccgttttcgatattgccacctattgtttgatgtggtacgtgtttgcctgtaattcacctgagcaccagactctctttcagtccggttggtttgtcgagggattattgtcacagacattgatcgtacatatgatcaggactcgtaagataccgttttttcagagtcgtgccacctggccggtgctagggttgaccttcctgatcatggcaatgggcatagctattcctttcacatcgtttggcctgtcgataggacttgaaccgttaccgttgagttacttcccctggctggtgcttatcttggtatcctactgtgttcttacacaatttatgaagagctggtatattcgaagattttcgaaatggtta

SEQ ID NO: 12199 - DNA, 1050 bp, Bacteroides fragilis
atgtcagttttatgtagcgttccgcaaataccggcgggagcctgtacgggtattaccttgaagagcaaggatggtgcaaccgttgtcgcacgtaccattgaatgggcggaaagtgtaatgaactgtatgtatgtggttgtgccgcgcgctcaagagttgcagtcactgactccctccggtatggatggacttaagttcagggcaaagcatggctttgtgggcctggcggtagagcagaaggaatttgtggtggagggcatgaacgaaaagggactttccgccggattatattattttccgaactatggtaggtatcctgtttatgatgcggcacagagggacaagagtcttgcggattttcagttggtatcatatgtgctggcagaatgcagcacggtagatgaagtgaaggaggccctttcgcaggtgcgtgtcatcaatattgatccccgttcgtccacggtgcattggcgctttaccgaagcatccggaagacaggtggtgttggagattgtaaatgaaatgatgaacttctacgacaatccattgggcgtgttaaccaattcaccgggtcttgaatggcattggaccaatctgaacaattacatcaacctacaaccgggcacgttacctgaacataacttcgggccgttggagccgaagtctttcgggcatggcagtggtctgctgggacttcccggtgattttacacctccatcccgttttgtgcgtgccacctttttccaacttacggcaccacaacaacccgatgcaaaaggaagtgtgttccaagcgttccatattctgaacaactttgatattccgacgggtagtgaacagccctggggaaaggcgtcagccaatgtaccgagtgccacccagtttaccgttgcgtgcgatatacgggaccagaaggtttattatcgtaccatgtacaacagcaacatccgttgcattgatttgaaaacgataaatttcgacaatgtaaaatatcaagcggatcctttggatgaaacgaaggagcaaccggtggaaatgaaagtgataaaa

SEQ ID NO: 12200 - DNA, 2301 bp, Bacteroides fragilis
atgaagagatataaaaaatatatgtttatcattttgtcggttctgttggcgggaggctgtgttcaggaggacattaacgaggccctgcgccgggaagccgaactgaatgtacggatgggaaaactccgggaatggatatccgataccaataatgaagtgaggctgcttgccacgatagtgaatacgataccgactcatgattacattgagagtgtgaccgaattgcctgatggaagcggtacactgattgtttttcataaaggaggagatattcttataaagaatggcctgacggggaataaaggagaaaatggcaatgacggtgccaatggtgagaatggcagtgatggagcaaacggcacggatggtacggacggtaaagacggcgttgacggtcagaacggagccgacggtcaaaacgggtcgaacggaactgatggtaccgatgggcataatggcagtgacggacaggacggtgccaatggtgagaatggcagtgatggagcaaacggcacggatggtacggacggtaaagacggcgttgacggtcagaacggagccgacggtcaaaacgggtcgaacggaactgatggtaccgatgggcataatggcagtgacggacaggacggtgccaatggtgaggatggcaaagacggagttgacggtaacgacggtaaagacggcgtgaaaggtcctgcaggagatactccgttgctgggtgccaaacgggatacggatggcaattattactggactgtacaaataggtggcggagcggtagagtggctgacggatggagaaggtaacaaggtgatcatgactcctgtgaatggtgtcactccttctgtcggcatagctaaagataccgatggtgaatactattggcaggttactgtcggaggtgtaacgaaatggatcacaggaggaagcggagagaagatagtggctacggtgacagatggcagcccgtccatctttgcttctgtgaataccggagatcctgaatatgtcgtgtttaccatgactgacgggagtatctataaagtggctaaaaccggagacagtaaattgatattcaatgaaacggggccacttttcttccgtcgtggagtaacgcaggacgttacgtttgattgcagcagtttccgacagatagtaaaggtggcaggaacatgggatgctacgattaattatcagccgaaagctttgcaggggacgctgactgtgaaagcacctgctgccggttcggctctgccggcttcggaaagaataacgatagaaggcacagatgctttgggaaatactgtccgggcagacatcctggtaacgttgtattatcgtattgaacttccgaagttcaatagttctctggtttatgatgtattgatggagggagttaaagtaggagaaatatgccgggagtatgtgccggtgtattccacgacggaccgggctacagtagtctattcttataatgctgcttcgcgtacttttggttccggactgatcttggaaaacggagcatcgatacagcatgacggaacaggatatacgccggtcgccggcaatccatcgtccactgccatacttacggaagacggtagccggtatgtgatggcggcagatggggcagacggactggtgaacgggactgtttgcgggctgaaagcttccttggctgtcgatgtgcagggatatgcttacagggttgtaaaaataggtagtctctactggatgggagaaaatctgaagacaacccaatttaatgatggtactcctattcctaccggttttgccacatctctggattggggaattcagtgcgggaaaggttttccggcctgtcaggtcgaccgggcggttaatgccaatgctccgggagctatgcaatatcgcaacctgtacggtgtactttacaatcagtttgcaatgaaaggaaatatagctccccaaggatggcatgttccttctaaagcagaactgcaagcattggtagactttgtgggggcagatgcacgtaaactgaagtcgacagctgttgggaaaggaattggaaattggttggaggatacgggaatagaggcgaacaatctgaccggttttacggctttgcctgctaatacggttgatggcggtaatggcagtaccggagcccaggaaacaacagggcaatggtggtcgacggaaacgagttatcgtatccggatgtcctacaaatctaattctgtagaactgttgacttctggcaatgcgttggcgggtgaaggtaacagcattcgttgtgtccgggatgcaaattat

SEQ ID NO: 12201 - DNA, 390 bp, Bacteroides fragilis
ttgctctatcactcaatgaaggatgaagtgcagacgcacgccttcattgagaagtggagccggtcgaaaagaatcatattgcctgtagtaacaggcgacgagttagaacttcgcgtttacacaggcccccaagatctcgccataggttcgtatggcattgccgaaccaaccggagcgccattcaccgattacgaaacaatagatctggctgtgattccgggtgttgctttcgatcggtacggacatcgtttaggccgcggcaaaggatattacgaccgtttattacctcaaattccggctcccaaagtcggcatttgtttcccgtttcaattgatagaagaagtacccgcagaagcattcgacttccgtatggatactattatagcacaa

SEQ ID NO: 12202 - DNA, 1428 bp, Bacteroides fragilis
atgagtgaatcgagtcatgtcggcctatggaaccgctgtcttgaaattattagagacaatgttcctgagtcgacatacaaaacatggtttgttcccattgttcctttaaaatatgaggacaaaacgttaatcgtacaagttcccagccagtttttctatgaattcctggaagataaatttgtggacttgctacgtaagacgttatataaggttataggcgacggcacgaagttgatgtacaacgtgctggtggacaaaagttcaggggcaaccgtgaaccaggagtctactacccgctctacggctattccccaatccggacttccccgtgttgatgaaaggaaagctccgggcttgctgcgtgcaccggccgttcaggatcttgatccccatctaaatccgaactataactttgagacctttattgaaggatacagtaataagctttcaagaagtgttgccgaagctgttgccgagaatccggcaaaaacagtcttcaatccgctgttcctccatggagcatcgggagtaggaaagacccatttggccaatgccatcggtacccgcatcaaagagttgtatccggacaaaagagtgctttatgtttcagcacacttatttcaggtacaatataccgattccgtacgtaacaatacaacgaatgacttcatcaacttctaccaaacaatcgatgtattaattattgatgatattcaagaatttgcaggtgtcaccaaaacacaaaacactttcttccatatctttaatcacctacatcagaatggcaaacagctgatattgacttccgaccgtgctcctgtattattgcagggtatggaagagcgcttactgacccggtttaaatggggaatggtagccgaattggagaagcctaccgtagaactgagaaaaaacatattaagaaataaaattcatcgggatggattacaattcccttcggaagtaatcgactatattgctgagaatgttaatgaaagcgtgcgtgacctggaaggtattgtcatttccatcatggcccactctaccatttacaataaagaaatcgatctggacctggcacaacgcatcgttcgcaaagtcgttcgttgtgagacaaaagctgtcactatcgatgatatcatcaacgtagtttgcaagcacttcgatctggaatcatctgctatccataccaaatcaagaaaaagggaagtcgtacaggcacgccaagtagccatgtatttagctaaaacacatacagacttctctacttccaaaattggaaaattcataggcaataaagatcatgccaccgttttgcatgcatgcaaaacagtaaaagggcaatgtgaggttgacaaaggattccgatcggatctggaaaacatagaaactttactcaagaaaagaaacgtgagtaacggtgaacgg

SEQ ID NO: 12203 - DNA, 1146 bp, Bacteroides fragilis
atgagaaagaataagtttaaatcatttgcttcacgcctgaataaggatggcgatcatccggaaaagatatcatttgaatctccggaagaacaagccgaatatgataagctcgactttctctggaaccgatgtctccccgaagaaacgggtaaaccggatatatgggcaaaagtgcaggcaaaaataaatgccgacaacactccggtccgtcttgccttgaagagcaataagacggcaaggttgttcagtattctgaaatattcggcagttgcagcttctgtagccctgttaataggagccggctgttttcttttattgaatgatgaagagagacatgatctgaataaaatagcacaaagtctgcaaacagaaattccacaggatataaaagaagttacgctggtggtttcggatcaaaagaagatagaattggacaataatgcccagatcgtctattcggcaacaggtcaggtgcaggtcaactctaataaacttgtggaagatgacattaaagaggaatacaatcagattattgtcccgaaaggtaagcgttcacagattgtcttagccgataacagtaaaatatggatcaattccgggagtaaagttatctatccccgtgcatttgaagggaaatacagagaaatttatgtggaaggagaagtgtatctgaacgtaacacatgatacttcgaaaccgtttatcgtgaatacttccggatttgaagtacgcgttttgggtacatccttcaacatatcggcttataaaaatcaggaaaaagccgcagtcgtattggtagaaggttcggtcaatgtaaaagaccaacaaaatcatcatataaagatggtacctaacgagaaagtagaacttaatcaagaaggtatatcaggaaaagaaaaagtaaatgcccgtgattatatcagctggattgacgggatatggaccttgcagggagaaagcctaaagcaagttttgttacggctgcaagattattacggacaaaacatccggtgtgatgctgcgatagagaacgaacaaatgtttggtaaactctttttaaatgatgatttaaatcaggtaatgaagtcaattctatctatcttgcctgccgaatacacaatgaaaaacaatgtaatctatatagaa

SEQ ID NO: 12204 - DNA, 1212 bp, Bacteroides fragilis
atggaaccaatcagactgaataccattgaagaggcgatagctgacttcaaagaaggtaattttgtaattgtggtagatgatgaagatcgtgaaaatgaaggtgatttcattattgctgccgagaagattactccggaaaaagtaaatttcatgctgactcacggtcgtggagtactttgtgctccaatcacagaagaacgttgcgctgagttggaactggatatgcaggtgtcgtccaacacttcaatttacgaaactccgtttactgttactgtcgacttgcttgaggggtgtacaaccggagtttccatgcatgaccgtgcaatgactattcgcgctttggctgatccgaagacaaaacctgccgacctggggcgtccgggacatatcaatcctttgcgtgcccgctctcgcggggtacttcgtcgtgcaggtcataccgaggcaagtgtcgatctggctaagcttgccggattatatcctgccgctgcattgatcgaaattatcaatgaagacggcaccatggcccgtctgcctcagttggtagaagtagcccgtcgcttcggattgaaaataatttccattaaagatctgattgcttatcgtctccagatggagtctattgtcgatagaggtgttgaagtggatatgcctacacagttcgggcatttccgtctgatacctttccgccagaaatcaaatggaatggaacacattgcattgataaagggaacctgggatacagacgaaccgattctggtgcgtgtgcactcttcttgtatgacgggtgatatctttggttcatgtcgttgtgagtgtggtgaacagcttcacaaagctatggaaatgattgaggctgccggtaaaggggtgatcgtttacatgaatcaggaaggtcgtggcatcggcctgatgaataagattgctgcttataaacttcaggaagaaggttatgacacggtagatgccaatctccatttgggttttgatgccgatgaacgtgattatggagtcggtgcacagattttgcgtgagatcggagtgaagaagatgaaactgatgactaataatccggtgaaacgtatcggtctggaagcctatgggttagagattaccgagaatgtgggaattgagattaagccgaatccttataatgaacgctacctgaagactaagaaagatagaatgggtcatacgcttcattttaataag

SEQ ID NO: 12205 - DNA, 879 bp, Bacteroides fragilis
atgcataaagctggttttgtaaatatagtaggaaatcccaatgtgggtaaatcgacactgatgaatgtgttggtaggcgaacgtatctcgattgctacgtttaaggcgcagactactcgtcaccggattatgggtatctataatacggatgatatgcagattgttttttcggatactccgggagtattgaaacctaattataagttacaggaatctatgctgaacttctctacttcagcattggctgatgcagatgtcttgctttatgtgacagacgtgattgaaactcctgataagaataacgaatttattcagaaagtacgtcagcagtcggcgcctattttgttgttgattaataaaatagacctgactgatcaggaaaagcttgtgaaactggtagaagagtggaaagagttgcttccgcaagctgaaattattccgatttcggcagctacgaagtttaatgtagactatgtgatgaagcggatcaaagacctcttgcctgattcccctccttattttgataaggatcaatggactgataagccggcccgtttttttgtcaacgagataatccgtgaaaagatcttgttgtattatgataaggagattccctattcggtagaagtagtagtggaggaatttaaggaagatgcaaagaagatacatattcatgctgtgatttatgtagaacgtgattctcagaaaggcattattattggaaaacagggtaaggccctgaagaaggtggctactgaggcgcgacgcgatctggaacgtttttttggaaaaactgttttcctggaaacgtatgtgaaagtagacaaagattggcgcagttcagataaggagttgcggaattttggctatcagttagat

SEQ ID NO: 12206 - DNA, 1473 bp, Bacteroides fragilis
atggcaactcagaataaaacagatataggcctgattggtttagctgtgatgggagaaaatttagctctgaacatggaaagcagaggttggaacgtatcggtgtataatcgtacggtaccgggtgtggaagaaggcgtggtggaacgtttcatcaacggaagggctaaaggcaagcatatagagggcttcacggatatagaggcttttgtagaatcgatcgctttgcctcgtaagataatgatgatggtacgtgccggtagtccggtggatgagctgatggagcaacttttcccgtatctttctccgggtgatatattgattgacggtggtaactcgaattatgaagatacgaaccgaagagtgaaactggcagagtcgaaaggttttctgttcgtcggtgccggtgtttcgggcggagaagagggagctttgaacggagcttctatcatgcctggcggttcggagaaagcatgggaagaggtgaaaccgattttgcagagcattgcggcccaagcgccggatggtactccgtgctgtcagtgggtgggacctgccggatcgggacattttgtgaaaatgatacacaacgggatagagtatggtgatatgcagttgattgctgaagcttattgggtgatgaaggagctgctggatatgactaatgaggagatggcatctgtgttcacccgttggaatgaaggtaaactacggagttatctgatagaaattacaggtaatatactccgccataaagataagacaggggcctatctgattgataagatcctggatgccgccggacagaaagggacaggcaaatggtcggtgattaatgccatggaattaggtatgccactgggattgattgctacggccgtttttgaacgcagtttgtcggctcggaaggaactgcgtgaagctgctgcccggcaatatcaatgcaggcactcgatggctgtatataataaacaagatacggaaaaagagattttctcggcattgtatgcttcgaaactggtttcgtatgctcaagggtttgcggtgttgcaacgtgcttccgatacatttggatggaacctcgatctggcttcgattgcacggatgtggagaggcggttgtattattcgcagtgttttcctgaatgatattgctgcggcatttgaggcaaaagaaaagcctaaacatctgttgctggccccttattttgaagaagagatcaaaggtctgttgtccggctggaagaacttggtggcacaagccatgcgtgaggaactgcctgttccggctttctcttcggctttgaattatttctattcgttagtgtcggctgatcttccggccaatctggtacaggcacagcgcgattatttcggtgctcatacatttgagcggaaagatgagttacgaggagtctttttccatgaaaactggacaggacacggaggagatacaaagtcgggtacgtataatgta

SEQ ID NO: 12207 - DNA, 921 bp, Bacteroides fragilis
atggtggataccaatgacgagtggattatgactcgtattggagtaaaagaaagacgaatactgaacgaagaaggattaggtacttcgtacatggcccgtaaggcagctaaacagttgatgaaaaaaacgggttcgaatcctgatgatattgatttggttatcgttgcaactactactcctgactatcatttcccctcaacagcttctattctttgtgataaactcggactaaaaaatgcttttgctttcgatctgcaagccgcttgtagcggattcttgtttttgatggaaacagcagccaattttatccgttcgggacgatataaaaagataatcattgttggtgcagataagatgtcatcaatggtagattacacagagcgtgcaacatgtcccatctttggcgatggagcggcagcctttatggttgaaccgactacagaagatctgggaattatggatgctatcttgagaactgatggtaagggattgcctttcctccatatgaaagcgggcggttcggtttgtcctccttcctatttcactgttgacaataagatgcattacattcaccaagaaggtagaacagtatttaaatatgctgtttcaaacatgtctgatgtgagtgcagctatagcagaaaagaatggtctgacgaaagataacatcgactggattgttccccatcaagccaatatgcgcatcatcgaagcggtagctcatcgcatggaagttccgatggagaaagttctggtagatattcagcattacggtaacacgagtgcaggtactctgcctttgtgtatctgggattttgaagagaaacttaagaaaggcgataacatcattttcactgcgtttggtgcagggtttacctggggagccgtgtatgtgaaatggggttacgacgggaaaaaagaa

SEQ ID NO: 12208 - DNA, 1338 bp, Bacteroides fragilis
atgaagataattattgctggtgccggagctgtaggcacccatttggctaaattactctcacgcgagaaacaggacatcatcctgatggacgatgacgaagagaaactaagtacgcttagttctaacttcgacctgatgactgttacggcctctccttcgtccatatcaggactgaaagaggtaggcatcaaagaggcagacctctttatcgccgtcactcccgatgaaagccggaatatgaccgcatgcatgcttgccaccaatctgggagccgaaaagacagtagcccgcatcgacaattacgaatacctgctgccaaagaacaaagagttcttccagaaactgggtgtcgactcccttatttacccggaaatgctggctgccaaggagatcgtatcgtccatgcgtatgagttgggtgcgccaatggtgggaattttgcggaggatcacttatcctgatcggtacaaagatgcgtgaaaaagccgaaatactgaatgtcacgctggccgaactaggtgcgccggatattccctatcacgtagtagccatcaaacggggtaccgaaaccattatcccccgtggagacgataccatcaaactgcacgatatcgtatacttcaccactacccggaaatacatcccttacatccgaaaaattgccggaaaggaagaatatgccgacgtacgcaatgtgatgattatgggcggcagccgcatcgcagtccgtacagcacaatatgtaccggattacatgcaggtaaaaattgtggataacgacataaaccgctgtaaccgcctgacagagttgctcgatgataagaccatgattatcaacggagacggacgggatatggacctgttgattgaagagggactgaagaacacggaagctttcgtagccttgaccggtaactctgagaccaatatcctggcctgccttgccgccaaacgcatgggagtgagcaaaacagtggcggaagtggaaaatatcgattacatcggtatggcggaaagcctggacatcggcacggtaatcaataaaaaaatgattgccgccagccacatctaccagatgatgctcgatgcagacgtttcgaatgtgaagtgcctgacctttgccaatgcggacgtagcagaattcacagtacccgaaaacgccaaaattaccaaaaacaaagtgaaagacctgggactgcccaaagggaccactatcggtggcctgatccgcaacggagaaggtatactggttacgggtgatacccttattcaggcaggtgaccacgtcgtcgtattctgcctcagcatgatgatcaagaagatagaaaagtactttaat

SEQ ID NO: 12209 - DNA, 2586 bp, Bacteroides fragilis
atgaattttaacaattttaccattaaatctcaggaagctgtacaagaggctattaacctggcacaaagtcggggacaacaagccatcgaaacggctcatatcctgtacggagtgatgaaggtaggcgaaaatgtgactaactttatctttcagaagttaggactgaacggacaacaaatctccctcgtactcgataagcagatcgactctttcccaaaagtttccggcggagaaccttacttgagtagggaagcgaacgaagtctttcaaaaagcaacacagtactccaaggaaatgggcgatgagtttgtttcattggaacatcttttgctggctttactgacagtaaagagcacggtgtctaccatcctgaaagatgcaggaatgaccgaaaaagaattgcgtggtgccatcagtgaattgagaaaaggagaaaaggtgacctctcagtccagtgaagataattaccagtcactggaaaaatatgccattaatttaaatgaagcagcccgtagcggtaaactcgaccctgtgatcggacgtgatgaagaaatccgacgggtacttcagattttaagtcgacgtacaaaaaacaatcctatattaataggtgaaccgggtaccggtaaaacagctattgttgagggattggcacaccgtattcttcggggtgatgttcctgaaaacctgaaaaataaacaggtatactcacttgatatgggcgcactcgttgcaggagctaaatataaaggagaatttgaggaacgactgaaatcggtagtgaatgaggtgaagaaatcagaaggtaatatcatattattcattgatgaaatccatactttggtaggggcaggaaaaggagaaggtgctatggacgcagctaatattctgaaacctgcacttgcccgtggagaactacgctctatcggtgctaccactctcgacgaatatcagaaatattttgaaaaagataaagctttggaacgtcgtttccaaatagtacaggtagatgaaccggacaatctgagcacaatatctatcttacgtggattaaaagaacggtatgaaaatcaccatcacgtacgtatcaaagatgatgcaatcattgctgccgtagaattaagcagccggtacatcactgaccgttttttacccgataaagcaattgacctgatggacgaagctgccgcaaaacttcgcatggaggtggattctgtccctgaaggattagatgaaatctcacgaaagattaaacagctggagattgagcgagaagctataaaacgggaaaatgatgaaccgaaattacagacaatcggcaaagaattggctgaattgaaagaacaggaaaaatcatataaagcaaaatggcaaagcgagaaaagcctgatggatataatccagcagaacaaagttgaaatagaaaatcttaaattcgaagctgacaaggcagaacgtgagggaaactatggcaaagttgcagagattcgctatggcaaattgcaggaactgcataaggaaattgaagatacccagaaaaaattgcacgaaatgcaaggggatacagccatgataaaagaagaggtggatgctgaagacatcgctgacgtagtatcccgctggaccggaattcctgtaagcaaaatgatgcagagtgaaaaggacaaattgctccaccttgaagaagaattacatcagcgtgttatcggacaagacgaggctattgcagctgtgtctgatgctgtacgccgcagccgtgcaggcttacaggatcccaaacgacctattggttccttcatcttcctgggcactacaggagttggtaaaaccgaacttgccaaagcgcttgccgaatttctgtttgacgatgaaacgatgatgacccgtatcgacatgagcgaataccaggagaagcacagcgtttcgcgtttagttggagcgcctccgggatatgtaggatatgacgaaggcggacaattgacagaggcgatccgtcgcaaaccctattctgtagtattgtttgatgaaatcgagaaagcacatccggatgtatttaatatcttgttgcaggtactcgatgacggacggttgacagataacaaaggccgtgtggtaaactttaaaaatacaatcatcattatgacctccaatatgggcagcagctacatacagagccagatggaaaaactgaacggcgccaacaacgaggaagtagtggaagaaaccaagaaagaggtaatgaacatgttaaagaaaaccatccgtccggaattcctaaaccgtatcgatgagactatcatgttcctgccattaacagaaaaagacataaaacagattgtcttgttacagattaagagcgtacaaaagatgcttgccggtaatggagtagaactagaactgacagatgcggctttggatttcctctcacaggtcggctatgatccggaattcggtgcacgtcctgtaaaaagggctattcagagatatttactcaacgatctatcgaaaaaattattggcacaggaagtagaccgtagtaaagcaatcattgtagatgcacaaggagacgggttagttttccgtaac

SEQ ID NO: 12210 - DNA, 672 bp, Bacteroides fragilis
atgggaaaactatatgtggtaccgacaccggtcggaaatttggaggatatgacattcagagctattaaagttctgaaggaggccgacttgattctggctgaagatacccgtacttccggaatcttgctgaaacactttgaaattaaaaatgtaatgcaatcccaccataagtttaatgaacataaaacggtggagagtgttgttaatagaataaaggcaggcgaaacaatcgctttgatttcggatgctggaacgccgggaatctctgatccgggctttcttgtggttcgtgaatgtgtacgtaacggtatcgaggtgcaatgtttgccgggtgctacagcttttgttccggcattggttgcgtcgggattgccaaacgagaaattttgtttcgaaggctttttgcctcagaagaaggggcgcatgacaaagttaaaatcactggtagatgaacacaggacgatggtattttatgaatcaccccatcgtttgttgaagacgttgacacagtttgccgaatatttcgggcctgagcgccaagtgtctgtatctcgtgagatttcaaagattcacgaagaaacggttcgcggcactttgagtgaactgatagaacactttaccgctaccgaccctcggggcgagattgtgattgtacttgcaggaatagacgat

SEQ ID NO: 12211 - DNA, 1743 bp, Bacteroides fragilis
atggggaatgaagaactaatcaaacaggtgactgagaaagccgaaaagtggctgaccccggcgtatgatgccgaaactcaggctgaagtgaaacgcatgctggagaacgaagataagacagaattgatcgaggccttttacaaagatctcgagtttggtacgggcggactccgtgggatcatgggcgtaggtaccaatcgtatgaacatctatactgtcggagctgctacccagggactctctaactatctgaacgcaaactttaaagatatgaaacagatttcggttgtagtcggatacgattgccgtaacaacagttctctgtttgccaagatctctgcggatattttctcggccaatggcattaaggtatatttgttcgaagagatgcgtcccactccggagatgtcttttgccatccgtcatctcggttgccagagcggcattatcctgactgcttcacacaacccgaaagaatacaacggttataaggcttattgggacgacggtgcgcaagtactggctccgcacgataagggcattatcgatgaagtgaataagattgcttctgctgccgatatcaagttccaaggtaacccggatctgattcagatcatcggagaagatgtcgataagatatatctggatatggtgaagactgtttctatcgatcctgaagcgatcgcccgccataaagatatgaagattgtatacactccgatccacggtacaggcatgatgctgattccgcgtgcactgaagatgtggggattcgagaacgtatataccgtgcccgagcagatgattaaggacggtaacttcccgacagttgtctctccgaatccggagaatgcggaagctttgacgatggctcttaatctggctaaagaaattgatgccgaccttgtaatggcttccgacccggatgccgaccgcgtaggtatcgcttgtaagaacgataaaggcgaatgggtattgattaatggtaaccagacttgtctgatgtatctttattacatcatcactcaatataacaaactgggcaaaatgaccggtaatgaattttgtgtgaaaactatcgttactaccgaactgatcaagaagattgccgataagaatcacattgagatgctcgattgctacaccggtttcaaatggattgcccgtgaaattcgtttgcgtgaaggcaagaagaaatacatcggcggtggtgaagaaagctatggcttcctggctgaggactttgttcgtgataaagacgctgtttctgcttgctgcctgattgccgaagtggctgcttgggccaaggataacggaaagactctgtatcagttgctgatggacatctacgttgaatatggattctctaaggaatttactgtaaacgttgtgaaaccgggtaagagcggtgcggaagagattaaagccatgattgataatttccgtgctaaccctccgaaagagttgggtgcttcgaaagtggttctgtcgaaagattacaagactctgaatcaaaccgacgcagcgggccatgtgactgacatcgatatgccggaaccatcgaatgtactgcaatatttcacagaagacggtggaaaagtatctgttcgtccgtcaggaacggagccgaagatcaaattctatatcgaaatgaaaggtgagatgggatgccgcaactgttttgctactgccgatgcagaagctactgaaaaagtagaagcagtgaagaagtcactgggtatt

SEQ ID NO: 12212 - DNA, 984 bp, Bacteroides fragilis
ttggtgaatggtctagttcagctgctttcaggaacagttgagatagaaagtcatcaaaacagcggtacgacctttaaagtaaaattacctttggtcgaagactctaaggatatgattgcaccggacgaaactttggatatcgttaactcacccgacgtagtggcagatactgtatacctgctcaataactccggactaaaagaggatatgaatgctgcaaatgccgagaaaaagatgactgtacttttggtggaagataatccggatatcaataacattttaaaaagtaagctactccgtttatataaggtgaaaacggcttataacggacaggaagctgtagagttgctaaaaacacatatcatcgacattatcatcagtgacattatgatgccttatatggacggatatgaattgagtaaatatattaaaacttctcgtgaatactcccatatcccggtcattctcatcacttcacagccttcgaaagaaaacgaattgcaaggtttatctgcaggagccgacgcctatatcgaaaaaccattcactttcgatgaattgaatcttagaattaccaacttgcttaaagccaaaaataatatccgcgaacattatcacgacatgaaaatattccaactcaatgaagaactcaacaacaaagacgaggaatttatcaaatcattgacacaattcgtcatcgaacacattgaggacccagaattgagtgtcgaccaactgaccactcacatgaatatcagtcgaactcaactatacaataaactgaaaaaactattaaacctgagtgcaaccgagtttatcaataaaatcaagatcgatgttgctaaagtaaagattataaagactaatctgactattgctgaaatctcatggcaactcggattcaataatcccagctatttcagtaagacattcaagcgtttttgtggagtgacacctaatgaatttaaaaacggtaaaagccaa

SEQ ID NO: 12213 - DNA, 234 bp, Bacteroides fragilis
ttgactgcggaaattttaaaccataacatatttaataataacaaaatgattgtagtacctgtaaaagaaggcgaaaacattgaaaaagcgctgaagaagtttaagagaaaatttgaaaaaactggcatcgttaaagagttgagaagcagacaacagtttgataaaccgtctgtaactaaaagacttaagaaagaacgtgcagtttacgtgcaaaaacttcagcaagtagaagat

SEQ ID NO: 12214 - DNA, 2436 bp, Bacteroides fragilis
atgataattagtaaaaatcctttgggcgacatagccaaactaaacaggatttgtgcttcggcacagatcggatggtgggaagtgaacttcactacaggaaagtgttttatttcggaaaccctgcttaaatcattggaagtcagtagtgaatggttagacattgacgagttgatgtctaccgtacgacaggattatcgtaagcgcattacggatgagtttacctccatacctcggaagggggtgttcgaacagacctttcctgtgacttccggtcgcggtaatgtattctggatacattgtgcgttgagcatggaggaggagaatgaagaagggcaattgattgccaccggatatggccagcggatagagagtccggagacacaaggttatcaatgtgcatggaatcagcgcatcaacaatttgctctattgccagaactccattgccaactcgctcctgaaacttttgagtaatgataccggtgacgaattgtttgaagaaatgctggctgacattctgtacttctttaaaggtgcccgggtctacatcgtgcgctacaactggaaaaacggaaatcaaagctgcctttatgaagtggcggcctgtaacgtgatcaccctgaaagagaaactacagaatatctgttcggaagatgctccctggttctatcagcagatacatgctaatcgtcccgttattttgaactcacccgacgaactgcctccgcttgccgtgcgtgatcgcgaagtactggccgaaaacgggacaaactcgatgatgctggcacctctgatgcgtgaggaaggggtatggggatatatgggtatcgacatcgtagacggataccggaagtggaacagtgaagattatcaatggttctcttcgctggcaaatatcattagtatctgcatggagctgcgcatcatcaaagagcgggtgatgcacagtgagaaattgtttcacgatatattcaccaatattccggtgggtctcgaactatataataaggaaggtatgttgctggactgcaataaccgcaacctcgagatattcggtgtcggcgataagaaccggatcgtcggactgaacctgtttgaaagtcccaatatgacccgggatatacatgaaagccttcgggcaggccgtcccggtacatttcatctgaaatacgatttcgatgaagaacgcaggctttttcagtcggagcgaagaggagtgatggatctcgacatacggagcctgatgctttatgatgcggaagacaacctgtcaaactacctgttggtcaatatcgataatacggagcgcaacaatgcgctgagtaaggtgcacgactttgagaacttcttctctattatctctgattattccaaagtggggtatgccaaaatcaatctgctggatcacaccggattcgccgtccgccagtggtatcgtaatctgggagaaagccatgatacacctttggcggacattatcggtatcttttcacacatgcatcctgatgaccgtaagtcagtgctcgatttttatgaaaaggcgaaagcgggtacggaacgcttctttgacggtgatctgcgtattcgtccggcagatggttcggatcggtggaactggatacacaagtcttctatggtgactgcctatcagtcacccaatccacggttggaactggtagaggtgaactatgatataacagtccagaaagagacggaagcggagcttcgggccgcacgggacaaggcggaagagtccaatcggctgaagtctgctttcctggcaaacatcagtcatgaaatacgtacgccgctgaatgccattgtaggcttctccgatcttctgatgacggttgacgatccggcagagcaggaagagttccgccggaccatacagaaaaacaatacattgcttctgcaattgttttcggatatcatcgatctttcaaagatcgatgcgggatcgtttgagtatatgtcgaaacctgtctgcctttatcagttctgtgccatgatggtgcagaagatgaggaacaaggtgcccgaaggagtcgaactgcagattgacgaggactcaccgctcgatgcctggttcagtgccgacagcggatatctgaatcaggtggttaccaactttatgagcaatgcgattaagtttacgcatcgaggcaccatcactgtcggctatcggatcgatgcccggcagcaacttgaaatgttcgtagaagatacaggtatcggtatttccattgaaaatcaggaagctgttttcgaccgctttatgaaagtggacagttttgtacaaggtaccgggttggggcttcccctgtgcaaaagcattatcgagaagatgggcggacacattggcgtaatctccgagttggggaagggttcacgcttctggttcacgcttccagctttttcttgtatacccacacgc

SEQ ID NO: 12215 - DNA, 1229 bp, Bacteroides fragilis
gatacgtgcgaggaaatcctcgtcacgataacaagaaacaaaacacgaagcctgctgacggcattcggagtattctggggcatcttcatgctggtggccctgatgggaggcggacaaggaatgcaggagatgatgcaagccgaatttgaaggcttcgcaaccaactcgggtttcatggcctcacaaaagacaggagaggcttacaagggattccgcaaaggacgctattgggatattgaaaacgcagatattgaacgaatccgcaaaaaagtaaaagacatcgatgtaatcactccatcgatagcccgctggggatcgacagccatttatggagagaaaaagtacgattgcagcgtgaaagggctttatccggactatgcaaagattgaaaaccaggatatggcttacggaagatttatcaacgacgtagacgtacgcgagggacgcaaagtgtgcgttatcggcaaacgtgtttacgagagccttttcaacccgggcgaagatccttgtggtaaatatgtacgggtagacggcatttattatcaggtgataggcatgtgtgtgtccgaagaaacatgaacatccagggccgggcttcggaagccgttgtgctacctttcagtacgatgcagcaagcctacaacatgggaaaacgtatcgacgtgatatgctataccgtgaaaccggggaaaaaggtaagcgaccttgaaccggagatagaagccatccttaaagaggcccattatatatcgccggatgacaaacaggcagttatgaaactgaatgcggaggccatgttctcaatgatggataatctgtttaccggtatccatgtattgatctggatggtaggcttgggcactctgctggcaggggctatcggtgtatcgaacatcatgatggtgaccgtgaaggaacggaccaccgaaataggtatccggcgtgccatcggtgcccgtccgaaagacattttacaacagattttatcagaaagtatggtattgactaccattgcaggcatggccggcatctcttttggtgtactgatcctgcaattaatggaaataggcgtcaactccggtaaggaccattattcccacttccaggtgtcttttggtatggctatcggaacctgcctgttactggtgacgctgggactactcgccggactggcacccgcttacagggcaatggctatccgaccgatagaagctatcagggatgaataa

SEQ ID NO: 12216 - DNA, 1152 bp, Bacteroides fragilis
atgttcgacaatttaagcgaaagactcgaaaggtcgtttaagattctgaaaggtgaaggcaaaatcaccgagatcaacgtagcagaaaccctgaaagacgtgcgcaaggcactgctcgatgccgacgttaactataaagtagccaaaggattcactgatacggtgaaggaaaaggcactgggacagaacgtgctcacagccgtaaaaccgagccagttgatggtgaagattgttcatgacgaactgacccagctgatgggtggagaaactgtcgaaatcgacaccaaaggtcagccggcagtcatcctgatgtccggtttgcaaggttcgggtaagaccactttctcgggtaagctggcccgcatgctgaaaaccaagaagaacaaacgcccgttgctcgttgcatgtgacgtttaccgtccggcagctatcgagcagcttcgcgtactggccgaacagattgacgtaccgatgtactcggagatcgacagcaaagatccggtttccatcgcccagaatgccatcaaagaagcacgtgccaagggatacgatctggtaattgtcgatacggccggacgtctggcagtcgacgaacagatgatgaatgagatcgctgccatcaaagaagccatccagcccaacgaaattctgttcgtggtagactctatgaccggacaagatgcggtcaacacagccaaagagttcaacgaacgcctcgactttgacggcgtagtgctgaccaagctcgacggtgatacccgcggtggtgcggccctctctatccgttcggtagtgaacaaacctatcaagtttgtaggtacgggcgagaaactcgatgccatcgaccagttccaccctgcccgtatggccgaccgtatcctgggtatgggtgacatcgtttcgttggtggaacgcgcacaggaacaatatgacgaagaagaagctaaacgcctccaaaagaagattgccaagaaccagttcgacttcaacgacttcctcagccagatctcccagattaagaaaatgggtaatctgaaagagctcgcttcaatgattccgggtgtgggcaaggccatcaaagatatcgatatcgacgacaacgctttcaaaagcatcgaagccatcatctactccatgactccggggatccac

SEQ ID NO: 12217 - DNA, 1137 bp, Bacteroides fragilis
ttgattcatactaactatactttccatatatttgcagtattcaacacacatcacatctttaatgatgaaaataaaaaaacgataagacaatacgaaattatgattaatactttaacatcgttgagattcatatttgcaataatggtttttggagcacattgctatgttatagacaatgttttcaatacccattttttcaaagagggatttgtaggcgtcagcttcttttttgtgctaagcggctttattatagcatataattatcaagagaaactgaaagacaacaaaatagacaaacgcactttctgggtagcacgcattgcgcgtatttatcctttacattggctgacattgtttattgctgctattttagggagttacgttatagcctcgggaactttagattggcttaagcatttcttagcttcgctcactttgacaaatgcttatattcccagagccgactactttttctctttcaacagcccttcatggagtttatgctgtgaacagcttttttacatctgcttcccattccttatacctttagcaaaaaattacaagtatttgctttctgtttttggaattgtagcgatactaatggtcgtcggcatgtactttactccggaagatgaaataaaaggcttctggtatgtcaatccaattacccgatttccggatttcattgtcggcatgttactgttccaattgtatgaacgcttgaaaaacaagaatatcactgtcttgcaaggaagtatcattgaaatctcatctattatcttatttttaattttctacctctatgccgccgatatacctaaagtataccgatattcatgttattattggctccctgttgcggtgattctgattagtttttcacttcagaaaggtatcttttcccgcattttatccaaccgttttctagtgatagggggagaaatcagttacagtttttatttgatccatctatttgtcttattgacatattcagaatggcaaaaagaaaataatctccatacggaatggtacatttccgtcccgattctattcagtatcatcattctattaagcctgctttcttactactattttgagaagcctatgaataaacgagtaaaaacattactaaacaga

SEQ ID NO: 12218 - DNA, 1008 bp, Bacteroides fragilis
atgaaagtagctattgttggcgtaagcggagccgtaggacaagagtttctacgcgtgctcgatgagagaaatttcccgttggacgagttagttttgttcggttctaaacgtagtgccggaactaaatatactttccgcggtaaacagatcgaggtcaaacttctgcaacacaacgatgactttaaaggggtggacattgctttcacttcggccggtgcaggcacgtctaaagagtttgagaagactattacccggtatggtgcggtaatgatcgataactccagcgctttccgtatggatgccgatgtacccttggtagtgcccgaagtaaatgcagctgatgctaaagatcgtccacgtggtgtgattgccaacccgaattgcacaaccattcagatggttgtcgcactgaaagccatcgaagagctttctcatataaaaactgtgcatgtatctacttaccaggcagcgagcggtgccggtgcagcagctatggacgaactctacgaacagtatcgtcaggttttagccaatgaacctgtcactgttgaaaagtttgcgtatcagctggccttcaacctgattcctcaaattgatgtattcacagaaaacggatatacgaaagaggaaatgaaaatgtataacgaaacacgcaaaatcatgcactctgacgtgaaagtaagtgctacttgtgtacgtgttccggcacttcgtgctcactctgaaagtatttgggtggaaacagaacgtcctatttcgatagaagaagctcgtgaagcttttgccaaaggtgaaggattggtattgcaagacaatcctgccgagaaagaatatccgatgcccttgttcctggcaggcaaagatcccgtttatgtaggtcgtatccgtaaagacctgaccaatgactgtggattaaccttctggattgtaggtgatcaaatcaaaaaaggagccgcactgaatgctgtccagattgccgaatatctgattaaagaaggaaatatcgga

SEQ ID NO: 12219 - DNA, 1167 bp, Bacteroides fragilis
atgattcaaaactctatctccgacaatcgtatcgtctggctcgacgtcatccgctgtgttgcaatgataatggtcataggcgttcattgtatcgaccctttttacatttcgcccacaatgcgggctattccggaatacacgcattgggcagcgatctatggttcactgctccgtccgtcggtacctctgtttgttatgatgacgggactgcttctgctccccgtaaaaaaacaaccactgggtaaattctacaaaaagcgcatttaccgtgttttgttcccttttcttatatggtcggtgttgtatagcatgtttccttgggttacaggcgtactcggactaccgaaagagatcatcggtgacttcttttgctatacacaagggcaggaatcacaaagcctgatagactctcttaaagatgtggcaatgattccattcaacttcagccataaagagaaccacatgtggtatatctatctacttatcggtctgtatctctacatgccattcttctcggcatggatagaaaatgccgaccgaaagaccaaacgagcttttctcctgatatggattatctcactcttcatcccttatttgaaagagtatgttgccaattgtttgttcgaaagaagcggatatgtattcggcacggacacgtggaatgaattcgggctcttctattactttgccggattcaacggctatttattactggggcattatgtcaaaaaaggaaatgactggagccttatgaaaacattcatactctgcatactcatgtttgccgtcggatattatatcacttatacagggttcagcaccacagcgtcaaatcccaatgcgacggaaacggagatggaactcttctttaccttctgcagccccaatgtgctactaatgactttggctaccttcttactattacaaaaggttgtcatcaccaactctactgtcattaaagtattggccaatatgacccagtgtggtttcggcatctatatggtacactattttgtcgtaggtcccttcttccttttaataggaccttcgtcattgcccatccctttgcaggttccactgatggctatctgcatattcctttgcagttgggcatttactgcactaatttataagctgatgccacaaaaagccgtttggtttatggga

SEQ ID NO: 12220 - DNA, 2424 bp, Bacteroides fragilis
atgaaaacatcaattaacaaactatgtattgctgcgtcgatactggttacggctgcgggcatatccgcttgtgtagatgacaacaaaactctctatgatccggagtataagactcctaatccgatggaggaaatcagtgcaccgaccggatttgactggtcgtcgacccatgccattaaattcaatgtagaggttaacgacgaatttgacggacagtattattataccgtagaaatagtagataaaaacccgcttgaagcaacgacagaagagccctataataccttagccaaaggagttgccaggaagggagaaacttatcagaccgaagtggtatcttccaaagataccaaatatctttatgtccgtcagactgacccacgtggcagagaccggattaaacaggtagaaatcgacgagtcaacctcccatattcagtgctcttttacaggtacatctgcaatcaaaacgagagcttttgcaaccaccagggggaataacggaggaattgacattccgaaaagaacagaacaaagctatgacatcagccgggctatcccggtaacaagtccttcacaggttctgcaaggaggccgagcctatattgttacgggaaacttttcaggtaaattcacagatacctctctcagcaactcgaacaaagcgaccgtctatatacaaggaacctgggaactggcacaggtcacccaagacttcctggatattattgttttgaagggtggaaagattaatggaaaatatctgatgctgcagaatacaagtactttaacaatccaatccggagcagaagtatctttatccgatcaattgatatgtaacacatacagcactatttgcaatttcggtgatctgaaaacaaagaatatgaaattgaacaccaacgatattctttacaatggacacaaaacggacatcacgaacagtctggatgcttcgcaaggaggcaacatccacaatttcgggaaactggatgtagagaatacgataaagctaaatacgccttccattgtatataatgcgccagaatgtaagatagaagctaagacatatgaagctgcgggaagtacgaatgtgaacttcggcgaaatggaatttgatacttatgatagcggtggagcgggaggttcgctatataacaattgtatgctgtttgtagagcacatgaaggcaggcggcatcgtttatctggatcatggagtgatagccgaagaaaaagaagacgatgaagagaacgaactcttcgaagaagccgatgatattgagttctatgacaatgctaaagtgactttagcgaatggttcgatgataaaagccaaaaatataattgctaaatccggtttatcggttaacggtgaaggcaatgaaacctctttattaaaagcgaccgaaaaagtacaaatccaaaattgggatgtccgttttaatggcagattgtgtatcaccggaaagatcagttgctccaatccggacatgtatcaggcaggaagtgaagtaaccttctccgaaagtccggacgtaatcattaccggctgcaacggaaaagcagaggtacccgatccggctcccgagccttccgatccggtgttccccatcattgtagatgacaatcataactatacatatctgtttgaagaccaatggcctttgtatggagattacgatatgaacgatatcgtactggaggttaaaaagaggaaaataagcatcgataaacacaataaagtcaccgaattcgatctgtctgtcgaactgcgtgcggtcggtgcgcagaagacaattgccgcagcgatcatgtttgatgaaattccggcatctgccgtcacacaagctgtcacctacgccgacaattatcagccggtatcttttgagctgacagacaaaaacatagagaagggacaagagtatgcagtagttcctctattcgacaatgcacatacattgatggaacgtccgacaggctcgtttgtcaacacgatatccggaagtgacaacaatcaaaagaatacccagaccattcatttcacactcagattcgactcgtctgttgcaccaagcagtgatgctcttaatatcaataacttgaatatttttatcatcacagacaggggaagcaaacgaaaagagatccacgtagccggataccggccgaccctactggcaaacactgagttattcggagggaataacgacgcctcttctctcaatggaaagaagtattacatcagtaaagataacctggcttggggaatcatggttccgacccaatttaagtggccattggaatatacacagattcaaaaggcatattctcaattcgccggatgggtcaccacgggcggagcggataacaagaaatggtggaacgattttgataacacaaaagtgttccaaaccaataaaaat

SEQ ID NO: 12221 - DNA, 2787 bp, Bacteroides fragilis
atggataacgatattgaacgatttcggcaaatggcgtccatggcgcaactcggatggtgggaagctgatttcacagccgggcattatgtatgctcagaatacctctgcgatttattgggacttgaaggaaataccatatcttttacggacttcaggaaacgggtgcgtgaggattatcaggaacagatagtccgggagttcaatgcttccatccatagggagttttatgaacagactttccccattcactccaaagagggaatcgtgtggttgcacacccgtttgggagaacgtgaagaaataccgggcaggggagtcgtttcattcggcatcatacagcgggtagaagctcccaatgatacttccgaacgggttctggaacgtgtcaacgacttgctgtacaggcagaactccatttcccattcactcttacgctttctcaaagatgatagtgtggatctctgtatcatggaaatattgaaggatatcctcgatctttttcatgggggacgcgtgtatatttttgaatatgatgaatattaccgctatcaggactgtacttacgaggtggtggccgaaggagtgttgccggagatcgatagcctgcaacgtatcccgactgacagtttaccttggtggaggcagcagaccctgtcgggcaaaccggtgatactggattcattggaccagcttccgaaacatgcaaaagcggaatatgccatcttgagccgccagaacatcaagtcactgatgatcactccgctgatagccggcgaacatgtatgggggtatatggggatcgatctggtgaagaattatcgcaactggaataatgaagacttccaatggttatcgtctcttgccaatatcatcagcatctgtatcgagctgcgtaaagcgaaagacgaagctgtgcgcgaacgttcttttttgcgtaatctgttccgcttcatgccgatggggtatatacgtatgactatggtccgggatgctgccggactaccttgtgattaccggatagccgatgctaatgatttgagttcggaactcataggaatgtctctttccgattacgtgggatgccttgccagcgagttgcatgcggactttaaggccaaggtggattatcttctcgatgtgatggagggcagtgtgcacaaagagactgatgtctacttccatcgcacccagcgcagttcccattgcatcgtgtattctccggaaaaggacgaggtggtcgctctgtttctggactctaccgagacgattcgtgcccatagggctttagatcgcagtgagaagcttttcaagaatatctttgccaatattcccgcgggagtggagatttacgataaggatggcaatttgctcgacttgaacaactgggatatggaaacctttggtgtaaaagataaagccgatgtaatgggagtcaacttctttgagaatccgaatgtgcctcttgaaatcagagaacgggtacggaacgaagacctggtcgatttcagactgaactactcttttaataaggcttccgattactaccattccgataaaagtaatataatcgagctgtatacaaaggtcagtaaactctttgacagccaagggaacttcaacggctatgtgctgatcaacatcgataatacggagcgtatcgatgccattaaccgtatccgtgattttgagaacttcttccttttgatatcggactatgcaaaagtaggttatgccaaactgaacctgctgagtaaacgtggctatgccatcaaacagtggtttaagaatatgggtgagacggaggatattccgctttcatccgttgtgggcgtttatgataagatgcatcctgaagaccggcagaaggtctttgacttttacgagaaggtattggcgggtgaagagaaggacttccgtagcgaaatgcgtatcctgaaacccggcgctaccaacgagtggaactgggtacggatgaatgtggtagtaaccaagtttgaaccggagcatggggaggtggagattatcggcattaattatgatattacggaactgaaggagacggaagccatgcttatcgaggcgaaagagaaagcggaaaccatggatcggctgaagagcgctttcctggcgaatatgagtcacgagatacgtacaccactcaatgcgattgtcggtttctcgggcctcttggtcgatacggaagacatggaggaacgctgcgaatacatcaagatcgtacaagagaataatgacttgctgctgcagctgatctcggacatcctggacttatcgaagattgaggccggtacgtttgagttcacctacggggagacggatgtgaatatgctttgtgaagatatcgttcgcagctctcagataaaggttccccagggagttgaattagtattcgatccgcatccttcggattgcactgtgataagtgaccggaaccggttgcatcaggtcatctccaatttcgtgaacaatgccctgaagtttacctcctcgggcagcatccatgtgggatatgaaaagaaggaagagggtgtggagttttatgtaagcgacacgggaatcggaatctctaaagagcaactgacgcatatctttgaacgctttgtgaagctgaacagctttatccacggaaccgggctcggactctccatctgtaaaagtattgtggagcagctgggcggcgtcataggagtggactcggaagaagggaaagggtcccgtttctggttcaccattccctatattaacagcgaacagtcaatcgttaacgat

SEQ ID NO: 12222 - DNA, 1032 bp, Bacteroides fragilis
atgttactgttgacagcttacagcccgtatatcaatcccgaagtgcatccggtgcagtcatgcctgggactgacttttcccatttttctcgtcatcaacttctgctttctgatcttttggctcatcgtgcgttaccgtttcgcactggtacccctactgggattcctcctttgctatccgcagttgcgcacctatatgcctgtcaacccgggaacggccggacaaccggaaaacagcatcaaactcctttcgtacaacatcatgtcctttgggaacatgaagaaagagaacggacaaaaccccatcctgaattatataaaaaacagcaacgccgacatcgtctgcatgcaggagtatgccggctccgaaaccgccaagatacatctcagcaataaagagatcaggcaggcattaaaggattatccgtatcacaacatcaagcaagtgggaaaaaccggagcaggcagtcaactggcctgttactcgaagtttccgattctatcggcacgcatgctcgactaccggagcaactacaacggcagcatggtttacgagatcaagataggaaaagacaccgtgctgctgataaacaatcaccttgagtcgaataaacttacccgagaagacaaagtggtgtatgaagacatgctgaaagatccgaaggcgggaaaagtgaaaagcggtgtacggcaactcgtcaataaactggcagaagcttcggccatccgctcggcacaggcgcgcaccatcgctcaggaaatagcccattcaccttatccgtcggtcatcgtttgcggcgactttaacgactccccgatttcgtatgcccaccgggtcatctcgcaagatatggacgatgcttttactgaatcgggatgcgggctgggcatctcatacaaccagaataaattctatttccggattgacaatattttggtcagtaaaaacctgaaagcgtccggatgcacggtggacaattccatcaaagactcagaccattatcccatctggtgctatattacgctccccgat

SEQ ID NO: 12223 - DNA, 1137 bp, Bacteroides fragilis
atgaacgcattaaagaatttaagcctgattttgttgctttctctggcatttacaggctgccacaacaaaagctcaaaaatcaatgatttcaacctgctgctttatgctcccgaatatgcctccggcttcgacatcaaaggggcgggcgggaaggaaagcgtactgataaccgtcaggaatccctggcagggagcggacagtgtaaccacatggctgtttatcgtccgcaacggtgaagaggttcccgaagggtttgcaggacaggtactcaaaggagacgccaaacgtatcgtggcgatgtcttccactcatatcgccatgcttgacgcaatcggtgaagtccggtgtataaccggcgtttcgggaatcgactacatttccaacccagacatccaagcccgccgcgacagtattggcgatgtcggctatgaagggaacatcaactacgagttgctgctctcgctcgatcccgacctcgttctgctctatggggtgaacggcgcaagcgcaatggaaagcaaactcgaagaactcgacataccgttcatgtatgtcggcgattatcttgaagagtcgcctctcggcaaggccgaatggatggtagtgctttcagaagtcacaggaaaacgtgagaagggtgaaaaagcctttgccgcaatcccggtcagatacaacgccttgaaaaagaaagtggccgacagtaccctcggcactccttcggttatgcttaatgttccctatggcgactcgtggttcatgccttcaacccaaagttatgtagcccgcttgattactgatgcgggaggccgctatatctaccagaagaacacgggaaacgcttctatccccattgacttagaagaagcatatctgctcgcgtcggatgcggacatgtggttgaacgtgggaatggcgaactcccttgacgacttgaaggcatcatgtccgaaattcaccgatacccgatgtttcaaaaatggagaggtgtataacaacaacgcccgtaccaacacagccgggggtaacgactattacgagtctgccgtcgtgaatcctgacatcgtgctccgcgacctcgtgaagatattccatcctgaactggtgcaggaagagtgtgtgtattacaagcaactgaaa

SEQ ID NO: 12224 - DNA, 1611 bp, Bacteroides fragilis
atgattacagtttctaacgtttcggtacagtttggtaaaagagtcttgtttaatgatgtaaatctgaagtttacaagtggaaattgttatggtatcatcggtgctaacggtgccggtaaatctacttttctgcgcacgatttacggtgacctcgatcctacaaccggaaacattacattaggtccgggcgaacgcctttcggtgttgagtcaggaccactttaaatgggacgcttttacggtaatggataccgtaatgatggggcacacagtgttgtgggacatcatgaaacagcgcgaagccctttatgctaaagaagattttacggacgaagacggtttgaaagtttccgaactggaagagaagtttgccgaactcgacggatggaatgccgaaagcgatgcggcgatgttgctgagcggtttaggtgtgaaagaagacaaacattatacattgatgggtgaattgagcggtaaagagaaagtgcgtgtgatgttggcacaggcattatacggaaatcccgataacctgctactcgacgagcctaccaatgacttggatatggagaccgttacctggttggaggagtatctctccaacttcgaacataccgtgttagttgtgagccacgaccgtcacttcctcgattctgtatgtacacataccgtcgatatagattacggaaaaatcaatctttttgccggtaattacagtttctggtacgaatccagccagttggctcttcgtcaacagcagaaccagaaggccaaagctgaagagaaaaagaaagagttggaagagttcatccgtcgtttcagtgccaatgttgccaagagtaagcagactaccagccgtaagaagatgctcgaaaagttgaatgtcgaggaaatcaaaccgtcatcccgcaaatatccgggtatcatctttactccggaacgtgagccgggcaatcagattctggaagtttccggtttgagtaagaagaccgaagatggagttgtgctgttcaacgacgtgaacttcaacgtggagaaaggagataagattgtatttatttcacgtaatccgcgtgcgatgaccgctttctttgagatcatcaatgggcatatgaaacccgatgccgggcatttcaactggggagtgacgattactaccgcttatcttcctttggacaataccgaatatttcaataccgatctgaatctggtcgactggctgagccaatatggcgaaggcaacgaggtgtatatgaaaggttttctggggcgtatgcttttctccggtgaggaagtactgaaaaaagttagtgttctttcgggaggcgagaagatgcgttgtatgattgcccgtatgcagttgcgcaatgccaactgtctgattctcgatactccgaccaatcatctcgacttggagtctattcaggcattcaataacaatctgaagacttacaaaggtaatatcctcttctcttcgcatgaccacgaatttattcagaccgttgctaatcgtgtgattgaattgactccgaatggtatcatcgacaagatgatggaatatgacgaatacattacttccgaccacatcaaagagctgagagccaagatgtataag

SEQ ID NO: 12225 - DNA, 2325 bp, Bacteroides fragilis
atgttgctgatatgtgttcatacggcagcacaacaaaaagtcaagttagaggtgttggagaagggcacggaacaacccattatcgcagccaatgtgatctatgccgataatgaagctttgcgaaatccccaatatgccattacgaatacatccggacaggctgaattaaagcttccttctaagggaatctgctattataaggtgacttatatcggctatgtacctgtgacggggaagattggagggacacaagatgaaaaagtcatttatatgaaagaagatgacctgggaataaatgaagttgtcgtgacaggttcacgtacagcccgtcccatcaagatgtctccggttacgacacaggtacttggcggcaaagcactggtagatgccggatatagtaatcttcaacaggcactgcagcaggaaacgcctggacttaacatacagaaggtggggttcggtaatgaaatctccatgcaagggttggacgcacgccacgtgttgtttttgatggacggagagcgcatgacaggcgacatggcgggtaatttggattacgaacgttttaacctgcatgccatagatcgcgtcgagatagtgaaaggtgcgagcagtaccctctacggatcacgtgcggccggtgcagtcattaatttgattaccaagaagacagacaaacctctctcgatagatgccggaatacgttatgggcagatgaatgaacgcaattacaagcatccgcaaccgaaggacttcctttacatgtttgagcaaaatgcagatcgccctaacttacaaagctgggtatctgccggattcaaggccggaaaattcacgtcgcagaccgacgtatggtatagcgagagtgatgccttttatatgtatcaggcggaaaatgacaagaaagtttacacaaaggaagcgaatcccttcttgccacatgacataatcgtggtcagcaatgctgtccgtccacccatgggtatcgaaggcaaagagcacattacggtatcgcagaaactgtactataatccgaatccgaatctgtcggtgctggtttatggcagttcttttttcatgaacacgtatgacttgatacaggatatgacgttcagtcaggcacgagattggacagccgggactaaagtgacttatcatgtgaaggactggtttagtgtgacaggaagtctgcacgctgatttttacgatcgcttcaaacgccatgaacgtatcgacaagcggcagaaggattatgaaagtagcatttatcagccacgtttgaccgttacgagcaattacttcaacggacacagcttaatattgggtatggagcatacgtcggatgaattgacttccgatcgtttctccggcaatgctaaccatgacctgaaaacgcgtgcattgaaagaaacagaatactttctgcaagatgaatggaccatcaatcctcggtggatgatatctgttggtatccgtactaacttctcgaaagcatttggtttcatgggaatgcccaaagtggcagccaaatattcgcctgataagcattggagccttcgtgccaactattcgatgggttatcgctcaccgagtatcaaggagttgttcttcaactgggatcatctgggaatgttcatgatccgcggtaatgaaaatatgcgaccggagaaaaacaattatttctcgctcggagcggagtacagtaacgaccgtttgtttgtttccggaacagcatacggtaactattttcgtgataagattgaaggtgtatggcgtatttacgatatgcaatacaattttgagtataccaacctgagccaacaacgccaactgggactggaagttcaaacacgatggagtgtgctggactgtctgacgctgaatggaacttacagttttgtagatgtaagtaagaataaaggcatacaggtgaataccacctcgccccatgcggctacggcaagcatgaattacaaatacatgaagaaaaattatcgattgaacgctgtgttcagtgcctcttatatgggagggaaaaagtttgatgtacaggaccgggtgtttgtaaaggaggagaataaaagctatgatgcctattttcggtgcgacctgccacaatatgtactttgtaatttatccgtttcgcaaactttttgcaataaggtgaaattgacgttgggaatggacaatctcttcaactatgtacctaaaacacttggctcagggatcaccatgttcaatgtgcctgccacagccggagcacgtggatgggtacaggtagagttcatgctggatgatgtgataaactctttaaagaaaaagaaa

SEQ ID NO: 12226 - DNA, 510 bp, Bacteroides fragilis
atgagaaaggaagataaaaatacgattattgagcagattgctgctacagtacaggaatatggtcacttctatttggtagatacaacagctatgaatgctgctgcaacaagtgaattgagaagagcttgtttcaaggctgacatcaaattgatggtagttaagaatacattgcttcataaagcacttgaaagcattgaaggtgatttctctcctctttacgattctttgaaaggtacaacagctgtgatgttttgcaatgttgcaaacgcacctgctaaactgatcaaggataaatctaaagatggtattccgggactgaaagctgcatacgcagaagaaagcttctatgttggtgctgaccagttggatgctctcgtagctattaagagtaagaatgaagttattgccgatatcgttgccctgttgcaatcaccggccaagaatgttatttctgctcttcaatcaggtggcaacacccttcacggagttctcaaaactcttggtgaaaga

SEQ ID NO: 12227 - DNA, 2247 bp, Bacteroides fragilis
atggagacaatttatctatgtattattatcttcctattcgtacttgccgtattcgacttgatggtcggtgtaagtaacgatgcggtaaatttcctcaattcggctgtcggagcaaaggcagcatcttttaaaacaatattgttcattgcaggtgccggtatcttcatcggagcgtccttatcaaacggtatgatggacatcgcaagacacggcatctaccaaccggaacatttctatttcgccgaaatcatgtgcatcctgcttgccgtaatgctgacagacgtcgttctgctcgatgtattcaactctatgggaatgcctacctcgaccactgtttcaatggtattcgaacttttgggaggtacttttgccctggcacttatcaaagtgcacaacagtgatacactgggattgggtgatcttatcaacaccgacaaagccttgtctgtcatcatggccatctttgtctccgttgccattgccttctttttcggtatgcttgtacaatggctggcacgcatggtgtttacatttaactacaagagcaatataaaatacagcattgcactattcggtggcatcgcttctactgccatcgtttatttcatggtgataaaaggattgaaagacagctctttcatgactcctgagaacaagcagtgggtacaagaaaacacgatgatgctggtaagttgtttctttgtcatctctaccatcctgatgcagatattacactggctgaaagtaaatgtattcaaagtagtcgttctgctgggtacatttgcattggcacttgcatttgccggtaatgacctcgtcaactttatcggtgtacctttagccggttattcttcgttcatagactataccgccaacggaacttctgtcggaccggacggtttcctgatgacctctctgatggggtcagccaaaacaccgtggtatttcctgataggtgccggagccgtcatggtatacgccttgtgtacttccaaaaaggcacatgccgtaatcaagacctcggtagacctctcccgtcaggatgaaggtgaagaaaacttcggaagcacaccgatagcccgaacactggtgcgtttcagcctcacactggccaacggtatttcccgcattactccgccgagtgccaaacgctggatagatacccgcttccgtaaagacgaagccatcattgccgacggtgcggcattcgacttggttcgcgcttctgtcaatctggtattggcaggtctgttgatcgccgtgggtacttcgttaaaacttcctctttctacaacctacgtcactttcatggtggccatgggtacctcacttgccgaccgtgcctggggacgtgattcagccgtttaccgtatcaccggtgtactaagtgtcatcggcggatggttcatcactgccggagctgccttcaccatctgtttctttgttgccatggtcatccacttcggaggaagcatagctatcatagccctgatcggtctggcagcattcactctgatccgcagccagttgatgtacaaaaagaaaaaagagaaagagaaaggaaacgaaactttgaagcaattgatgcaagccacaagcagccacgaagctttagagctaatgcgtaagcatacacgcgaagagttgagtaaagtactggaatatgcagaacagaactttgagctcaccgtgacttcattcttgcacgaaaacctccgcggattgcgccgggcaatgggatctaccaagtttgaaaaacaactgatcaagcagatgaagcgcaccggaaccgtagcaatgtgcaaattggataatcacaccgtacttgaaaaaggactttattattatcagggaaatgactttgcaagtgaactggtatacagtatcagccgcctgtgcgaaccctgtctggaacacattgacaacaatttcaatccgctggatgctatccaaaaaggtgaatttggagatgtagccgaagatatcacctatctgatccagcaatgccgccaaaaactggaaggcaacaattacagcaatcttgaagaagacctgcaccgggccaatgatctgaactcacagctatcacacctgaaacgccaggaactacagcgtatccagagccagaccggaagtattaaagtaagtatggtttatctgaccatgatccaggaagcacaaaacgtagtaacttatacgatcaacctgatgaaagtaagccgtaaattccagatagaaacagatatt

SEQ ID NO: 12228 - DNA, 1059 bp, Bacteroides fragilis
atggatatagcagcattattatcgggaggagtggacagttcggttgttgtacatctgctttgtgagcagggctacaagcctacactgttttacatcaaaataggtatggatggggcggaatacatggactgttctgccgaagaggatatagaactgtctactgccatagcccgacgctacggtttggcactggaggttgtcgatttacatcgggaatactgggataatgtggctgcttatgccatagaaaagatacggaaggggcagactccgaatccggatgtgatgtgtaacaagctgattaagtttggctgtttcgagcagcaggtcggaaaagatttcgatcttacggcaaccggacattatgctacgaccttgcaactaggcgggaaaacctggctgggtacagccaaggacccgataaaagatcagactgatttcctggcccagattgactatttgcaggtttcgaaattgttgtttccgataggtgggctgatgaagcatgaagtgcgtgagatagcgttgcaggccggattgcccagtgcccgtcggaaggatagtcagggaatttgctttttgggcaagataaattataacgattttgtccgtcgctttctgggagaaaaagagggggcggtgatcgaatttgaaacaggtaagaagattggtactcatcgcggctattggtttcataccattggccagcgaaaaggattgggattgggaggaggaccctggttcgttgtgaagaaggatattcaggataacattatttacgtctcccatggttatgatgccgagcagcagtatggttatgaattcaggatgaaagacttcaattttattacagataacccgtgggaaggctcgacaggcgaggaggaagtaacatttaagatccggcatacacctgagtttatcaaaggccgtttgctacatgacgaagagggataccggattatttcttccgaaaaattacagggaattgcaccgggacagtttggcgtgatttatgacgccgaatcccgggtttgtttcgggagtggagaaatagga

SEQ ID NO: 12229 - DNA, 2139 bp, Bacteroides fragilis
atgcccgactatatcgaagaacttaatgaaagccagcgtgcggcggtgctctatggtgatggcccttcgctggtcatcgccggtgccggttccggaaagacgcgtgtgctcacttataagatagcctatctgctcgagaacggttacaatccctggaatatcctggcactgactttcactaacaaagctgcccgtgaaatgaaggagcgtattgcccggcaggtgggcgagcagcgtgcacgattcctttggatgggtacgttccattcggttttttcccgtattcttcgtgccgaggcgtcccatatcggctttacgtcgcagttcaccatctacgattcggcggacagcaagagcctgattcgttccatcatcaaagagatggggcttgacgagaagacctataagcccggcagtgtgcaggcacgcatctccaatgcgaagaaccacctggtgtctccttcgggatacgcagccaacaaggaggcgtacgagggcgatcttgccgcaaagatgcctgccatacgggatatctacagccgctactgggagcgttgccggcaggccggagcaatggatttcgatgatctgctggtctatacctatatccttttccgcgactttcccgacgtgctggcacgctatcgcgagcagttccgctatgtgcttgtcgacgagtatcaggacaccaactatgcacagcacagcatcgtgctgcaactgacaaaggagaatcagcgtgtatgcgtggtgggcgacgacgcgcagagcatctactccttcaggggagcggacattgacaatattttgtatttcaccaagatatatcccgataccaaagtcttcaagctggagcagaactaccgttccacccagaccattgtccgtgcggccaacagcctgatcaaaaagaacgaacggcagattcccaaagaggtgttctccgagaaggaacggggtgaggccatcggggtctttcaggcttacagtgatgtggaagaaggcgacattgtgaccaataaaatagcgcaactgcgtcgcgagcacgattatgaatactccgacttcgccatcctttatcgtaccaatgcccagagccgtgtcttcgaagaggctttgcgcaaacggggcatgccttataagatttacggcggtctctctttctatcagcgcaaggagatcaaagatatcatagcctacttccgtctggtggtcaaccccaatgacgaagaggcgttcaagcggattatcaattatccggcacgcggcatcggcgataccacggtgggcaagattattactgccgccaccgataacaatgtcagcctctggaccgcactctgcgaccccattacgtacgggctttccatcaataaaggcacacataccaaattgcaggattttcgtgcgctgatcgagcagtttatggcagatgtgaccgtaaagaatgcttatgaaataggtacggaaatcatccgtcagtccggcatcatcaatgaagtctgccaggacaattcgcccgagaatctcagccggaaagaaaacatcgaggaactggtgaacggtatgaatgatttttgtgccatgcgtcaggaagaggggaacacgaacgtttctctgatcgactttctctccgaagtatccctgctcaccgatcaggattccgacaaggagggagacggcgagaaggtgactctgatgacggtacattccgccaaaggactggagttccgcaacgtattcgtggtggggatggaagagaatcttttccccagcgggatggcgggcgattcaccccgtgcgatggaagaggagcgacgcttgttctatgtagccatcacccgtgccgaagagcactgtttcctctcgtttgccaaaacccgtttccgttacggtaagatggagttcggcagccccagccgtttcttgcgggacatcgacacccgtttcctgcaacttccgcaggaggccgctttaggccggagcatcgacgaaggggccggccgcttccgccgcgagatggaagaggggtattcgcgccgttcgtcttccgaacgcttctctgcccgtccgtcggccgaccgtccggaacgcgaacggccgaagggcagatcatcgcgccgacggtcccccgtaact

SEQ ID NO: 12230 - DNA, 1863 bp, Bacteroides fragilis
atgatcccttatttacaagtagataatcttaccaaatcttttggcgatttggttcttttcgaaaatatttccttcggtattgccgaaggccagcgtatcggcttgatcgctaaaaacggtacgggtaaaaccaccttattaaatatactctccggaaaggagggatatgatagcggcaatattgtgttccgccgtgacctccgggttgattatttggaacaagatccgcaatatcctgaagaattgaccgtgttggaagcctgctttcaccatggtaacagtaccgtggagttgataaaggagtacgaacggtgcatggaaaccgaaggacatccgggactggatgacctgctggtacgtatggaccatgaaaaggcctgggagtatgaacagaaggctaaacagatactttcgcaactcaagatacggaactttgaccaacaggtgaagcatctctccggaggacagcttaagagggtagctttggccaatgctttgattaccgaaccggatttgctgattttggacgagcctaccaaccatctggatctcgacatgaccgaatggctggaagagtatcttcgccgtacgaacctcagtctgctgatggtgacgcatgaccgttactttctcgaccgtgtctgttccgaaatcatcgagatagacaaccgccaggtttatcaatacaaaggaaattacagttattatctggagaaacgccaggaacgcatcgaagcgaaatcggtcgagatagagcgtgcgaacaatttatatcgtaccgagttggactggatgcgtcgtatgcctcaggcacgcggacacaaagcccggtatcgcgaagatgctttttatgaactggagaaagttgccaaacaacgatttaacaatgacaatgtgaagctggaagtgaaagcttcttatattggcagcaagatattcgaggctgatcatctctataagagctttggtgacctgaagatattggaagatttctcttacatcttcgcccgttatgaaaagatgggaattgtggggaataacggtacggggaagtctacttttataaaaatattgatgggacaggtgcagcctgacagtggtacactggatattggagagaccgtacgtttcggatactattcgcaggacggattacagtttgacgagcagatgaaagtcattgacgttgtgcaggatatcgccgaggtcattgagttgggtaacggcaagaagctgacggcttcccagtttctgcaacacttcttatttactcccgaaactcaacatagttatgtatacaaattgagtgggggagaacgccgtcgactttatctctgtaccgtgctgatgcgtaacccgaacttcctggtacttgacgagccgacgaatgatctcgatattattaccttgaatgtgttggaggaatatttgcagaacttcaagggatgtgtcattgtcgtttcgcacgaccgctactttatggataaagtggtcgaccacctgttggtattcaacggacagggagatattcgtgactttcccggtaattacagcgattatcgtgactggaaagaagccaaatcccaaaaggagaaggaggcggagaaaccacaggaagaaaaaacagcccgtgtccgcctgaacgagaagcgcaagatgagtttcaaagagaaacgggaattcgaacaactggaaaaggaaatagccgagctggaaacagagaaactacagatagaagaactgctctgcagtggtacgctttcggtggacgaactgacggagaaatcgaagcgattgcccgaggtaaacgatctgatagacgagaaaaccatgcgttggcttgaacttagcgaaatagaatca

SEQ ID NO: 12231 - DNA, 948 bp, Bacteroides fragilis
atggcaaaaatcgcaaagaaacttaccgaactgataggccatactccattgatggagttgtccggttatagtcgtaaatacggccttcaagagaatatagttgctaaactggagtcgtttaaccctgccggaagcgtaaaggaccgcgtggcactttcgatgattgaggatgccgaagagagaggagtgctgcaacccggtgccactatcatcgagcctaccagtggcaataccggtgtgggactggcgatggtggccactatcaaagggtatcgccttatactgaccatgcccgaaaccatgagcctggaacgccgtaatctgttgaaggcattaggagcccagattgttttgactaacggacagaagggaatggccggttccattgccaaggcagaggaactgaaaaagtcgattcctggttcggtcattctgcaacagtttgagaatcctgcgaataccgaagtccatgctcggtctaccggtgaagaaatctggcaggatacggacggagaagtggctgtattcgtggcgggagtaggaaccggaggtactgtttgcggggtggcccgtgcattaaaaaaacataatccgaatgtatatatagtagctgtagagcccgcatcctctccggtactcgaaggcgggaaagcagcttcacatcgtatacaggggatcggagcgaatttcgtgcccggcatttatgatgcttcggttgtggacgaagtcatgcctgtgcccgatgatgaagcgattcgtggcggacgagaattggcctcgacagaaggattgttggcgggaatttcttccggagcagttgtttatgcagcccgtcaactggccggacgtccggaatttaaaggaaaaatgattgtgactctgttgccggataccggcgaacgctatcttaccaccgagctattcgcatttgacgcttatccgttggac

SEQ ID NO: 12232 - DNA, 1795 bp, Bacteroides fragilis
ctttttaagtatagagtttatgaagagaagacttatccaattcgttacgacttattttctttttgtcctcatattcgtcctccagaaaccaattttcatgggttactaccataccttatataataaggtgtcatggactgattatttctctgtaatgggacacgggcttccgttagatttttcacttgccggatatctgactgccattcccggactattgctgatcgcatcggtctggatacagccagcggttatccgccagatacgccggggatatttcatgataatcgccattctgctttcctgcatctttatcggtgacctgggactgtatgaatactggggattccgcttggatgccactccgctgttctacctcttctcctcgcccaaagatgctttggccagtgtcagcatttgggtcgtgatggcaggactggccgcaatggctgtctatgcggctttactttacctgatattctaccgggtactgatttatcaaaaacaaccggtaaaaataccttttcaccggttgagtgtatccggagtattgctacttgccaccgccctcctgttcatcccgatacggggaggtttcacggtgtcgaccatgaacctgagcaaagcctacttcagcagtaatcagcggctgaaccatgcggctatcaatccttgtttcagcctgatggagtcattgtcacgccaagacaatttcgacaagcaatatcgattcatgccagccgaagaggcagacaaactctttgccgaactcaaagaccagccggttgcccccactgacagcatcccgcaactcttcacgaccgaacgcccgaacgtgatattaatcatactcgaaagcttttcgtccaaactgatggaaaccctcggaggagagtccaatgtggcaatcaacatggatcagttcggacgtgaaggggtattgttcactcatttctttgccaacagcttccgcaccgaccgtggactggcagccatcatcagtggttatccggcacaaccgactaccagtattatgaagtatccaaagaaaacgcaacacttgccttcgatccccggcagcctgaagaaagcaggatacgacctgcaatactattacggaggtgacgccgattttaccaacatgcgctcttatctgatccaggcaggaatagacaacatcgtttcggataaagatttcccgctttccgaacgtctcagcaaatggggagcgcatgaccatgtggtgttcaaccgtctgctggacgacttgaaacagcatacaccccaaaaaccctttatgaagatattgcagacttcaagcagtcatgaaccgttcgaagtcccgttccgacgattggaaaatcccagactaaacgcttttgcctatgcagacagttgtgccggcgactttgtacgtcagttcaaagagactcccttatggaaaaatacggtaatcgtattggttcccgatcatctgggagcctatccgcaggacatagacaacctgaccgtagaccgctatcggattccgctgattttcataggaggtgccgtaaaagagcccagacagataggtacttacggctcgcagattgacattgccgccacactgttgggacaactcggattaccgcacgaagagtttatctttagtaaaaacatgcttaatccgaactcacctcacttcggattcttcacctttccaaatgctttcggaatgatgacaccggagaatgaggtcgtattcaactgcgaatcgaactccatcgtctcagatgaaggaacacataaagga

SEQ ID NO: 12233 - DNA, 1144 bp, Bacteroides fragilis
aaaaacggaaagacaccgattatgggccgtatcaccatcaatggaacccaagccggtttcagttgtaagaaagaagtgtccctcgctttgtgggacgtcaaaaccaaccgggccaaaggcaagtccgaggaggcccgtacactcaatcaggagcttgacaatatcaaggcgcaaatcaccaggcactaccagtacatctgcgaccacgacagttttgttacagccaagaaagtctataaccgctatgtcggcttctcagaggaatgccacacccttatgaaccttttcagggaacagctggaaccgtataaaaagaaaatcggcatagagaaagccgaaagcacctactgcggtctggttgccgattacaagagtctcctgcttttcatgaaaagcaagaagaatgcagaggatattgtcatcgaagaacttgagaaatcattcatcgaggattactacaactggatgctcggtacatgcgctttggcaaactccactgtcttcgggcgtgtcaataccttgaagtggctgatgtatatcgcgcaggaaaaaggctggatacgggttcatccgttcgcatcattcgagtgtatgcccgaatacaagaggcgttctttcctttccgaagaggaactgcaaaggataatccatatagaaccgagatacaaacgccagcgtgccatgcgcgacatgttcctgttcatgtgcttcaccggtctttcctatgtggacttgaaagccataacatacgataatatccataccgactccgacggcggtacatggctgatgggcaaccgtataaaaacgggagtggcgtatgtcgtaaaattattgcccattgctatcgaactgattgaaaaatataggggtacggatgaaaagaaagactccccgaatgtgtctttccggtaggtgaatacaatgccatgcggctcagtcttggaatcataggcaggaaatgcaactccggggcgaggtcaccccgcacatcggacgccacgcatttgccgttctggccatactcaaggggatgctgctggaaactcttcagaaagtgtttgggcataagtccatcacatacgtcctgcgcatccattcacttgtccggcgcaggcggggcaatctttttctggaagtcgcc

SEQ ID NO: 12234 - DNA, 1245 bp, Bacteroides fragilis
atgaatctgaatgatacttttgctgccgtacaggcagccggccgccatctggcactattacccgacgatcggatcaaccaaatactgaatgccgtggcagaagctgctttggaacagacttcctacatcctctctgagaaccggaaagatctggaacggatgtcacccgacaatccgaaatacgaccgactgaggttgaccgaagaacgacttcgaggaatcgcttccgatatacgcaacgtggccactctcccctctcctctgggcaggatattgaaagagagcattcgtcccaatggcatgagactcactaagataagtgttcctttcggggtcatcggcatcatttacgaagctcgtcccaatgtcagcttcgacgttttttcgctttgcctgaaaagcggtaacgcctgtatcctgaaagggggaagcgatgctgactattcgaatcgtgccatcgtagaagtgatacaccaagtactccgacagtttaacatagacactcacatggtcgagttgctaccggccgaccgtgaagcaacccgggaactgctgcacgctgccggatacgtagatctgatcattcctcgcggcagtagcgccctgattaactttgtacggcaaaatgctactataccggtaatagaaaccggtgcaggcatctgccatacctactttgacgaatacggagatacggccaagggagctgccatcatccataatgccaagacacgccgcgtgagtgtttgcaatgcactcgattgcgtgattgttcacgaaagcagattgtccgatctgcctctcctttgtgaaaagctcaaagccgacaaggtgattatctatgcagatccgtcagcctatcaggcactcgagggacactatcctgccgggttgctgaaacctgccacccccgagagcttcggaactgaatttctggactacaaaatggcaatcaaaactgtgaatagttttgagaacgcactcggacatatccaggaatacagctcacgacatagcgaaagtatcgtcaccgaaaacccggaacgcgccgcgcttttcacccgcatggtagatgcagcctgtgtatataccaatgtatctaccgctttcaccgacggagcacaattcgggctgggagcagaaatcggcatcagcacacaaaagttgcatgcccgcggaccgatgggattggaagagatcacttcctacaaatggatcatagagggtgacggacagacacgtcag

SEQ ID NO: 12235 - DNA, 1611 bp, Bacteroides fragilis
atgaaaaacaattgtctgatatgttccttattgtttgcttcgggaattcagaatgcttggggaactcaaataacagaccgtaaagcgaatcctgatcaagcgaaacccaatataattctgattatgtgtgatgatatggggttttctgatttatcgtgttatggcggagaagtacacacaccacatattgattttctggcggaaaacgggatacgtttcagtcaatttaaaaatacgggacgcagttgccccagccgggcggctttgctgacaggtagatatcaacacgaagtaggtatgggctggatgactgctgtggatgaacatcgtccgggatacagaggacagatatcggaccggtatcctacaatcgcagaggtatttcgtgaaaatgggtaccacacttatatgagcggtaaatggcatgttaccgttgaaggagcatttacccaacctaatggaagctatccggttgaacggggatttgagaaatattacggttgcctttcgggagggggcagctattatactcccaaaccggtattttcgggtttgcagcgcattacggagtttccgaaagactattattataccacagccataaccgattctgccgttagttttatccgtcaacatccggttgatgaacctatgtttatgtatttggctcactatgctcctcatctgccccttcaggctccaaaagagagagtagaggcttgtcgggaaaagtataaagcgggatatgacgtattgcgtaaacaacgcttcgaacgcatccgtcgcaatggcttaatcgacattgaaggagaacttccggtatttgaaaaagagtttggaggaaaacgtcccgcatggaatagtcttactccgcagcagcaggaacgatggattacggaaatggctacttatgctgccatgattgaaattatggacgatggtatcggagaagtaataaaagccactaaggaaaaaggtatatttgataataccatatttttattcttaagtgataacggtgctaccaatgaaggcgatatgatcacgcaattgcgtgcagatttgagtaatactccatttcgcagttataagcaatggtgttttcagggaggtacgagtgctcctctgattatcatgtacggaggcggacaacctgatggaaaaaaggaagcggttcgtcacgaatttacacatattatcgatctttttcccacttgcctggatatggcttctattgaatatccccgggaatttcgaaatcatgccattgatgctcctggaggcagaacgattcttccggcgttgaaaggaaagaaattatcgaaaagagatttgttttttgaacatcaaacctcctgtggcattatatctggagactggaagttggttcgggctaatggtaagcagccgtgggagctgtttaacctgttacaagatccgtttgaacagaacgatttatctgcccgttacccggatagagtgaaaacattggaaaaaaagtggaatcaatgggcagaaaaacaacaggtatttccttttgaatacagaccatggactaagcgtatcaattattataaatccctgtatcccgatcaatccggaaaggattta

SEQ ID NO: 12236 - DNA, 945 bp, Bacteroides fragilis
atgggaaagatagcaaagaaactgacagatttagtgggtaacaccccgttactggaactgagtaattacaatgcaagtaatgggctgaaggctcgtgtagtggcaaaactggaatatttcaacccggcagggagcgtgaaagaccgtatctctctggctatggttgaagatgccgaagccaaagggacgttgaagtccggcgctactattattgagccgaccagtggaaatacaggtgtcggcctggcatttgtggcagctgccaaaggttacaaactgatattgaccatgcccgatacgatgagcatggaacgtaggaatctgctgaaagcactgggagcggagcttgtgcttactccgggagcgaacggaatgaaaggagccatcgccaaggccgaggaactgagggctgccactcccggatctgttatcctgcaacagttcgaaaatccggctaaccctgcagtccatgtccgtactacgggtcaggagatctggagagataccgatggaaaggtggatatctttgtagccggagtgggaacgggaggtactgtaagcggggtaggagctgctttaaaggagcataatcctgccgtacgaatcgttgccgtagagcctgtcgattcgccggtgctgtccggtggagctcccggtccgcacaagatacaggggattggtgccgggtttattcctaaaacttatcatgcagccgtagtagacgagatcaggcaggtgggaaatgacgatgccatccgcaccagtcgtgagttggctgctaaagaaggacttttggtcggcatttcttcgggagcggcagtatatgcggctacagagctggcaaaactgccggaaaatgaaggaaagctgatcgttgtattgctgccggatacgggagaacgctatctgtcgactatcttgtatgcgtttgaagagtatccgctt

SEQ ID NO: 12237 - DNA, 1473 bp, Bacteroides fragilis
atggaacatcaactgacgatttacaacactttagatagaaaaaaagagctgtttgtgcctttgcacgctccacatgtgggcatgtatgtctgcggaccgacggtatatggtgatgcccatttgggacatgcccgtccggccatcacgttcgacgtacttttccgttatctcacccggctgggttataaagtgcgatacgtgcgtaacattaccgacgtaggccacctggaacatgacgcagatgaaggcgaagataagattgccaagaaagcccgtctggaacaattggaacccatggaagtagtgcaatactacctgaaccggtatcataaagccatggaggcactgaacgtacttccccccagcattgagccacatgcctcgggacatatcatcgaacaaatagaattggtaaaaaagattctggatgccggctatgcatacgaaagccagggttcggtatatttcgatgtagccaaatacaataaagactaccattatggcaaactctcgggacgtaacctggacgatgtactgaatacaacccgcgagctggacggccaggaagaaaaacacaatcctgccgactttgctctttggaaacgggcacaaccggaacatatcatgcgctggccttcaccatggggtgacggtttccccggctggcatgccgagtgtacagctatgggacgtaagtatctgggcgaacacttcgacattcacggaggaggcatggaccttatcttcccgcaccacgaatgtgaaatcgcacagtcggtagcttcacagggtgacgatatggttcactactggatgcacaacaacatgatcaccatcaacggcaccaagatgggcaagagtctcggaaacttcatcacgctgaatgaattcttcagcggctcgcacaaattgctgactcaggcttacagcccgatgaccatacgcttctttatcttgcaggcacactaccgcagtccggtggatttcagcaacgaagccttgcaagcagcagaaaagggaatgagccgactgatggaagcagtagacagtctggaaaaaatcactcccgcagctacttcgaacgtcgatgtaaaaagcttgcgcacgaagtgttttgaagcaatgaacgatgacctgaatactccgattgtgatttcacatctctttgacggagccaagatgatcaataatatcattgccggcaacaacaccatttctgccgatgacctgaaaaacctgaaagaagtattccatacattctgcttcgatatcctgggtctgaaagaagaaatcggttcgtcggacggacgtgaagccgcttatggaaaagtggtcgatatgctgctggaacaacgtgtgaaggcaaaagccaacaaagactgggcaaccagtgacttgatccgtaacgaactgactgcattgggattcgaaattaaagatactaaggacggatttgagtggaaactgaataaa

SEQ ID NO: 12238 - DNA, 3882 bp, Bacteroides fragilis
atgacttatgttgataactttttgaagtttatctttgttagtagctgtagacattgtaattttatggcttcaaattatcaacctataactatgcaggatttcgttcatttacacgtccatacgcaatattctcttctggatggtcaggccagtgtcagtgcattggtcgataaggctatgaaagacgggatgaaaggcattgccgttacggaccatggaaacatgttcgccattaaagagtttacgaactatgttaataagaaaaatggaggtccgaaaggagaaataaaggacctgaagaagcggattgcagctattgaagccggtgaagtggagtgtgcggataaagatgccgagattgctgactgtaaagctaaaatagcggatgcggaagggcgattgttcaagcctatcataggctgtgagatgtatgtggctcgccgtacaatggataaaaaggagggaaagcctgaccagagcgggtatcacctgattgtgctcgccaaaaacgagaaggggtatcataacctgataaaattggtttcgcgggcatggaccaaaggttactatatgcgtccccgtacagaccggaacgagttggagaaatatcacgaaggtttgattatctgttctgcgtgcttgggcggtgaagtgcccaaaaagataactcagggattgttggcggaagcagaagaagccatccaatggtataagaacctgtttggagacgattattatctggaaatgcagcgccataaagcgacagtgcctaaagcaaatcatgaagcttatccgttgcaggtgaatgtaaataagcatttgattgaatactccaaaaagtataatgtcaagttaatctgtacgaatgatgttcactttgtcaacgaagaacatgctgaggcgcacgatcggctgatctgtttgagtacgggaaaagatctcgacgatccgaaccggatgtattatacgaaacaagagtggatgaagacgaaggcagagatgaatgaactctttgccgatgtgcccgaagcattgagtaatacacttgagattctggataaagtagagtattattcaatcgatcacgcaccgattatgcctacttttgcaatccccgaggactttggaacagaagaaggatatcggcaaaaatatacggaaaaggatctttttgatgagttcacccaagacgaaaacggcaacgtggtgttgagtgaggaagcagccaaagataaaataaaacgtttgggaggctatgataaactgtaccgtatcaaactggaagccgactatctgaaaaagctgactttcgacggagctaagaagttttatggtgatccgttgtcaccggaggtcaaagagcggctggtctttgaattacatattatgaagaccatgggtttcccgggatactttcttatagtacaagattttattgccgccgggcgtaatatgggagtctccattggtccgggacgtggttccgctgccggttctgccgtagcctattgtttgcagatcactaaaatagacccgatcaaatacgatttgctgtttgagcgtttcttgaatcccgatcgtatttcattgcctgatatcgatattgacttcgatgatgatggtcgtggcgaagtgttacgttgggtgacggagaaatatggacaggaaaaggtggcgcatatcattacctatggtactatggctacgaaactggctatcaaagatgttgcccgtgtccagaaacttccgcttgccgaatcggatcgcttggccaaattggttccggataaaattccggataagaaactgaatctgaagaatgccatagaatatgtgcccgaattgcaggcggctgaagcatctcccgatcctttggtgagggatacgatgaaatatgccaagatgcttgaggggaatgtgcgtggaacgggtgtacatgcctgtggcactattatttgtcgtgatgatatcacggattgggtaccggtcagcacggctgatgataaagagaccggcgaaaagatgctggttacccaatatgaaggttcggtgatcgaagataccggattgatcaagatggactttctggggctgaaaacattgtctattataaaggaggctgtcgaaaatattcgtttgagtaaaggaatggaactggatatcgattccatttcaatcgaggatccggctacttataaactttacagtgacggacgaacgatcggtactttccagtttgagtctgccggtatgcagaagtacctgcgtgagttgcaaccttctacgtttgaggatctgattgcgatgaatgccctttaccgtccgggtccgatggattatattcctgactttattgatcgtaaacatggacgtaagcctattgaatatgatattcctgtcatggaaaaatacctgaaggatacatacggtattacggtctatcaggagcaggtcatgcttttgtcacgtctgctggccgactttacgcgtggtgaatcggatgccctccgtaaagcgatgggtaaaaaattgcgtgataagttggatcacatgaaacccaagtttgtagaaggcggaaggaaaaacggacacgacccgaaagttcttgaaaagatttgggcggactgggagaaatttgcatcgtatgcgttcaataaatcacatgccacctgttattcttgggttgcctatcagactgcttatctgaaagccaattatccggctgaatatatggctgctgtcatgagccgaagtttgtcgaatatcactgatattaccaaactgatggacgagtgtaaaatgatgggagtacagacgttgggaccggatgtgaatgaaagtaacctgaagtttaccgtaaaccggaatggaaatatacgtttcggattgggagccgtcaaaggtgtgggtgaggctgccgtgcaaagcatcatggaggagcgaaaagagaacggtccctttaaaggtatcttcgactttgtgcagcgtgtcaacctgaatgcttgtaacaagaaaaatatggaatgcctggcacttgccggtggattcgatagctttcctgaactgaagcgtgaacagtattttgctgtgaacagcaaaggagagacttttcttgagacattgatgcgttatggcaaccgttaccaagctgataaggctgccgccgttaattctttgttcggcggagataacgttatcgatatagcgactcccgaaattctaccggcggaacgttggaacgatttggagagactgaataaggaacgcgaactggtaggtatttatttgtcggcacatccgcttgatgaatatgccattgtgttggaacatgtttgcaatacacatatgagcgagcttgatgataaatcggctttggcaggaagagagattacgatgggaggcattgttaccagtgtccgccggggtatcagtaagaatggaaatccttatggtatagctaaaatagaagattattccggttcggcagagattcctttctttggaaatgactgggttactttccaaggctatttaggtgaaggtactttcttgtttatcaaagcccgttgtcaacctaaacaatggcgtcccgatgaacttgatgtcaagattacttcgatggaattgctgcccgatgtcaaggaacaactgatagagaagattacgattctgattccgcttgccgaacttaattcggctttggtaaccgagcttgcttctttaacgaaagaacacccgggaaatacggaactttatttcaaagtaacggatacggaggggaagatgtatgtagacctgatttcccgtcctgtgaaactttcggttggcagagaattaatttcctatttaaaggaacgtcccgaacttgcgtttcatataaat

SEQ ID NO: 12239 - DNA, 2598 bp, Bacteroides fragilis
atgaatgacgagatacagcgggaagccttgttctacggaggagtcaaagtagagacacgtacggcgcatgacgatagccggcgtcagatagaagatatacgatacttcatccggcagaaggttgacctgctgattgtggcagccaatgaaggaatggctctcactccggttgtcgaggaggctttcgataaaggaataccggtgattatggtagaccgcagaatactttccgataaatataccgcatacatcggagccgacaattatgagttaggcaaagccgtcggcaattacatagcccatcgcctgaaagggcgcggaaaagtagtcgaactgagcggacttgtcggttctactcccgctatcgaacgccatcaggggtttatgagtgccatcagccaatatccggacatgaccttgcttgccagcgaagatgcaggatggctgcaacaacctgccgaggcaaagatggactcccttttgcaacgttttccggagatcgatgccgtatatggaatgaatgaccgtatggctgcaggggcttttcgggctgccggtcgtcgaggacgggagaaggagatgatttttgtgggcatcgatgccctgccgggtaaggggaatggagtggaactggtgctcgacagcgtactggatgctacctttatctatcccaccgaaggggataaagtggtgcaactggcaatggatattctcgaaaagaaaccttttgaacgggaaacgaagttgaagacggctgtagtcgatgcggtaaacgcgcatgtgatggagttgcagacaaaccatatcggtgagctggacggaaagatcgagacactgaacgaccgtgtggggatatatctctcgagggtggctacgcaacggatagtgttgtacggaggcctgatcatcctgctgctgattgtcgggttgttgatagtagtatataaatcgcttcgttccaagaatcgcctgaaccgggagctgtcacggcaaaaggagcagttggaagagcaaagagatcagctgatcgaactttcccatcagttggaagaggctacccatgccaaactggttttcttcaccaacatttcacatgatttccgtactcctctcactttggttgccgatcctgtggaacagctactggcagatccgtcgctggaaggtgaccggcgtagaatgttgttgctggtgcaacgcaatgtgcagatcctattgcgtttggtcaatcaaatacttgattttcgcagatacgagaccggaaaaatggagtttacaccggttccgctcgacctgttgcaatgctttgtagagtggaatgattcgtttcaggcggctgcccggcggaaacatatccacttctctttcgacagtatgcccgatacggattatcacacacaggcagatgcggagaagctggaacgcatttacttcaatttgttggcaaatgcctttaaattcactccggagaatggaaaggtcactgtccgtcttgcggctctgaagaaggacagcgtgcctttcttccgtttcacggtggccaataccggcagcctgatttcggctgaacacattcgcagcattttcgatcggttctataaaatcgacaggcatcataccggttccggcatcgggttggcattggtgaaagcatttgtcgagatacatggcggaagtattagtgtggagagtgacgaacggttgggaactgtctttactgtcgatctgccggtgcggacttgtgaagagggggcttgtgtggtgactgctccgatggaggagtctgctccggaccgggtggacagcctgctccgcgaggatgaagcggaaaacctgaatgatccgtccaaaccttctgtccttgtgatcgacgataatgccgacatccgtgcttatgtgcatacgttgctcaattcggagtattcgattattgaagctgcggatggtaccgaaggaatccgtaaagcgatgaagtacgtccccgatgtgattatttcggatgtgatgatgccggggattgatggcatagagtgttgtcggaggctgaagggagaactgcaaacctgccatattcccgttatcctgcttacggcctgttcgctcgatgagcaacgcatccagggatatgcgggaggagccgattcatacatctcaaaaccgttcagttcgcaactcttgttgacccgtatccgaaatctgattgaatcgaggcagcgtatgaagcagttctttggcgaccggcagacgctggcgaaagaagacatttgcgatatggataaagattttgtggagaggttcaagtcgctgatcgaggtgaagatgggtgattcggaacttaatgtggaagatctgggcaaggagatggggttgagccgggttcagctttatcggaagatcaagtcgctcacgaactacgctcccaatgagctgctccgcatggcacgtcttaaaaaggcggcatctctgttggcttcttcggatatgacgatagcggaggtcggatatgaagtgggattcacatctccttcgtactttgcgaagtgttacaaggagcaattcggtgaaagtccgacggagttcctgaagagaagcggatta

SEQ ID NO: 12240 - DNA, 1683 bp, Bacteroides fragilis
atgaaaagagaagtaaaatttagtctggtttttagagacatgtggcagtctgccggtaaatatgtgcctcgggtagaccagttggtgaaggtagcacctgctattgttgaaatgggatgttttgcccgggtagaaacaaacggcggtggttttgaacaggtaaatttattgtttggtgaaaacccgaataaatcggtgcgtgcatggacaaagcctttccatgaagccgggatacagacacacatgttggatcgtgctctcaacgggcttcgtatgagtcctgttccggccgatgtgcgtaagttgttttataaagtaaagaaagcacaggggacggatatcacccgtacattctgtgggctgaatgatgtacgcaatatcgctccttctatcacttatgccaaagatgcaggaatgatttcgcaatgttcgctttgtatcacccattcgccaatccatacggtggaatattacaccaatatggcactggaactgataaaactgggggcggacgagatttgcattaaagacatggcaggtatcggacgccccgtttctttgggcaagattgtggcaaatatcaaagctgcgcatcccgatattcctattcaatatcacagccatgcaggaccgggctttaacatggccagcattttggaagtatgtgaagccgggtgtgattatgtagatgtcggaatggaaccgttgtcgtggggcacaggacatgccgatttattgagtgtacaggccatgttgaaagatgcgggattccaggtacctgagattaatatggaggcctatatgaaggtgcgtgccctgattcaggaattcatggacgactttctgggactgtatatcagtccgaaaaaccggttgatgaattcattgttgatagctccgggacttccgggcggaatgatgggaagcctgatggcagatttggaaacgaacctggaatctattaataagtataaggcaaaacacaatcttccttttatgacacaagatcagcttctgatcaagttgttcaatgaagtggcttatgtatggccccgcgtcggatatcctcctttggttactcctttcagccagtatgtgaaaaatctttcgatgatgaacgttatcgcgatggagaaaggaaaagagcgttggggaatgatcgctgatgatatttgggatatgattctgggcaaagccggacgtctgccgggcaagcttgctcctgaaattatagagaaagccgagagagaaggacggaaattctttgagggaaatccgcaggataactatccggatgatcttgagaaatatcgcaaactaatgaaagaaaagaagtgggagacaggcgaggacgatgaagaactctttgaatatgcgatgcatccggctcaatatgaagcttataagagcggaaaagcgaaagaggatttcttggctgatgtagcaaaacgcagggctgagaaagagcaggtgcctacggaagaagcgaaacctaaaacacttacggtacaggtagacgggcaagcttaccgggtgacagttgcttacggagacacggaactgcctgttgcaccggcttcacaaccgtctgctgctgcaggtgaagggaaagaggtactttctccgctcgaaggaaaattcttcctggtaaagaatgcgcaagagactccgctcaaggtaggc

SEQ ID NO: 12241 - DNA, 1188 bp, Bacteroides fragilis
atgagtaaaattaccaaacagcaaaatggagtattgtcagtgccggatgtaccgacaataccttttataacgggtgatggagtaggagcggaaataactccggccatgcaggcgatagtagatgcggcggtagacatgtcgtatggtggtgcccggcgtatcgaatggaaagaagtactggccggtgaacgtgctttccgggctaccggttcgtggttgccggacgaaacgatggaggttttcaaggagtatctgataggcatcaaaggaccgttgactactccggtaggaggaggaatacgttcgttaaacgtggctttgcgccagacactcgatttatatgtctgcctgcgtccggtacgttggttccgcggagtggtgtctccggtcaaagagcccgaaaaggtgaatatgtacatctttcgtgagaatacggaagatatctatgccggtatcgaatgggaagcaggcactccggaagctaagaagttctaccggttcttgcacgaagagatgggagtcagtaaagtacgtttccccgaaacctcttcttttggtgtgaaaccggtttcgcgtgaggggacggagcgtctggtacgcgctgcctgccgttatgcgttgcagcatgaattgccctcggtcaccttggtgcacaaaggtaatatcatgaaattcacagaaggaggttttaagaagtgggggtacgaattggctgagcgggagtttgcagatgctcttgcctcaggtaaactggtgatcaaagactgtatagccgatgcctttttgcagaacactcttttgattcctgaagaatattcggtcattgccactctgaatctgaacggagactatatttccgaccaactggctgcgatggtaggtggcattggtattgcaccgggagccaatatcaattatgattccggacacgccatctttgaggccactcatgggacagcccccaatattgccggaaagaatgtggtgaatccctgttcactgatactttcggccgttatgatgcttgaatatataggctggcaagaacccgccgatcttatcgtcgaggcgcttgaagccagttttgccgaggggaaagccactaatgacctggcacgtttcatgcacaaaggccagccgctctctacttcggaatttacccgggaaatcattaaccgaattaaaaat

SEQ ID NO: 12242 - DNA, 735 bp, Bacteroides fragilis
agatattttatttatttagcctatgatggcacccattatcatggatggcagattcagcctaacggaatcagtatacaagaatgtctgatgaaggcacttgccacctttctgaggaaagatacggaagtgattggggcgggacggaccgatgccggggtacatgcgtctctgatggttgcccacttcgactacgaaggtgaacctttggatgtggataaagtagctgagaagctgaatcgtcttttgccgcaggatatttcggtctataaggtctgtcgggtaaagccggatgctcatgcaaggttcgatgcaacagcacgtacttacaagtattacatcactactgtaaaattcccgttcaatcgtcaatatcggtatcggatacataatccgctcgactttcaaaagatgaatgaggcagccctgacattatttcattattcggactttacgagttttagtaagttgcatacagatgtaaaaaccaatatttgtaagattatgcatgccgaatggactcaggaggatgaatatacctgggtgtttaccatccaggcagaccgctttttgcgtaatatggtacgtgccattgtcggtacgcttctggaagtggggcgtggcaaactgtcagtcgatgacttccgtaaaataatagagcagcagaatcgctgtaaagccggtacttcagctcccggaaatgccctcttcctggttaatgtagaatatcctcaggag

SEQ ID NO: 12243 - DNA, 789 bp, Bacteroides fragilis
atgagtacgaatgttagcgatttttctaaatcagaggcagcagaacgtcctgcctttattacgaatttaactgaattaattgatttcagagacaaagtgaacaacggtgaagacttcaagggcaaacagattatacaggtttgtaccatcgaagacctaaaggactggacgcctatcggcacgatggaacatcctttccgcggtatatacagcggacagaatgaagttttcaagaacattactgtgcagagcaatggcgtagccggtctgttcggttgcattgaaggtgccactattgaagatgtgtgtatcagaagcggaagcgtcacgggaaataaggctgggggcatttgtggtcatatccgcttcaacggtactatccaaagatgtgtgaatggagcatctgtcaagggcataggggaaaacgcttatgccggaggtatctgtggagactcttggggggggactttaatcgactgtgctaacaatggagaaattgctaacgaaagtaagtcggtctccgctttaactgccggaatagcaggagcatcttatcagggaatcattgacaaatgtacgaacaaagggcgtgttagtcctataggcggacattgcggtggaatatgtgccagcaacaatgaaggaaccattcgatatagcgataatggcggagtgatagaaggtggtgcgaacaatggcagtatttgtggttggaacaacggcaaggtggaaaaaagcagttcttccatcgatacagcccctattggcgatggttatcctatggtagtc

SEQ ID NO: 12244 - DNA, 1269 bp, Bacteroides fragilis
atgaaagtagatgttctattaggattacaatggggcgacgaaggtaaaggaaaagttgtcgacgtcttaactccgaaatacgatgtggttgcacgtttccagggtggcccgaatgccggtcatacacttgaattcgaaggacagaaatatgtgcttcgttccattccttcgggtatcttccagggggacaaggtaaatatcatcggtaacggtgttgtgctcgatccggctttgttcaaagctgaggcagaagcgctggaggcatcgggacataacctcaaggagagactgcatatttcgaagaaagcgcacctcattttgcctacacaccgtattctggatgcggcttatgaagctgccaaaggcgatgctaaggtaggaactaccggaaaaggtatcggtccgacttatacggataaagtgagccgtaatggcgttcgtgtaggtgatatcctgcataactttgaacagaaatatgctgcggcaaaagctcgccacgaacagatcctgaaaggtttgaactatgaatatgatttgacagaacttgaaaaagcctggttcgaaggaatcgaatacctgaaacaattccagttggtggatagtgaacatgaaataaacggtttgctcgataacggcaaatccattctttgcgaaggtgctcagggtactatgctggatattgattttggctcttatccgttcgtaacttcttcgaacacagtttgtgcaggtgcatgcacaggtttgggggttgctccgaataagatcggtgatgtatatggtatctttaaagcttattgcacacgtgtaggttcggggccgttcccgacagagttgttcgataagacaggggatcagatttgtacacttggccacgagtttggttcggtaaccggacgtaaacgccgctgcggatgggtggatctggttgcactgaagtattctattatggttaacggtgtcactaagctgatcatgatgaagagcgacgtactcgatacgttcgaaacgatcaaagcttgtgttgcttacaagatgaatggtgaagagatcgattacttcccttacgacataaccgatgaggtagagccgatctatgtggaacttccgggatggcagactgatatgacaaaaatgcagagtgaagatgaattccctgaagaattcaatgcttatctttcgttccttgaagaacagttgggcgtacagatcaagattgtgtcggtaggtcctgaccgcgaacaaactatcattagatatacagaagaa

SEQ ID NO: 12245 - DNA, 834 bp, Bacteroides fragilis
atgaaccacgtcaccacttatatccgccaggctttacacgatatttatccaccgggagaactcaggagtctcacaaaaatcatttgttgtgatctgctgggtcaggatgctattgattattatctgggcaaagatataacattatctgcaaacgagcagtgtgatttagaaagcattgtcgaacgattgaagaaaaacgagccgatccaatatattcagggcgaaacctgtttttatgggtctatgtttcgggtagctccgggtgtgttgattcctcgtcctgaaactgaggagctggttgatctgatagtgaaagaagctgcaaccggtacccgtttgctggatataggaaccggtagcgggtgtattgccatcagtctggctaaacatattccgcaggctgtggtcaccgcatgggacgtatcggaagaggctcttgccattgccggggagaataatcgggaattgaaggccggagtgcattttgagaaaatggatgttctgtctgcagaacctgttggtgatgatcaatatgatatgattgtcagtaatcctccttatgttacagagagcgaaaaaaacgaaatggaacccaatgtgttagattgggagcccagactggccctttttgtgccggacaatgatccgttgcgcttttatcggcgtatcgcatctttaggaagaaaaatgttacgcctgcacggcaggctctattttgagatcaatcgggcttatggtgaagaggttctccaaatgcttcacgaacaagggtacgaagaactccgtttgataaaagatatatcgggtaatgatcgaattgtaaccgccaaacga

SEQ ID NO: 12246 - DNA, 1290 bp, Bacteroides fragilis
atgaattttgtagaagaactaagatggcgtggaatggtgcatgacatgatgcccggcacagaagagttattggctaaagaacaggtgactgcttatgtgggtattgacccgacagccgattcattgcatatcggacacttatgtggtgtgatgatattgcgtcacttccagcgttgtggtcataaaccattggctttgattggtggtgcgaccggtatgattggcgatccttcgggtaaatcggccgaacgcaatctgctggatgaggaaacactgcgtcacaatcaggcttgtatcaaaaagcaactggctaagtttttggacttcgaatctgatgctcctaacagagctgaactagtgaacaactatgattggatgaaggagttcactttcctggattttgcccgcgaagtaggtaagcatattactgtgaactacatgatggctaaggaatcggtaaagaaacgtctgaacggtgaagcccgtgacggattgtcgtttactgagtttacctatcagttgttgcaaggttatgactttcttcatctctacgaaaccaaaggatgtaaactgcagatgggaggctctgatcagtggggaaatatcactaccggtactgaactgattcgtcgtactaacggtggtgaggcttatgcattgacttgtccgttaatcaccaaagctgacggtggaaaatttggtaagaccgaatcgggtaatatctggttggaccctcgttatacttctccttacaagttctatcagttctggctcaatgtgagtgatgccgatgctgagcgctatattaagatatttacttcactcgataaggcagaaattgacggactgattgccgaacataatgaagctccgcatttgcgagtgctccagaaacgtctggcaaaggaagtaactgtgatggttcactctgaagaggattacaatgctgcagtagacgcatccaatatcttatttggtaatgccacttccgatgcgttgaaaaagctggatgaagatacattgttggctgtgttcgaaggtgttcctcaatttgagatctcacgtgatgcgttggcagagggagtgaaagcggttgatttgtttgtcgacaatgccgctgtatttgcttcaaaaggtgaaatgcgtaaattggttcaaggtggcggtgtctctttgaataaagagaagctggttgcttttgatcaggtgattactactgccgacttgcttgatgaaaagtatctgttggttcagcgtggtaagaaaaactattatttgattattgcaaaa

SEQ ID NO: 12247 - DNA, 1239 bp, Bacteroides fragilis
atgggttttctgatttatatatccgaaaccgttgtcgtgaagtatctctatattgccgaagcattgatgctgctcctgatgctgtatcttattttgttttaccggaaaatcgtgaaaccgatgaacaccatcggcagtggtatggaacttctcagagaacaggacttcagtagccggttaagccatgtggggcagcaggaggccgaccgtgtggtaaatgttttcaatcgcatgatggaacaactgaaaaacgaacggttgcgcttgcgagaacagaatcattttctcgacctgatgattaatgcttcccccatgggcgttattatcatgacgctggacgaagaggtatctcaactcaaccccatggcgatgaagatgatgggagtccgtccggaagaagccgagggcaggaaattgtcggaaatcgattctccgcttgccctggaactggccgccattccgaatggagaaaccagcaccgtccggctgaacgactcgagtatctataaatgcacccactcttcatttgtggaccgcggcttccagcatcctttctatctgatggaaggattgaccgatgaagtgatgaaagctgaaaagaaggcatacgagaaagtgatccgtatgattgcgcatgaggtgaataatacaacagcgggcatcacttccacattggatacggtagagcaggcattgtccgagtcggaaggtatggaggatatttgcgatgtgatgcgcgtatgtaccgagcgttgtttttctatgagccatttcattacccgctttgccgatgtggtgaagattcccgagccccgttttactccgaccaacctgaatgaccttgcatttacctgcaagcgctttatggaagggatgtgcaatgaccggaacatccggttgcaactgatatgtgacgaatctctggacgatgtgaagctggatgcgtctctgtttgaacaagtattggtaaatattattaagaatgcagccgagagtatcggacaggacgggcagatcatcattcgtacttcattgcctacagctatcgaagtggtggataacggacccggtatatcaaaagagactgaagcaaaactcttcagtcccttcttttctaccaaacccaacggacaaggtatcggtttgatttttattcgcgaagttctgagccgtcatggctgcacgttttcattgcgtacatacgccgacggactgacaagattcaggattctatttccg

SEQ ID NO: 12248 - DNA, 402 bp, Bacteroides fragilis
atggaaaagtatatctatgaacttactttaaaggtacgcgactatgagtgcgacctgcaaggcattgtgaataatgcgaattaccaacattatctggagcatacccgtcacgagtttctttcatcggtaggcgtaagctttgcaaaactgcatgaagagggagtcgatccggtggtagcccgcatcaatatggctttcaaaacaccgttgaagagtggcgatgaattcgtttccaaattgtatatgaagaaagaaggcatcaaatatgtattctatcaggatatctttcggaaaagcgatgataaagtagtcgttaagtcgaccgtagagaccgtatgtgtcgttaatggacgcttgagcgacagtgagttattcgatcagatcttcgcaccctatctgcaa

SEQ ID NO: 12249 - DNA, 1428 bp, Bacteroides fragilis
atggcaacaacagattttatcgccgctattgaactgggttcatcgaagatagccggtatagccggaaagaagaatagtgatggaagtatacaggtattagcttatgccagggaggattcgtcttctttcatccggaaaggagtgatctataatctggataaaacggcacaaagcctgacttcaatcatcaataaactggagggggctctcaataactcaattgccaagatctatgtgggtatcggcggacaatcgctccgtacggtgcgcaatgtggtaagtcgcgatcttgaagaagaaactattatttctcaggaactggtcgactcaatctgtgatgagaacctcgagataccactgatcgatatggatatactggacgttgctccacaagaatacaaaataggaaacaatcttcaagccgaccctgtcggtgtagccggaagccacattgaagggcgttttctgaatattgtagcacgtgcttcgctcaagaaaaatctggaacgctgcttcgaacaggctaaaatagaaatagcagacctattgatctcacctctggttactgccgatgcagtactgacggaaagtgaaagacgctccggctgcgcactgatcgactttggtgccgacacatctaccatttccatttataagaataatatcctccgcttcctcactgtgctgccgctaggaggaaacagtattacccatgacctcgtctctcttcagatggaagaagaagaggccgaacgtttgaaaatcagatatggcaatgctttctacgaagaggaagaaggcgaagaacctgctacttgccaattggaagacggaaatagaacgatagagttaggtaaactgaataatatcatcgaggcacgtaccgaagagattatcgcgaacgtatggaatcagattcaactttcgggatatgacgacaaacttctggccggactcatcatcaccggaggggccgccaacctgaaagacctggacgaggttctacgcaaacggagtaaaatagagaaggtgagaaacgcacgtttcgtacgcaataccatccatgcagacgaagacgttgtgaagaaagacggtacacaaaacaccttattcggactgcttattgcgggcaacgaaaactgttgtttattggaaacacccgctccacagccgcatatacaacctcagccccagcccgaaccggtgaacatgtttgaagaagacgaaagtctgaaggaacaggaagccgctgcccgcgctgccaagaagaagaaagaagaagaagagaaaaagcggaaagaagaagaaaagcaacgcaagctggaagagaagaaaagaagggaagaagagagaagaaataaacctaactggtttaaatcgactttcgacaaactctctaatgaaattttctctgacgaagatatgaaa

SEQ ID NO: 12250 - DNA, 762 bp, Bacteroides fragilis
atggaagcgttcggacgctttctggacatcctcgacgaacttcgggtaaaatgtccatgggaccgcaagcagactaacgaaagcctgcgccccaacactattgaagaaacttacgaactttgcgacgcattaatgcggaacgacaaaaaagatatctgcaaagaactgggagacgtcctgctgcacgtagctttttatgctaaaatcggttccgaaaccggtgatttcgacatgaaagatgtatgcgacaaactttgtgagaagttgatattccgccatccccatgtattcggggaagtaaaagcagaaacagccggacaagtatccgaaaactgggaacaactgaaactgaaggagaaagacggcaataaaagtgtgttaagcggtgtacctgctgctttaccctcacttataaaagcttacagaatacaggacaaagcacgcaacgtaggattcgattgggaagaaagagagcaggtttgggataaagtaaaagaagaaatagccgaatttcaggtggaagtagccaatatggataaggataaggcagaagcagaattcggagatgttatgttcagcctcatcaatgctgcccgactttataaaatcaacccggacaatgcattggaacgtaccaaccaaaaattcatccgacgatttaactatctggaagatcataccattaaagaaggtaaaaatctaaaagatatgagcctggatgaaatggatgccatctggaacgaagctaaaaagaaaggatta

SEQ ID NO: 12251 - DNA, 1062 bp, Bacteroides fragilis
ctgaccctgattaaaggtcctttggaaaatattatcctgaaaaaggaagtggattcggaaacgaaagaggatttgtatatcatgaagcagaatacggagcgtttgttgaatcttaccaatcagttgttggattttcgaaagacagaaacacggggattccggttgaactttactgaatgtgacgttgttgcagtgcttcgtgaaacctatttccgttttacttctttggccaagcaaaaaggattggattttatattagaacttccacaggagtgctttatggcggatgtcaatcaggaagctttgacaaaaataatcagtaacttgctgaataatggagtgaaatatgcctctacttatctccggatttctttggaaacagacgaaaaagtatttcacatacgaacttttaatgatggggagatgattcctgatacaatgaaagaggaaatttttaaacctttcgtacggttggataaagaagatgaagtaactaccggaacaggtatcgggttggccctatcacgttctttggcagaattacatcaaggtagtctgatgatggaaaagggtgaagaggtgaattgcttttgcttgaccttgccggtgaatcaagattctacaattactctctcggctgaaaacgtatcacaggttgaggagaactcttgtggatgggaacaggaagaaaccgatacgaaagaaaagaaaccgatgattctagtggtagaagataatccggatatgttagcttttatcaggaagcaacttacaacggagtattcggttctaactgctatgaatggaattgaagcacttgctgttttagataatcattatgttaatctggtggtgagtgatgtaatgatgcctcagatggatggttttgaactgtgtaaaactattaagtcagatttgagttatagtcatattcccgttgtactgctaactgccaagactaatattcaatcgaaaatcgaaggattggaactgggtgctgatgcttatattgaaaagcctttctctgtggaatatctgctcgcaaatatttccagcctgatt

SEQ ID NO: 12252 - DNA, 1257 bp, Bacteroides fragilis
atgcagacaattgacaatttcaattttgccggtaaaaaggcattcgttcgcgtggacttcaatgtacccttggacgaaaacttcaacattacagacgacactcgtatccgtgctgcacttcctaccctgaagaagattctggcagacggtggtagcatcatcatcggttctcacctgggccgtccgaaaggcgttgctgacaaattctctctgaaacacattgttaagcatgtatcagagttactgggcgttgaagttcagtttgccaacgactgtatgggcgaagaagctgctgtaaaagccgctgctctgcaaccgggcgaagtgctgttgcttgaaaaccttcgcttctacgctgaagaagaaggcaaaccaagaggattggctgaagacgcaaccgacgaagaaaaagccgcagccaagaaagccgtaaaagagagccagaaagaatttaccaagaaattggcttcgtatgcagactgctacgtaaacgacgcattcggtacagctcaccgtgctcatgcttctacagcactgatcgctaaatacttcgacaccaacaataagatgtttggctacctgatggaaaaagaagtgaaagccgttgataagatattgaacgacatcaagcgtccgtttactgccatcatgggtggatcaaaagtatcttctaagatcgaaatcatcgaaaacctgctgaacaaggtagacaacctgatcatcacaggcggtatgacttacactttcaccaaagcaatgggtggacagatcggtctgtctatctgcgaagatgacaaactggatctggctcgcgaactgttgcagaaggccaaagacaaaggtgtaaatctggtattagctgttgacgctaagattgctgacgctttctctaacgatgccaatactaaattctgcccggttaacgaaattcctgacggatgggaaggtcttgacatcggtccgaaatctgaagagatctttgccgaagtgatcaagaattctaagacaattctttggaatggtccgacaggtgtattcgaattcgaaaacttcactcacggctctcgttcagtaggcgaagctatcgttgaggctactaagaacggcgctttctcactcgttggcggtggcgactctgtagcttgtgtcaacaagttcggtctggcaaacggtgtatcttatgtttctacaggcggtggagcactgctcgaagcaatcgaaggaaaagttcttccgggtattgccgctatccaggaa

SEQ ID NO: 12253 - DNA, 1149 bp, Bacteroides fragilis
atgaaacagttgcgtaacatagttgccggaatgcttgtcttgataggaggaatgttgcctgctacaacctttgcacaggagcctgtaccgggtgataccaccgctactttgcagcaggagattattgtaggtaaagacacaatcaatcaggaagctaatcaggtagatgtaaaaggcattgtgttcggccatattggagattcttacgagtggcatatcacgaatataggaaaaacttcgatttgcattccgttgccgattatcgtgtatagcgaaacttctggttggcatgcttttctgtcttcgcgcctagaagagaatggcggcaaatacgagggattttatatagctcctgccgggagcaagtatgaggggaaagtagtagaacgtaatgcgacgggagaggaagtacgtccgtgggatatttccattacaaaggtaactttgtctctctttatcaatagcgctattttgctggcgatcattctgagtgtagcgcattggtatcgcaaacgtgaacagggtgcatatgctccgggaggatttatcggatttatggagatgtttattatgatggttcatgatgatgtgattaagagttgtgtgggacccaactataaaaagtttgctccctatctgctcacagcctttttcttcattttcattaacaatattatgggactgatccccatctttcccggaggagcgaatgtaaccggaaatattgccataacattggtattagctttattcacattcgttattgttaatatattcggaacaaaacactattggaaagatattttctggcctgatgttccctggtggctgaaggtacctatacccatgatgccgtttatcgaatttttcggtgtatttaccaaaccgtttgccttgatgatccgtctgtttgccaacatgttgtccggacacatggccatgttagtgcttacctgcctgatatttatatcggcaagcatgggaccggctatcaatggttcgcttacggtggcttccgtattattcaacatctttatgaatttgctggaagtgttggttgcctttattcaggcttatgtgttcacgatgttatctgctgtattcatcggactggcccaggaaggcggtaaaaaagaagaagtaaaagaa

SEQ ID NO: 12254 - DNA, 675 bp, Bacteroides fragilis
atgcttccggaaataggagaagcaggacagctaaagctaaaagctgccaaagtactgattgtaggcgtgggaggactcggttctcccatcgccctctatctggccggcgctggagtgggtaccatcgggttggcagatgacgacgaagtgagcctcagcaatctgcagaggcagatactctacacggaggaggaagtgggcgacctgaaggctatctgtgcctccatgcggatcagcgtcctcaacagggagataaaagtgaatgcctgtccgggaaggctaagtaaagaaaatgcacgtgatctgataggccagtatgacatcatcgtggacggttgcgataactttgcaacccggtatctgctcagcgatgtctgttcggagctcgggaaaccgtatgtatacggtgctatctgcggatttgaaggacaagtgtccgtcttcaactacggagaaggaactcaacggaaaacttatcgtgacctctacccggacgaagaaggaatgttacacatgcctcctcctcccaagggggtggtcggagtgacaccggcagtaacgggcagtgtggaagcatgcgaagttctcaaaatcatttgtggattcggagaggtcctggcaggcaaactatggacaattgacttgcggacattgcaatctaacatattttcacta

SEQ ID NO: 12255 - DNA, 465 bp, Bacteroides fragilis
gtgcttatagcctacttctcggcgacaggaactacagcaggtgctgctgaaaaattgtctaaggttacaggtggagaactttatgaaattactccagcccaaccctatacaaatgctgacctcaattggaataacaaacaatcgcgcagttcgttggaaatgaatgatccgaagtcacgtccggccatccggaaatcttccatagatatcgccgattatgacgtgattttcgtcggctatcctatctggtggaatcttgctccacgtattatcaatacattcatcgagagctatcatttgaaaaacaagacaatcatcttgttcgccacatcgggaagcagtagcatcactaacagtatggcaactctgaagaaaagttatcccgaactgatctggaaagagggaaaactgctgaatggaatgaacgaaaacgatatccgcgaatggatcagtaaattggactat

SEQ ID NO: 12256 - DNA, 1008 bp, Bacteroides fragilis
atgagttatttaaaaaatataattacttacttttttcatcatccggcatcggacggagtggtggaaagagtacatcaacgactggccgatacaaacagcggacaagagaaagaagaggtcttgtccggtatttgggaacagatcggttttccacaggcggatgaacatcaaacgctgagagcttttgaaaagctggaacaacagattggaggagattctttaaaatcggaatcttctttttcgcgttttcgtattccccgatggagttggattgctgcttctatcatcgtccccttattactattgttcggttccgcttacttatataaagaaactcttaccattaagaacgaacttagcaatgtgactttcattcaatattatgttagtaatggaaaacgggagcaagtcactttacccgatcgatcgaaagtttggcttaattccggttctttgctgatctatccgtctgcgtttataggaaacgaacgtgaggtctatctggctggtgaaggctatttctcggtgacaaaagataaagaatgcccatttattgtaaaaacgaactctgtttctgtaagtgtacttggtacggaattcaatataaacgcttatccgaatatagataaggtcgtgactactttggaagaaggatctatccgtatgtcgctgaatcgtttcgattcatcctatttgttggagccggatgatcagattgtttatattccgtccaccggacatatagagagaaaacgcgtgaaggcttctgattattctgattggagaggtggaggtttgtatttcagtaatagtccattcaaagaagtgatacagactatagaacgtacctattcggttcaggtacatttgcagacttctatttatcaatccaataatctgactattcatttctatcctaatgagtccatcgagaatattatgatgttgattaaagaaatgatccctggacttgaataccagatagaggggaaagatatttatatagat

SEQ ID NO: 12257 - DNA, 624 bp, Bacteroides fragilis
gagaatcaattacacgctgctattgtcgaaatcatggtacatgatccggccaggttaggaatcaaattccttactttatataccttttctacagaaaactggaatcggccttcggatgaagtcgctgcattgatgagcctccttttcgactctatcgaagaggaaacatttatgaaaaacaatatcagtttccgtatcatcggagacatcaacaaactacctgagaatgtacgggagcgcctgaatgcttgtgtagaacatacttccaagaatacaggtatgtgcctgatacttgccctcagttattctgccagatgggaaataaccgaagctacacggcagattgccacattggtacaaaatggagaaatgaaccctgaagaaattacttcagaaagcattcggacacatctgacaaccaactttatgcccgacccggatttgctgatccggacaggcggagaggttcgtttaagcaattatctgctttggcaatgtgcttattcggagctctatttctgtgaaactttctggcccgactttaaggaagaagaattgtgcaaggctatctgtgactaccagaaacgcgaacgcagattcggaaaaaccagcgaacaaatcagt

SEQ ID NO: 12258 - DNA, 1332 bp, Bacteroides fragilis
atgaatgcagctaaggtattagaagatttgaagagaaggttccccaacgaaccggagtatcatcaggcagtagaagaagttctttctaccattgaagaagaatacaacaaacatcctgaattcgacaaggccaatctgattgaacgtctttgcattccagacagagtataccagttccgtgtaacttgggtagacgataaaggcaacgtgcagaccaacatgggttaccgtgttcagcacaacaacgccatcggcccgtacaaaggaggtatccgcttccatgcttctgtaaaccttggtattctgaaattccttgctttcgaacaaacatttaaaaactcgctgaccacattgcctatgggtggcggtaaaggtggatcggacttctctccacgcggaaagtcaaatgccgaagtaatgcgtttcactcaagccttcatgctcgaactgtggcgccacatcggtcctgaaaccgacgtaccggccggtgacatcggtgtaggtggccgcgaagtaggcttcatgttcggtatgtacaagaagttatctcacgaatttaccggaacattcaccggcaagggacgcgaattcggcggttcactgatccgtccggaagctacaggttacggtaacatctacttcctgatggaaatgctgaagaccaaaggaaccgacctgaaaggtaaagtatgcctgatctccggttcgggtaacgtggctcagtacactgccgaaaaagtattggaactcggtggtaaagtagttaccatgtccgactccgatggttacatctacgatccggacggaatcgaccgtgccaaactggattacatcatggagttgaagaacctctatcgtggacgtatccgcgaatatgccgaaacttatggttgtaaatatgttgaaggagcccgtccctggggtgaaaagggtgatatcgcactgccttcagccactcagaacgaacttaacggcgacgatgcacgcaagttggttgccaacggggtgatagccgtatcggaaggtgctaacatgccttctacacctgaagccatcaaagtgttccaggatgctaagatcctgtacgctccgggtaaagcagccaatgcaggcggtgtatctgtgtcaggattggaaatgactcaaaactctatcaaactgagctggagttcggaagaggtggacgaaaaactgaagagcatcatgaagaacattcacgaagcttgcgtacaatacggtaccgaaccggacggatacgtaaactatgtgaagggtgctaacgttgccggattcatgaaagtagccaaagcaatgatggcacaaggaatcgta

SEQ ID NO: 12259 - DNA, 840 bp, Bacteroides fragilis
atgaaacaatcccttccataccaacctggtcctatcggtgtattcgactccggatacggtgggctgaccatcctgagcaaaatcagggaagcgctgccggaatacgattacatctatctgggcgacaatgcacggactccttatgggacccgttcttttgaaatcgtatacgagttcaccttacaggctgtcaacaaattgtttgagatgggctgtcatctggtgatacttgcttgcaacacagcctcagccaaagcactgagaaccatacaaatgaacgatcttccgaatatagatccggaccggagggtgctaggagtcattcgcccaactgcagagtgtatcggcagtatgacccaaacgcgccatgtaggaatattggctacagccggtaccatcaaatcagaatcatatccgcttgaagtgcataagttgtttgaggatatcaaagtaagcggagaagcttgtcccatgtgggttccactggttgaaaacaatgaagccaacggcgaaggagccgacttctttattcgtaaatacatcgacaacctacttgccaaagaccggcagatagacacccttgttttgggatgtacccattacccgatactattgcccaagatacaaaaattcattccccaaggagtgaaagtggtggcacagggagaatatgtggctaccagtctgaaagattaccttcaccgtcatcccgaaatggacatgaagtgcactcgggaaggtaaatgccgcttttacaccacagaggccgaagacaaatttattgaatcagcctccatgttcctcaacgagaacattacagtgcaacgaataactttagaa

SEQ ID NO: 12260 - DNA, 1230 bp, Bacteroides fragilis
atgtttgcggagataataactattggtgatgaactgttgataggacaggtgactgataccaattcggcatggatggggcgcgaattaaataaagtaggtatagaggtgattcgtgtcgtgtctgtacgagatcgggcagatgagattattgaagctgtagatgcttcgatgaaaagggcaaatattgtactagtgacagggggcttgggacccaccaaagatgatattaccaaacagactctttgcaaatacttcggtaccagactgatctttagcgaggctgtctttgaaaacataaaacgggtattggcgggaaaaataccgatgaatgcgttgaataaaagtcaggcaatggtacctgaagattgcatcgttattaataatcgggtagggagtgcttctgtcagttggtttgagaaagatggtaaggtacttgtttctatgccgggagttcctcaggaaatgaccactgtgatgagtgaagaggttattccacgtttgtgtgcaaagtttcgtacggatgcaattgttcatcgaacatttactgtacaaaactatcccgaatcggtgttggctgagaaattggaatcttgggaaatggcattacctgcttgtcttaaactggcttatttaccaaaaccgggtttgattcgtttaagattgacgggacgcgggcagaatcgtagcgaggtagaagcttgtgtaaatactgagagtgccaaacttgaggcaattttaggagaagatattttggatgaggaagatactccgattgaaattttgataggcgaacttttaaagaagaagaatttgactctttctaccgcagaaagttgtaccggtggaagcattgcagcccgtataacttcggttgccggcagttcggaatattttaaaggaagcatagtagcgtatgccaatgaagtaaagacggagttgctgggtgtatcgatggaaacgcttgaaaaaagaggcgcggtaagtgaggaaacggtgattgaaatggtaaaaggtgcgatgaaagcgctaaaaactgactgtgctgtagctacgtctggaatcgcaggtcccagcggggggactgaagagaagcccgttgggacagtttggattgctgctgcctataaaagtgaaatttgcactatgaagcaggaaactaatcgtggaagagagatgaatgtggagagagcaagcaataatgcccttctattgcttcgaaaattggtgaaa

SEQ ID NO: 12261 - DNA, 2961 bp, Bacteroides fragilis
gtgcctgtcgccttgcaggcacaaaccagcgagaaaataacgtctcccgtaaatctgtataaagaagggaaagagctgttcctgcaaaagaactatgcagccgcaatgcctcccctgcgcacatttgtccgccagaaagcggacgtgaacctgaaagaagaggctgaatacatgttggtatgttcggcgtatgaattgaaagaccgtaatgccatcgctcaactacgcaactatctggacacctatccggatactcctcacgcaaaccgtatttatgcactgattgcctctgcttatttttatcagggcaactatgatgaagctctcgccttgttcaactcttcccgccttgatttgctgggcaacgaggaacgggatgacatgacctatcagttggctacctgctacctgaaagtcggcaatgtcaaagaggccgccatctggttcgaaaccctgaaagcaagcagtcccaaatatgcgaatgactgttcttactatatctcatacatacgttatacgcaaaaacggtatgacgaagcactgaaaggctttctccccctacaggatgacgcaaaatacaaggcattggtgccctattatatcgctgagatttacgccgtcaaaaagaattatgacaaggcacagatcgtagcacaaaattatctgtctgcctacccgcaaaacgaacacgccgcggaaatgtatcggattctgggagatgcctattatcattttggagattatcacaaggcggtcgcctctttccggaattatctggaaaaggaaaatactccacgaagagacgcactttatatgctgggactgtcttactttcagaccggcgtattttccaaagctgccgaaacactcggagaggtcactaccgagagcgatgcactcactcaaaacgcatacctgcacatgggactcgcctatctgcatctggctgaaaaaaacaaagcccgcatggcattcgagcaggctgccgcctcgaacgcaaacctgaaaattaaagaacaggccgcctacaactatgcattgtgcatccacgaaacatcttattcggctttcggcgagtcggtaactgtttttgaaaaattcctcaatgaattcccaaactcagaatatgcggagatggtaagtagctatctggtagaagtgtatatgaacacacggagctatgaggcggccctgaagtcaatcgaccgcatcgcacatcccggtaaacgcattctggaagcaaagcaacgtatcttattccaactgggcacacaagcattcgccaatacacaattcgaacaagccatcggttatttcgaccgctcgctcggactcggacaatacaaccgccagaccaaagccgacgccctctactggagaggcgaagcttattaccgcttgaaccgtatggaggaagctaaacggaacttcaccgattatctgcaattgacccagcagacccataacgagatgtatgccctggcacattataacttaggctatatcgcatttcaccagaaagactatacacaggcacaaaactggttccggaaatatatcagcctggaaaaaggggaaaacaaaacggcactggccgatgcttataaccgcatcggagactgttatctggatgtgcgcaactttgacgaagccaaacattattactcacaggcagaagcgatgaatactccttcgggagactattcattctatcaactcgcacttgtatcgggcctgcaaaaagattattcaggcaaaatcactttgttgaatcgcctggcaggtaaatatcccgcttccccctatgccatcagcgccctgtacgaaaaaggccgttcttatgtattgatggacaacaatcaacaggccatcgcttcgttcaaggaactattggctaaatatcccgaaagtcctgtcagccgcaaagcagcggcagagatcggattgctctattaccaaaacgaggactacgaccaagctattaacgcttacaagcaagtcgtacaaaaatatccgggaagcgacgaagcgcgtctggccatgcgtgacctgaagtcgatctatgtggatatgaaccgtatcgatgaatttgcggcgctggcttcggctatgccgggcaacatccgcttcgatgcgagcgagcaggactcactgacttatatggcagctgagaagatttacatccggggacgagtggagcaggccaaagagagcttcggaaagtacctgcaaactttcccggatggagcattcggactgaacgcacactattatctctgcctgataggcaaagaacaaaagaactacgacatgattctggaacattcgggcaagttgcttgagtatccggacaatcctttctcggaagaggcattgattatgcgtgcggaagtacaattcaataaagtacagtttgccgatgcactggcaagctacaaaatgctgaaagaaaaagcaactaccgccgaacgcagactgctggccgaaaccggtatgctccgtgcggcttatctgctaaaagacgatacggaaaccattcatgcggcaactgccttattatcggaagccaaactaagcccggaacttaagaacgaagccctgtattaccgtgccaaagcttatctgaatcagaaagcagacaaagccgccatgggcgacttgaaagaactggccaaggatacacgtaacctatacggtgcagaagcaaaattcctggtagcccaggaactgtataactcacagaactatgccgctgccgagaaagagttgctgaacttcatcgatcaaagcacaccgcatgcctactggctggcgcgtggcttcatcctcctgtccgatgtatatgtggctatggataaaaagttggatgcccgccagtatctgctgagcctgcaacaaaactaccatgctgacgatgacattgagagtatgattgaaagcagactgaacaaccttaataag

SEQ ID NO: 12262 - DNA, 834 bp, Bacteroides fragilis
atggacagtgaggatcctatttatcagtttgaccatttcaaatctttactttccactatggggattgaagttggagaagcctcagcttggtctcctgtcggtacaatcgaagttctttctgaaaatatcggtaagaaaataaaatttgaaagtaatggcatattttacattgatgacaatggaagtgaacatcaaggttttatgtataaaagagatttttattttcacgattatggagagagaatgcccaaattccatataagatactgccatacacttgagtgttttggaaaagaagcttatcgctttgctaataatgaacctatcaaagtttttgcacgagataaagcaatacgtcatgaagtagaagtctccggattgcatctatgtacctattgttctcaaatacttgcaaatgaacttgagaatgaaattcataattctacagatttcgtagaattcttaaaacaagcagaaggaatcgatcccaatgataacagagatactgaaattgatattttcgggtataccaaaaattgggaacaaataagtcaagcatacagatccattcaccaatttacatgtgaacgttgtggtctccagatcactgaaccttttgatcaacattttatgcacacacaccataaaaatggaaacaaaacagataatcgagaagctaaccttgaatgcctttgcgttcgctgccattcagaagtggatgatcgacataaaaaacgtctttgcacaggagcaaataggattatactagaagatttcaacgagaaatacccttcctttaataaagatagtttagaggataatgatttagctttc

SEQ ID NO: 12263 - DNA, 1167 bp, Bacteroides fragilis
atgaaacaaattaataagcagaagttactggagcagatggtttatctcgtcatttggctgacggttatctctgtgccgttggtgggtgattatctgtttgcttccattagcccggtacatacgtttagttggcagaccatacggatggcatggttgctgactctgcctttcattctgcttttcgtagtcaataactattttctggctccccggctgttacttcggaaacggtattgggcttatgcactttcattagcaggagtcgtgactctgctttttattttgtatccttctatcaatcctcctcaacataaacaatttcagaatctgatgccgatgcaacctcgccgctatccggaaggaaaggtgttaccggatagggagagggagtttcccaatacatttccggagcattcgtcactgctccttttgccgaaacaggagcttgatatgcgctggcggggcccgcatcctcttccggggtattttctcggacgactttcactggcattgctcgtggtaggcattaatgtggctatcaaactcttgttcaagtcgatgcgtgatgaagaagcattgaaagagttggaacaccagcatttgcaatcggagttgcagtatctgaagtatcagataaatccgcatttttttatgaatacccttaataacatacatgcgttggtcgatatggatgccggcaaggcaaaacgtactattgtcgaactttccaaactgatgcgttatgtgctttatgaagccagcaaccggacgattttgctttcacgcgagatacagtttttggacaattatattgccttgatgaaattgaggtataccgggagagtccggatcgaatgctgtatgcccgatgaggtgccggaggtgcaaattcctcctttgctttttatctcttttgtcgagaatgccttcaaacatggagtaagttatcaggaagagtcgtttatccgggtttttatgtctgtcgaggatggcagacttgcctttcgttgttcgaacagcaatcacgggcgatctgtggaacaacaccacggcatcgggttggagaatatccgcaagcggctgaggctgctattcggacaagattatactttatctatcaacgaacgtgacgatagttttaatgttttactaattattccgttatta

SEQ ID NO: 12264 - DNA, 2532 bp, Bacteroides fragilis
atgaataatcaattctcacaaaaagtttccgatattatcgtatatagcaaagaagaggcaaatcgcctgaaaagtagctatatagggcctgagcatttattgcttggtatgcttcgcgatggtgagggaaaagcaatcgagatattgtctaaactcaaaacaaacctgaccgacataaagaagcagattgaggccatactgaaagagcatgcagacgacatgctgttgcctgatgccgatgttccattgtcaaatggagctgcaaagatattgaaactatgtattttagaagcacgagtgatgaaaagtcaagttgcagatacggaacatgtactgctggccatccttaaagataaggataatctggcagcaacggttcttgaagcgaatcatgtgaattaccagcaggtattcgaacaattgtccttacagccggatatcagtgccggcatgggatttacagaagatgatgatgacgaagaagagatgaatcaatcccgttcgtcccatggatccggtgaacgtcagcaacaggcgcagactgcctccaggaagccgactaatgatactccggtgcttgataattttggtactgatatgactaaggccgccgaggaaggccgtcttgaccctgtggtgggacgtgagcgggaaatcgagcgcctggcacagatattaagtcgccgtaagaagaataaccccattttgatcggtgaaccgggagtcggaaaatcggccatagtggaaggtctggcacttcgtattatacagaaaaaggtgtcccgtattctgtttgacaagcgtgtggttgcactcgatatgactgcggttgttgccggtaccaagtaccgcggacagtttgaggaacgcattcgttccatcttgaacgaattgcagaagaatccgaatgtgattctgttcattgacgagatacataccattgtaggtgccggatcggcagccggatcgatggatgctgccaacatgttgaaaccggcattggcgcgtggagagattcagtgtatcggtgccactacccttgacgaatatcggaagaatatcgaaaaagacggggcgttggagcgtcgtttccagaaggtaatggtagagcctactacagctgacgaaacgttgcagattcttcgtaatattaaggataaatatgaagatcatcacaacgtaaattatacggatgcggcattggaagcttgtgtcaagttgacagaccgttatataaccgaccgtaacttcccggataaagctattgatgcactcgatgaagccggttcgcgtgtacatcttaccaatgtgagtgtacccaaggaaatagaagatcaggagaagttgatcgaagaagctaaaaataacaagaacgaggctgtcaaatcacagaatttcgaacttgctgccagttttcgcgataaggaaaaagaacttgctgtccagttggatgtgatgaagaaagactgggaggaacgtttgaaggataatcgtgagacggtggatgaggaagaaatcgcaaatgtcgtatcaatgatgtccggcattccggtacagcgtatggcacaggcggaaggcatcaagttggcaggcatgaaagaagacctgcaatcaaaggtgatagctcaggacgatgctatcaaaaagctggtcaaggccattctgcgcagccgtgtcggactgaaagatccgaataaaccgattggtacatttatgttcctaggccctaccggcgttggtaaaactcatttggccaaggaattggctaaatatatgtttggttcttcggatgcattgatccgtatcgatatgagtgagtttatggagaaattcacagtctcacgcttggttggagcgcctccgggatacgtaggatacgaggaaggcggacaattgacagagaaagtacgccgtaaaccctattctatcgtattgcttgacgaaatagaaaaggcgcatcccgatgtgttcaatctgcttctccaggtgatggacgaaggtcggctgactgacagttatggcagaatggttgacttcaagaatactgttattatcatgacatcgaatatcggaacccgccagttgaaagagtttgggcgtggagtcggttttgccactcaaagccgtcttgacgataaagaattctctcgcagcgtgattcagaaggctctgaataaatcgtttgcacccgaatttataaatcgtgttgacgaaatcatcacctttgaccagttgtcattagaagctataacgaagattatcgatattgagttgaaaggactgtataacagaatcgaatctatcggctataaactggtcattgaagacaaggctaaacagtttgtcgcttcaaaaggctatgatgtccagtacggtgcacgtccgctgaagcgtgccatccagacctatctggaagacggcttatcggaacttatcatttcggctgatctgaatgaaggagatacgatcactgtctctttaaatgaagaaaagggtgagttggaaatgaaaaatgaagccaaaacggctgaa

SEQ ID NO: 12265 - DNA, 738 bp, Bacteroides fragilis
atgaaagtaggtttatttatcccctgttatatcaatgccatttatccgcaggtaggggtggcatcatataaattactgaagaacttaggggtggatgttgattatcctcttgaccagacctgttgcggacagcccatggcgaacgccggttttcaagatgaatctttaaaaatggctattcgtttcgatgatttattccggaagtacgattacattgtcggtccctctgccagttgtgtggcttttgtgaaagagaatcatcccggcattctggccaaagaaggccatcagtgccaaagcgcaggtaagatatatgacctttgcgctttcattcacgatgtgataaaacctacgaaaattcctgcccgctttccccataaagtcagcatccataacagttgtcacggtgtacgtgaacttttcctgtcagctccgagcgaactgaatataccttattttaataaattgcgtgatttacttcagatggtcgaaggaattgaagtttttgagccctcccatgtggacgaatgttgtggtttcggaggtatgtttgcggtcgaggagcaggctgtttcagtctgtatgggacgcgataagatacggcatcacatggagaccggtgccgaatacatcaccggagcggatagctcctgcctgatgcatatgcagggtatcatcgaacgtgagcacctgcctatccgaatgattcatgttgtagaaatattagcatcacaatta

SEQ ID NO: 12266 - DNA, 471 bp, Bacteroides fragilis
atgaaaacaacccttatcgtcgtaggacggactgtagagcagcattatatcactgcaatcaacgattacatagagcgtaccaaacacttcatttctttcgatatggaggtaattccagaattgaaaaatacgaaaagcctgacacccgagcaacagaaagagaaggaaggcgaactgatagccaaagcccttcagccgggagacgtggttgtgttgctggacgaacacggaaaagagatgcggtcggtggagtttgcccgctggatggagaagaagttggtaaacgtcaacaaacgcctggtatttattataggaggaccttatggcttttcacaaaaggtatatgacgcggcacacgaaaagatatccatgtcgaaaatgactttttcgcaccagatgatccgcctgatctttgtagaacagatatacagggccatgaccatactgaacggcggaccctatcaccatgaa

SEQ ID NO: 12267 - DNA, 912 bp, Bacteroides fragilis
atgaaagaagaagaaacaacatatcacgtaccggtactgctaaaagaaagtgtagatgccatgaacatatctcccgacgggacttacgtagatgtcacctttggcggtggcggacattcccgcgagatactttcacggctcggagacggaggacgcctgctaggattcgaccaggacgaagatgccgagcgcaacattgtaaatgatccgcattttacttttgtacgaagcaactttcgttacctgcacaattttctacgttatcacgatatcggagaggtagacgctatattggctgatctcggcgtctcttcccaccactttgacgacagcgaacggggattctctttccgctttgacgggaaactggacatgcgcatgaacaaacgtgcaggcattacggctgccgatgtggtaaatacatatgaggaggaacgccttgccgacattttctacttgtatggcgaactgaagaacagccgcaaactggcatccgtcattgtgaaggcacgtaccggacagaaaatagaaacgatcggtgagtttcttgaaatcataaagcctctcttcggccgcgaaagagagaaaaaagagttagctaaagtttttcaggcactccgcattgaagtgaaccaggagatggaagccctgaaagagatgctgatggccgcgacagaagcattaaagcccggaggacgactggtggtaatcacttaccactcactggaagaccgcatggtgaaaaacatcatgaaaaccggcaatgtagaaggcaaggccacacaggacttttttggcaatttacagacacctttccgcctggtaaacaataaagtgatcgtacccgacgaggatgagataacacgcaatccccggtcgcgcagtgccaagttgagaatagccgagaagaag

SEQ ID NO: 12268 - DNA, 870 bp, Bacteroides fragilis
atgaatttgattctgattgcagtgatttctttgggagctattgcgcttgtattggctgcagtattgtatgttgcttctaagaaatttgccgtgtacgaagacccacgaattgcccaggtatccgaagtgttgcctcaggctaactgcggtggatgtggttatccgggttgcagcggatttgccgatgcttgcgtcaaagccggttcgctggaaggtaagttttgtccggtgggtggacagcctgtgatgtctcaggttgcctctattctcggattggacgccggaactgcagaaccgatggttgcagtggttagatgtaacggaacctgcacgaaccgtccgcgtacaaatatgtatgacggtgcaaagagctgtgctattgctgcttcgctttatggcggagagaccggctgtagctatggatgtttgggatgtggcgactgtgtggctgcctgccagttcgatgctattcacatgaatccggaaacaggacttcctgaggtggatgaagaaaagtgtacggcttgcggcgcttgtgtaaaagcctgtccgaaagcgataatcgagcttcgtgccaaaggtaagaaatcgcgtcgtgtatatgtatcttgtgtcaacaaagataaaggggctgtcgcacgcaaagcctgtacggtaagttgtatcggttgtggtaagtgtgtcaaaacttgtccgttcgaggcaattacacttgaaaacaatctcgcttacatcgattacaataaatgtaagtcttgtcgcaagtgcgttgaagtttgtccgcagcacactatcatcgagttgaatttccctcctcgtaaacctaaagaggaaacgcctgttgccgaagctgccaaaactgccgaagct

SEQ ID NO: 12269 - DNA, 3171 bp, Bacteroides fragilis
atgagcgaactcattgtctataaagcctccgccgggtccggaaaaaccttcaccctggctgttgaatatatcaagttactaatccggaatccgcgcgcctatcgccagattttagcagtaacctttactaataaagctactgctgaaatgaaggagcgtattcttagtcaattatatggaatacagataggcgatccggattcggatgcctatctaaaacgcataattgccgagacagggcattcagaagacgagatacgaacaacggcaggcatagctttgggttatatgcttcatgactacagtcggttccgcgtcgaaaccattgattccttttttcaatcggtcatgcgtaatctggctcgtgaacttgaattgagtcccaatctgaatatcgaactgaacaacgtagaagtattgagcgatgctgtggacagtatgattgaaaagttgggacccaattcacctgtactggtatggctgctcgattatatagatgaacgtatcgctgacgataaacgctggaatgtttcggatgagatcaaaagtttcggacggaatatttttgatgaaggatacatcgagaaaggtgatggtctccgccgacgcctccgtgacccgaatgtaatccataattatcgtaagacattaaaagagatggaaacagccgctcttgaacagatgaaagagttcgctcaacagtttgaaaatgtactttccagtcaatcactgaaaccaactgatttaaagaacggagccaaaggaataggaagctatttcaataaactaaaaaacggtatactcggagacgagatagtcaatgctactgtaatcaaatgcctcgatgacgagactaattgggctgcaaaaacatcaaaacaatatacggatattatattgttggcttcttccatcttaatgccacttctacaaaatgccgaacaatatcgctcacgcaacaatcgaatagtgaacagctgccgactgtcgacacagcacctgaacaaagtccggcttttaaccaatattgatgaagaagtacgtcaactgaatcgtgaaaacaatcgtttcctcctttcggataccaacgctttgctccaccaattagtgaaagacggtgactcctcttttgttttcgaaaaaatcggaactaacatccgcaatgtgatgatagacgaatttcaagacaccagtcgaatgcaatgggataattttaaactcctgctacttgaaggattgtctcaaggagccgacagcttgattgtaggtgatgtcaagcaatctatttatcgttggcgaaacggcgattggggaatccttaacggattaaacaagcaacttggatatttttctatccgtacagaaacgttaaaaaccaaccgtcgaagtgaaaccaatatcatacgattcaacaatagtatattctccgcggctgtggactatctcaacgaaatgtataataagcagttgggaagtatttgtgagcctctaatcaatgcatatgccgacgtggaacaggaatccccccgaaacaaacaacaaggatacgttaaggtagagtttctcgaaccggacgaagaacacgattatacagaacaaacccttatcagcctgggaatggaagtagaacatctgttacaatccggcgttaaactgaacgatatagctattctcgtaagaaagaataaaagtattccgcgtattgccgattacttcgataaacaactaaattataagattgtgtctgacgaagccttccgtctggatgcctcgctcgccatctgtatgatgttggatgccttgcgctatctttccgatccggagaatcggatcgtgaaagcacagttggccactaattaccaattacaaatacttcattcggagtatgatctcaattcgctgctcctccataaagccgaagaattatttccaccggcttttctggaacgaatggcagaactacggttgatgcctctgtatgaactgttagaggaacttttcagtttatttgaactgcaccgtattgaacaacaggacgcttacctgtttgctttctttgatgcagtaaccgattatctgcaaagccactcttctgatccggacagctttatacgatattggaacgagacgttatccgggaaaacaattccgagtggcgaagtggagggtatacgtatcttttcaatacataaatccaaaggactggaatttcatacggtactcctacccttctgcgactggaaactggaaaatgaaacaaacaaccaactcgtctggtgcgtacctcaagaagcccctttcaacgagttggatattgtgccggtaaattactcttccgccatggcagaatcagtataccgcacagattatttacacgaacgcctgcaactatgggtagacaatctgaatctgctttacgtagcatttacacgtgccggcaaaaatttgattatctggagtcggaaaggacaaagaaatacaatggccgaattgctaaccggagcactaccacaggctgccaacaaattagatcaggaatgggatgaagaacaggtatatgaattaggtgacctttgcccatccgaaaatgagaaaaaaatcgattcaggtaacaagctgactcgcaaaccggaaaaacttccggtcaatatggaatctatgcatccggatatagaattccgacagtccaaccgatctgctgattttatcaaggggctttctgaagaagaatccgatgaccgcttcataaatcacggacaattgttacatactttattttctgccattgagaccaaggatgacatagaaccggccattcatcacttgatattcgagggaatcattggcagcaaagaagcggaagaacgaatacgttctctgaccgtaaaggccttctccctgcctgaagtacaagagtggtactccggtgaatggagattgttcaacgagtgcgcaatcatttacaaagacaaaggtgtattacaaacccgtcgccctgatcgtgtaatgatgaaaaacgagcaagtagttgtggtagacttcaaatttggtaaagcaaacaaaaaatacaacaaacaggtaaaaggatacatgcagctcctctcccgaatgggatacaaaaacatcacaggttatctgtggtatgtagaagaagaaataatcgaaaaagta

SEQ ID NO: 12270 - DNA, 2613 bp, Bacteroides fragilis
gtgagcaatgatattgaattaaccccgatgatgaaacagtttcttgacctgaaggctaagcatccggatgcagtgatgctgttccggtgcggagacttctatgaaacttattctaccgatgcgattattgcagctgaaatattaggaattactctcacaaaacgtgccaatggaaagggtaaaaccgttgagatggcgggatttccgcatcatgcgttagatacatacctgccgaaattgatccgtgcaggtaagcgggtggccatatgtgaccagcttgaagatcctaagacaacgaagaaattggtgaagcgtggcattacggagttagttactccgggtgtttcgatcaatgataatgtcttaaattataaggaaaataactttctggcagctgttcattttggaaaatcggcttgtggtattgcatttctggatatttctaccggagagttcctgacggctgaaggaccttttgactatgtagataagctgctgaataattttgctccgaaagagattcttttcgaacgtgggaaacgcggaatgtttgagggaaatttcggaagtaagttctttacttttgaactggatgattgggtatttaccgaatccagttcccgggagaagttgctgaagcattttgaaacaaagaatctgaaaggattcggggttgagcatctcaagaatggtattatagcttccggagctatcctgcaatatctggatatgacggaacatacacaggtaggacatatcacttcgctggcacgtatcgaggaagacaaatatgtgcgtcttgataaatttacagtgcgtagcctggagttgatcggtagcatgaacgatggtggcagcagtttgcttcatgttattgacaagactatcagtcctatgggagcccgtctgttgaagcgttggatggtatttcctttaaaagatgagaaacccattaatgaccggctgaatgtagtagaatacttctttcgtaaaccggatttcagggagttgattgaagacgaactgcatcggatcggagatttggaacgtatcatttcaaaagtagccgtcgggcgtgtttctcctcgtgaggtagtacagttaaaagttgctttacaagcaattgaacctattaaagaggcttgtcaacaggccgataatcccagtttgaaccgaatcggtgagcagttgaatctttgtatttctattcgtgaccggattgaaaaagagattaataatgatcctcctctgttgataaataaggggggagtcataaaagatggtgtagatacggaattggatgagcttcggcagattgcttattctggcaaagattatctgcttaagatacagcaacgtgaaagtgaactgacaggaatacctagtttgaagattgcttataacagtgttttcggatactatattgaagtgcggaatgtgcataaagataaagtgccgcaagagtggatacgtaagcagacgttggtaaatgcggagcgttatatcactcaggaactgaaagaatatgaagagaaaattctgggtgccgaagacaagatcctggtattggagactcgcctgtatacagaacttgtacaggcattgagtgaatttatacctgccatccagatcaatgctaaccagatagcccgcattgactgcctgctttcatttgccaatgtagccaaagagaataattatattcgcccggtgattgaagataatgatgtattggatattcgtcaggggcggcatccggtaattgaaaagcaactgcctatcggagaaaaatatatagctaacgatgtgttgttggataacgctacccagcaggttatcattattaccggtccgaatatggccggtaagtcggccctgttaaggcagactgcattgatcaccctgcttgcccagattggttcgttcgttccggccgagagtgctcatatcggattggtagataagatttttactcgggtaggtgccagtgacaatatctctgtaggagaatctacttttatggtcgagatgaatgaagcgtctgatattctgaataatatttcttcccgaagccttgtcctgttcgatgaattgggacgcggaacttctacttacgacggaatatccatagcttgggctattgtagagtatatccatgagcatccgaaggcaaaggcacgtacactttttgctactcactaccatgaactgaacgaaatggagaaatcctttaagcgtattaagaattataacgtatcggttaaggaggtggataataaagttattttcctccggaaacttgaaaggggcggaagtgagcactcgttcggtatccatgtggccaagatggcaggcatgcctaaaagtattgtgaaacgtgccaatgaaattctgaagcaactcgaatctgacaaccgccagcagggaatttcgggtaagccgctggcagaagtcagtgagaatcgcggaggtatgcagttgagtttctttcagcttgatgacccgatcttgtgtcagatccgggatgaaatacttcatctggatgtgaataatcttactccgattgaggcattaaacaaactgaatgatatcaaaaagatagtcaggggaaaa

SEQ ID NO: 12271 - DNA, 351 bp, Bacteroides fragilis
atggatttaattaaaattgcagaagaagcattcgctaccggaaaacagcacccgagcttcaaagcaggagacactgtaacagtagcatatcgtattatcgaaggtaacaaagagcgtgtacagttgtaccgcggtgttgttatcaaaattgcaggtcacggagaaaagaaacgttttactgtacgtaaaatgtcaggaaccgtaggcgtagaaagaattttcccgatcgaatcaccggctatcgacagcattgaagtgaacaaggttggtaaagtacgtcgcgctaaactgtactacctgcgtgctcttaccggcaaaaaagctagaatcaaagaaaaaagagttaacggc

SEQ ID NO: 12272 - DNA, 219 bp, Bacteroides fragilis
atgaataactatctcaaaaaaaatgctgaaatatgcgatattcacgagaaactaagtacacatattgccagacatagctacgccacaagtattagccttacaaacggtgtaagtatggaaaatctagcaaaaatactggggcatactgatacatccataacaagaacactttgcacaggtgctggaccaaagtattatggaagatatacagaaagtaaa

SEQ ID NO: 12273 - DNA, 555 bp, Bacteroides fragilis
atgaaaaagtttagatgtactgtctgcggttatgtttatgaaggtgacgcagctcctgagaaatgtcctttgtgtaaagctcctgcaagcaaattcgtagaagttgttgaagaagaaggtggtgcactcacttttgttgacgaacacgtaatcggtgtagctaaaggttgtgacgaagaaatgattaaagacctgaacaatcacttcatgggcgaatgtactgaagttggtatgtatttggctatgagccgtcaggccgatcgcgaaggctatcctgaagtagctgaagctttcaaacgttatgcttgggaagaagcagaacatgcttctaagtttgctgaactgttgggtgattgcgtatgggatactaaaacaaaccttgaaaagagaatgaatgctgaagccggtgcttgcgaagacaaaaaacgtatcgctacacgtgctaaagctttgaatctggatgctatccacgataccgtacacgaaatgtgtaaagacgaagctcgtcatggtaaaggtttcgaaggactttataaccgctatttcggtaagaaa

SEQ ID NO: 12274 - DNA, 2988 bp, Bacteroides fragilis
atgctaaaacaactactaacagttgtgtttctgctgagtgcaggcactttgtgggcacaacaagctgcaggacttctgcctgtacaggaagatacacattgcaaagaatgggtagagcagacgctctcccgtatgaaactgaaagataaagtcgggcaattatttgtttataccctggctccacgagcagataaagatactgaaaagttagtgggcaaactgacccgcaagttcaaagtcggggcctttctgtactctgaaggaacagtagaagatcaggcaaacctgaccaactatgcgcaacgccagtcgaaaattccattaatgattacctttgatggtgagtggggactcgccatgcgattggaaaatacaccggtgtttccacgtaatgcggcattgggctgtatcagcgacaataccttgattgaggcttatgggcaggaagtggcgcgtgagcttcgtgagataggtgcgcacgttaattttgctccggatgcggatgttaataccaatcctgaaaatccggtcatccatgtccgttcgtttggtgaaaatccgaaaactgtggctgagaaagtaatagcttatgggcgtggattggagaccggtggcattttgtctgtctccaagcatttcccgggacatggtgacacggatgtcgactcacaccaggcattgcctgccgtttattataatcgtgcacggctggacagtgtggaactgtatccttttaaagaagccattcaggcaggattgggaggtgtgatggtgggacacttacaagtgccggccttagaacctgaccggatcaccccttcttcattgtcacatagcattgtgacggatctattgagaggagagttgggattcaatggattggtatttaccgatgcgctcgccatgaaaggagtagctgccgaatcggatgtaacagtgaaggctctgaaggccggtaatgatatggtgctggtacagcaaaatgtagaaaaagcacaagagagtgtggtgcaagccataaaagacggacgcctcacgatggaagaaatagatgcgaaatgccgtagaattctggcgtataaatatcgtttgggattaagcaggcgaccgatgattccggtagacggattgagtgaccgtattcatactcctgaagcgcaggctttggtaaccaagctgcgtacgtcggcagtgaccgtacttgggaattattttcagatccttcctcttactgcaacaaagggtgagatagccgtattaacagtgggagatgaaggcagcgatgcttctttcatcgaggggttacgtagtgaattaccattaaaaacattccggatggataaaaataccggggaagaagagcggcggaagatagtgaaagaactgggaaactatcggagggtggttgtctgtataacggtgcaggataaagaagcgggtgagtatcgttcgttttttgccgggttcaggccccaagctcctgtggtctacgctttctttacttcctatcgggcattggcgtcgcttgaagaggctgccgcccgttcggctgctgttgtcctggcacattccggtgaggaggatttgcaacgctatgtagccgatgtgatattgggcaaagcttcggcaacgggacgtttatccatgcgtatcggcaatacatttgcagccggttccggtgtagatgtgatatccggtagcccagcgggcatagcacccgaagattatggtttgaaatcatacagactccaccggatagactcggtggtagctgccgggctggcggcgaaagcctttcccggatgccaggtgttggtattgcggcatggacaaccggtatatgataaatgtttcggcactcactctgtaacagacactactccggtacgggcgaccgaccttttcgatctcgcttcattgactaaaaccagtgccacactgctggccgtgatgaaactctatgatcagggacggatcgagttgacagatgctgtctctaaatacgtgcctgttttgcgggctacgaacaaaaagaatatcacaatcagggaactgttgttacatgaatccggactggtgccttatattcgtttttatcgtgatgcaatcgatgaatactcggtgaccggcccttttacacaaggatttgtagacgagtggcaccatacccgtatgggagaatatacttatgcctgttccgatttcaagtttaagaaaggattggtttctgcaacaaaaacctccgggcatacgttgcagatagccgatggattgtggctggacaagaaatttaaagctgcgatgatgaagagtattgcgcagtcggaactcgaccgtaaacgttttgtatatagtgatatcggatttatcctgttgcaacaggtggtggaagccgttaccggcaagacactcgatgcttatttagtttcagagttttatcggcctatgggattggaacatacattgttccaacctttaaaccgttataagaaagcggatattatgccgactgctgccaatgattacttacgtcggcaggatctttgcggatatgtgcatgatgaagctgccgcctttatgggaggcgtaagtggcaatgccggattgttttcaacggcccaagagttgggaaaaatctatcagatgattctgaatgagggtgaactggatggaaaacgctatcttcggccggaaacctgccgtatatttactacggagaaatcagctgtcagtcatcgtggactggggtatgacaaacctaatctgaaggatccgaaggcaaatgcctgtgcttcttcggctccggcttctgtttacgggcataccggctttacgggtacttgtgcttgggttgatccggagaacgacctggtctatatcttcctgagtaatcgtctttgtcccgatgcctggaatggaaagctgaacagcatgaagatacgacaagcagtccaggaagtgatttatcagtcgttatatacaccggaa

SEQ ID NO: 12275 - DNA, 1623 bp, Bacteroides fragilis
atgaagtatgaaattgaagggaatatagtgagcgttcaacgtcgtgaaatatttgagggctctattatggttgagaatggtattataactgatataaggaaacatccgataaactgtggcggattcattattccgggatttattgactctcatgttcatattgaaagctcaatgcttactccacaggagtttggtcaattggcagttcggcagggaacaattgctgttgttactgatcctcatgagatggctaatgtgatgggagttgaggggattgagtttatgataaataatagtatggatgcaaagattaaagtttattatacaattccatcgtgtgtccctgcaacttcatttgatatttccggagggactattgcatctaaggacgttgagaaactggctgtgtccggacggtttgtcgggctttcagaagtgatgaatgttccgggagtcctggctggggaagaagaggttatgctaaagcttgctattgctaatagattgggtttgccagtagatggtcatgctccggagctaagcggacaaaagttagttgattatgtaggtcatggaatttgtacagatcacgaatgtactactcttggagaagcccttgagaaaatagatgtaggtatgaaagttttgataagagaaggtagtgctgcatataattacgaagcattgaaatctcttatagccacgaaccatggtgatgtcatgttttgttctgatgacttacatccggatgattttatatcaggccatataaatagacttgtgagaagatctgttgcatccggatttgatttgtttcatgtattaagggttgcgtccataaaccctatcgaacattataagttggatgtagggcaattgcgaactggtgataaagctgattttgtagtagtgaataatttacaagagtttcagactgaaaaagtttatattaatggggtgaagcaatatgatagcgtattgggagaaaattttaagaatgaaaggacttccccagtatgcttgaatcattttcttcatggtagtgttgatatttctttgttgaggaaggaggtgcatggcacaataaaagtaatttcggttgttcaagatgagttgcttactaatattgagtattataatcctaagaaagtgcatgataacttagaatcggatctggaacaggatgttctaaaaattgtatatataaatcgttatacaaatggaaagcctcaagtggctttttgtaaagggttcaatttgaataaaggggcttttgccagttcgatcgcacatgactcccataatattattgccataggttgcagcgattcggaattgtcgaaggcgatcaatacaatcattgtgcacaagggaggccttgcggtatgtgactctgatcaagtagaagttttaccattgcccataggaggtataatgagtgatcaatcgggtgagatagtggctgctgattacaaaagactgtgtaatttgataaataaaatgggatgtcagttgcgatctccgtttatgacactgtcttttatgtcattggttgttattccgaatataaaaataggagaaagcggattgtttagttatgcagattttaattggattgaagag

SEQ ID NO: 12276 - DNA, 1142 bp, Bacteroides fragilis
caaacggaagaggcgttggctgaagcgaaggaaaaagcggaaaatgcagatcgttccaagtccgcttttctagccaatatgagtcatgaaatccgtacgccactgaatgccatcgtcggcttttccgaactgctggcagcggccaatacagaagaagaaaagcaaaaatacctggagatactccatacgaacagcgaattgctattacagctggttaatgatattcttgatttgtcgaagattgaggccggtacattggagtttgtttattctgatgtcgatatcaacttgttactgaatgatttggaacaattgttccgtatgaagataggctctaactcgcctgtacggattataacagagcccgggctgccttcgtgtatggttcatacggatcgtaaccgaattgctcaggttgtgtccaattttgtatctaatgcaatcaaatttaccacagagggcagtatccgtatcggatatcagtcttccgagaatggacttcggttttatgttagcgataccggttcgggtatttcggcggataaattggagggcgttttcgatcgttttgtgcgtttgcaaagtgataaaaacggtaacggactcggactctctatctgtaagacgattgtaaataagctgggtggggaaatcggagccgaatctgaggtaggcaaaggaagtaccttttggtttacattgcccgaacattccgatattaaacccaaagtcatcattgagaaagagcaggaagaattgccttctgcagtacgggttccggttatcgatgcgggaagtgataaaaaactgagcatactggtggccgaagatatggaagacaattatcgtctttgcgaactatcctcgcttcacgttacgaattacattgggctcacaatggtgaagaggccatttctcttttcctgaaattccaaccggacattatcttgatggatatccgtatgcccgaggtgaatggctacgaggctacggaggctatccggcagatgtcggctacagtgcctatcattgctcttactgcttttgcgtatgaagaagaccgccagaaaatcatgcatagcggctttaccgatttcctgacgaagcccatttcgtcaaaagtactgttgggaaaactggaa

SEQ ID NO: 12277 - DNA, 678 bp, Bacteroides fragilis
atgaaagaaaaagtatccgtacccttcatgttgctcggcattctgttcaatgtttgcctgattgcagccaatcttcttgaaaccaaagttattcaggtaggcagtatcactgttactgccggattattggtatttcccatctcttacattatcaacgactgtatagccgaagtatgggggttcaaaaaagcccgtttgattatctggagtggctttgccatgaacttctttgtagtagccctcggactgatcgccgtggcattgccggcggcccctttctgggaaggcgaacagcattttgattttgtattcggcatggccccccgtatcgtagtagccagtctgctggcttttctggtcggttcgttcctcaatgcctacgtcatgagtaaaatgaaagtggccagtggcggacgtaacttttccgcccgtgccatttggtcgacggtggtgggagaaactgccgactcactgattttcttccccatagcattcggagggctgattgcctggccggaactgctggtgatgatgggtactcaaatcgtactgaagtctctctacgaagtgattattcttccgattaccatccgtgtcgtgaaagccgttaagcgaattgacggaagcgatgtctacgatacggacatctcctacaatgtactgaaggtaaaggatatc

SEQ ID NO: 12278 - DNA, 882 bp, Bacteroides fragilis
ttgcaacctaatttaacattaaaaggtatgagttacaatttgttgaaaggaaaaagaggtattattttcggtgcattaaacgagcagtctattgcctggaaagtagccgaaagagccgttgaagaaggtgctgttattacattatcaaatactcctgttgctgttcgcatgggacaggtttctgctttatcagaaaagctgaattgcgaagtgattgctgctgatgccaccaacgtagaagatttggagaacgtattcaagcgctcgatggaagttttgggcggacaaattgattttgtattgcactctatcggtatgtcaccgaatgttcgtaagaaacgtacttatgatgatctcgattataatatgttgaatactacgctggatgtttcagctgtttcgttccataaaatgattcaggctgccaagaagcaaaatgcaattgcagaatacggttctatcgtggcattgagttatgtagctgcacagcgtactttctacggatataacgatatggcggatgcaaaagcattacttgaatctattgcccgcagttttggttatatctatggtcgtgagcacaacgtgcgtgtgaatactatttcccagtcgcctacctttacaactgccggttctggtgtgaagggtatggataaactgtatgactttgctaatcgtatgtctccgctcggtaatgcttcagccgacgaatgtgctgattactgtatcgtaatgttctccgatcttacccgtaaggtaactatgcagaatctgttccacgatggaggtttttcaagtgttggtatgagtctgcgtgcaatggctacttacgaaaaggggctggacgaatataaagacgaaaacggtaatatcatttacggt

SEQ ID NO: 12279 - DNA, 1074 bp, Bacteroides fragilis
atgaagaatgtgactttgatccttgacgacgggagccgtttccacggtaagtcgttcggttacgaaaagcccgtggcaggtgaagtagtgttcaataccgccatgaccggttatccggagagtctgaccgacccttcgtatgcggggcagttgatgacactgacgtatccgctggtgggcaactatggtgtacctccttttagcatagagcccaacggactggctacgtttatggagagcgaacgcatccatgccgaagctattatcgtaagcgattactcacaggaatacagtcattggaatgccgttgagagtctggctgactggctgaagcgtgagcaggtgccgggcattacagggatcgatacccgtgagctgaccaaagtgttgcgtgaacatggggtgatgatgggacggatcgtatttgacgatgaaccggagagtgctccggaagctgtatacagtggagtgaactacgtagacaaggtttcatgcaaagaggtgatccgttataacgagggggcggacaagaagaaagtggtgcttgtggattgcggtgtgaagacgaacattatccgttgcctgcttcgccgggatgtggaagtgatccgtgtaccctggaattatgatttcaatcatctgaagttcgacggactcttcatctccaacggaccgggtgatccggatacgtgtgatgctgccgtgcagaacatccgtaaagcgatgcagaatcccaagttacctattttcggtatctgcatgggtaaccagttgctgagcaaagccggaggggctaaaatatacaagctgaaatacgggcatcgcagccacaaccagccggtacgcatggttggcacggaacgttgtttcatcacttcgcagaatcatggttatgcggtagacaataatacacttggcaccgactgggaaccgctgtttatcaatatgaatgatggctctaacgaaggaatacgccataagacgaatccctggttctctgcacagttccatccggaagcagccagcggacccacggatacggagttcctcttcgacgagttcgtgaagttgctc

SEQ ID NO: 12280 - DNA, 303 bp, Bacteroides fragilis
atgagtcagaaaattagaattaaactgaaatcttacgaccacaacttggttgacaaatcagctgagaagatcgttagaacagtgaaggctaccggtgctattgttagcggaccgattccccttccgacgcacaagcgtatctttacagtaaaccgctctactttcgttaacaagaaatcaagagagcagtttgaactttcttcattcaagagactgatcgatatctatagctcaacagctaagactgtagatgctctgatgaagttagagttgccgagtggtgtagaagtagaaattaaagtg

SEQ ID NO: 12281 - DNA, 690 bp, Bacteroides fragilis
atgaacaaacagaaactaaacatcaagcagtggtccaaagccgatcggccacgcgaaaaaatgatgacaaaaggttccgaagcattgagcgacgctgaactattgggcatcctgataggttcgggcaatacggaagagagtgccgttgaactgatgagaagaatacttgccacttgcgacaacaacctgaatgaactggggaaatgggaagtacggaacttttcttcattcaaaggcatgggaccggccaaaagcctcaccatcatggccgctctggaactaggcaagcggcgtaaactgcaggaaagcaaagaacgggaacagatcagatgttcagaggacatctacaagctgttccatccactgatgtgtgatctgccgcaagaagagttctggattctgcttctgaaccaagcatgtaaagtaatcaacaaattacgtatcagtacaggaggcattgacggaacttatgccgatgtacgcaccatcttacgagaagcactgataggacgtgccacacaaatagccctgattcataatcacccatcgggccatgcgaagcccagccaagaggacaaacgcctgacgggcgccatacaaaaagcgtcgcaaacgatgaacatcaccttggtggatcatgtcattgtctgcgacggttgcttttatagttttgctgacgaagggcttatc

SEQ ID NO: 12282 - DNA, 1908 bp, Bacteroides fragilis
atgaagacatttgaagagcttggcgtttctccggagatacgtaaagctattgaagagatgggatacgagaatcccatgccggtacaggaggaagtgattccatacctattaggagagaataatgatgtagtagctcttgcacagacagggacgggtaagaccgcagcgtttggcttgcccctcatccagaaaattaacgtaaaaaacagaatacctcaatcactcgttctttgccccacacgcgagctttgcctccagatagcaggcgacctgaacgactattccaaatacatcgacgggctgaaagtattgcccgtatacggcggttcatccatcgacagccagatacgcagcctgaaacggggtgtgcatatcattgttgccacaccggggcgactcctcgacctgatggaacgcaaaacggtatctcttgccactgtcacaaacgtagtgatggacgaagcggacgaaatgctcaatatgggctttacggacagtatcaatgccatcctggcagatgttccgcaagaacgtaacacactgcttttctcggccactatgagcccggaaatagcccgtatttcgaagaactaccttcacaatgcaaaagagatcaccatcggacgcaaaaacgaaagtacgagcaacgtgaagcatgtggtctataccgtacatgcaaaagataaatacgccgccctgaaacgcatcgtagactattatccgcagatttacggtatcatcttctgccgtacccgcaaagagacacaggagattgccgataaactgatgcaggaaggttataacgctgactcgttgcacggagaactctcacaggcacagcgtgacacggtgatgcagaagttccgcatccgcaacatccagattctggtagccaccgatgtagccgcacgcggactggacgtagacgacctgacacacgtcatcaactacggattgccggacgatacggaaagttatacgcaccgtagcggacgtacaggacgtgccggaaagacaggtacatccatcgccatcatcaatttgcgtgaaaaaggaaagatgcgcgaaatagaacgcatcatcggtaagaaattcattgccggtgaaatgcctaccggtaagcagatctgcgagaaacagcttctcaaagtgatagacgatcttgaaaaagtaaaggtaaacgaggaggatatcaatgatttcatgcctgagatttaccgtaaactggagtggctgagtaaagaagacctcatcaagcgcatggtatcgcatgagttcaaccggtttgtcgactattatcgcaaccgcgaagaaatagaggtgccgactgatagccgcagcgaacgcgccggaaaaagccgtgaaggaaaaagcagccgccaggcagaaccgggttacacccgccttttcatcaatctgggtaagatggataacttcttccctcacgaactgatcaccttgctcaacaataacacacgaggaagagtagaattgggacgcatcgacctgatgaaaaatttctcgttcttcgaagtggaagagaaacaagcacaaaacgtcgtaaaggcgctgaaccggacaaactggaacggacgtaaagtcacagtagaggtagccggagaagaggcatctacagagcacaaaggacgtggaaagcggaatgaaggtaacgatcagggtggcagaggaagaagcagcgctccatctgccgaccgcaaagagagaggcaaaggcagcaaagacagcaaacaagccgacagccggaaaggcaaaaagccaagccgtgaggaacgaggatattccgcagcccgcggccccaaaggcaaagatgaatggaaacagttctttaaagatgccgaacccgacttcagcgaagaaggatgggcaagaagaaagcctaaaaagagc

SEQ ID NO: 12283 - DNA, 1383 bp, Bacteroides fragilis
atgagaacatcatcttataatatattagtgaatgtagatagtaagctaaacttattcgctattttaaacggatatactcaagcttttgacatagtaaataaagatgtttatttggctctgaaaacagaacgaaaactggaagacttgcctgatgttattctaagtaaattgaagaaaagaggatatgtgacaccattaacaaaaattgaagaaataaaattggttcaaggtctgtccgatagagctcgtgagaatcatttatttcaaaaatataattttcattttatagtttcatatgcatgtaatttgaggtgtatatattgttatgaagataatatattaaatgggtgtaattctttatctaagaagacgatgactttggaacaggttgataaagcctttgaaataattactgaaaaggataaggtaaatcaaagttctaaaacaatagcattgtatggaggggaaccccttttaagagaaaactatgatgtcatatcatatatagtggaaaaaggaaagcggattgatcatacttttagggttacttctaatggatatgatatagatgcttatgcttttatgttacaaaaaaatagtaatttattttcgtttcagataactgttgatggagttgaggaaattcaaaatcagagaaaacctcattttaagaatagcgattcttttatgaaaataactaataatattgattttttattaaagtgcggtattcctgttaatgtgcgaataaattctgatttgtatacaatcaataagattcatgacttactcagtttttttgaagataaagggtggtataaatataaaaatttcagagcttattgtgcccttttacgtcaggaggttgatgttaaacaacaaattcaacattctcaaatgggacacttggatttattgaaatactataatgataaaatcaagaacaaagagataactgaacgaaagatcttttgtcaagactatgggactttggctctgttgaaacattcattattgaataggacacatttatataaggggagtttctgtggagctcagacaaataatattatttttgatccttttggagatttatattcttgttgggatgtagttggtttgccagaacatagggttggaagatatatacctgatttttgtattgatgatactaaatcgattaaatggtttggccatagagttagcgatacaaaatgtatacagtgtaaatttgtacttttttgtggtggtgggtgtttggccagatctttaagaaaatctggtgaaataagttttggaaattgtaatgagtatccacaaagtttcaaatatttgatgaaaacagtttgtaaggagattctagagaataattatgatgtttta

SEQ ID NO: 12284 - DNA, 2760 bp, Bacteroides fragilis
ttgctctttggactgatcgggtacaactacctgggtgtccgggagtatccatccgtagataaccctattatttcagtgtcctgctcctatccgggtgcaaatgccgatgtcatcgaaaatcagatcaccgaacccctggaacagaacatcaatggtattccgggcatccgctcactctccagtgtcagtcagcagggacaaagccgtatcacggtggagtttgagctttccgtcgacctggaaacagctgccaatgacgtgcgtgacaaggtatcacgcgcccaacgttatctcccgcgcgactgtgaccctcctaccgtatcgaaagccgatgccgatgccacccctatccttatggtggctttgcaaagcgacaaacgttctttgctggaactcagtgaaattgccgacctgactgtaaaagaacagttgcaaacgatctctgacgtaagtagtgtctccatttggggagagaaacgatactccatgcgtttatggctcgaccccatcaagatgtccggttacgggatcactcctatcgacgtgaagaatgcggtagacaaagagaacgtggaactcccttcaggtagtatcgaaggaaatacaacagaacttaccatccgtactttgggactgatgcacactgcagaagagttcaacaacctgatcgtcaaagaagagaacgaccgcatcatccgtttcagtgatatcggacgagccgaactgggccctgccgacatcaaaagctacatgaagatgaatggtgtacccatggtgggaatcgttgtaatcccccagccgggtgccaaccatataaagatagccgatgcggtatatgaacgcatggagaagatgcagaaggacctcccggaagacgtgaagtattcttacggattcgataacaccaaattcatccgtgcctctatcagcgaagtgaaagaaaccgtttacgtagctttcatcctggttatcattattatcttcctttttctgcgcgactggcgtgttacactggttccctgcatcgtgattccggtatcgttgatcggtgctttcttcgttatgtatctggcggacttctccatcaacgtgctctccatgctggctgttgtgctggcagtgggtctggtggtggacgacgctatcgtaatgacggaaaacatctatgtccgcattgagaaaggtatgcctccgaaagaggccggcatcgaaggggctaaagaaattttcttcgctgtcatctctaccaccattacgctggttgccgtattcttccccatcgtctttatggaggggatgacaggacgactgttccgtgaatttagtattgttatttccggttcggttatcatctcctcttttgcggctctgacctttactccgatgctagccaccaagttactggtaaaacgggagaaacagaactggttctatctgaaaacagaacctttcttcgaaggaatgaaccgcctctacagtcgttcactggctgttttcctccataaacgttggattgccctgccctttgtagcaattaccattggcatcattgccttcttgtggaattacatcccggcagaaatggctccgttggaagaccgttcacaaatcagtatcaatacccgtggagccgaaggtgtgacctatgaatacatccgggactatacggaagacatcaatgacctcgtagactcgattgtaccggatgccgaatcggtaaccgcccgtgtatcgagtggtagcggtaatgtgcgcatcacgctgaaagacatgaaagaccgtgactacacccagatggatgtggctgaaaaactgtcggcagcagtacagaaaaagacgatggcgcgttcattcgtccagcagtcatcttcttttggcggacggcgtggcggtatgcccgtccaatacgtattgcaggccactaatatcgaaaagctacaggaagtactgcccaagttcatggcgaaggtttacgagaacccggtattccagatggcagacgtagacctgaagttcagcaaaccggaggcacgtatcaatatcaatcgcgacaaagccagcatcatgggggtaagtacacgtaacatcgcacagaccctgcaatacggtctgagcggacagcgaatgggctacttctatatgaacggcaagcaatatgagatcttaggagaaatcaaccgccagcaacgtaacacacctgccaatctgaaatcgatctacattcgtagtgacaaaggagatatggtgcaattggacaacctgattgaactgaccggtggcatcgcgcctccgaaactgtatcgttacaatcgtttcgtttcggccactgtttccgccggactggccgaaggaaaaaccatcggacaaggattggacgaaatggacaagatagccaaagagacgctggacgacacgttccgcacagcattgaccggtgattcgaaagaatatcgcgagagttcttcaagtctgatgtttgcttttattctggccattgtactgatttacctgatcctggcagcacagttcgagagtttcaaagacccgctgatcattatgctgaccgtccccctggctattgcaggcgcattggtattcatgtattttggaggtatcacaatgaacatcttcagccagatcggcattattatgctgattggactggtggctaaaaacggtatcctgatcgtagagtttgccaacctgaaacaagaaacgggtgaggataagatgacagccatcaaagatgcgcttacaacg

SEQ ID NO: 12285 - DNA, 1737 bp, Bacteroides fragilis
atggcaaaaaaggtagcagaacagcttgtcgatacgctgattgaggcaggcgtcagaagaatttatgcagtgacaggcgacagcctgaacgaagtaaacgaggccgtgaggcaaaatgaggcaatgaagtggattcatgtccgccacgaagaaaccggtgcgtatgccgcaggtgcagaagcgcaactgaccggactaccgggatgttgtgcgggcagcagtggtccgggacatgtccacttaattaacggactttacgatgcgcatcgctcgggagcacctgtgatagccatcgcttccactattccgacaggagagttcggaaccgaatatttccaggaaaccaataccgtcaagctattcaacgattgtagcttttacaatgaagtggctactactcccgagcagtttccccgtatgctgcaatcggccctccagacggcaaccacccggaaaggagtagccgtagtcggacttcccggcgacctggcaaagaaaccggcagtcaaggtagagtcctcggaacagatttatccgcttgcctcgtctgtctgtccggcagaagaagacctgatacggctggcagggatgctcaatcattacgaacgtatcactttgttttgcggcataggctgcaaaggggcacatgaagaaatcatccggatgtctgaaaccttaaatgctcctgtagcatacacttttaaaggaaaaatggaagtacaatatgacaatccttatgaagtagggatgaccggcctgctgggcatgccctcgggctattacagcatgcatgaagcggaagtacttgtcatgttgggcaccgatttcccttactctgcttttctacccgacgatatcaaaatcgtccaggtagacattaagcccgaaagactgggacgacgcgccaaagtggatctcgggctttgcggagatgtacgttctacactccgtgccctgctgcctatgttgcaacaaaagaagaatgactctttcttacggaaacaactgaaacgttatgaaggggttaagaaggatctggcggcatatacggaagacaaaggcaaaatggaccagatccatccggaatatgtaatgtccgaaattaataatatttcctccgacgacgccatctatacggtagatacgggcatgacgtgtgtatggggtgcccgctatctgcaggcaaccggaaagcgtcacatgctgggatccttcaatcatggttctatggcaaacgcattgccacaggccatcggagcggcattggcttgtccggacaggcaagtgatcgcactttgtggtgacggaggactgtccatgacattgggtgacctggaaacagtagtgcaatataaacttcccataaaaatcatcgtattcaataaccgttcgctaggtatggtaaaactggaaatggaagtagacggattgccggactggcagaccgatatgctaaatccgaatttcgcacaagtagccgaagcaatggggatgacagggttcaacgtatcagatccggaagaagtattaaatacattatgtaacgctttcgagctggaaggtccagtattaataaatgtcatgactgatccgaatgctttggctatgcctccgaaaatcgaattggggcagatggtaggctttgcccagtctatgtataaactgctgatcaatggtcggtcacaagaagttatcgatacgattaattcgaatttcaaacatatcagagaggtattt

SEQ ID NO: 12286 - DNA, 654 bp, Bacteroides fragilis
atgaaattctttattgatacagctaacctggatcaaatccgggaagcacatgatttgggagttctggacggagtgaccaccaacccttctctgatggcgaaagaaggcattaaaggtgtcgaaaatcagcgaagacattacgtggagatatgcaatattgtacaaggtgatgtcagtgccgaggtgattgcaactgattacgaaggaatggtcagggaaggtaaggaactggcagccctcaatccgcatattgtggtgaaggtaccgtgcattgccgatggcataaaagccatcaagcacttttcggggaaaggcatccgtaccaattgcacattggttttctccactggtcaggctttactggctgctaaagcgggagctacgtatgtttctcctttcgtgggacgtttggatgacatctgtgaggatggagttggattggttgccgatatcgttcggatgtaccgcttctacaattatcctactcaggtgctggccgcctctatccgtagttccaagcacatcatggaatgtgtggaggccggtgccgatgtagcaacttgtccgttgagtgctattaaaggactgatgaaccacccgttgacagatgccggattgaagaaattcctggaagattataagaaggtaaatgaa

SEQ ID NO: 12287 - DNA, 1251 bp, Bacteroides fragilis
atgagtgagaacttaattatattcaatgccaaagtagtgactccgctcggcttttcggctcggaaagggaaagagatggcggaactgcgaattttggagaaagcgacagtcgaagttgtagatgggatcattacctatgtcggtcccaaccggggtgaagtgcgtgatggatattatcatcacttctggcattacaatgctcgtgggaagtgtctcttgccgggttttgtcgattcacatacccatttcgtatttgggggagagcgggccgaagaattttcgtggcgcctcaaaggggagagttatatgtctatcatgcaacgtggcggcggtatagccagtacagtacaggctacccgtgaactctctttcatccatttgcgctctaaggcagaagggctcctcaagaagatgacagccatgggaattacgaccgtcgaaggcaagagcggatacggtctgaaccgcgaaacggaattgttgcaactcaaggtgatgcgcagcctgaataaagatgagggtgtacgggtggatattgtgcctactttcctgggggcacatgcgttgcctgacgaatatagagagcgtcctgatgattatattgacttcctgatccgtgagttacttccggtgattcagcgggattcactggctgaattttgtgatgtgttctgcgaaggaggcgttttctccatcgaacagtcacgtcgtttgcttacagctgccggagattatggtctcttaccaaaacttcatgccgacgagattgtccctttgggaggtgccgaactggctgccgaattgggagctgtatctgccgaccatctgcttcatgcttccgatgccggtatcgaagccatggcgcgtaagggagtggttgccacactcctcccgctcacagcgtttgccttgaaggagccttatgcacggggacgcgacatgattgatgccggatgtgccgtagccctggctaccgacctgaatccgggcagttgtttctccggttccattccactgacgtttgccttagcctgcattcacatgcagctcactgtagaagaagcaattacggcccttaccctgaatggggcggctgcactcaaccgtgccgactctatcggcagtatcgaagtgggtaaaaaaggcgacttcgtagtgctcgactccgataattaccatattcttccctattatgtcgggatgaattgtgtaaatacgactatcaaaggcggaatgctttattcgtctgtc

SEQ ID NO: 12288 - DNA, 1983 bp, Bacteroides fragilis
atgaaaatgactctcagcaatcagttacctgaatatccggtattcgccgaaggtattcgccgggcgcccgaccgtggatataccctttcgccggcacagaccgtcacggccttaaaaaatgcattgcgttatatccctgtagaactgcacagaaaactggctcctgaatttctggaggagttgcggacccggggacgaatctatgggtaccgttttcgtccggcaggcgacctcaaagccaaacccgtcgacgaatatcaggggaactgtattgaaggcaaggcctttcaggtgatgatcgacaataatctttgttttgatatcgctctctatccttatgaactcgtcacttatggcgagaccgggcaggtatgtcagaactggatgcaataccggttgataaaacaatacctcgaactcctgacgcgtgaacagacgcttgttatcgaatcgggacatccgctaggacttttccattcccgtcccgatgcccctcgggtcattatcaccaattcaatgatggtaggcatgttcgacaatcagcatgactggcatgaggcagcccagatgggagtcgccaactatggccagatgacagccggcggatggatgtacattggtccgcagggtattgtgcatggcacattcaatactctgctgaatgccggccggctcaagctaggcatccctcaagataagaacttgagtggacatttgttcgtttcctccggtttgggtggtatgagcggtgcccaacccaaggcagccgaaatagccggtgctgcttcgattatagccgaagtggaccgctcgcgtattgaaacccgttacaagcaagggtgggtggagcatgtcacgactgatctccataccgctttccggatggcactgagcgctgctgaacggcatgaatcctgttcggtggcctatcatggcaatgtagtagatctgcttgaatatgccgttcaggaagatattcctattgaacttttatccgatcagacctcctgtcacgctgtttacgaaggtgggtattgtcctgccggagttactttcgaagaacgtacccggttgttgcatgaatctcccgaagcgtttcgtcagttggtagacgaatccctccatcgtcattttgcagtgatcaagaaacttgtttcccgcggaacttattttttcgattacggcaactcgtttatgaaagctgtctatgatgccggagtcaaagagatttcacgaaacggaaccgatgaaaaagacggctttatctggccgagttatgtggaagatattatgggaccggagctcttcgactatggttacggtccattccgttgggtatgtctcagtggtaaccccgaagatcttgccagaacggaccgtgctgcgatggaatgtatcgatgtgaaacgtcgcggacaggatctggacaattataactggatacgggatgccggcaagaaccggttggtggtgggtacacaggcccgtatattgtatcaggatgctgtcggtcgtttgaagatagctctccggtttaaccaaatggtgcgtgacggagaagtcgggcctattatgctgggacgcgatcatcacgatgtgagtggtacggattcacccttccgtgaaacctctaatatcaaagatggcagcaatgtaatggccgatatggccgtacagtgttttgccgggaattgtgcccggggcatgagcctggtagctttgcacaacggaggcggagttggcattggcaaagctatcaacggaggtttcggtatggtgtgtgacgggagcctgagagtagacgaaattcttcgttcttctatgctttgggatgtgatggggggagtggcccgccgttcgtgggcccgcaatgaacatgcgatggaaaccagcgaagcgttcaatctgtcacatggtgatgcctaccacatcacgctgccttatctggcagatgaaaagttgataaagagaatagttgcggaa

SEQ ID NO: 12289 - DNA, 1449 bp, Bacteroides fragilis
gtgcgtaccgctttgtataattatctgtttgcccgccagcatgggggagatttgattttccgtatcgaggatacggattccaaccgtttcgttccgggtgcggaagaatatattctggagtctttcaaatggttaggaatacagtttgatgaaggtgtaagcttcggaggagaatacggaccgtaccgccagtcggaacgtcgtgaaatatacaagaagtatgtacaagtgttacttgataacggaaaggcctacatcgctttcgatactccggaagaactggatgccaagcgtgctgaaatagctaatttccagtatgatgcgtctacccgtgtgggaatgcgcaattcgttgacgctcccgaaagaagaagtggaagcgctgatcgctgacggaaaacaatatgtggtacgtttcaaaatagaaccgaacgaggatatccatgtgaacgacttgattcgtggcgaagtggttatcaattcgtctatccttgatgataaagttttatataaatcggccgacgaactgcctacttatcacctggccaatatcgtagatgaccatttaatggaggtgtcacacgtgattcgtggtgaagagtggctgccttccgctccgctgcacgtactgctgtatcgtgcattcggctgggaagatactatgccggcttttgcccacttgcctttgctgctgaaacctgaaggcaatggaaaactgagtaaacgtgacggtgatcgtttgggattccctgtattccctcttgagtggcatgacccgaagagcggtgagatttcttccggttatcgtgaatcaggttatctgcccgaggctgttatcaatttccttgctctgctgggatggaatccgggtaacgaccaggaagtgatgtctatggacgagctgatccgtctgttcgacctgcatcgttgcagcaagtcgggtgcaaaatttgattataaaaaaggtatctggttcaatcatacttacattcagcagaaatctgacaaagagatagccgagctgtttgtaccggtgctgaaagagcatggagtagaagctcctttcgaaaaagtggtgacggtggttggtatgatgaaagaccgtgtcagctttgttaaagaactatgggaggtatgcagtttcttctttgtggctccgacggaatatgacgaaaagacggttaagaaacgctggaaagaggattcggctaaatgtatgaccgaactggcggaggtattggccggaattgaagatttcagcattgaaggtcaagaaaaaatagtaatggactggattgccgagaagggttatcatacaggtaatattatgaatgctttccgcctgacactggtaggtgagggcaaaggtcctcatatgttcgatatttcctgggtgttgggaaaagaagaaacattggctcgcatgaaacgtgccgtagaggttttgaaa

SEQ ID NO: 12290 - DNA, 528 bp, Bacteroides fragilis
ttgaagacgtcaagaaatagacaaccaagaacaaaaacattatttttcgaacaaatgagaaaagcaaaaccaaaaaaacgcgttatccttccggatcccgtgttcaatgaccagaaggtttctaaatttgtaaaccatctgatgtatgatggaaagaagaacacttcttatgagatcttttacgctgcactggaaacagtaaaagcaaaacttcctaacgaagaaaaaactgctcttgaaatctggaagaaagcgttagataacgtaactcctcaagttgaagtaaaatcacgccgtgtgggtggtgcaactttccaggttcctaccgaaattcgcccggatcgtaaagaatcaatctcaatgaagaacctgattctgttcgctcgcaagagaggtggtaaatctatggctgataaattggctgctgaaatcatggatgcattcaatgaacaaggcggtgctttcaaacgtaaagaagatatgcacagaatggctgaagctaaccgtgcatttgctcatttcagattc

SEQ ID NO: 12291 - DNA, 1224 bp, Bacteroides fragilis
atgagtaaaataacgattaaagacttgtatctcatttttggcaatgacaaacagcatgctttacgcatgttgaaggaaaaaaagagcaaaagtgagatattgaaggctaccggatgtacggtggccgtaaaagatgcaaacctatctatcagggaaggagaaatatttgtgattatgggactttcgggaagtggaaaatcaactttgctgcgttgcatcaaccgattgataaaaccgacctcgggcgaagtgatcattaacgggagagatatttctaacgtcactgataaagaattgctccgtatccgaagaaaagagctagctatggtgttccagcattttgggttgttgccccatcgctcggtgttgcataatatagctttcggactggaactacaaggagtaaagaaacaggagcgggagcagcgggcaatggaaagcatgcaactggtaggactgaagggctacgagaaccagatggtcggcgaactgtcgggaggtatgcagcaacgtgtcggtttggcccgtgcgttggccaatgatcctgaggtgctgctgatggatgaggctttttccgctctcgatcctttgattcgcatacagatgcaggatgaattgctgaccttacaatctaagatgaagaagaccatcgtgtttattacccacgatttgaatgaagccattaaattgggcgaccggattgctatcatgaaagatggtgaggtagtacaggtaggcacttcggaagagatcctgacagaaccggccaatgcttatgtagagcgctttgtgcagagtgtggaccgtagcaagattattaccgctgcatcagtgatggtagataaaccccttgtggcccgattgaagaaagagggaccggaggtgttgattcgtaaaatgctcgagcgtaacctgactgtgttgcctgtggtcgatgcaaacaatgtgcttgtgggagaggtccggctgaaagatttgctccgattgcgtcaggaccaggtgaagtcgatcgagtcggttgtccgggaggaagtgcattcggtgttgggagatacgatactggaagatattttaccgttgatgacaaaaaccaattcgcctatctgggtagtgaacgagacccgcgagtttcagggagttgttccgttgtcatcgcttatttacgaggtaaccggaaagaacaaacaagaaatcaatgaaatcattcaaaatgcaatagaatta

SEQ ID NO: 12292 - DNA, 1296 bp, Bacteroides fragilis
atgaaaagaaaaactatagatatcataacattagggtgctcaaagaacctggtggattcagaacagttgatgcgtcaattggaagaagccggatatgatgtaacccatgactcggaaaaaccgacaggagagatagctgttatcaatacctgtggttttatcggtgatgcaaaagaagaatcgattaatatgattctggagtttgcacaagaaaaagaagaaggcaatttggagaaactttttgtaatgggctgtctttcggaacgttatttaaaggaattagcgattgagattcctcaggttgataagttttatggaaaattcaattggaaggggttgttacaggatttgggtaaagcttaccatgaggagcttcatattgagcgtactcttaccactcccaaacattatgcttatctgaaaatatcagagggttgtgatcgtaaatgctcttattgtgctataccgattattacaggaagacatgtatctcgtcctatagaagaaatcttggatgaggtgagatatttggtttccaatggtgtaaaggagtttcaggtaattgctcaggaattaacttactatggagtggatttatataagaagcaaatgcttccggagttgatcgaacgcatttctgagattccgggtgtagaatggatacgtttacattatgcatatccggcacatttccctaaagagttgttccgagtgatgcgtgaacgagataatgtatgtaaatacatggatattgcattacagcatatcagtgataatatgctgcaacgtatgcgtcgtcatgtgacgaaaaaggagacttaccggttgattgaacaatttcgtaaggaagttcccgggattcatttgcgtacgacgttgatggtgggacatccaggagagacagaagaggattttgaggaattgaaagagtttgtacgtaaagtgcgctttgacaggatgggggcttttacttattcagaagaagaaggaacatatgctgcggctaattatgaagactctattcctcaggagctaaaacaggcacgattggatgagttaatggctattcagcaaggaatttctactgaattaagtgcatcaaaagttggacaaaaaatgaaagtcattattgatcgtatagaaggtgaatattacattgggcgtacagagtttgattctccggaagtagatcctgaagttttaataaggtgtgaaggggataatttaatgattggtaacttttatcaagtacaagtgattgattccgatgaattcgatctttttggtgaaataatt

SEQ ID NO: 12293 - DNA, 558 bp, Bacteroides fragilis
atggaacatatcattcatttactaatcggtttcatcgttttaagtttccttctcaaaaccggtttctatccgcgatggggaatctggttgtcagcacttgtctatacggttttccttatttgtataggtccatgggctacggaacaatcgccaacagagataaactctctgctggcctctgccccacacatactgaccctttcagtatatgtcacgctcgaagcctcaataatgatcactttttgcttcaactgttttgcagacacctcaaaacagcggacacttttccaacggacagttacatacatattgaatttttatcccggactgctaatggcgggcatactaacctatctgcttatacagttgttcttcgcttttccgggagtcagcttcggactgatcaccggcatctcttcagttgctgtttttatactgatatccggactgagcctactcttgaaaaacatagtaggagaacggaaattacgacttgaaatactcttcatcaccaatctgtttatcgtactgcttagtgtcgttagcacaggaaacaac

SEQ ID NO: 12294 - DNA, 1386 bp, Bacteroides fragilis
atgaaataccgttatctggacttacgccgtagtgctgttcgttcaaatttggaattacgtcacaaaatgacgatcgaggttcgcagttatctcgataaactaggtttcttggaagtggaaactccggtattgatcggttcaactcctgaaggagcacgtgactttgtagttccttcccgcatgaatccgggacaattctacgcattaccgcaatctccgcagacactgaaacagctattgatggtttccggtttcgatcgttatttccagatagccaaatgtttccgtgacgaagacctgcgtgccgaccgccagcctgagttcactcagattgactgcgaaatgagtttcgtagagcaggaagatgtgattactacatttgaaggaatggccaaacacctgtttaaggtgatccgtaatatcgaactggccgagccattcccacgtatgccttggagcgaagcaatgagattgtacggtagcgataaaccggacattcgcttcggtatgcaattcgtcgaattaatggatatcttaaaagggcacggtttctctgtattcgataatgccacatatattggcggtatttgtgccgagggtgcagccggctatacccgtaagcaactggatgccttgaccgaatttgtgaaaaagccacaaatcggtgcaaaaggtatggtctatgcccgtatcgaagctgacggtactgtgaaatcaagcgttgacaagttctatacacaagaagttttgcaacaattgaaggaagcattcggtgccaaacccggtgacctaatcttgattttatcgggagatgatgccatgaaaactcgtaagcagctttgtgaattacgtctagaaatgggtaatcaattgggattacgggataaaaacacatttgcatgtctgtgggttgtggacttccctctatttgaatggagcgaagaagaaggcagattaatggctatgcaccatccgtttacctcacctaaaccagaagatatccatctgctggatacaaatcccgctgctgtgcgcgctaatgcttacgatatggtaatcaatggtgtagaagtaggagggggatcaatccgtatccacgatagccagttgcagaacaaaatgttcgaattactcggatttaccccggagcgtgcgcaagagcagttcggcttcttgatgaatgccttcaagtttggtgcgcctcctcatggcggactggcttacggattagatcgttgggtatctctttttgccggactggactcaatccgtgactgcattgcattcccgaaaaataactccggtcgtgacgttatgttggatgctcccgcagcactcgatccgtcacaactggaagaactgaacctgattgtagatattaaggag

SEQ ID NO: 12295 - DNA, 483 bp, Bacteroides fragilis
atgtacaccacacccggaagggaattccttttcagggaaatagtaaaggggctggaagagaagtatgaccacatacttatcgactgtcccccatcattggggatcatcacgcaaaacgcgctgatggcaagcgattacgtgatcatacctacggatgggaattacttcgccatgaaaggaattgaaaagatacactatatcatcggcctgctcaaaaggaagctgggagccgatgtccggatactcggatactttatgaccaagtacaatgccaggagaaagctggatgtggatatcagggagagtctggtaagaagtctgggagatggcgtctttgaaacggtaatacgaagcaatgttgccctgggagaggcacaatacaaggcacagagcatatttgactatgcgccttcgtcaaacggggctgatgactacagggagctggtcaaggagttcctgggcagaattaaaaaaataaataaa

SEQ ID NO: 12296 - DNA, 531 bp, Bacteroides fragilis
atgagactggtgcttcacctgttgcgtcaggatacctctgtggtggaagctttcggaagttctattataactttaaagcatgaggcgaaatattgcaaggtgtgtcataatatatctgatacggaaacttgtcagatttgtgcaaatccgcagcgggacgcgtctatggtctgcgtagtggagaatatacgggatgtgatggccgtagaggccactcaacaatatcgtgggttgtaccatgttttggggggagtgatttcaccgatggatggggtaggaccgggcgatctgcagatagaaagtctggtgcgccgggtagccgaagggggaataaatgaagtgattcttgctctaagcacaaccatggaaggggataccacgaatttttatatttaccgtaaacttgagaaaatgggtgtcaaattgagcgtacttgcccgtggggtatccattggtgacgagctggaatacacagacgagataacgttgggtagaagtattgtgaaccgtacgacttttaccggaaccgtt

SEQ ID NO: 12297 - DNA, 375 bp, Bacteroides fragilis
atggctagaaaatcattttcggttttgttcttcatcaagaaaggcaaattattgaaagcttctattcttgacaagtataaggatgtggcagaatgtaccggaaaactattgccagtattgagcaatcaacgcatgaacagttacctgaaagagattgcagatgtatgcggattgcagaaaaatctgtgcacacattcagcccggcactcctatgccacaagcatttgcctagcgaatggcgtaagtatggagaacgtagccaaaatgttaggtcatgccgataccagcgtaacaaaacactatgcacgggtactggatcagaatattctaaaggatatgcagaaagtaaatagctgtttatcggaattggctata

SEQ ID NO: 12298 - DNA, 981 bp, Bacteroides fragilis
atggccggaccgcaatcttatttagccagtgaagcagaccgcttatgggtagctgtatacgatggcttttcacgcatggcagtaccattattcatgattgtctccgcctttctccttgctccgatgaaagaagaacaaactacatggcaattttatcgccagcgattccttcgtatcataccaccatttttcatattcatgatactatacagcatcttaccaatgttgtggggacagataaacggagagacatcattaacggatttatcacgaattttcttgaacttcccgacacttgcaggacatctatggtttatgtatcctctaatcagtctttatctattcatacctataatatctccatggctgagaaaagcctcggcaaaagaagaacgcttcttcatagggttgtttctgttatcaacatgcatcccatatctcaaccgttggtgtggtgaagtatggggacaatgtttctggaacgaatatcacatgctatggtacttctcaggctatctgggttacctcgtgctggcacattatatacatactcaccttacgtggagtcgttcaaaacgcttcatcataggaaccattttaatggttatcggagccgtattaaccatctattcattctatagccaggctatacccggtgagactctttccactccggtaatagaaataggatgggccttctgtacaatcaactgtgtactgctcacagcgggtacattcctcatgtttacgtgtatcaatagctcaaaagctccacgaatcataacagaaatgtcaaagctcagctacggtatgtatctaatgcatatcttctggctaggattatgggcaacagtatttaagtataccctggcactgcctactgttgccgctataccatgcattgcagtcagtacatttatctgttgcttcataacttcaaaactcatttcattcataccgggcagcaaatggatcatagga

SEQ ID NO: 12299 - DNA, 495 bp, Bacteroides fragilis
atgtcattgttactacccgatagtggcctgatattctggatgctcctttcttttggaattgtattcgcagtattggcaaaatacggcttccccgtcattattaagatggtggaaggccgtaaaacctacattgacgaatcattggaggtagccagagaagcaaacgcccagttgtcacgactgaaagaggagggcgaagctattgtggctgccgctaacaaggaacagggacgtatcatgaaagaggctatgcaggaacgtgaaaagattatttacgaggcccgcaaacaagctgaaatagctgctcagaaggaactggatgaagtgaaacgacagattcagattgaaaaagacgaagccatacgtgatatccgtcggcaggtagctctgctttctgtggatatagccgagaaggtcattcgcaaaaatctggatgataaacaagagcagatgggaatgattgaccgtatgcttgatgaagtattaacgaagaac

SEQ ID NO: 12300 - DNA, 1287 bp, Bacteroides fragilis
atggaattcttagtaattattcttttactcgtactgaatggcatttttgccatgtacgagattgccttagtatcctcaagtaaagcacgtctggaaaccctggtcagcaaagggaacaaatctgcccggggagtattgaaacaattggaagaacccgaaaaatttctttctaccattcagattggtatcacgctgatcggtatcgtatcgggtgctttcggtggagtagccattgccgatgatgtgactccgctctttgccatgataccgggagccgaagtctatgcaaaggacctggccatgatcacaaccgtaatcgtcattacctacctgtcactgattatcggtgagcttgtacccaaatccatcgctctcagcaatcccgagcgctatgcaaccttgctgagtcccgtcatgattctgctgaccaagatttcattcccttttgtctggttgctcagcatttccacccgcctgctcaacaaactgatcggtctgaaaagcgaagaacgcctgatgactcaggaagaactgaaaatgattcttcaccaaagctcggagcagggtgtgattgacaaagaagaaaccgaaatgctacgtgatgtctttcgcttttcggataaacgtgccaacgaactgatgactcaccgacgtgatctggtggtgctacatacgactgacagcaaagagaaagtgcttcagatcatcgacaacgagcatttcagtaaatacctcctgattgatgacgacaccgatgaaatagcaggtgtggtttctgtgaaagatatcatactgatgataggtagcgaacaggaattcaaccttagagaaatcgcacgtcccgccttgtttatacccgaaagtttatacgctaaaaaagttttagagctatttaagaagaacaaaaataagttcggagttgttgtaaacgagtatggcagcacagagggaatcattaccctgcatgacttgaccgaaagtatctttggagacattctggaagaggacgatacggaagaagaggaaatcgttcgccgacaggacggctccttgttggtagaggcttcaatgaatatcggagattttatggaagagatgggaatactctcttatgatgatatcgaatcggaagactttacaactttaggcggattggctatgttcctgataggacgtattcccaaagccggagatatattcacttacaaaaaccttcagttcgaagtagtggatatggaccgtggaagagtcgataagctgttggttattaagagagaagaggaggaa

SEQ ID NO: 12301 - DNA, 1161 bp, Bacteroides fragilis
atgggacgcatcacggtggacggcagccagacgcagttcagttgcaagttgagtgtcgatccgaagctgtgggacaccaaagggggacgtgtcacgggcagaagcgcggcggcactcgaaacgaaccgtatgcttgacaagatgcgggtgcgcatcaacagacactatcaggaaatcatggagcgtgacaacttcgtcacggcggagaaggtaaagaacgcctttctcggactggaacaccgctaccacacgctgatgcaggtgttccgtcggcacaacgagaactatgagaaacaggtggaagcaggcatgaaagcaaaaggtacactggaaaagtaccgtgtcgtttacaagcacctgcaagagttcctcgacatccgctaccatgtgaaggacatcgccctaaaagagcttactcccgctttcatctccgacttcgagatgttcctgcgcacggacaagcactgctgcaccaataccgtgtggctgtacgtctgcccgctacggacaatggtgttcatagccatcaacaacgagtggctgacacgcgacccgttccgcgagtatgaaatcaagaaggaggaaacgacacgcagtttcctgaccaaagacgaaatacgcctgctgatggaggggaaactgaaaaacgccaaacaggaactgtaccgcgacctctacctgttctgtgcgttcaccggattgtcgttcgcggatatgcgcaacctcacggaagagaatatccgtacctatttcgacgaacacgagtggataaacatcaaccgcaagaaaacgggcgtggtgtccaacatccgcctgcttgacatcgccaaccgcataatcggcaaataccgtgggctatgcgagaacggcaggatattccccgttccgcattataacacgtgccttgccggtatccgtgccgtcgccaagcgttgcggcatcaccaagcatatcacgtggcatcaaagccgccacacggcagccacgacagttttcctttccaacggcgtacccatcgaaacggtcagctccatgcttggacacaagagcataaagacgacgcagatttacgcgaagataaccaaagaaaaactcaatcaggatatggaaaaccttgccgcaaggttaaacaacgtcgaggaatttgcaggttgcaccatc

SEQ ID NO: 12302 - DNA, 1599 bp, Bacteroides fragilis
atgcccgtattcgatgccttatacgatcatagagagactttgaatcatattttggttcgccacgaacaaggggcggcacatgcggctcagggatttgcccgtgcttcgggtgaggtcggagtttgcctggtgacgagcggccccggtgctaccaataccataaccggtattgcagatgcaatgatcgacagtacaccgattgtagtcattgccggacaggtgggaacagcttttttggggacagatgcttttcaggaggtcgacttggtaggcatcacgcagccaattacaaaatggagttatcagatccgtcgtgccgaagatgtgccatgggcggtggcccgcgccttttatatagcgaaaagcggacgcccgggaccggtagtgctcgactttgcaaaaaatgcccaggtagagaaagccgaatatatgcctgcgaaactcgatttcatacgcagttacgtgcctgtacccgagactgacccggaggccgtgaaagcggctgccgaattaattaacggtgcagagcgcccgttggtattggtggggcaaggtgtggaactgggcaacgcacaacaggaattgcgtgctttcatcgaaaaggcagatatgcccgccggatgtacgttgttgggactgtcggctttgccaaccgagcatcctttgaacaaaggtatgctgggaatgcacggtaatctcggaccgaatatgaacaccaataaatgtgatgtcctgattgctgtcggcatgcgttttgacgaccgtgtgaccggaaacctggctacgtacgccaagcaggcgaaagtgattcattttgatatcgatccggctgaaattaataagaatgtacatgcagatgtagcggttctgggtaactgtaaagagacgctctctgctgttacggcattgctgcagcccaacgagcataaagaatggctggatagtttcctgccttatgaacaggtggaagaagaaaaggtaatccgtccggaattgcatccgatgggagatacgctttcgatgggggaagtggtgcgtgcggtaagcgatgcgaccaatcatgaagcgatattggtgaccgatgtcggtcaaaaccagatgatgtctgcccgatactttaaatattcaaaagaccggagtatgattacttccggaggacttggtaccatgggattcgggttgccggctgctatcggtgcaacctttggccgaccggaccgtacggtttgtgtatttatgggtgacggtggtctgcaaatgaacattcaggagttgggaaccattatggaacagaaggcaccggttaaaattatcgtattaaacaataatttcctgggcaatgtacgccaatggcaggcaatgttcttcaaccgtaaatactcgttcacacccatgctgaatcccgattatattaagattgcttctgcttatgatataccggccaaaagagtctttacccgtgaagaactggctgatgcgattgacgaaatgattgcgacagacggtccgttcctgttggaagcttgtgtgattgaagagggaaatgtgttgccgatgacccctccgggaggttcagttaaccagatgttgttggaatgc

SEQ ID NO: 12303 - DNA, 444 bp, Bacteroides fragilis
atgaaagtcgaacaggtattttcagacaggaagcgtttcctcgatttgctcttgctggcagatgagcaggaagatatgatagaccggtatctggaacgtggagatatgttcgctctatatgatgaagacaagctcagggcggtttgtgtggttactaacgagggggaaggaatttacgaattaaagaatatcgcaacttgtccggatagccagcgtaagggatatggtaaaagcctgattgaatatctgtttcaccattattcggaccgatgctcggtcatgtttgtgggaacaggagatactccacatacgcttttattctatcaatcctgcggatttgttccttcccatcgtattaagaattttttcaccgaccattatgatcatcctatttatgagaacggcatccggctcagggatatggtttatttgaagaaggaaaaa

SEQ ID NO: 12304 - DNA, 849 bp, Bacteroides fragilis
atgttaagaatcgcagtacaagccaaagggcgtctttttgaagaaacgatggcccttcttgaagaatcagacatcaaactgagcacaaccaaacgtactttactcgtacaatcgtccaactttccggttgaggtactttttctccgtgacgatgatattccccaatctgtagctacaggagttgccgacctgggtatagtaggagaaaacgaatttgtagagaggcaggaagatgccgaaatcattaagcgtctcgggtttagcaaatgccgtttgtctttggctatgcccaaagacattgaatatcccggtttgagttggtttaacggaaagaagatagctacttcctatcccggaattttagatgcttttatgaaaagtaacggggtgaaggctgaagtgcatgtcattaccggttctgtagaagttgctcccggcatcggattggcggatgctattttcgatattgtcagttccggttctactctggtcagcaatcgtctgaaagaagtggaggtcgtaatgagatcagaagctttgctgataggcaacaagaatatgagtaaggagaaaaaagagatattggacgaattgcttttccgcatggatgctgtgaaaactgctgaagataaaaagtacgtactgatgaatgctcctaaagataaactggaagatattattgctgtgctaccgggtatgaagagtcctactgtgatgccgttggcacaagatggttggtgctctgtacatacagtgctcgatgagaaacggttttgggagatcataggtaagctgaaagcgctgggagcggaaggtattttggtgttgcctattgagaagatgattata

SEQ ID NO: 12305 - DNA, 2037 bp, Bacteroides fragilis
atggaaaagaactttaaaagaactaccgtcacatcggcactgccgtatgcgaacggccccgtccatatcggccatttggccggtgtatatgtaccggcagacatctatgtccgctatctgcgactgaaaaaagaagatgtacttttcatcggaggttccgacgaacatggggtacccatcaccatccgtgccaaaaaggaaggtatcactccgcaggatgtagtagaccgctatcacttcctgattaagaaatcattcgaagaattcggtatctcgtttgacgtatacagccgtacatcatccaaaacacaccacgaactggcttcagacttcttcaagaagctatacgaaaaaggagagtttatcgaaaaaacttcggaacaatattatgatgaagaagcacaccagtttctggccgaccgctacatcaccggtgaatgtcctcactgtcattcggaaggtgcctatggtgaccaatgcgaaaagtgcggaacttcactgtcgcccactgacctgattaatccgaaaagtgccatcagcggaagcaaaccggtcatgaaagaaaccaaacactggtatctgccacttgacaaacatgaaacatggctgcgccagtggatattggaagaacacaaagaatggcgtccgaacgtgtacggacagtgcaaaagctggctcgatatgggtttgcagccgcgtgcggtcagccgtgacctcgactgggggattcctgttccggtagagggtgctgaaggtaaagttctctacgtatggttcgatgcaccaatcggttacatatccaatacaaaagaactgcttcccgattcatgggaaacctggtggaaagatcccgaaacccgtctggttcactttatcggaaaagataatatcgtatttcactgcatcgtatttccggctatgctgaaagctgaaggcagctatatcttgccggataatgtaccgagcaacgaatttctgaatctggaaggagacaaaatatccacttcacgcaactgggcagtgtggttacacgagtatctggaagacttccccgggaaacaggacgtattgcgttatgtattgacagccaatgcacccgaaaccaaggacaacgactttacctggaaagacttccaggcacgcaataacaacgaattggtagcggtctacggtaactttgtgaaccgtgcgatggtattgacacagaagtacttcgaaggtaaagtacccgctgcgggcgaacttacagattatgacaaagagacactgaaagaattctccgatgttaaagccgaagtagaaaagctgctcaatgtattcaagttccgtgatgcacagaaagaagccatgaatctggctcgtatcggaaacaaatacctggccgatacagaaccctggaaactggcaaagacggatatggaacgtgtaggtactatcctgaatatatctctgcaactggtagccaacctggctatcgctttcgaaccattccttccgttcagttcggaacgcttacgccagatgctgaacatggatagcttcgactgggcagaactgggacggaacgacctgcttcctgccggacatcaactgaataagccggaattattgttcgaaaagatagaagatgccacaattgaagcacaagtacaaaagttgctcgatacaaagaaagcaaacgaagaggctaattacaaagccaaaccgatccgcgccaatatcgaatttgacgacttcatgaaactcgatattcgcgtaggtactgttctcgaatgtcagaaagtgcctaaggccgacaaattattgcagtttaaaatagacgacggactggaaacacgcaccatcgtcagcggcattgcacaacattacaaaccggaagagctagtaggcaagcaagtttgcttcatcgccaatctggctccacgaaagctgaaaggtatcgtcagcgaaggtatgatcctgagtgccgaaaataatgacggcagcctggccgttgttatgcccggacgggaagtgaagccgggaagtgaagtgaaa

SEQ ID NO: 12306 - DNA, 288 bp, Bacteroides fragilis
atgggaattattattaaaccgttggtgacagagaaaatgactgcaataactgataagctgaatcgtttcggctttattgtacgtcctgaagctaataaactggaaattaagagtgaagttgaagccctttataatgttacggtagttgatgtgaatactgtgaagtatgctggcaaaaataagagccgttatacaaaagcaggtatcatcaatggtcgtacgaacgcttttaagaaagccatcgtgacattgaaagaaggagatactattgatttttatagcaatatt

SEQ ID NO: 12307 - DNA, 1725 bp, Bacteroides fragilis
atgaacatattagaactaagtgaacaggaaatcatccgacgtaacagtctgaatgaacttcgcgcgatgggcatcgaaccctatcccgcagcagagtatgtaaccaatgctttctcaactgatattaaagccgaattcaaagatgacgagacaccccgccaggtatccgtagccggtcgcatgatgagccgccgcataatgggtaaagcctctttcattgaattgcaggactctaaaggccgcatccaggtatatatcacccgtgatgacatctgcccgggagaagacaaggaaatgtacaacactgtgttcaaacgcctgctcgacttaggcgacttcatcggaatcgaaggcttcgtattccgcacacagatgggcgaaatcagtatccatgcacaaaagctgacggtactcgccaaatcgatcaaaccactgcctattgttaaatacaaagacggcgtaacttacgactcttttgaagatcctgaattgcgttaccgccagcgctatgtcgacctggctgtcaacgaaggcgttaaagatattttcatcaaacgcagcaaagtatacagttccatgcgcgaatacttcaactcaaagggatacatggaagtggaaactccgatcctgcaggccattgccggaggagcagccgcgcgtccgttcatgactcaccacaatgctttggatattcctttatacatgcgaatcgccagtgagctttacctgaaacgccttattgtcggcggttttgaaggtgtatacgagatcggtaaaaacttccgtaacgaaggtatggaccgtacacacaatccagaattcacctgtatggagatatatgtagcctacaaagactacaactggatgatggaatttactgaaaaaatgatcgaaaagatctgtctggacgtaaacggtactaccgaagtaaaagtaggcgacaacatcatcaatttcaaagcgccctataagcgtgtcactatgctgggagccatcaaagagcacaccggttacgatctgacaggaatgaatgaagagcagattcgcgaagtttgcaagaaactgaacatggaaatcgatgatacgatgggtaaaggtaaactgatcgatgagatcttcggtgagttctgcgaaggcacttatatacagcctacattcatcacggattacccgatcgagatgtctcctctgaccaagaagcatcgtgacaaccctgaactgacagaacgtttcgagttgatggtaaacggtaaagagttgtgtaacgcatattctgagttgaacgatccgatcgaccagttggaacgtttcgaagaccagatgaagctgagcgaaaagggagatgatgaagcgatgatcatcgataaggacttcgtccgtgcattggaatatggtatgcctcctacttcgggtatgggtatcggtatggaccgtctgactatgctgatgaccggtcagtcgaccattcaggaagtattgttcttcccgcagatgcgtccggagaaagtcgtaccgaaagacagtgcttccaaatttatggaactgggcattgccgaagagtgggtacctgtcatccagaaagcaggatacaatcaggtggccgacatgaaagaggttaatccgcagaaattccaccaggatatttgtggtatcaacaagaaatacaaattggaactgaccaatccgtcagttaacgatgtagccgagtggatacagaaaattaaa

SEQ ID NO: 12308 - DNA, 1392 bp, Bacteroides fragilis
gtgatatactatcatgaacagcatcatttatttctattctctaaagaatattttcttaagcagattcatacggaaggcctgcttagctatctgactgatttcattattcaattcttttacatgcccgcattaggaagtgctatattagccggtatattggcgggaatctatctgttgacacattacaacataaaaaaaataaccggacaaccggacatactgcaattatcattgatcccatcagtatctcttttcatctatacgctgcctgtggatcattcactgactctgattatcggagtattcttagggcttctgatacttggatgcatagcatttttcatatcgggaatatggaaaaacattacactgcatagaataaatgttcccggaaagaaaaaaaaattaattatttctacggccctcataaccatatatgccattggagcttgctatatattcatacattcatataatatgcccgaacgcattatgataatggcggaaaagagtgtaaaagaaaagaattgggaaaatgtactgacacaaaccgaaaaatatatcaactcgggaagaaccaaccagttgatctcctactttcacaacctggctctgtaccatacggaaaaattgccttatcaactattcgattacccacaaaaactgggagtcaaggcgctatacttcccatggaacagcgatagccgtgagagtgagtacggacattttatatatgaagacttaggatacatcaacgaagcacagcggtgggaattcgaagcaatggtggtatggggagaaacggcaccccatttgcttaacctggcacgatacaacatagtaaacaaaagacctgaagtggcacgacggttcatcaatctcctgaagcagtccctcttctatcggaaagatgccgaagaattagaaaaacagctccatgcaggcagtgtaccgggactgcgcatggcacttgaaaacaataaggaacatcccgcacgatttgcaaacgtcatcaatataggaccggaattacaatatctgtgtgagcaggacacgacaaacagaatggcttttgaatacctgatgagtgacctactgctgagcaataacgtagtacgctttgtggataacctgaagttcatcaggcactttaaatatccggaaatgccacccgcataccaagaagcactctatatatacaaattgggagtggacggggaaacgttttccaaatcaggattcaacgtcagcgaaaacaccgaaaagagattccaaaggtattacagcctgtataaaaacaggcaaatgcagaggctgaaagcggagtttggaaacacctactggtattacctgaacttcatcagtccgtatggagacaaaatcataaggaac

SEQ ID NO: 12309 - DNA, 1596 bp, Bacteroides fragilis
atggcaaatattaaacaagcagtgaaactaggggtattcaccctggcgatcatgaacgtaacggcagtagtatccctacgcggacttcctgccgaggccgtatatggaatgagttcggccttctattatcttttcgcagctatcgtattccttattccgacatcactcgttgcggcggaattggctgccatgttccaggacaaacagggtggtgtgttccgttgggtaggcgaagcgtacggaaagaaattgggattccttgccatctgggtacaatggattgaaagtacgatctggtatccgactgtattgacattcggtgctgtatctatcgctttcatcggaatgaatgatacacacgacatgacactggccagcaacaaatactatacactggccgttgtgcttatcatttattggctggctaccttcatctcactgaaaggaatgggatgggtaggtaaagtagctaaaataggcggtatggtgggaaccatcatccccgctgccctgctgattatcctaggtattgtttacttggcatccggagggcattccaaccttgacttccatagcagcttcttccccgaccttacgaatttcgataacgtggtattagcggcaagtatcttcctcttttatgccggtatggaaatgggcggtatccacgtaaaggatatgcaaaacccttcaaagaactatccgaaagcagtatttatcggtgcacttattactgtaatcatcttcgtcttgggtacattctcactaggtatcattatcccggccaaagatatcagcctgacacagagtttacttgttggcttcgacaactattttagatatatccatgcatcctggttatcaccgatcatcgccattgctcttgcattcggtgtgttggcaggtgtattgacatgggttgccggtccgtccaaaggtatctttgccgtaggtaaggccggttatatgcctccgttcttccagaaaaccaataaattgggtgtacagaaaaatatcctgttcgttcagggtggtgctgttaccgtattgagccttctgtttgtggttatgccttccgtacagagcttctatcagatcttgtcacagctgacagttattctttatctggtgatgtacttacttatgttctccggtgccatctacctgcgctataacatgaagaaagctaaccgtccgttccgtatcggtaaaaaaggtaacggcttgatgtggattgtcggcggcctcggtttcctcggttcattactggcgtttatcctcagctttatcccgcccagccagatttctacaggtagcaacacggtatggttctctgtattgattatcggtgctttggttgttgtgattgctccgtttatcatttatgcagctaaaaagccatcatgggctgacccgaacagtactttcgaaccgttccactgggaaacacaagctaaaccacaagttgctccggcaacaacaactaccgccggtccggcaacaagcagcgctaccactatcggtagtacaacttctgccccatcgacaggttccggctctgtttcatccgataaggacaccccacagaaacaaagt

SEQ ID NO: 12310 - DNA, 1227 bp, Bacteroides fragilis
atgaaagtggaaaaattcaaggtgctgctctacctgaaaaagagcgagccggacaagaccggcaaagccccgatcatgggacggatcaccctcaaccgcacgatggcgcagttcagctgcaagctctcctgcacccccgggctgtggaacgcgcgtgagagccggctgaacggcaagagccgggaagcggtggagaccaatgaaaaaatagaaagactgctgcttgccgtacactcggccttcaattccctcatggaaagaaaaagggatttcgatgccgccgcggtcagggacatgttccagggcaatgcgggcatgcagatgaccctgctcaaacttctcgaccggcataacggggaaatgaaggcccgtgtcggtgtggaccgtgcgcccaccacactctcgacctacctcttcacctaccgcacgctttccgaattcatcaaggcgaaattcaaggttccggaccttgtcttcgggcagctcaacgagcagttcatccgcgactatcaggatttcatccttctggaaaagggatatgccgtggacacgcttcgcggctacctggccatcttgaaaaagatctgccgcatcgcctacaaggagggccactcggagaaataccatttctgccacttcaagctgcccaagcagaaggagacaacaccgaaagcactcagccgtgagaatttcgagaagctgcgtgatctggagataccggaaaaacgcaggtcacatgtcatcacccgggacctcttcctcttcgcctgttacaccggcaccgcctatgccgatgcggtaagcatcacccggaagaacctcttccgggatgacgagggcagcctctggctgaaataccagcgaaagaaaaccgactacctcggacgtgtcaagctgcttccggaagccgtcgcgttgattgagaaataccgggacgatacccgcgagactcttttcccgccgcaggactaccacacgctcagggccaatatgaaatccctgcgcctgatggcagggctgagccaggaccttgtctaccacatgggacggcattctttcgcctcgctggtcacgctcgaggagggagtgccgatagagaccatctgcaaaatgctgggacactccaacataaagaccacccagatatacgcgcgcgtaaccccgaagaagctgttcgaggacatggacaggttcgtcgaggcaacccgcgatttgaaacttatcctt

SEQ ID NO: 12311 - DNA, 153 bp, Bacteroides fragilis
atggcaacgactgtttgtttggcaaacggtgtgcctattgagagcctatctaaggttttaggacacactaatataaaaactactcaactatatgccaagattaccgatgaaaaattgagtaatgatttggctatactcatgtcaaagatagat

SEQ ID NO: 12312 - DNA, 1216 bp, Bacteroides fragilis
  misc_feature (1180)..(1213): n=g, a, t or c
atgaagaaggtttttgaaagaattatagaaggaatattgacctgtagcggttttgtaacgagtattacgattctgctggttgtgcttttcctttttaccgaggcattcggcctgttcagcagcaaggttattgaagagggatatgtgctggcgctgaacaaagataataaggtaagcgaactgacaccgatgcaaattaaagatgtctttgatgaagagatcaccaactggaaagagttggggggtgaagatctcccgatccgggtgttccgtctggaagacatcacgcactactactcggaagaagaactgggagaagcctacgagaatgcaggggaaaagattatggagctgattcagaaaacacccggtatcgttgcttttattcctcagaagtttgtggtacggccggatgcggtacatttcataaaggataacaccatttctgtgaaggaggtctttgccggagcggaatggtttccgacggctactcccgcacctttgttcggctttctgccgctgataaccggtacgctttgggtgagcctgtttgccatattgattgctttgccgttcggactttcggtatcgatctatatgtcagaggtggccgattcgaaagtacgtagttggctgaagccggtgatagagttgctgagcggtattccttcggtggtatatggctttttcggcttgatcgtgattgtacctttgattcagaaagtatttgatttgccggtgggggagagcggacttgcgggaagcattgtgcttgccatcatggcattgcccactatcataacggtgactgaagacgccatgcgcaactgtccccgtgccatgcgtgaagccagcctggcactcggagcttcgcagtggcagaccatttataaagtagtgattccttattcgatctcgggcattacctcgggggtggtgttgggtatcggacgcgctatcggcgagacgatggcggttttgatggtgaccggaaatgccgccgtgattcccactaccattctcgaacctttgcgcacaatcccggcgaccattgcggccgaactcggagaagcaccggcagggggaccacactatcaggctctgctcctgctgggggtagtgctgttcttcattacattaatcatcaactttagtgtggagtacatttcatctaagggcnnnnnnnnnnnnnnnnnnnnnnnnnnnnnnnnnntga

SEQ ID NO: 12313 - DNA, 1995 bp, Bacteroides fragilis
atgactgtaaaagaaaaaatagagcaactccgtctccaactccatcagcataattacaattattatgtgctgaatgccccggaaatctcagataaagaattcgacgatttaatgagggaacttcaggacctggaacaggaacatccggaatataaagacgaaaactcgcctactatgcgtgtaggtagcgatatcaataagaattttacccaagtagcgcacaaatatccgatgctttcattgtcgaatacatattcggagaatgaagtaaccgacttctatgacagagtgcgtaaagctttgaatgaagattttgagatttgttgcgagatgaagtatgatggtacctctatctctttaacttacgaaaatggtaaactgatccgcgcggtaacccgcggtgacggtgaaaaaggggacgatgtaacagacaacgtaaagaccattcggagtattcctctcgtcctacatggagataattatccggaagttttcgagattcgtggagaaatcttgatgccatgggaagttttcgaagcattaaaccgggaaaaagaggcccgcgaagaacctctctttgcaaatccgagaaatgccgcatcgggaacattgaaattacaaaattccgccatcgtggcttcccgtaagctggatgcctatctctattatctgcttggcgataatctgccgactgacggacattatgaaaatctgcaggaagcagccaaatggggatttaagatttccccgttaatgcgtaagtgccagacactacaagaagtcttcgactttatcaactattgggacgtagagcgcaaaaacctgaacgttgctacagacggaatcgtactgaaagtaaacagcctcaagcagcaaaggaatcttgggttcacagccaagtctccccgctgggccattgcctataaatttcaggctgaacgtgcactgacccgcttgaacatggtaacctatcaggtagggagaaccggcgccgtaacaccggtagccaatctcgacccggtacaactttcgggcacagtagtgaaacgcgcatcattgcataatgcggatatcattgaaggactcgatttgcatataggcgatatggtctacgtagaaaagggaggagaaatcatccccaaaataaccggtgtggatacgtcggtccgcttcatgatcggtgaaaaggtaaaattcatcactcactgtccggaatgtggcagtaagctgataagatacgaaggagaagccgcccattattgtccgaatgagaccgcctgtccaccacaaatcaaaggaaaaatagagcacttcatcagccggaaagcaatgaatatagacggattaggacctgaaaccgtcgacatgttctaccgtttaggactgattcatgacacagccgacctctatcgactgacgacagatgacatcagaggcttggaccgtatgggagacaaatctgcggaaaacatcattaaaggaatcatgcagagcaaagaggtaccttttgaaagagtaatttttgcattaggtattcgttttgtaggcgaaacggtagctaaaaaaatagccaaatcttttaaagacatagaagaattggaaaatgcagatctggaaactctgatcaatatcgatgaaatcggtgaaaaaatagctcggagtatccttaactactttgcgaatgaatcaaatcgtaaattggtaggccgattaaaaacagcaggattgcaactatacagacctgaagaagacttgagcggacataccgataaattggccggacaatccattgtcatcagtggagtattcacccaccattcaagagatgaatacaaggatcttatcgaaaaacacggtggcaagaacgtgggaagcatctcttctaaaaccagttttattctggccggagacaatatgggacctgcgaaattagaaaaagcaagtaaactgggaattaaaattatgaacgaagaggaatttttaaagcttatatcg

SEQ ID NO: 12314 - DNA, 714 bp, Bacteroides fragilis
atgattctctcttctttggtacataccgattttcagccttatttacttcctaatacggatgcatgggctttgcctggggataaggcgttggaattgttggtttatcttgaacagcaaggtgtcaggcagatctactgtgtacctccggtaaaggtggaaaatgaagggaatgctttttcttttctgaaagatgcctttcaatatttacagcagcaatactccggtaatatctctctgcgtttgtcggcaagatatcgtttggatgaaggatttccggctttgttggagaagggagatttgttgacgataggaggggggaaggagttgctggtagatgtgtctcctttacaacagccggaaggactcagtgagatgattcatgccatctgccggtcgggttatattcctgtcctgatgcaaccggaacgttcgctttattggggaacggaagactatctgcacttgcgggaatcgggatgcaggctgatgctgaatctatattccttgttcggttataatggtgacggagcgttgaattacagccgtatgttgttgagaaaggagtggtatacatatctctgttcgggtagggaggatacgaaagtgatgcgctatggtgaatcgttttcgatagaggatgatgatgatttggcgatgaaattgcaggagatagaaagaaacagcaggctgttgtgggctgctatggaaaacggg

SEQ ID NO: 12315 - DNA, 354 bp, Bacteroides fragilis
atgtattttgctaaattgcaaaatgttcctacttctcctcgtaagatgcgtctcgtggctgacatgattcgtgggatggaagtgaacagagcacttggcgttttgaagttttcttcaaaagaagcagctgcaagagtggaaaaattgttgcgctctgcaattgctaactgggagcagaaaaacgaacgtaaagctgaaagtggcgaattattcgtaacgaagatttttgttgatggtggtgctacactcaaaagaatgagaccggctccgcagggaagaggatacagaattcgcaaacgttcaaatcacgtaacattgttcgttggttctaaaagtaataacgaagatcaaaat

SEQ ID NO: 12316 - DNA, 2661 bp, Bacteroides fragilis
atgcgaaacttacttgggggcaaaggtgcgaaccttgccgaaatgaatctgatcggtgtccccgtacctccgggcttcacaattacaactgacgtttgtaccgaatattacgagatgggacaggaaaaggtcgtatctctcctgaaagaagaagtagaaaaagctattgcaaatattgagaacctgatgcgttcaaaatttggtgacgtagagaatccgttgctggtttctgtgcgttcgggtgcacgtgcatccatgccgggtatgatggatacgatcctgaatctgggtttgaatgatgaagtggttgaaggtctgacccgtaagaccggaaacgctcgttttgcatgggattcttaccgccgtttcgtacagatgtacggtgacgtagtattgggtatgaaacctgttaacaaagaagaccaggatccgtttgaggcaatcattgaagaagtgaaacatgccaaaggcgtgaagctggacaacgagctcgaggtggaagatctcaaggaactcgtgaagaaatttaaagctgccgtaaaggcacaaacaggcaaggacttcccgacttgtgcatacgaacagctttggggagctatctgcgctgtgttcaattcatggatgaacgaacgtgccatcctgtaccgtaagatggaaggaattcccgatgaatggggtactgccgtaagtgttcaggcaatggtgttcggtaacatgggcgatacttccgctacaggtgtatgcttctcccgtgatgccgctacgggcgaggacctcttcaatggtgaatatctgatcaatgcacaaggtgaagacgtggttgcgggtatccgtactccgcagcagatcactaagatcggttcccagcgttgggctcagcttgccggtgtgagcgaagaggaacgtgcatcaaaatatccttctatggaagaggctatgccggaaatctacaagcagttggatgaattgcagaccaagcttgaaaatcactacaaagacatgcaggatatggagttcaccgttcaggaaggcaaactttggttccttcagacacgtaacggtaaacgtaccggtgctgccatggtaaaaatcgccatggatctgttccgccagggcatgattgacgaaaagaccgcgctgatgcgtgtagaacccaataaactggatgaattacttcacccggtattcgataagtctgctttgaaacaggctaaagtgctgactcgcggtttgccggcttctccgggtgctgctaccggtcagatcgtattctttgctgacgatgcagccgaatggcatgctgccggaaaacgcgttgtgatggttcgtatcgagacttcacccgaagatttggccggtatggcagttgccgaaggtatcctgaccgcccgtggaggtatgacctcacatgcagccgtggttgcccgtggtatgggtaaatgctgtgtttcgggagccggtgcattgaatatcgactacaaggcccgtacagtggaagtggatggtgtattgctgaaagagggagatttcatctccttgaacggtagtaccggtgaagtttatcagggtaaagtagaaacgaaagcagccgaactgtcaggcgactttgccgatctgatgaagttggctgataaatatacccgtctgcaggttcgcaccaatgccgacactccgcatgatgccgaagttgcccgtaatttcggtgcggtaggtatcggtctttgccgtacggaacacatgttcttcgaaggtgaaaagatcaaagccatgcgtgagatgattctggcagaaaatgctgagggacgccgcaaagctcttgccaagatcttgccatatcagcaagccgacttcaagggaatcttcaaggcaatggccggttgtccggtgactgtacgtctgctcgatcctcctttgcatgaatttgttcctcacgatctgaaaggacagcaggagatggccgatacaatgggagtaagcctgcaatatatccagcagcgtgtcgaatcgctctgcgaacacaacccgatgttgggtcaccgtggttgccgtttgggaaatacgtatcccgaaatcacacagatgcagactcgtgccattctgggtgccgctcttgaactgaagaaagaaggaatagagacacatcccgaaattatggtgccgctgacaggtattctttacgagttccaacagcaggaaagtgtgattcgtgccgaagcagacaagctctttgaagaggtgggagatcgcatcgacttcaaagtcggaaccatgatcgaaattccccgtgcagctctgactgccgaccgtatcgcttcgtctgccgagttcttctcgttcggaaccaacgacttgactcagatgactttcggttactctcgtgacgatatagcttctttccttccggtttatctggagaagaagattctgaaagtagacccgttccaggtactcgaccaaaatggtgtaggtcagttggtacgtatggcaaccgaaaaaggccgtgccatccgtccggacctgaagtgcggtatctgtggtgaacatggcggtgagccttcatctgttaagttctgccataaagtaggtttgaattacgttagctgttctccgttccgtgtgcctatcgcacgtctggcagcggcgcaggcagccatcgaagaa

SEQ ID NO: 12317 - DNA, 697 bp, Bacteroides fragilis
gatgacgagcccttggcgctcgagcaattgacgggttatatagcccgtgtccctttcctgcaactgatagcctcgtgccaggatgcattcagtgccatgcaggtgttgtcggaagaagaggtcgacctgatgtttgtcgatattcacatgcccgatctgaacgggctcgatctggtgcgttcgttagtggtgaagcccctgattgtgtttacaaccgcctatccggaatatgccgtcgagggtttcaaggtagatgcagtcgactatctgctgaagccatttgaatttcaggatctgttgaaagcagccgataaggcacgtcggcaatttgagtatcatttgcaagataacgggggagggacggaaactgatttattggaaaaggacggttcattgttcgttaagtccgaatataagattatccgcatcaatgtggcagacatttgctatatagaaggtatgagtgagtatgtacgcatctataccgatgcggcggataagcccgtagtgactttgctgagtatgagaaagctggaagaacgcttgccgcaggagatgttcatgagggtacatcggtcttatatcgtcaatcttcggaaaataaccgaagtttcccggttacgcatcattttcaataagaatatatatataccggtgggagataactataaggaaagatttacagaatatattaaca

SEQ ID NO: 12318 - DNA, 2211 bp, Bacteroides fragilis
atggaaagagatgaattctttacgaaagaagagagagaattattgttctcactatacaaaaaactactgcgtctcaccggagaaaccttacaaaaaggagattgcagaaagctgaaaaagcatcttatcgactccactcaaaacaatacgatgcagagagacagttttgggctgaatcctgttatcaaagatatgcagactgctgtaatcgtggctgaagaaatcggcatgaaacgggcatctattttaggcattatgctacacacgcctgtacgctgccactcttatacaatagaatacattcaacaggagtatggtgaagatgtggccggaattatccggggattaatcaagatcaatgacctttatgataagagtccgaccatagaatcggagaatttccgcaatctgctactgtcttttgccgaagatatgcgggtaatcctgatcatgattgccgaccgtgtaaacgtgatgcgacaaataaaagatgccgaaaatgacgaggcccgcagacgggtggccaatgaagcggcctatctgtatgctccgctagcccacaaactgggattgtataagctgaaatcggaattggaagatttgtcactaaaatataccgaacatgacatctattaccatatcaaggaaaagctgaacgagacgaaaaagtcacgtgaccgttatattgccaacttcattgctccgatacaacagaaattggaggaagcaggactgcatttccacatgaaaggacgtaccaagtccattcattccatctatcagaaaatgaaaaaacagaaatgccagttcgaaaacgtatatgacttgtttgctatccgtatcatcctggaatctcagtttgaaaaagagaagcaggaatgttggcaggcatattccatagtgacggatatgtatcaacctaaccccaaacgtctgcgtgactggctgtcggttcccaaaagtaacggttacgagtcattacacatcactgttatggggcccgaaggcaaatgggttgaagtacagattcgtacggagcgtatggacgatattgccgagcgcggattggcagcccattggagatataaaggcgtgaagggtgaaagcggactggacgaatggctgacttcaatacgtgaagcactggaaaatacggagaacgacctggaaatgatggaccagttcaaactggatctgtatgaagacgaagtattcgtatttacaccgaagggagacctttttaaactgggcaaaggggctaccgtacttgattttgctttccacatccacagcaaattgggatgtaaatgtatcggagcaaaagtaaacggtaaaaatgtacagttaagacaaaagctgaacagcggggatcaggtagagattatgacatcgaacacacagactccgaaacaagactggctgaacattgtcactacttcaaaagcccgtactaagattcgtcaggccctcaaggagatggtagcgcgtcagcacgattttgccaaagagaccctggaacgcaagttcaagaaccggaagatggaatacgacgaagctgtgatgatgcgcttaatcaaacgcttgggattcaagaacgtgacagagttttatcagaagattgccgatgaggtactcgacgtaaacgatattctggataaatacatcgaacaacaaaagcgggacagcgaacgtgatgaggtgacctatcgcagtgcagaagaatacaacctgcaaaaccagatagacgaaacaacagtcactaaagaagatgtactcgttattgaccaaaacctgaaaggattggatttcaaactcgccaaatgttgtaatcccatatacggagacgatgtattcgggtttgtcacagtatccggaggtatcaagatacaccgaaatgactgccccaatgcaggacagatgcgcgaacgcttcggctatcggattgtaaaagcacgctgggccggtaaatcggaaggtactcaatacccaataacactccgcgttgtgggtcatgatgatatcggtattgtaacaaatatcacttcgatcatctcaaaagaaaatggtatctcgctacgttctatcggtatcgattcgaacgacggacttttctcgggtacattgaccattatggtaagtgacaccggacgtctggaagcgctgatcaagaagttgcgcacagtaaaaggagtaaaacaggttagcagaaat

SEQ ID NO: 12319 - DNA, 396 bp, Bacteroides fragilis
atgtgggcagtccgcatcttcaaaactcgcacaatcgctgcagaagcctgcaagaaaggacgaatcagcatcaatgggtcgtttgtaaaagcagctcgtatgataaaacccggagacgtaatccaagtgaaaaaacctccgataacatattcctttaaagtcctgcaagccattgaaaaacgggtgggtgcaaaacttgtatctgaaatgatggaaaatgtaacaacccctgatcaatatgaacttctagagatgagtaaaatcagcggttttattgatcgggcacgaggtaccggacgtccaactaaaaaagatcgccggagcattgaggaatttactactcccgaatttatggatgacttcgattttgatttcgacttcgaagaagataatgaa

SEQ ID NO: 12320 - DNA, 1326 bp, Bacteroides fragilis
ttgtcggcaggattgactactttagtcgccatccttctgctggctcttggcaaaggagccgaaaaacaacttaaccgccgagacggatatgtcattgtcagtgtagcatgggtcgtgttttccttatttggaatgctcccgttctacctcagccattatataccaagcataaccaatgccttcttcgaaacgatgtccggattcagtagtaccggagccaccattctcgacgatatcgaagcactgccccacggacttctcttctggcgaagcatgacacagtggataggcggattgggcattgtcttttttaccattgccgtactgcccattttcggtgtgagcggcgtacaactctttgccgccgaagccagcgggcctacctacgataaagtacatccccgtatcggtgtgacggccaaatggatatggactatctatgccggactgacagccattgaagtgattcttctgttattcggaggcatgggactgttcgacagtatctgccactcatttgccacgaccggtacaggaggttattctaccaagcaagacagcatagcctattacaattcaccttatatagaatatgtgataggtgtttttatgtttctctccggaatcaactttacgctacttctcctgctatttaccggtaaactgaagaaagtatctcaaaatgccgagttaaagtggtacgtgatgtcagtgattctctttaccgcattcattgcggcagtgctctaccgcaccaccccgatgggagctgaggaatctttccgcaaagccttttttcaagtagcttcgctgcatacttccaccggatttgtaacagccgactacatgcaatgggtaccggtactttggggtaccctgactgtcatcatgctgataggtgcctgtgccggaagcaccacaggaggtatgaaatgcatccgaatggtgattctggccaaagtgtcacgaaatgaatttaaacacatcgtacatccgaacgccgtacttccggtgcgggtgaacaaacaggtcatttctcctgccatcctgtcgacggtactggcattctcattcatctatgccgtcatcatcattgtcagtgtactgttgatgctggcaatgggcgtaggtttcacagaatctatcgggacggtgatttcaagtatcggaaatatgggaccgggattggggagctgcggtccggcctattcatgggacggactccctgatctggccaaatggttattgtcgttcctgatgttactgggacgtctggaactattcaccgtcttacttttattcagttctgacttttggaaaaggaat

SEQ ID NO: 12321 - DNA, 1497 bp, Bacteroides fragilis
atggcattcaaatccatttctgcagcagaagctgccagccttgtcaaacatggctacaacatcggcctcagcggtttcacacccgcaggaacggccaaagcggtcacttccgaaatagcaaaaatagcggaagcggaacacgcaaaaggaaatcctttccaaatcggcatctttaccggagcctctaccggagattcatgtgacggtatattatcacgtgtaaaagccatccgctatcgtgccccttacactaccaaccccgatttccgtaaagctgtgaacaacggtgagattgcctataatgacattcacctttcacaaatggcacaagaggtacgctacggattcatgggaaaagtgaatgtagccattatcgaagcctgcgaagtaactccggacggaaaaatttatctgacggctgccggcggaattgctccgaccgtctgccgcctggccgaccagatcattgtcgaactgaacagtgcacacagcaaaaacatgatgggaatgcatgacgtatacgaaccactcgatccgccttatcgccgtgaaattccgatctataaaccaagtgaccgcatcggactaccttacatacaggtcgatccgaaaaaaattgtaggtatagtagagacaaactggcccgacgaagcccgctcatttgcagcagccgatcctatcaccgataaaatcggtcagaacgtagccgacttcctggctgccgatatgaaacgcggtatcattccttctacattccttccgttacaatcgggagtaggcaacatcgccaatgcagttttgggtgcattgggacgtgaccaaacaattcctgccttcgaaatgtatactgaggttatccagaactctgtgatcggtttgattcgcgaaggacgtgtaaaattcggcagtgcctgttcgctgaccgtaaccaacgattgtctgcagggtatatatgacgatatggactttttccgtgataaactgatcctccgtccgtcagaaatctctaacagccccgaagtagttcgccgtttaggcatcatctctatcaatacagccattgaagcggatatctatggtaatgtaaactctacccacattggcggaaccaaaatgatgaacggtatcggcggttcgggcgactttacacgtaatgcgtacatctctatcttcacttgtccgtcagtggctaaggaaggtaagatcagttctatcgttccgatggtttctcacctggatcatagcgaacactctgtcaacatcgttattaccgaacagggagtagccgatctgcgcggtaagagtccgaaagagagagcacaagcaatcatcgagaattgtgcacacccggattacaaacagattttatgggattacctgaaactggcaggtaataagtcacagactcctcatgccattcaagccgctttaggaatgcacgccgaactggctaaaagcggagacatgaaaaacgtgaactgggcagaatatgaacga

SEQ ID NO: 12322 - DNA, 2208 bp, Bacteroides fragilis
atgagtaatataacaaagaaagcgtttcctgtactgaatatgcactgtgcagggtgcgctaataatgtggaaaaaacagtgaagaaactggccggtgtggtagacgcatcggtcaacttcgccacaaacacactgtccgtttcgtacgaggccgacaagctgacccccggagagatccgtgcggctgtacttgccgcaggttatgacctgatagtggaagaggccctgaaagaggaacgtcaggaggaggcacaggagaaacactaccggctgctgaagcggcaggttatcggtgcatggatcttcgttgttcccatgttgctgttttctatggttctgatgcatgtacctttctctaacgagatccagttgatactggccctccctgtaatgatcttttttggtggatctttctacgtcaacgcctggcggcaggcacgtctggggaggagtaacatggatacgctggtggcactgagtacctccatcgcattcctgttcagtgtcttcaatacatttttccctgagttctggtatagccgcggacttgagccgcacgtctattacgaagccgcagtagtcatcattgcctttgtactgaccggaaagttaatggaagagcgtgctaagggaaacacctctaccgccattcgtaaattgatgggacttcagccccgtgtggcccgagtgcttcgcgaagggatcgaagaagacatcctgatagaccagttgcaaaccggcgatctggtggtcgtacgtccgggcgaacagattcccgtggacggacgtctgtctgaaggagagtcttatgtagacgaaagcatgattagcggagagcctattcctgtagagaagaaggtcggtgaccgggtactggcgggaaccatcaaccagaagggagcttttgtaatcaaggcgtccggtgtgggaagtgagacggtgctggcgcgcatcatccgcatggttcaggaagcgcagggaagtaaagctcccgtacagcgtatcgtagaccgggtgacgggtatcttcgttccggtggtgctgtgcattgccgtgctgacatttgtcatctggctgttggtgggaggaaccgattatttctcacatgccttgctttcggctgtatccgtactggtcattgcctgtccgtgtgctttgggacttgctactcctaccgctctgatggtgggtatcggcaaagcagccagcaaccatattctgataaaggatgctgttgccctcgagcagatgcgtaaagtcgatgtagtggtgctcgacaaaaccgggacattgaccgagggacatcccactgtctccggatggctttgggcccaagtacaggaagagcatttcaagaatgttctgctggcagccgagcttaaatccgaacatccgcttgctggagccattgtctcttctctgcaagaggtggagaagatagttcctgcccagttggagagttttgagagtatcaccggaaaaggtatcaaggtggtatatcagggtgacacttattgggtgggcagccacaaattgctgaaagatttcagtgcttctctttctgacgtacttgccgagatgatggtgcaatacgaatcggacgggaacagtatcgtttactttggccgtggaacagaggtacttgccgttgtcgccattgccgaccagataaagccgacttctgccgaggcggtgaaggaactgaaacgtcagggcatcgacatttgcatgctgaccggtgacggacagcggacggcacttgccgtatcgggcaaattgggcatcgaccgctttgtggcagatgccttgccggatgataaagaagagtttgtgcgtgagctccagatgcagggcaaaacggttgctatggtgggtgacggaatcaatgactcacaggcgttggctttggctgatgtcagcatagcgatggggaaaggcaccgatatagccatggatgtggcgatggttacgttgatgacatcggatctgctgttgctgccccgtgcattcgaactctccaagcaaacagtaaaactgattcaccagaatctgttttgggcgtttatctataatctgataggcattcccattgcagccggaatcttgttccctgtcaacgggttgctgctcaatccgatgcttgccagtgcagcgatggcattttcaagtgtaagtgtcgtgctgaattcactgagtctggccagaaaa

SEQ ID NO: 12323 - DNA, 1482 bp, Bacteroides fragilis
atgagaaaagcaacacgtactcaatggataaagtgttccattgccattcttttgtatctgatattcctgatttgggtgaaaagctggtggggactgatcgtagttcctttcatcttcgacatctacatcaccaaaaagattccctggtcgttctggaagaaatctaaaaacccgacggtccgtagtgtgatgagttgggtagatgccatcgttttcgctttggtagcagtatatttcgtaaacatctatgtttttcagaattatcagatcccatcatcgtcactggaaaaatcgctgctggttggagacttcctctacgtgagcaaaatgagttacggcccccgtgtgccgaacacaccgctatcaatgcccttggcacaacatacattgccgattctgaatactaaatcctatattgaatggccgcaatggaaatacaaacgtgtacccggattcggtaaagtgaaactgaatgacatcgtagtgtttaacttccctgcgggagataccgtcgcactgaatttccaggatgcagacttttatacattggcgtacaacatcggaaagcagatttacccgaacccgatcgacatggacagcctgactcgggagcagcagaagacagtgtatgatttatactataatgccggtcggaaagagatactgtcaaaccctcaacgatatggtaaagttgttacccgtccggtagaccgccgggagaactatgtaaaacgttgtgtaggacttccgggagatacactccagattatcaacggtcaggttatgatcgatggcaaggccattgaaaacccggaaaacttgcaattcaactattttgtgcaaactaccggcccgtacatcacggaagaaatgttccgcgaactgggtatcagcaaagccgaccaaagactaactcccgaaggagcaggctatgaagagggactgattgagctgggattggacggacgaaatgcccaaggtggactgaatcctgtttatcatcttccgttaacgaagaagatgtatgacactctatccggtaacaaaaaattagtcggtaagattgtaatagaaccggaagaatactccggagaagtgtatcccctgaatttaaatacccattggaatcgtagtgactacggccctatctggattccggcaaagggtgccaccatcacactgaccccggacaatctgcccatttatgaacggtgtatcactgcttatgaaggcaataaactggaacagaaagaagacggaatctacatcaacggtgtgaagacaaaccaatacactttccagatggattattattggatgatgggcgataaccgtcataattccgccgactcccgctattggggattcgtaccggaagatcacgtagtaggtaaaccgatcgtcgtatggttatcattagataaagaccgtaactggttcgatggtaaaatccgctggaaccgcatctttaagtgggtagac

SEQ ID NO: 12324 - DNA, 984 bp, Bacteroides fragilis
atgaaacaagcgacaacaggaaataaggatataataaagaagctactgaccgatagcctatcgccagaagagcgagagaagctaaacaactataaatttgtgaatcaagcaatttatagtcaatgggaacaagcttctgatatgtataccgatgtcgataaggaagaacgaatgctgacaaacgtcatgcaccaaataaagaaaggaaaaaccggacgttttaggcaaagcttacatcggtatggctgggtggcatctatagctttattgctgatttgcggaacactatctttaatgttattatccagaaaagcagagccggaggtttggtatgtactgaactccggacgccagtcaatggattcggtaagattagcagatggtacgcttgtgatgctgaacgcagggagtcgcttgacatatcctaaagagttttccggaaacaagcgggaagtaactctttccggacaagctttttttagtgttcatccggataaggtacatccttttgttgtgaaaacaaagaatatggatgttacagctttaggaacagcatttgaagtctttagtttcgatggtgatgaaagtgtagaaacggtattgcttaacggaaaggttaaggtagaacctaaggatcacaaagagcaaataaaaggagaatatatccttcaaccgaacgaaaaactaacgtgccaggtaaatggtgatatacgtatagatcgcgtagatgccaattcttattctgcttggcgtattggaggacggttgagctttaaaaatgaaacattagccatgatcttgcctcggttagagaaatggtacggacaaaagatcgattgcccgcagaaaactgctgatcattatcgctttacatttacgttgcggaatgaacctttggatctgatattaaatataatgtcgcatagtgcgccattaaattataaattaataagtaatgactactatgttctcgaagaacttaag

SEQ ID NO: 12325 - DNA, 1521 bp, Bacteroides fragilis
atgcaagagaaaattataatacttgatttcggttcacagaccacgcagcttatcggtcgccgggtgcgcgagttggatacgtattgcgagattgtcccctataacaagttccccaaaggcgatgaaaccgtcaagggagtgattctgtcgggaagccccttctccgtatatgacgaaagtgcgttcaaggtcgatttgagcgaaatcagaggtaaataccccatcttgggcatctgctatggtgcacagtttatggcgtataccaatggtggcaaagtagaaccggcaggtacccgtgagtatggacgtgctcacctgacttctttctgcaaggacaatgttttgttcaaaggtgtgagagagggtacgcaggtatggatgagccacggtgataccattactgctatccctgagaattttaaaaccattgcatcgacagacaaagtggctattgccgcctatcaggtagagggcgaacaggtatggggagtacagttccatccggaagttttccacagtgaagacggtacgcagatgcttcgcaatttcgttgtcgatgtatgtggctgtaaacaggactggagtccggcgtcattcatcgagagcacggttgccgaattgaaagctcagctgggtgatgacaaggttgtactgggattaagcggaggagttgactcttctgtagccgccgttttgctgaacagggctattggcaagaatttgacttgtattttcgttgaccacggtatgcttcgcaagaacgagtttaagaacgtgatgcacgattacgaatgccttggcttgaacgtgattggtgtggatgccagtgagaagttcttctctgaactggaaggcgtcaccgaacctgaacgtaaacgtaaaattataggtaaaggatttattgacgtattcgatgaagaagcacataaactgaaagatgtgaaatggctggctcagggtacgatttatccggactgtatcgagtcgctttctatcaccggtactgttatcaagagtcaccacaatgtgggaggacttcctgaaaagatgaatctaaaactttgtgaaccgcttcgcctgttgtttaaggacgaggttcgtcgtgtaggtagagagttaggtatgcccgagcacttgattacccgtcatcctttccccgggccgggacttgctgttcgtatcttaggtgatattactcctgagaaagttcgtatcttgcaagatgccgatgatatctttattcagggtttgcgcgattggggattgtacgatcaggtgtggcaggcaggtgttatcttgcttcctgttcaatcggtaggcgtaatgggagacgaacgtacttacgaacgtgccgttgctttgcgtgccgtgacttcaacggatgctatgacagctgactgggcgcatttgccttatgaattccttggtaaagtgtcgaatgatattataaataaggtaaaaggtgtgaaccgtgtgacctatgatatcagttcgaagccacctgcaactatcgaatgggaa

SEQ ID NO: 12326 - DNA, 269 bp, Bacteroides fragilis
cattattatctcttaccaagtaatcaaaaagtaaatgcttatctgaaagagattactgatatttgtgatattcataagaacctgacttttcgcgtcgcccgacatatgatggcaacaactatttgtttggcgaacggtatgcttattgagagtttgtccaaggttcttggctggtctaatataaaaacactcaactttatgctaagattactgatgaaaagctaaatgatgatttggctattttgaaaaataaaatagattagctgccg

SEQ ID NO: 12327 - DNA, 2163 bp, Bacteroides fragilis
atgaaaactatgattagaaagaaaatatatctgttgttgttattgatacctttgctgcatggctgtaaagagtccgatttcaacgatttacttgacagacagggtgatcagaggaaagaattgcaggagttgacggatctatgtaaaaaactgaatgaggatatttataatcttcaggtgattgtcaataccgacaggataggagataacattactcatatcgaggaactggcggatggtgcggggtatactatctccttctccaaaagtgctccgattactatccgtaacgggaagaaaggagataccggtccggatggagatgccgggaaagacggcatagacggtacagacggtaaggatggcgtagatggtacggatggtaaagacggtgtggacggtaccgacggtacggacggaaaagatggtgagaacggtaccgatggtaaagatggtgcagatggtacgaatggtacggacggtaaggatggcgtggatggtaccgatggcaaagatggtgtcgacggtaccaacgggaataagggggagcaaggtgaccccggacagaatccggtggttggcattatgcaggatcccgctgattcggaatattactggactataaaaataggttccggtgaaccttattatctggccgacaatgatggaaacagaataaaggcaacctctacggtacacgatggacaaacccctcaactgggagtgaagcaatgggaaacgtccgacgggggcgacgataactattactggacgcaaaagattggaaccggtcccgagacatggattgaagcggatggaaagaaaatagttgccaatgcaaaaaatgctgtgtccgtgtttgagaaggtggacttgaaggagccggattatgtggaatttactttaagcggtggggcaacccggttcagattacctataggaagaccggttattgaggttccggagggacgtaaactgttttttttcaaccggggcgggtctcaggcgattgctttcagttgtaagggtatctcaaaagagcaattgtcggtagatgttccgaaggggtggaaagcgacagtcgattttgaagcgggagctttgactcttgaggccccttcggcgggaacagcggacgtagcattatcaggagatgtggtattgcgaagtacgaataccgcagaagaaacggcgcggacttctttcaccgtgagtatgctttataagataatgcttccggattttagaggttcttatgtgtacaacatccgtctttggggcaaaaaggtaggagaactttgtcgtgaataccagcgggaactgggattgtctgcaacggttgtctatccttatttgacaggaggagtttatggatcgggacttatcacgaataccggtgcttcggtgaagcacgacggtacgggttatcatgcttcagtttctgacaggccggcagttatgtatatctatactgaaaatggatcggaattctataccgacagttcgttgaaaggacgggaaccggatttcggagacggcctgcaggcggaaaggctgactgatgcggatggcaatgcctaccgcattgtgaaaataggtaaacagtactggacagcggagaatttacggacacttacttatcctgacggaactcctgttgccaccggcttgtcggggcgtgcctggagagagagtggatttgatgatagcggttcgggtgcctgtgccgtgtacgattatgagaatgctgctgcagcaggggcatttgccaataaggtatcttatggagttttgtacaatagagttgctgccagaaaagtggtgcctgccggatggaagcttccaacggaatcggatatcgtatccacattacgggcttttttgggttctaatgccggtacattattgaaagagtccggaacagagcattggctgacagggggtggaaccgatctcacaggtttttccggtgtcggagggggatacagaggtgctgacggtctttcgttcaacgattttcagcaagtcggtatctggtggagcagtgccagtctggagagtgtcggtgctgtgttcagattgtccgcaaactcatccgtactcgagtttaacagcggagacaataattcgacaggctacagtgtacggcttttgaaagaagat

SEQ ID NO: 12328 - DNA, 2829 bp, Bacteroides fragilis
atggaatataatttcagggagatcgaaaagaaatggcagaaaatttgggtagacaaccatacctaccaggtaaatgaagatgcatccaaacaaaaattctatgtactcaatatgttcccctatccttcgggtgctggactgcacgtaggtcatcccctgggatatattgcctcagacatttatgcgcgctataaacgcctgcaaggatttaacgtattgaacccgatgggatatgatgcttacggactgccggccgaacaatatgctattcaaaccggacagcaccctgcaattaccactgttaataacatcaaccgctatcgtgaacaattagataagattggtttctctttcgactggaatcgtgaaattcgcacttgcgatccggaatattatcattggacccaatgggcatttatcaaaatgttcaacagctattattgcaatgatgaaaaacaggcacgtcccatcgaagagttaatagaagcttttagtaccaacggaacacaaggtatgaacgtagcctgtggcgaagaaatggacttcactgccgacgaatggaatgctaaaagcgaaaaagaacaacaggaaatcctcatgaactaccgtatagcctatttgggcaatacaatggtaaactggtgtccggctttgggtaccgtacttgccaatgatgaagtagttgacggtgtttccgaaagaggcggttatcccgttattcaaaaagtgatgcgtcagtggtgcctgcgcgtatccgcttatgcacagcgtttgctcgacggacttgaaaccgtagaatggaccgactcgctgaaagagactcaacgcaactggataggacgcagcgaaggtgctgaaatgaactttaaagtgaaagattcggatattgaatttactatctttacaacccgtgccgacacggtatttggagttactttcatggtgcttgccccggaaagtgaattggtagccaagttgaccactccggaacaaaaagccgaagtagatgcttatctggaccgtaccaaaaaacgtaccgaacgcgaacgtattgccgaccgtagcgtaagcggcgtattctccggaagctatgccattaacccattgaccaacgaacccataccggtatggattagcgattatgtattagcaggttacggtacaggtgccatcatggctgttcctgcacacgatagccgtgactatgcttttgccaaacatttcaatctggaaatccgtccgctgatcgaaggttgcgacgtcagtgaagaaagcttcgacgccaaagaaggcatcatgatgaattctccccgtccaggagctcccgaaagcggactcgtattgaacggattgaccgtaaaagaagcaatcgccaaaactaaagaatatatcaaggcaaccggattaggccgtgtgaaagtcaatttccgtctgcgtgatgcaattttctcacgtcagcgctattggggcgaaccattcccggtttactacaaagacggaatgccttacatgattgatgaaagttgcctcccgctggaattgccggaagtagccaaattccttcctaccgaaaccggtgaaccaccattgggacatgccactaaatgggcatgggacactgtcaacaaatgcgtgacagacaatgaaaacattgataatataaccattttcccactggaactgaatacgatgccgggatttgccggttcatccgcctattatctgcgctatatggatccgcgcaatcacgaagctctcgtttctcccgccgtggatcagtactggaaaaatgtagacttatatgtaggaggtacggaacatgctaccggacacttgatttattcacgtttctggaataagttcctgcacgattggggtatctccgtagccgaagagcctttccagaaactagtcaatcagggaatgatacaaggacgaagtaactttgtctaccgtatcaaggataccaatactttcgtatctctcaatctgaaagatcaatatgaagttactcctatccacgtagatgtcaacatcgtatccaacgatatcctcgacctggaagctttcaaggcttggagacccgaatacgaaactgccgaatttattctggaagacggcaagtatatctgtggatgggctgttgaaaagatgagtaaatctatgttcaatgtggtaaatccggatatgattgttgaaaaatacggtgccgatacactccgtatgtacgaaatgttcctcggaccggttgaacagtccaaaccttgggatacgaacggaatagatggcgtacatcgtttcatcaaaaaattctggtcattgttctatgacagaaacggcgaatatctggtaaaagacgaaccggctaccaaagaagaactaaaagcactccataagttgattaagaaagtaaccggtgatatcgaacagttctcttacaacacttcagtaagtgctttcatgatctgtgtcaatgaactttcaagtctgaaatgcaataaaaaagaggtattggagcaactcatcgtagttcttgcaccttttgctccgcatgtatgcgaagagttatgggatacattaggaaacaccacctctgtatgtgatgcacaatggccagctttcaacgagcaatacctggtagaagatacggttaattacaccatttctttcaatggtaaagcacgtttcaatatggaatttccggctgatgccgccagcgatgcgattcaagccactgtacttgccgacgaacgctcgttaaaatggacagaaggcaaaacaccgaagaaagttatcgtagtcccgaagaagattgttaacattgttatt

SEQ ID NO: 12329 - DNA, 978 bp, Bacteroides fragilis
atgcgttcccgttcgactatattattctccatattgattacgctcacggtcggtctttttttactggacttggccgtgggagctgtcaacattccgatccgcgatgtatgggcagcactgaccgggggaaattgttcccgtgccacggaaaaaatcgtactcaacatacgcctcataaaagctatagtggcactgttggccggggctgccttatcggtcagcggtcttcagatgcagaccctcttccgtaatcctcttgccggtccctatgtccttggcatcagttccggtgcaagtctcggtgtggcacttgtggtacttgccgggatcggttcatcaataggcattgccggagcagcgtgggtgggtgcggctgtcgtgttgctcgtgataactgccgtcggacagcgaataaaagacatcatggtaatcctgattctgggcatgatgttctcatcgggcgtaggtgctgtcgtgcagatattgcagtacctcagcaaagaggaatcgctgaaagcctttgtcatttggacgatgggggctttgggtgacgtcacctccggacaacttctgattcttgttccatcggtgtttgccggactgctgttggctgtactgaccatcaaaccgcttaacctcctgctgttcggagaggaatatgccgtaacaatgggactgaatattcggcgttcacgcagcctgttgtttctctcgacaacgctgctcgccggaacgataaccgctttttgcggtccgataggtttcataggtctcgctatgcctcatgtcacaagaatgcttttccaaaatagcgatcatcatgtccttctgcccggaacaattctttcgggagcatcgatattgcttctttgcgacatcatttctaaaatattcaccttgccgatcaacgccattacagctctattgggaatcccaatcgtcgtatgggtggttttacgcaacaaatccatcaccgca

SEQ ID NO: 12330 - DNA, 4281 bp, Bacteroides fragilis
atggcttttagaaaagaaaataagatcaagagcaatttctcgaaaatctctatcggtttggcttctccggaagaaatccttgagaattcgagtggtgaagtattaaagcctgaaaccatcaactatcgtacatacaaacctgagcgtgacggtttgttctgcgagcgtatcttcggcccgatcaaagactacgaatgccattgcggtaaatataaacgcatccgttataaaggtattgtctgcgaccgttgtggtgtagaagttactgaaaagaaagtacgtcgcgaacgtatgggacatatccagcttgtcgtgcctgtagctcacatctggtatttccgttcgctgcctaataagatcggttatttgttgggactccccaccaagaaactcgattctatcatttactacgaacgctatgttgtcattcagccgggtgtgaaagctgaagacggtatcgccgaatttgatctgttgtcagaagaagaatacttggatattcttgatactcttcctaaagataatcagtatctggaagatacagaccccaacaagtttattgctaaaatgggagccgaagcgatctatgatctgcttgcccgtctcgatcttgatgcattatcgtatgagttgcgtcaccgtgccggaaacgatgcttcgcaacagcgtaagaatgaggctttgaagcgtcttcaggtggtagaatcattccgtgcatcacgtgggcgtaataaacctgaatggatgattgtacgtattgtaccggtaattccgcccgaacttcgtccgttggttccgttggatggagggcgtttcgctacatccgatttgaacgatctttatcgtcgtgtgattatccgtaacaatcgtttgaaacgattgattgagattaaggcccccgaggtgattctccgtaatgagaaacgtatgcttcaggaatctgtcgattcactgtttgataattcacgtaaatccagtgcagttaagactgatgccaaccgcccgttgaagtctttgtctgacagcctgaaaggtaagcaaggacgttttcgtcaaaacttgttgggtaagcgtgttgactattcggcccgttcggtaattgttgttggcccggagttgagaatgcatgaatgtggtattcctaaactgatggctgccgaactgtacaagccgttcattatccgtaagttgatcgagcgaggtatcgtaaagactgtgaagtctgctaagaagatcgtggaccgtaaggagccggtgatctgggatattcttgaacacgtaatgaaaggtcatccagtattgttgaaccgtgctccgacacttcaccgtttgggtattcaggctttccagcctaagatgatcgaaggtaaagctatccaattgcatccgttggcatgtacagcgttcaatgccgactttgatggtgaccagatggctgttcacttgcctttgagcaatgaggcagtacttgaagcacaaatgttgatgctggcttctcacaatattctgaatcctgcaaatggtgctcctattaccgttccttcacaggatatggtgcttggtttgtactatatcaccaaactccgtaaaggcgccaaaggtgagggactcacattctatggacccgaagaagcgttgatagcttacaatgaaggcaaagtagatattcacgctccggtgaaggttatcgtaaaagaccttgacgaaaatggaaatatcgttgatgtaatgcgtgagacttcagtaggtcgtgtgattgtgaacgaaattgttccgcctgaagtcggatacatcaatactattatttcaaagaaatcattgcgtgacattattagtgctgtaatcaaagcttgtggtgttgctcggactgctgacttccttgatggaattaaaaatttaggctacaagatggcttttcagggtggtctgtcattcaacttgggtgatatcattatcccgaaagagaaagagacactcgttcagagaggttatgaagaggtagagcaggtgattaataactataatatgggtttcatcaccaataatgaacgttacaaccaggtaattgatatctggacacatgtaaactctgaattgtctaatatcttgatgaagactatttcttcagatgatcagggtttcaactctgtgtacatgatgcttgattccggtgcccgtggttctaaagagcagatccgtcagctctccggcatgcgtggtttgatggcaaaaccgcagaaggcaggtgctgaaggtggtcagatcatcgagaaccctatcttgtctaactttaaagagggactttctgtgttggagtactttatctctactcacggtgcccgtaaaggtttggccgataccgctttgaagactgccgatgcgggatacttgactcgtcgtctggttgacgtttcgcacgatgtgattattaatgaagaagactgcggtacgcttcgcggactggtttgtactgacctcaagaacaatgacgaagttattgctactctgtacgaacgtatcctcggacgtgtatccgtacacgatattattcatcctcagaccggtgaattactggttgccggtggtgaagaaattacagaagatatcgccaagaagattcaggaatctccgattgaaagcgttgagattcgttcggtattgacttgcgaatcgaagaagggtgtttgtgcgaagtgctatggtcgtaacctggctacgaaccatatggttcagaaaggtgaggctgtcggtgtaatcgctgcccagtctatcggtgaaccgggtacacagttgacattgcgtacattccatgctggtggtacggctgccaacattgcggccaatgcaagtattgttgctaaaaataatgcccgtttggaatttgaagaactccgtacggtagatattgtggacgaaactggtgaggctgccaaagtggtagtaggtcgtttggctgaggttcgtttcattgatgtcaatacaggcattgtactttctacccataacgttccttacggttctacactttatgtagccgatggtgaagtggtagaaaaaggtaaactgattgcgaaatgggatccattcaacgctgttatcataaccgaagctaccggtaagattgagtttgagggtgtcattgaaaatgttacttataagattgaatcggatgaagcgaccggacttcgagaaattattattattgagtctaaagataagactaaagttccttcggcccacatcctgaccgaagatggtgatcttatccgtacatataatttacctgtaggtggacacgtagtgatcgaaaacggccaaaaggtgaaagcaggtgaggtaatcgttaagattccgcgtgctgtgggtaaggctggtgatattaccggtggtcttccccgtgttactgagttgtttgaagcacgtaacccgtcgaatcctgccgtcgtatccgaaatcgatggagaggttactatgggtaaagtgaaacgcggtaatcgcgaaatcatcgttacatctaagaccggtgaagtgaagaaataccttgttccgctgtctaagcagattctggtacaggagaatgactacgttcgtgcaggtactccattgtccgatggtgctacgactccggctgatattttggctattaaaggtcctacggctgtacaggaatacatcgtgaatgaagttcaggacgtatatcgtttacagggtgtgaagatcaatgataagcattttgagatcattgttcgccagatgatgcgtaaagtgactgttgacgaaccgggtgatacacgcttccttgaacagcaggtagtggacaaactcgagttcatggaagagaacgaccgcatttggggtaagaaagtggttgtagatgccggagattctgaaaacctgaaagccggtcagattgtcacagcccgcaagttgcgtgacgaaaacagtatgctgaaacgccgtgaccttaaaccggttgaggtgcgtgatgctgttgctgcaacttctacccagattcttcagggtattactcgtgccgcattgcaaacttcaagcttcatgtctgccgcttctttccaggagacaactaaggtactgaatgaggctgctatcaatggtaagatagataagttggaaggtatgaaggagaatgtaatttgcggtcatttgattccggccggtacaggtcttcgcgagtttgacaagatcattgtaggttctaaagaagaatacgatcgtattctggctaataagaagacagtgcttgactataatgaagtagaa

SEQ ID NO: 12331 - DNA, 1263 bp, Bacteroides fragilis
ttgatttatagttttgcaaccaaaaaaaagacgagtatggcaagaagcacatttcgcgtgctgttctatgcgaacggcagcaaggagaagaacggaattgtccccatcatgggacgggttacaatcaacgggacggtggcgcagttcagttgcaagcggagcatctcaaagacgctttgggatgctaagggcaaccgtgccaaagggaagagcgtggaggcaagggaaacgaaccttgcgctcgacaacatcaaggcgcaaatcatcaagcactaccagcgcatatccgaccgcgaggcgtatgtcacggcagaaatggtgcgtaacgcttatcaaggcataggttgcgagtatgaaacgatactcggtgcgtttgacaaggagaacgccaagttcttgaagcgtgtcggcaaagaccgctgcatggggtcttaccgtgtaatggtacgttcaaggaactatgtggcggcgtttatcaagtcgttctacaagcgcaacgacatgtcgatgctggaacttatctccgacttcatcaaggagttttctgtattcctcacaacggagcaagggcttaaaaatgcgactgtatggttggcgtgcatgtgggtcaagactatcgttttacgggcgcattacaacggtctgataccgagaaacccgtttgcgcagttccgtattactcccaacgtaaaggaaagggaatatcttacggagggagaaatccgacagctaatcgaacatgagtttaccgatgcaacgctcgctttcactcgtgaccttttcgtctttgcctgcttcaccgcactcagctttgcagacatcagggaactgaccacggacgatattatggacgtaaacggcgagaagtggattatttccaagcgacacaagacaggcgtaccgttccaagtgaagctgctggatattccattgcagataatcgggaagtacagaccgttccaaaaagacaattcagttttcggtgaaatcaactattggagcatctgcaaaaagctgaagaatgtcatccgtgagtgcaacataaacaagcaaatcagctttcatgttgcccgtcacacgttcggaacattagcccttagcaagggtatgccgattgaaagcgtgagccgtgttttgggacacacaaatatcaagaccacacagatttacgcaaagataaccacgcagaagttgggtaacgatttgacggctttcggtaaccagctgaaccggactttcggtaacatcaaagtggcaggagta

SEQ ID NO: 12332 - DNA, 1455 bp, Bacteroides fragilis
atgttgctgaaacagactaaaatcgtagcttccatctcagacagacgttgcgatgtagattttataaaagagttgtttgatgcagggatgaatgtggttcgtatgaacacagcccacgccagtcgtgaaggttttgaggcgttgattgccaatgtgcgtgccgtatccaatcgcattgccatccttatggataccaagggaccggaagtgcgtaccactgccaatgcggaccccatactttatcagatcggtgagaaagttaaaatcgtaggagatcccgatcgtgagactacccgtgaatgcattgccgtttcatatccgaattttgtgcatgacctgaatgtaggggggactattttgatagatgatggtgaccttgaattgcgagttattgataaaacaaccgaatacttactttgtgaagtccagaacgaggcaactttggggagccgtaagagtgtaaacgttccgggtgttcgtatcaatctcccctctttaaccgagaaagatcgtaataacatcctttatgccatagagaaagatatcgatttcattgctcattcttttgtgcgtaaccgccaggatgtgcttgatatccgtggaatactggacgctcacaatagtgatatccgcattattgccaagatcgaaaatcaggaaggtgtcgataacattgatgagatcctggaagttgccgatggagtaatggtagctcgtggtgacttgggtattgaagtaccgcaggaacgtattccgggaattcagcgtatgttgatacgcaaatgtatccttgccaaaaaaccggtaatcgtggcaacacaaatgttgcatacgatgattaataatccacgtccgactcgtgcggaagtaaccgatattgccaatgcaatctattaccgtacagacgctttgatgttgagtggtgagactgcctatggcaaatatcctgtagaggccgtgaaaacgatgactaagattgctgcacaggctgagaaggacaagttggaggagaatgacattcgcattcctttggacgaaaacagtaatgatgtcacagctttccttgctaaacaagctgtaaaagcaactactaagctaaagatacgtgccatcattacggatagctatcaggggcgtactgcacgcaatttagcagctttccgtggtaaatatccggtacttgcaatttgttataaggagaagactatgcgtcaccttgcactttcttatggtgtggaagcgatttatatgcctgaacttgccaacgggcaggagtactattttgcagctctgcgccgtttgttgaaagaaggacgtttgcatccaactgatatggtgggttatctgagtagcggtaaagccggaacgcagacttctttcctcgaaatcaatgtcgtggaagatgctttgaagcatgccggtgatagtgtgttgcctaatagcaaccgttattta

SEQ ID NO: 12333 - DNA, 418 bp, Bacteroides fragilis
gattgtaaggtgaaacatattatcttgactggtggaacggatacggcccgtagcatagcaaaagctattccggctactccgctttcggcagagaccggagggaagaatgtcattattctgactgcctcgggggatcgtgatcatactattatgaatattgtcatatcagtttttggtaatgcgggacagaagtgttctgcttgttcgttgttgttggttgagcgttcggtatatgaagataagaacttccaaaagaaactgattgatgtggctaccagcatgaaagcggggagtgtttggaatccgggtaatgtagtggggccaatgataacgaataaaaaatgaaaaattactgcgggcattgacattggaaccgggagaatcatggttagtaccgtacttgttcccttgagatacc

SEQ ID NO: 12334 - DNA, 1104 bp, Bacteroides fragilis
atggaaaaaacgaagcgggatagcagacatattgatcctttgaaagacgaagaaaagttcttccagtggttaaaattcaagagcgttcggatgaatcaagaacacctctcgaaagatgactatgaacgcctgcgtcagcgaatccatgtttcgctgcgtatgttacgtcggaaaagaacggtcaggagggtagcttattatggtgtatccgtatgcgtcattattgcattaggaattgttgcttatctgaatcattatgagagagtggaacctgtgccgtctgttgtcgaaaaaaaagcagagattgtctggcaacctttgaagtcggaagatattcgtctggttagcggtgatagcataacttcgttccggcaaaacgtgcaattgctcttgagcaaagatggatcagctatggtatatcatcctaatagcgggcagaagcgaatcagaatggaacaggacgaggttaatgaactggtggttccttatggtaaacgatcgaaggttaaactggaagatggaacggaaatctggctgaattccggttcggtacttaagtttcctactcatttctcgggagagaaacgggaagtaagcttgaaaggtgaaatgtatgccgaagttacggcagatagtaaaaaaccgtttatcgtgcatacggcccattttgatatacaggtatatggaacgcgtttcaatatatcggcttatgaagatgaaccgactccttcgtgtgtacttgtagatggaatagtcggattccgtccggaatccggtcctgaaatacgcatgaagacaaatgaaaaagtgctttatgatggcaagcgatttgaaaaaagaaaagtgagtgcgtccagatatacttgttggaaagaaggctatctggaattggatgatgccaatatcatggatgtactgaaccggatagggagatattataatctatcgtttagcttcggcgataagaagcggctgaccggtaggaagtgttcaggaaaaatttatttatccgataatatagataatgtattgacaactatatcattgctgtattctactgattacaggaaagaagaacggactatttttatatctgagaaccca

SEQ ID NO: 12335 - DNA, 831 bp, Bacteroides fragilis
atgtttgtagcacgaagttctcttgctacccggaaagctttgcttgacaaagaattgggagagaagcgctttttgcaagtggcggtagtaggattgtctctgtttgttgttttgttggtgtggggagtgatacgcttgatccggattcggggagagttggtgaaatctcagaaggaaatggcggaatcgtatgccgtggtcgtagcaaccgataagatgaaagaggtttttttgcggaacattacagatgaaatacgggttcctctggatactgtggtggaattgtctgaccgcctgtgccgggagacgaatttgaaacaggaaaaacagcaggagtattctgcaacaatcaagaagtgtgcttcaaaactgattggcctgatattcaatgtgctggaccttgcccgattagaatcgggaatgatgaagtttgtggtagaggagtatgatgtggttcagttatgtaccgatgccaggctgatggtggagatgcaaaccgaaaatagaacgaaagttgatttccacacggaaccggatatgctgctgatcgatgtggataccaaccggtttatgaaaatgcttgcttctgtgctaaaatatcccgaagaaagtgaggggcttttcagggtgaaattcatcttgtcccgcccaagcgaggattgtttgcaaattaaagttgtaaacagccccatttttatgactgccgaaagtgaaaaggagtttgatgttttgcataccatcaatcggctgtacttagaatctttccaaggtagctatcagttactcgaagagagtggtgagcggatgattatcattacatatcctgtgtca

SEQ ID NO: 12336 - DNA, 1023 bp, Bacteroides fragilis
atggatgaatcctgttacattaatgagtcggttcttttaaattattttgcgggggagctcccagccgatcgccggaaagaggtggaggaatggatagcggcttcggaagataacgagaagatggcacgagatattttccggctctaccgcgcggcagacacactggactatatgaatcgggtggatgcttccgcagccttacagcaggtgaagggcagaatacacaaacatcgacatagaatctcctggatggtttgggggcagcgtattgctgcttgtatggcgttaccgctgcttgccaccaccctttatttaattctgaaaaatccgccgcaggaatatgtggagatacggaccaatcccggtatggtggctgaggcaaatttaccggacggtaccaaagtctggcttaactccggatcttcactgaaacatcctgttaagtttacaggggatacgcgtacggtggaacttgacggggaggcttacttctctgtccgtaaagacaggagtaaacggtttgtggtcaatactcctttcaatatacagaccgaagtattgggtacggagttcaatatggaagcataccggacggatagtgtagtcaggacaacgttggtatcgggatcggtcaggttgtcatttttggggaaaggcgatacaaaagaaacattcgtcatgaaacccgatgaagaatttgtatataatacggcgacacacgaggcacgggccgaaaaatcgtatgtggagatctatacagcctggaagaacggtcaggtagtgcttaaaaacacatcattggccgaaacgctgaagatactcagcaagaggtttaatgtagagtttatcgtgaaagattccacactatatgccaattctttcaccggtgtgttcagcaggcagtatttgccgttgatccttgaacacttcagatatgcatccggaatacagtataaataccttgatctggagtatgatgccacacacaaggcaatacaggaaaaaacaaagatagaattatat

SEQ ID NO: 12337 - DNA, 498 bp, Bacteroides fragilis
atgagtagaatcagcattatcgccgccgtagacagccggatggctatcggctttcaaaataaacttttattctggctgcccaatgacctgaaacgtttcaaggcgttgaccacaggaaacacaatcatcatgggacgcaaaacgttcgaatcactcccgaaaggggcattacccaatcgccggaatgtggtcctttcttccaatccggcagccgaatgtccgggagcagaagtattcacttcgctggaagccgctttggaaagctgccaagccgaagaaaaagtatacatcatcggaggggcaagcgtctatcgccaggccatatccctggccgacgaactgtgcctgaccgaagtaaatgatacagcgccggaagccgatgccttcttcccggctgtagacacaactatatggcacgaaaaaagcagagaagttcatcctgccgatgaaaaacatctctgctcgtatgcttttgtagattacgtacggggaatcgat

SEQ ID NO: 12338 - DNA, 2061 bp, Bacteroides fragilis
atgatgaaagtaaaattagcattactacttactcttataggaacacttcctttagcagcacagaatgtacggcaagaacaggacacagtctcttatatgaacgatgatcctttcaatcttgaacaaattgtggttacggcaacccgaacagaaaagaagattaagaacacaccggtcatcactcagataatcacctctaagcaaatagaagaaagaggaaccggtaacattcaggaccttctgactcaagaggttcccggacttaactttcaggaggttggctatggaaccagcatcgatatacagggattaggttccaaacacatccttttcctgatagacggcgaacgtatagcgggcgaaaacggtggcaacatcgactattcgcgaatcaatctttataatatcgaccatatcgaaatagtcaaaggagcttcttcggccctctatggttctcaagcgatgggcggagttatcaacatcattacgcgtaaagccaaaaagaaattcgaggcttccgcaggcatacgctatgcaggaagaaaccagcaaaactataaagatactcccaaagatcattcgcaatacaaatatcggattcatctggataaacccaatctgaacaccaatctgtctcttggattgaacctgggcaagttcaccatgaacaccgacgtactttacaaaagtttcgatggataccaattattcgataaaaaacctctcgtgaaatattttccggcctataacaccacaattaccgaagaactcagtaaacccccgaccagtatatcgggatacgaagacgtacaagtagcccataaaatggactatcgtttcagcaaacggctcaaagtccagttaaaaggaagctattatatgctgaacaaatatgattttcaagcagataatatattcgagaaatcagaggactatacctatggcggaagcatagattacacgatttccgacaaatcctctttggtagcctctgttcataccgatcactacaaccgatatgataaatacgaactgaagagcggtcgtcgtctcgaatataaaaacaatattatccagccccgtatcgtatatagcactacggcgctcgataaacagaccattacgggaggattggaatattacagagaatcattattcagtgataaatttgaaaccggtgtgaaagaaaacaaaagccaatggtatgccaccgctttcctccaggatgactggagcatcaacaagcaattctccgtaatagcgggactccgctgcgactatcacgagaaatacggtaccaacctcactcccaaagcttccgtgatgtataagatctttccattcactgtccgctttaactatgcacgcggctaccgttcacccagcattaaagagttgtacatgaactgggaccatctgggcatgttctggatatatggcaacagtaaactgaaacccgaaactaacaattatatctctctttcgggagaatatgtgaacagttggatcaatatcaatgccaacgtttatagcaactggttccgaaacaaaatagaaggaatgtggagcaatgaccaaacggaactccattatatcaatataggaaaaagccgcctggcaggagtagagaccatgtgcaaaatacaaataaacagacatatcaatgtgcatggagcatacaattatctgtacacaagcaaagatgcggatggagtccgattgagctcttccagtccacattccggtaatattcgtgctgaatataacacacgcatcccacgctatgccaccgttgtcaacctgtccggcaatattatggggaaaaagaaattcgatgtgttggatgaactggaaatagacggaaagaaggtagaagcctactatcaggctaaagtaaacccttattgtctttgggatctgacagtatctcaatatatcatgcagaatctgagaatcacagcaggaataaccaatttattcgattatacttcagatcgagtgactttcaatacttccacttcaccgggaagaaactattttatcgcatgtaattatacactt

SEQ ID NO: 12339 - DNA, 566 bp, Bacteroides fragilis
atggaaccaattatcaactcacagatgcctgaattcaaagtacaggcttttcagaacggaagttttaaaacagtaagcagcgaagacgtaaagggaaaatgggctattttcttcttctacccggcggacttcacctttgtgtgcccgaccgaactggtagacgttgccgagaaatacgaacagtttcaggctatgggtgtagaagtatactcggtaagcaccgactcacacttcgtacacaaagcatggcacgatgcttcggaaagcatccgtaagatcaaatatccgatgttggcagacccgacaggtgtattgagccgtggattcggtgtgatgatcgaagaagacggaatggcttaccgcggaacgttcctcgtcaatccggaaggaaaaatcaagattgccgagatacaggataacaacatcggacgtaatgccgacgagttgctccgcaaagtagaggccgcacagtttgtagctactcacgacggagaagtttgccccgctaaatggagaaaaggcgaacaaccctgaagccgagcatcgacctggtcggtaagatctaa

SEQ ID NO: 12340 - DNA, 1464 bp, Bacteroides fragilis
atgaatcaaaaattattgttcagtagcgcgttgcttgtcggcatagcaggaacacaacaggcgcttgcacaaaaaaagaaagtccaggatcaaaagagacccaacgtcgttttcatcctggccgatgacctcggattcggtgacctcagttgttacggacaagagaagttcgaaactcccaacatagacaagttggctcaggaaggaatgcgcttcacccagtgttattcgggtaccaccgtcagcgccccttcgcggtcttgcctgctgaccggtacccacagtggacatacggccattcgtggaaatgtagaactcgatccggaaggacaattccctctaccggcagatgcacaaaccatcttccacgatttccagaacgcaggatacaagaccggcgctttcggtaaatggggactcggttttatcggttccacgggtgatcctaaaaaacagggcatcgacgagttctatggctacaactgccagttgctggcacacagttattatcccgatcatctgtgggacaatgacaaacgagtagaactgaaagataacacactggacgtacagtacggtaaaggtacttattctcaggatctgattcactcaaaggcacttgacttcctcgatcggatgggaaaaagcggagaatcgttctgcatgtggtatcccaccatcatcccccacgccgaactgattgtacccgaagacagcattataaagaagttccgtggcaaatatcccgaaaaacctttccatggaaccgaaccgggtaatcccgcattccgcaagggaggttactgctcacaattctatccacacgccacatttgcagctatggtctatcgtctggatgtatatgtaggtcagattgtacagaaattgaaagagatgggggtttatgacaatacgatcatcatctttgcaagtgacaacggtccgcacatggaaggtggagccgatccggacttcttcaacagcaacggaatctggcgcggatacaaacgcgacttgtacgaaggaggaatccgtgtaccgatgattatttcatggccgggacgtgtacagcccagtactcaaaccgacttcatgtgttcgttctgggatgtaatgcctacgttccgtgaaattctgaatccgaaagcaaagaatcagcaaatggatggtgtcagtctgctaccgttgctcgaaaaccgcaaagggcagaaagaacatgaatatctgtactttgaatttcaggagatgaacggacgccaagccgtacgcaaaggaccgtggaaactggtccacatgaatgttcgtggcaagaatccgtattatgaactctataatctcaattctgatccgtcggaacgacataatgtgctgaaccaatatccggaaaaggtgacggaattgaaggctatcatgcagtcatcgcatatacctaacccgaacttcccgttacttccgggagagaaa

SEQ ID NO: 12341 - DNA, 2043 bp, Bacteroides fragilis
ttgtcggaactacaagctattgcccaggaattgggtatcaaaaaaacagactcacttaagaaagaagaacttgtctacaaaatcctcgacgaacaagccatagccggagctactaaaaaggtagctgccgacaaactgaaagaggaacgcaaagaagataagaaaaaacgctctcgggtgacagtaaagaaggaaaacgccgacaaggttttctcttctaccaagaatggagaactaactaaaacagatgccaaaacacctgcagccaaaacacagccacaacctaaaacaacagaaccgaccccagaaacagctaaagaggcaaacgccgaaacaaacgccactccggccgaatctgtcaaagtgacaccttatgccactccgaaaaagaaaccgggacgcccccgtaaaaatcaggtagaaacagaagctaaacccgcagaagaaactaccgaaaaaccggaaacagtaccatcggcacaagaagaaaagcccgctgcccaaccggaaacagaaaaacgtcccatcagcaaaccgattctcaaacccaaaccggccgttgtagacgaagaaagctcgatcctctcggatatagatgcagacgatgattttatccccatcgaagacctgccttcggaaaaagtagaattgccaaccgaactgttcggcaaatttgaatcgaccaaagccgaagcagcaacagcccccgaacctgtggcacaaccccaacgcccgcgtgtgattcgcccacgagacaacaataacaacaacaattacaacaacaataataataacaataataataaccaacgcaacaataaccagcgtcagcctgtacaacagcgtcccatgccgcaacaaaatgccgccgaagccgcacccgttcaggaacgccgcgtgattgaacgtgagaaaccttatgaatttgatgatatcctcaccggaaccggtgtattggaaatcatgcaggatggttacggattcctccgttcgtcagattataactacctctcttcaccggacgatatctacgtttcgcaatcccagatcaaactattcggtctgaagaccggtgacgtagtagaaggtgtaatccgtccgcccaaagaaggcgaaaaatacttcccgctggtaaaggtttctaaaatcaacggacgtgatgccgctttcgtacgtgaccgtgtaccgttcgaccatctcactccgctgttcccggacgaaaagttcaagctttgcaagggaggctactccgactcgatgtcggcacgtgtagtcgacctcttttcaccaatcggtaaaggacagcgtgccttgatcgtggctcagcccaagaccggtaaaaccatcctgatgaaagaaatcgccaatgccatcgctgccaaccatccggaagtatatatgatcatgttgttgattgacgaacgtccggaagaagtaaccgacatggcccgcagtgtcaatgcggaagtgattgcttctacattcgacgaacctgccgaacgccatgtgaaaattgccggcatcgtactcgaaaaagctaaaagattggtagagtgcggacacgatgtagtgatcttcctcgactctatcacccgtctggcgcgcgcatacaatactgtatctccggcatcaggaaaggtactctcgggtggtgtggatgccaatgcactacacaaaccgaaacgtttcttcggagcagcccgtaacatagagaacggaggttcgctcaccattatcgctactgccctgatcgacaccggttcgaagatggacgaagtaatctttgaagagttcaagggtacaggtaacatggagttgcagctcgaccgcaacctaagtaacaaacgtatcttccctgctgtcaacattgtggcatcgagcacccgccgcgacgacttgctgctcgacaaacagacactggaccgcatgtggattctacgcaagtatctgtcggatatgaatcctatcgaagcaatggatttcgtaaaagagcgattggaaaaaaccaaagacaatgacgagttcctgatgagcatgaacagc

SEQ ID NO: 12342 - DNA, 558 bp, Bacteroides fragilis
atggataagacattatatacattaattgttcattcagagaactttgccggattgttgaatcaggttacggcagtatttacccgtcggcagattaatatagaaagcctgaatgtttcggcttcatctatcaagggggtgcataaatatactattacggcttggaccgataaagatacgatagagaaggttgtcaaacagattgagaagaagatcgatgtgcttcaggcacattatttcactgaagatgaaatctattttcatgaaatagctctttataaggtgtctatgcccgaatttcagtcacagccggaagcttcgaaggtgattcgtcgctataatgcacggattgtggaagtgaatccggtatttgccatcgtcgagaaaaatggaatcagtgaagaaattacttctctctacgaagagttgagtgcattgaattgtgtgttgcaatttgtgcgttcgggacgtgtggcaatcactaccagttgctttgaacgtgtgaacgagtttctggcagatcgtgagaccaaatataacttaagcaagaaagaggaaaag

SEQ ID NO: 12343 - DNA, 2625 bp, Bacteroides fragilis
atggaattagcaagtaagtacaaccctgctgacgtggaggggaagtggtatcagtattggctggaccataaattattcagttcgaaacccgatggacgtgaaccttacaccatcgtcattccgccccctaacgtcaccggtgtgttgcacatgggacatatgcttaataataccattcaggatattcttgttcgtcgtgcacgtatggaaggtaagaatgcttgctgggtgccgggaaccgaccatgcctctattgctaccgaagccaaggtagtgaataagttggccgcacagggtattaagaaaaccgatctgagccgtgacgagtttctgaagcatgcctgggcatggacagacgaacacggtggtatcatcctgaagcagcttcgtaagttaggtgcatcgtgtgactgggaccgtacggcttttactatggatgaaaagcgcagtgaaagtgtgctgaaggtatttgtcgatctctataataagggacttatctaccggggagtacgtatggttaactgggacccgaaagcactgacagccctgtcggacgaggaggtgatttataaagaagaacatggaaagctgttttacctgagatacaagattgaaggagaagacggatatgcagtggttgccactacccgtccggaaacgattatgggtgacacggccatgtgtatcaacccgaacgatccgaagaatcagcatctcaaaggaaagaaagtaatagttcccttggtaggccgtgtgattcctgttatcgaagatgactatgtggatatcgaatttggtaccggttgcctgaaagtgactccggcacatgacgtaaacgactatatgctgggcgaaaaatataatttgccgagtatcgatatattcaatgataacggtacgatcagcgaagctgccggaatgtatatcggtatggatcgctttgacgtccgtaagcagattgagaaggatcttgaagcagccggactgctggagaagacagaggcttacaccaacaaagtgggatattcagagcgtaccaacgtggtcatcgaaccgaagttgtctatgcaatggttcctcaagatggaacatctggcccagatcgctcttgaaccggtgatgaaggatgatattaaattctatcctgccaagtataagaatacctaccgtcattggatggagaatatcaaggattggtgtatcagccgtcaattgtggtggggacaccgcatcccggcatatttcctgcccgaaggcggatatgtggtagctgtgacggatgaggaagccttgaagctggctcgggaaaagactggcaatcctaacttgaagatgaccgatcttcgtcaggatgaagactgtctggacacttggttctcttcctggttatggcctatctctctgttcgacggcatcaataatccgggtaatgaagaaatcaattattactatccgacaagcgatctggtgaccggaccggatatcatcttcttctgggtagcccgtatgattatggccggttacgaatatgaaggaaaaatgccgttcaagaatgtatatttcacgggtatcgttcgcgataaactgggacgtaaaatgtctaagtcactcggtaactcgcccgatccgttggaattgattgaaaagtacggagcagatggtgtacgtatgggcatgatgctctcggctcctgccgggaatgacattctctttgatgacgcgctttgcgagcagggacgaaatttctgcaataagatatggaatgctttccgattggtgaaaggttgggagaacggaatgggaacaatcgatattccggcagatgctcacctggctgtacagtggtttgaccagagactggatgccgctgctgtcgaagttgccgatttgtttagcaaatatcgtctgagcgaagcattgatgctgatttataaactgttctgggacgaattctcttcatggttgctcgagattgtgaagccggcttacggacagccggttaacggattcatttactcgatgacgttaagtgctttcgaacgtctgctggctatgctccatcctttcatgccgtttattacggaagagttgtggcagcagttgcgcgagcgtgaaccgggtgcaagcctgatggtacagcctttgggagaaccgggagaggtaaacgaagaattcctccagcagttcgaaacagccaaagaaatcatcagcagtgtacgtaccattcgtttgcagaagaatatcgcattgaaagaaccgcttgaattgcaggtagtcggagccaatccggtagaaaagatgaatcctgtcattcgtaaaatgtgtaatctgtctgccatcgaggtagtggacgcaaaggccgacggagcttcgttcatgataggaaccactgaatttgcggtgcccctgggcaatatgatcgatgtcgatgccgagatagcacgcatggaagccgagctgaaacacaaagaaggtttcttgcagggagttttaaagaaattgagcaatgaaaagtttgtaaataacgctccggcagccgttatcgagatggagcgcaagaaacaggcggatgccgaaagcatcatccagtcgctcaaggaaagtattgcttccctgaaaaatgta

SEQ ID NO: 12344 - DNA, 1567 bp, Bacteroides fragilis
ataaaaataacatttcctgatggctctgttcgtgagtataacgaaggagtaaacggactgcaaattgcagaaagtatcagttcgcgtttggcgcaagacgtactggcgtgcggagtgaacggtgagatttatgatttaggacgtcccatcaatgaagatgcttcggtagtactctataagtgggaagatgaacagggaaagcatgctttctggcacacgagtgcccacttgctggctgaagctttacaggaactgtatccgggcattcagtttggtatcggtccggctattgaaaacggtttctactatgatgttgatccgggagaggcggtcatcaaagaggctgatctgcctgctattgaagcgaagatggctgagttggttgcaaagaaagaggctgtcgtgcgtcgggatattgcaaaaggcgatgctttaaagatgtttggcgaccgtggagaaacatataaatgtgagctgatttccgaattggaagacggacatataactacatatacacaaggtgattttacggatctttgccgtggtcctcacttgatgacaactgctcctattaaggcgataaagctgacttctgtggcaggagcttactggcgtggccatgaagatcgtaagatgctgacccgtatatatggtatcactttcccgaaagagaagatgctagatgtgtatctggctttaatggaagaaggctaaaaaacgcgaccatcgtaaaattggtaaggagatgcagttgttcatgaactctgatacggtgggtaaaggattgcctatgtggttgccgaaaggtactgctttgcgtttgcgcttacaggacctcttgcgccgtatacagactcgttatgactatcaggaggtgattactccgcctatcggtaacaagctgctgtatgtgacttcgggacattatgcgaaatatggtaaagatgcattccagcccatccatacaccggaagagggtgaagagtacttcctgaagccgatgaactgtcctcatcattgtgaaatttataagaatttcccgcgttcgtataaggatttgcctttacgtattgccgaattcggaactgtttgtcggtacgagcagagtggtgagcttcacgggttgactcgtgtgcgtagttttactcaggatgatgcacatattttctgtcgtccggatcaggtgaagggagaattcctccgtgtaatggacattatttcgattgtgttccgttctatggatttcgataacttcgaagcacagatttctttacgcgataaagtgaatcgtgaaaaatatatcggtagtgatgaaaactgggaaaaagcagagcaggccattattgaagcatgtgaggaaaaaggattgaaggcaaagatagaatatggtgaagctgctttctatggccctaaattggattttatggtgaaagatgccatcggtcgccgctggcagttaggtactatccaggttgactataatttgccggagcgcttcgaactggaatatatgggatcggataatcagaaacaccgtccggtaatgattcaccgtgctccgttttgg

SEQ ID NO: 12345 - DNA, 780 bp, Bacteroides fragilis
gtgggttgtatactatatgatccactggctttcggcactctttttgtcattgtcagcgctctgactatacgcgaattcggacatctcgtcaaccaatcgggagaggtaagcatcaaccggactatcaccatgttgggaggagcttatctgtttctggccattatgggtttctgtattgacgctgccggttctaaaatatttattccttacctgatattaatcatttatctgatggtaagcgagttatatctcaaaaagaagaatccggttttaaactgggcttactccatgctgagccagatgtacatcgcgcttccctttgccatgctgaatgtgcttgctttccagaatgatccggaagcaagcagcgtatcatacaatccgatattgcctctatccatctttgtctttttatggctgaatgatacgggggcatattgtttcggatcacttttcggcaaacaccgcctgtttgaacgcatatcacctaaaaaatcatgggaaggttccattggcggaggtattgtagccattgcctcttcatttgtttttgcctgctacttccccatcatgacatgggcagaatgggcgggactggcattggtagttgtcattttcgggacttggggtgacctgacagagtctctgctgaaacgccaattgcagattaaagattcaggaagtattctacccggacatggaggtatgctcgatcgcttcgacagttcacttatggctataccggcaggcgttatttacctatatgcactgacattggtc

SEQ ID NO: 12346 - DNA, 1251 bp, Bacteroides fragilis
atgaaaaatatttttaaagatttaaaaagtaaagaccacaaacgctatctgggaggtttggacgtcttcagatatattggtcccggtttattggttactgtaggttttattgatccgggcaattgggcttctaattttgcggcaggttcagaatttggttactcactgttatgggtggttacgctgtccaccatcatgctgatcatattgcaacacaatgttgctcacttgggaatcgtgacagggctttgcctttcggaggcggcaacgcagtatacgcccaagtgggtatcgcgtcccatactggggacggccgtacttgcttccatctctacatcactggccgagattctgggaggggccatagcgctggaaatgttgctcgacattcctattgtctggggggccgttctgactaccgtttttgtttccatcatgctttttacaaattcatataagaaaatagagcgctccatcattgcttttgtatcggtgatcggcttgtcgttcatctatgaactctttttggtggatattgactggcctatggcagtagaagggtgggtgacgccggctatacctaaggggagcatgctcattattatgagtgtgctgggtgctgtggtgatgcctcacaatcttttcctgcattcggaggtgattcagagccacgaatacaataagcaggatacagcgtccataaagaaagtgttgaagtacgaattgtttgatacgctcttttcaatgattataggatgggccatcaacagtgccatgattctgttggcagccgctaccttctttaaaagtggcattcaggttgaagagttgcagcaggcgaaatcattgctcgaacccctgttgggaagtaatgcggctattgtttttgctttagccctgcttatggcgggtatctcgtctacgattaccagcgggatggcggccggatctattttcgccggtatctttggcgaatcataccacattaaggatagccactctcaggtaggggttatcctgtcgttgggcattgcattgctgctgattttctttatcggcgatccgtttaagggtctgatcatctctcagatggtgctgagtatccagttgccgtttacggtttttttgcaggtcggtctgacctcctcgcgtaaggtgatgggcgattatgtcaatagtaaatggagcacgtttgtgctttataccattgccgtgatagtgacagtgttgaatataatgttgttgttctcg

SEQ ID NO: 12347 - DNA, 1173 bp, Bacteroides fragilis
ttgatagtgatgaaaattaaaaagtctttagattcctataaagtaatttttcaaaatacattttatttgtcgataattgaagctatacgcttaataatgccctttatcgctcttccatatattattactactattggcgcaactaattatgggattatcattttttctcaaacgattgtttcatatttttcaattgttattaattggggattagatgtaacttcagtccgagaagtgtctttaaatagaggtagtttaaaaaaaatgagtttaatcgtttctactgtatttactattaaatttattttgtttggactttgcttttctattttcatgatatgtttgttttttatccctttctttcaacaatatagaattatatatctgtatgcttttttgtcatgcttttctgaggttattatacctgtgtggttttttcaaggtattgagaagatgaagtatttgacttatataaggacaacaagtatagttctctatactatacttgtttttacttttattaaaaaagaaatggactttacacttttagccttattacaatctttggctaatattactgcaggtgtattttcattaatattattattaattttttgtagagtcaaatttgtatttcctactttcagagtgatgaaagaaactttttgtaatagtacaccgtttttcgtttccagagtttcgtttttattgaatacgaatatagctaaaacgatgagtgggttatttctgaatatgcatactgttgccgcatttgatttgtctcagaaaattttatcttttgtgtctgttcccatacaaatgctgaatcaggcgatttatcctcatgttgcaaaaaatccaattaaatcattttctgtaaagatgctatatgttatagctgcattatctttgattttatctgttttacttttttttctagcaccctatatcattctttatttttcagcgcaactatatgctgaagctctaatttttataaggatcttgtgtctttatgtattttgttttggtattaatacttatttagggactccacttcttgtcgcttatggtttttataagccatttaacttcagtgtaatatattctactttatttgtgtgctctttgtacgggattttatacgtttttaatttattgggtggggagtgc

SEQ ID NO: 12348 - DNA, 366 bp, Bacteroides fragilis
atgctttcagcacttatccaatcccgacttagatacccggcaatgcacctggcggcacaaccggtaaaccagaggtcagtccaacacggtcctctcgtactagtgtcagagccacgcaaatttcatacgcccacgatagatagagaccgaactgtctcacgacgttctgaacccagctcgcgtgccactttaatgggcgaacagcccaacccttgggaccttctccagccccaggatgtgacgagccgacatcgaggtgccaaacccctccgtcgatatgagctcttgggagggatcagcctgttatccccggagtaccttttatcctttgagcgatgtcccttccatacggaaacaccggatcac

SEQ ID NO: 12349 - DNA, 1290 bp, Bacteroides fragilis
atgggatatttattcacatccgaatcggtgtctgaaggacaccccgataaagtggccgatcaaatatcggacgctgtgcttgacaaactgttggcttatgatcccagttcgaaagtagcttgcgaaaccttagtaactaccggacaggtggtgcttgcgggagaagtgaaaacaggtgcttatgttgatttgcaactgattgcacgtgaagtgatccaaaagattggttacacgaaaggcgaatacatgttcgaaagtaattcgtgcggtgtactttctgccattcatgaacaaagtgcggacattaaccgtggtgtagaacgcgaagacccgatgaaccagggagcaggcgaccagggtatgatgtttggttatgcaaccaacgaaacagaaaactatatgccgttgtctcttgacctggcacatagaatacttcttgtgttggccgatatccgccgcgaaggtaaagaaatgacttatcttcgtccggatgcaaagagccaggtaaccattgaatatgatgataacggtactccggtacgcattgatacgattgttgtttcaacacagcatgatgaatttatattaccggctgataattctgccgctgcccaactgaaggctgatgaagagatgttggcagtgatccggaaagatgtgattgaggtgctgatgcctcgtgtcattgcttctattaatcatccgaaggttcttgctttgttcaatgaccatattatctatcatgtgaatccgaccggtaagtttgtgatcggtggccctcatggagatacaggactcaccggacgtaagatcattgtggacacttatggtggaaagggagctcatggtggcggtgctttctccggtaaagatccaagcaaagtagatcgtagtgctgcttatgctgcccgtcatattgctaagaatcttgttgctgccggcgttgccgacgaaatgctggtacaggtttcttatgctatcggtgtggctcgtcctattaatatttatgtaaatacatacggacgcagtaacgtgaagatgagtgatggagagatcgccagaaagatcgatgaactgtttgaccttcgtccgaaggctattgaagaccgcctgaaactgcgttatccgatttatagtgaaactgctgcttacgggcatatggggcgtgaacctcagatggtgactaagcattttcaatctcgttatgaaggcgaccggactatggaagtggaactgtttacatgggaaaaacttgactatgtggacaaagtaaaagccgctttcggtttg

SEQ ID NO: 12350 - DNA, 255 bp, Bacteroides fragilis
atgttactatcagtattattgcaagctgctgctgcaggagtaggattaagtaaattgggagcagctctcggagctggtttagctgttatcggagcaggtatcggtattggtaagatcggtggctcggccatggaaggtattgcgcgtcaaccggaggcatcgggagatatccgtatgaatatgattattgccgctgccttggttgaaggtgtagcattgttggcattagttgtttgtctattggtacttttctta

SEQ ID NO: 12351 - DNA, 957 bp, Bacteroides fragilis
atgggattttttagttttttctcaaaggaaaagaaggaaactttagataaaggattatctaaaaccaaagaaagtgtattcagcaagattgcccgtgcggtggccggaaaatcgaaggtggatgatgaagtgctggataatctggaagaggttcttatcacatcggacgtaggggtagagactactcttaatatcatcaagcgtatcgaaaaacgagcagcagaagataaatatgtaaatacacaagagttgaattcgattcttcgtgaagaaatagctgcattactgactgaaaataattcggatgatgttgccgatttcgatgttccggtagagaaaaagccttatgttattatggtggtgggtgtaaacggagttggtaaaacaaccactattggtaaactagcttatcaatttaagaaagccggtaaatctgtatatttgggggcagccgatacttttcgtgcagcagcagtggagcaattggtgatatggggcgagagagtggatgttccggtcattaaacaaaagatgggggccgatccggcttctgttgcgtttgatacgttaagttctgcagtagctaataacgctgatgtggtgattattgatacagcaggacgtttgcacaataaagttggcttgatgaacgagctgacgaaaattaaaaatgtaatgaagaaagtagtgcctgatgctccaaacgaggtgttgttggtgcttgatggctcgaccggacaaaatgcctttgagcaggcaaaacaattcacacttgcaacagaagtaactgctatggctataaccaaattggatgggacggcaaaaggtggcgttgttatcggaatttcagatcagtttaagattccggtgaaatatatcggattgggtgagggtatggaagacctacaggtgttccgcaagaaagaatttgtagactccttatttggagagaatgca

SEQ ID NO: 12352 - DNA, 924 bp, Bacteroides fragilis
atgagcgtagaacctggaaaatggggtgtaatctacaatcccaaagcaggcacacgaaaggtgcagaaacggtggaaagaaataaaagagtacatggactctaagggagtgtcatacgactatgtgcagtccgagggtttcggatcggtagaacgactcgccggtattctggccaacaacggttatcgcaccatcgtagtagtgggcggagacggtgcactgaatgatgccattaacggcattatgagttcgaacgcagaaaaaaaagaagagatagccatcggtatcattcccaacggaataggaaacgactttgccagatactgggaattgaatctggaatacaaacaagcagtagactggattatcaataaccgccgaaagaaaatagacgtgggttactgcaacttttacgatggcgaaaaacaccaacgacgttacttcctcaatgcagtcaatataggattaggtgcgcgtatcgtaaaaatcacggaccagaccaaacgtttctggggagtaaagttcctctcctatctggcagctctcttcctgctgatattcgaacgcaagctttatcgttcacatctcaaaattaacgacgaacacatccgcggacggattatgacagtctgtgtgggaagtgccaccggatacggacaaaccccaagtgccgtaccctataatggctggctggatgtatcggtcatctaccgtcccgagttcctgcaaatcttgtccggactgtggatgcttattcaaggacgcatattgaaccacaaagtggtgaaatcctaccgtacccgaaaagtaaaagtattgcgtgcccagaatgccgccgtcgaccttgacggacgcttgttgccacgccatttcccgattgaaataggaattatcccggaagcaaccacattgattatacccaat

SEQ ID NO: 12353 - DNA, 1341 bp, Bacteroides fragilis
atgataaagaaaaatctactcaaaggaatctgcctgctatggctattgctggcagtaactcctgtattgcaagcccaggatcgtgcgcaacaggcatccgaacttctcgaccggctgattgcaggccaaggagacagtgtgtatgtacatctggacgataacatccggaaaatgctttccgtagagatgttgaacggactgttcaagcaattggaacaacaagcaggtaagtatcagtcgcacggagagtggaaaaccgaaccaataaacggtatgactgtttattattgcgacgttaagttcgaacgcttaccactgcgttttctcacagcgttcaatccggacggaaaggtgaataccattcgtttcgtacctgttccgcctgaaaagaccactcccccgacgacatcggtacaagataaaataaaagagacagacatacaggtttgtacggggaatttcaagcttcccggcacactgactcttcctaaaaacggcaaagatctgccggtagtcattttggtacatggctcgggggccagcgaccgggacgaaacggtaggggccaataaaccttttcgggacctcgcgtatggactggccgagcgtggaatagccgtgatccgttatgacaagcgcaccaaagtatatggagccgacagcgcacctgcaggcaaagaaattactttcgatgaagaatcagtggatgatgccctttcggcaattaaacttgcccgttccataccgacaataaatcccgaacggatctacattctcggacatagcctgggaggcaccttggctccccgcatcgtccaacgtagcgataaagttccggcagggattattctgcttgccggtgcagcccgtccactcgaagatctgtttataagtcaggtgaagtttctcgcctctgcactcccatcgactaaagatattgaaaaggaaatagccgaattacagaaacaagtggacaacgtgaaaaggctgggtacagacacattcgacattacaactcctttgcccatgaatctctctcaagcttactggatgcttgccaatcaatataaacctttggaagtggtccgaaaactgactctccccatacttgtccttcaaggcgaacgtgattatcaggtcaccatgcaagatttcgaattatggcaatccgccctggcaaagcatccgaatgcgatatttaaatcttatccccgactcaatcatctgtttcaggaaggagaagggaagtcaacccctcttgaatacagccgtccctcctctattccttcttacgtgacggatgacattgcagctttcatcaaccgacccaagcccggtaac

SEQ ID NO: 12354 - DNA, 882 bp, Bacteroides fragilis
atgatttcatcaggtacatttgggctcattccattatttacaattccattaatgggaaatatggaaatgaatgaatccaacattcttttttatcgatttctattttctacccttatgatgggagcagtatgtcttttgcacaaaagtactttaaaaataaatatgaaacatctgatctctatcatcggtttaggtgccttgtatgctcttacagcgctatttcttatttattcctaccattatataactagtggagtggctacaaccattcactttctctatccaatctgtgtcagcttcttaatggtagtattctttaaagaacaaaaatccaaatctctattcttagcagcctcactctcactaatcggtgttgcacttatgtgttggtcgggaggaggcagtatccgattgatgggtatcggactcgcagctcttacgatattaacctatgggatatatattgttgctctgaatcaattggatataggtaaattacctgctgaagtgcttacgttctatgtgcttttaggcggttgcgtaatctttttcatctacagtctatttacagcaggtatatcctccatccccagcacaaaagccggattttatattttggcattggcatttctatctaccgtcatctccgaccttacgttgattttagcggtaaaatatgccggttcgacaacaacagccatccttggttcaatggaacctttggtcgcagtggttgtaggcgtattggtattttcggaacatttcacattacaatcattaatcggtttattactgatactaatgtctgttatcattgtaatattagccgatcaacaaaaaaagtcgaagagaatcacagaacagaaaatcattaagccacat

SEQ ID NO: 12355 - DNA, 1458 bp, Bacteroides fragilis
ttgatgctggccggaaccggtagcgatgtaggcaaaagcatcattgccgcagctttctgccgtatatttctgcaagacggttatcatccggcaccattcaaagcacaaaacatggcattgaactcttatgccactcccgaaggacttgaaataggaagggcgcaagccgtgcaggccgaggccgcaggtgtgccttgccatacggatatgaacccgttgcttctgaaaccatcgtccgatcatacttcacaggtggtgctcaacggacgtcccatcggcaatcggaatgcttacgaatatttccgccgtgaagggcgggaggaattgcgaaaagaggttcatgccgcattcgaccgtttggctgcccgatataatccggtagtgatggagggagcggggagtatctccgagatcaatcttcgtgacagcgatctggtgaacctgcccatggctatgcatgccggggcagatgtgattctcgtggccgatatagaccgtggaggagtgtttgccagtgtttacggttcggtgatgctgcttcggccggaagagcggaagcatatcaaggggatattgattaataaattccgtggagatatccgccttttcgagtcgggagtaaagatgctggaagatctttgtggtgttccggtggttggggtggtgccctactataaagatatctatattgaggaagaagactcggtgatgcttcagaccaagaatatccgtgccggacaaggcaaagtgaatgtggctgtcgtgttgcttcgtcatttaagcaatttcaccgacttcaatgtcttggagcgcgatccgcgtgtacacctgttctacaccaacaatacggacgagttgatgaaagcggatatcatcctgttgcccggttcgaaaagcactttgtccgatttatatgagttgcgccgcaacggagtggcgcaggccatcgtccgtgcccaccgcgaaggtgccacggtaatgggcatttgtggaggttaccaactgatgggtagggaggtttgcgatcccgatcatgtggaaggcgagatagaacgcttgccgggattggggttactgcctgtcagcacccgcatgcagggagagaaggttacccgccaggtacggtttcgttttcttgaagacagcgctgtctgcgaaggatacgaaatacacatgggaacgaccacgccccttgcggatgttcctgtttctccactcaaccatctggcggacggaagggaggatgggtattttgtagaccgcacctgcatgggaacatacgtacatggcattctcgacaatccttcagttatcgattacctgctggagcctttcgccgataaactgaaagagacggcttttgattacaaagcatttaaagaagaacaatacgataaactggcagcccatgtccgtaagcacgtcgacttgccgcttatctatcaaatattgacagac

SEQ ID NO: 12356 - DNA, 282 bp, Bacteroides fragilis
atgaaagcacgcgaaataaagcgtgctaaattagtagccaaatatgccgaaaagagagctgccttgaagcagattgtgagaaccggagatcctgctgaagcttttgaagctgcacagaaattacaggagcttcctaagaattctaatccgattcgtatgcacaatcgctgtaaattgactggtcgtcctaaaggatacatccgtcagttcggtgtttcaagaatccagttccgtgagatggcatctaatgggctgatcccaggtgttaagaaagcaagctgg

SEQ ID NO: 12357 - DNA, 708 bp, Bacteroides fragilis
atgaaactttctgctctctaccagatattcctggattgtgccgtagtgaccaccgacagccgcaactgccctgcaggttcactgtttattgccctgaaaggcgaatcattcaatggaaacgcttttgcagctcaagcattaaaagacggctgtgcatacgccatcgtagatgaagccgaatatgctccggaaaacaacagacatatcattctggtggacaattgcctgcaaacccttcagcaactggctaattatcatcgccgccaactgggtacaaaagtgatcggcattaccggaaccaacgggaaaacaaccactaaagagctgatttctgctgtcttgtcgaaatctcacaatgtactctacacagaaggaaacctaaacaaccacattggagtgcccatgactctgcttcgcctaaaagcagaacatgaactggcagtgatcgaaatgggagctaatcatcccggagagataaaatttctggtacacattgccgagccggattatggaattatcaccaatgtgggaaaagcgcatctggaaggattcggttccttcgaaggagtgatccgcaccaaaggagaattatatgactatctccgtgaaaaggaagattctaccgtctttatacaccatgataatgcttatctgatggacatcgctcatggcctgaatctgattccctacggaagtggaagcgcactt

SEQ ID NO: 12358 - DNA, 918 bp, Bacteroides fragilis
atggaaatagaaaaattcattaaatctttagcaagaaaagcgaagttaggcgggcgttacagcacagccaatacctacctctacactttgcacagttttcagaagtttgcgggaaaagcctcactgacttttgaagagatcactcccgagagtatcaaggagtacgagcaatacttaatcctcaacgggaaacggtacaacacgatctcgctctacatgcgcatgttgcgttccatctgcaatcaggcatcggagcagaacatagcttcgctcaacacccgcgagctgtttgagaatgttttcatcggcaacgagcccactgccaagcgtgccatctcacccgccatcatttcccgcctgctcgaagcagatttcagcaagaacagccggctcgattttgcccgcgacctcttcttgctaagcttctacctgaggggaatcccgtttgtcgacctggtacatctccgcaagaccgatgtgcagggaaacatgctcgtttatttccgccagaaaacgggacagcaacttacggtaatcatagaaaactgcgccaaagtgatcttgcgtaagtatgcctcgctttgcaaagaatccgtctatctgctgcccgtcatcagcgcagccggagaggaggggcacaagcagtaccgaagtgcattgagggtatacaacaaacgcctcaaccagatatccggaatactgaaattgaagactccgctgacctcttatgtggcacgccacagttgggcgaccacggccctgcagaaaggggttccggtttcggtgatcagtgcgggaatggggcatgcttcagagaaggtgacatacatttatctggcatcttttgataacaaaacgctcagtaacgcaaataaaaaagtgattgccgccgtgagatttaagaaagaggaggaggag

SEQ ID NO: 12359 - DNA, 1266 bp, Bacteroides fragilis
atgttatactatctgtttgaatggctacacaaactcaactttccgggtgccggaatgtttgggtacacctcgttccgtgcattgatggctatcatcctggcactgcttatttccagtatctggggagataagttcatcaatctgctgaaacggaaacagatcaccgagacgcagcgtgatgccaaaatcgatccgttcggcgtcaataaagtaggagtgcccagcatggggggtgtcatcattatcgtagcaatcctgatcccctgtctgttattggggaaactgcataatatctatatgatactgatgctgatcaccaccgtctggctgggatctttaggatttgcagacgattatataaaaatattcaaaaaggataaagaagggctccacggtaaattcaaaattatcggtcaggtaggtctcggcttaattgtcggactgactctatatctgagtccggacgtagtgattcgtgaaaacatagaagttcagaaatcggaaaacgaaatcgaagtaatacatggcactcacgatctgaaatctacccagaccacaattccttttttcaaaagtaacaacctggactatgccgaccttgtaggctttatgggagaacacgctcaaacagccggatggattttgtttgtcattatcaccatctttgtcgtgacagccgtgtcaaacggagccaacctgaatgatggtatggatggtatggcagcaggcaattccgccatcatcggactaacgctgggcatattggcttatgtatcgagccacatcgagtttgcgggttacctgaatatcatgtatattcccggaagtgaggaactggtaatctttatatgcgcctttatcggagcattgatcggtttcttatggtacaatgcctatccggcccaggtattcatgggggatacaggcagtctgaccattggaggtatcattgcggtatttgccattattattcacaaagaattgctaatcccgattctctgcggtatatttctggttgaaaacctttcagtacttctgcagcgcttctattataaagccggaaaaagaaagggtgtaaaacaacgcctctttaagcgggccccgatacacgaccatttccgtacttcgatgagtctggtagagccgggatgcagcgtaaagtttacgaagcccgatcagttgttccacgaatcaaaaatcacagtccgcttctggattgtaaccatcgtgctggcagctattacgattataacactgaagattaga

SEQ ID NO: 12360 - DNA, 720 bp, Bacteroides fragilis
atggatacattaaaactacatggtcaggcgataactttggtcgatcaggtcgaagataacctacttacttattttagaaccaaagatctgcgggcaggagatgccattcccaatgagatggaactggccgctgctttgggtgtggcacgtagtgtgctgagggaggccctcagccgattgaaaatggtagggatgatcgagacacgtaccaggcggggaatgattctgaccgaaccttctatccttggaggcatgaagcgggttgtcgatcctcgcattctgagtgagcattccctgtttgatcttttaggtttcaggattgctttggaattgggaatttgcagtgatcttttccagaatataactccggaagatattgttgaactgaaggagattgtccggttgggaatcgcttttgagaacaatgaatatgcccctatcagtgaatttacttttcatgctaaactttatgagataaccggtaatgctactatccgtgaatttcaggaaatcatccatcccgtgatggtttttgtgaaagacaaattcaaagagttgctcgaacctattaatatagagataaaagagcggggagaattggtaactcacgctgaccttctcggctttttggaaaaacatgatgaggccggttatagaaaggcgcttgagaaacattttgccgtatacaagatttttatgaaacgtagaatcgttaacgaa

SEQ ID NO: 12361 - DNA, 318 bp, Bacteroides fragilis
atgagtaaattacatattaaaaaaggcgatacagtttacgtaaatgctggtgaagacaaaggtaaaactggtcgtgtattgaaggttcttgttaaagaaggacgtgcaatagttgaaggtatcaatatggtatctaaaagcacaaaaccaaatgcaaagaacccgcagggtggtatagttaagcaggaagctcctatccacatttcaaacttgaatccggttgatccaaaaactggtaaagcaacgcgtgttggtagaaaagtaagttctgagggaactttagtgcgttattctaaaaaatcaggagaggagattaag

SEQ ID NO: 12362 - DNA, 1854 bp, Bacteroides fragilis
atgaaagaatatcgacttaccgattggttacccactaccaagaaagaagtagagcttcgcggctgggacgaactggatgttatcctctttagcggcgatgcttatgtggaccatccttcattcggagccgccgttatcggtcgtatccttgaagccgaaggcctgcgtgtagccattgtgccccaacccaactggcgtgacgacttgcgtgactttcgcaagctgggacgtccccgactctttttcggcatcagtgcaggttgcatggactccatggtgaacaaatatacagctaacaaacgcttacgtagcgatgacgcttacaccccggacggacgtcccgatatgcgaccggaatatccctcgatcgtatacacccaaattctgaaaaaactctatcccgatgttcccgtcgttttgggaggtattgaagcaagtatgcgccgcctcagccattatgactattggcaggatcggttaaagaaaagtatactttgtgaaagcggtgccgacatgctgatttacggcatgggagaaaagcctatttgtgagttggtccgccgattgacagccctgtgtgataatcaggatggagtgatttcatcatccgacattcattctccggcattatcctctatcccgcagacggcttatctgaccagaaaatatgaatccgacgagaatgatatcaccctctattcgcatgaagaatgtctggctgataaaaagaaacaggcaaccaacttccgtcatatagaagaggaaagcaataaatacgcggcagcccgaatcgtacaggctgtcgatggtaaaacagtggttgtaaatccaccctaccctcctatgacagagaaagagctggaccgttcgttcgatctcccttacactcgtttgcctcatcccaaatacaaaggcaaacgcattccggcttatgatatgattaaattttccgttaatatccaccggggatgttttggcggatgcgctttttgtactatctccgcccatcagggaaaatttatagtcagccgaagcaaggaaagcattctgaaagaagtaaaagaggtagttcaattgcccgatttcaaaggaaatctgagcgatttaggaggtccttctgccaatatgtataaaatgggcgggaaagatctctccctttgcaaacgttgtaaacgcccctcttgcattcatcccaaagtgtgtccgaacctgaatacggatcaccgtccgctattggatatttactatgcagtggactctttacctgagatcaaacgaagtttcatcggaagtggagtgcgatacgacttattgctccatcaaagcaaggatgctaccgtcaacaaaatcacagcagaatatactcgcgaactaatagcccgccacgtcagcggacgcctgaaagttgcaccggaacataccagtgaccgggtactgagtatcatgcgtaaacccgctttcagccaattcggagaatttaaaaagatattcgacagaatcaaccgggaacttggcttgcgccaacaattgatcccttatttcatctccagtcatccgggctgtaaagaagaagatatggcggaactggcagtcatcaccaaacaactggacttccatctggaacaagtgcaggatttcacccctacccctatgaccgtagccaccgaagcttggtatacaggctttcatccgtatacactcgaaccggtattcagtgccaagactcaacgggaaaagttggcacaaagacaatttttcttttggtataaaccggaagaacgacggaatatcatcaatgaattgcgccgcatcggacgggcggacctgatagacaaactatacggaaagaggaaa

SEQ ID NO: 12363 - DNA, 990 bp, Bacteroides fragilis
atggctgtaacaatggctgatataaccaagctccgcaaaatgaccggtgctggtatgatggactgcaaaaatgcgttgactgatgctgaaggcgatttcgacaaagcaatgaagatcatccgcgaaaaaggacaggcagttgctgcaaaacgttctgaccgtgaggcttctgaaggttgtgttttggtaaaagtagaagaaggtttcggtgctatcatcgctttgaagtgcgaaactgattttgttgctcagaatgctgacttcgtgaaactgactcaggatattctggacgctgctgtagctaacaagtgcaagactctggaagaagttttggctcttccgatgggtgatgctactgtagctcaggctgtaacagacagaaccggtatcactggtgaaaagatggagttggatggttacatggttttggaaggcgctacaattgctgcttacaaccatatgaacagaaacggtctttgcaccatggttgctttcaacaagaaagttgacgaacagctggctaagcaagtagctatgcaggttgctgctatgaatccgatcgcagttgatgaagatggcgtttctgaagaagtgaagcagaaagaaatagaagtggctgttgaaaagactaaagtagaacaggtgcagaaagctgtagaagctgctttgaagaaagctaatatcaatccggctcatgtggacagtgaagaccacatggaaagcaacatggctaaaggctggattacagctgaagatgttgcaaaggcaaaagaaatcattgctactgtttcagctgagaaggctgcaaatatgcctgaacaaatgattcagaacattgctaaaggacgtttggctaagttcttgaaagaagtttgcttgctgaatcaggaagacatcatggatgccaagaagacagtgagagaagtgttgaaagaagctgatcctgaattgaaggttgttgatttcaaacgtttcactttgagagctgaa

SEQ ID NO: 12364 - DNA, 1365 bp, Bacteroides fragilis
atgaaaataagaagtatccttaccatcaaatatgcaggtatcacggccactatctttctcgtgtttatggccactatctattgtgtgaacgaacatctgcgcagtgattctttttatcgtagcctgcgaagcgaagctatcactaaagcccatctgtttcttaacaatcaggttgatgtagaaaccatgcagtcgatatatctcaataatcgtcagttcattgatgaggtggaagtagctgtatacactcccgacttccggatactctaccacgatgcgttgcacaacgatatcattaaggagactcccggaatgatcgatgagattgtccggaaaaaggagatcgacttccgtacaggcgactatcaggggatagggattttatatgagttcgggggtaaaaattatgtggtgacagctgccgcttacgaccgttacggacatattaatcaggtcataatgacgcggctgcttctccttttatctatcggcggactgagtgtgctcgccattgtgggttatatgcttgccaaaagttcacttgcccctatccgtagcatcgtacgtaaagccgagggtatcaccgtcactcaaatcgacgaacggttgcctgtcaagaacgagcatgatgaattgggagaactcgcctttgccttcaatgcactgctggacagggtggaaaagactttcaatgatcagcggatgtttgtgagcaatgtatcacacgaacttcgtacacctatggcggcactgtcggcagaacttgacttggcgctgcaaaaggaacgtactgtcacacaatatcaaaattcaatacacaatgcgttacaagattcccagcgcgtcattgaactgatagatggcttgttgaaccttgccaaagcggattattatcccgagcaaatcaagaaagaggaaatccggctggatgaattgctgttggatgccaatgagcttgtgctcaaagcccatccggattatcacatagagctaattttcgagcaggaggcagatgatgaccgtgtgttgactgtgatcgggaatccgtatctgcttaccactgcttttgtgaacctgatagagaataactgcaagtattctgataaccggacgtcgtttatccagatctcattctgtgatcagtggaccatcgtaagtttatccgacaacggtgccgggatgtccgaaacggataaggagaacttgttcaagctcttctaccgcggagagaataaaaaccaggctcagggacatggtatcggaatgacgcttacaaagaagatactcaccctccataagagtgagatctcggtgtattcacaccaaggagagggcactacctttgtggtaaggtttcatcattta

SEQ ID NO: 12365 - DNA, 1242 bp, Bacteroides fragilis
atggaactacgtagaccacacatattatatatattgatttgcctttggctactcgtttctccatcaaacgtcagtagcgtctgggcaaaagatttcgttgtagttattgacgccggacatggcggtcacgatcccggagccatcggaaagatatccaaagaaaagaatatcaatctgaaagtagcattgaaattgggtaatctgatcaaacaaaactgcaatgatgtgaaggtggtctatacccgtagcaaagatgtatttataccacttgaccgccgtgcagagattgccaataatgcaaaagccgacctgtttatttcaattcacaccaacgctctggccaataaccggaccgcaaaaggtgcttccacatggacattaggtctagccaaatcagacgccaacctggaagtggccaaacgggagaactctgtaattttatatgaagatgattacaaaactcgttacgccggatttaatcccaattccgcagaatcgtatattatcttcgaatttatgcaagacaaatatatggagcagagtgtacacctggcttcattggttcaaaaacaattccgccatcactgtaaacgggtggaccggggagtacatcaggccggattccttgtattgaaggctagtgccatgccaagcattctggttgaactcggttttatctctacgcctgaagaagaacgttatcttaatacagaagaaggaagttctactttggcaaaaggtatatatcgggcatttctctcttataaaagagaacacgaaatccgtttgacaggcagcagccgcactgcacttcccaatgatgatgaagtaaccgatactgaggttgcacagatagacagcacagaaagcgaaaacaaaaagccccaaaatactccacgcaccgacaagcttgtaacagaagcaaaaactcaacgcccaattgttgtagaaagtacaacaaacgactctgaaattacgtttaagatacaaatactgacctcttcacgtccactatctaaaaatgataaacgactgaagggattgaaagatgtagattattacaaggaaaatggactatacaaatacacttacgaggcatcgtccgattataataaggtattacggacacgccgtaatacagtcactccattatttaaggatgccttcatcattgcattccgcaacggagaaaagatgaatatcaacgaggctatagccaattttaagaaaagaagaaataaa

SEQ ID NO: 12366 - DNA, 954 bp, Bacteroides fragilis
atggacgacgaattattaatagcttattttaaaggagaggtttcggatgaagaaactcaacgaattactgaatggatagaagcggagatagaacaccagcgttactaccaacagctttgccgtctgtttgaaatgagttactggattgaggacatgcccgaacaaacagaagttgccctcccccaaaaagctaaaatcctcccgtggaaacattatgccatatctttcatgaaggtagcggctatcttcgtgctgggctttgccctgcacttcttcttgaaccggcagacaacaacaacccaccacgaactacaacaccaaatccatgtaccaactggacagcatgtagaaataatgctggccgacggatccaaggtatggctgaactccggcagtaccctgaccttcccctcgaaatttaacggaaaaaaacgcctggtagaacttgacggtgaaggattcttcgaagtaaaatccgacaaggagcatccctttatcgtttctacttctaaatatcaagtaaaagcggtaggtacttcctttaatgtatacgactatcaggattctcctcaatttgaagcggccctattgaacggtaaagtggaagtcactactaatgcaaaaaaatcatcggccgtaattcttacccccaaccagcgtgcagcgctatgccaaggagtattgaaggtcaaaccgattgaaaatactaacaattatctgtggcgcaaagggatactctattttaacgaacctctgttggaagtgttcgacaaactgcaagaatactatgatgttgaattccaaatcagaaatacttctttaaccagaaaatcaccctactgcaccggtaagttccgtgccaaagatggactagaacacatcatacgagtgctgaaagaaaccaatcattttgactatcaaattgattacgaaaataaaaaaattatcatctta

SEQ ID NO: 12367 - DNA, 2160 bp, Bacteroides fragilis
ttgacagaccaactgaaaaagtatttcggatttgataatttcaaggggaaccaggagccgatcatccagaatttgcttgatggtaatgatacctttgtgctgatgcctaccggcggtggaaaatctctgtgctatcagttgccttctttattaatggaaggtacggccattgttatttctccgttgattgccctgatgaagaatcaggtcgatgcgatgcgcaacttcagtgaagaagatggtgtggctcatttcattaactcttctttgaataagggtgcgattgatcaggtgcggtctgacattcttgccggaaaaacaaaattgctatacgttgctcccgaatcgttgacgaaggaagaaaacgtagaatttctgcggtcagtaaagatctcgttctatgctgtcgacgaagcgcattgtatttccgaatggggacacgacttccgcccggaatatcgcaggatacgtccgattattaatgaaataggaaaagcgcctcttattgcgttgaccgcaacggccacaccgaaggtgcagcacgatattcagaagaacttgggaatggtggatgcacacgtcttcaagtcttcgttcaaccgtccgaatctgtattacgaggtacgtcctaaaactcagaatgtagataaggacatcataaagttcatcaagaacaatccggaaaagtcgggcatcatttattgcctgagccggaagaaggtagaagagcttgctgagatacttcaagccaacgggattaacgcccgtgcttaccatgcaggtatggattcggcaacgcgaacgcagaatcaggatgatttcctgatggaaaagatcgacgtaattgtagctactatcgcatttggaatggggattgataaacccgatgtgcgatacgtcatccactatgatataccaaagagcctggaagggtattaccaggaaacgggccgcgccggcagagacggcggagaaggccagtgcattaccttttatacaaacaaagacttgcagaaactcgagaagtttatgcaaggcaaacctgtggcagaacaagaaattggcaagcagcttctgttggaaactgctgcgtatgctgaatcttccgtttgtcgccgtaagacattactacattacttcggcgaagagtacacggaagaaaattgtggaaattgtgacaactgtttaaaccctaaaaaacaagtggaggctcaagaattattgtgtgctgtgatcgaaacaatcatagcggtaaaagaaaactttaaggcagattatattattgatgtcctgcagggacgcgaaacgtccgaagttcaggcgcacttacatgaagatctggaagtgttcggatcaggaatgggagaagaagacaaaacctggaatgccgtgatccgtcaggcactgatagccggttatctgagcaaggatgtcgaaaattacggattactgaaagtgaccgatgccggaaagaaattccttaaacatcctaagtcgttcaagataaccgaagacaatgactttgaggaagtagaagaagaaacaccggcaagaggcggaggttcctgtgcggtcgatccggttctctattccatgctgaaggatctccggaagaaactatcgaaaaaactggaagtgcctccttatgtgattttccaggatccgtctctcgaagcgatggctaccatctatccggtgacgctggaggagcttcagaacattcccggtgtaggcgccggaaaagccaaacgttacggcgaagagttctgcaagctgataaagaggcattgtgaagaaaacgagattgaacgtccggaagatttgcgggtacgcacggtggccaataaatcgaagatgaaagtggccatcattcaagccatcgaccgtaaagtagccctggatgatattgcgctttccaagggtattgagttcagcgaattgctcgatgaagtggaggcaatcgtttattcgggtactaagttgaatattgattacttcctggatgagattatggacgaagaccacatgctcgacatctatgattatttcaaggagtcgacaacagataagattgacgatgcgctcgacgaactcggtgacgaatttaccgaagaagaagtccgtctggttcgtatcaagtttatctccgaaatggctaat

SEQ ID NO: 12368 - DNA, 636 bp, Bacteroides fragilis
ttgtcaatcaaaacaaaacccttatctttgcacccgctattacgagttagtagcattaattcaaatcattcattaaaaaaacatttatttaaaatggcaacaagaattagattgcaaagacatggacgtaaaagctacgctttctactctatcgttattgcagacagcagagcaccacgtgatggtaaatttacagagaagattggtacttacaaccctaacaccaatcctgctacagtagatttgaatttcgaacgtgccttgcactgggtgctggtaggtgcacaaccttcagacacagttcgcaacatcctttcacgtgaaggcgtttacatgaagaaacacctcctcggcggtgtagctaaaggcgcatttggtgaagctgaagctgaagctaaattcgaagcttggaagaacaacaaacagtcaggtctgtctgctctgaaagctaaagaagaggaagctaagaaagctgaagcaaaagcacgtctggaagctgaaaagaaagtaaacgaagtaaaagcaaaagcattggctgaaaagaaagctgctgaagaagctgctaaggctgctgctgaagctcccgcagaagaagctgctccggcagaagaagctgcaactgaagctgctgctgaa

SEQ ID NO: 12369 - DNA, 1527 bp, Bacteroides fragilis
atgagcaatagaatagttagccgaagtttgatgggagccctctgtagcgcatgtttcacaacagcaagtgcacaagaacgacccaatatcattgtttttttagtcgacgacatgggattaatggacacctccgttccctttgttacggacgaaaatggaaatgcacagagacaaccgttaaacgattggtatcgtactcccaatatggagcgcctggcaaaccagggaatccgcttttccactttttatgcacaaagcgtgagttccccttccagagcatccatcatgaccgggcaaaatgcggcccgtcaccgcactacgaactggatcaatgcggaaagcaacaaccgcactccatacggaccattcgattggaattggaaagggctcactcatcaggatatgatctatccctatttattacaacaagccggatacaaaacgatccatgtgggtaaagcacacttcggatgtctgaaaagcgaaggagaaaaccctacgaatctgggctttgatgtcaacatagccggttcggcaatcggccatccgggtagttatcatggagaaaacgggtacggctggatcaagggtcaaagagcaagagccgtgcccgacttggaacaatatcacaaaactcacaccttcttaagtgatgcactcacattagaagccggtaaagagatagaaaaagccgttgcagaaaaaaagcctttctatctaaacatggcacactatgccgttcactctccattcgaaaccgatgaacgcttcatcagccactataccgatccaaacaaatctcaacaagcacgcgcttttgccaccctgatcgaaggtatggataaatcgctgggagacattctggataaactcgaagatatggggatagcggaaaatactctgatcatctttttgggagataatggtggtgatgcaccactcggggatgctgccgattatggttcatctgccccattcaagggaaaaaaaggatcggaatatgaggggggagtccgtgttcctttcattgtcagctgggcacatcccaacccaaacaataaattccaaaaggcatatcctatagcccggaatgccatacaaacccaaatgggaacggttatggatatatatccaaccgtactttctgttgcgggtgtcaaacctgctcccaaccatatcttagacggagccgatttaagaaaactgttaaagggaaagagagataaaaagcatcgtgatgatttcttaatgcatttcccacatgagcatcgcggcagctatttcacctcttatcgtaagggagactggaaatttatctattattataacccacagactccggaggcgcctacctataaactgtttaacctctcagaagatccttacgaaaaaaatgatctgtcaaaaacaaaccaacaaaaagcgaaagaactcttccgtctaatggttcaaaggctggaaaaagaacaagctctctatccggtagatgccgataaaaacgtattgagtccgatatttgttgccgaa

SEQ ID NO: 12370 - DNA, 2511 bp, Bacteroides fragilis
atgaagaaaggattcaaaattacagcaatcgtcatcggcgtcattctgatactgatgtttctccttccctttgccttccgtggcaagattgaaggtatcgtaaaatcggaaggcaacaaaatgcttaacggtcattttgattttagtagccttgatatcagcttattccgcaatttccccaaagcttccgtcaccctgaatgatttttggctgaagggaaccggagaatttgaaaacgacacattggtgaaggccggtgaggtaacagcggctattaacctgttttcgctttttggagatgacggatacgatgtatccaaagtatctgttgaaaacacccggttacacgccatcgtacttcctgacggaaaagctaactgggatatcatgaaacccgattcatccactgccagcgaaacccaagaaagtggtgaatcttctactttccgaattaaactccagcgttttgtcatcaaaaacatgaatgtggtatatgacgaccggcagtccgcgatgtacgccgacatacacaatttcaatgcgctttgttcgggtgatctgggtagcgaccagactttactcagcctggaagccgaaactgaagccctgacttataaaatgaacggtatccctttcctctcacaagctaacgtctacgccaagatggatgtagatgccgatctggcacacaacaaatttacactgaaaaagaacgaattccgtctgaacgccattaaagccggcattgacggatggatagagttgaaagaccctgctatcgacatggatttgaaactcaacaccagcgaaataggattcaaagaaatcttgtcactgataccggccatttattccaaagagttcaagaatctgaaaacagatggtacagcaactcttgaagctacagcgaaaggaatactgcaaggtgacacggttccacagttcgatgtccgactggctgtaaaaaacgccatgttccgatatccatccctgccggcgggagtcgatcagattaacatcgacgcacaagttcggaatccgggaggtaacattgacctgaccgagataagcatacatcctttcagtttccgactggcggaaaatccgtttagtctgacagccgacatacagacacctgtcagcgacccggactttacagccgaagccaaaggggtacttaatctgggcatgatcaagcaagtctatccgctggatgatatggagctgaatggtaccgttcgtgcggatatgacaatggccggacacttgtcatacatcgaaaaggaacaatacgatcgtttctccgcttcgggaaccattgccctcagtgatatgaacttgaaaatgaaagagatgccggatatagaaataaaaaaatccctgttcacattcactccgaaatatctgcaactcagtgaaacgacagtagccatcggaaagaatgatcttactgccgactgccggttcgagaactatatgggctatgctcttaaagggggcacactgaaaggtgtcctgaatgtccggtcgaaccatctgaatctaaacgattttatgacggcaacaactgacagtaccgcccaaacatcacaagcatcttcgaccgaagaaaccgccagtatgatcgaagttccgcagaatatcgacttccagatggatgccggcctgaaagaagtgttatttgacaagatgacttttacaaacatgaatggcaaacttattgtgaaaaacggaaaagtcgatatgacaaatctgtcaatgaacaccatgggaggaagtgtcgttatgaacggatactattcgaccgccgatccgaagaagccggaaatgaacgcaggattccgtatggaaaatatcggttttgcacaggcttacaaagaactggatatggtgcagcaaatggctcctatctttgaaaacctgaaaggcaacttttcgggtaatatgcatatccggactttactcgacaaccagatgagccctgtcatggatacgatgcaaggaaacggaagcctttcgacccaagatcttagcctcagcggcgtaaaagtaatcgaccagatagccgaagccgtaaagaagcctgaactcaaagagatgaaggtgaaagatatggcactggatttcaccatcaaagacggaagagtatctaccaagccgttcgatatcaaactgggtgactatgtcatgaatctttccggaagcacaggactcgaccaaaccatcgactattcgggaaagatcaaattaccggcatcggcaggtgatatcgccaaactgactaccctcgacctgaaaataggaggtaccttctcctcacccaaagtatcactggatacgaaaagcatgaccaatcaggcagtagaagcggtgacagacaaggcaatcagcgaaatagggaaaaagctcgggctggattcggctacaacggccaacaaagactccgtgaaggagaaggtaaaagagaaagccgtagaaaaggcacttgattttcttaaaaagaaaataaaa

SEQ ID NO: 12371 - DNA, 1593 bp, Bacteroides fragilis
atgctcaaacggataccccacacatacaccatcatttcttcggtcattctactctgtgcagtgctttcctggatcattcctgccggagaatatatgcgagagacaatcgacgtaaacggtatttcccgcactgtcattgtagaccattctttccaccgggtagaacagacaccccagacctggcaagtgttcagctcccttcttgaaggcttcgaacgtcaggcaggaattatagctttcttactgattatgggaggtgcctttcaaataatgaataatagccgtgctattgataccggcattttttcatttctgaacttcacgaaaggacttgaaaaacaccgactgatcaaaatactgggagtaaacaatgtagtgatatccttagtcatcatccttttcagccttttcggttccgtattcggtatgagtgaagagacactggccttcgtcatcatcatcgtcccacttgccatatcaatgggatatgactccatcaccgggctgtgtatggtatacgtagctgcccatatcggcttttccggtgcagtactgaatccttttacgatcggcattgcgcaaggtttgtctgatctcccgttgttctcaggatttgaataccgtatgttttgttggctggtactgaccaccgccctgattgtttgtgtactcagatatgccgctgtcgtcaaaaagcatccggaaaaatcacctatgtatcatgctgacgcttattggcggaaacgggaaaaagaaagctgtggagagatatcccatgtaacgactcgccaagcatggatcgtatacctattgttactcgtgtccttggggttgttctccatcatctacccgatcagtactttttcagtaggtgaagcatcagtcacctgctatgcagttcccaccttatctatcttgtttgcagttttcggttggctgggtttacgcaaatccaaccagttctttatattgaccttactcgcattcactattcttttcctgattatcggtgtcatgggtcatggctggtatttaccggagatatccgctatctttctggcaatgggcattctttcggggtttgccaatagtgaacatgcagatgctatcatcaagcaattcatggatggagccaaagacatgttgtcggccgccatagttgtgggactggccggagggattattcaaatactgcaagacggacatatcatcgaccccattttacattctttggcttcactgatgggagaagccggaaaaatagtatctttgggggtgatgtatctgatacagacactcattaacctgattatcccttccgggtccgccaaagcagcgttaaccatgcctatcatggcacccttttccgatgtcatcggactttcgcggcaagctacggtaatggcttatcagtttggtgacggatttaccaatatgatcacccctacttctgctgtattgatgggtgccttaggcattgcccgcataccttatgagatttgggtaaaatggttctggaagatacttcttttattcattatcctaggaatggtactactgattcccacggtacttttcccattgaatggattt

SEQ ID NO: 12372 - DNA, 1449 bp, Bacteroides fragilis
atgaaaagaacattaatacaaaacgctaccatagtaaacgaaggacgttctgtgcgcggttcggtagttatcgaaggggaaaaaatagccgaagtacttgaaaaaggacagaaacctgctatcccctgcgaagaaacaatcaatgccaacggatgctatctgattccgggtgtgatcgacgatcatgtacatttccgtgatccgggactaacccacaaagccgacatctctaccgaaagccgggctgccgcagctggaggtgtaacctctatcatggacatgcccaatacaaatccgcaaacgaccacactggatgcactcaatgccaagttcgatctgcttgccgaaaagtgtagcgttaactattcgtgctatttcggggcaaccaataataactataccgagttcgacaaactggacaagaaccgtgtatgcggaattaagcttttcatgggatcgagtaccggaaatatgctggtagacaaaatgaacagtctactgaatattttcaatggaaccgatctgctgattgccgctcactgcgagaatcacgaaacgattaaaaagaatacggagaagtatgtaaaagagtatattgaaaaatatcctcaccaatattaccatgttcatcatgagacccttccgatgggttatcatgctaaaatacgttcgattgcggcttgttacgaatcgtccgaactggctgtacgcctggcacgcattgcagatgcacgcctgcatatcctgcatatctctacagccagagaactttcactgtttgacaatgatatcccgttagaggaaaagagaatcacagcagaagcttgcgtttcacatctgttattcgactcttccgattatccggaactcggtgcacgcatcaagtgtaatccttctatcaaaacaaaaaccaaccgggatgcgctccgccaggcagtcaactccaacctgatcgatgtaatcgcgacagaccatgccccacaccttctcaaagaaaaagaaggagggccgttgaaagcaatgtccggtatgcctatgatccagttctctctggtcagcatgctcgaactggtgaacgaaggtatctttacgatagaaaaggttgtcgaaaagatgtgtcacgcccctgcacaaatatacaatattcacaaccgcggctttatccgccccggttatcaggccgatctcgtattggttcgtccggatgcattatggacggtaagcgcggatcagattttaagcaaatgcggatggagcccgcttgaaggacgtacgttcgagtggaaagtagaaaagacatttgccaacggacatctattgtatactgacggacaggtagacgaaacctatcgcggacaagagatctattttgaacggttagcaatatacgatgaacggggaactatgaatgcgtgggacaatatgcagtatattggaaagataaaagta

SEQ ID NO: 12373 - DNA, 1674 bp, Bacteroides fragilis
atgatcgctctacacattactaaaaacatgcaactatacgaaagaacactcggacaatggcttgaacattgggccgaaacaacaccggacaaagaatatattgtatactccgaccgcaacttgcgcttcacctggaagcaattcaacaagcgggtagacgatatggcgaaaggattgattgccatcggagtggaaagaggtacccacgtcggaatctgggcagcaaacgtaccggactggcttaccttattatatgcctgcgcgaagataggtgcagtctacgtaacggtaaacaccaactataaacaggccgaactggaatacttgtgcgagaactcggatatgcatacgctctgcattgtcaacggcgaaaaagacagcgactttgtacagatgacctacaccatgcttccggaactgaaaacctgcgaacgaggacatctgaaaagcgagcgttttccttatatgaagaacgtaatctacgtaggacaggagaaacatcgcggaatgtacaacacacaggagatcctgttgctaggcgataacatagaagacaccgagctcaacgaactcaagtcgcaggtcgattgccacgatgtggtaaacatgcaatatacatcaggaacaaccggatttcccaaaggggttatgctgacacattacaatatcagcaataatggtttcctgaccggagaacacatgaaattcacgggcaatgataaactctgctgttgtgttccattgttccactgcttcggtgtagtgctggccaccatgaactgtctgactcatggttgtactcaagtgatggtggaacgttttgacccgctgatcgtattagcctctatccataaagagagatgtacagcactttatggagtacccactatgtttattgccgaactgaaccatccgatgttcgatatgttcgatatgtcgagcctccgcaccggtatcatggccggctcactctgcccggtagaattgatgaagcaagtggaagagaaaatgtatatgaaggttaccagtgtatacggactgacagaagcagcccccggaatgactgctacacgcattgacgatccgtttgacgtacgttgtaacaccgtagggcgtgactttgaatttacggaggtaaaagtgctcgatcctgaaactggtgaagaatgcccggtcggcgtacagggggaaatgtgcaaccggggatataacaccatgaaaggatattacaagaatccacaagctacggctgaagtgatagacaaaaacaatttcctacactcaggagacttgggaatcaaggacgaagatgggaattatcgtatcacaggacgtatcaaagatatgatcatccgtggtggagagaatatctatccccgtgagatagaggaattcctctataagctcgacggagtgaaggacgtacaggtatcgggcatcccatctaaaaaatatggagaggcagtaggggctttcatcattttgcacgaaggagtaactatgcaggcttcggacgtacaagacttctgccggaataaaatctcccgctacaaaatccctaaatacattttcttcattgacgaatttcccatgaccgggagcggtaagatacaaaaattcaaactgaaggatttaggactgaagctctgtgaggagcaaggtatccagattata

SEQ ID NO: 12374 - DNA, 975 bp, Bacteroides fragilis
atgaaaaggaacgaatcaaaatacaaacaagtagtaaaccacgtaatagagggtatcaataacggtagttataagaaaggtgactggattctctctatcaacgaattcaggaaaaactataatctatccagagatacggtattcgccggtttaagcgaactgaaatcaaaaggaatcattgattcgactccgggtgtaggttattatatagcgacgacccgcatcgcacaaaagctgaatatatttcttcttttcaacgaattcaatgaattcaaagaagatctttacaattcatttatttcatccatcaggaaaaccgccaatgtagatctatattttcataattacaaccgaaaggtttttgaaactctgatcaacgaagccaattataaatacacaacctatattctgatgcccggtaaattcactaatatagccccactattggaaagcctatcgggtcgtgtctttttactcgaccatttccatcccgaactggccggaaaatactcttctgtcgcacagaattttgaaaaagacacctacgaagccttggtatacggacttccccacctaaagaaatatgatcatatcataatggttcagaaagaagaaaaagaaccgatcgagcgctataacgggctttgcgcattctgtgaagaataccatttcacgcatgaatataccgactccgtccggaacagggaaatcaggcaaggggaaaccttcatggtcgttaatgaccgggatctcgtcgacctgcttaaacaggcccaactacagaatttcgcaccgggaaaagacttcggaatcatttcttacaacgacaccccgcttaaagaaatattggccggaggaatcaccactttgtctaccgacttcaaacaaatgggacaaacaatggcttcactcattacacaaaaagagataaagaccatcgagaatccctggaagttggatatccggaactcactt

SEQ ID NO: 12375 - DNA, 2163 bp, Bacteroides fragilis
atgaacagactcaaactttacttactggcgctgactgcgctggccgtttgttccgcaaaggcggacgagggtatgtggttactgcaattaatgcagcagcaacactctatcgatatgatgaaaaaacagggactgaaactcgaggcacaggatttgtataatcctaacggagtctcactgaaagatgccgtaggtatcttcgggggaggatgtaccggcgagattatttcaccggaaggattgatattaaccaaccaccactgcggatacgcttccatccaacaacatagctctgtagagcatgattatctgacagatggattttgggcaacttcaagagacaaagaattgccgactccaggactgaaatttacatttatcgaacgcatagaagacattacggatattgtaaatttaagaattgccgctaaagaaatcactgaatcagaatcattcagcagtacatttcttaataaactggctaaggagttgtttgaaaagagcgacttgaaaggaaaaaaaggaatcgttcctcaagctttgcctttttacgccggaaataaattctatatgttttataagaaggtatatccggacgtacgtatggttgccgctcctccttcatcaatcggtaagttcggtggtgaaacagacaactggatgtggccacgccataccggtgacttttcaatgttccgtatctatgccgacgcgaatggcgaaccggcagaatacagtgcttccaatgtccccctgaaaaccaagaaacacctgaacatctctatcaaagggctgaaagagggagattatgccatgattatgggattcccgggaagcaccagccgttatctcaccgtctcggaagtgaaagaacgcatggaagcaagcaatgccccccgtatccgtatccgcggaacccgtcaggacgtgttgaaagaagtgatgaatgccagcgataaagtacgtattcaatatgccaataaatatgcaggttcaagcaactattggaagaactccatcggcatgaacaaagctatcatcgataacaatgttttgggaacaaaagcagaacaggaagctaaattcgctaagtttgccaaagaaaaaaataataccgactacatgaatgtagtggcaaagatcgacgaggctgtagctaaaacttctccaatcaaatatcaacagacctgtctgacggaaacattcttcggcggtattgaattcggtagcccatttatggtaatggacaaactgaaagaagcattggaacagaaaaacgattcaagtattgaagctaacatcaaagtgctgaaagaggtattcaacgacatccataataaagactatgatcacgaagtagaccgtaaagtggccaaagccctgttgccactatacgcagaaatgattcctgccggacagcgtcctgccatctacgatgtgattgagaaagagtacaaaggcgactacaatgcctacgtagatgcaatgtacgatacttcaattttggccaatcaggcaaactttgataaattcatcaaaaaaccgactgtaaaagcaatcgaaaaagatatagccactcaatattcacgtgccaagtttgacaaatacaccaatctggccgagcaaatgggaaaattgccggaagaactggctttattacacaaaacatatatccgcggactaggtgaaatgaaattgcctgtaccatcttatccggatgccaatttcactatccgcctgacctatggcaatgtgaaaccatacagcccgaaagatggtgtatattacaaatactacacaacaaccgacggaatccttgaaaaagaaaatccggaagaccgtgaattcgtagtacctgccaaactgaaagagttgatcgagaaaaaagatttcggacgctatgcattgcccaatggtgaaatgccggtttgtttcctgtctaccaatgacatcacaggcggtaactccggaagtccggtactgaacgaaaacggcgaattgatcggttgtgcattcgatggtaactgggaatcactgagcggtgacatcaatttcgataataacctgcaacgctgtatcaacctggacatccgttatgtactctttattctcgaaaagctgggaggatgcggacatttgattaacgaaatgacgattgttgaa

SEQ ID NO: 12376 - DNA, 978 bp, Bacteroides fragilis
atgaaaataacttttggacaacaaacgaccaaagtaaagcaactggctgataagatcagttttgatatctcgatgggagtatataaatcgggagactcattgccttctattaatcagctcagtcaggcgtatgaagtttcccgtgatactgtgtttaaagcttttcttgatttaaaagaaagagggattattgattctactccgggaaaagggtattacgttgtggggagattgaagaatgtattgcttctgcttgatgaatattctccttttaagtatgcactttacaatagttttgtaaagcgtttgtctatccgctataaagtcgacctgctgtttcatcagtacaatgaacgtttgttcaataccatcatccgtgaatcgttggggcggtataataaatatattgtgatgaacttcgataacgaaaaactgtctcctaatctttataagataaatccatccaaacttcttcttcttgatttcggtaaatttgagaaagaggggttttcttatgtttgtcaggactttgatcaaggattctataatgcgctatttcaactggcagatcgattgagaaaatatcaaaaactcgttttcgtgttagtagatgatagtatgcatccccggagtagccgtgacttttttgagagattttgtgccgatcaacatcttggttgtgaagtggtgagtgatattgagggacttcaggttcgcagaggagaagtttatatagcaattcgccaaatagatgtagtaagtattattaagaaaagtagggttgagggattgcaatgtggggttgattttggcttgatcggatataatgatacacctgcttatgaagtgatagatcagggaataactgcactaagtgtggattgggaaaagatgggagataaagctgctgagtttgttttgcaggggaaaaccatacaagattacttgcctacggaggtcaggttaagggcttcttta

SEQ ID NO: 12377 - DNA, 1590 bp, Bacteroides fragilis
atggcaaagaaatcgataaataagaaagacaatctcccaatggaggaagtactttggaaagcatgcgatgcactgcgtggatctattgaacccagcgaatacaaacatgttgtcctgtcattgatattcttgaagtacgccggatttcattttgagaaacgccgtcaggaaattgtcaatgacggtttggaagactttgtggataatgtggagttttatgcggccaagaatgttttttatttgccggaaacagcccgttggccgtatcttaaagaaaattcaaagcaacccaacatcgcatctattgtagataaagctctttctgacatagagaaggaaaacaagcctttgcgtggcgcattacccaacaactactatagttcgttgggtatagaagcggaaaaactcggttcattgcttgataagattgatggatttgatacgattctggaatccgcagacggcaatgatattattggacgtgtttatgaatatttcctatccaagtttgccattaaagaaggaaaaggtaagggggaattttatacgcccaaaacgatagtcaatttgatagccgaaatgattgaaccctacgaaggtaaaatctacgacccttgttgcggttcgggcggtatgtttgtgcagtcgatgaagtttgtggagagtcatcatggcaatcgtcgcaaggtgtcggtgtatggacaggaatataccaagaccacttttaaactggccaagatgaaccttgctattcgtggtatcgcagccgacttgggcgattatgccgccaacacctttaccgatgaccgtcacaaagatttgaaagccgatttcattatggctaatcctccgttcaaccaaaaagactggagagcggacaatcaactgacggacgatcctcgttgggatggttatgacgtgccgcctacctctaatgccaactatgcttggattctcaatatggtgagcaaactctcgtccaacggtgtggcaggtttcattttggccaacggtgcgctgagtgccgatggtacagaaggagaaatccgtcgcaagatgattgaacgcggattggtggaagcaattgtaatactgcctcgtaacctcttttactctactgatatttccgttacgctttggattatcaatgcgaataagaaaggtcgtttggtcaatcgtaacggagaagacatacattatcgtgaccgtgaaaaggagatacttttcatcgatatgcgccagatgggcgaaccctttgaaaagaaatatgtgcgtttcaccgatgaggatattcgtaaagtggccgatacctaccacaactggcagcgagagggtcatacagaaacctataccgatataccggagttctgtaaatcggtaagtgttggtgaagatggaggaattgcagacaaaggtttctcgttggtcccctccaaatacatcgaatttgtcaatcgggatgagtcggtggattatgacacacgcatgaaggaacttcaatcggaacttgccgacatccttcgtcaagaagccaaaagtcgagaatcagtacttaatgtttttaaatcattgggttatgaaatcgaatta

SEQ ID NO: 12378 - DNA, 5661 bp, Bacteroides fragilis
ctttttgctgagccagtatttcaatcgatattcccttgggaggagagtgtctacagttttgaggcacactcttctaaacttggattgctaacttcttcatttgttaatgcactgagcaacgaaggaattgacaaggatttaagattcccattagacaggcatccttataagcatcagaccgaaagctggagaactatgctctctcctcgaccacagaccattgttgttacctctggaacaggatcgggtaaaactgaatgttttatgattccggtattgcaggacttggctaagaccaatatgaaagattgtgttcaggccattttcctttatcctttgaatgcgctgatgaaaagtcaacagaaacgtattcatgcttggtgcaaagcccttccggaaaaggttacctatgcaatatataatggggaaactgacaaagaaaatcgttctgacagatatactgcacctcattatccacagctcgtaacaagacctcagataaggagaactccgcctcagattctctttaccaatccgactatgctcaactatatgttggtacgagctgaagaccatgaaattttggaaaaatccaaggggaagctcaaatggattcttcttgatgaagcacacacttatatcggctcttcggctgctgaattatcattgcaaatccgacgtgttttggacgcttttggtgtaactattgaccaagtaaattttgctgtaacatcagcgaccatcggggatgagagtgaccccaaaacgatgataaagctaaagactttcgtttctcagctcacgggaaagccattcgaagatataaagatcattgggggcaagcgcattattcctgagctaaataagggaattgcagaagaacaattatccaaaataaacaaaagatttggcatcaggttgacctattctgatattgagagactgcgaaaaaagctcaattcttcgccagtattaaaagtaaaggaaataggtagcatacttgataagaaaatcgggataaatgtggatgcctcattggaaataattgatgctctcggggaaaaagtgaagaatctaaatgaaggaagtggttttggagctttattgccaacccgtgctcatttctttgttcggtcgataagcggagtgtatgtttgtaccaatcccgattgtcagcgtcataagggatatagattaccgataggtagtctgacaacatatcagaatataaactgtccagtttgtaaatcaaagatgctggagcttgccacatgctcgtcttgcggctctcccattgtagtgggtgagacaagcacaactaagggcttcaggatgcacaccaatataattgaccttgacaatacgcttttctatgagcaaaaggaagatctcattgattctgaagatatggaaaatatcgaaaatgttgagcagaatgaggcagatggcttttctcgcttctttttcgccattcctgagaaactatgtctaagaaaaaatgcgacttgtacttctcacattgtcaatcatcggaatggcaaaatagaacttgctcctgaaaacaatgaaagcagtaagggtattactcctttggaaagaggagaaagtactcctgtaagatatcaatctcttcgacactcaggagataatcacgttctttgtcctcattgtggtaataatctcagtgagttaaaaaaacttgattatctcagaataagtgctactcagattggacgtactttagcgacattacttcttgacaacgccgaagctattggcagtaatgatgctggcgttgtatatgaaggtcggaagtatatagcatttactgatagccgtcaagggtctgcacgctctgcgatgggacttaatcaggatgtagaacgttcatggattcgagcttccatttttcataagcttgccgacatgcgtttgaacgatgtgaaacccggcggtctgactcctgatgaggaagctgaatataatgcatatctgagcattcggggttgtcttccagccttactccttgaaaaattcaaacaacttgaagaaaaaaagaacggtgtaccagtaatccccagcccggaggaagtgtcgtggtcgcaaataagccaacctcttgaaaatgactctaatttcaggaaattgtacgaacatgttgataaagcacgtggcaggaaaaatttcaggaatgcaacggactatctgaaagcacttcttgtcgatcaattcggatggattcccaagcgcgcgaactctttggaaacaatggggttcgtgcgtcttgtttatccgacacttaaaaatgcgaaatgcccgacacttcttattcagaaaagatgtacggacaccgactggcagaattttctgaagatttgtatggattatgtcattcgtggaggtcgtcattatatgctttctggagcctataaggattatcttacacaaaataagtattgttctcctatatatccttcaaattcagagcttagaaagaatggaaaccctgtatcgaaatggttcaaagtcaacgtcagccaaaaaggtgtcgatgagaatcagaacaggctcgttcttcttctatgtgccgttctcggttatgatgacatttctcaaatcagtcagacgaagattgctgacatcaactcaatgcttgatgctgcatgggatttcctaaaacaaaatgtccttgaagcgacagatgccgaaaaccaagggtatatgctcgatctcaccggtgataaggttaagttgcaacttatcgaaaaaggttacctctgtcctgttgacaacgttattatagatacgccgttctgtggctacagcccaagaatgaatggttacatcggtcgtgagaatttcgatcgattcaaaatccagacggagtttgtcaatccgtttttcccattcaagtttgcggaacagatagaagaaaatgtcacggaatggattgagaagaatctcttcgaccaaaaggccgcgggagtgttcggagttatgaactatagagtacttgcttcaaaaccaatttttatatcggcagaacattcagctcagcagtcgtcagaagaccttgaccgatatgaaaaggagtttaatgagggaaaaatcaatattctttcttgctcaactacaatggagatgggtgtagatattagtggtatcacagaagtcgtgatgaataatgtaccccctaaatcgtcaaactaccttcaacgtgcgggacgtgcaggacgaagaagtgaaactaaagccttggctttaaccgtttgtgcccccaatcctattggaacccatacatggaacaatcctgattatccgattacacatgttacagagaccccgttgttaaaattggaaagccgccagttgattcaacgtcatgtcaatgcgatggtattcgcatcctttgtcgcagatcaagggggaatcagggtcacggcaactcttagggatttctttgttaaggcagaagggatgtctttctatgataagtttctaaattacattgacagcgtaatcagcggaaacgttgaacggcttcaaagagcgtattcaaaattaatcaagggaacaagtcttgctcagataacattgccggatgccgcacaagtagtcaagaaagacatagctgctgttcacaatgtctttgatgctcacaacggtgctttggaaaaggctcttgaatctctgagaaatgaatccgaaacagccaacgctatcaaggctattgagaaacaagaagagaatcttttaaagacttcaatgttgtcctatcttgccgaaaattcttttttgccaagcgccggcatccccataggattagtcgaatgtctactcggaggtaaagaaaaggttgacggcagctcaccgacattgcacataagccaggcaatctcttcttatgctcccggtaatcccgtagtgaaaaacgaatgggtctatgaacccagtggtattcgtcttaagacaaaatacgatgacagcacctcaaggtatatcatacagaattgtactcactgcggctataccactattacctatggaagtgctaaaacggattgtcctaagtgtggtcggcatggaactatgcatggtataaaggacatctcgttgtcgatagagcagcgtttcacagaggtcgttgaacctgcagcattctctgtagcatgggattcgacccctatacgaaaaatgggcactcttggcggtatgaatttcattcagcctattttgcttgaaatggatgcctggcaaccgaagaccaattctgccaaaatgtctatccgttgttcaaccccaaggtctgagatcctcttttataataaaggagcgagtgggtatggatatgctttctgtccttattgcggcagaatgaaatcagaaaaatcaccggactctacagagcggatgatgccgcaccataaacatcttttggcctcaacaccttgcctcggtggtgaaaatgacggtgcagcagtaagacgccacgtgttgttggtcggaagataccagacagactttgtcgagatcaagttccatgataagaacaacaatttgatcgttgactctgagacactctattctctcggtgtgattctaagccgtaagctcacggagttgctcggagtcaacgacggagagattgaattcggttatgatgtcataaatcattctattttcatatacgatactgccctcgggggcgcaggttattcattgcttttccgggaatataaagatgaagtcctgaaaatggctttggaagcgcttgaaagatgtgactgtgaacggtcttgtactaagtgccttatcgaccgcagatcgcaatggtatctgaactatcttaaccgaactaaggctctcgaatggctaagacaggaaattaaggcccgcattgctccaaaggaaattcttcgcttaatacctgattctcacactgtgacatcagacatcacaaccgagttttatcaactcacacggaacaaggacatttcctgtattaaaatatttgttaacgacaacatctctcaatgggatgcggaggcgttcccattcaagaaaattctcacagaactatctcttgaaggcgttgacgttgcctttatactaccaagcgttcccgatgtaaaatcactctcgtcagccgacagtgctactttaattgcagaggtatttaaaaacgactttaaaggccttgaaaacacattgccagcagaattgcttcccttgatggttgtgattatgaatgatggaaccgtcaaaacctactttggtaaaaatattgacacttcctattccaaaaattggggaagcggagatgtattcataaccacccaattaaattcgttgtcctacgccgacataaatcgaatgcaattgttgaacaccttttcatcaggcgatacctccttcatgttcgactatagaataacagaacacagttcgttaggccatttctttgattctctgaagaatccggaagtagagaactggaatagaatagtatccaacctacaaggcaagaccgtttctgttgaatattctgatagatacctaaaaacacccttaggctgtatgctcctagcgaaaatgatttctgggctgaagaatgaagctgatttaaacgtggtgtctatcaaggttatcgtcacaaatatc

SEQ ID NO: 12379 - DNA, 855 bp, Bacteroides fragilis
atgaagtcttcacgaaacacttctacctccggcaaacccgcttccggtcgtcgtacaccggcacggaagacgaaagcgaaaaagaaaactacccgcaccatgcccgtttggatgcgcaatacccttgcgcttattgtggtcggagtattttctctcactttctattatttcgttatccgtccttattcttatcgttggaaggagtgctacggacggaaggagtatggcgtttgtatcccttgtggctatgaggtgcatggtatcgatatctcccattatcaggggaacatcgactggaaggagttgaaacaaaacagagaaacggattttccgcttcactttatttttatgaaagccaccgagggaggagatcatggtgacgatactttcaaagacaacttcgaacaagcacgtcgctatggctttattcgtggggcctaccatttcttcactccacgtacggatgccttgaagcaggcggacttttttatccgtaccgtgaaactcgatagtggagatttgcctccggtgctcgatgttgaactgacaggtaagaggcctaaaaaagagttgcaacaaaatattaagaaatggctcgaccgggtggaggcacattatggtgtaaaacctattctctacacttcttataaattcaagacccgctatctggacgactcgcttttcaatgcttatccctactggatagcccactattacgttgattcggtgaggtacgaaggtaaatggcacttctggcagcacactgatatcggaagtgtgcccggtattcatcacgatgtagatctgaacgtattcaacggttcgctcgaagactgtaggaagatgacgatgaga

SEQ ID NO: 12380 - DNA, 1632 bp, Bacteroides fragilis
atgatttcagtagacggactggccgtggaattcggcggaaccacattatttagcgatatttcatttgttattaacgaaaaagaccgcatcgcgcttatgggaaagaacggtgcaggtaagagtaccctactcaagattctggcaggcgtacgtcagcctacccgtggcaggatatctgctcccaaagagtgcgtcatagcctatctgccccaacatttgatgacagaagacgggcgaacggtttttgaggagactgcccaggcctttgcccatctgcacgaaatggaagctgagatagaacgcatgaacaaagagctggagacacgcacagactatgagagcgacagctacatggaactgatagagaacgtgtcgaccctcagcgaaaagttttatgccatcgacgccaccaactacgaagaggacgtagaaaaggcacttctcggattaggcttcatgcgcgaagatttccaccgccagaccagtgacttcagcggtggatggcggatgcgtatcgagctggctaaacttttattgcaaaagccggatgtgcttttattggatgaaccgaccaaccacctggacatcgagtctattcaatggttggaagacttcctgatcaataacggaaaggcagtaatcgtcatcagtcacgaccgcaaattcgtagataacatcactacccgtaccatcgaggtgactatgggacgcatttacgattacaaagtgaactactccaaatatctggaattacgcaaagaacgtcgtgaacagcaacagaaagcctacgaagaacagcagaaattcattgctgaaaccaaagatttcatcgaacgtttcaaaggtacctattcaaaaacactccaagtgcaaagccgggtaaagatgctcgaaaaactggaaatactggaagtggacgaagaagacacatcggcattgcgtctgaagttcccgccttcaccccgttcgggcaactatcccgtcattatggatggtgtaggcaagagctatggtgataaagttgtcttccgcaacgccactctgacagtagaacgcggtgataaggtggcatttgtcggcaaaaacggtgaaggtaaatcgacactggtgaaatgcatcatgaacgaaatagagcatgatggaacactgactttagggcacaacgtacagataggatactttgcccagaatcaggcatcgcttctggatgaaaacctgactgtattccagacaatcgatgatgtagccaaaggcgaaatacgtaataaaatacgcgacctgctgggagcgttcatgtttggcggaccggaagagtcgatgaaaaaagtaaaagtactctcgggaggtgaacgtacccgcctggccatgatcaaactgttgctggaacctgtgaatctgctgattcttgacgaaccgaccaatcaccttgacctgaaaaccaaagatatcctgaaacaggcattgaaagatttcgacggtacactgatcgtagtatcacacgaccgtgacttcctggacggactggtgaccaaggtatacgaattcggaaaccaaaaggtgaccgaacatttatgcggtatctatgaattccttgataaaaagaaaatggattcgttacgtgaattggagaaa

SEQ ID NO: 12381 - DNA, 933 bp, Bacteroides fragilis
atgggaaagggactcaaatggattatagcttttgccggagcaatggtcatcgtactgttgctccgcggctttgcttttacctcatgcctgataccttcggcgggtatggagaattccctttttcagggtgaacgtattctggtaaataaatggagctacggacttcgtgtaccctatatgtcattattctcctaccaccgctggggagaaagtcccatacataaagacgacatcgtcgtattcaataaccctgcgggtatcaaagaacccattatagaccgaagagagatttatataagccgatgcatcggtgtaccgggggatacgttacttatcgattcactcttcaacgtggtcgaccgtagcacacaactcggaccggaccggaaacaactatatacgtatccgcaaaccaaggaacagcaactggattcattgctttctattctttctattggccctaatgaactgatgggacaacacgaaggaaaaaatgtacggagcttcagccgctatgagtattatttgctcgatcaggctatgaacgggaaaagctggatacagcctttacaacaaagcttacaggaagaagctaaaccactcatcgttccgggtaaaggaaaagcagtccgggtatatccgtggaaccggacattgttacgaaacacgctggtactgcatgagggtaaacaggcggagatccgaaacgatacgctctacatcgaaggacgtccttcacaacattgttatttcaccaaagattattactggatggcttccaataattccgtaaatctttccgattcccgcctgttcggtttcgtaccgcaggatcatgtcattggaaaagcttcacgaatctggttctcaaaaacagaccatacgggaatctttagcggataccgctgggaacgattcttccaaccggtaaaa

SEQ ID NO: 12382 - DNA, 600 bp, Bacteroides fragilis
atgaaaggcagtctcattatcgtctctttcttcattgtcggcactctgtgcggacttcttcagttgatcccgtacgatttcagccaaagtaaactcagtttttatgccttatgcgggctgatgttctgcgtcggcattagcataggcaacgatccgcagacactgaaaagtttccggtcactgaatccccgcctactcttcctgcccgtcatgaccattctgggaacattggctggatgtgccgtagtcagcctctttttgtcccatcgttcaccgtccgattgtatggcggtaggttccggattcgggtattattcactctcaagtatattcatcaccgagtacaaaggagccgaattgggtaccatcgcattgctttcaaacatcatgcgcgaaatcatcgctttgctttgtgcccccctattggtaaagttcttcggaaaactagcacccatttcagtcggaggagccaccaccatggacacgactcttcccattatcacccgttgttccggacaggaatttgtcatcgtctccattttccatggattcattgtagactttagcgtaccgtttctggtgacattattctgttccata

SEQ ID NO: 12383 - DNA, 888 bp, Bacteroides fragilis
atggaagaaggacaaagggtcaaggcttgggtagaagcatcagacgaaaacgagcgcgctttctatagggaacgtaaaatttttgatgccttgatgcttaataatccgcttccggtaaagaaaacctcttttttcaattttacacattataaaaaaatagagtggctgaaaattgccatggctgtaatattaacatttctgcttagttatttctatcaggagtataaagccggtctggattcagtggcaatgagtacgatttctgttcctgaaggacaaagaaccaatgtcacattacccgatggtagtaatgtttggttaaatgcatgtacaacgatacaatatccgacttcttttaacagccgggagcgtttcgttatactaaaaggagaagcttattttgatgtgaaaaagaataaaagcagaccgtttatagtgcacacagatgcttatagcatcgaagtattaggtacgaagtttaatgtggatgcatatccggaaacagaaaaatttgaaactacattgatgcatggcagtgttaaggtcactttgaaagcagattcatcgcaaacagtaatattaaagcctgatcataaattgtcattagaaaaaggacggtttgtaatgactaaagtggaagattataatccttatcgatggaaagaagggcttatctgtttctctgacgaatcttttcctaatattatgaaagactttgaaaagtattacggagtgaaaatagtgatagagaataaaaatgtattgcagattaattttacggggaaattcagacaaaccgacggaatagattatgcgcttcgtatcttacaaaaaaatatagatttccaatatgagaaagataatgaaaaacaaattatctatataaaa

SEQ ID NO: 12384 - DNA, 1336 bp, Bacteroides fragilis
attagtttgaacattgaaaaaacttttggattcatttccaaggaatcggtttctgcctacgaagctcaggtaaaagccgcacaggaagcgctggaaaacggcactggtaaaggtaacgactttctggggtggttgcatctgccctcttctatcagtaaagagcacctggccgacctgaaagctaccgcacaagtattgagagacaattgtgaggtagtgatcgtagccggtatcggaggaagttacctgggtgcccgtgcggtgatcgaggcattgtcaaacagcttcacttggttacaggaaaagaaaacagcaccggtcatgatttatgccggccacaatattggtgaagattatctgtacgaactgacagagtttctgaaagataaaaaattcggtgtaatcaatatctctaaatccggtacaactacagagaccgctctggcattccgcctgctgaagaaacagtgtgaagaccaacgcggcaaagagatggcaaagaaagtaatcgtagccgttacagatgccaagaaaggtgcggcacgcgttactgcagataaagaaggatacaaatctttcattatccctgacaatgtaggaggacgtttttccgtgttgactccggtaggtttattgcccattgcagtagccggattcgatatcgagcaactggtaaacggtgctgccgacatggagaaagcttgtggagccgatgttcctttcgcagaaaaccctgcagcgatttatgccgctactcgtaacgagttatacaagaacggcaagaagatagagattcttgttaatttctgcccgaagcttcactacgtaagcgaatggtggaaacaactttatggagaatctgaaggaaaagataataaaggtatcttcccggcagcagtcgatttctctacagacctgcactcgatgggtcagtggattcaggaaggtgaacgcacaatcttcgaaacagtgatctctgtagacaaagtgaaccataagttagaaggtaccttcggatgaagctaacctggatggcttaaacttcctggccggcaagcgcgtagacgaagtaaacaaaatggccgaattgggaacccaattggctcacgtagacggaggagttcccaatatgcgtatcgtgattccggaactgagcgaattcagcatcggacaattactctatttcttcgaaaaagcttgcggtatcagcggctatctgctgggcgtaaatccgttcaaccagccgggtgtagaagcatacaaaaagaacatgtttgctttactgaacaaacccggatacgaagaagaatcaaaagctattcaggcaagactgtaa

SEQ ID NO: 12385 - DNA, 483 bp, Bacteroides fragilis
gtgagcgaagttaatgcaggcaagtccattaaagccctttcaagggaatacaatcttcatgaaaataaacttcttgaatggagcaggctttatgagcgttacggaaatgacggccttaagaaacagccaaagctaaagcctatgcctgattttaaggaaaaaggcgtgcgattaatattagaaaaaggtgtacttttgtcccatgtattaatcgattatcgtataagccgcaccgcccttgagagctgggtacgtttaacccgtaataagggctacacggcacttcgccaatcccaacgtcggggcagaccgcccaaagatatgggtagacccaagaagaaagaaccgcagacggaactggagaaactccaggcagaaaatatccgtctgagagcagaaaatgcgcttctaaaaaaagcgaaggccttagtcgaggaaaagaaaacccgggcacatctgaatgggcagaaggcatcgacggac

SEQ ID NO: 12386 - DNA, 1275 bp, Bacteroides fragilis
atgaaacgctattccatcagtgtggtgctgcacattctattgttggtggtgctctccatcggaggatacttgctgttctgttacgaattatggttcagcactctgattgtgggcatcctgctgatcgctacaggcgttcatctctattccatccagatgaaattggcaggtatgatgagacgactgacagactgcatccgcttcaatgacatgacgcagaactttcagccgccgtttaaaagcaagatgatggttgaactggcggacgaactttctcagacgcttaggttgttccgtggacgcctgctcgaggaagagatcaagcaccagtattacgagaaccttttaaataaggtagatacggctgtggtggtgactgaccgttcgggccgggtggaatggatgaaccgtgcggccgtggcactggtcggacaagaatcccggttgcctcaggagtggctgaccacctcctggaacgagacgcaggtggtacgtatccggcagcaaggagcctcggtagagatggcggtatcatgtactttgtttgccgcacaaaataaggaaaggctgttggtcagcctgaaaaacatccattcggtattggaacgtaacgagatggaagcctggcagaagttgatacgggtattgacccatgaaataatgaactctatcactcctatcatttcattatccgaaacattgagtgaacgcggaatacccgaacggctcagtgagaaagaatacggagtgatgttgcaagccatgcagactatccatcgcagaagtaaagggctgctcggttttgtggaaaactaccgtcggttgactcgtatccccactcctgcccgcacattggtagcggtggacgaactcttttccgacctaaggaaactcttccctgattcgttcattcattttgcggcaacacacaggggggccactctgtacattgatcgtgcccagatagagcaggtgctgatcaatctgattaaaaatgccaaagagtcctgcggacaaaatactgcaccgcagatagaagtagagttggaacaggtccccggaaaagtttgcagtctcacggtgcgtgacaacggcgaaggcattcttccggaagtgatagacaaagtatttgttccgttctttacgaccaagccatcggggtccggcatcggacttagtttatgtaagcagatcatgaatctgcatggcggcaccattacagtctcctcagagatagggaaaggaagctgctttacactgatgtttccgggaaga

SEQ ID NO: 12387 - DNA, 675 bp, Bacteroides fragilis
atgcgtatcgatattataacggttttgcccgaaatgattgagggctttttcaattgttctattatgaaacgggcccaggacaaaggactcgctgaaattcatattcacaatttacgtgattataccgaagacaagtatcgccgggtggatgactatccatttggaggttttgccggtatggtgatgaagatagaacctattgaacggtgtattaatgccctgaaagcagagcgtgattatgatgaagtgatatttaccacacctgatggagagcagtttgatcagaaaatggctaatagtttgtctttatccggtaatcttatcattttatgcgggcattttaaaggtatcgattatcgcatccgggagcatttgatcacaaaagaaatcagtattggagattatgttttgaccggcggtgaattggctgccgccgttatggcggatgctatcgttcgaattattccgggtgtgatttctgatgaacagtccgccctttctgattctttccaggataatttgttggcggcacctgtttatactcgtccggcagaatataaggggtggaaagtacccgagattctgctttcagggcacgaagcgaagattaaggaatgggaactccaacagtcgttggaacgtactaggagactgcgtccggatctgttggaagat

SEQ ID NO: 12388 - DNA, 765 bp, Bacteroides fragilis
atgggaaaaataattgctttggccaatcaaaaaggtggtgtaggaaaaacaacgactacgattaacctcgcagcttcgctggctacgctcgaaaagaaagtactggttgttgatgcagacccacaggcaaatgcctcttccggattgggagtcgacatcaagcaatctgaatgtactatctacgaatgcattatcgacagagccaacgtacaggacgctattcatgacaccgaaattgattcgttgaaagtcatttcatcgcacattaatctcgtaggcgccgaaatagaaatgctaaatctcaaaaaccgcgaaaagatactgaaagaagtgctgactccgttaaaggaagagtatgattatattttgatagactgctctccttcgctgggactgatcacaatcaacgccctcacggcggccgattcggtgattatccccgtacaagcggaatattttgcccttgagggaatcagcaaactgctgaataccatcaagatcatcaaatcgaaactgaacccggcactcgaaatagaaggttttctgctgaccatgtacgactcacgtctgcgtcaagccaaccaaatctatgatgaagtgaaacgccacttccaagaactggtgttcaaaaccgtcatccagcgtaacgtaaaactgagtgaagcccccagctacggcctccccaccatcttatatgatgcagagtccaccggagcgaaaaatcatttggcgctggctaaagaactaataagcagaaacagtaaa

SEQ ID NO: 12389 - DNA, 651 bp, Bacteroides fragilis
atgaagattattaatttaagtgagacagactcaatattgaatcagtatgtatcagagataaggaacgttgaggttcagaacgaccgtttgcgttttcgtcgcaacattgaacgtatcggcgaggtaatggcttatgaaatgagcaagacgtttgcttattcggtgaaggagatacaaactccattggggatagcacctgtcagaacaccggacaatccattggttattagtacgattcttcgtgccgggttacctttccaccaaggattcctgagctatttcgattatgccgagaacgcttttgtttctgcttatcgtaagtacaaggatacgttgaaattcgacatacatattgaatacatcgcttcaccgcgtatcgacgggaaaactcttatcattacagatccgatgcttgccaccggcggaagtatggaactgagttatcaggccatgttgacgaagggacatccgtctgaaattcatgttgcttcgattattgccagccaaagggctgtcgatcatatagccagtattctgccggaggataaaactacaatctggtgtgcagctatcgatcctgagataaatgaacactcttatattgttcccggattgggtgatgcgggtgatcttgcttttggcgagaaagaa

SEQ ID NO: 12390 - DNA, 1479 bp, Bacteroides fragilis
atgaaaagactgattttaccaattgcatgtggcatttgcactgttacctctgatgcacagaccgacaaacaaccgcatcccaatgtgatcttcatttatgcagacgatttgggatataaggatttgagttgtaccggaagccgtttctatgaaactcctcatatcgacaagctggcaagagaaggagtttgttttactcaatcctatgccgcatgtccggtttcgtcgccgtcccgggctgctctgttgaccggtaaataccctgcccggatcaacctgaccgactatattcccggagaccgggcgtacggtcctcataagaatcagcggttggcttctttgccgttcaatctccatctgtcgaaagacgaaataacgatggccgaggccttcaggcagaacgggtattctacctttatggcgggcaagtggcatctggccgagtctgccgaatactatcctgagcagaatgggtttgatattaatatcggaggaaataatacggggcatccctccaaaggatatttttcgccttatggtaatccacaactgaaagacggtcccgaaggagagtatctgacggatcgcctgactgatgaagtgatccgttatatctcggagcctaaggaaaagccgttctttgtctatctgtcctattatacggttcatctgcccttacaggcaaaagcggaaaagatagccaaataccggagaaagctgagccgggcggttcctgcggattcatcttttgtgaaaaaaggagagacgtatcataaacttgtgcaggacattccggcttatgccgcgatggtcgagagcctggacgaaaacataggacgcctgttagacaccctgcatcggtcgggactcgatgaacgcaccattgttgtgtttacgtccgataatgggggaatggccaccagcaatactactcgtaatatcccgacctccaatctgcctttgcgtgccggaaaaggatatttgtacgaaggaggcatcaaagtgcctgccatcatccgatggagtggacacctgaaaggaagacaggtttcggatactccgatcatcggtacggattattatccgactttgctcgatctttgcggattgcctctactgcccggacaacacgtggacggagtttccatgaaacccgtcttacagggcggacggctgtccagaccttccttattctggcattatcctcattatagcggtggactgggtggtcggccttctgcggctatacgtgagggggattataagcttattgagttttttgaagaccatcacgtcgagttgtacaatgtgattcaggacgaatccgaagagaaagacctgtcacaaatataccctgagatagcagatggactaaggaagaaactatatttgtggtataaggaggtcggtgcccgaatgcctgttgataatccccactatgtttctcctgtgaaggattccgactcttttgaaaataaa

SEQ ID NO: 12391 - DNA, 1185 bp, Bacteroides fragilis
atggagaaaaaagaagaatttatccgagtaggcaccacgctctacaagattgtggaccagccccgcattgacggcggctatgtgaggaaacgcatcgcatggaactccgagaccctgcggcaggactacggcaaggactatatggcgggcatccccaagtatgacggcttctgcaccgtacccgaccatgtgggctacaagcccgtagtcggcaagttcctcaacctctacgaaccgataagccaccgaccgcaggagggggatttcccctgcatccgctcgttggtggaacacatcttcggcgaacagtacgggctgggcatggactatctgcaactgctctacctctatcccattcagaagctgcccatcctgttgctcgtgtccgaagaaaggaacacgggcaagagcacgttcctgaacttcttgaaagccattttccaaaacaacgtgacgttcaacaccaacgaggacttccgcagccagttcaactccgactgggcaggcaagctgcttatcatggtggacgaggtgctgctcaaccgccgagaagacagcgaacggttgaagaacctcagcaccacgctttcctacaaggtggaggcgaaaggcaaagaccgtgacgagataggtttcttcgccaagttcgtgttgtgttccaacaacgagcacctgcctgtcatcattgacgctggggaaacacgctattgggtgcggaagattgtgccgttacagaatgacgataccgactttctgcaaaagttgaaagcggagatacccgctttcctgcatttcctacaacacagacagctatccaccgggaaggagagccgcatgtggttcaacccgaagctgctggagacggatgccctgcagaagataatccggagcaaccgcaaccggctggagattgagatggcagaactgctgcttgatatcatggcgaagatggaggtggaaacggtgtccttttgtttgaacgacatcattcccttgctagtctgctcgcaagtcagggtggagaaatcgcaggtacggaaagtggtgcaggagtgctggaagctgacacctgcacccaacggtcttacctacaccgcctaccaatacggcggcaatgaccgttaccagacccgaagaagtgtgggcaggtattataccgtcacgaaagaactgctggaaaagctt

SEQ ID NO: 12392 - DNA, 2307 bp, Bacteroides fragilis
atgaaaatgaagaaatatatatttttcctcgttagcctgtgctgtgccctgttgcctgctatggccgaccaaccggaacatccggaactgaaagcgtctgatgccaatatcatcggccatgtactcgataaaaaaacaggtgaacacctctcttatataacaatcgccctgaaaggaactaccatcggtacggtgacggatgccaccggacactatttcctgaaaaaccttcccgaagggaattttgtgctcgaagccagttcggtggggtataaaaccatcagtcgcaatgtcagtctcaggaaaggaaagacacttgaagaaaattttgagttggaagaagatgccgtagcgcttgacggagtggtagtttcggccaaccgcagcgtgaccaaacggcgcttggcacctacattggtcaatgtggtagatatgaagatgtttgagaatacaaactcgcctacactttcgcaggggcttaacttccagcccggtgtccgggtcgaaacgaactgtcagaattgcggtttccagcaggtgcgcatcaatggactggacggtccgtatacacagattcttatcgattcgcgtcccatcttcagtgccctttccggtgtttacgggttggaacagattcctgccaatatgatcgagcgggtagaggtgatgcgaggcggaggttctgccctgttcggttcgtccgctattgccggaaccattaatatcatcaccaaggagccattgcgcaattcggggcagttggcacatactcttacttctatcggcggcagctcgtctttcgataataatacttcgctgaacgcatcgctggtgaccgatgatcatcgggcgggactttatgtgttcggacagaaccgtcaccgggatgcgtacgatcatgatggagacggttattccgaaatgccgaaacttaaaaaccagacagtcggcttccgttcgttcctcaagacaagcacttattctaagttgacatttgagtatcatcacttacaggagtttcgtcgtggcggaaacctgctgaaccgtccgcctcacgaggctgacattgccgagcagattcagcactccatcaacggcggcggcttgaaattcgattattttgctccgaatgaaaaacaccgtctgaccgtttatacttcggcacagcatacggaccgcgacagttattatggcagcaaaaaagaccagaacgcctatggaaagacaacggacctgacatttatcggcggttctcaatatgtgtacagtttcggtaaatgccttttcatgcctgccgacctgactgcgggattggagtataaccgggataacctgaaggacgatatgtggggatacaaccgttatacgaagcagacggtaaatattggtagtgcttttttgcagaatgaatggaaaaacgagaaatggagcattctgttgggcggacgtctggataagcacaatctgatcaaccatgttatctttagccctcgtgccaatctccgtttcaatccttccgaggacattaatcttcgcctgagttattcgtcgggcttccgtgccccgcaggctttcgacgaagacctgcatattgagaatgtaggcggaacggtgtcgatgattgagcgtgccaagaatctgaaagaggaaaaatctcagagtttcagcgcttcagccgatatgtatcatcgtttcggtgcttttcaggtaaacttcctggttgaaggtttttataccagactgtcggatgtatttgtactcgagaacatcggagagcgggacggcattcttatcaaagagcgccgtaacggatcgggagccaaagtattgggactgtcgatggagggaaaaatggcttatctctctttgttccagttacaggcaggagtcacgttgcaacagagccgttatgacgaaccggaaaagtggagcgaaacggcaccggccgagaagaagattttccgtacgccgaatacctatgggtactttacggcaacgtatatgccgatcaagcctctgtcattatccctgtcgggcacgtacaccggatcgatgctggtgcagcacatggccggttatattgacaaggatgtggcggtgaatacgcgcgatttcttcgatatgggagtcaaggtggcctatgatttcaaactttataaatcggtggacctgcaattgagtgcaggtgtgcagaatgtgttcaatgcttatcagaacgatttcgaccagggagtggagcgtgactccggatatatttatggtccggctgctccgcgaagctatttcgccggaataaagatcagctat

SEQ ID NO: 12393 - DNA, 852 bp, Bacteroides fragilis
atggtactcaataatctgaatctggatattccggaaaatgcactctatggatatttaggtaataatggttccggaaagacaactacgattcaagtattacttggcttagctcgtcctgttaaaggtgaggtattatatgatggacagccatttcgagatcagagagaaaaacaattaaggaagataggcttatgcccgggagaaccattctattatgataatcttacggggtatgaacaccttgcgtatttagaccatatttatcattgtggaaggaccgctatcaataaagtattggcaatcacgggaattgagaatgccagaaacaagaagcttcgacactattccacgggtatgatacatcgattgggaatggctatggctttattgcatgatccggatatactgtttctggacgaaccgctcaatggacttgatccggaggggatacattctataagagagttacttttacagctgcatcaagagggtaagaccgtttttttatccagtcatttacttgatgaagtagaaaaaacttgtacccatgttggtatccttcagcatggctgtttattgtatcaaggagatttatcggaattactaaacagtatagagaaaagaatccatatcaggttggacaaggtggatttgttacattcggtatgtaaagaggtccaaattgacagccggatcaagtcggagtcaatattggaagttatcctttccaatgatactacctatgacaggcttattgagctactggggcagggcggttatcatatatctgctattcaacctttggagaatactttggaatcggtttatttaaaattaacttcacaaacaaaa

SEQ ID NO: 12394 - DNA, 648 bp, Bacteroides fragilis
atgaagaacaaacggtactcacgcggcgaagagctgtccaatactttaagccatggcgcaggcaccctgctgggcatcaccgcaggatattttcttttggaaaaggcgctcgccaaccctcacccctattgggcaacaggctgtgtactggcttatctggtggggatgctggcatcgtacatcagttcgacctggtatcacggctccaggcccggcaagcggaaagaacttctgcgcaaatttgaccacggcgccatttacctgcacatagcagggacttacactccgttcaccctgttagtgctacgccatgccggcggatggggctggggaatcttcacttttgtatggctgtcggctattgtaggattcatattagccttcaaaaaactgaaagaacacagcaatctcgagacgatctgttttgtagggatgggctctgccatcctggtggccctcaaaccactaatggactgcctgtccgccatcggagcctctcccgccttctggtggcttctcggaggaggagcttcgtatatcatgggagccgtgttttactcgttgcgaaaaccttatatgcacgccgttttccacctgttttgtctaggcggaagcataggccatatcatagccatctggttgattctt

SEQ ID NO: 12395 - DNA, 618 bp, Bacteroides fragilis
atgaaaattacccgtgatgaattactgatagccgcgttcaagctgtttatgtccgtgaactatgaaaaagccagttttgcggaacttggaaagatgcttggaatgtcgaaagccggaatattcaaatactacaagaacaaacaggaactatttattgccgtagtggataaattttggttcagcacgcaaaatccacgaaacaaattcactgaaacaaacggtacatttgccgaatttatagacgaatatgtgcgtggcgtacaacggacaatggatatgctgggcgacctgataggtgcagagcgggaaaaggtggcacaaggaaagttcacatatcacgcccaatattttcattttctgtttcaactgctccaatacgatcctgatgcaaaagaaaaactccgtaatcttgtagatggtgattatgcttactggcgtgctgctatacaacgtgccatagctaccggagaactaagagaggatgtggatgtagaggatgcggtagtcatgttccgacaggtttacatgggactttcgtttgaaatggcatttatgggcggattgaacacccagcggcttgccaaacatctacatgccgtttactccttattaaagcgt

SEQ ID NO: 12396 - DNA, 348 bp, Bacteroides fragilis
atgccaagatcagtaaatcatgttgcttcaaaagcaagaagaaagaaaattttgaaattgaccagaggttactttggtgcaagaaaaaatgtatggaccgtagctaaaaacacttgggaaaagggtttgacttatgcgttccgtgaccgtagaaacaagaagagaaacttccgtgctctttggatacagcgtatcaacgctgctgcacgtctggaaggaatgtcatattctaaactgatgggtggtctgcacaaagccggtattgaaattaaccgtaaggttttggctgacttagctgttaaccatccggaggctttcaaggctgtggttgctaaggctaaagttgct

SEQ ID NO: 12397 - DNA, 936 bp, Bacteroides fragilis
atgagcgaaaaagcaccctttatggtattctcgggaactaattcgagatacctggcagaaaaaatctgcgcaagcctcaattgtcctctaggaaacatgaacatcacccactttgctgatggtgagtttgcagtttcttacgaagagtcaattcgtggcgcacatgtattcctggttcagtccactttccctaattccgacaatctgatggaactccttctgatgattgatgcagctaagagagcttctgcaaagagcgttgttgcagttgtcccttacttcggatgggcacgtcaggacagaaaagataaaccacgtgtttctatcggcgccaagctggtagcagacctgctttcagtagcaggcattgaccgtctgatcacaatggatttgcacgcagaccagattcagggcttcttcaatattccggtggatcacttatatgcttcggctgtgttcctcccctatattcagtcattgaagctggatgaactcgtgattgcaactcctgacgttggtggttcaaagagagcaagtacattctccaaatatctgggtgtacctctggtactttgtaacaaatcacgtgaaaaagcaaatgaagtcgcttctatgcagatcattggtgatgtaaaaggcaagaatgtagtattgatagacgacattgtcgatacagccggaaccattaccaaagctgccaacatcatgcttgaagccggcgccaactctgtacgtgccattgccagtcactgtgtaatgtccgatccggcttcattccgtgttcaggaatcaggactgaccgagatggtatttaccgacagtattccttactctaagaaatgtgccaaagtaaaacagttgagcattgccgatatgtttgccgaaacaatcaaacgtgtgatgaacaatgaatccatcagctcacaatacattatc

SEQ ID NO: 12398 - DNA, 564 bp, Bacteroides fragilis
atgttaaagatattggtgacttatgccgtacaaggcgaatttacagaaatcaagtggcccgacgtggaggtatattatgtgcggaccggtattggaaaagtgaaatcggcttttcatttgtccgaggctatccagcaagtgaagcccgatattgtgatcaatcagggaacagccggaactattaatcatcaggtaggggacgtttttgtctgccgtcattttgtcgatcgggatatgcataagatgaccggattgggaatggaataccgtattgattcgtcggaattgcttgctgccaggggcttttgccaacactggaccgaatcggcaacctgcaataccggtgatagcttcctgaccgagctgacggatattgagggagatgtggttgatatggaggcttatgcgcaggcttttgtatgcagagccaaagaaattccttttatttcggttaagtatgtttcggatgtgattggacagaattctgtgaagcactgggaagaccgtttggaagatgcccgtgcaggcttatctcactttttcaatgttttaaaagaaagtata

SEQ ID NO: 12399 - DNA, 438 bp, Bacteroides fragilis
atgacaaacaacgaatcggagcgcgagcttgtcctacaaaccttacgaacctggatggcattccgccaggccgttcagcgggtactcaaacgtcacaacgtggatatgaccttcgagatgctgcaagtaatgaactgcctgtggaacaaacaaggcatcagccagcaatccctggctgagaaaacagcaaaggacaaggcttgcctgaccaatctgattaataatctggaaaagaaaaactgggtgatacggaaagaaggcccctccgaccgccgaaaccgcctgattttcctgacgccccaaggcgaagaacttgccctcaccgtgaaacccctgatcaacgatatctatgcccaaaccggaacagagatggaggcaagccggataacggaatgcatcgaagatctgaagagactgcatgaagtgctcaatgagatc

SEQ ID NO: 12400 - DNA, 1488 bp, Bacteroides fragilis
atgtatcactggatcttcgtgcctctcacgcttggtttggcggttgttatggccattatggagaccctttattataaaacaggcaatgaattctggaaacgaacggctaaattctggatgaaacttttcggtatcaattttgccgtgggagtggccaccgggctgatcctggagtttgagttcggaaccaattggagtaactattcctggtttgtaggcgatattttcggtgcacctcttgcaattgaaggtattttggctttctttatggaggccacgtttattgctgtcatgttctttggatgggacaaggtgagcaagagattccacctcatttcaacctggctcacgggcttgggagctacgatttctgcctggtggattctggttgccaatgcgtggatgcagcatccggtaggcatgcagttcaatcctgacaccgtacgcaacgagatggtcgactttatggctgttgcgttttcgccggtggctgttaataagttctttcatacggtactttcaagttgggtgctcggagctgtttttgtgattggcatcagttgctggttcctgctgaagaagcgtgataaggaatttgcggtggcgagcatcaagataggtgcagtcttcgggctggtggcttctttgctgacggtgtggaccggtgatggttccggttatgccatcgcacagacacagccgatgaaactggctgctgtggagggctattacgaaggacaaaatggtgccggactggtggctgtcggacttttgaacccggagaagaaaacctatgatgacggtcaggacccgttcctcttccgtatcgagattccgaaaatgctttcgctgctggccgaacgtaaggtggatgcctttgtgccgggtataaaaaatattattgagggaggatatgaactgaaagacggtacaaaagctctttcggctgccgagaagatagaaaaaggcaagaaagcgattgctgccctggccacttatcgtacggctaaaaaagaaggtgatgaagctgccgccaaggaggcttataccactttgcaggaaaatgtgccttattttggttatggctatattaaagatgtaaatcagttggtacctaatgttccgcttaacttttatgcttttcgcgtgatggtgatcctgggcggatatttcattctgtttttcatcctggtgcttttctttgcctataagaaagatttgtcgaagataagatggatgcagtacgttgctctgtggaccattccgttggcttatattgccggacaagccggttgggtggtggccgaatgtggtcgtcagccgtgggcgatacgggatatgcttcctacgtctgtgtctatctctaagctcgatgtgggctctgtgcagaccactttctttattttcctcgttttgtttaccgtgatgttgattgctgaaattggcattatggtccgtgagatcaagaaaggaccgacggttaatcat

SEQ ID NO: 12401 - DNA, 2787 bp, Bacteroides fragilis
atgagaagacatctaattcatttcctgctggttgcagtgctgacggtatgttctgccgctacggccattgcccaggtaacagtgaaaggtcaagttgtggatgcggaaacaggtgagccattgattggtgcagccgtaacgattgtcggtaccacccagggtagtgtgactaacttggatggtatgttcacacaaaaagctgcctccggttcaacgctgcttatcaagtaccttggttacaaggaattcagcaagaagatcacccagaaaggtggtactgaagatttgggcgtaataaaaatggcagccgatgcaatggtgctgaatgacgttatcatcacttcttctgttgctgtttcgcgtaaaacaccggtagctgtatcgacagttgaccctgtctttatcgaggagaagctcggaacacaggagtttcctgaagttttgaagtctactccgggtatctatgcaactaagcaaggtggtggttttggtgactccaaagtgaacatacgtggttttaagactgagaactctgctatgatgattaacggtgtcccgatgaatgatatggaatggggtggcatctattggtcgaactgggccggtttgagtgatgtgactcgtagcatgcaggtacagcgtggtttgggtgcatcaaaggtagcggctccttcagtgggtggttctatcaacattgtgactaatacaatcgatgccaacaaaggcggtttcgtatcttatggtatgggtaacgacggattgaacaaaatcctgttcaaggtatctaccggattgaccaaatcaggttgggccatgacccttttgggaggtaagacctgggccgatggttatatccagggaaccaactacgaagcctacaactggtttgtgaatattacaaagcgtttcaatgacaatcatcagttgtcatttactgcttttgctgctccccagtggcataatcagcgtggaaataaagacggacttaccattgaaggatggcaggaagttgcgaagaattatatgaatggtgagaagccttatcgttataaccctacctacggattcgggctgaacggacaaagaaagtcatcggcatataatgtgtataataaacctcagttgtcattgaaccatttgtggcagattaatgaaaagtcaagtttgagtacggctctgtatgcttctatcggtcgtggatatggctattccggtcagggattgaccagtgcggatcgcagtaactggtatggcagtaacaatggtaacctgaatatgactttccgtaaagccgacggtacatttgcgtatgatgaaatatatgctttgaatgaagcgagtgagaatggttcggttatggcaatgtcgaagtctaagaacttccataactggtatggtctgctttctacttatactactaagttcggtgattacttcgatttctatggtggtatagactaccgttattataaaggtacacacaccaatgaattggttgacctctatggtggtgacttttatgtagactcttcttcaagaaaaagtgttttggcttcaaacaatgccgccgctgctgccggttcttcatttgtgaaccagaaattgaaagtaggtgatattgtttatcgtgactttgatggctatgtgatgtctgagggagtatttgctcaaggtgaatacaacagagataagttgagtgccttcatttccggttcggtttctaataccggttactggcgttacgaccgtttttactatgacaaggcgcacgccaaatcaaaaaccgtcaacttcatcggttggaatgcaaagggaggtttgaactacaaccttaccgaaaatcataatgtgtttgccaatatcggttatatcagccgtgctccattcttctcgggaggtgctttccttaattcaacagtcagcaatgcgacaaaccccgatgcagtgaacgagaaagtgttctctttcgaaatcggatacggctaccgttcgagcttccttactgtgaacatcaatgcctaccacactcgttggatggataaaaccactacccgttcacaggatatcacaaactactatgaaggcagccttagcgagccttacgatgcaagtaagctggtttctaccaagtctgttatcaacatgcagggtgtgaatgctttgcaccagggtgtcgaacttgattttgtagcaaaacctttccaatggctggatttgagcggtatgttctctatcggtaactggcgttgggatagcaatgcttcgggtagcttcactgtagaaggtcaatttgtgaacagcgcatctatcaagggaagcgatggtaaggatgtgaccgttcttgtaaatgcggcagctaacggactggaaccgggtacaatgaaactgaacctgaaagatgtgaaagtgggtggatctgcacagactaccgcagctttgggtgctactttcaagatcgacaaagcccttcgtctgggtatcgactggaacttatacgcacgtaattatgctgactggtcattgaactcaaacgacctggtgatgaacagtgagaaagacttttctactccttggcgtattccgactgcaagtactttcgatttgaacgcaagttataaattcaactttggtaaactgaatgcagtactgtcaggtaacgtgaacaacttattcgaccagacttatatttctgatgcgacagatggtagcaatcacgattggaagaccgcttacaatgtgttctacggattcggccgtacttatagcttgagattaaaagttaatttc

SEQ ID NO: 12402 - DNA, 660 bp, Bacteroides fragilis
atgggagaaaagcaatacggcatcgatgaaaagcgattggccgaatatgccgcacaaatcaaagagattcatgaacaaggcgtacaaatcggcatcgttatcggtggtggtaacatcttccgtggactgagtggagccaataaaggtttcgatcgggtaaaaggtgaccagatgggtatgctggccacagtaattaacagccttgccttaagttcggcattagttgcggccggtgtgaaagcacgtgtacttacagccgtacgcatggaacctatcggtgaattctacagtaaatggaaagctattgaatgcatggaaaatggcgaaatcgtcatcatgtcggcaggaaccgggaatccgttttttactaccgacaccggctcatcgcttcgcggtatcgagatagaagcagacgtcatgttgaaaggtactcgcgtagacggtatctatactgccgacccggagaaagatcctacggcaaccaagttccacgacatcacttacgatgaagtgctgaaacgaggactgaaagtgatggacttgacagctacttgtatgtgtaaggagaataatctgccgatcgtagtattcgatatggatacagtaggcaacctgaaaaaagtgattaccggagaagaaatcggtacattggtacacaat

SEQ ID NO: 12403 - DNA, 3921 bp, Bacteroides fragilis
atgcatagaaacacagccctacttattatagtaatattactttgtgcatcctctgccctgggccgcggcgtaaactatcagtttacgtccatttccattgaggaagggctttcacaatcaactgtccaatccattctcttggataaaaagggaaagttatggataggaacgaggaatggactaaattcttatacgggacaagatttaaaaatattcaagagtaacccggaagacagatattctttacccgacaatgagattctacatctaactcaagattctctaaacaatatatggatatccacccgggaggggatggtaacatatgatgagaaacatgggaattttactcttgttaatcgagatataatatactcctctttatgcataaccgatggaatacttttcggaagcgaaaaccgaatatacaaatatgactataaaaaacgctcttttaaatccattaatattaaaaagcaagaggataaaggtagtgatgttacaaagtacagggtacaaaaaattatagcattttctgaaagagaggcactagtcgccaccagaagagatggggtatacgtattggactatcagaccatgcgactgaaaaggcttttctctggttcaaacaatattctgcaaggggcgtatctatcgtcaaacggatatatatatttatccttttggggacaaggtttgttttgttatgaaaaaacaggtaagtttataaaacggtatacaaaagaaaactccgacctaacaaacaattatgtattggatatcgtagagaaggaagggtttctatggctggcgactgacggaggaggaatcaaccgtctggaactgtctaatgagaatttctccaatctctaccatattgctggagataaaaattcgttacccgtaaattctgttactatattatataaggatgaaaatgaaggcctatgggccggaagtgtcagaggaggggttttcaatattaaagaaagctacatacgcacatataaagactgcccattaggatatattaacggactgagcgagaaatcggtaacaagtttattcgaagagcctaatggaaggctatggatcggtacagacggtggcggaataaacctgtatgagcctcaaacgggagatttcaagcatttttactccacctatggagataaagtggtttccatagctcctatatcagaaaaagagctgatagtatctgtttataccaaaggactctttttattcgacacacacacgggagcttaccgaccatttttaataataaatgatagtatcaatttcaggcaatgcttttacggatatattccacgcgcccatcgggtgacaaagaacaaaatatatatactaagcaaagatatatggatatatgatataaataatagaaaattctctccgatcaaaacagacaagaattaccaattaccaacttcagtaatggggtattctgatgaaaagatgtctctaacgatgagtggcaataaagtattccaaatcattaataaaaatgatagcatccaacctctttttcaaatagacgaaaaagagaccatcactgcaatcgattgtgacggacaagataggatatgggtgggaacaacagccgggataggatattacaatctaaaagaaaaaagatactcaaaaatagactcacaattgttcagtgacattagtgcactccgctatgacccttcctctgaaagggtatggatttgcgcgcaaaaccagctgtactcgtattgtataaaagacgacaagtttatccaatggaacagaagcgacggatttcatcccaatgaaataatattcacttatcaacaacggactatgaaaaaacaccgatatctttatttcggtggtatagaagggctggtgcaaattaacacggatattccagagcctaatgagccatatcctgagatagatctttgtggagtagagcttaacggacaactacaaacatcagatataaatatacgcaacataaagattccatggaaatataatacactcatactacaggtacatatcaaaaacaaagatattttccagcgggttccatttcgatatattataaaaggagacgttgataaaagcattgactcatatcatccgatgctggaactttccaatctctccccaggcaaataccacattgaagtatcatgcatgacaaaagacgggaattataccatgcccatccacctaactgacattcatgtcaccccaccatggtataaaacggactggtttataatcctatgttgcatttttcttacaggaggaatcattgtaggaatgtctatttttaatataagaaaagaagtcaaaatacaaaagagactaaaagaatatagacaatattttaatgaaaagaagatagattttctcattcacataaatcatgaattacggacccctttgacattgatttatgctccactaaaatgtttgatagataaaaacgagacacaagggttaccttcatatctgatgccacaattgcaattaatattcaatcaggcacaatatatgagggaaatagtggacatggtactagactggaacagtatggaagcaggctatagtaaattgaaaatacaaaaatgcaaattagacgaatggataactaatattgtaaaagattttacagaagaagctaggcagaaagggatatgcataaaattacaaatgaccaccgatatagaagaggtatggtttgataagcaaaaatgtcataccgtactgtcaaacctgctgatgaatgcactgaaattcagcatgcccgaaagttgtataacaataaacacacggaagcttgaaaacaaagtcagaatatcagttgtagatgaaggaatcggtatacaagattcggatataacaaaccttttcacacggttttataaaggtaatcataaggaaaaaggaagcgggttcggattatattatgccaaaacaatcatggaaatgcatggaggggatattgggacctataataataccgacaaaggggcgacattttatttagagttgccgcttcttgatatcaatgaaaaggcagaagccacaaagttactacaaaaagaagcccccattgtgaacacaactcaagatttacatttcgattgtacggggaagaccatacttatcgtagaggatgaaaaggagttaagagaatacctaatagagtcctttacagaaacttttaaaaaagtttatgcagcagacaatgcaatctcggcactggaaacatgcagaaagaaacaaccgtctatcattgtgagcgatgtaatgatgccccaaatggatggttttgaattatgccgtcaaataaaaaacgacatccggataagccatataccagtaatattgctgacagcacgttatgaccaaacaggaataacaaccggatataaatccggagccgattcttatatccctaaaccttttgatttggcctttttaaaggtcgtcgtcggcaatattttaaaaaacagagaaaaaatacacagtcaatatgtaacggttactggtgcaccctccttattagatttgacaaacagtaaggccgatgaggatttcatgaaaaagataaatgctgtcatacatgaaaatctatctgacgaagagttctccgtccagcaattggcggatgcaatgatagtcagccgatcttcattatacagcaaaataaaaattataacaggtatgggagtaaatgactatataaacagattacgcatagagcaagcgatgtcactacttgttaacacaaatttaaatataaatgaaataagttgcgaagtgggttttacttatccccgatatttcagttctacgtttaaaagcatgacaggaatgactccaaaacaatttagaaatgaaaaatgtaataaa

SEQ ID NO: 12404 - DNA, 192 bp, Bacteroides fragilis
atgaataaatttattgaaattaccgaagacggtaaaaacatccttgtcaatcttggatgtgttgccaaaattgaagatcgtaaaaaacagtgtattttacatttccttaatggaacacctcaattaactatcaatcttgcgtatgagactttgaagtcaattctgaaggatcccaatcattcaatgtgtggt

SEQ ID NO: 12405 - DNA, 1212 bp, Bacteroides fragilis
atgacatcaattacaccacggctcaatcgctcgcgcgaggggcgtgatggcagttatccgcttgtgatacaaattattcgccatcgaaagaagagagagatttatacgccttaccgtttctgggaggcagagtttaacacccgtttagaaatggtggagaacatcggaggcaatcgccgtcgtctgctcattgtccgcgaagccaatgaataccttatatatataaagaaggagttggaggctatttgcagatcgctcgaagcggataaggggagtgcttatacggtggacgacattgtgaacgtttataactaccacaatgatctgacccaggtgttggtatatgccgactcggtgattgccgggctggagaataagggacgtcagggtacggctgccaattatcgtagcgcccgccgtgcgtttgagatgtttttggatggcagtcctttttcgtttgaggagttgactcccgaagtgctggaccgctttgtcacctttctccgtgagcggggcaaccggcccaatacggtttcgttctatctccgtcagtggcgtgccatctacaatcgtgcctgcgccgatcatgtggttttttccgatcaaaagcctttccgacggctgaacctcaaagaggaggtgacatccaaacgcgccatctcccgagagaagattgcgcagatcgaatgtgtcgaccttactgcttgtcatgctgatatgcagcttgcccgtgacctgttcctgtttagcttctatacgcgcggaatgtcctttgtagatatgtgctatttaaataaggagaacctgcagggaaattatcttcggtacaaacggcagaagacagggcaggagttacagatacgcattgaaaaagatttgcgtgtgttaatcgacagatataccagccctttgtcggactatctgcttccaatgcttcgaaacggtgaccgttatcaggattatcggcgcaggcagcggaggcttaataaactgattcgtgaattgggcgaccggttacagttggatatgccactcacattttatgtggcgcgccactcatgggcgacactcgctcacgaaaatgatgtgcccgtctcggtgatcagcgattgtatggggcacacatcggagaagactacccgcatttatctggatcgcatagacactaagcggcttgaccgggccaaccggttggtgattaatagtctgcgg

SEQ ID NO: 12406 - DNA, 1200 bp, Bacteroides fragilis
ttgaatacccatcgtagaaatgattgtgagatttatcctctgattatccgtgtggtttatcacaggcgtaaaagtgagtattctcttgggtggaagattcatacttctaatttctctgcagatcgtgagcgtgttgtctattcatcaaccggtaatcttaagcgcaaggatctgggacttatcaatgatgccatttctcaggagcgtgaacgattgctgaagatttttgcttttcttcaacagaatatgccggggttcagcttatctcagttgatggataagtatcgtatggagcgcaatttgcgttatgtcgatgcttttattgtgcgtgagatagagaggcttcggcaggaggggcgttccggtactgccggcctgtaccttagcggattgtactctttacgacgttttttgcgtggtcagaagattacgtttcgcgagttgacttattgttttcttacggattatattcattttctacgtatgcgcggtatctctgaaaatactgtgaatatgtatattcgcaatctccgcgctgtctataacaaagcccaaaagcaggggataaatatgggttgtgagtctcccttccgggagcttaagcttcaaactcaggagactgcgaagcgtgcgttgtgtaagcatgatattgcccgtatagtatctgttgatctttcctccgaacctttattggatcgtgcccgggatctttttatgtttagtttctatgcccgtgggatgccttttgtcgatattgtctttcttaaacatgactcgataatcaatggaatcatttattatgagcgtaataaaacggggcaacgcatgcaagtccgtgtgattcctcctctcgcagctctgattgagaaatatcggagttcttatccgtatgtattgccgtatataacgtctttttcggaccgtacgtcttatatgcagtatcgttatgcattgggtaatgttaaccgcctactcaaacggttgggcaggcgattgcacctgcctcttgtactgactacctatgttgcccgccatagctgggcgactattgccaaagaggagggattttctatcgcatctatcagcgaagggcttgggcatacttctgaggcaacgacccagatttatcttcagtcttttaatagtgaggtcattgataagattaacgagcaagtcgtagcctccataggaaggcatatc

SEQ ID NO: 12407 - DNA, 441 bp, Bacteroides fragilis
atgcgttcggtggctgatgcagtattgcagaatgggggagaagtgaccggagtaattcctcattttatggtagaccagggatggcatcacacgggattgacagagcttatcgaggtagaaagtatgcacgagcgtaagaggttgatggctgaaaagagtgatgccgtgattgcactgcccggaggatgcggaactttggaagagctgcttgagattattacctggaaacagttggggttgtatcttaacccgatcgtgatattaaacactaatggtttctttgacccgttgctggagatgcttgaaaatgctatagaaggtaatttcatgaggaaacagcatggagatatctggcatgtggcacatactccggaggaggctgtagagttggtttattccataccggtgtgggatggttctattcgtaagtttgccgctata

SEQ ID NO: 12408 - DNA, 1917 bp, Bacteroides fragilis
atgggaaaaattattggtattgacttaggaactacaaactcttgtgtttctgtatttgaaggaaacgaacctgtagtaattgcaaatagtgaaggtaaacgtacgactccttctattgtggcatttgtagatggcggagaacgtaaagtcggtgatcctgcaaaacgtcaggctatcacgaaccctacccgtacaattttctctatcaaacgtttcatgggtgagaattgggatcaggtacaaaaagaaatagcacgcgttccttataaagtagtgaaaggtgataacaacactccacgtgtggatattgacggacgcctgtatactccacaggaaatttcagcaatgattctgcagaagatgaagaaaacagctgaggattatctgggacaagaagtaacagaagctgtgattaccgttcctgcatatttctctgattcgcagcgtcaggcaactaaagaagccggacagattgccggtttggaggttaaacgtattgtaaacgaaccgacagcggctgcgttggcttatggtcttgataaggctcataaagatatgaagattgccgtattcgacttaggtggaggtacattcgatatttctatcttggagttcggtggcggcgtattcgaggtgctttctacaaatggtgacacccatttgggtggtgatgactttgaccaggttattatcgattggctggttcaggaatttaagaacgatgaaggtgccgacctgactcaggatccgatggctatgcagcgtttgaaagaagctgctgaaaaagcgaagattgaattgtcttcttctacaagcactgaaatcaacttgccgtatattatgccggtaggtggtgtacctaagcacttggttaagacgctgactcgcgctaaatttgaatctttggctcacaacttgattcaggcttgtcttgaaccctgtaagaaagcaatgcaggatgcaggtttgagtaactcggatattgatgaagtaatcctcgtaggtggttcttctcgtattccggctgtacagaagctggttgaagatttctttggtaaaactccttcaaagggggttaatcctgatgaagttgtagctgtaggtgctgctgttcagggtgctgtgctgactgatgaaatcaaaggtgtggtattgttggatgttactccgttgtcaatgggtatcgaaacgttgggtggtgtgatgactaaattgattgacgctaatactacaatccctgcacgtaagagcgaaacattctctactgctgccgacaatcagacagaagttaccattcacgttctgcaaggtgaacgtccgatggctgcacaaaataaatcaatcggtcagttcaatctgactggaattgctccggcacgtcgtggcgttcctcaaattgaggtaactttcgatatcgatgccaacggtattctgaaagtatctgcaaaggataaggctactggtaaagaacaggctatccgtatcgaggcttccagcggtttgagcaaagaggaaatcgaaaaaatgaaggctgaagctgaggctaatgcagaggctgataagaaagaacgtgagaagattgataaactgaatcaggctgacagtttgatcttccagactgagactcagttgaaggaattgggtgataagttaccggcagataagaaagctccgatcgaggctgctctccagaaactgaaagatgctcacaaggctcaggatatgacaactatcgatagcgctatggctgaactgaatactgcattccaggctgcaagtgccgaaatgtacgctcagagcggtgcacaaggtggtgcacaggccggtccggatatgaacgcaggtcagtcaaatgccggacaaaataatggcaaacaagacgataatgttcaggatgctgactttgaggaagtgaaa

SEQ ID NO: 12409 - DNA, 1146 bp, Bacteroides fragilis
gtgcaaaagaatgaatgggtggctcaaaccaaggaatcagatacgattttacgtagtatgaacgcttgctttatcttgataaatagtgacttggtggtgataaggaccaattattatgatttgagtggaatctcagaagagcctgagtcctccggtagagtcggtgatctactgaattgtaaaaacgctgttcgtagtggcggaggatgcggggcacataaaaattgcgaaaattgcatgattcgccatactattgagaatgcattctgccataaaaagggttttcataaattagaagcatccatgaggctgctcagttcggatcatcaacagattattccttgtgatgtttctgtctcgggtacttacttgaataatgaaggtcacgaacagatgttactgactgtctatgatattactgaattgaagaatatgcagcggttgctgaatattgaaaaagagaacgctgtttctgccgaaaagttgaaatctgcttttatagctaatatgagtcatgaaattcgtaccccactgaatgcgattgtcggtttttccggtttgttggcttctgcggatgatgatacggaaaaaaagatgtatctggatattgtagcggaaaacaatgatcgtttattgcagatagtgacggatgtactcgacctttcaaaaatagagtcgggtagtctggatttccattattccgaatttgatgtaaacgatttattatgtgctctgcatggcattttaaacatacgtctgaaagacaagcccgaaattaaactgatttgtaaggcaggaacagatgaatggatcatttattccgagcaacatcgtatcgtacagataatcacaaatctggtacataatgcgatgaagtttacccacagtggggagatttgtttcggatgtcgtccccaaggagaggacgagatttacttttatgtttctgatacaggtattggcattcctgccggagaacaggataaaatattcgaccgatttaccaaattggaccatgaagtacccggaacagggctgggactgactctttcacaaactatcgtacagaatctggggggagaaatgggagtcgaatcggaagtgacaaaaggatctaccttctggtttacccttcctttgaaatcc

SEQ ID NO: 12410 - DNA, 417 bp, Bacteroides fragilis
gtggaagatttttcgtgtctgaacaatgctgtaggcgacctgattatcggggaatatacccgaatcggactgggcaacaccattatcggccccgcaaccatcggcaaccatgtaaacctggcacagaatgtaaccgtaaccggactgaaccataattatcaggacgcagacaagcggatagacgaacaaggagtaagcacacaacccatcacgattgaagatgatgtatgggtaggtgccaattcggtgattttacccggcgtgacactgggcaaacattgcgtagtagctgccggaagtgtagtcagtcgctccatccctccctactctgtctgtgccggcagtccggctaaagtagtcaaacagttcaatccggagagccgaacctgggaaaaaacagtctcaaaaaacggaaag

SEQ ID NO: 12411 - DNA, 1956 bp, Bacteroides fragilis
atgagcgaagaacagaatcccaccaataacgggtcttattcagcagatagtatccaagtattggaaggacttgaagcagttagaaaacgccctgcgatgtacattggtgacatcagcgtaaagggacttcatcacttggtatatgaaattgtcgacaactctatcgacgaagcattggccggttattgcgaccatatcgaagtaactatcaacgaagacaactctatcaccgtacaggataatggacgtggtattccggtagatttccacgaaaaagagcagaaatctgccctcgaagttgccatgaccgtactgcatgccggaggtaagttcgataaaggttcgtacaaagtatccggaggtcttcacggtgtaggtatgtcctgtgtgaatgcattgtctacacacatgactacccaggtattccgcaacggtaaaatctatcagcaggaatatgaaatcggtaaaccgctttatcccgttaaagaagtaggaatagcggaccacacaggaaccaaacagcaattctggcccgatgacagtatctttaccgaaaccatttatgattataagattctggcttcacgtttacgtgaattggcttatctgaatgccggtctgcgcatctcgctgacagatcgtcgcgtagtgaatgaggacggcagtttcaaacacgaaactttctattcggaagagggtttaagagaatttgtacgcttcatcgaatcgtcacgcgaacacttgattaacgatgtgatttatctaaacacagagaaacaaaacatccccatcgaggtggctatcatgtacaataccggattttcagaaaatatccattcgtacgtcaataacattaatactatagaaggtggtacgcatctggcaggtttccgccgcgccctgacccgtacactgaagaaatatgcagaagacagcaaaatgctggagaaagttaaagtagaaatctccggcgatgacttccgtgaaggtctgacagctgtgatctctgtaaaagtagctgaaccccaatttgaaggacagactaaaactaagttgggaaacaacgaagtaatgggtgctgtcgatcaagcggtaggcgaagtactaaactattatctggaagaacacccgaaagaggctaaagcaattgtagacaaagtgattttggctgctactgcacgccacgccgcccgcaaagcgcgtgagatggtacagcgtaaatctcctatgtcaggtggcggtcttccgggtaaactggccgactgctcggacaaagacccgcagaagtgtgagttattcctcgtcgagggagactctgccggcggtacagctaagcaaggtcgtaaccgtgcatttcaggctattcttccactacgcggtaagattctgaacgtagagaaagccatgtatcacaaagcgcttgaaagcgaagaaatacgcaatatatacacggcactgggtgtcactatcggaacggaagaagacagcaaagctgccaatattgataagctgcgctatcataaaatcattatcatgaccgatgccgacgtcgatggatcacacatcgacacactgatcatgactttcttcttccgctatatgccacagatcatccagaatggctatctgtacattgccactcccccgctctacctttgcaaaaaaggaaaaatagaagagtattgctggacagatgcgcaacgccagaagtttatcgacacttatggtggcggttcggaaaatgcaatccatacacagcgctacaaaggtttgggtgagatgaatgcccagcagttgtgggaaacgactatggatccggaaaaccgtatgctgaaacaggttaatatcgacaacgcagcagaagccgactatatcttctccatgttgatgggtgaagacgtaggtccacgccgcgagttcattgaagagaatgcaacgtatgcaaatatcgatgca

SEQ ID NO: 12412 - DNA, 378 bp, Bacteroides fragilis
atggctataagaatagttggtgtagatttacctcaaaataagagaggtgagattgcgttgacctatgtatatggaataggtcgtagtagttcagcaaaaattttagataaagctggtgtagacaaagatctgaaggtgaaagactggacagatgatcaggctgcaaagattcgtgagatcatcggtgcagagtataaggttgaaggtgatcttcgttctgaagtacaattgaacattaagcgattaatggatattggttgctaccgtggtgtacgtcaccgtattggtctgcctgtaagaggtcagagcactaagaacaatgcgcgtactcgtaagggtagaaagaaaaccgttgcaaataagaaaaaagctactaaa

SEQ ID NO: 12413 - DNA, 387 bp, Bacteroides fragilis
atggcaaaaaaaacagtcgcagctaagaagagaaatgttaaggtagatgctaatggacaattgcatgttcattcatctttcaacaatattattgtttctcttgcaaatagtgaagggcagattatctcttggtcgtctgcaggaaagatgggatttagaggttctaaaaagaatactccttatgcagctcagatggctgcccaggattgtgctaaaattgcattcgatcttggcctgagaaaggtaaaagcatatgttaaaggtccgggtaacggtcgtgaatctgctatcagaacgattcatggtgccggtattgaagttacagaaatcattgacgtaactccgcttccgcataacggttgtcgtcctccgaaaagacgtagagtt

SEQ ID NO: 12414 - DNA, 603 bp, Bacteroides fragilis
atggctagatatactggaccaaaatcaagaatagcccgtaaattcggtgaaggtatctttggagctgataaagttttgtcgaagaaaaactatcctcccggacagcacggaaattcaagaaaaagaaaaacttctgaatatggtattcagcttcgtgagaaacagaaagctaaatatacttatggagtattagaaaaacaattccgcaacttgttcgaaaaggcagctacagctaaaggtattaccggtgaggtacttctccagatgcttgaaggtcgtcttgacaacatcgtgttccgtttggggattgctcctacgcgtgcagcagctcgtcagttggtaggccacaaacacattacagttgatggacaggtagtaaacattccttcatacgcagttaaaccgggtcagttgattggcgttcgtgaaagatctaaatctttggaagtaattgctaattctctcgctggtttcaatcacagcaaatatgcttggttggaatgggatgaagcttcaaaggtgggcaaattgctgcatattcctgaaagagcagacattcctgaaaacattaaagagcatttgattgttgaattgtattctaaa

SEQ ID NO: 12415 - DNA, 324 bp, Bacteroides fragilis
ttggacatggtagaacagtatgaagtgtattgggtagagttagaccctacccgtgggggtgaaatggcaaagacacggccatgtgtagttgtcactccttcagatttgaatatgtaccttacaacagtagtcattgttccgataacctcaacgataagaaattatccttaccgggttctgtgttctgtagccgggcgtgaaggagagatagccactgatcaaattcgcacggtggataaaagccggctgaaaagaaagattggagatttgaatttcagtgagataaaaaggttacgtgaagtatttcagcaaatgttctgtgaa

SEQ ID NO: 12416 - DNA, 990 bp, Bacteroides fragilis
atggcgatattagcatttcaaaaacctgataaagtattaatgttggaagcggatgccaaattcggtaaattcgaatttcgtcccttggaacccggttttggtattaccgttggtaatgctttgcgccgtatcctcctttcttcattagaaggttttgctatcaccactatccgtatagaaggtgttgagcacgaattttctagtgttcctggagtaaaagaggatgttaccaacattatcttgaatctgaaacaagtgagattcaagcaagtagttgaagaattcgagagcgaaaaggtgagcatcactatcgagaattctagtgaatttaaagcaggtgacataggtaagtatttgactggatttgaagtgttaaatccggaattagttatttgtcatttagattctaaagcaactatgcagattgacattacaattaacaaaggtcgtggatatgtccccgctgacgaaaaccgcgaatattgtaccgatgttaatgtaattccaatcgattcaatctatacgccgatacgtaatgttaagtatgctgtagaaaacttccgtgtagagcagaagactgactacgagaaactggtacttgaaattactaccgacggttccattcacccgaaagaagcgctgaaagaagctgctaaaattctgatttatcactttatgttattctctgacgaaaaaattactcttgaaagtaatgacgttgacggtaatgaagagtttgatgaagaagtattgcatatgcgtcagctgttgaaaactaaacttgtcgatatggatctgtcagtacgtgccctcaattgcttgaaggctgctgatgttgaaacattgggcgatttggtacagttcaacaaaactgacctgctgaaattcagaaacttcggaaagaaatcgcttaccgagcttgatgatttgctggaaagtctgaatctgtcgtttggaaccgatatttctaaatataaattagataaagaa

SEQ ID NO: 12417 - DNA, 483 bp, Bacteroides fragilis
atgaatgacagaaagattttagtggcgtacttttcatgcagcggcgtaactaaagctgtggcagagaaattggctgcaattactggagcagatctgtatgaaattaagccggaggttccttatacggaggctgacctggactggaatgataagaaaagccgtagctcggtggagatgagagatgctctctcgcgtcctgccatttccggtacgttgtttcatccggaagagtacgaagttctgtttgtaggctttccggtctggtggtatattgcccctactataattaatacatttttggaaagttatgactttgccggtaaaatagttgttccgttcgctacatcgggaggtagcggcataggaaattgtgaaaagaatcttcataaagcatatccggatatcgtgtggaaagatggaaaacttttaaatggacagataacgcgggatctggttacggaatggtttgaaaaaattaggttg

SEQ ID NO: 12418 - DNA, 1512 bp, Bacteroides fragilis
atgaaaagaatagaaatctatatcggactgtccgttttcgctttatcggccaaaagccaggtgaaagaatctcgacccaatgtcatatatatcataatggatgatctgggctacggggatatcggttgttatggttcggagaaaatagaaacaccgaacatcgatcggttgtataaggatggcatcagtttcacacagcattacacaggttcacccgtttcggcacccgcccgctgtgtgttgatgacaggtatgcactcgggacatgcgcaaatccgggctaatgatgaaatggcttatcggggcgctatcatgaattacgactccatgtatgtacatcccggtctggaggggcagtatcctttaaaagcccataccatgactctcggaagaatgatgcagcaagccggatacgtcaccggatgctttggaaaatggggactgggggctccgggcacggaaggtactcccaacaaacagggattcgacagtttctacggatacaactgccagcggcaggcacacagttattaccccgcctttttgtataagaatgaagaccgggtatacttggccaataaagtgctcgatcctcacacgaccaagctggatgcaggagccgacccccgtgatgaagccgcctatgccaagttctcgcagaaagagtatgccaatgatcttattttcgatgaactgatttcgtttgtcgggcagaacagaaagaaaccgtttttcctgatgtggactactccgctaccgcacgtgtcgttgcaggcaccggagaaatgggtgaagtattatgtcgggaagtttggagacgaagccccctacatcggaaaagccggatatatgccttgtcgctatccgcatgcgacttatgctgctatgatcagttattttgacgagcaaataggcaagctgatagagaagctgaagaaggaacgtctgtacgacaatacggttatcatgtttacttccgataatggaccgacttttaatggtggtagcgattcgccgtggttcgacagtggaggtcctttcaggtctgagtatggttggggaaaatgttttgttcacgaaggaggaatacgtatccctgctattgtcacctggcccgggaaaatcaaaccgtctacccagagcgatcatatttgtggatttcaggatgtgatgcctaccttggcggatatcgcaaacattgcttgtccggagaccgatggcatcagtttcttgcctgctttgcttggcgaaacggaacgccagaaagaacacgaatatttgtattgggaatatcccgatcccacaatcggcctcaaagccattcgcatgggtaagtggaaaggaattgtcaacaacatccgtaagggcaactctacaatggagctttatgacttggagagtgatctcagggaagaacatgatgtggctgccgaacatcccgatatcgttcggaaactgacgaggttgatggaaaagtcgcataccgagccggagaatcccaaattcaggttc

SEQ ID NO: 12419 - DNA, 699 bp, Bacteroides fragilis
atgacttattcacacgaagtggaacacatgtgtgttgtaaagaagggtcctaaccacggaccggctcccatacccgaagaaggaaaatgggtaaaatcaaaagaaattgttgatatttcaggtctgacacacggtgtgggttggtgtgctcctcagcagggtgcatgtaagctgactctgaacgtaaaagaaggtatcatccaggaagctctggttgaaactatcggctgttcaggtatgactcactcagctgctatggctgctgaaatcctcccaggaaaaactatcctcgaagcattgaacacagacttagtttgtgacgccatcaacactgctatgcgcgaactcttcttacagatcgtttacggacgtactcagtcagctttctcagaaggtggtctgatcatcggtgcaggtcttgaagatttaggtaaaggtctgcgtagccaggtaggtacattgtacggtactttggctaaaggtcctcgttaccttgaaatggcagaaggttacatcaagacaattgctcttgacaaaaacgatgaaatctgcggatacgaattcgttcacatgggcaaattcatggatgaaatcaagaagggtactgatgcgaatgaagcattgaagaaagttaccggtacttacggacgcttcactgcagaacagggagctgttaaacacattgatccacgtcacgaa

SEQ ID NO: 12420 - DNA, 267 bp, Bacteroides fragilis
atgagtcgttcattaaaaaaaggtccatatattaacgtaaaactcgaaaagaaagtgcttgctatgaatgaatcaggcaagaaagttgtcgttaagacttggtccagagcttcaatgatttcgcctgattttgtaggccatacagttgcagttcacaacggaaataaatttattcctgtatatgttaccgaaaatatggtaggtcacaagttgggtgaattcgctccaactcgtacattcagaggacacgctggtaacaagaaaaaa

SEQ ID NO: 12421 - DNA, 360 bp, Bacteroides fragilis
gtgctggacgaggtagattcgcaactttgcatacaaggagactgggaacgtatttctcaggttttggttaatctgattaccaatgccattaaatttacttctgtcggagaaattcattttggatttcagaagaaggcggatatggtacagttttacatgtctgatacggggaaaggtattccggcagaaagggtggccaccatctttcagcgtttcggaaaaatagatgattttgtgcaagggaccggattgggactgactatctgccggatgcttgtcgaaaagatgggcgggcgtatctgggtacgttccaaacagggagaaggaactgttttctattttactctgcctatggcaaaa

SEQ ID NO: 12422 - DNA, 663 bp, Bacteroides fragilis
atgactaacgacatgatccagttactggtcaacacagaccagaatctactgctatacctcaacggatttcacaatgcctttggtgattatttcatgagtactttcaccggaaaatggatttgggtaccgatgtatgccagtatcctgtatgttctgctaaagaacttcaattggaaaataacactatgctgcctaactgccatcgcactcaccatcctctttgccgatcaagtttgtgccagcctgatacgccctgccgtagaacgcctgcgaccgtccaatccggcaaatcccatctccgacctcgtccacattgtaaacaactaccggggcggacgttacggctttccatcctgccatgcctccaattctttcggactggcattctttctggtcttcctgttccgcaaacgatggctgagccttttcattcttttatgggccacgctgaattgctatacgcgcatttacctgggagtgcattatccgggcgacctcatagtaggtgccatcataggatgctgcggagcagcattcatgtgttatttactgaagaaaacagcaagaggcgcttcttttggaaaagtgaaacatacggaaatcacgatctacgtagggctacttacaacaataggaattctggtttacgcttcaatcatggca

SEQ ID NO: 12423 - DNA, 1302 bp, Bacteroides fragilis
atgatgaatatggttcttgtccggttcgaaagggctcttgccactgcgaacacgaaccatcaccacacggatcacatcgaatgcagggacaatcagcgtactgaaagcaatcacgaaagcaccttcggtatacggggtgacatccggattgtactggctgtatttgatggcaaggaaagagagcacatagcccaaagtcaggctgcccgtatcacccataaaaatcttacgggcacgttccgcactgccgaagacgttatagtaaaagaaagggaccagcacaccgaacgtggcaaaggcgagcatgctgtacgtccaaagttctttctgcatgaacaggaagccgaagacaagcagggcaacgctgctcagaccggaggcaagaccgtcgataccgtcaatcagattgatggcattggtgacaaagacaaccagaagaaccgtaaaaggcatacctatccaggcaggaagggcatacaggccgaaaagaccgtagaagttattgatccaaaggccggccaggggaaaaaacgaagcacagatgatctggatcacaaatttctgacggtagcgcactccgacaaggtcatcggcaatacccgtcaggtagagcaaagtcatcccgcagaccagaaacaagcactcgggcaacaagtacaccgcacggagggcgggaacatcataacccatcaggatgcgaagggcgaacactccacaggaggaaagcaggatggtgggaaagaaagagacaccgcccaaacggggaatggcacgtttatgaaccttgcgctcactcggcatatcgaaaagcttcttccgcaaagagataagcaggatgcggggaatgataagccgggcaaccgaagcagagatgacaaaagccaatatgatgaaaaggatattcaagacaaaggggatttaggttatatacagtgttgtgtcgaaaaagaaaagagtttactcctctacttcccagttgggataaggattctcttcaagactgcggagttgttcggcaatctcacattcatcgccggaaagggcacgctctccccagctgtcgatgatgctatgcgcctcacgggagaggtcgtcgtcaaagacttcaccatagcaataagtcagaaggcgcaccttcagcaaggaagcgggcaagcggtcgagcacttcccaacaacggttcaggatctgctggatgcggacttccttgtcaccgttattgtagatcgtcgcgttataacccatcagaagcgaaaggcacaaacgggcttcttcctcgtcggtggagccatgatggggata

SEQ ID NO: 12424 - DNA, 1230 bp, Bacteroides fragilis
atgcaagacacgctttctctttatgaactgaatgccttggtccggcggagtctggagcagtgcctgcccgatgaatactgggtacaggcggagttgagcgatgtccgtacaaacagtaccgggcattgctatctggagtttgtccagaaagatccccgcagcaataatctgatagccaaggcaagaggaacgatctgggctaacatctaccggctgctgaaaccttattttgaggagtccaccggacagttgtttacttccggcataaaggtgttggtcaaggtgacggttgctttccatgaattgtatggttacagcttgaccgtgcaggatatcgaccctacctatacattgggcgatatggcacgccgccgccgggagatactcaggcagcttgaagaagaaggggtgttgacgctgaacaaagagttggagatgccgttattgccacaacgcattgcggtcatctcttcggctacggcagccggttatggcgatttctgccatcagttgcagcacaacccgcgcgggttctacttccgtacggaactttttcccgccctgatgcagggcaaccaggtggaggagtctgtattggctgccctcgatgcagtgaatgcccgggtggacgagttcgatgtggtggttatcatccgtggtggaggtgccacttccgatttgtccggttttgatacttatctgttggctgctgcctgtgcacagtttccgttgcctgtcataaccggcatcggacacgagcgggacgataccgtactcgattctgtagcccatacccgcgtgaaaactccgacagcagcggccgaactgctgatcgaccggatggaagaggcggcagaccggctcggggcgttggccgaagaactgcatgcccgtgttttctaccgcctggagcaagaacgcaggaggcttgctttgctacaggcacgcataccgtcacaagtgatgcgtaaactgtcggaatcgcggataaagttgcagatggcgaaaagcaatctctcgcatgctgccgaaactttattggcccgacagcaccaccggctggaacttttacagaaccgcattgcggacgcttcgcctcagaagctgttgaaacgagggtatagcatcactctgaaagacgggaaggcggtgaagagtgctgcctgcctgcaatcgggagacgagctgataacccgcctttacgaaggagaagtgaagtcgagagtcgaa

SEQ ID NO: 12425 - DNA, 831 bp, Bacteroides fragilis
atgaaatacaaactcctcgtactcgacttggacggaacactgaccaatgctaaaaaagagataactctacacaaccgagaagcactgatacgtgtacagcaacagggtgtgaaactgatacttgcatcgggacgtcctaccttcggtattgtacccttggccgatgaacttcgcatgaaggaattcggcggatttatcctctcctacaatggcggggaaattatcgactggagtaccggagagatagtttatgccaatgtattgccggacgaagtgatacctcggctatatgaatgcgccacgcgcaaccaacttcccattcttacttatgatcatcaatatatcattacagaatatcccaatgacgattatgtccggaaagaggcattcctcaataaaatgcagatatatccttccacggattttctgaaagatattcgtctgccgcttcctaagtgtttgatcgtaggcgagccacatcgtttgattcccgttgaggctgaactttcggtaggactgcaaggccaactgaacgtctaccgctcggagccctttttcctcgaattggtgccacagggaatagacaaggcacaatctttatctgtcttactaaacaaactgaacatgaaccgggaagagatggtagccgtaggcgatggctacaatgatctttcaatgatccaattcgctggattgggagtagccatgggcaatgcgcaggaaccggtaaagaaggtcgccgattacatcacttttagcaacgaagaggacggtgtagctgtcgtcgtagataagttcttcacaaaagcctccgacaaggaaacaagagtt

SEQ ID NO: 12426 - DNA, 759 bp, Bacteroides fragilis
gtggcacaggacattgccgatacagtagatacattccccgatttgccaattttggaagtcggaccgggaatgggtgtgctcactcagtttcttgttaagaaagaacggttggtaaaagttgtagaggtagactacgaatcagtagcctatttgcgagaggcctatccgtcattggaagataacatcattgaggatgacttcctgaaaatgaacttacaacgtttgttcgacggacatcctttcgtcttaactggaaactacccttacaacatatccagccaaattttcttcaaaatgctggataacaaggatctgatcccctgctgtactggaatgattcaaaaagaagtagccgaacgcatcgccgccggaccgggtagtaaaacgtatggtatactcagcgttctgatacaggcctggtatcgggtagaatatctgtttacagtaaatgaacaggtgttcaatccacctcccaaagtgaaaagcgcagtcatacgaatgacacgcaacgagacacaagagctcggttgtgaccccaagctatttaaacaaattgtaaaaacaactttcaaccagcgtcgaaagacattacgaaattcaatcaaaccgattttaggtaaagattgcccgttgacagaagacgccctgtttaataaacgaccggaacaactgtcggtgcaagagtttatccacctgacaaatcaggtggaacaagcactgaaagttccgatagaaccagtttctcagatagaaaatcca

SEQ ID NO: 12427 - DNA, 1119 bp, Bacteroides fragilis
ttggctttggtggcaggcatttactggattctgacacgaccacataaagtagagccggaagtgccgactgtaattgtagagcccgcagaaagggataatgtagagattttcggtgagtatgtggggcgcatacgtgcacaacaatttgtggaagtgcgggcccgtgtggaggggtatctggaaagtatgctctttgccgagggaacgtatgtgaataaaaatcaggtgctttttgtgatcaatcaggatcaatatcgtgcaaaggcagataaagcacgggcacaactgaaaaaagatgaagcacaggcattgaaagcaaagcgggatttggagcgtatcaagcctttgtatgcccagaatgcggccagccagttagatctggacaatgcgggggcggcctatgaaagtgcggtggcaaccgttgccatgagtgaggcggacctggcgcaggcagagttggagttgggttatacattggtccgttcgccgttgtccggacatatcagcgaacgtaatgtggatttggggacactggtgggaccgggtggaaaatcgcttttggctacagttgtgaagagtgatacggtgctggtggacttcagcatgactgctctggattatctgaagagcaaagaacgtaatatcaatatcggtcagcaggactcttcccgttcctggcagccgaacatcaccattaccttagcggataatacggtatacccttataaaggatatgtggattttgccgaacctcaggtagatccgcagaccggtactttttcggtaagagcggagatgccgaacccgaaacaggtattgcttccgggacagtttacgaaggtaaagctgctcttggatgtacgtgaaggagccatcgttgtaccgcataaagcagtgactatcgagaaaggcggagcatatatttatgtgatgcgcagagattctacggcagagaaacggttcattgagttgggacctgaatttggtaataaactcgttgtggagagaggtttgggtgcaggtgaagaagtggtggtggaagggtatcacaagctgacaccgggaatgaaagtgagagctactttaccccagccgtcagctgagaaaaaagagactgag

SEQ ID NO: 12428 - DNA, 1155 bp, Bacteroides fragilis
atgaagaaaataattcttgtagcagctcttctttcggctgcagtctgtctgcctgcacagaataaaggcggaaacaaaagtgggggaatcaatctttctttatggaaaaaagcatgtacgcaaccacttgacagtacacagactacatatgtcaacctggggcttttctcggcaatgcataagttgcacggtgtaggcttcaatgccttcggaagtatggtacagaacaatatgaacggtgtgcagatttccggattggccaaccttgcgggaggaagcatgcatggagtacagattggaggtatcagtaacgtaaacggcaacaatctggcaggattgtctgtttcgggacttgtcaacatcaccggaaacaaagcaaagggtgtactgattacgggtttaagcaacattgccggagacaatatgcgcggactgatgatgagtggtatcatgaatatcacaggagataaagccgcaggtgtacaattggcaggccttgccaacgtaaccggtgaggaatatgacggacttatgatgtcgggattgctcaacgtggtaggagaagaaatgaacggactgcaactttccggacttgccaatgtaaccgggggacaaatgaacggagtgcaattgggactgttcaattttgcctctaaggcaaaaggtttgcagatcggactgttcaactatcataaggaggatatgaaaggacttcaactgggactggtcaatgccaacccgcagaccaaggtacagttaatggtcttcggaggaaacagcaccaaaatcaatgtaggtgcacgtttcaagaacaaactcttctacactatcctcggtggaggcacacactatcttgattttgacgataaattttctgcggcattattctatcgggcaggccttgaacttccactctacaaaaacttgtttgtaagcggtgatttaggctatcagcacattgaaactttccggaataaaaaggtggaaggcattccggcacgtctttatgccttgcaggcacgcctcaacctggagtatcggtttacggataaattcggtttgttcgtcacaggcggatacggtggcagccgttactataacaaagccaggacctacgacaaaggcgtgattgcggaagcaggagtggttctgttc

SEQ ID NO: 12429 - DNA, 1635 bp, Bacteroides fragilis
atggaaaaattgcatatccggaagattgcttcattggggttgatgctttgcttttttacggggggaggagcacagacacctgtcaaagtggaaaaaaggaaagagcataaatcgaatactgtaatacctgttgtcaagggaaatgtgacagataccttgtcacttgtatcatttaacgattttcatggagcctttgcctgcgataagggtgttcccggagccggccaactggtacaaacagtgttgacacagaaagagaaaaataaaaataccatcgtgctttctgtcggagataatttcagcggaagttatttctcaagaataaccagaggcaatccgttaccggaaatgtttcaggaaatggatgtaaaaatgtccgctgtaggcaatcacgagtttgattggggattaccctatctgacggatacggcgaaggtatatatgaattttgtggcagccaatattataacggatcggggagatacgttggagtgggctaaaccttaccggattgtgactctgaatttgaagaatggaggaacggtgcgggtggctttcgtagggttgacaacgactgatacggcacataaaacgagtccggaaaatataaagggactggcttttgtgcatcctgtatatgcagcccgtgtcgagactgcctgtcggttgaagaaagaaggcaaagtggatatggtagtcctcttgatgcatatcggcactaacatgaagaatagagatattatagaagaggagaatgctaaattgctgcctttcctgaaaggagtggacgcaatcatttccgggcattctcacgaagttgttcttagtaaggtgaacgatgtacccattatccaggcaggggtaaacggtactcatatcggtaagttggattttagagtagtgaaagaagagggcggcaatcgtatctcttatataggaggtgatacaattcggacagaggggccgtctaatgcacatatcgattcgttggtcgataaagtattggcggtatacggactgtcggaaaaactgattttggcaaaagatgccctgatccacgatcgtaccattaataaatgggagtacactccggtgggagcttatgtgacagctgcctacgtccggagtttcttagagaatgaaaaagtgcctgccgaattgaaagtgttgcccgtcattggggtaaatcattttggtggtttacgtgccagtattccggcgggtgaggtcacaaggttgcgtgccggcaatgtgcttccattcggtggtaatgtggtggcttatgaatttacgggtgaacggttgaagcaattattggacgatggacgcaggaataaaaacggttttctgcaaacttcttatttaaaactacatttgaattcgaaaggaaatgttgaaacgataaccgactgccgtaccaataagataatccgtgatgacgataaatgtatcgttgtattggatgctttcatcacctcgggtggcgacggttatgacagcaaattattttcaggttatgaaataggagattttaatagtcagaatcttgaaacaactgtggcttttatcgattatttgaagagtctgaaagggtttgtttcctctgaggctgcgccgatacccatagtgcaaaag

SEQ ID NO: 12430 - DNA, 2568 bp, Bacteroides fragilis
gtgaccgatctgactgccaatcaggaactacagggaacgaggaaagagttgttggcacaattggtgactttggtcggtttgacttacgaacagtttacccgtacggtgctgcttgcccagaatgacttcgctactttcttgaaatcccgtgagtctgccaaagccgagttgctcgagaagctgaccggaacggagatatactcccgtatttccagtgaaatctatctgcgtagcaaaacagccgatgcagaactgaatcagctgaagagcaatgccactctgatcgaactgctttccgaagaggaaatcactcttctacggaccgaaaaagagagtctgaccaaccttcgtgaacagggaagcaaagcattgatagacctgaatgcacagctatcggtgctgcatactttgaaattgcagcaggagcagcgtgataagaaagtgcaggatatgcggctggatgaagaaaaaagtaagaagctccgggaagaatatacacgccagtccgactctctcattcgcttcaggggacagtgtgaagctgtgcaacccgatcttagccgggcacgtgaactggatgttcagatccaatcactggtcagccaatctaagcaggtagaggagatactgcaaggtgctgaaaaggcagcgaatgcacaagccaataaattgcaatctgtgcagggagccctgcatacttcctgccattcgttgaagaatctgacgggagagatcgagctaccggttacggaagagaccgggctatttcttgaatctgtccggaacaggctgaaagagcaggaagaccaacttgccattcttcaggaaaagaacgaagcgcgtgtgaaccgtctgaatgcttttggggttgaagcggtgactgacgagcaagcccgatggatgcaggaacaaacccgtttgcagaatgcccgccagcagatgttggaatggagaaaagcggggacagaggccgaacgtctgaaagcacaacaggaagagatggggcacaaacaagaacagatgcggaaagagataacccttctgaccacccggttgtcagagaaggaggctgaactgaaagtgctgcaacgcctttttgagaatgcccgtatcgcgatggggaaagacgttcggaccttgcggcagaatttgcgtgagaatgaaccgtgtccggtatgtgggggcactgaccatccttataggaatgaggaacaggtagtccatagtctgtatcagaacatcgaacaggaatatcaaaccgcatctgctgagtatcagcaactaaataaccggaatattgccttgaaacaggatttgtttcatctgtcggaattgtccggagagataaccgtacagttgcaggcgttcctccaagaggctgagcagaaacgtccttcgtctgaagaggagcaaaatccggactattttgagaaacaattgcataccgtgcaagggaagctaaatctgctcgcggagaaaatgtaccaataccatcagctctacaaggaatggcaacagcatgaggggcagatcaggacggttcgctcggcttgtgaggctttgcgcgaaggggtggcccgttgccatctgttgatgcagcaagttctggctgctaaagagcaatttgaactactgaaaacggcggaaacgactgctcgggagcagttccgagtggtcagtgaacagttgataactctccgtcaggaacgggctcctttgttgaaaggcaaatctgtcgaggatgcggaagccgctattcggaaaaaagagaaacaattaaacgattccgtggaacaggtgcgcaaggagggagaagaagtccagtcgcgtatttccggtatgcagggagagatcaggcaactgaacagctccatcgacgaattgatgctccggaaagaacagatagccgatccggaacatttgccggagacgatcgcccgccagcaagccaccaatcaggagaccgaacggcgtctgtcgaccgtcgaagcacgtcttttgcaacaggagcaaaaccggaagaagctgaagcaactggagcaggaactgaccgaaaaacaggagatagccaaccgatggggaaaactcaataaactgattggcagtgcggacgggacaaagttcaaggtgattgcccaaagctatacgttgaatctgttgctgatgcatgccaacaagcacctgtcttatctatcgaaacgttaccggttgcagcaggtgccgggaacgctcgccctgcaagtgatcgactgcgatatgtgtgacgaggtgcgtaccgtctattctctttccggcggagaatcttttctgatctccctggcgttggctcttggcctgtcgtctctttcgagcaataacctgaaagtggagtcacttttcatcgacgaaggtttcggttcgctcgatgccgacagtttgcgcacggtgatggaagctctcgagcaattgcagatgcagggacggaagatcggagtcatttcccatgtacaggagatgagtgagcgcatcgccgtgcaagtgcaactccatcgcgcggcgaatgggaagagtgctatcactttgacaagt

SEQ ID NO: 12431 - DNA, 1404 bp, Bacteroides fragilis
atgattctacatacacaaactccggtagttgacgaaacagacggccttcctctcccgcaccgcatatgggcagttgtcggtatttcttttgccttatgcatgtcggtactcgatatcaacattatcaatgtggtactcccgacactttctcacgacttcggaacttctccggcagtcacgacctggattatcaacggctaccagcttgccattgtcatctctttgctttcattctcgtcactgggagaaatttatgggtaccgcaaaatatttctttcgggaatagctatgttcatcgtcacttccctgatctgcgctttgtcccattcattttggacattgaccattgcccgcattttccagggattcagtgcttcggccattaccagcgtcaacacggctcagttacgtacgatttacccccgaaaacaaatcggccggggaatggggatcaatgccatggtagtggccatatcggcagcagccggcccctcggtagccagcggaattctatctgtcgcttcctggcactggctattcgctatcaacgtccctctcggattagttgccctgactttgggattaaagtacctgccccgaaaagaggaacgttcgaacagaaaattcgataagctgagtgccatagccaatgcaatcaccttcggactcctgatttatactttggatggatttgcccaccacgaaaacaatgattatatagtgatacaacttgctgtattggcagttgtcggaacttattatgtgcgcagacagttgaaccaaccgtctcctctccttcccctcgacctgttgggaattcccattttcaggctttccattcttaccagtatctgttcgttcaccgctcaaatgctggcaatggtctctttacccttcttcctgcaaaactctttgggatacagcgaggtcatgaccgggctattgttaactctctggcctatagccacactggtgacagcaccggcagccggatatctggtggaacgcattcatcccggcatactgggcagcatcgggatggcattgttctgtatcggactttactctctgtctacattaacggcggattcatcggtcaccggcatcatcctgcgattgatgctttgtggtgcaggtttcggtcttttccagacaccgaacaacagtacaatcatctcttccgcccctacccgacgttcgggaggagccagcggaatgttgggtatggcacggctcttgggacagacattcggtacgacactggttgctttgctcttcagttttgtagtacacgagaagagtacggcggtctgtctgatagccggcagcggatttgcgtttgtcgcagcagtggtaagcagcatgcggctttcacaaccctccacattaaagacgaagccccga

SEQ ID NO: 12432 - DNA, 687 bp, Bacteroides fragilis
atgaacgattaccgtattttagtggtcgacgatgaagaagacctctgtgagattctgaagttcaatcttgagaacgaagggtatgaagtagatactgccaactctgcggaagaggccctgaaaatgaatatcagcagctatcacctgctgttattggatgtcatgatgggggaaatttccggattcaaaatggccaatctgctgaaaaaggataaaaagacagcgcaggttcccattatattcatcactgccaaagatacggaaaatgacaccgtcaccggattcaacctgggagcggacgactatatttcaaagcccttctccttgcgtgaggtcattgcccgtgtaaaggccgtgctccggcgtactgctacctccgatacggaaaaagcacccgaacaactttgctaccagtctctggtgatcgatattaccaaaaagaaagtaagcatcgacggcgaagaagtacccctgaccaagaaagagttcgaaatcctcttcctgctgttacaaaacaagggacgcgtcttctcgcgcgaagatattctgagccggatctggagcgacgaagtctatgtactggaccgcaccatagacgtcaacatcacccggttacggaaaaagatcggtacctacggtaaacgtatcgtcacccgcctgggatacggttattgcttcgaaacggaa

SEQ ID NO: 12433 - DNA, 966 bp, Bacteroides fragilis
atgaatgatgaattagaaaaatatttcgcaggcaccctgtctgccaccgaaaaaacagaatttctgaataaactccgagataatccggaagctaaaaaagaattcgcacgcatgaaggcagtatgggctgtctccggactgatggcacaggaaggagaccctcaaaagactgtaaggggtatagcagagttcgataaacgtctgaaacgccgttctgtacatcgattccgtatagggttctttaaatatgcggctatgattgttttgcttatttccactacttggtttatcgctaactggtatacacaaaaagagcaaaaaaaacaatatacggagatcaatgttcccaaagggcaacgagtgaacatgacccttccggatggtacttccgtatggttaagcccacagagcaaaatcaaaatccccaatgaattcaaccggaaaaaccgtatggtggaattgaacggtgaaggatatttcgaagttaccaagaatgccaagaaaccttttatcgtgaagacacagttgttcaatatacaggtattaggtacccggttcaacgtattcgcctatgcaggaaaagagagtaagtttgaaacctgcctcgtagaagggcgcgtattggtttataacaaaaataataaaaacgagaaagtctatctgaacccacacgaaaaagtatcgttagtaaacaaccgtatggtagtgtctacttccaacttcgacaatgaagaatacctgaagagtggtattttcagctttcgctcaaagcctttcggagaaatcctgagctatctgaccctatggtacaatgtgcaattcaattttaccggagacgtgaaactggacgaacgaatctcaggcaaaatccgacaaagcgaagatgtggataatatcctgatagccttgcagggagtatatccttttaaattcaaaaaaacagatgatgaacattatgagatttac

SEQ ID NO: 12434 - DNA, 300 bp, Bacteroides fragilis
atgcctccagctgccagattaactgatatgcactcttgtcccatgcagactcctgcatggccgtcgcctattccgcatgtgggtgggccgattattgggcccggtgcccctaccgtactgataggtaaactgcctgctgccgtgatgggcgatagttgcgtgtgtgtagggcctcctgattcgataatcaaaggatcggccactgtgatgatatgtggaaaacctgctgcccgtatgggggatacgactgcccatggcggttcgattattgccggttgcccgactgttcaaataggagga

SEQ ID NO: 12435 - DNA, 1338 bp, Bacteroides fragilis
atgaacgaagaatacattgacaacgtaaaagaacttatcgaagaaaaagatgccgataaggtaaaagagcttcttatcgacctacaccctgctgacatagcggaattgtgtaacgagttgaacccggaagaagcccgcttcgtctaccgattacttgataatgaaacagctgcggatgtacttgtcgaaatggatgaagacgttcgtaaagagtttctcgacatcctgccatcagaaactattgccaaacgcttcgttgactatatggatacggacgacgcagtagacctgatgcgtgaactggatgaggataaacaggaagaaatactttcgcacattgaagacatcgagcaggcaggagacattgtcgacctgctgaagtatgatgaaaatactgccggtggtttgatgggtacggaaatggtaaccgtcaacgaaaactggagtatgcccgaatgtctgaaagagatgcgccaacaagccgaagaactcgacgatatctactatgtatatgtaatagatgatgatgaacgccttcgcggaatatttccactgaaaaagatgatcacatctccctctgtatctaaagtaaaacatgtaatgcagaaggatcctatctcagtacacgtagacacccctatcgatgaagtggcacaaattattgagaaatatgacttggttgccattcctgttcttgacagtataggccgattagtaggacaaatcaccgtagatgacgtcatggacgaagttcgtgaacaatcagaacgtgactaccagttagcatccggtctttctcaagatgtagaaacagacgataatgtactccgccagactactgcccgcttaccttggttgttaatcggtatgattggaggtattggcaactctatgatattggggaactttgattctacttttgccgcgcatcccgaaatggccctttacattccattgattggtggtacaggcggaaacgtaggaactcaatcgtcagctctcatcgtacaaggcttggccaacagttcccttgacgccaaaaatactttcaagcaagtcagcaaagaagccgtagttgccttgatcaatgctacgatcatctctttattggtatatacctataattttatccgcttcggagcaaccgccacagtcacttattcggtatctatcagtctgttctcagtagtgatgtttgcctccatcttcggtactttggttccaatgacactcgaaaagatgaaaatagatccggccatagctacaggaccgtttattgccattacgaacgatatcatcggcatgatgatgtatatggggattacggtgttattatcg

SEQ ID NO: 12436 - DNA, 1908 bp, Bacteroides fragilis
atgctacgcataaaaagattagatatttttataataaagagttttttattactctttgtcggtacatttttcatctgcctcttcatcttcatgatgcagtttttgtggaagtatgtagacgaattggtgggaaaagggttggagatgagtgtactggctcaattcttcttttattctgcgttgagtctggtaccgatgtcactacccttggcagtgttgttggcttctttgataacgtttggtaattttggtgaacgttttgagttgcttgccatgaaagcggcggggatttcattacttaaaatcatgcgcccgcttattgttctcgtctttgccatttgttgtgtatccttttatttccagaacgtcatcggtccgcaggcgcaagccaagttgggaaccctgcttatttcgatgaagcagaaatctcctgaagttgatattcccgaaggagttttctatgatgaaatagatggttataacctgaaagtacaaaggaaagaccgtaaaacgggtatgctttatgatgtgatcatttatgatttctccaacaactttgataatgctcgcattatagttgctgattcgggacgtttggaaatgaccgctgataaacagcatctctacttgcatctgtacagcggcgagatgtttgagaatctgaaagcacagagcatgagttcgaagaatgttccttaccgtcgtgagtctttccgggaaaagcattcgattattcagttcgactcagattttaatatggctgatgccagcatcatgagcaatcagtccactaccaaagatatgataaaaatacaggcatctatcgattctatgaccgtattggccgatagtatcggaagacagtattttgttgaagcaagtaagggaccctatcgtacagcagtcggattgacgaaagaagataccttgaaaatgcaggaagcgcagattcgtgactataatgtagatagtctgtttgaggctgctacgttgatgaataagcagaagattatagcatcagctgttgggcgtacagagaatctgtcgagtgactggggatttaagagctttacgatgacccagaatgacttcagtataaggaaacataaaatagaatggcaccggaagatcacgatttctctatcctgtcttttattctttttcattggtgcacctttgggagggattattcgtaaaggtggattgggaatgcctgttattgtttccgtacttacctttattatttactatataatagacaacacgggttataaaatggcccgtgatggaaagtggattgtgtggatggggatgtggatgagttctgccattctggctccgcttggatatttcctgacttataaatcgaataaagactccgttgtattgaatacggatgtatatatctcttggttcaaaagagtgtttggggtacgtagtgtccgacatctgtccaagaaggaagttattattcatgatccggattatcaacgtcttccgttcgatttgaatggcctttcagaggagtgtagggcttatatgcaaaagaaccgattggccaaggcacccaattattttagcctgtggatgtccggcgggcaagatcaggaaattatcgctataaacaaccgtatggaagcattggttgatgagatgtctaatacccgttcactgatactacttcagaagttggaaaaatatccgattatccctgtaaatgcgcatgtgcgcccattccataattattggcttaatatggcaataggaattgtgattcctatcggtctgttcttttatttccggatctgggcttttcgtatacgtctgaataaagacatggagcggattatcgcattgaaccgggatgtggaattgacaataaaagatattaataacgaaaacaagata

SEQ ID NO: 12437 - DNA, 966 bp, Bacteroides fragilis
atgcgcaaagtttactacatctataatccgcaaacgcagacttatgaccggatttatccgactgtccgacaacgggcgctgagcattctccgccgtctttttataggaatgggactgggagccggcagtttcatcattctgttactgattttcggttctccctcagagaaggagttgcggaaagaaaatagccaactcttggcgcaatataacgtactctctcgtcgtcttgacgaggcgatgggggtgcttcaggatatccagcagcgtgatgataacctctatagagtgatttttatggccgatcctgtttcaccggctattcgtcaggccggttatggtggtacgaaccgttacgaacaattgatggatatggctaactcaaagttggtgatcaacactacccaaaagatggatgtactgagcaaacagctttatatccagtccaagtcatttgacgatgtagtggcaatgtgtaaaaatcatgatcagatgctgaaatgtattcccgccatccagcctatatccaataaggaccttcggaagacagcatccggttatgggacacggattgaccccatctacggaacaacgaaatttcatgccggcatggacttctcggcgcatccgggtacggacgtgtatgccacgggtgatggtacggttgtgaaaatgggatgggagaccggttatggcaatactgtcgagattgaccatggcttcggatatcgtacccgctacgcccatttacaggagtttcgtactaaactgggtaaaaaggtcgtgcgtggtgaagttatagccggggtaggaagtacgggaaagagtaccggcccgcatttgcattacgaagtgcacgtcaaaggacaggtggtcaatccggtgaactattactttatggatttgagtgcggaagattatgaacggatgattcagattgccgccaaccacggtaaagtatttgac

SEQ ID NO: 12438 - DNA, 1140 bp, Bacteroides fragilis
atgaatttatatttaaaacacaccttattttatctattaggtatatcttacgctttgatatcttcagcacagtctaatccggataaactacaatgtaaagtgacaggacgcatgcttctggatggcggtgtttatctcaagaatgataataattttggtaatggagttgaattcagtgatcttcggataggtgcaaaagtcgcatatcaaaattgggatatgaaacttgaaataggctataccgacaataaagcgacaataaaagatgcttttgcaaagtacacatacaagaaccactctatacaagtcggacaattctacgaaccgtttagtttagaaatgatgtgcagcactttcgacattcgctttaatcaatctccaggagctgttcttgcattaacaaacggcaggcgaatgggaatcacttatagttaccgaaacaaacgtcattatatgtcaggaggggcattcatggataatgaagtcaacaacctaaaaaaagcgtcacatggatatgctttggatggcagggtagtatatcgtccggttttagatagcaagaagcttattcatataggttttgcggccaattaccgtacccctaacgaatccttaaatgaagaagataaaaacatatttatctataaatctcctggtgtgagtacgattgataaccgaaatattgcaatggctactattgatcatgcagcgtatcagataaaatttggcacagaattactggtttattatcaccgtttctgcctgcaaagtgaatatatacgtactcatgtggaacgagacaatgcttttaagaactatgtggcacaaggagcctaccttcagtgctcttggcttttatccggagaaacttatctgtacgatgaatctgttgcatgtgccggtcgtccggaaggaaaaagtctggaggtttgttcacgatttaactatttgacactcaacgatgaggatgccgccatttggggaggagaacaaaaagatatctccatcggactcaactattatattaataaatatataggtataaaattaaactatagctatctgatgcccggagccagtataaaagagatcagccgtaaaaactttagtgtttttcaaggacgatttcaattcattttt

SEQ ID NO: 12439 - DNA, 1338 bp, Bacteroides fragilis
atgagtgccctcgtccgctattttctttctaaaggaaaagtagtggcaggctatgaccgtactcccagtgaactgactcaacatcttatagaagaaggagcacagatccattacgaagagaatatcgatctcataccggaggcttgcaaagacaaagctaccacattggtagtcctgacccctgccgtacctcaggaacatgccgaattaacttacttccgtgataatggattcgaaatacagaaacgtgcacaagtactgggcaccattacccgttccagcaaaggactttgtgtagccggcacacatggtaaaaccactacctcaacgatgacagctcacttgtttcatcagtcacatgtaggttgtactgcttttctgggaggtatttccaaaaattacggaacaaatctgctactctcttcaaccagcccttatacggtgattgaagcagacgaatttgaccgttcattccattggttgtctccttatatgtctgtcattaccgcaaccgatccggatcatctggatatttatggcaccgaacaggcttatctggaaagctttgaacactacaccacactgattcagcccggaggagcactgattatccgcaaaggcatttccctacagccgaaagtgaaagagggagtgaaaatgtatacttactcacgtgacgagggagactttcatgctgagaacattcgcatcggaaacggagaaatcttcattgacttcgtagggcctgacattcgtatcgacaacattcagctaggagtaccggtaagtataaatatagagaatggtgtcgctgcgatggcgcttgcccaccttaacggagtcacacctgaagagatcaaacagggaatggccagtttccggggtgtggaccgccggttcgactttaaaatcaagaataaccggattgtattcctgagtgactacgcacatcatccatccgagattaaacaaagcgtgatgtccatgcgtgagttgtaccgggacaaaaagatcactgcggtttttcagccacacctctatacccgtacccgcgacttctacaaagattttgccgacagtctgtctttactcgatgaagtgatactggtagatatctatccggcgcgcgagcaacctattccgggagtaagcagccggctgatatatgacaacctacgtccgggtattgaaaaaagcatgtgcaagaaagaagaaatactcgatgtactgaaagcaaaacatatcgaagtattaattacattgggagcaggagacatagacaactatgttccgggtatttgtgacttattgtcccgaagaatggttccttcggacaat

SEQ ID NO: 12440 - DNA, 189 bp, Bacteroides fragilis
atgccaaagatgaagactaactccggttctaaaaaaaggtttgcccttaccggaacaggtaaaatcaaaagaaagcacgcttttcacagtcacattttgactaaaaagtctaagaaaagaaaaagaaacctgtgctactctacaactgttgatacaacaaatgtaagccaggttaaggaactcttagct

SEQ ID NO: 12441 - DNA, 2121 bp, Bacteroides fragilis
atggaaatttttcacaaaatgatttcggcagcactcaacctgccggaaaagcagatcagtaatactctcgggctgttagccgagggagccactatccctttcatcagccgctaccgtaaagaaatcaccggcggactcgacgaagtgcagatagaatctatcaaaacgcagtacgataaactctcagaactcgccaaacgcaaagagaccattctcggcaccatcggcgagcaaggcaaactgacgcctgagttgcggcaacgcatcgatgccacctgggatgccaccgctcttgaagatatctacctgccctacaagcctaaacgcaagacccgcgccgaagccgcccgccagaaaggactcgaacctctggctctgctactgatgatgcagcgcgagaacaacctgggctcccgtattcctgcgttcgtcaaaggcgatgtcaaagacgcagaggatgctctgaaaggtgcccgcgacattatcgccgagcaggtgagcgaagacgaacgtgcccgtaatgcagtgcgtaatctctttgcccgccaggctgtcatcagcgctaaagtagtgaagggtaaagacgaagaggccgccaaataccgggactatttcgacttctcttctcccttgaaacgctgcacctcccatcgcctgctggccatccgccgtgccgaggccgaaggtttgctgaaagtcagcattacccccgacgatgacgaatgcctcgaacggctcgaccgccagtttgtccgtagcaataacgaatgtggccgccaggtggcagaggccgtacaggatgcctaccgccgtctgctgaaaccttccatcgaaaccgaatttgcctccctcagtaaagaacaggccgatgacgaagcgatccgggtctttgccgaaaacctacgccaactgcttcttgccccacccttgggacaaaaacgggtaatgggtatcgatcccggctttcgtaccggttgtaaggtggtctgcctcgatgcacaaggcaatctggtacacaatgaaaacatctatcctcacccgccggtagacaagaaaaccgaagcggcttcgaaactccgcaaaatgattgaagcttacaagatagaggccatcgccatcggtaacggaactgccagccgcgaaacggaaaacttcgtcacgcaccaacagttcgaccgtcccgtacaggtgtttgttgtaagtgaacagggtgcttccatctactcggcctccaaaacggcccgtgacgagtttcccgattatgatgtcaccgtccgtggggccgtctccatcgctcgccggctgatggatccgctggcggaactggtcaagatcgatcctaagtccatcggtgtcggccaataccagcatgatgtagaccagaccaaattgaaaaaatcactcgaccagacagtggagaactgtgtcaaccaggtaggtgtcaatctcaacacagccagcagtcatctgctcacctacatttccggtctgggtccgcaactggcacagaacattgtagcctaccgcgctgccaacggcgcctttgcctcacgtaaagagttgatgaaagtaccccgcatgggagctaaagcttttgaacaatgcgccggattcctccgtatcgccggaggagaaaatccgttggacaacaccgctgtgcatcccgaaagttatgggatcgtgcaacagatggccaaagatctgtcatgtactgttcctcaactgattgccgacaaatcgttgcgtacccgtatcgaaatggaaaagtatatcacccccaccgtaggactccctaccttgaaggatattctgcaagaactcgacaaaccgggacgcgacccacgcgataccattcaggtatttgagttcgaccgtaacgtgcgcaccatcaacgacctccgcgaagggatgactctacccggtattgtcagcaacatcaccaacttcggagcttttgtcgatataggcatcaaggagaacgggcttgtccatctctcccagcttgccaaccgattcatcaccgatcccaccgaagtggtctccattcaccaacacgtcacggtgaaagtactgagcatagacctcgaacggaaacggatacagttgacgatgaaggaggag

SEQ ID NO: 12442 - DNA, 1230 bp, Bacteroides fragilis
atggttttaaattacatctggatcgcattcttcgtgattgctttcgtagttgccgtctgcaaacttttgttcttcggcgatacccaaatattcacagagatcatcaactccaccttcgattcatctaaaacggcattcgaaatctctctcggcctgacaggtgtgttgtcgctttggctcggtgtaatgaagattggcgagaacagcggcctgattaatgccctttcacgctggctgagtccggtcttctgccgcttgtttccggacattccgaaaggacatccggtcatgggatctattttcatgaatatgtccgccaatatgctggggcttgacaatgctgccactcccatgggactgaaagctatgaaggaactgcaagaactgaatccgaaaaaagacactgccagcaacccgatgattatgttcctggtgattaacacttcgggactgatcattatcccgatcagcatcatggtctaccgggctcaaatgggagcggcccaacctacagacatcttcatccctatcctgctaagcaccttcatttctacactcgtaggagtcattgccgtcagcatctcccaacgcattaacctgataaacaaagctatattgacactaatgggttgcctgagccttttcttcggcggaattatctatctgacaactacactttcccgtgaagagatgggagtttattccactctgattgctaatgtaatcttattctcggtcattttactgttcattatagcaggtatccggaaaaaaatcaatgtgtacgactcctttgtcgaaggagccaaagagggattcaccactgcggtccggatcatcccctatctagtggcttttctcgttggaatcgctgttttccgcacttcgggtgccatggatatactggtcggcggcattggggcaatcgtagaattttgcggactggacaccggctttgtgggagcactgccaacggccttaatgaagtcactgagcggcagcggtgccaatggcctgatgatcgacaccatgaaacagtttggacccgattcatttgtcggacgtgtcagttgtgtcgttcgcggtgcatcggacaccaccttctatattttagcagtatattttggaagcgtaggcatcacaaaaacacgtaatgcggtcacgtgcggactgattgccgactttgccggaattattgcagccattttaatcagttacttatttttcttt

SEQ ID NO: 12443 - DNA, 1128 bp, Bacteroides fragilis
atgaaaaagatattacttgttttcggtacccgtcctgaggccattaagatggccccgttggtgaaagctttgcaaagagatactgaacactttgaaacgaaagtgtgtgtgacggcacaacatcgtcagatgttggaccaggtacttgaagtgttcgacatcattcctgactacgatctgaatattatggcacccaaccaggacttgtacgacatcaccactaaagttcttctgggcctgcgcgatgtgctgaaagatttctgtccggatacggtgctggtacacggagataccactacgtcgatggccgcttcactggctgcattctatcggcaggttgccgtgggacatgttgaggccggtttgcgtacctatgatatgctgtctccctggccggaagagatgaatcgtcaggtgaccgaccgtatttgtacctactattttgctcctaccgggaaatcgaaacagaatctgttacaggaaaacatcgatgcaaagaagatatttgttaccggtaatacggttatcgatgctttgttgatggctgttgacattatttcgaagaagccgggaatcaaagaaaagttgcatcaggaacttcgtgacaaaggttacgaagtgggacaacgtgaatatattctggttaccgggcatcgtcgtgagaactttggggaaggatttttacatatttgtaaagcgattagagaattagccgcgttgcatcccgagatggatattgtatatccggtacatctgaacccaaatgtacagaaacccgtatacgaacttctgtcaggagtagacaatgtatatcttatttcgccgttggattatctgccgtttatttacgctatgcagcactccactttgctgctgaccgatagcggtggagtacaagaggaggctccttcacttggcaagccggtgttggtgatgcgaaataccacggaacgtcctgaagcagtagaggcgggaactgtaaaactggtggggacggatgctgaggcgattgtcagtaatgtgactgagctgctccgtaataaggagttataccgtcgtatgtccgaaacacataatccttatggtgacgggcatgcttgtgaacgcatcctgtcggcattaacccgt

SEQ ID NO: 12444 - DNA, 456 bp, Bacteroides fragilis
atgaacatcttgtacacgtatcccgaaacaatcgttgacggagaaggtatccgctattcgatctatctggcaggatgcaggcacggctgtccgggttgtcataacccggaaagctggaacccacaagccggtgaggaactatccgaaggacggttggcttccatcatccgcgaaataaactcgaacccgttgctcgacggagtgactttctccgggggcgatcctttttatgatccggaagcatttttgcctgtcatccggagagtaaaaacagaaacgggacagaatatctggtgctacacaggatatacttacgaggaaatagaatcggatccgaaactggcagccatattgccctacatagatgtactggtggacgggcgcttcaaacaggaactttattcaccgcatctggaattcagaggaagcagtaatcagcggattatcaaactgaaa

SEQ ID NO: 12445 - DNA, 1539 bp, Bacteroides fragilis
atggcacaagaagatgtttttaagaagttagtatcacattgcaaagaatacggttttgtgttcccctcaagcgatatctacgacggactgggcgcggtgtatgactacggacagatgggtgttgaactgaaaaacaatattaaaaaatactggtgggacagcatggtgttgctgcacgaaaacattgtcggtattgactctgcaatctttatgcaccctaccatctggaaggcttccggacatgtggatgcatttaacgatccgttgattgataataaagactctaaaaaacgctaccgtgccgatgtgctgattgaagatcaattggctaagtacgatgataagattaataaagaggtggccaaagctgccaaaagatttggtgaagcttttgacgaagctcagttccgcagcaccaatgggcgtgttcttgagcatcaggcaaagcgtgatgcattgcacgaacgtttcgcaaaagcgctgaacgataacaatctggaagagctccgtcagatcattgttgacgaagaaatagcttgcccgatttccggtactaagaattggacagaagttcgtcagttcaatctgatgttctctaccgatatgggttctactgccgatggttcgatgaaaatctatcttcgtccggagacggcacagggtatctttgtcaattatctgaacgtacagaagaccggccgcatgaaagttcctttcggtatcgctcagatcggtaaagctttccgtaacgagattgtagcccgtcagttcatcttccgtatgcgtgagttcgaacagatggagatgcagttctttgttcgtccgggcagcgaattggaatatttcaagaaatggaaagaaattcgtttgaagtggcacaaggcactgggctttggtgacgatcattatcgtttccacgatcacgataaattggctcactatgcaaacgccgctactgacattgagttcttgatgccatttggtttcaaagaagtagaaggtattcactcccgtacgaatttcgacctttctcagcacgaaaaattttcgggaaagagcattaagtatttcgatccggaactgaacgaatcgtatactccgtacgtaatcgaaacgtcgatcggtgttgaccgtatgttcctcagtattatgtcggctgcttattgcgaagagcaactggaaaatggtgaaagccgcgttgtattgaaattgcctgctgcattggcaccggtgaaactggctgtaatgccgttggtaaagaaagacggactgcctgaaaaggctcgtgagatcattgacaatcttaagttccacttccattgccagtatgatgaaaaagacagtatcggtaaacgttaccgtcgtcaggacgccatcggtactccgtactgtgtgactgttgaccatcagacattggaagacaactgtgtgacattacgtaaccgcgacactatggagcaggaacgtgtggcaatctctgaattgaataatatcattgccgaccgggtaagtattacctcgttgttgaaaacaatccaa

SEQ ID NO: 12446 - DNA, 492 bp, Bacteroides fragilis
atggcaacagcatatcataacttatcagattacgattttaattcagttccgaatgcagaagaaatgaaattcggtatcgttgtttccgaatggaacgctaacatcaccggtgccctgctggacggagcagtgaaaactttgaagaaacatggagccaaagaagaaaatatcctggtaaagacagtacccggaagtttcgaacttaccttcggcgctaatcagatgatggaaaatagcgatatagatgcaattattatcattggttgcgtaattaaaggagatactccacattttgattatgtttgcatgggagtgacacaaggcgtagcgcaactgaacgcaactggcgatataccagttatttacggattaattaccaccaacactatggagcaggcagaagacagagccggcggcaaactgggtaataaaggagacgaatgtgcaattactgcaataaaaatgatcgattttgtttggagtttaaataaa

SEQ ID NO: 12447 - DNA, 2319 bp, Bacteroides fragilis
gtgggttttcgtaaaaacaatacggagctgcaaaggcgcaagctgctacaagagaatattttgaacagcataccgcttcccattcatataaaagatgtggaagatgattttcgttatgtcttctgcaatgaagaaagcatgcggatgttcggcacccatgagggtgaaaccgtatgtagcgttctggatagcgaacaggcggaacgtatgcagaaaacagatctggaagtcttcactaccggaaagccttattttggggtagaaagaatcatattgaaagacggacgcagctatgataccatcgtgcgcaagaatatcatctatgatggcaccaagcgtctgttgcttaatatccgctgggatcagaaattgcagaatgatcttaagcgccgtgctaaagtgctctctatgtcaatggaagtaatgaacgcttatacctggttttacgagccgtcaaaacaaagggtaagctttggtgaaggatttgataagatcgggcgtaatgctttggaaatcaactcgtttgaaaagtttgcagagtgtgtgcaccctgatgatcggcaacggtttgtcgatacaatggatgcggtgctcaaacaggatagcggcgaatgggatatagaatatcgtgctgatctgagaggaaacagaaactatgaatggtggaaaacccgcggagtacttgaaacctccatactcaatgatcatccttatcagtatgtttccggaatgtcaatcagcatcgaatcctacaaacagacagagttgactctactgaaaaataaagaaaagctgaataaacttatccgacagaatgaactggtattgaataatactaattcggggttggcctatatcacgacagattatgtagtacaatgggaaaatgtgtctgtctgttcatccagcctctcttttgaggcttataaaagaggagaatgctgttataaaagtgctcataatcggacttctccttgtgacaactgtgtgctaagcaaagtattggtatcaagacagatggaaaagatcaagtttcatctggagaataaccggattgtagaagtgctggctactcctgtatttaatgaaagtgaagagatcgacggtattgtcattcgtgtggatgatattactgacagggagaggatgattgaggagttgagacaggcgaaattgttggccgaacaatcggataagctcaagtcggcctttcttgccaatatgagtcacgaaatccgtactccactaaatgctattgtcggcttctctgacctattgatgaattcggaagaacagggtgataaagaagaatacatgcagattatcaataccaataacgaattgctgctgaaacttattaatgatattctggatttgtcgaagttggagtccggttcggtggagctgaaatatgaggaatttgatctggcagaatatttcgatagtatggcatcttcaatgaagcaacgggtgacaaatcctaaagtgcagttggtcgcagtgaatccttatagtgtgtgccgggtgagacttgacaaaaatcgggttgcacaagtggtgactaattatgtaactaatgccatcaaatatacgccgcagggaactatcgagatgggatacgaggtggtagacgccggaatccgtctttatgtaagggataccggtatcggtataccggaggagaaaaagagaaaagtctttcatcggtttgagaaattggatgaatttgcacaaggcaccggtcttggactctctatatgtaaggctattaccgaatcgatgggaggaagtgtcggttttgaatcggaatatagccggggatctcttttctgggctgttctaccttgcgatccggaggtacaaatgcgtcgggagtccaatatcgccattggacagaatgcgggtaaagatgatctgatacgtagcggaaatcagcattcggctttggatagaaaaacagtcttggttgtagaagatatttcaagtaattatctgctgatatcggctatgttgtccaaacattataatttgcttcacgctgtgaatggggagcaggctgtagcgatggtaaaagagtataaaatagatctcttgttgatggatatgaaaatgccggtaatggacggactgacggcaacagctgagattaggaagtttgatacgaatattcctattgtagctcttacagcgcatgctttcgagtccgacaaggtagctgcgctgaaatccggttgcaatgattatctcgtgaagccggtggataaagcaagactaatgtctgtattgcgcaaatactgccacccttcaactcttgtttta

SEQ ID NO: 12448 - DNA, 1443 bp, Bacteroides fragilis
atgatagagttgactcaggaggaattgaagcagcatttcagtgagcccattttcggtcagatctcagagacggctgatgcgttgggattggagtgttatgtggtaggcggttatgtccgtgacatttttctgcaacgtccttctaaagatatagatgtagtagtggtggggagtggcattgcgatggccgaagcgttgggaaaacgtttgggacgcggtgcgcatgtctctgtttttaagaatttcggtacggcccaggtgaagtgtcacggtacggaggtggagtttgtaggtgcccggaaggagtcgtatcaacgggattcccgtaaaccgattgtggaggacgggacgttggaagacgatcagaatcgccgggactttacgatcaatgcactggctgtctgcctgaacaaagggcggtttggagaactggtcgatccgttcggcggcatgaatgatttgaaggagaagatcattcgtactcctctcgatccggacataacgttcagtgacgaccccttgcgcatgatgcgctgtatccgttttgctacccagctgaatttttacatcgatgatgatacatttgaatctctttgccgtaacagagaacggattgagatcatttcacgtgaacgcattgccgacgaattgaataagatcatgctttcacctataccttcgaagggttttatcgatctggacaggagcgggttgttggaattgatttttcctgaattagtggctttacagggagtagagacccggaacgggcgtgcccataaggataatttctatcatacgctggaagtgctcgacaatatcagcagagtgacggataacctttggctccgttggagtgctctgttgcatgacattgctaaaccggtgactaaacgttgggagccgaaagcgggatggaccttccataatcataatttcatcggtgaaaagatgattccgaatatcttccggaagatgaagttgccgatgaacgagaagatgaagtatgtacagaagatggtgagcctgcacatgcgtcccattgtgatagcggatgatgtggtgacggattcggctgtacggcgtctgctttttgaagccggagatgatatagacgatctgatgacgctttgtgaagcggatataacctcgaaaaatatggaacgtaaacagcgcttcctgaataattttcaattggtgaggcagaaattgaaagatctggaggaaaaagaccgtgtccgtaacttccagccacctgtgagtggggaagagattatggaggtgttcaatctgggaccttgcaggcaagtgggctcgttaaaaagtgctataaaggacgctattttggacggagtgattcccaatgaatacgaagccgcctatgcatttatgcttcaaaaagccgcaaaaatgggattgaaacccgtacaaaacaaagaggtt

SEQ ID NO: 12449 - DNA, 987 bp, Bacteroides fragilis
atgaagaattatattcagagaatcatccgtctgtttgccacctccgaccccgacccaaagctcaccggagagatccaccgatggctgctcgatcaggagcatgccggggaaaaggagacggcactgcacgatttatggaacgaaacggaaggaaaggtggacaaaactacctgggattctcttgcatcggtatataccaaagtcggagccaactccggggacagacatcagccacgtatccgtttcgcacattatgcggctgccatagcgttgctgatcgtatcagtttcggtcacttttcaaatgaccaaacagcactttgccgaagctccccttattgaaaacataacaccggacggacgactgagcagccttcgtcttccggacggcagcatagtacaaaccaactcgggcagtatcttgctctaccccgaaaagtttaaaggtgaaacccgcacagtttacctaatcggtgaggccaacttcaaagtaaagaaaaactccggtcagccattcattgtcagatcgggtaccatgtcggtgacagccttgggcactgagttcaatgtcgctgcttatccggaagagaacgaaatgattgcaactttgatccatggaaaaataaaagtggaatgcgacaatgggaaagagagttatatcgtcactcccggacaacaggtcacttatcgtaaaagtacgggagaaagccggctcgccgaagcaaacatcgaagacgtaacagcttggcaaaaagggatgtacgtattcagaggcgtcaccatgtcagaaatcctgaacgagctggaaagacgctatgcagtcaccttccagtataacgccaatttatttaatgatgataaattcaacttccgttttcgtgaaaaatccactttggaagatatcctgaacattatgcaggaagttgtgggaggattcagtcatgaactgaagggaaatatatgttatataaaaccggagacaaaaaaa

SEQ ID NO: 12450 - DNA, 1697 bp, Bacteroides fragilis
cccgaaaacgaagcattcattattgacgataaacattatacttatgcccaactcggtgaaataacagcttctatcacccattcgctatcagaaataaaagatgaaaaaatcggaatcgtagcggaaaaccggattgaaacctatgctgctattctggcagtactagccggcggaaagacctatgttatcctgcatcctgcctacccggaagagcgtaatctcaaaatagccgctctggccggactgcgtactttgctctgtacaagtgacactgaccggtcagcattcggcaccggacacttcagaatcatcgatacggaccggctaccgggaaaaacactgtcagaacagcagtcccattcatcggacgaagaaaggaacgcttatatcatttttacatcgggaagcacaggcgagcccaaaggagtgcccatcacacgggctaacttgaacgccttttaccgggcatacagttcgctcgactggaatctggatgaacatgatcgcatgttgcaaatgttcgaacttacattcgatgtatccgtagtatctttactgtatcctcttactttaggtgctgccgtttatacggtaggccatcaggatgtaaagcacttcaaggtgtttgaacttctggagaagtatcaactgacctttgccactgtcactccctcactgctacaactcctttcaccctacttcgacgaaatcaatctgccctctctgaaatatctgggagtatcggcagaagcatcgcaaaccgagctgttggagcgattcagaaaatcggcacccaacgcaacgttcatcaacctatacggaccgaccgaagctacgatttactgcacctgttaccgtattccggcttcggacaaatgcaagcattacaacggaatggtggctatcggaaaaccatttcccggcatccgcgccatcattgccgacgaagaaggaaacgagctacctcaaggagagacgggagaactttgggtatccggccggcaggtaatgaaaggttatctggacgacccggaaaaatcggcattggttctgatacaccgtcccgacggacaaatctattaccggaccggagacttgtgtattctggatggcgacggggatattatttattgcggacgtaaagactatcaggtgaaaatacagggtttcaggatagaactgagtgaaatagaatatactgcccagtcgtttttcaagactccctgcagcgtggctgccgttccgttgctctgcgacggaatctgtaacgaattacatctggccgtcgagacaactgaatgtacccaaagcgcattgatagaatatctgaaagaaaagctgcccaaatacatgctgccgaagcagattcattgtatttcccaatttccggtgaccaatagtaataaaacagaccgtaaaaagattgccgaactgataaaagagaagaaactctaaaaacaataataaatatgaatcgagaagaagtattaaaacaactacaaagcattttccgtgatatcttaaaaaaggacaacgtatgtatcgacgaatcatctacctcaaaagatgtagatggctgggactcgctaacccacatgcaaattatagctcaaatcgagaaacatttcggagtacgtttcaatttcagggaggtcattaagttcaagaatgtcggcgatttgtgcagtgccttatta

SEQ ID NO: 12451 - DNA, 1047 bp, Bacteroides fragilis
gtgaaaatcattaattttgaggctttaaactccaaaagcataattatgaaaagaaactctatgttcatactgtcagctttcatcctgttttctgctttctcctgcggaacaaacggcagcaagaccacttcgaccgacatcaccgagaaaaaggtaattgtccaagtgccccaatttgacgcagacagtgcttacaagtacatacaggcgcaagtcgatttcggaccgcgcacaccaaattctaaaggtcatgttgcctgtggagactacctggccgccaaactggccgaacatggagccaaagtgatcagccaaaacgctgaattacccgcatacgacggtacactgctgaaagcacgcaacatcataggatcttttaagcccgaaagcaaaaaacgcatcgcactctttgcgcattgggatacccgtccatgggccgacaatgatccgaatgaaaagaatcatcacacaccgatactgggcgccaatgatggagcaagcggagtgggtgtattactcgaaattgcccgccagatcaatcaacagcaaccggaactgggaatcgacatcatctttctggatgcggaagattacggagcacctcagttttatacaggcgaacatcgggaagaccagtggtgtctcggcgcacaatattgggcacgaaccccgcacgtagatggctataatgcccgcttcggaattttactcgatatggtgggcggcaaagatgctactttctttaaagaagtatattccgagaaatatgccaaaggtatcaacaagaaggtatggaaaaaggctaacgacgccggatacggacgttactttattaacgaagtaggcggtcagatcactgacgatcatctgtttatcaatcgcttggcaggtatcccgactatcgacatcattccaaacgacgaaaattgtgaactgtccagcttcggaccgacctggcacaccgtgaatgacaatatggatgccatcgaccgctctacactcaaagctgtgggacaaacggtactggaagttatttataacgagaaa

SEQ ID NO: 12452 - DNA, 588 bp, Bacteroides fragilis
atgagatcaattgaagtaaaaggaactgcaagaacaattgcagaacgctcttctgaacaggcaagagctttgaaagaaattcgtaacaacggtggtgtaccttgcgtactttacggtggtgaagaagtagttcacttcacagtgaccaacgaaggacttcgtaatttggtttacactccgcatatttatgtagttgatttggttattgatggcaaaaaagtaaatgccattctgaaagatatccaattccacccggtaaaagatactatcctgcacgtagacttctatcagattgacgaagctaaacctattgtaatggaagtacctgtacagcttgaaggtcttgctgaaggtgtgaaagccggtggtaaattggcattgcagatgcgtaaactgaaagtgaaagctttgtataatatcattccggagaaactgactattaatgtatctcacctgggtctcggtaagacagtaaaagttggcgaactaagctatgaaggtttagaattgctgaatgcaaaagaagctgttgtatgtgctgttaagttgactcgtgcagcaagaggtgcagctgctgcagccggaaaa

SEQ ID NO: 12453 - DNA, 1125 bp, Bacteroides fragilis
atggatagagaagaaagtgtacagcatttcctcgacttgataaaaaaatcccgtcgtggcaagtttaaggtttatatcggtatgattgccggtgtaggcaaatcgtaccggatgctccaggaagcacatgatctgattgataacggggtggatgtccggatcggatatattgagacacatggtcgtgccgggacggaagccctgttgaaaggtttacctgttatccggcgcaggaaactgttttataaggggaaagagctcgaggagatggatctggaagcgattatccgtattcatcccgaaattgtaattgtagacgaactggcacataccaatgtggaaggaagcttgaatgagaaacgttggcaagatgtgatgacactgcttgatgaagggattaacgtgatttcggcagtcaacattcagcacatcgagagtgtgaatgaagaggtgcaagatatcgcaggtattgaagtgaaggagcgtattcccgatagcgttcttcaagaggctgatgaggtcgtaaatattgatcttacggccgaagaactgataaccagacttaaagctggaaagatatataagccggaaaaaatacagactgcactcaataatttctttaagaccgagaatatcctgcaactccgtgaacttgcactgaaggaggttgccttgcgagtggaaaagaaagtagagaatgaggttgtgatgggtattggtttgggagttcgtcatgaaaagtttatggcgtgcatcagtagccaagagaagacgccccgccgtattataaggaaagtagcccgtttggctacccgatataatacctcgtttgtcgctctttacgtacaagttcccaaagaaagcatggaacgtatcgatttggccagccagagacatctgctgaatcattttaagttggtgactgagttgggtggggaagtcgtccaggtacagtcgaaagatatattaggcagcattgtgcaggtttgtaaggagaaacagatatccactgtttgcatgggttccccaggccttcgcctgccgggagcattgtgtagcgtgctgaaatatcgcagatttttaaataatctggcacaagcgaacatacgtttgattatacttgca

SEQ ID NO: 12454 - DNA, 1437 bp, Bacteroides fragilis
atgaatataaaaaccaaactacttttcggcattggaatattggccggaatgattattttactggtaacactttcagtagtaaaccttcagattctaacggccacggaacctgatagtccggttgccatgcctgctttggagcgtgcgctcttatggatctccgtaacaggtggcatttgtatcctcacgggtttggtcctgcttatctggctaccccgttctattaataggccggtaaaagaactgacttgtggtatcttggaaatagccaatcataattatgaaaagagattggatatgagaggatacgaagagttcagggaagtttcggatagttttaaccgcatggctgagaaactgacagagtatcgtgacagtacattggctgatattctttctgcaaaaaaattccttgaagccgttgttaacagtattcatgagccgattatcggcttaaataccgaacgggaaattctttttatcaataatgaagcattgaatgtactcaatatgaagcgtgagaatgtaatccggaagtccgccgaagaactttctctgaagaatgatttgcttcgcaggctgatacgtgagttggtgactcccggtgagaagaatgaacctttaaaaatctatgcggacaataaagaaagctatttccaagcctcgtatattccgattgagaatgcggcggcagaagaaggagaggctcgaaacctgggagacgttatcttgctgaaaaatattacagagttcaaagaactcgattctgcaaaaaccacttttatctctaccatctcccacgaactgaagactcctatttctgccataatgatgagtcttcaattgctggaggacaaaagagtgggctctttgaatggcgaacaagaacaattatcgaagaatataagggacaatagccagcgcttactcgatattaccggagagttactgaacatgacgcaggtggaagccggcaagcttcaaatgatgcctaaaattacgaaacctatcgaactgattgagtacgccatcaaggccaatcaggtacaggctgataagtttaatatacaaatagaagttgactatcctcaagagaagataccgaaactgtttgtagatagtgaaaaaatagcttgggtacttactaatcttttaagcaatgcgattcgctattcgaaagagaatggccgggtagtgattggcgtaaggcataaaaaagagtatatcgagctctatgtgcaagactttggcaaaggaatcgatccaagatatcaccaaagcatttttgatcgttatttccgtgtaccgggaactaaagttcagggtagcggtttgggattgtccatttcgaaagactttgtagaagcacatggagggacattgaccgtacagagcgaaccgggtaaggggagttgctttgtgataaggttgaaggca

SEQ ID NO: 12455 - DNA, 2289 bp, Bacteroides fragilis
atgaaacattatatagttatgcttgtgcttgcttgtgtaagcatgagttcgtatgcggtcaatccgattaaagaaggtaatatgattgccggacacgttattgtgaaaggcactgaagagggtatcccattcgcaacagtgatgattctgggaaccaaccgcggtgcggtgtccaatgaggaaggacaatttgaattccgtaaactggctgccggtaaatatacgctccgtgtacaggtgatggggtataaaacacaggaaaaaacaattacggtcagtgcagaggctacgtccgtggttcatttccaaatggaagaagtaagttttacgacagatgaagtggtggtttcggccaaccggaacgaggtgagccgaaaggcggcaccggtggtcgtaaacgtgatgagcgctaaactgtttgagacggtgaactctaccgatctggctaaatcgttgaacttccagtcgggtcttcgggtggagaacaattgccagaattgcggtttcccacaggtacgtatcaatggcttggaaggtccttattcgcaaatcctgattaacagccgtcctatcatcagtgctctctcgggagtgtacgggctggaacagattccggtaaacatgatcgaacgtgtggaagtggtacgcggtggtggttcggcgctgttcggtgccaatgccgtaggaggaacgatcaatattatcacgaaagacccgattaataattctttccaggtggcaagcacgatgtctaatatgaatggcaagtcgtgggagcaatatatgggaggaaacgtttctttggtggcaaaagacaattcgtacggcatcgccctgtacgagacctatcgtaaccggaatccttatgatgccgacggagacggtttttcggaactcggtaagctaaatatgaatacattcgggatgcgtgcttattatcgtcctaactattttagccgtatcaatgtggagtatcacacgacaaacgaattccggcggggaggaaataagttcaatttgcaaccccacgaggcggatattactgaacaaacgaaacatatcatcaatagtggaggagtgagttacgatcgttactggggcgagaagcataaaatgtccgtatacggttctgtccagcatacggatcgcaacagctattacggagcacagaaagacatgaatgcttatggtaagacaaacgatctgacttgggtagtgggaggtatgtatgtgggcaacatggaccgctgtctttttgctccggctacgtttaccggcggtgtagagtatcagagcaactcactacacgatgtgatgacgggatatcaccgcgacatgcagcaggatgtgcgtattgccggaggctttgtacagaacgaatggcggttgaaccgctggacgatgcttgtaggggcacgtctggacaagcataacctgatcgatcatccgatttttagcccgcgtgtgaatttcttatataaaccgagcgataatttgcaggcacgtctgacatactctaccggattccgggcaccacaagcatacgatgaagacttgcacgtaacggctgtggggggtgaaggagtacagatccggttggccgacggacttcgtgaagagtgctccaacagtttcagcggttcggtggattggtcgttcccgatggggcactggcagtcaaacattcttctcgaagggttttatacggatttacatcatgtatttgtgctcgaagatatcggtgaggaccaaaacggagataagataaaagagcgccggaacggcagcggggccaaagtatatggtgtcaatctggatgcaaaggtagcccacggacgcgaagcgcagttgcagttgggatttacggtgcagcgcagcagatataaccgggcggaagtatggaccagtgaaggagaagaagagcagactacgaaacgcatgccccgtacgccggactactacggttacttcacttttacgtcggcaccattaaagaatttcgatttctcgctttcgggtacttataccggtaagatgattgtgccgcacatggccggatacatcgagaagtcacgtatggagcacactccgcaattcatggatctcaacctgaaactgaattatacttttgtgctgaaagatcatatcaaaatgcaggtaaacggaggagtacagaatatatttaatagcttccagaaggatctggacaagggagaattccgggatgcaggttacttctacggaccgactcagccgaggacttattttgtggggataaagattatgaac

SEQ ID NO: 12456 - DNA, 1248 bp, Bacteroides fragilis
atgatattcagtcaacgcatctatttcatcatactgtttcacgtattgctgatactggtcacagcaggcaccggactatggttggtcgtgtcacatacgggatacatcatcggcggtatactgctgctctgttcgctgttccagatcggtgcattgacccggcagttgaatacgtttaaccggaaaatcagactgttcttcgacgccgtgcaggataaggataatatgctctactttccggaggcaaatgtcggcaaagagcaggcacagctgaaccgctccctcaaccggcttaacgacctccttgcccgcaccaaaggcgaaagtcacaaacaagaacatttctatcaatcactgctcgaggaggtgcctagcggcgtgcttgcctgggacgactcaggtagaatcattattgccaacagtgccgctttctcgctgctgaaatgcaaccgtctctataccgaaacccaattggcacaactgctgaatgcaaccggtatccgcaagagtctcagcatatcggagaaaaagatgattctggacggcgaaaccatcaccatcttgtccatcaaagacatcggcgacgaattgagcgataaggagaacgaatcatggagcaaactgacgcatgtgctgacgcatgaaatcatgaataccatcgcaccgatcctttcactctcacaaaccttgtccgaacgtccggatatcaacgaaaaatcggcccgcggactacggattatacaggctcagagcgaacggctgatggagtttacggagtcattccggcatctgtcctatctcccccatccggaaaaaaggcgcttcgcattgaccgagatgctccgcaatcttgaagaattgctgcaaagcgactttcgggaacgcggcatccggttcatgctgcaatgcgtgccggacccgatagaaacagatggtgatcccaatcaactgtcacaagtctttcttaatctgctgaaaaatgcgatgcaggcactcgagggacaggcggacggaagaatcattctccgtgtacggcgggcagaccgtctgcaggtcgagatagaagacaatggccccggcataccggaagagatacgggaacagatcttcattccgttcttcacaacgaaaacggaaggaagcggaatcgggctcagtctttgcaaacagatcatccggcaacatgacggacacttatccatccgggaaagccgtccgggacaaactattttcagtctcgatctgcct

SEQ ID NO: 12457 - DNA, 1029 bp, Bacteroides fragilis
atgggcgctgagctaacaggaaattggaattcttttttagagcgattttctccatcacaacaagatatttattatagagaagaatatttaaaattatatcaatctcttgacgaacaagcagtttgctttgtttataccgatgggaatttttgttttttatttccttatttacttcgctctttttattttgacggtgtctgttatcatgattttgaaacagcctatgggtatggggggcccattttcaatactgataataaagaattcatatcgaaagcttggaagagtttttactgttatggacaagaaaaccactatattgcaggatttgttcgttttcatcctttattaaataataccctttccttcgactccattggggtagttgttaaagatcgtaatacaatagccatcgatttgcaaaaggatatcgactctgtttggatggaggagatacacactaaaaatcgaaatataataaaaagaggtgctaaaacaggcttgagattcatagcagactatcagtatgagtatttagatgaatttatccgtctatataatagtacaatggataaattgagtgcagattctttttattattttgatgatagttattactatcaattgaaaaaaaatattcctgatagttttttaggagttgtattattagaggataaggtgatttcttcgtctatctttttctgttcgggagattatggtcattaccatttgtccggaagtgataaagagtcattgaaactttatcctaataactttatgctgtgggaagctgctaaagaaatgaaagcccatggtattctaaaatttcatttgggcggaggaacgaattctgatgaatacaattctctgtacgaatttaaaaagaaattctcaaagtcgttttattcttttcaaataggtaagattatttttaataagtacgtctatgataagatgtgtcggaactgggaattgaataatccgaataaaagtatgcattatattaatcatctattaaaatataaatat

SEQ ID NO: 12458 - DNA, 996 bp, Bacteroides fragilis
atgtctgacgcatacaaaatcatacacaactttatggccttcatagccagtccggaccttaaaaataaagtgtggacatggcttcttgatccttccggcaaacaacggaaagaagaagcgcttcttcagatatgggacgaatatcgtcctgaagcagatgccggtacccggcattctttacgtaagtttcaaaaaagagcagggctttcttctgcccggccggcctatctacatcggtgggcgcatatagcagctattcttcttatcccgttaatatctattataacagcctatatatatgtggaacatcacacgcaggaagtccgttttgtagaatgtatcgttcccaagggagagcaaaaacagatcacgttaccggatggttcgatcatcaccctgaattcgggatccgtatttctatatcctacgcaatttgccggcgatacccgctctgtatatctttccggagaagggcactttgcggtagcccctaataagaaacttccttttgtggtggcaactaaccatctggacatttgtgtactgggtactcagtttaatttgcaggcatatccttttgatagaaggacaattactacattggagtccggttctgttgctgtaagaaagaaaaaccagccgaacagttttattaccttagaacccaatcagcagcttgattacgaaaatcggagtggtagattcaacaaaacagatatagatgcttctgtttattcgggttggacaaagggagagatgaactttatttcccagtcactcagggaaatcctgagaacactggaaagaagctatgcagtatctattcagttatcgtctgatctgatggagtcgaatcggatcaattcggacctttatacaataaagtttaagcgtcgtgatgatattttccatgttttggatattgtaacaaaaacagtaggaggtatcacctataaagtggagaaggacgaatccatatctatttgtccattaaag

SEQ ID NO: 12459 - DNA, 847 bp, Bacteroides fragilis
cgggaaattcttattactgccttacattgatacacaaatagaatggaaaaagtcaataatgaaaaacggaaccgccgctgcttatcaaagtacctatgcttcacttgccaaatatatcggtaagaaagaggtgaaaatatcgcaagtgaaccaccgctttgtaacttgctacagagactttttatccaaaaatggggctacggaaaatacgatcggatactatttaaggaacttcagggcattgtataatctcgcggtaaaggacggcttggttcctccatgcgattatccgttcaaggaaatatgtaccaagccctgtaaaacagtaaaacgtgcattagatcgggaacagatggttaaattggcttgtctgtcattgcattccgatgcagagttaaaacgttcattggatctttttctttttggtttctatgcccagggaatggcttttgttgacattgcatatctgaagtggaaaaatataagtggtaatcggattatctatagaagacataaatcaaaacaattgatacaaatagtcattacaccccagatcaaatccattatagacgagcatgggaataatacgaacaatgcagaagagtatgtattctcggttatcaaaaacaatgcaaatgaatatactcagtatcgtacagctttaggacgtaccaacaggcacttaaaaataatctctgcgaaactgaagattgatcctccgttgactacgtacaccgcgcgccatacatgggcaacactggccagagaatacggggccccggtttcggcaatcagtgcgggattagggcataccaaagaagaaatgacacttgtctatcttaaggaa

SEQ ID NO: 12460 - DNA, 963 bp, Bacteroides fragilis
atgagtgaactgatagataaatattttgcaggagagatgacctgtgaagagaaaaaagatctcttcgaccggatagaaagtgatgaggctctgaagaaagaatttcttcggatgcaaaatgtagtggcgttgacccaaatactctcccgccaggatgattcggagaccagccgtaaagggaaacagcattttatgcaacttcttttccgtaaaagattaaagcgcgcgataacggtttctttgaaatatgctgctgttttcgcggtattagtggtaggaactttctatgctgcgaagctgtatttatctgaggaattcggaaaaagttataccatagttacggctcccaagggacagcgtgtaaaaatagaattacctgatggaaccattgcctggctaagcccctgtagtcgtcttcgttttgcggcctctttcaatgaaacggaccgtaaaatagagttggacggtgctacctattttgatgtggcaaagaatcccgagaagccatttgttgtttcggctaaaggttaccgtatccgagtacttggaactaaattcaatatatcggcttataaaaatagtaaagagtttgagaccgatcttgtggaaggttgcgtacatatctatgatccggcggatataaggaacgaagtgtttctacagcctaaagaaaaggcagtgttgtggggagaccggttgatgaagcgggagtctgactttgataatgaagaatatctgaagaacggagttgtcagttttctgtccgagccgttcgggagagtactgaatagtgtcgctttatggaatgatgtgaatattaaaatagaacgttcagtcaacgcgacgcagcggatctccggaaaattcaggcaaagtgattctttggagagtatattaaaagccttgcaaggcgctatgcctttcaagtataaaatagttagtgaagaagaaataattatttat

SEQ ID NO: 12461 - DNA, 693 bp, Bacteroides fragilis
atgaaaaacatccattcggtattagacagccaggaaaccgaagcctggcagaaactgatccgtgtactgacacacgaaatcatgaattccatcactccggtcacgtctttgtccgaattgctggaacatcagatcgaagactttgacggcaatgaagaagagcgggccgaaatacgccggatgttacaaaccatccgccggcggggcgacgggttaattcggtttgtcaacagttaccgggaagtgtctcacctgccacaacccctgctgaagatatatacatcacaagaattactgacaggtgtggtacggttgatgtacagagaaccgaatgacctgcacctgatatttccgcccaagggccaacgcctgatggcggacaaagatctgattgaacaagtgctgatcaacctgattaaaaacgcccgcgagaacgatgcgaccgacatccggatctcagccggattaagttccggagaacgcccctatataaggatagaagacaacgggacaggaatcgagcaagaggtgctcgaccgcatctttatcccgttcttcacgactaaacccaccggatcgggcatcggcctgaccatctcacgacagatcatgcatctgcaccgcggcaccatcaccgtttcatccgaaccggggaaaggcagtatcttcaccctcttgtttccgggcgtattc

SEQ ID NO: 12462 - DNA, 822 bp, Bacteroides fragilis
atgaatctactgagacctaagtatctgaaatacgtcgtattgggactgatatcagccctcgttgtcacctgttggccccgcaaagagaagcccaaaggacatccgcgggattatgccgagatcaaagaaagcggcattcttcatgctgcaacagaatacaactccatcagcttctatgtggatggagatacggtttcgggattccattacgaactgatagaggcgtttgcgcgcgacaaaggtttacaggtacaggtctctccggtgatgagcttcaatcaacggctggaagggctggccaacggaacgtatgatgtagtggcttatggcataccggctacgagtgaactgaaagactcgctgctcctcacctcccctatcattttaagcaaacaagtcctggtgcaacgcaaagtcggagaaaacgattcacttgccatcagaagccaactcgacctggcaggcaaaacattgaatgtcgtcaaaggatctccctccatcctgcgtatccgcaacctgagcaatgaaataggcgatacgatctatgttaacgaaatagagaaatatggttccgagcaactgatcgcaatggttgctcacggagacatcgattatgccgtatgtgacgagggcatcgcccggatggctgtggactcgctaccccaactcgatatcaataccgccatcagcttcacgcaattctattcatggggagtcagcaagcaatctcccgccctactcgacagcctgaatacatggctatccgacttccggaaaaaaggagaataccagtccgtttatcgcaaatattacgggaaacaa

SEQ ID NO: 12463 - DNA, 1317 bp, Bacteroides fragilis
atgaacaagcaactgattactattttttctatcttctcaattacttgtctgggaatggtttctgcccaggagtctaaatcttttcttcctgaggtgaagaaagagtcattaaccttcagttcggaggacaataagtttaaactgactttcaatgggcgcatccaggcagacggagctatgttctttggagaagactaccagcccataggcaacggtgtcggattcaggcgtgtacgtttgggagctactgctgcttttggcaaaaggctgtccggtaagatagaaatggatcttaccgacggtggcttttcattgaaggactgtttcattaaatatgctttcccgaatgggctttattttagggccggtaattttaaagagagttttggcatggctgcaatgacctcctcgggcgatttgtggttcatggaaaaggcgaacgtggtatctgcatttgctccggaatatcatatcggtgtacagggaacctgggaacatgaccagtttctgggagtagcgggtgtacattttaaaaagatagaaggtaacaaagagaaagactattccgaaagtaataataaagcgggggacgatgaaggaatatcggttacagcccgtgctgtctggcaaccggtttcggcagataaggtaaaaggttttcatttgggaatagccgcatcttatcgtactccgaagacaacagtcggttcgctgatgccgaatactgtgagatatagtacaagatcactgtcttatattaacaaaatcaagtttctggatacatcgccgattgcttctgtcagtcacgattggttggccggtgccgaactggccggattttacagaggttttcgctttcagggagagtatatcatgaacaatacggtgcgtatggaagggttggcaacagagaagttcaacggcttctatgtgcaggcggcttatcttttgttcggtgggcagcaacgatatagcaaatcgcgtggagccttctcgcagccatcgttcggacgcagttggggggatatagaattggcagcccgttttgaccgtatcgacctgaacggaacagaagtgatggggggatcgtccaacggatggacattcggagtgaattattatgctacccggaatcttaaatttcagctcaattattcatatgtagataatgataaatatgccaatgccttcggacaggcagcggtagggtataaatcgaacggagagattgcctataaacccgaggaagtagatgaattgttgggtaaaggagggaatgcttatggtattctggggcttcgtattcaattgaatttt

SEQ ID NO: 12464 - DNA, 666 bp, Bacteroides fragilis
atgaatgttactgataacttaaagcaggtcctggccgaattgccatccggcgttcgactggttgcagtctcgaaattccatccgaacgaagccattgaagaagcctatcgcgcgggacagagaattttcggagaaagcaaagtgcaggagatgacaggcaagtatgaaagcctgcccaaagacattgagtggcattttatcgggcacttgcagacaaacaagatcaagtatatggcgccttatgtgtccatgatacacggaatcgactcttacaaactactggcagaagtgaacaaacaagccataaaggcagaaagagttattcgctgtttactgcaaatacacatcgctcaagaagaaaccaagtttggtttcagttttgacgaatgcaaagagatgttgaatgccgccgaatggaaagcattggcaaacatacagatatgcggactgatgggaatggctaccaacacagattcgaaagaacaaatcgaacgggaattccgttctttaaattgttttttccatgaagtgaaaaaacaatattttgccaacgaaccgactttttgcgaactttcaatgggaatgtcccatgactatcatctggccattaaagagggcagtacattggtaagagtaggaagtaaaatcttcggggaaagagtttat

SEQ ID NO: 12465 - DNA, 2349 bp, Bacteroides fragilis
atgcatgccggcgaacagcaacaacaaagtaaaggtatagtgacaggtcgaatcgtcgaccaacagaagcaaccttactatccggttgcagttgccattgaaggtgtttatattggcggatataccaacgagaatggagtttatcatatcaatgatgtgccggcgggcagtcagacgatagttgtatcgggcataggagtgaaaactaaaaaggtgccgatacatgtgactgccggaaaagtgaaccggattccagacatagagatcgatacccaggcggaagagctggaagaagtacaggtgattggaaaatctgaagctcgccggcagcaggagcaggcgtatgccatatcggtactcgacatcaagaaagcgtataatagcgctgcacctctcaacaaattattgaacaatgtgtcgagtgtccgtatccgtgaggaaggtggtatggggtctaactataatttcagcctgaacggattttcgggcaatcaggtgaaattctttttggacggaataccgatggataatttcggatcgtcttttaacctcgctaatatctcggctaacatggctgagcgtgtagaggtatataaaggggtattacctgtaaatctgggtgccgatgccttgggaggagcggtgaatatcgtcagccgtagagatgccaattatctggatgcgacctattcttttggctctttcaatactcataaagtctcggtgaatggagcctatacccatctgaaaacaggtttcacggtgcgtgccaatgctttctataactattccgacaatgattataaagtgtttgtgcccatcatcgatctggctaccaataagaagatagacgagcggtgggtaaagcgctttaatgatgcctaccggtcaggaggtatccgcctggagacgggaataaccaataagccttatgccgactatctgcttgcaggcattattctttcgaagaatgataaagatgtacagactggtgctacgatggatgccgtttacggtggcgtaaaaatgaagagtgaatctgtgatcccttctattcgttataagaaagacgatctgtttcttgacggactttcgctgtcactttacggaacgtataattctgtaaatactttcaatgtggataccatcgcccgccgttacaactggttgggagaatccgttccgtctacttctgcaggagaagggtattatacggattccaagataaagaaccgcgaatggttaggaaacggaaacatcagttacgtgatcgacggtcaccaatcattgatactgaaccacgtggtttctgctatgcggagaaccatgaatgataaagtacggccggatgatgaaaacaacaatgtacctcagcaactgactaagaatatcacaggcttgggatggcagatccgctatgatcgttggaatgccaatgtattcggaaagatgtataagttgtacagttctacctataagcggttggatgaatatacagagaatgcccgttgggaaaaagtgcaggatcataaaaccaatttcggatacggtgcggcggctacttattatatcttaccctctttgcaggctaagttctcttacgagcatgcctatcgtttgccggaaagtatcgaaatgtttggagacgggttgattcagcagcggaatccggatttaaaaccggaaagcagccggaatttgaatctggggttgagcttcattcaaactttcggagcccatcaactttcggctgatggaaacttcatttatcgttatacgacagactttatcctgaaaggggtcagcctgaccagtaacccgactaccggttacgagaatctgggtaaggtgttgacaaagggtgttgaggctgctgtcagatataactataaagatctgttccatacgggagccggttttacttatcaggacattaccgaccggcagcgatatgagaagacgaaggacagctttgtcggcgaaggtatcacagagaatattacctataaagagcgtttgccgaacatcccttatttgtttgctaatgccgatgcaggggttcgttttcacgatttgatttggagaaactctgtgctgacgtttgactataatcttaattatattcattcgtattatctttcgttcccgggcttgggtgcaaaaagctctaaaaaagtaatccccgaacagttctcacacgatctggcattggggtattcaatggacaacggaaagtatagtgtggttgtggagtgtaccaatctgaccaatcaaaagctgtatgataactaccgcttgcagaaacccgggcgtgcctttaatgtgaaactgagatatttctttagtaaa

SEQ ID NO: 12466 - DNA, 540 bp, Bacteroides fragilis
atgataaaaagagaagatgtatacaagataggcttgttcaataagccacacggcatacacggtgaattgtcgttcacctttaccgacgatattttcgatcgggcggattgtgattatctgatttgccggttagatgatatttttgttcctttctttatagaagagtatcgtttccggtccgattccacagctttggtgaaactcgaaggtgtagacactgccgaacgtgcccgtatgttcaccaacgtggaagtttattttccggtgaaacatgccgaagaagccggtcccggggagttgtcctgggatttctttgtcggattccgggtggaagatgtccgtcacggtgctttgggaaaggtgacggatgtggatacgtctaccgttaatacactgtttgtagtggaccgtgatggcgatgaattgctgattcctgcacaagaggaattaattgccggtatcgatcagaagcacaaaatcattacagtcgatttgcccgaaggcctgctgtctttggacgagtgcgatgatgaagaaagt

SEQ ID NO: 12467 - DNA, 1098 bp, Bacteroides fragilis
atgggacattacgagcataaaacgaaagaggaactactggaaattgtatgtaaattggaaaagaaggtggaaggcctctcttccgaactcgactctctgaaaaaagggcgattccgtgaacggtacagtactcggattctagatgcattgcctgatatgctgactgtttttgaccataatgcgaacattgtggagttggcttcatctcctacaacaaatcatgtggaaggtaccacctccgatagtattattaattcaaatgtaaaagatattgttcccgaagaagcgtatgaaagtgttcgtcacaacatggataaagtcatccataccggtaagagttcgacagctgaacattcattaatgctggacggggtactccatcattatgaaaatcgtatttttccgctggatgatcagtatttgttatgtatgtgtcgcgatgtctcgcaggagactgagatggctaagatcaatgagacccagcgaagtgagattgtacgtctcaattcgttgatgaatgacattttgaacaatattcccgtctatttatttgtgaaggataccggaaatgattttcgttatctttattggaataaagcttttgccgagcattccggaatctctgtccagagggctgtcggtagtacggatgcagatatattcccggacaagaaagatgccgaacatttccgggaagacgatttgaaggtgatgaagttgggacgtattgaatatctggagaattatacaactatgagcggtgaggtccgtacggtcactacaatgaaaacagttgtcccttcgggaggtcagcatccttatattatcggagtatcgtgggatgtaaccgaaatcaagaagacggaaaaggagcttatagctgcccggattaaggcagaagaggccgaccggatgaaatcttcgtttttggctaatatgagccacgaaatccgtactcctctgaatgcgattgtaggtttttccaaactgattattgaagcggacaatgagtgtgaaaagcgacagtatgccgatattgtggaacacaacacgactgtactgttgaatctctttaatgatattcttgatcttacggca

SEQ ID NO: 12468 - DNA, 810 bp, Bacteroides fragilis
atgagactaatcattcagccggactatcagtccgtttctcaatgggcggcacattatgttgctgctaagatcaaagctgccaatcccactccggaaaaacctttcgttctgggatgccccacaggatcatctccactgggtatgtataaggcactgatcgacctgaataaaaaaggaatcgtatcgttccagaatgttgttactttcaacatggacgaatacgtaggactgccgaaagaacatccggaaagctactattcttttatgtggaacaacttcttcagccatatcgacatcaaaccggagaacacgaacattttaaatggaaatgctgccgatctggatgctgaatgtgcacgttatgaagaaaagatcaaatcgtatggcggtatcgacctgtttatgggaggtattggtcctgacggtcacattgctttcaacgagccgggctcttcgctgagttctcgtacccgtcagaaaacactgacaacagatacgatcattgcgaactctcgcttcttcgacaatgatattaacaaggttcccaagacttcgttgactgtgggagtgggtactgtgctttctgcccgtgaggtgatgattatcgtaaacggacacaacaaagcacgtgcattgtatcatgccgtagagggtgccattacacagatgtggacgatcagtgcattgcagatgcacgaaaaaggtatcatcgtttgcgatgatgctgctactgccgaactgaaagtaggtacttatcgttatttcaaggatatcgaagcagatcacctcgatccgcagtcattgctgaag

SEQ ID NO: 12469 - DNA, 1008 bp, Bacteroides fragilis
atggatgaaacaaaactactgaactatctgaaaggagaatcagatgccgaagagtgtctggaagtggaggcatggtattatgcttctgcagaacacaaaaaacaactggaccaactttattatatgctttttgtcggtgaacgtaaggtggcaatggatggtgtggacaccgaaaattcactaagcgttttgaaggaccggataaagcacaaagagtcagagaaaaaatcagtgcatagaatacgtgtatcaaaatggaaacgttacgcgatgcctttggcagctttcctgtgcggtctgttggtgtctgtcggtgccctatactggatttcctccggaaagtcggcaggatatatttttgctaccgaatcagggcagcgggcacaggcagttttaccggatggaacgaaagtatggttgaatgcttcaacacagatcgtctataagccttctttctggaagcgggaaagacaggtcgacttgagtggtgaggcttattttgaggtatcacgtaataagacaaaaccctttgttgttaatagtaatgatgtcaggacttgcgtgctcggtacaaaattcaatgtccgggcacgtccgtccgaagaaaaggtggtgaccactttattgaagggatcagtaaaagtccaattgccggggcagtctgaagaggaaggtattttgttgaagccgggacagatgctgagtgtggatacccgtacgatgcaacccatgcttacagaagccagccgtccgggagatgtattgctatggattaacggaaaactgaaattcgaacaggccacacttcaggaaatagtgcagtgtcttgaaaaacattttgatgttcatttcattatttcggatgcacaattgcaaaaagaccgttttacctgtacttttagtacggacgatgatataagacaaattctttctatactcgctcttaccaaacgtttcgattataaatgtgaggataacaatataatattgactcctaagacgaataga

SEQ ID NO: 12470 - DNA, 927 bp, Bacteroides fragilis
atgaatcaagagatactaaacagatatcttacaggagatgccagtgcggaagaaaagcaaatggtagtccgatggctggatgccgatccacaacacatgcgtgagtatcttgccctgagaaagttgcacgacatcaccctttggcaagagaaaccggcagcaacggttgataaaaagaaatggctgacacttccttatatcagggagttcattaaaatagccgctattttcctcatagcagttacctctgtttatttcctggctccggagagaggaagagatacacctgatttgaaagcaatacatgtcccatcaggacaacgggcagaattaacattaggtgacggaacccgagtatgcctgaattcaaatacgacacttacgtttcccgaccacttcgaccggaaagagcgtagagtgacactggacggtgaaggttatttccaggtggcaaaaaatgaaaagaaacccttcatcgtacaagccaaagaatatgaagtaagagtattgggtaccgaatttaatgtgatgatgtataaagatcaggactttttcgaaacagtcttgctgaaaggctcggtagaagtaaacgaaaccactaccggcaggaaagtaaaactgcaacccaacgaacggttattcggcaaagccggtcaactccggaaagagagtatcagcgagtggaaccgggcattatggatgcaaggaatcctttatttcgacaatacgcgcatggacgaaattatccgccagttaggtctatactatgatgtaaaattcattttggaaaaagagtccctggcaaatgtacggttcaccggaaaatttcgtatcagagacggtgtagagcacgtattaaaggtgcttcaactgaaatgtaaattcacctatcaacgggatgaagacagtaataccattactataaat

SEQ ID NO: 12471 - DNA, 1125 bp, Bacteroides fragilis
atgaaaatagatgatgcgattatagataaagtgctcaataacggagcttctgtggaagaagcgggattggttgcggaatggtttgctacagaagagggtagcgaatttttgtcggggcgtttggagagcgagtctgcacggctcatcgaagaacgggcccgggaatggttagaccatccggtgccggaagaacggatgtgggaacgcttcatcgggcaaataaaacctgagaaaaaaatagtttcttatcgtcgtggactgatagcgacagcggtattgattccttttttattccttagtatatctctttggtttctggctgacagaaccggagtcttttctgccacagaatatgctgagttaaaggttccttgcggagagcaagtgcaggttgttctgcaagatggaacagttatacagttgaattcggatacccgtttgcggtatcccaggaagttcggtctgttcagtcggagtgtggagttatgggaagaaggcttttttgtggtcgctaaggataagaagcgtccgtttatcgtcgatttgaaaggtgttgaagtaaaggtcaccggaactaaatttaatgtaaaggcatatccgtcagaacccaatgtatgggtcaccttggaagaaggaggcgtgctgttgaaagatatcaagaacaaggaatatcctctcgtaccgggtgaaagtgccgaatacaaccggacatccggaatttgccagataaccaaaccggatgatatgagccagatctcatcctggcgttccaatagcctgaatttttatcttactccgctgagagatattataaaggtcatggaacggcagtatgatgttcattttgtggtgcgtgattccatcctattgaataacaggtttactctatctaccagcaaagtgaatgtggacgatgtattgcgtgatttggaagcggttttttctattacattaccgatgggaaggaaatacttgccatcggtaatgaacttagtatggggcttgggctggtctggactgccaatcgttttgccttattcaattttagtaaggagaaagcgggagaagacggatataccgattttaattggttccgtttcaccaataaataataaaaggcgggga

SEQ ID NO: 12472 - DNA, 1098 bp, Bacteroides fragilis
atgtctatttttgtgtcgtctaagtatagacaggtaattacgtattcaattatgaagcaggaaaatattccttgggaactgataatctctaaattcaaacaagaaatttcggaggaagatgacgcacgcttgatgagttgggcggaacggccagagtgccggtcggtcatggaagatttgaatgtcgtgtggaagagggtacaggagaagacgagcgattatacacccgataaggagtattattggaaagtgctttcggcacggataggcaaggctgggaaaccgcaggtggaagtattgcaagagaaggcttcgggaaagacattcacactccgcagtctctatcgctatatagccgctgcttgtgttgtactggtgttgtccgtaggcatgagctattattggggtgtctctatgggcaggcagccgatgggcgagcaggtatataccagcatggacggcaagtcgaaaatatttctgccggatggcactggagtatggctccaggctaatacaacactggcatacggtaacgatttcagggatcgcgaccgctcggtgaggctgtcgggtgaagcctattttgaagtggcaaaggataaacggaagcctttcattgtgcacaccgagggcatgcaggtgagggtgcacggcactaagttcaatgtggcatctccggatggagctgccgagagcagagtcagcctgatggaaggttcggtttcgttggagacccgtgcgggattggtcttcctaaagcccggagagattgcggtatatgacaagaaaaacaatcggctggcgatagatgcaggcgatgtggcgctcgagaagatgtggatacaagatgaattcttcgtatcgaacaagactttaggagaggtttgccggattttgagcaaacgatacgatgtagagataaaggtggatgacgagttagaggacaagtatcgatatacttttacgttgcgtaatgagacgttggaggagattgttcggattatggcgcgcatcaatcccatagcctatcactttgatgataataatgtattggttatcaatcagaaatgggaaaataaggaggggaaaggaaagaaa

SEQ ID NO: 12473 - DNA, 2007 bp, Bacteroides fragilis
gaaccggaaactcagtcgttgggtgaagttgtcgtcacagccaaaagcgaagcccgccaactgcgcgaacaggctatgcccatgtcagtgataagtatgcaacagttgcagggaacagtcagtaatgttcaggatgttctgtcgaaaacggtaggtgtaactatccgcaacacaggaggggtaggcagttcatcccgtgtttccgtacgtgggttagagggaaaacgcatcggctttttcatagacggtagcccgatgaatgacaattcagacttcatcgatatcaatgacataccggtagacatgatcgaccgaatcgaaatctacaaaggagtggtaccggccaggtttggcggctcttctgtggggggagccgtaaatattgtcatcagagagtatccgcctaaatacctcgatgccagttacagtatcgaaagttttaacacacacaaactttcgttagtaaccaaacgcaacatcgctaccaaaggattagaatttggaggcggaggattctatacttactctgacaataactataagatggaatctccttttgaagaagggcttatcattaaacgcaaccatgacaaattcaagaaactggctgttgcaggtagcctgaaggctcgtaaatggtggttcgatttggtagagttcgaacctgtctttatacacactttcaaagagatacaaggtattgaatataatattgagaaagcccacacttactcagacgccttcattttcgccaacaaactggaaaaagaaaacttcctgacagaagggctcgatatggaatcgaatctggcctatgcctacacggtattccacatggtggataccgctgcttaccgatacaactgggacggtacgacttatcctgctgtatccgaatatggaggagagataggcaaatgggcctcgaatgccagaaacgagaaacacaccatcacccacaagttgcatctgaactatgtgatcaataataatcattctatcaacttgaactcactgttcagtttcgcatccggacacccgaaagatgacctgaaaaataaagttgttggttataaaaccaatttcagaagtacgatggcaagctggattgccggactgggatacgatttccgcaccgacaatgatatcttcctgaattcgctcaacgtgaaatattatatgtatggtatgaatactcacatgagcagtatcatgtcttcggaagccgagaaagtggatatgttgaaacgggattttggcatcagcaacgctctacgctatagatttactccggatttcatgggtaaactctcggtaggatatgacgtacgcctgccggccgaaagcgaacttttgggtgacggatatacagtcgccccttccggaaacctgcttcctgaacgcaatacaagcgtaaacctgggttttcttttagaccgcaccggaaaggatgccagcaacttacaggtagaagtaaataccttctatggatatcttgagaatatgatccggtttacaggaggatatctccagtctcaatatcaaaacttcggaaaaatgcgtacccttggagttgaagtagaggtcaaggcggacttgactcattggctttacggctactgcaacatgacctaccaggacttacgggatgtgcggaaatttgaaccgaatacccatataaccaacccgaccaaaggtagtcggatgcctaacattccctaccttctggcaaatgccggactagaatatcataaagagaatctgttcggaggcaagggacagaacacccgtatctttacagacggttcttttgttgaagaatatttctacgattttgaacaaagccggtttcaggaacggagaattccacgcaccttctcggccaatatcggaatagaacacagctttatgaacggacggttcatcatttcggcacgaatgaataatctgactgatgcccgaatgatgtctgagttcaatcgtcccctacccggacgtaactgggga

SEQ ID NO: 12474 - DNA, 1005 bp, Bacteroides fragilis
atgaactacgaagatatagaccatttactgcctcgatattgtgaaggactggctacggaagaagaatgccggcaggtggaaagctggatggaagaatcggaagataaccgaaagatagtggatcaaatcaacactctttatatagctgtagatacggtcaacgtaatgcgtaaggtggatacggaaaaagctctgaaaaaggtcagtagcagaatgatcgtcaggaaaacaacttggtgggagtggatgcagcgtgtcgctgctatcttatttatcccgttgtccgttgcttttctggtgcaatatatgcacaatgggaaatctgctgtgtgccagatgatggaaataaaaaccaacccggggatgacaacctcggtggtattgcccgatagtacggttgtctatctcaattcggagtcttctttacgttatccttctgtttttgaaggcgatatacgaaatgtcgaattaaagggagaagcttattttgcggtagcaaaggatttgaaaaagaagtttgtagtttccgccccgcattcatcgcagatagaagtgctgggtacacacttcaatgtggaggcttatgaagacgagccggatgtttcgacaacattggtggaagggcaggtctgctttcattttagtgataaagactatctagccaagaaagtggttatgaaacccggacaaaggttggtctacagttcgaccaatggtgatgtacagttgtacgcaacatcctgcctgtccgaaaccgcctggaaagatggtaagattatatttaataacactccgttggatgtagcactgaggatgctcgagaagcgctttaatgtaacatttaaactaaagaatgcccgtttgaagactaatgcctttacaggcacatttactgaacagcggttggaacgtattctggagtattttaaaatctcgtccaagatacagtggagatatttggaaagtcctgatattcgggatgaacgaagtataatagaagtttat

SEQ ID NO: 12475 - DNA, 603 bp, Bacteroides fragilis
atgctgccccaccctgataaagtggaaacattactcaaacagatcgaacagtatcccgatgtgagcttctcagtaaaaatgcgcctgggatgggaaaagccggatgaatgtttgaccctgttgcctctattgaatgcggctccgctgaccgagattatcgttcacccccgcttaggtatccagcaatacaaaggagaagtaaatatggagggctttacagctttctacgaagcatgcagacatcctgttatctacaacggagacatcctgaccatagaagatatccggtgcatcaccgaaaagtttccgaaacttaccggagtgatgatcggccgcggattattggcaaaccctgcattgggttgggaatataaagaaggcaggaaacttacgcctgaagaatggagagaaaagttgagagcactgcacacagccgttttccaacactatgagacacagatacaaggtggcgaagcacaactggtgactaagatgaaaacgttctgggagtatctggccccacaaatagaccgaaagagctggaaagctatccataaaagcactacgcttgccaaatacaacattgccgtccgttcggcattg

SEQ ID NO: 12476 - DNA, 735 bp, Bacteroides fragilis
atgaaagttatgaaagattataaactaatggcggttggacaaattgtagccgattgttttgattatgcaaaggtcttcaataagtatggtattgatttttgctgtaatggagatgtttccctggctgatgcttgcgggaaaatggggatagacgcagattgtttgcttgaagaattgaagcaaacaaaatcggaacagtccttaactcttgactttaaaagttggcctatagatttattagtagattacattttgaagttccatcatcgtaatatccgttatcagggaccgcaaattctccagttgcttgatagggtttgtgaagcacatgccggaaagcacccggaactttatgaagtgcgtgaactgtttcaggaatcctggatagatctgaacaatcatcttactaaggaggagatggttttgtttccttatatatatgatttatttgatgcggtggctcaacatcgtcctattccggctttccattgtggaagtgtgagtagccctatttcggtaatgatgagcgaacatgatgccgaaggagaacgttttcgcaggatttccgggttaactcatggatatctggtacctggtgatgcttgtagtagttataggttgctacttgagatgttgaggacgtttgaagataatttgcaccatcatattcatttggagaacaatattgttttcccaaaggctatagagttacaagagaattgtgaacgaatgtgt

SEQ ID NO: 12477 - DNA, 1272 bp, Bacteroides fragilis
atgcttaccattaaacaaattacagaaaacaccgacgcggtaatccgcggtctggagaaaaaacacttcaaaggagccaaagaaacaattgcccaagtaatcgaagtgaatgacaaaagacgtaatacacaaaatcaattagataaaaacctggcagaagtaaattcactttcgaaaacgatcggtcagttgatgaaagaaggcaaaaaggaagaagctgaagttgcaaaagcccgtgtagccgagataaaggagagcaataaaacactgcaggccgacatggaccaggctgccaacgacatgctgaatctgctgtataccattcccaatattccctacgacagtgtgcccgaaggtgttggtgccgaggacaatgtagttgagaaaatgggaggtatggaaactcaacttcccacagatgcactcccccattgggaactggctaagaaatacgacttgattgactttgatttgggtgtaaaaataaccggtgcaggttttcctgtttacaaaggcaaaggagctcaactgcaacgcgcactgattaactttttcctggatgaagcacgtaaatccggatataccgaaatcatgcctccaacagttgtaaacgctgcttccggctatggaaccggacaacttccagataaagaaggacaaatgtaccattgcgaagtagacgatctctatctgattccgacggctgaagttccggtaaccaatatctaccgtgacgtcattttggatgaaaagcaacttcctattaaaaactgcgcttatacacaatgcttccgtcgggaagccggctcttacggtaaagatgtacgcgggctcaatcgccttcacgaattctctaaagtagaattggtgcgtatcgacaaaccggagcactcccgtcagtcacatcaggaaatgctggatcatgtagaaggcctgctccagaagctggaactcccttaccgtattctccgtctctgtggtggtgatatgagttttaccgctgcgctttgctttgatttcgaagtatattctgaagcacagaagcgctggttggaagtcagctctgtatctaacttcgatacttaccaagccaatcgattaaaatgccgctatcgtagcggagaaaagaaaaccgaactttgccacacactgaacggatcggcactggcattgccccgcatcgtagcagccttgctggaaaaccatcagactccggagggtatccggattccgaaagcattggttccctactgcggatttgacatgatcgac

SEQ ID NO: 12478 - DNA, 834 bp, Bacteroides fragilis
atgaaatatatcggagcacatgtcagtgcatcgggaggagtagagtttgctcctgttaatgcacatgagatcggggccaatgcgttcgccctcttcacaaaaaatcaacgccagtgggtcagtaagcctctaactgaagatagtattcgtctattcaaagaaaattgtgagaagttcggttttgcccccgaatacattctcccacatgacagttatctgatcaatctgggacatcctgaggaagaaggattaactaaaagtagggctgctttcctcgatgaaatgcaacgctgcgaacaactgggattaaaattactgaacttccatccgggaagccatctcaacaagatatcggtagaggaatgtctggaccgaattgcagaaagtatcaatctggctttggaaaagaccaaaggagtaaccgctgttattgaaaacacggcaggacagggaagtaacctgggaaatgaattctggcagttgaaatacatcatcgaccgcgtggaagataaaagccgtgtaggagtgtgcctggacacctgccacacctttacagccggttatgactttctgaatgattatgatgacgtattcggagaattcggtgaagtggtcggatttgaatatctgcggggaatgcatctcaacgattcaaaaaaagaattgggaagtcgtgtagaccgtcacgacagcatcggtaagggattaatcggtttcgctttctttgagaagctaatgaaagatccccgtttcgacaacatgccgttgattctggagactatcgacgaaacactgtggcccgaagaaatagcctggctgagagaacaagctcaa

SEQ ID NO: 12479 - DNA, 444 bp, Bacteroides fragilis
atgatcgaacaatttaactttgatatcaggctgatctttgccatcttgaatggtaaggtctctgctgccattaatcggaaactataccggaacttcagacagaacggtctggaaatcagtccggagcaatggacggttcttatttttctctgggaaaaagacggagtgacacaacaagagttgtgcaatgcaacttttaaagacaaaccgagtatgacccgcttgattgataatatggaacgccaacatctggtggtacgcatctccgataaaaaagaccgccgtaccaatctgattcatctgaccagaacaggaaaagagctggaagaaaaggcccgtatcatagctaaccggacccttaaagaggcgctgcatggcatcacagtcgaagagctaagcgtaagccaggaagtattaagaaaaatattcttcaacaccaaagat

SEQ ID NO: 12480 - DNA, 663 bp, Bacteroides fragilis
ttgcccgaaggtaaattattgataaacacgattaacgcccattcatataatacagcgctgaaagatgctgaatttgcagaagccttgctcaaaggcggagcactgattcctgacggagcaagcatggtattggcgtttagatggctccgaaaagagagcatagaacgtactgccggatgggatctctttgaatatgaaatggaacggctgaaccggaaaggaggtatttgctactttctgggaagcagcaaaaatacacttaaattgatcaaagaaaaagctaaaaccgtatatccgaatattcgaatagagacttactccccaccctacaaaccggaatttacagaagaagaaaatcaaatgatgatagatgccataaatgcggtaaagccggacttattatggataggcatgacggctcccaaacaagagaaatgggcgtatacgcatctggatgcactggaggtgaacggacatataggaactatcggagcggtattcgacttctttgcgggtacggtggaacgtgctccggtccggtggcaagagcacggactggaatggctgtatcgcttgatcaaagagcctaggcgcatgtggcgccggtatatcatcgggaatgccttgttcctgtggaacatcaccaaagaaaaattctctata

SEQ ID NO: 12481 - DNA, 1515 bp, Bacteroides fragilis
atggccgcaagtggacaaaaaggagaaaaaaacaaacagaaggtgaatgaccgacaactgccgaatgtggtgtttatctatgcagatgatttgggatatggcgatctggaatgttatggagctaaaaatgtacaaactcctaatgttaaccgtttggcatccgaaggtattcgctttactaatgcgcatgctactgcggctaccagtactccttcacgttactccatgcttacgggagaatatgcctggcgtcgtccgggaacggatgtagcagccggaaatgccggaatgattatccgtccggaagattacacgatggccgatatgtttaaaaattccggttatgtgactgctgctctcggtaaatggcatttgggactgggagataaaagcggagagcaagactggaatgctccacttcccgctgcattgggggatttgggatttgactattcatacattatggctgctactgccgaccgtgtgccctgtgtatttattgaaaacggaaaagtggcaaactatgacccgagtgcgcctatcgaagtcagctaccgcaaaccttttgaaggagaacctttagggaaagatcatccggagctgttgtataaccagaaacacagtcatggacatgatatggctatcgtaaacggaatcggccgcatcggttatatgaaagggggaggcaaggctttatggaaagatgaaaatattgccgactcgatcactacacatgccatcaactttattcgcgaacataaggatgaaccgttttttatgtattttgcaacgaatgatgtgcacgttccacgctttccacacgagcgtttccgtggtaagaatccgatgggggtgcgcggagatgccattgtacagttcgactggagtgtagggcaaatcctggaaacacttgacaagctgggactttctgaaaacacattgattattctttccagtgataacggtcctgttgtggatgatggttatcaggatcgtgcagaggagttgctcaacgggcacagtccggcaggtccgctgcgtggcaacaaatatagtgctttcgaaggtggaacccgtattcccgccattgtgcgctggcctaagaaaattactcagccgcaggtgtcggatgtattggtttcacaaatcgactggctggcctctttagcttccctggttgatgcaagggttcccaaaggagcggctcccgatagttttgaccgtctgggcaactggctgggaacggattctaccgaccgtccttgggtgattgagcaagcctctaaccacacactgtcagtacgtaccaagggctggaaatacattgaacctaacgacggccctcacatgataacctggggacctaaaatagaaacgggtaatctgagcattccgcaattgtatgacatgactaaagattatgaacaggagaatcttgcagagaagaatccagccaagctttttgaattgcaaaccattttgagaaaagtgcgcaataaaacttatagagcttta

SEQ ID NO: 12482 - DNA, 791 bp, Bacteroides fragilis
ggattgtgaatatctgtttctattcttgtgtggcttttgttgcctggatggtattgcaggtgttttgcctgacttctttcaaaatcccctccaattcaatggaaccggcattgctttcgggagacaaaatactggtggataaatggaccggtggggcacgtctgtttaatatctttgcgtcattgcgaggagaagaagtggatatctatcgtctaccgggtttcggatcgtttcagcgggacgatgtgcttgtttttaatttcccttatcaggatgggagcgacagcatcggatttgatataatgaagtattatgtgaaacggtgtattgccttgccgggtgatactttggaaatacgtaagggctattatcatataaaaggaatcacagacagtgtggggaatgtgcaggcgcaacatcggattgcacgtgtcagaagggaagattcacatgggatcgtgatggatgcttttccgtgggacggacgtctgggatggaccattcaggaattcggacctcttccggtaccagccaaagggcaggtggtgaaaatagatacattgtcttgtttgctttacggaagactgatccactgggagcagaagaagagactgcggcaaaaaggagaggcggtatgtctgggtgatagtgcgataacggaatataagttcacagagaattactatttcgtatcgggggataatatggaaaattccaaggattcacgttattggggaatgttgcccgaatcatatattgtaggtagggcatttacaatatggcggtcggac

SEQ ID NO: 12483 - DNA, 1179 bp, Bacteroides fragilis
atggataaaattatttacagtttggtgtataataggaaaaagagcctgaataaaaagggtatggcattagtacaggttgaggcctatttaaacagaaaaaagaaatatttctctaccaaagtttacttgagtcccgatcaatgggattttaagaagagaatggttaagaaccatcctaatgcagatgctatcaatcacatgctttacgagtttatggcagaaatagagaagaaagagttgggattgtggcaacaggggaaacagatttcattggattcattaaagaattctatggaaaatcaagacgacagcacttcatttattgcatttttccgcaacgaaatagcaaaatcttcattgaaggaaagtacaaaacgcaatcatctctcaacattagaattattaaggagttataagaaggatgtgtcattttctgaattgacttttgaatttatatcctcatttgatcactatcttcagcaaaaaggatatcatactaatacaattgcgaaacacatgaaacatctaaagcgtcatattaatgtagccataaataaagaatatatggagatacagaaatatgcctttcggaaatataagatcaagagtgttgagaataatcatactcacctctctccggaggaattaggaaagattgaaagtctggaattggggggacggttcactaaactggaaaagaccaaagatgctttcctcttttgttgttatgcaggattacgatattctgacttcaccaacttatcccctgaaaacatagtgaaaatgcatcaagaaacttggcttatttataaatctgtgaaaacgaacacggaagtacgtcttccgctttatcttttatttgaggggaaaggaatagaagtcttgaataaatatcaagatgatcttgccgatttttttaagcttagagataattcaaatgtgaataaggagctattgatcatagcaaaattatcagggctaaataaacgtatttcgttccataccgctcgccataccaatgccacattattaatatacagtggagtcaatattactactgtacaaaagctattgggacataaaagtgtgaaaacaacacaggtttatactaatataatggacataactattgtaagagacttagaaaagtctaaaaataatcgcaaagtatcttatatg

SEQ ID NO: 12484 - DNA, 834 bp, Bacteroides fragilis
atgtcaagaacaaattttgatacattattggaagccgggtgccacttcggacaccttaaaagaaagtggaaccctgcaatggctccttatatttttatggaacgcaatggtattcatatcattgacctccacaaaacagttgcaaaagttgatgaagccgcagaggctctgaaacagattgcaaaatcaggcaagaaagtcctttttgttgctactaaaaaacaagctaaacaggtagtggctgaaaaagctgcatctgtaaacatgccttatgttatcgaacgttggccgggtggtatgttgactaacttccctactatccgtaaggcagtgaagaagatgactactatcgacaagttgactgctgatggtacttactcaaacttgtcaaagagagaaattcttcagatttctcgtcagcgtgctaagctggacaagactttgggttctatcgctgacctgactcgtctgccgtctgctttgttcgttatcgatgtaatgaaagaaaatatcgctgttcgcgaagctaaccgtttgggtattcctgtatttggtatcgttgatactaactcggatcctacaaacattgacttcgtaattccggcaaatgatgacgctactaaatcagtagaagttatcctcgatgcttgctgtgctgcaatgatcgaaggtctggaagaaagaaaagctgaaaagatcgatatggaagctgccggtgaagctcctgctaacaagggcaaaaagaaatcagctaaggctagactcgataaatctgacgaagaagcaatcaacgcagctaaagctgctgctttcctgaaagaagacgaagaggct

SEQ ID NO: 12485 - DNA, 1173 bp, Bacteroides fragilis
atgaaacagattttgaaagaaaacggcggactaccggcttcgattctttggacacttgctattgttgcaggtatatcggtagccaatctgtactataaccagcctttactgaacatgatccgccatgaattgggtgtttcggagttcgaaacaaacctgattgccatggtaacgcagatcggatatgccctcggactattgtttatcgtccccttaggcgatttatatcagcgaaagcggatcattctcaccagcttctccatattaatcgtttcgttgctggtgatcgcgatggcccccaacatccacgtcatcctgtgtgcctcgctcctcaccggcatctgttcggtgatgccacagatattcatcccgatagcttcccagttctcacgtccggaaaacaaagggagaaatgtaggaatcgtcgtatcgggactactgaccggcattttggcctcacgtgtagtcagcgggtttataggagaactgtttggttggcgtgagatgtattacatcgctgccggcatgatgttgatatgtggtatggtagtcatgcgggtattaccggacatacgcccgaactttcagggcaaatacagcgacttaatgaagtctttgctttcactgctgaagcagtatcccgagctccgcatcttttcagtccgcgccgcacttgctttcggttcatttctagccatgtggtcatgtctggcatttaaaatgggaagtgcccccttctacgctgacagccacatcatcggtatgttaggattgtgcggcattgccggcgccttatcagcctctcttgtaggtaagtatgtacggaaagtgggagtcagacgattcaatttcatcggatgcggactgatcttatcagcttggttgcttctctttatcggagagaactcctattggggaatcgttgccggtatcatcatcatcgatatcggcatgcaatgtatccaattgagcaatcaaacccgtatcttcgaactctgtccgagtgcttcgaaccgcattaatactatttttatgacaacttacttcataggagcctccaccgggacatttctggcaggaactttctggcaggcattcggttggcatggagtcataggcacaggagtggccttgactaccggctcactgctgattacttttttttcaaaacga

SEQ ID NO: 12486 - DNA, 681 bp, Bacteroides fragilis
atgctgattgttgtaaccggaaccgatatgtatgccgatggtaacctgcaaacagggttatggctcagtgagttgacccatatctatcattgtgccgaagaggcagggtatgaaataaccgtcgcaagccccaagggcggcaatgttcctgttgatccggagagtctaaaaccgatgatgttggacaaactttctaaggattattgggatgatcttgaattcaggcgtgaattgcagcatgcaaaaagtttagccgaagtttccggacagctatttgactgtgtttatttggcaggtggtcatggtgcgatgtatgattttcctgacgatactgtattgcaggcgattattgaaaagcattatgagagtgataaagcagtagcggccatctgtcatggtgtaagcgggcttttgaatgttaaactgtccggaggagagtatcttatcaaagataaaaagatcacaggcttttcttggtttgaagaaagtttggccgggagaaaaaaggaagtacctttcgaccttgaggctgcactcgaaaagagaggagccgactacgagaaggcattgattccgatgacctcgaaagtagtggtggactgtaacctgataacgggacaaaacccgttcagttcaaaagaaatggcagaagttgtaatgcggcaattgagtcgcgaaaag

SEQ ID NO: 12487 - DNA, 3259 bp, Bacteroides fragilis
caagaaatttgccgaatattcgcagttcgacctttcgaaggtgaataaggacgtgttgaaaaaatgggacgaaaaccaagttttcgccaagagtatgacagaacgtgaaggctgtccttcgtttgtattttttgaaggacctccatcagctaacggtatgccgggtattcaccacgtaatggctcgttctatcaaagatattttctgtcgttacaaaacgatgaagggctatcaggtgaaacgtaaagccggttgggacacacacggacttcctgttgagttgggggttgaaaagtctttgggaatcacaaaagaggatattggaaaaacaatttcagtagccgaatacaatgctcactgtcgtcaggatgtgatgaagtttacaaaggaatgggaagacctgactcacaaaatgggctattgggtggatatgaagcatccatacattacatatgataatcgttacatcgaaaccttgtggtggttgctaaaacaattgtataaaaaaggattactgtataaaggatacaccatccaaccctattctccggcagcaggaaccggattaagttcacacgaactgaatcaaccgggatgttatcgggacgtgaaagatacaacagtagtggcacaattcaaaatgaagaaccccaaaccggaaatggcacaatggggcactccttatttcctggcatggaccactactccatggacattaccttcaaataccgcactctgtgtcggccctaaaattgattatgtagcagttcaatcatataacgcatatacaggacaacccatcacggtggtattggcaaaggcgttattgaatgcacattttaatccgaaagcagccgaactgaagctggaagattataaggcaggtgataaattggttcctttcaaagtgatagctgaatataaaggtcctgatttagtaggcatggaatacgagcaattaattccgtgggtaaatccgggcgaaggtgctttcagagtaattttgggcgattatgtaacgacggaagacggtacaggtatcgtacatattgcacctacatttggtgccgatgacgcccaagtagcaaaagctgccggcatacctccgctacagttggttaataaaaagggagaacttcgtccgatggtagatttgaccggtaaattctatactttagatgaattggatgaagactttataaaacagcgcgttaacgtagatttatataaagagtatgctggccgatttgtgaagaatgcatatgacccaaacctgtccgatcaggatgagtcattggatgtaagtatctgtatgatgatgaaggttaataatcaagctttcaaaatagagaagcatgtgcataattatccccattgctggcgtacagataaaccggtactatattatccgctggacagctggtttattcgttctacagcttgcaaagaacgaatgatagaattgaataagactattaactggaaaccggagtctaccggaaccggtcgctttggaaaatggctggaaaacctgaatgactggaacttaagccgttctcgttattggggtactccattaccgatttggcgaacagaagataacagtgacgaaaaatgtatcgagtcggttgaagagctatataatgaaatagaaaaatcagtcgctgcaggatatatgcagtcgaatccttataaagataaaggtttcgtaccgggtgaatataatgaagagaattataataagatagatcttcatcgcccttatgtagacgatattatccttgtctcaaaggacgggaagccgatgaaacgtgaagcagacttgatcgacgtatggtttgattcgggcgcaatgccgtatgcccagattcattatccatttgaaaataaagaattgttggatagtcatcaggtatacccggccgattttatagcggaaggagtagaccagactcgcggatggttctttactttacatgccattgcaacaatggtattcgatagcgtctcttataaggctgttatttccaatggattagtattagataaaaatggcaacaagatgtctaaacgtttaggtaatgctgttgacccattctctactattgaacaatatggctctgatccgttacgctggtatatgatcactaactcttctccatgggacaacctgaagtttgatgttgatggcattgaagaggtacgccgtaaattcttcggaacgttatacaatacttattctttctttgccctgtatgccaatgtagacggttttgaatacaaggaagccgatcttccgatgaatgagcgtccggaaattgaccgatggattctatccgtcttgaatacattagtaaaagaggtagatacttgttacaatgaatatgaaccgactaaagccggacgtttaatttcagattttgtaaatgataatctgtctaactggtatgttcgcctgaaccgtaaacgtttctggggtggtggattcactcaagataagctctctgcatatcagactctgtatacatgtttggagactgtagccaaactgatggcacctatcgctccattctatgcagaccgcttgtacagtgatttgatcggagtaacaggtcgtgataacgttgtatctgtccatcttgccaaattcccggaatacaatgagaaaatggttgataaagaactggaagcacaaatgcaaatggcacaagatgtcacttccatggtgctggcattacgccgtaaagtaaacattaaggttcgccagccattgcagtgtattatgattcccgtggtagatgaagttcaaaaagcgcatatcgaagccgtgaaagcattaatcatgagcgaagtgaacgtaaaagagatcaagtttgtggatggtgcggcaggtgttctggtgaaaaaagtgaagtgtgacttcaaaaaactaggaccaaaattcggaaaacaaatgaaagctgtagcagctgctgtagcagaaatgtcacaagaagctattgcagaacttgaaaagaatggtaagtacacctttgatttgggcggagcagaagctgtgatagaatcggcggatgtggaaatcttcagtgaagatattccgggatggttggttgccaatgaagggaaactgactgttgcacttgaggttaccgtgacagacgaactccgtcgtgaaggaattgctcgtgaattggtaaatcgcattcaaaatatccgtaaatcaagcggtttcgagattacagacaaaataaaattaaca

SEQ ID NO: 12488 - DNA, 1002 bp, Bacteroides fragilis
atggctctgttttgttttggctacggggcgtttatcagtgcatatggcgatgactctaaccgactggtagcaggtccggtagttttttcattaggtatgatttgcattgcattatttgcaacagccgctactattatccggcaaatcatacatacttacgggcgaggttctttatatgcattgcctattatcggttatctggccgctgttgtcacaattattggcggaatttgcatgtttacccgatctacctctgcctcctctttcgtagctggacatgtagttgccggagtgggactgataactacttgtgtagcaaccgcagcaacatcttctacccgtttttcattgattcctgccaactcaaaaatgattggtaacggtattcctaaaggagcgtttaccaagggccaagagcgtatattaaaaacaatagctatcactatatcgttgattgcctggatatgggctttcgttttattagccaagagtgatgtacatcctgcttatttcgtagcagggcatgtgatggtaggtttagcttgcatttgcacaagcctgattgctttggttgctactattgcccgtcaaatcagaaatgtgtatacggatagagaacgtaaaagatggccaaaactcgtattgttgatgggaaccgtttcgcttctttggggactgtttgttattttttccgattcaagcactactaacggagtaatcggatacatcatgattgggcttgggctggtttgttacagcatttcaagtaaagtaattctgctggcgaaaatttggggaagagaatttgctttggccaaccgcatccctttgattccggtattgacggcgttggcctgtttgtttctggcttctttcgtttttgaattgggtacgacgcatgatgattattttatccctgcacgcgtattagccggtttgggtgccatttgcttcactctcttttcaattgtcagtattcttgagagtggaacatcttcaaaa

SEQ ID NO: 12489 - DNA, 1020 bp, Bacteroides fragilis
atggtaaaaaatatagaaatacgaaatagtacagcagagtttctcatcttcatgcttgaaggcaaggaggatgggattcaagtgatatataagaacgaaaccatttgggcaacccaaaaggcgatggcacagctttttgatgtaggagtacctgcaatcagcaagcatcttaaaaatatttttgagagtggtgagttggacgaacattcagttatttccaaaatggaaacaactgcttcggatggcaagaattacgatacgacattctataatctcgatgccattatcagtgtcgggtatagagtcaattctgttcgtgccactcaattccggcagtggtgtacgtttgtactccggcagtttgccattcgtggatatgtgcttgatcataagcgaatggagaacggggctttctttggtgtggattactttgagcatttgttggccgaaataagggagataaggctgagtgagcgtcgtttttatcagaaactgaccgatatttatgctacggcaatagactataacaaggatgctccgacaacccgtcttttcttcaagaaggtacagaacaaaatgcactatgctgtgcatgggcatacagctgcggaattgatagttgaacgagccgatgcaaatagggagcacatgggattgaccacttgggaaaatgctccgaatggaaaaattgtcaaaaccgatgtgtctgtagcaaagaactatttgcgagaaaaagaattagaagaaatgggcaggatagtcaatgcatcccttgatatggcagaaagcatggctatgcgtcatatacctatgacaatggaagattgggcaaagcgaatagataaattcattaatttatttgagagcccgatattacaagataacggacaggtttctgccgaatatgccaaagagtttgctgaatcagagtttgaaaagtacaggatcattcaagaccgtcttttccaatctgactttgatagatttgaagatgatagttttcctccattggatatggaa

SEQ ID NO: 12490 - DNA, 618 bp, Bacteroides fragilis
atgaaaagcagtctaattgttgttgcatttttctgtataggttgtctggtcggaatcttcaatgatttccagtttgacatgcacaatctttctatgtacatactttatgcgttgatgttgcaggttggcatcagtatcggaagcaataagaatctgaaatttctgatcaaaagcctacgtcccaatatgcttttagtgccgatagctaccattgtcggaactcttcttttttcagcttttgccagtttattgctgagtcagtggagtgtattcgattgtatggcagtgggaagcggatttgcatattattccctttcatctattttgattactcaattcaaagaggcttctgtcggattacagttggcaacagagcttggcactattgctttgctggctaatatcttccgtgagatgatggcattgctgggtgcaccgttaatccgaaaatactttggaaaactggcaccaatttctgcagccggagtaaattcaatggatgtattgttgccatccatcaccctttattccggaaaggatatgatacccgttgccatttttcatggtattctcattgatatgagtgtacctttctttgtttcattgttctgcagttta

SEQ ID NO: 12491 - DNA, 567 bp, Bacteroides fragilis
atgaagcaagactggaagcccggaactctgatttatccgttgcctgccgtattggtaagttgcggaagcgatgaaagcgaatacaatatacttacggtggcatggaccggaaccatttgtaccaatccgccgatgtgttacatttctgttcgtcccgaacgtcattcttatcctattataaaaaagaatatggaatttgtgatcaatttaacaacccgggatatggcattcgcaacagattggtgtggggtacgttcagggaaggattatcataagtttgaagaaatgaaactaaccccgggcaaatgttctgtagtgaatgcacctctcattgaagaatctcccctttgtattgaatgccgtgtgaaagaaatcgtatctctgggatcacatgacatgtttatttctgacgtagtaaacatccgtgcagatgatcgtcatctaaaccgggaaaccggaaagttggaactggcagaagcaaatccgcttgtatatgtacacggaggatattataatttaggagaaaagataggaaaattcggttggtcagtagaaaagaaaacaaag

SEQ ID NO: 12492 - DNA, 2043 bp, Bacteroides fragilis
atgcaaaaaggtaatattggggttacaacagagaacattttccctatcatcaaaaagtttttgtacagtgaccatgaaatcttcctgcgggaattagtatccaatgccgttgatgccactcagaagttgaatacattggcttctatcagtgaatttaagggcgaactgggtgatttgaccgttcacgtttcattaggcaaagacaccattaccatctccgatcgtggtatcggtttgactgctgaagagattgataaatatatcaaccagattgccttttcgggagctaacgatttccttgaaaaatataaaaacgatgcgaatgccatcattggacacttcggacttgggttctactctgcattcatggtttccaagaaggttgaaattatcaccaaatcatataaagaaggtgcgcaggccgtaaaatggacttgcgacggtagtccggagtttacacttgaagaggtggagaaagcggatcgtggtacagatatcgtattgtatattgatgatgattgcaaggagtttctcgaggagtcacgcatctctgccctcctgaagaaatattgcagcttcctgcccgttcccatcgcttttggtaaaaagaaagagtggaaagacggcaaacaagtagagacggcggaagataatgtcatcaatgacaccattcctttgtggacaaagaaaccgagtgaattgtcggacgaagattataaaaaattctatcgtgagctttatccgatgtcagacgaacctttgttctggattcatttgaatgtagactatccgttccatctgaccggtatcctctacttcccgaaggtaaagagcaatattgatttgaataagaataagattcagttgtattgtaatcaggtttatgttacggattctgtagaaggtattgttccggatttccttactctgctccatggtgtgctcgattcaccggatattcctttgaatgtatcccgttcttacctgcaaagtgattcgaacgtgaagaagatctctacctatatttcgaaaaaggtatcagaccgtctgcaatctatctttaagaatgatcgcgctcagttcgaagagaagtggaatgatttaaaaatctttattaattatggaatgctcactcaagaggatttctatgataaagcacaaaaattcgcccttttcaccgatacggatggcaaacattacacctttgaggagtaccagactttgattaaagataatcagacagataaagataaaaacctgatctatctgtatgccaataataaggacgaacagtttgcctatatcgaagctgccaaaaataaaggttacaatgtgctgttgatggacgggcaactggatgtggccatggtaagtatgctcgaacagaaactggagaaatctcgcttcacccgtgtagacagtgatgttgtcgacaacctgattgtgaaagaagataagaagagcgatgtgcttgaggcttcaaaacaagaagctctgtcagcagccttcaagagtcagttgccgaaaatggaaaaggttgaatttaatgtcatgactcaggctttaggcgaaaacggctctcccgtgatgataacccagagcgaatatatgcgccgtatgaaggaaatggccaatattcaggctggcatgagtttctatggtgaaatgcccgatatgtttaatctggtattgaattcagaccataaattggtgaaagaagtattggctgatgaagaaaaagagtgcagtgctgccattgctcctatacagacggaactggaagatgtgacaaaacgtcgtgatgcactcaagaaaaaacaagaaggcaagaaagacgaagatatccctactgcggagaaagatgaactcaatgatctggataagaaatgggatgagttgaagcagcagaaagattctatttttgccggatatgcaggcaaaaacaaagtggtacgtcagttgatcgatctggcattgttgcaaaacaatatgctgaaaggtgaagcattaaataactttgtaaaaagaagcattgagctgatt

SEQ ID NO: 12493 - DNA, 1245 bp, Bacteroides fragilis
atgaagcagttaagtacccgtgcagaaatgcaatataatatacataccctgtccaatggacttcgcattattcatgaaccctcttcttcgaaggtagcttattgcggatttgccgtagatgccggaacccgtgatgaggccgaaaatgaacaaggaatggctcactttgtagagcatcttatttttaaaggtacccggaaacggaaggcttggcatatcctgaaccgcatggagaatgtgggtggcgatctgaatgcgtataccaataaagaggaaactgtgatctattcggcatttctgactgagcacttcggaagggcactggaactgctggcggatatcgttttccattccacctttccgcagaacgaaatcgaaaaagagacagaggtgattatcgatgaaatacagtcgtacgaagacactccttcggaattgatctttgatgactttgaagatatgatcttccgcaatcatccgttaggacgtaatatcctgggcagacccgatctgctgaagaaattccggagcgaggatgccatggcttttacttcccggttttatcaaccctccaatatggtattctttgtcctgggtgatttcaattttcagaaaatagtccgtcaggtggagaagctgttagtggatcttccgttggttacggttgagaatcagcgtacgatacctccgctttatgtacccgagcagttggttgttcacaaggagacccatcaggcacatgtgatgattggcagtcggggatataatgcttatgatgacaagcgtactgcattgtatctgctgaataatattctgggtggtccggggatgaacagtcgtctgaatgtctctctgcgcgaacgcaggggactggtctatacggtggagtccaacttaacgtcatataccgatacgggagctttctgcatttatttcggtaccgatccggaggatgtggatacttgtctgaaactgacttacaaggagctgaaacggatgcgtgatgtgaagatgacctcttcgcaattgatggctgccaaaaagcaactgatcggccagatcggggtcgcttccgataataacgaaaacaatgcgctgggaatggcgaagacttttctgcactacaataagtatgaatcatccgaatctgttttccggcgtatcgaagccttgacggcagaaggactgttggaggtagccaatgaaatgtttgcagaggaatatctctctacactgatttacaga

SEQ ID NO: 12494 - DNA, 846 bp, Bacteroides fragilis
atgctattgaaatttgaaacaaagttagcaattattcaggacagcaatattattttgtttatttttgcacaagctaaaaccaaaatcattatgaagatactatactatatttatcaaatctgcattgcattgcccattttgttagtattgactatcctcacggcggttgtcacaatcgttggttcattgctgggaggagcccacatctgggggtattatccggggaaaatatggtcacaactgatctgcctttttctgttgatcccggtcaaagtgcatgggcgcgaaaagctacatgaaagaacttcttacatctttgtccccaatcatcagggctcattcgatatctttctgatttatggttttctgggacgtaactttaaatggatgatgaaaaaaagccttcgcaaaattcctttcgtcggaaaagcatgcgaaagcgcaggacatatctttgtagatcgctcgggaccgaaaaaggtacttgaaaccattcgtcaggctaaagactccctgaaggacggagtatcattagtggtcttcccggaaggagcccgttctttcaccggacacatgggatattttaaaaaaggagcttttcaattggcagatgacttacagcttgccgtagttcccgtaaccatagacggctctttcgaaatcctgccacgcaccggcaaatggattcaccgtcatcgcatgattctgaccattcatgatcccatcccccccaaaggacaaggagcagataatatgaaagctactatggccgaggcttacacagctgtagaaagtgcacttcccgataaattcaaaggaatggtgaagaacgaagatcaggatcga

SEQ ID NO: 12495 - DNA, 765 bp, Bacteroides fragilis
atgataagtcccttagcgtatattcatcccgaagcaaaaatcggtgaaaacgtagagatagctccttttgtgtacattgatagaaatgtagtcatcggagataacaataaaattatggctaatgccaacatcctgtacggttcacgtatcggtaacggaaatacaatctttccgggagccgttatcggagcaatcccacaagatttgaaattcaaaggtgaagaaagtacagccgaaataggtgacaataacctgattcgtgaaaacgtgaccatcaaccgaggtacagcagctaaaggcagaaccattgtaggtaacaacaacctattgatggaaggcgtccatgtggcccacgatgcattgatcggcaacggttgtatcgttggtaactccaccaaaatggccggagaaatcatcatcgatgacaatgccatcatcagtgccaatgtgttaatgcaccaattttgccgggtaggcggatacgtcatgattcagggaggatgccgtttcagtaaagatattcctccgtatatcatagccggacgcgaacctatcgcttacagtggaatcaacatcatcggactccgtcgtcgtggtttttcgaacgagattatagagaatatccacaatgcctaccgcatcatttatcaaagcggactcaacacttcggatgccctcacaaaggttgaagcagaagtgccggccagccccgaaatagaatacatcgttgattttattcgcaactcggaacggggaattatcagg

SEQ ID NO: 12496 - DNA, 1329 bp, Bacteroides fragilis
atgaaaaacaccaaccgttccattctccataaagatggagtaagttatatcctaccatttatcttagtgacctcttgttttgctctatgggggtttgctaacgatattaccaatccaatggtgaaggctttctcgaaaatattccgtatgagcgtcactgatggagcactagtacaagtcgctttttacgggggatactttgcaatggcctttcctgctgcaatgtttattcgcaaatactcttataaagccggtatcctgttgggactggggctatatgctttgggtgccttgctgtttttcccagcaaagatgacaggcgattattacccttttctgctcgcttattttatattgagatgtggactctcgtttctggaaacaagtgctaatccttatatattatcgatgggtacagaagagacggcgacccgacgattgaatctggcgcagtcgtttaatccgatgggatcattgctcggcatgtatgttgccatgaatttcattcaggcgcgtctgaatcctatggatacggtagaacgcagccaattgtctccggcagagtttgaagtattgaaagagtcggatctctctgtgttgattgctccttatctgattataggattagtaattctagcgatgctttttgtgatacgtgccgttaaaatgcctaagaatggcgataagaaccataatattgattttatacccacattgaagcgtatctttaaaattccccattatagagaaggagtcatagcacaatttttttatgtaggtgcacagattatgtgttggacttttgttatccaatatggaacgcgcttgtttatgtcgcagggaatggaggagaaggctgctgaagtgctttcccaggaatataatataattgctatgattattttttgcataagccgtttcgtgtgtacatttattcttcgctacctgaatccggggatgcttctcaagattcttgcgattgcgggtggtgcttttacgttaggtgtgatttttttgcaagacatatggggattgtattgtttagtagctgtttcggcttgtatgtcactaatgtttcccacgatttatggcattgctcttcgtggtttgggtgatgatgccaaatttggggctgccggtttgattatggcaattctgggaggctctgtgttgccaccattacaggcttgtattattgaccaacatacattgttgggtatgcctgctgtaaacttgtctttcatacttccttttatctgtttcgtagtgattattatttatggacatcgtacgtgtgcacgtgtgaagaagataaaagcagcacgaaag

SEQ ID NO: 12497 - DNA, 186 bp, Bacteroides fragilis
atggcaaagaaagcaaaaggtaatagagttcaggtgattctggaatgcacagaacacaaagatagcggtatgccgggaacatctcgttatatcacaactaagaatagaaaaaatactactgaaagacttgagttgaagaagtacaacccaattctgaaaagagtaacagtacacaaagaaattaaa

SEQ ID NO: 12498 - DNA, 540 bp, Bacteroides fragilis
atgtctgagattgaaaagaaatggtacgttttgcgtgctattagcggaaaagaagctaaggtgaaagagtatcttgaagctgatattaaaaacagcgaccttggcgaatatgtgtctcaggtattgattcctaccgaaaaggtatatcaggttcgcaatggtaagaaaattgtgaaagaaagaagttatcttcctggttacgttttggtggaggctgctttggttggtgaggtttctcaccatctgagaaatactcctaatgtgataggtttcttgggaggttccgataaaccggttcccctcagacagtcggaagtgaatcgtatacttggtacagtggatgaactgcaagaaacgggtgaagacttaaatgttccgtatattgtaggcgaaactgtaaaggttacttttggtccttttagcggattcagtggcatcattgaagaagttaatagtgaaaaaaagaaactgaaggtcatggtaaagatattcgggcgcaagacgccgcttgaattaggctttatgcaagtggaaaaggaa

SEQ ID NO: 12499 - DNA, 441 bp, Bacteroides fragilis
atggctaaagaagttgctggactaatcaaattacagattaaaggaggcgcggcaaacccatcacctcccgttggacctgcattaggttctaagggaatcaacatcatggagttttgcaagcaattcaacgccagaacccaagacaaagcaggtaagattttacctgttatcattacttactacgcagataagtctttcgattttgtaatcaagactcctcccgttgccattcagttgcttgaagtggctaaggtaaagagtggttctgctgagcctaaccgtaagaaagttgccgagattacttgggaacaggttcgtacgattgctcaggacaaaatggttgacttgaactgttttactgtggaagctgccatgagaatggttgcaggtacagctagaagtatgggtatcgctgtaaaaggggagttcccggttaataat

SEQ ID NO: 12500 - DNA, 696 bp, Bacteroides fragilis
atgggtaaactgacaaaaaatcaaaagttagctgcaggaaaaattgaagcagggaaagcatactcactgaaagaagctgcatctttggtaaaggaaatcacttttactaagtttgatgcttcattagatattgatgtacgtttaggtgttgatccacgtaaagcaaaccaaatggtgagaggtgtcgtttcacttcctcacggtactggaaagcaagtacgtgtattggtactttgtacaccggatgctgaagctgctgcaaaagaagctggtgctgactatgttggtcttgacgaatatattgaaaagatcaaaggtggatggactgatattgatgtgattatcactatgccatctatcatgggtaaaattggtgcgctcggtcgtgtgctcggtcctcgtggattgatgccgaacccgaagagtggtaccgtaactatggatgttgctaaagctgtaagagaagtaaaacaaggcaagattgacttcaaagttgataagagcggtattgttcatacttcaattggtaaggtttcattcactgcagagcagattcgcgacaacgcgaaagaattcatctctacattgaataagttgaaaccgactgcagccaagggtacatatattaagagtatttatctttctagtacaatgagtgcgggtatcaaaattgacccgaaatcagtagaggaaatc

SEQ ID NO: 12501 - DNA, 768 bp, Bacteroides fragilis
atgattagtccattagcatcgatagcccccggggcaaaaatcggaaagaatgtgatcattcaaccgtttgcttacattgaagataatgtcgaaataggggacgactgtatcattatgccctatgccagtgtgctgaatggtacacggctgggaaaaggtaacaaagtatatcaacatgccgtattaggagcagaaccacaggatttccactacaaaggagaagaaagttcactgattatcggggataacaaccatatccgcgaaaacgtagttatcagtcgggctactttcggtgggaatgctaccaaaataggcaatggcaatttcttgatggataaagtccacatttgtcacgatgtacaaatcggagataattgtgtagccggtatcggcaccaccatcgccggagaatgtaccttggatgattgtgtcatcctgagtggcaatgttaccctccatcaatattgtcatgtgggacaatggacattggtacagagcggttgccgtatttcaaaagatgtgcccccatacagcattatggccggtaacccggtagaatatcacggagtaaatgccgtagtattgcaacaacataaaaatacgagcgaaagagttctacgccacatagccaatgcttatcgcctgatctatcagggaaacttcagcttgcaggatgcagtgcaaaaaattatagaccaggttcccatgagcgaagagatagagaatatagtggcttttgtcaaagagtctaagcgtggaatcgtaaaa

SEQ ID NO: 12502 - DNA, 1743 bp, Bacteroides fragilis
gtgccggacaagggcagtgacagcatttaccgatacgatcatatttaccacatcgccatcagtgagccgcaacgggcactggcgctggccgatacagcggaaatgctcaacctcctgcgaccggaccacacctgtctcaacgccgtgaaagcaatgatctaccagaacggtctgggacagcgcaaactcgccaagttctattctcagaaagcgtatgaggatactgaattcaggaaagataccaacagctatctcaacagccttgcccaacttgccggtctctgctacaaatcgagcgattatgctgccgccatccgctatgctaccgaagggctgcagatggcccgtacacacggactgcaaaatctggaagccaaattcctgatgtacatcggtatgggccagttctatacaggaatcactaaggacgcgcaggccaacatgaaccggagcattgccctctatgaggaaatagtagataaagaacagtcatggagcagtgtgaacgaccttctctatacgctgggtgaaaccatggctgcgctgtgtgccataggcgattacgagcaggccgccacactgattcccaacatactgaaagccaacagccggcacgagcaaatggtggatcaggcgccaccgggtgccatagatatgtacaaggcgtttgtctatgcccagtgcatggaagtctatcagtatctgggccataaggagcaagccggcgagtgctatcagaagtgcctctctaccgactatgtgaagtcgcccgacggtgtggtgctgctcacccattaccggatatggacgggagactaccggcaggcgttgcatgacatccgaaccgccaagcggatataccggcagaaacggaacacggagagtgaatactatgccaacgaattgcttgccgatgaaatggaagcgctcacccggttggggcagtacaaggaagccgtcgacgtgagccgcgagattatcgcactgaaagatacccttttcgagcgtaagcagcaggacgacgcccaggaactggccgtcatctacgagagcggcgagaaagacaggcagatacagaaagaacaggctgagaagcatctgctgattgtatttgtaacggcagttatagtcgctttgggagtggcagtgcactacaaccgccggatgcaccgtcgcaatgtgtcgctggtacgttccgtgcaaaagggcattgcctgtaaggacgaacttttgcagaaggaggaggaatgccttgcatataaggcacaaatcgaaacaatggcgaagcggcttgaagagttggaacagacccctgatgacgattcctccgcttcggttgtgaatgcagaagcacccggagtgacggaaagtggaattacagtcgatgaaaaggaacttctgaaacatgcattgcatcaaatagcggtccgtcagctttatctgcaactgggcatcacggcgaaaaccttgcaggaggaactgcacgtccccgcctcgcttttcggcacatatttcaaggagcagaccgggcacagcttctctgaacatatcaataagctgcgtatggattatgctgccaagctgctcacggaatatccgcaatataccattgatgccatcgccaagatgtgcggcatagactcgcgccaacacttccaccgccttttttccgaatatttcggtatcacgccttccgctttccggaaaaaccatttatcatctgataataaggatattaaacaa

SEQ ID NO: 12503 - DNA, 1206 bp, Bacteroides fragilis
atgaaacaacatcttttaaaagaaatagaactaggtaccaaaagcgctcttctcaaaaagaaaattattacacattatatatataatggcagttcaacaattaccgacctgtctaaagaattggatcttagtgtccctacagtcactaagtttatcagtgaaatgtgcgaagaaggttatatcaacgactatggtaaattggaaacaagtggaggacggcaccctaacctatatggcttaaatcctgaatccggctactttataggagtcgatatcaaaagatttgccattaatatcggcttgatcaacttcaaaggtgatatgatggaacttaaaatgaatattccttataaatttgaaaattcaatagaaggattgaatgagttatgcaaactcatttcaaattttatcaagaagttgacaatagctaaagacaaaatattaaatatcaatgtaaatgtttccggacgcgttaatccggaatccggatatagttttagtcaattcaattttgaagaacgcccattatctgaagttttagctgaaaaattagggtataaggtaacaatagataatgatacgcgcgccatgacctatggagaatacctaaaggggtgtgtaaatggcgaaaaagatattatcttcgtaaatatcagttgggggctaggtgttggaatcatcatcgatggcaaaatttatacaggaaaatccggattttccggagaattcggccacaccagtacctttgacaatgaaattatttgccactgcggcaaaaaaggctgtctcgaaacagaagcttccggatctgcgctacaccgcatcttgctggaacgtatacaaaatggtgaaaactcaatcttatccaatcgtataggagacattaacaatcctataaccttggatgaaatcattgcttctgtaaacaaggaagatcttttatgtattgaaatagtggaagaaatcgggcagaaattaggcaaacaaattgccggacttatcaatctttttaatccggaacttgtcattatcggaggaacaatttcgctgacaggagactacattactcaaccaataaaaacagctgtccgcaagtactcacttaatctggtcaataaagactcggcaatcgtcacttcaaaactaaaagacagagccggtattgtcggagcttgcatgcttgcaaggagcagaatgtttgagtgt

SEQ ID NO: 12504 - DNA, 756 bp, Bacteroides fragilis
atgatagaattacagcatttttccataggttacaaagaaaactcgttgctccacgaggtaaatgccacgataaaaaaaggtcaactgacagcccttatcggaagaaacgggacaggaaaatcgacgttgctccgcgccatagccggtctgaaccggtgttattccggaaaaatcattctcgacgggcacgacatcgcctgcatgaaaaccgaagatatggcaaaaacgctggctgtcgtcacgaccgagcgcacgcgcatcgccaacctgcggtgcaaggatgtcgtagccataggccgtgctccttataccaactggataggtaggatgcaagaaacagataaggagatagtcatgcaatcgctcatttcggtgggaatggaggcttatgcaaaccgcacgatggataaaatgtcggatggcgaatgccagcgtgtgatgattgctcgtgcattggcacaggatactcctatcattctccttgatgaaccgacttcctttcttgacatgcctaatcgctacgaacttgtggcgttgcttcgtaggcttgtccacgacgagaaaaaatgtatcatgttctcgacacatgaacttgacatcgcgttgtccatgtgcgattcgatagcattgttagataccccgaatttaagttgcttgaccgcgtctgaaatgcagaaaagcggatacattgacagacttttccaaaatgaaaacatccgtttcgactccttatgcggtacaatgattttgaaacaa

SEQ ID NO: 12505 - DNA, 330 bp, Bacteroides fragilis
atgcgcgatatctacaaagcactctccattttcgaaacggcatttgaagaggtgtatggaatatcgctgaacgaagcaatggtgctatgtgcgttgcgcgaagccggaaaggaaattacctcgactgctatagccgaacgaacggaaatggctccgtcgcatacgtcgaaagtcatccgtgcggtagaagataaaggactcatccgacgggcattgggtgaagtagacaaacgccagatgtacttcagcctcacagaggcaggcaagaagcgtttaaacgaactggatctggacaaagtagagataccggaaatgttaaaaccactgata

SEQ ID NO: 12506 - DNA, 243 bp, Bacteroides fragilis
atgaattttatctggtacattttgataggtatccttgccggttattttgccggtaagataatgcgtggaggaggattcggccttttggtcaatctcttattagggattataggcggtgtgctgggcggttgggtgtttgcccttctgggactggcagcaaccggaattattggtagtctgattacttcggttgtcggcgcgatcttatttctctggatagcctccttcttcagtcgctcccga

SEQ ID NO: 12507 - DNA, 972 bp, Bacteroides fragilis
atgaaacgcaacattgccattgtggcaggaggcgatacctccgaaatcgtagtttccctgcgtagtgcacagggcatttactcctttatcgacaaggagaagtataatttgtacatcgtagaaatggaaggtcggcgttgggaagtgcaattgccggacggaagtaaaacaccggtggacagaaacgactttagttttatgaatggggcggagaaggtcgtgttcgactttgcttatatcaccattcacggaacaccgggagaggatggacgtttgcagggctatttcgacatgatgcgcattccgtattcatgttgtggcgtactggccgctgccatcacttacgataaatttgtctgcaaccagtatctcaaagcatttggtgtgcgtatctccgaatcgttgttgctacgtcagggacaggctgtctccgatgaagatgtggtggagaaaattggcctgccttgctttatcaaacccaatctgggaggatccagctttggtgtgactaaggtgaagacgcgcgaacagattcaacctgccattgccaaggctttcagtgaagctgaggaagtgatgatagaagcctttatgggcggaacagaattgacttgcggttgttataagacgaaagaaaaatcggtagtctttccgttgaccgaggtcgtgacacataatgaattcttcgattacgatgcaaagtacaacggacaggtggacgagatcactccggcacgtatatcggaagaactgacccggcgtgtccagactttaacctcggctatttacgatatattgggatgttccggcattattcgagtggactatatcattacggaaggtgagaagatcaatcttctggaggtgaataccacaccgggtatgaccgctaccagttttattccccagcaggtgcgtgccgccggactggatataaaagacgtgatgactgatattatagaaaataaattt

SEQ ID NO: 12508 - DNA, 2376 bp, Bacteroides fragilis
atggaattcataaatcctaaatttaagtatatttttgcctccattcttttgttggggggctttttatgtgggtataatttcaaacaatggtatgtaaccaaccatcgaaacgaaaaacatatttctcttatctattcttgttcaaaaaaagaggctgaccggggacaatttgaagaactgctgaagaaagaatttaggtcgaagggtgtagaacctatatttgataaatactatcttgattgtaaccgtttcggccaaaaagtcgaaatagaacacatcagtaattatcttgaagctctgaaaagtaagccgatagaccttgttatggcgatgggagatcaggctacccattctttattatcgactcgacatcctttgctctattctgttccggtggtagcttgtaatgtgcattttcctgatgaagaccttttgaaaaaatatgagtccaggaaagtatatgctctaagagatacccccgactttaagcataatatggaatttataaggtctttgcagccacatgttggtctggaaatcgtttataacattgacttgacgcctctcggtcataaatcttttgacttattaaatcaggtggttgatagaaaagatgtacagattctgggacataaatcagcattctccatggagtatgaatataaagaaatgagagaaatgattgagttttataatctgatgcctgccgtagcaaataaccggataaaaaagaatgagctgacaataagcctttgccccttccggtatattaaaggtgcttctttgcttgtaatgatggaaaattcaaaaagtgagcaggggaagaaagcatttctgcttgataaattcgatatggtatcgtttccgatagtgaatgccttaagcataccttcatttagttgtgtacatgccggattcggagaaggaaataaaattgttggtggctatatggccaccaaagagatttctgtgcaggctgcagctgatctgtctacccggttgatgaataaagaaaaaataggtatgcctaaaataagggatttgagaaaagaatatgttctcgattggagcgttttttctacttataatggttatgatattaaaaacgtgggcaagaatgtgcgtattattaattatcctatttatgatcattatcgtgaggaattttatttattgggtgtattatttgtctttgcattcatttttatttctgtcagtttgctgcatactcggcggcgttcgctgattgaacgcaaaaacttgaaaatactggaagaggcacacaagcgtttgactctttctgcggatggaggacagatttcgctttggaatatgcagggaagtgatattgagtttgatgataattatgcgcgtctgacaggagtagaaaaaaggaagtttaagagaactgattttttggagtatgtacatcctgatgactcgcagttattaagttctttttatgaagcattgtgcaaatctccgggtgtagaaatacaacgggtacgtttccgttttgatgaaaagaaaggttatcaatggtatgaattacgatgccgcagtctgaaggatattaaaggagagatgatgctggcggggatcatgcagaatattcaagagtcggtagaacgtgagcatcagttgattgtggcgaaacaaatggctgagaaagctgaactgaaacaatctttccttaataatatgagtcatgaaatccgtactccactcaatgccattgtggggtttacaaatgtattgttgggtgagggctccgaggagattgatccggatgaaaaggcgagtatgctcgaaattattaatcataataatgaattgctcttgaagctcattaatgatgtactggaaatttcccgcctagattccggaagtttggattttgacatgaaggaatggaatatgacagatattgtcaaagagatttataagacgtaccaacccttaatccggctttctttacagtttcgtctcgaattggatgatactgtttctgtgcctgttcatacagatcgtctccgttttgttcaggttatttcaaactttttgaataatgctaacaagtttacccaaaatggatatatcgctttggggtgtaaagtagacaagaagcatagggaggttcgtatatatgtggaagatagtggtaagggaattgatgaaaaggaacttatgatgatttttgagcgtttctataaaactgacgagtttgaacagggaagcggtcttggtcttgccatctctaaagttattatcgagcggttgtcgggacgtataaaagtacactctgaaaaaggtaaaggaagttgttttacagtgattttatcattggcggatgcaccggagaatcatatgttgatt

SEQ ID NO: 12509 - DNA, 864 bp, Bacteroides fragilis
atggctattttagaacgaaaaattatacatgagattgatacctcatgcagtcatattatctatccgcaatttgtgttaccccgacacaagcatgcggaatacgaaattatgctcttcactcaagggagtggaaaacagtttgtaggagaaggagtcgcggactttcaagaaggggatattgctttgatagggagcaatgtgcctcatctgcatctttgtaattcaaaactgaatcctgttgcgaacactgtatgcagtgccggagaagccttacagtttcttccggacatatttcctgtacatatagaaaatttgcctgattatcaagagatttatcgtctactgagaaaaagtcaatatggcgttcgcttttatgataaagggttgtatgatgaggtcaaagaattgtttcaggagatggatctcttaaaacatactaatcgtttgatcactatattacgtatcttggggagactgactgaatgtcggaatattaaattactttctgatgtagcctacaatggttctaataggcttctggaagtgaatgaaccggtcaataaagtgtatacctatttatttaatcattttaaagagaaagttctcctgcaagaagtggctgattatgtaaagcagaatccttctgcactttgccgttactttaaacaacggacagacaaaagtatttttcagtgtctggcagaaatccggatagaacatgcttgtaaattactgtcatattcaaacttgtctgtttcgcaaatagcttttgagtccggtttcaacagcgtaccttattttattaagcagtttcagagtatcactgaaaagactcccggtgagtatagggaattgataggcaga

SEQ ID NO: 12510 - DNA, 447 bp, Bacteroides fragilis
atggatttattcgaaagagtcagcgaagacattaaaaacgcaatgaaagcgaaagataaagtagctctcgaaactctcagaaatgtaaaaaagttctttttggaagctaaaacagctccgggagctaatgacacccttacagatgcagatgcactgaaaatcgtgcaaaaactggtaaaacaaggtaaggatgccgcagaaatatatataggacaaggtcgccaggacttagctgatgcagaattggctcaggtgcaagttatggaaacttatctgcctaagcagatgagtgccgaagaattggaagccgcactgaaagaaattattgctgaagtaggtgctaccagcggcaaagacatgggaaaagtaatgggagtcgcttctaaaaaactggcaggattggccgaaggacgcgcgatctcagctaaagtaaaagagttattggga

SEQ ID NO: 12511 - DNA, 1209 bp, Bacteroides fragilis
gtggcattgctacgtctcctgctatcaatggggtatacctgcgaagctgctcactgcaatttccatttgcgggataaagaatcggacagagacgaagcttttgtgcgccgattatgccatgaatcaggggttcttttacacatagaacatttcgatacaacccaatacgccgcaaagaaacatatttctattgagatggctgcccgggaattacgttatgaatggttcgaaacgcttaggagacaacgtgaagccagtgttatcgcaacagcgcatcataaagatgacagtgtagaaaccgtattgttgaacctgattcgcggtacgggtatcaacggattactcggaattcgtccacgaaacggtaacattgttcgccctttactttgcctgagtcgcgaagaaataatagcctatctgcaatatatcgaccaagattacgtaacggacagcaccaatcttttggatgaatatacccggaataagattcgtttaaacttattgcccctgatgaaagagatcaatccgtcggtgaaagagagtatcatccgcactaccaactatctgaatgacgcagcaactttatacaatcaaagtataggggaggcgcgtaaacgtatattgacccccgaaggcatccggatagaagccttgctgcaagaaccggtacccgaagccattttattcgaagtattacacccgctaggattcaacacgacccaaatagataatataaggcaaacgctcgacggacaaccaggaaaaatcttccttggtaaaggatggagagtcataaaagaccgtgacctgttattaatcgaagaagatacaactgcagaagagtcccagccacctttccggttagttatggaagagtacgattatacttctgaatttataattccaaaagataaaaacacggcttgcttcgatgctgacaaaataaataaaacatgggagatacgcaagtggaaaccaggagatgtttttatacctttcggaatgaccggtaaaaaacatgtcagtgactacctgacggataaaaaattctctttgagtgaaaaagaaaagcaatggatattatgctttggagaacaaatagcctggctgataggagaacgtacggataaccgatttaaggtaaacgagaacacaaagcgggtaataatagtccgaatcgtttccgaacattcagattttattgaggaa

SEQ ID NO: 12512 - DNA, 1569 bp, Bacteroides fragilis
atgaacaaaattgatatgacaaacgaacgaatgaaattactgaactgcacattgggattagtggcaggggtgtctttgccggtaagtgccttggccgtacctcagcctgcccaggaacaaacagagaaacaacccaacatcatcctgattgtcgccgatgacttgggatacggagatttaagttgttatggcgcacaccggattcaaactccgggtatggatcgtatagccaacgaaggtattcggtttacgcagggattttgtactgcggccacatctacccccagccgctattcggtgatgaccgggaaatatccctggagcaatgtggatgctaaaatcttaccgggtaacgccgcattgattatcgatactcaaaaaataacgttgcctaaacttatgaagcaggcgggatatactaccggttctgtcggtaaatggcacatcggcctaggagatgggcatgtggactggaataaggaggtgcatcccggagccgctgagatcggttacgactattcgtttattcaggcagcaaccaatgatcgcgttccttgcgtctttctggaaaatggaagagttgtcggattggatccgaatgaccctctttatgtggattaccggaaaaacttccccggtgaacctaccggtaaagagaaccccgaattgttgcgcatgcatcccagtgtgggacatgcaggctctattgtgaatggagttccccgcattggtttccagaaaggtgggaaggctgcacaatggaaagatgaagaaatggcaggattattcctggacaaggccaggcagtttgtagatgacaataaagacaagcctttcttcctttattacggacttcaccaaccgcatgtacctcgtgttcccaatgaacgttttgtaggaaagtcaggcatgggaccccgtggtgatgtgattctggaggcagactggtgtgttgatcagttcctgaaagagttggataagttgggattggcggagaataccattgtgattctgacgagtgacaatggtccggtgctcgatgatggttatcaagatgatgcggtagagttggtgggtgatcacaaaatagccggtccgttgagagggggtaaaacaagtatgttcgacggtggtacccgtataccgttcatgcttcgttggcctgcaaaggtgaagcctcaggtgtcagatgtatttgtctgtcagatggacctattggcctcgtttgcttctcttttgggacagacttatccggacaaggtagatagcgaaaacacactcgatgcttttctgggcaagagtaaaaaagggcgtaaagagttggttattgagggaatgttcaattatgcctatcgtcagggagattgggcgctgattcctccatattacaatccttatagcaaggaagacggtgacttcatcggtttgggttacggttataagttgtataatttgaagtcagacatcggtcaacaaaagaatctggccgagaagtatcctaaaaagttgggtgaactgatcaatcgttttgagtatctgaaagctcactccgacaaagtgacgagattt

SEQ ID NO: 12513 - DNA, 2796 bp, Bacteroides fragilis
gtgatatggacaggatgtttaaacgatgataggtttgtacctttagcaatgaaaaaaactattcaacagctggtactcgaacgtatccttatattggatggcgctatgggtacaatgattcagcaatataatcttagagaagaagattttcgtaatgaacgctttgcgcatattcccggtcaactgaaggggaataatgatttactttgtctcacacgccctgatgtgattcgggatatacaccgtaagtatctagaagccggtgcagatatcattgagacgaatacttttagttctaccactatttctatggccgattatcatgtacaagagtatgtgcgtgaaatgaatcaagcggctgtaaagctggcacgtgaagtggctgatgaatatacggtactaaatcccgataaaccccgtttcgtagccggttcggtcggtcctaccaataaaacatgttctatgtcgccggatgtgaataatccggcttatcgtgctgtgacttatgatgaaatggctgatgcttatcagcaacagatggaagctatgcttgaaagtggggtagatgctttattgatagaaactatctttgatacgctgaatgccaaagctgctattttggcagcagaacgtgcaatgaaggctacaggagtaaaagtgcctgttatgttatctgtgacggtttccgacaccggaggacgtactctttccggacagacgttggaagctttcttggcttcagtgcaacacgctgatatcttctcagtcgggttaaactgttcgtttggtgccaggcaactgaaacctttcttagagcaattggccgctcgggctccttattatattagtgcttatccgaatgctggtctacctaatagtttaggaaaatatgaccagactccggcagatatggcccatgaagtaaaagagtatgttcatgaaggattgatcaatatcataggtgggtgctgtggtactaccgatgcctatattgcagaatatcctgcattgattgccggagcaaaaccgcatattccggtttgtaaaccggattgtatgtggctttcgggattagaactgttggaagtgaaacctgaaataaatttcgttaacgtgggggaacgttgcaatgtagccggttcgcgcaaatttcttcgtttgattaatgaaaagaaatatgacgaggcattatccattgcccgtaaacaggtagaagacggagcactgattatcgatgtaaatatggacgatggtcttctggatgcaaaggaggagatgacaactttccttaatctggtggcttcggaaccggaaattgctcgtgttcctgtaatgattgattcttcgaaatgggaagttatcgaggccggattgaaatgtcttcaaggaaaatcaattgtgaattccatctcgttgaaagagggagaggagaaattccttgaacatgctcgtacggttcgccaatatggtgcggctgtggtagtgatggcttttgatgagaaagggcaagctgatacagccacccgtaaaatagaagtttgcgaacgggcctatcatttgcttgtagataagataggattcaatccgcatgatatcattttcgacccgaatgtattggctgtggcaacagggatcgaggaacataataactatgcggtagattttatagaggcgacggcttggattaaaaagaatcttccgggcgcccatatcagtgggggagtaagtaatctttcgttctcattccgtggaaacaactatattcgtgaagcgatgcatgccgtatttctttaccatgccattcagaaagggatggatatggggattgtgaatccgggtacttctgtattgtatacagatattccggcggatgtacttgagaggattgaagatgtagtattaaaccggagaagtgatgccgcagaacgattgatagaattggctgaccggttaaaggaggcttctgcgggtaatacttcggctgggcaaccggtaaaacatgatgcctggagggacggtacggtagaagaacgcttgcaatatgctttggtaaaaggaatcggggattttctggaagaagatcttgctgaggctttgcctaaatatgataaagcggtggatgtgattgaaggaccgttgatgaatggaatgaatcatgtgggcgaattgtttggcgcaggtaagatgtttcttccacaagtggtgaaaacagcccgtacgatgaagaaagccgttgcaatcttacaacctattatagaatcggaaaaggtggaaggtactgcttcggcaggaaaagttttgctggccactgtgaaaggggatgtgcatgacattggcaaaaatatagtctcggttgtgatggcatgtaatggttacgatattattgatttgggagtgatggtaccggctgaatcgattgtccaaaaagccattgaggagaaagtggatatgatcggacttagtgggttgattactccttcactggaagagatggtacatgtggctatggaattagaaaaagccggattggatattccattgttgataggaggagcgactacctctaaactacatacagcattgaagattgctccggtttatcacgctccggttgttcacttgaaggatgcttcgcagaatgcgggtgttgctgctcggctgatgagtccgaaatcgaaagaagagttggcaaaagaattatccggtgaatatgaagcccttcgtgataagagcggcatgatgaagcgtgaaaccgtttcattgaaagaagctcaggaaaacagattgaaacttttt

SEQ ID NO: 12514 - DNA, 1605 bp, Bacteroides fragilis
atggcaaatttagatttaagcaagtacggtattacaggtgtaactgaaatcctgcacaacccgtcttacgatgttttgttcgctgaagaaacaaaaccaggtctggaaggctttgaaaaaggtcaagtaacagaattgggtgctgtaaacgtaatgactggcgtttacacaggccgttctcctaaagataaattcttcgttaagaatgaagcttctgaaaattcagtatggtggacttctgaagaatacaagaacgacaacaaaccttgttcagaagaagcttgggctgacctgaaagctaaagccgttaaagaactttctaacaaacgcctgttcgttgttgatactttctgtggtgctaacgaaggtactcgcatgaaagtacgtttcatcatggaagtagcttggcaggcacacttcgtaactaacatgttcatccgcccgacagctgaagaacttgctaactacggagaacctgatttcgtatgcttcaacgcttctaaagcaaaagttgataactacaaagaactgggtctgaactcagaaactgctacagttttcaacctgaagactaaagaacaagttatcctgaatacttggtacggtggtgaaatgaagaaaggtatgttctcaatcatgaactacatgaacccgcttcgtggcatcgcttctatgcactgctctgctaacacagatatggaaggaactagctctgctatcttcttcggtttgtctggtacaggtaagactactttgtctactgacccgaaacgtaaattgatcggtgacgacgaacacggatgggacaacgaaggtgtattcaactacgaaggtggttgctacgctaaggttatcaacctggataaagaaagcgaaccggatatcttcaacgccatcaaacgtgacgctctgttggagaacgtaacagtagctgctgatggcaaaatcaatttcgctgacaaatcagtaacagaaaacactcgtgtttcttatcctatctaccacatcgaaaacatcgttaaaccggtgtctaaaggtcctcacgctaaacaagttatcttcttgtcagctgatgccttcggtgtattgcctccggtatctatcttgaacccggaacaagctcagtactacttcctgtctggatttacagctaaattggctggtacagaacgtggtatcactgaaccgactccgacattctctgcttgcttcggtgctgcattcttatcattgcacccaactaaatatgcagaagaattggttaagaagatggaaatgaccggtgctaaagcatacttggttaacactggatggaacggaagcggcaaacgtatttctatcaaagatactcgtggtatcatcgacgctatccttgacggttctatcgacaaagctcctactaaggttattcctttcttcgactttgttgttcctacagaacttccgggtgttgatccgaagatccttgatcctcgtgatacttacgctgatcctgcacagtggaatgaaaaagcaaaagaccttgccggtcgcttcatcaagaacttcgctaagttcactggaaacgaagctggtaagaagttggttgctgctggtccgaaactc

SEQ ID NO: 12515 - DNA, 252 bp, Bacteroides fragilis
atggcaaatcataaatcatcaatcaagagaatcagacaagaagaaactagaagacttcgtaacagatattatggtaaaaccatgagaaatgctgttagaaaacttcgttcaactactgacaaagcagaagcaactgctatgtatccgggcatcgttaagatggtagacaagttagctaagacaaacgttattcataagaataaagctaacaatctgaaatctaagttggccatttacatcaacaagcttgct

SEQ ID NO: 12516 - DNA, 450 bp, Bacteroides fragilis
atgaaactggctcctataaatataaagaataaacgtgctactttcgactatgagttgatcgatacttatacagcaggtattgtgttgaccgggacggagattaagtccatccgtctgggtaaggcaagcttggtagatacgttttgttattttgcgaaaggcgagttgtgggtgaagaatatgcacattgccgaatatttttatggctcgtataataatcatgcggcccgacgtgaccgtaagttgctattgagcaaaaaggagctgaataaattggaaagagggacgaaagacgccggattcaccattgtccctgtgcgtttgtttattaatgaaagaggtttggccaaagtggttgtagctttggctaaaggtaaaaagcaatatgataaacgggaggctttgaaagaaaaagacgaccgtcgtgatatggacaggatgtttaaacga

SEQ ID NO: 12517 - DNA, 1140 bp, Bacteroides fragilis
atgggagaggtaacatatcgacaaaaatccatatatttgtgctttcaaatcgtcagcataatgaaaaaggagtttacacgaatagccataaaagtgggaagtaacgtactgacccgacaggacggaacactggatgtcacccggatgtctgcgctaaccgatcagatagccgccttgcataaagccggagtagaggtgattcttatctcttcgggagctgttgcctcgggacgaagcgaaatacgtaccctcaggaaactcgacagcgtagatcagcgccaattgttctcggcagtgggtcaagccaaactcattaaccgatattacgagctgttccgcgatcatggcattgctgtaggacaggtactcaccaccaaagagaattttggtacacgccgtcattacctcaaccagaaaaactgcatgacggtgatgcttgagaacggcgtcattcctatcgtcaacgagaacgacaccatctccgtcaccgaactgatgttcacagacaatgacgaactgtcgggcctcatcgcctcaatgatgaatgcacaggcccttatcatcctgagtaacatcgacggcatttataacggttccccttccgatccggactcattagtgatccgggagattggacagggaaaagacctgagtaactacattcagaccagcaaatcgagtttcgggagaggaggcatgctgaccaaaaccaacattgcccgcaaagtggcagatgaaggtattacagtaattattgccaatggcaaacgcgacaacatccttatcaacctcatagagcatcccgaagagacggtttgcactcgttttatccccgcatcccaacccgtatcgagtatcaagaaatggatagctcacagcgaaggtttcgctaagggagagatacatatcaacgaacaggctaccgaagtgttgaactccgacaaggcagtcagcattcttcccgtcggaatcacccgcattgaaggagaatttgagaaagacgacatcgtgcgcatcattgattaccggggtactccggtaggtgtaggcaaagtcaactgtgactccatgcaggcacgggactccatcggaaaacatggaaaaaaagcagtagtccattatgactacctttacattgaa

SEQ ID NO: 12518 - DNA, 366 bp, Bacteroides fragilis; identical to SEQ ID NO: 12348

SEQ ID NO: 12519 - DNA, 447 bp, Bacteroides fragilis
atgtgtggaatcgtaggctacattggtaagagagaagcctaccccatccttatcaaggggctgaagcgactgaagtatcgcggatacgacagcgccggggtagcgatcatcaacgacaaccagctgttaaatgtatatcggccgcaaggcgaaacgttcgtgtttgcttctgacggcattatcgagactcccaccgttatcctccaagaatttccatcccaaagttacatcttccgtaacagtacctatacagaggtacccgtttattccttttcttctttccgcccgatgcatcagttttgtaagataacggcttctcgtgctgtgaggccggaaacattaaagtgctctgattcgttgataattagagaggttttttctgacacactgttgcaagacgggaaagatgaagcgaccgggatgagggaagagagtgtgactatggag

SEQ ID NO: 12520 - DNA, 1054 bp, Bacteroides fragilis
tttatgtgcatgcacccgcttgttccggaggatcaggcggccggataccgcgaactgattcacaacctgagtgaagagctgaaagtcatcaccggatttgccggagtaagcctgcaacccaattccggtgctgccggtgagtatgccggtctgcgcaccatccgtgcctatcttgaaagcatcggacaaggacaccgcaacaaagtattgatccccgcatctgcacacggcaccaatcccgcatcagccatccaggccggattcaccactgtaacttgtgcatgtgacgaacatggaaacgtagatatggatgacctccgtgccaaagctgaagaaaataaggataacctggccgcactgatgatcacctatccctcgacacacggtatctttgaaacggaaatcgtagagatctgccaaatcattcacgcctgtggagctcaggtatatatggatggagccaacatgaatgcacaggtaggactgacgaatccgggatttatcggagcggacgtctgtcacctgaatctgcataaaacctttgcatctccccacggaggaggcggccccggcgtaggtccgatctgtgtagcggaacatttggtaccgttccttccgggacacggactgtttggcaactcacagaacgaagtatccgccgcaccgtttggcagtgccggtattctgcctatcacctacggctatatccgtatgatgggtgccgaaggactgacaatggcaaccaagacagccattctcaatgcaaactatctggctgcttgcctgaaagatacgtatggcattgtataccggggagccaacggctttgtgggacacgagatgattctggaatgtcgcaaggtatacgaagaaaccggtatcagcgaaaatgatattgccaaacgcctgatggactacggctatcatgctcctaccctctccttcgcccgtgcacggcacactgatgatcgagcccactgaaagcgaaagcctctccgaactggataacttcgtccttacgatgttgaccatctggaatgaaattcaggaagtg

SEQ ID NO: 12521 - DNA, 1194 bp, Bacteroides fragilis
atggagaaaaatcactatatacattatactgctgccgatttgttgaatgacgggactttcctggattcgatgcaacaccctacggagcaaagtgaaaagttctggtcacaactggaaaaggaaaatgaaacttttgccggagaattacgtatggcccgaagctttttaatggctgtggcggaaagccctcaaaaacggatgacagacgatgaagtggggacactttgggagcgaattagccggcaggtagcgatggagaaaagagtgaaaagaaaaaaacagttgcttttcttacgtgtggccgggattgctgcttgcatatcagtgttggcattgagcagttactttgttttttcacttatttcattttatgaagaaagttcttgttacagtttggccggtatttccgagccggatagcagtaatgacatacagctgattttatcggaaggacgtaagttggttatggatgggaaagaaagcaggttgcactacaaggaaggtggtaagatagctattagttccggaaagacccaattggacgaagaaaatgaaaccggttacaatcaattaattgttccttcggggaaacgttctttcataactttctccgatggtacccgagtagccgtaaatgccaatacccgtatagtatacccgtcagagttttcgggacataagcgggaaatttatgtgaatggagaagtctatcttcaagtatctcctgataaaaagcatcctttcgttgtgaaaaccaatcgcatggaagtagaagtgttgggtacggaatttaatgtaagtgcttacgattttacaaaaaatcaatcggtggttctagtatcaggtaaagtagaagtggatacatataaatatcctaaaaaagttctgaagcccaatgatatgttgacttatgacggacaagacgacgggctacgggtaaatacagtagatgtgtctgaatatataagttgggtggatggttattattgtttcaaccatgagaagattgaaatcataaccgaaaagctatctcgatattatggaaagcgtgtcatacctgattccggattgataggattgacttgtagtggtaagctcgatttacgagacgatttacgggatgttctggaagtattaagtaaaactatacctgcacaaatagagaccagagataattattttttattaaccaag

SEQ ID NO: 12522 - DNA, 5778 bp, Bacteroides fragilis
atgagaattaaactgatttgtattatcgtgttactttctatggggatgatgtcatggacacatgctcaatcatacgatagattatggaagcaagtggagcaggctcagcagaaaagtttgccccaaacagttgtccgattaaccggtgaaatttatcaaaaagctaaagcagagaagaattctcctcaaatgctgaaagcttatatttggcagatgaaatttagggaagagattactccggatagcttttacgtgtcgttgaatggcttagagcagtgggcggtgactacggacaagccattggaccgtgcaatcctgcattcgcttatcggtagtatgtatgcagattatgcttcccaaaaccgttggaaactgaatcaacgtacggatttggaagaagaagctccctctgttgatatccgggagtggagtaagaatcagtttgtaactaaagtaatgacagaaatagccgtaacatttcaagactctttgctactgctcgatacttcctcccgaagctacattccttttgtggaacttggagtaaccagtgattactatcatcatgatatgtatcatttgttggcttcccgtgccattacttcattggagaatctgtccggatttggccgtgattctttaataaatgtacgcattgaagaaatttatcagcatatgatgaattcatatcgtcggactgataatcacgatgctctgttgcttactactttggattatttgcagtggaagaggcgtactgatatcgattttcggccttatcgtgctccggaggggaaacttggcttgacacaggatccttatttggctgcactggacaaactgattgccgaaaataagtcacatgatgtctgtgcagaagtttatttgctcaaggcacaggcggcaatggatgcaggagtgcccgtttccgcgttacaattgtgcgaagaggctatctctcgctatccggactatcgccgcatcaatgctctgaaagaactgaagcaagaaattctgcgtcccgatctgacagtacaatccccgtcaacagtttatccgggtgaggagtttgatttaaaagtcagctttaaaaatttgaaagactttacggtagagttgtatgcaattaatttaccggcacgtccgaatacggtggaagcacccaatgacgcatttctaaaaaaacatggacgtttactttcatcggaacattatgttctcttcccgtcggatgactataaagtgaaagattccatctaccacataaaggcacctgaaacaggactgtacgccctccgtgttattccgggtgttaaggttcgttccaatgtttcaaaatttctctattctacttgctttaaagttcttacccgatctctaccttctaatctgagtgaggtagctattctcgatgctatgagtggcaagcctttgcagggtgttgttctttcattcttcgatcgacagaacaaacaacttctgacagccactaccaataccgaagggaaagtacagtttgcttcatcggaaaaatataggtatctgactgctgccaaagggaatgatacagctatgccgcagatgtatttatggggaggagattataattttgcagaccattcaaaacctgtttctgtggtaactttgcttaccgaccgttctgtttatcgtccggggcagactgtctatgtaaaaggcattgcctatgaactgtatcctgactctgcccatgtgattgcgggacaggaatatacgctgactctttcggatgccaatgggcaagaaatcagtgcaaagaagctgcgtaccaatgattttggatctttcaccgcagaatttgttttaccgtccgtttgtttgaacggtactttcagtttgaatactcaaaacggatctcgttccattcgtgtagaggattacaaacgtcctacatttgatattacttttgagccggtgactgaaagttatcggttgggagatcgtgtcgagttgaaagggagtgtaaaaactttcagtggtgtgccgttacaggatattcctgttgcttataccattacccgctcattgtatacttggcggatgtgggggatgaatccggttattttggcctctgacactgtccgtttgggagtagatggaaacttcgaaattcctgtggatctgaaaccagacacttcgaatcccgatttgggagacggtgacaatacctctttatattatgactataaagtgcagctttcagtaaccaatgtcgcaggtgaaacgcaaacctcagaaacaagtctgcgggcaggaaagacctctttgttattgtttgctgatatatccggactgatttgcaaggatgattctgtgaaagcgacttttcgggtaaataatctggatcgtaaaccggtcagtgtcgaaggcagttaccggttgtttttgatttccgattatcagaaatcaaaacccttgaaagaacaggacgtttccgatcaaccggctctttccggttcgtttaggtccaatgaagagatcttgttgtccgattggaaaaaacttccttcaggtgcttacaaacttgtagcttcggtgaaagatgatcaaggccgtaaggtagatgcggaaaaggtagtgattctttttgcttccgatgataagcgtcctccggtatctatgcctttgtggtgttatgaagtgaatacccggtttgatgtagcacatcctgccctgttctattttggtacttccgaaaaagatacttatgtcttaatggatgtgttctgtggtaataagcatctggagagtaagcttcttcatttgtccgattctcttgttcgttttgaatatccgtatcgggaagcctacgggaatggtttgggtattacctttgtatttgttcgtaaaggtgttgtttacgaacaggaggtaagcctgataaaacgtttgcccgatcataacttgaatatgcgttgggatgtattccgtgataaattacgtcccgggcaggaagaggaatggaaactaactatccgtaatccacagaaatcacctgttttggccgaaatgctggctactatgtatgatgcctctttggataaaatttggaagaccaaccagtcattgcaattacattatcaactttctgtccccattgctcgttggaggagagattatgttggctcaaactatttttattttggtttccgccggactgatttgaaggtgcctccgtttagctatgatcattttgacttgcctccggttttatatgcggttgccgaaatgttgtcggtcaccaatgatgctgctccgactacccgatatgcacgtctgcgcggaatgggtgctgcaaaaccacaaatgaagagcgctgccgtagccgatgtcgttttcgaatctgaaatggttcctgttacggaagagagtggaatggcaatgtcaatggacaatgccgatatgggtaggacaacagatatagagttacgtaccgactttgcggaaactgccttcttttatccgcagcttcacacgaacgttcagggtgaggtcagtttctctttccgtatgcctcaaagtctcacgacctggaatttccgaggatatgctcatacacaagatatgatgacagggcagatggatgctactgctgttaccagtaaagagtttatgcttactccgaatctacctcggtttgtccgggtaggagatcacacttccatggctgcttctgttagtaatctgaccggtaaaaatctgtctggtactgtgaaactggtacttttcgatccaatgacagatcaggtaatatcgccccaacagaagaaatttaatgctggagccggacagagtgtcggtgtaagtttcttgttcacagtaactgataaatatgaaattttgggatgccggatgattgccgaaggaggaaatttcagtgatggagagcagcatttgcttccggttctcagtgataaggagaacttgacagagactttgcccatgcctgttcgtggcgagcaaacacgtactttttctttggccgatctgttcaatcaccatagtaagactgcgaccaaccgccgtttaactgtagagtttacttccaatccggcttggtatgcagtgcaagcattaccggcactatcacagccccagaatgatgatgctatttcgtgggctacttcctggtatgccaatacaatggcttcttatatcatgaatgctcagccacgtattcaggcaatatttgatagttggaaactccagggaggcactaaagaaagtttcttgagtaatttgcaaaaaaatcaggaagtgaagaatatctttctttctgaatctccttgggtgatggaagcgacttcggaaagcgaacaaaaagagcgtattgccactttattcgatttgaataatatccgtaacagtaatacagcagctttgttgaaattaaaggaactccagttacctgatggttcgtggagctggtataaaggaatggacggaagtctttttgtcaccgacttcattgtagaacagaatgcacgtatagccctgcttacagggaagccgctggagggaggagcgctggatatgcaacaagcagctttcggttatctccataaagaagccttgcaggaatatcgttctatccgtgaggcagaaaaggttggcaataaatcagagggaatttcacgaagtgcattgaagtatctttatttgattgctgtctctggcgaaaaagttccggcatcggtgaaagaaggttatgattacttcctatccaaagttgctccatcattgtctcaacaatccgtcactgagaaggcctggtcggctattgtattacagaaggcaggtaaggtaaaagaagctcaggagtttatggcatctctcaaagaatatcttactcaaacagacgagcaaggcatgttctttgataggactgatagtccgtatgcttggaataacttaaaagtgcctgcccatgttgatgtaatggaggcttttgagatggtaggcagcaatgccacgattgttgaagaaatgaaaatgtggcttttaaaacagaagcaaactcaacagtgggactctccggtagccacagccgatgctgtttatgctttgctttaccggggtactaatttattggataatcagggagacgtgcgtattgtccttggcaatgaagttttagaaacgataagtcctgccaagacgactgttccgggattaggctatatcaaaaagacttttaccgataagaagaccgtgaataccgatgagattatcgttgaaaagagagatccgggtattgcctggggagcagtttatgcacagttcgaagagaatcttgataaagtggtccgccagggaagtgggttgaatgttgataagaaattgtatgtagagacgattgttaataataatcgccggttacagccggttatcggtaaaactcaattaaaggttggtgataaagtagttgttcgtctgaccgttcgtctcgatcgtacaatggactttgtacaattgaaagatcaacgtgctgcttgtcttgaaccggtagaggtcctgtccggatatcgtaatgtcggtgatgtcggttgttatgttgcagtaaaagatgcttctaccgatttcttcttcgatactttgaataaggggacttatgttttagaatacagttatcgtgtagatcgtgcgggaagttatgaagcaggaattgctactattcaaagtgcctatgcacccgaatatgctgcccattcagcttctgcccgttacgaagtttctcag

SEQ ID NO: 12523 - DNA, 1017 bp, Bacteroides fragilis
atgatagctaagattaatcaacttcttgaagaggtgggggccttgaaagccgccaatgccgaagaactcgaagttctgcgcatcaaatacctcagcaagaaaggagccatcaatgacttgatggcagatttccgcaatgtggctgccgaacagaaaaaagaagtcggcatgaagctcaacgagctgaaaacaaaagcacaagaaaaaatcaacgcactgaaagaacagttcgacaaccaggacaacggacaggacgatctcgacctgacccgttcggcttatcccgtggagctgggcacacgccatccgctttccattgtgcgcaacgaaatcattgacatctttgcccgtctgggattcaacattgccgaaggtccggaaatagaagatgactggcatgtgttctccgcactcaactttgccgaagaccatccggcacgagacatgcaagacacattcttcatcgaatcccatcccgacgtactactgcgcacacacacctcatcggtacagagccgtgtgatggaggtttcgcaaccacctatccgtatcatctgtccgggacgcgtttaccgtaacgaagctatcagctatcgtgcacactgtttcttccaccaggtagaagcgctgtacgtagaccgcaatgtatctttcaccgacctgaaacaagtgttgctgctcttcgccaaagagatgttcggtgccgatacgaagattcgcctgcgtccgtcgtacttcccgttcacagaacccagcgccgaaatggatatcagctgtaacatctgcggcggaaaaggctgccccttctgcaaacacaccggctgggtcgaaatcttgggttgcggaatggtagacccgaacgtacttgatgccaacggaatagacagcaaagtgtatagcggatatgctctgggtatgggtatcgaacgcatcacaaacctgaaatatcaggtgaaagacctccgcatgttctccgaaaacgatacacgtttcctgaaggagttcgaagcggcctat

SEQ ID NO: 12524 - DNA, 1461 bp, Bacteroides fragilis
atgaaacaagcgcagagtagtctggaacaaaaagaatacactaaggcgcgttatcttttcatccaggcctatggcgctttcgcaacgcaggaaaattatccgaaagccgtggaatgcggaattcagggagcagctctgtaccatcgtgaaaattattacaaagaggcattcgacctctgtagaggaatggatcagctagtctgggccggtgaacaaaaacagcagaaacaattttacccgctacgtttccaaatcaccaaagagagactgcagatgtacatcggactaaagaatgcggcgcaggctaaaattcaattggataagttggcagaaaccgtaggcctggccaagaacgattcattaagcgagaacctactatacacacaggcaagttattactacacattcgggcaaaacactcagggagacgcgtgctttcagaaattaatcaaccaatataaagctcaaaagaattacgataaggtcaacgaatgctataaaaaactgattgccatcggacgtaaatctaacaatgcctcactggtggcccgcacttacgagaacttcatcgtctggaccgattcggtaaaagcaatgacggcacaagacgaactgaacgtactgaaacgcaagtatgacgaaagccagcagatcattcaggagaaagaagacacactttcgggcaaacagtatatgatcgtcgggctgtgcacactggtagtaatcctgattgccggtctgatatttgtggccatcgtactgcttcgtttcattgccggtaaccggaaactgaaaaagagcgtacagatagccaatgaacacaatgaactgaagacacagtttatccagaatatttcagcacagatggaacctacgctggatacactcgcctcttctgccgccgagctgtcggacaaagcacctcaacaggcacagcagatgcaaggacaagtagcagccctgaagaagttcagcaatgatatacaggaactttccacattggaaaactctctgaccgaaccttatgaaatgaaggagatcaacgtaaatactttctgtgaagctaccatggataaggtgaaagagtttgtacaacccgaagtttcgaccgtagtcaatgctgccaaactccagatcaagaccaatcctgaacaactggaacggatcttgattcacttgctgaagaacgctgcggaatataccgaaagcggaaagatattccttgatttcaaaaagagaggcgcacatacgcaccaattcattatatcggataccggtacgggtattcccgttgagaaacaagagaacctgttcaagcccttcactgaaatcaaagacctgacagaaggagacggtttaggactacccatctgcgccctgatagcaaccaaaatgaacggcagcctgacactggataccagctataccaaggggagcaggtttgtactcgaattacataca

SEQ ID NO: 12525 - DNA, 2244 bp, Bacteroides fragilis
atgactatcgaagaaataaaaaaccaagtattacaaggaacggctatcagccgagagcaggccgaatggctggcgctctatccccgtaaagaagagttgtatgatgccgcgcacgacatcaccaccgcctgcgcttcgcaggagttcgacatgtgttccatcatcaatgcccgctcgggacggtgtccggaaaattgtaaatggtgcgcccagtcgtctcactacaagaccaaggccgatgtatacgatctggtgagcgcagaagagtgcctgcgacaagcaaaatacaacgaagcacaaggggtcaaccgcttttcattggtgaccagtggacgcaaaccttctcccaaaaacatgaaagagctctgtgtagcggcccggcggatgcgtcgccattcgtctatccggttgtgcgcttcgctcggactgttggacgaagaagagttgcaggcattgtatgatgccggagtgacccggtaccactgtaacctcgaaacggctccttcccacttcgactcgctctgtaccacgcatacacaggaacaaaagctgaaaaccttgcatgccgcacgacgagtagggatggacctctgctgcggaggcatcatcggcatgggtgaaactgtggaacaacggatcgaatttgccttcacactccgcgatctcaacatccaatccatcccgatcaacttgctgcaacccatacccggcactccgctcgagcatcagtctcctctcagtgaagaagagatactgaccactgtggctcttttccggttcattaaccctgcggcttacctgcgctttgccggaggacgctcgcaactgacaccagaggccgtccggaaatccctctatatcggcatcaactccgccatcgtaggcgatctgctgacaacactcggctccaaggtatcggatgataaagagatgattctctcggaaggatatcactttgccgactcacaatttgaccgcgaacatttgtggcatccgtatacttcaacttcgaatccgctcccggtatataaggtgaaacgggctgacggtgccaccatcaccctggaaagcggacagacactgatcgaaggaatgtcatcgtggtggtgtgcggtgcacggatacaatcacccgatattaaaccaagctgtacaagatcaactcagccggatgtcgcatgtcatgttcggcggactgacgcacgatccggctatcgaactgggcaaactgttgcttcctctggtcccgccctctatgcaaaagatattctatgccgattccggctccgtagctgtcgaagttgcactgaagatggccgtacaatactggtatgcagccggaaaaccggagaaaaataatttcgtcaccatccgtaacggttaccacggagatacctggaatgccatgtcggtatgcgatcctgtaacggggatgcacagtatctttggttcggcacttcccatccgccacttcctccctgctccctcctcccggttcggagatgaatggaacccggaagacatccgtccgttggagcatctgctggagaaacataccgatgaactggcagctttcatcctcgagcccattgtacaaggtgcgggaggcatgcgtttctaccatccggaatatttaagagaagctgcgcgcctctgccaccggtatggggtactgttgatcttcgatgaaatagcaaccggattcggacgtaccggaaaactcttcgcctgggaacatgccggagtagagccggacatcatgtgcatcggcaaagcattgacaggtggatacatgactttatcggcagtactgaccaccaatgaagtggcagactgcatctccaaccatgcaccgggagcattcatgcacgggcctacgtttatgggaaacccgttagcatgtgccgtagcctgcgcatcggtacggttacttctaacttccggctggcaagaaaacgtaaaacgaatagaagctcaactgaaccgtgaattagctccggcacgtgagctccctcaggtagcggacgtccgtgtactgggtgccatcggagtgatcgagatgaaagaaccggtgaatatggcatacctgcaacgccgttttgtggaggaaggcatctggctccgtccgtttggcaaactgatctatgtaatgcctccgtttatcattacgcccgaacagttgaccaaactcacggaagggatgataaggagcataagtaacggccttcccggttcccaaacgaaa

SEQ ID NO: 12526 - DNA, 1089 bp, Bacteroides fragilis
atgaggcgagaaaaatatactcctaacggtggacctgatggaggagatggcggaagaggaggccatgttatcctgcgtggtaaccggaattactggacattgcttcacttgagatatgatcgtcatgcaatggctggtcatggggagtcgggcagtaagaaccgtagtttcggtaaagacggagcggataagattattgaagttccctgtggtacggtggtttacaatgccgaaacaggtgaatatgtatgtgatgtaacagaacacggacaagaggtcattctcttaaaaggcggacgtggcggattgggaaactggcacttcaagacggctacccgtcaggctccccgttttgcccagccgggcgaaccgatgcaggagatgactgtaatccttgaattgaaattgctggctgatgtaggtctggtaggtttcccaaatgcaggtaagtctaccttgttatctgctatttctgctgcaaaaccaaagattgccgattatccgtttacaacattggagcctaacctgggtattgtatcttatcgtgacggacagtcgtttgtaatggctgatattccgggaattatcgaaggtgccagtgaaggtaagggattgggattgcgtttcttgcgtcacattgagcgcaactctttgttacttttcatgataccggcggatagcgatgatatccgtaaagattatgaagtgctgctaaacgaactgaaaacatttaatcctgaaatgctggataaacaacgggtacttgccatcactaagagtgatatgctggatcaggagctgatggatgaaatagaaccgacattgccggagggaattcctcatgtattcatttcatctgtatccggtttgggcatttcggtgctgaaggacattttatggacggagttgaataaggaaagcaataaaatagaagctattgtgcatcgtccgaaggatgtcagccgattgcagcaggaactcaaagatatgggtgaggatgaagaactcgactatgaatatgaggatgatggtgatggtgatgaggacgatttggattacgaatacgaagaagaggattgggaagataaa

SEQ ID NO: 12527 - DNA, 567 bp, Bacteroides fragilis
atgctgaacattgtaattttcggtgctcccggttcaggaaagggaacacaaagcgaacgtattgttgagaaatacggaattaatcacatttcaacaggagatgtattgcgtgcagaaattaaaaacggcacagaactgggtaaaacagctaaaggctacattgatcagggacagttgattccggatgaattgatggtagacattctggcaagtgtgtttgatagtttcaaagatagcaaaggggttatttttgacggtttcccaagaactattccacaggctgaggcgttgaaagtgatgttgaaagaacgtggtcaggacatctctgtgatgttggatctggatgttccggaagaagaactgatgactcgtctgattaaacgtggtaaggaatcgggccgtgcagatgataatgaagagaccatcaaaaaacgtttggttgtatataatacacagacttcaccgttgaaagaatattataaaggcgaaggcaaataccagcatatcaatggtcttggaaccatggaaggtatcttcgaagatatttgtaaagcggtagatacatta

SEQ ID NO: 12528 - DNA, 1083 bp, Bacteroides fragilis
atgaacgcagaaggtaaagatgtaatcagcctgggaatcggaagcccggacatgcctccttcggaacagaccatcgaaacgctatgtaataatgctcacgatccgaacggacacggttatcaaccgtatgtgggtataccggaacttcgcaagggttttgccgactggtataaacgctggtatggagtggaactgaatccggcaacagaaattcagccgctgatcggatcaaaagaaggcatcttgcacgtgacactcgcttttgtcaatccgggagaacaagtactggtgcccaatccgggatatcccacctacacttcgttaagcaaaatactgggtgccgaggtggtgaactataacctgaaagaggaagacggatggatgccggacttcgatgaactggaaaagatggatctgagccgcgtgaaactgatgtggaccaactatccgaacatgcctaccggtgccaacgctactccggaactgtacaaacgcctggtggagtttgcccgccgcaagaacatcgtgattgtgaacgacaatccgtacagctttatcctgaacgataagccgatcagtatcctgagtgtgccgggtgccaaagaatgctgtatagaattcaactccatgagtaaaagtcacaatatgccgggatggcgtatcggcatgctggcttcgaacgcagagtttgtacaatggattctgaaagtgaaaagcaacatcgacagcggaatgttccgtgccatgcaactggcagctgccaaagcacttgaagcggattcgacctggtacgaaggcaacaatgtaaactatcggaaccgtcgccacctggccggcgagattatgaaaacgctgggatgcacgtacgacgaaaagcaggtgggcatgtttctctggggaaaaatccccgcaagttgcgccgatgtagaagaactgacagagaaagtgctgcaggaagcacgcgtcttcatcactcctggatttatattcggaagcaacggagcgagatacatccgcatctccctctgctgcaaagacgccaagctggcagaagcgctggaacgaatcaaatcaataatgaaa

SEQ ID NO: 12529 - DNA, 546 bp, Bacteroides fragilis
atgagccagctcaatgatatatcgttagtcgcacaggtcgtggtgttcagaaacaccagggccttcgaccaattggtacagaaatatcagtcgcctgtacggcgcttctttctgaacctgacctgcggcgacagcgaactgagcgacgacttggcacaagatacgtttataaaagcctacacaaacattgcaaactttaaaaatctctcaagtttctcaacatggctttacagaattgcttataacgtattttatgattatattcgcagccgaaaggaaacaacagacctggatgcccgcgaagtagacgctgccaatagtaccgaacaagtaaacgtgggtgaacagatggatgtttaccaatcactcagaacgctgaaagaaatagaacgcacctgcatcactctgttctatatggaagacgtaagtatagacaagattgcgggaataacggggtgcccggtaggaacggtcaaatcgcacctttcaagggctaaagataaattagctatttacttaaaacaaaacggttatgacggaaacaga

SEQ ID NO: 12530 - DNA, 309 bp, Bacteroides fragilis
atggagatatcggctgcacataagctgattcttccgtaccggagcaaatgcgccagtcttcatggtcacaactggattatcactgtctactgccgttctgagcggctcaatgcagatggaatggtagtggatttcacccagattaagcaggctgttaaggagaaactggatcacaggaatctgaatgaggtacttccttttaatcccacggcagaaaatattgcccgttgggtatgcaagcaaatacctcaatgttataaggtcgaagtgcaggaatcggaagcaaatacggtgatttatgagaaagat

SEQ ID NO: 12531 - DNA, 462 bp, Bacteroides fragilis
atgaatacaataacagaagaagaagcgttaaatcgcatggctgcctattgttccgcagccgaacattgtaaagccgaagtgaatgaaaaactccagaaatggggcttaccttatgaagtgattaaccgaatcatcgatcgtcttgttgtcgagaagtttattgatgaagaacgttattgtagagcgtttgtcaacgataagttccgttttgccaaatggggtaaaatgaagattacacaagctctgtatatgaaaaaaattcctcgtgaggtaacttacaggtatctgaatgacattgaccgggaagaatatcttgcgattttaggagatctgatagcagcaaaacgtaaaagtatacatgccaaagatgaattcgagctgaatgggaaattgattcgttttgccatgaatagaggatttgaaatggacgatatccgtcgctgtgtgcaggtagaagaagag

SEQ ID NO: 12532 - DNA, 1248 bp, Bacteroides fragilis
atgataaaacatttattgaaacagatatgggcccagcgctctgtcaacgcctggttgtggtttgaactgatgattgtctcagtctgcctgttctatgtaatggactatctgtacgtaaccggaagattatatgccactccgctcggttttgataccgagcacgtttatcgggtaaaactagcttcgatacctcccggaggaaaggaatataaacccggtgatactgatagcttgaagatagaacaatggttctccatcctttcgcgcctcagggcttatccgggagtagaggccgtatcgctgagtattggttcgcatccttacaatcaaaacagttccagcggttcaagggggatagataccacttgggtacacggatatgtgtataatgtatcacccgattatttccgggtattccgcatcactgacaagcagggaaaaaccgagtcacttgtacaggcggctactcaggaaaacacatggatcatttctgccgaaaccgaacgtgagttttccgctaagggaaccgatgcactgggtaaaggagtgaagaattggggcgagacagaaccgacacataccattcgcggtatatgcaataccatccgctttgatgatttttatccgctttaccctacttatatcgaatgtcattcggaggctgctttgttagggtggagggggaataatgcggagttttgtgtgcgtgtccgtccggatgcggatggtgtggactttccgtcccgtttccgtaaagatatgaaggtacagcttcgggtcggtaatttttatcttctggatattacctcttttgacgatcttcgtgagaactattaccgcagcaacgggaagataaatgatgtgaaaacccggattgccgctttaggcttcttcttgctgaacattctgatgggagtgatcggtacattttggatacggacacagcaacggcgttcggagatgggacttcggctggctttgggatctacccgtgcgaacctcagaagtttgctgatcggtgaaggggttttattattaatactggccacggtgccggctgctgtcataagtctgaatcttgcctttatggatttgctgaccgatacgatgccggttgttaccgtcacccgtttcctgattgtgcaggctatgacgtttgtgtcgatagttgtcatgatcgtcatcgggatttgtatacctgcccgtcaggtcatgcgcattcagcctgcagaagcactgcacgaagaa

SEQ ID NO: 12533 - DNA, 1023 bp, Bacteroides fragilis
atgaaatggaatgtcctgttatatggtctgttattctcgggattaggtatcttttcctatctcctgcttgtcaactatacggagctgactcctaaagtagcggatgttctctattcaaagggagcattcgtcttctttattaccgctttcaatgtgcttggttattctacgcttcggatcagttcgtggataaacactcagtatgcactcaatatccgccatcgttggaagataatagttatttatgttgccgttatcttgttattcctgttgttgaactatagcctgctgattgctgctaagctattggcaggcattgacaacctatttactttctccaatggaggctggcgtatcctgatcgtggtatggctcgtagagcttgtcattgtgggcttattattggcaaatcgttccattcagaataacctgaaactgcaacaggaggccgcaaaactgcaaacagagaacgacactgcacgttatgcggctttacaaagtcaactgaatccccattttctgtttaatagtctcaatacgctgattgctgaaatagaatataacccgggtaatgctgttcatttcaccaagcatttgtccagtgtataccgttatgttttgcaatgtcaggataaaacattggtaacgttgacggaagaactggaattcctgcaatcttatctctttctgcataaagttcgtttgggagattgcattagttgtaactgttgtatagctaccggctatactagttgtatgctgcctccgctgactttgcagttactggcagagaatgttatcaatcataattctattactctcagcaagcctatgaagatagatattcggttagaggaaggatatcttgcggtgagtaaccccatacagcctaaaaaaagtcatgaatcgccgggtgtagggttgaagaacctgtccaatcgttgccagttgatgctcggcaaagagataattgtccacaacgatgaaaaagtatttatcgtaaaagtacctttactgtatgaa

SEQ ID NO: 12534 - DNA, 999 bp, Bacteroides fragilis
atgattaaagtaggtattaacggttttggccgtatcggacgtatggtattccgtgcagcagttaagaactttggtaacgacattcagatcgtaggtattaacgacttgttggatgctgaatacttggcatacatgctgaaatatgattcagtacacggtcgtttcgaaggcgaagttgctgtagaagacggtgctctgattgtaaacggaaataaaatccgtctgactgcagagatggatcctgctaacttgaaatggaacgaagttgatgctgacgttgtagttgaatcaacaggtttcttcttgactgacgaaacagctcgcaaacatatccaggctggtgctaagaaagttatcatgtctgctccttctaaagactctactcctatgttcgtatatggtgttaaccacacttcatacgcaggacaggacatcatttctaacgcttcttgtactactaactgcttggctcctatcgctaaagtattgaacgacaagttcggtatcgttaaaggtttgatgactacagttcacgctgctactgctactcagaaaacagtagacggtccttctaagaaagactggagaggtggtcgtggtatcttggaaaacatcatcccgtcttctacaggtgctgctaaagctgtaggtaaagtattgccggtattgaacggtaaactgactggtatggcattccgcgttccgacttctgacgtttctgtagttgacctgacagttgttctggaaaaagctgctacaatggctgaaatcaacgctgctatgaaggaagcttcagaaggcgaattgaaaggtatcctgggctacactgaagatgcagttgtttcaactgacttccgtggttgcgctaacacttcaatctacgactctaaagcaggtatttctttggattctaacttcgctaaagttgtttcttggtatgacaacgaatggggttactcaaacaaagtttgtgaaatggctcgcgttatcgctgctaaa

SEQ ID NO: 12535 - DNA, 1038 bp, Bacteroides fragilis
atggagttctcggctaagcaaattgcagcatttatccaaggggaaattataggtgacgaaaacgctactgtacatacattcgcaaagatagaagaaggaataccaggcgctatctctttcctttccaatccgaaatatacaccttatatatatgagactaaagctagcattgtgttggtgaacaaagattttactcccgaacaagaagtaaaagcaacgttaatcaaagtagacaatgcttacgagagccttgccaagttgctcaatctgtatgaaatgagcaaacccaaaagaaccggtattgacgaacgtgcctatgtagcggaaaccgctaaaataggaaaagacgtatatatagctcctttcgcttgcatcggtgatcatgcggaagtaggagacaacacagtgattcatccgcatgccactgtgggaggtggtgccaagataggcagcaattgtatcttgtacgccaactcgactgtataccatgattgccgggtaggtaataactgtattctgcatgcgggatgcgtgatcggagcagacggtttcggttttgcccctaccccacaaggatacgaaaaaattccccaaatcggtattgttatcctggaagacaatgtagaagtcggcgccaatacttgcatcgaccgtgcaaccatgggagcaaccgttattcatagcggagtaaagttggacaatctggtccagatagcccacaacgatgaaataggttcgcataccgtcatggctgcccaagtgggcatcgcaggttctaccaaggtaggcgaatggtgtatgttcggcggacaagtaggcattgccggacatctcaaaataggcaaccaagtgaatctgggagcccaatcgggtgttcccggaaatataaaatccggtagccaacttatcggaactccccctatggagctaaaacaatttttcaaagcatccattgtacaaaaaagccttccggagatgcagattgagttacgcaatctccgcaaagaaatagaagaattaaaacaacaattaaataag

SEQ ID NO: 12536 - DNA, 2454 bp, Bacteroides fragilis
atgttgaaattatttataagcatggctgctttattcctgggagtcggtagctctgtgttcgcacaaatagaaggaaaagtttatatcgatgcgaacggtaatggcatttgtgatgcgggagagagggggctaaaaggagtctgcgtacaagatggtctcaatgtggtgaaaaccacagatgatggtcatttcatacttccgggacataaagatacacgttttgtaactttgactgttcccgatgggtatcaggcatcaacctcccattacctatcttttgacggaaccggaaaaaagtatgaattgggtatctgcaagacctcggtaaataccgggaatggatattcgtttgtacaaattacagatacggaaacttctctatacggtgattggatcgataacttgaaagagtacgtgaaaaccaatccgactgcttttattatccataccggtgatatttgttatgaagctcatcaggattttcatggacgttatcttcgttccgtagatttgggaattccgacctactattgtgtggggaatcatgatctgcgtgccggaaaatacggtgaagagttgtggcaaagtcattttggtccttcatggtattcgtttgatgtcggtaatgtacattatgtagtaactccgatgctgggtggtgatcatgcaccttcgtacaggcgttccgacatcatccgttggctgaagaatgatcttgcacaaacggataaagggaaaagaattgttttatttaatcacgacttatggttttggggagacgatttgctcttcaaagataaaaatggcgaacagatagactttgctgattacaatctggatgccatgatttacggacactggcacaatcattattataagcagttgaagtcaggacttcatacttactgctcatccactccggacaaaggaggaatagaccatggagcttcttgtttcagaatttacaatgctgataccaaaggtaaattaagttcagcaactcgttatacttatatagacgcaatattgacttctgcctatccggcggaaggtgaaaccgtttcagttcctgacggaaaaatgacggtccggatcaatgcttaccgtactatatcggatgcgaagaaggtgacagcttctgttgaacgaaacggaaggcttgtatcgactgtgacgcttatgcctgaaacagactggggatggagcggggcagtccgggtatccggcggtaagcaacgcctgttggtgactgccgagtttgaagatggaactcgtttgacgaagagagtagactatactgtaactaagcagccgttatcggtcattgcgacatctgatgtctgggcagggcttcgtggaaatgccgcacacaaccaactggtgaatgacagtgtatctttacccttgcaaaccaactggattcagaatgtcggcagcaacatttacatgtgctcgccgattgttgcgcagaacaaagtctttatcggaaccattgatgatgacaaagcgaagaaatgctatgtaaaagcctatgatgcgaccacaggacatctttgctggacctttgtcacttccaattcgataaagaataccattgcctatgaagatggccgtatattcgcttcggatgcttcgggaatgctttatgccatagatgctgaaaaaggaacagcttgctggcaaacgcaattgccggtttctttgctgccgcttctcgacgaaggattggccgtagccgatggtgtggtatatgccggacatgcaaaaggtacttgtgctgtgcaggctgtcgacggaaaaattttatggcagaataaagcctgggacggaggcgagggaaccacttccacttttaccgtgggtgcgggagtgttagttgcatcggcccattggaacgggcttttcggacatgacatcagtaatggtgctttgttgtggaagaagcgtgatagtaaaattcgttttcgagacggatcagctactttctatgatggtaatttctatttagcttcatgtgagaatctgtatgtaatcaatccccgttccggagatattctgaaaatggcagaaacttcttatgaatttaattcggcttgcgctccgcttgtgacggataaatatctgattgtttctacttccaataaaggtgtggtcgcttttgaccgcctcacttttaaggaagtctggaattatcgtaccgggacaagtcttttctataccgttccgtattcacataatcaggaatgtacggtcgaggtttcgcctgtccttgtaggttcgactgttctctttggcgccagcgatggatatttgcatgccgttgacctgaatacgggggcttatcgcggtaagcgggctttgggagcacctgtattctcaagcgtggcagttagtggtaactgtctgtttgttgccgattttggcggtaatatttataattttaagttacacaat

SEQ ID NO: 12537 - DNA, 2226 bp, Bacteroides fragilis
atgatcttactgctattgacctcctgttattcaaaagaagagcggcgggtattggtgatccactcttatgaaaaggattaccaaggatatgcagaattcaataaactgataaaaaaggaattcgccaaagctcacattcccgtagaacttactttcttctatctgaattgtgaaattaacaacgaacagcaagagatagataagatcaataactttctcgattctatttcgaaatggaaacctgaagttcttcttgttaacgatgaccaggccacttactcgttattggaaacccatcatccgttattgaagggaataccaatcgtattctccggagtcaattatcccaattgggaactgatcggacaatacaacaacgtcaccgggtttcacgacaagatagatttcagaaagaatctggaaatggtgcacaagctaaccggcaaaaaccatatttacaccatacttgactttacgttcttagaccggaaagtccgaaacgatattgataaccaattgaaatcgacggacatcatatccaatctggactggcatctggacaaaaacgacacacggaaagaagcagaaaaaggacatataataattaatgcgctatctgcccgtaacctctccaagaaccagaataaggatcagacaaaaggtggagacttcatctggtctatcagtaaatacagtaccctcccttatctgcagacaaagtttgactacacaacggtcactatggcatctttgtccacccggcaacgctttacaacgatcaatgaactttttgactgcgggcacgactttctgggcggatacatcaccccgatgcatatccaggtagaagagtccgttcatgcggcggcccgtatcctcaatggagaaaacgttgccgacatacccattcaggaaagcgccaaaggatacttcatcgactggaatgccatgcaaaaagaacatctgaccatcgcagacattccccatgaatacaccattatcaacattccattcaagacccggcaccccatcgtctggtggttcgcactattaggcagcatcaccgccattgtcagcctgctgtcgggcatcacttacctgtattggcgtgaaacgaaaaggaaacgctccatcctgtacgaactggaagatgagaaagaatcgttggcgctggcagtcgagggaagcgatacatacgcatggcggttaaaggacgatacgatggtgttcgaatacgccttttggaaaaacttgggcatggctccccatccattgacgattgacgggttcctgtcctttgtggatgccgactatctggatacgacacaagccttattgacaaagaacgccaccaacggcaaacacttcataaagctgaaatgcgactttaacggtacaggataccaatggtgggaacttcggtgcagcaccatgaagagtgctctgggcggacagaaaaccaccggccttttattaaacattgaggactacaagaaacgggaacaggaattgatcgaggcccgtaaaatggcggaaaaggcggaacttaaagaatccttcctggccaacataagccacgaaatacgtacaccgctaaatgccattgtcggattctccaccctgcttgcctctccggatgatacggacatcacccccgaagagaaggaacagtatatagataccatcaaccgcaacagcgagttgttgctgaaactgattaatgatatattggaactttcgcgcatcgagtccggatatatgtcattcgactgtgatgactatccgctggatgcccttatcagggatacttatcagacacataagattctgattcccggacagctccacttcctgttggaagaaggcgaaaagggcttgatcgtacacgtcgacaaaaaccggctggttcaggtgatcaccaacttcctgaacaatgcctccaaatttacccgggaaggctccatcaaactgggatggagctacatgccgcaaaccgaagaagtggagatctatgtagaggacaccggaatcggtatcccgcagtccgaacaaaagatgatattcggccgattctacaaacagaacgagtttgcgcaaggaaccggcctgggactctctatctgcaaactgatcatagaaaaacttcagggaaggctatcgttacggtccgaagcgggcacgggaagccacttctccattttcttttcttgcaaaaagcaacctata

SEQ ID NO: 12538 - DNA, 195 bp, Bacteroides fragilis
atgaaaattgcagaaattaaagaaatgtctactaatgatttggtagaaagagtagaagcagaagtggttaattacaaccaaatggttatcaatcattctatttctcctttggaaaatcctgcgcagatcaaacaattacgcaggacgattgcgcgtatgagaacagagttacgccaaagagaacttaacaataaa

SEQ ID NO: 12539 - DNA, 1107 bp, Bacteroides fragilis
atgtatagttcccaacttattagaatgcaaaagtatatgttgtttattatatatgttttgattttgtttgcattatatgcttatttttatacaggtttaaatttaataaggattggttattctttttggctctatatatcagcatttcatatggttttattgcccgtaataagttacatgtctggtgagcgatttatttataagatattttctttttttgctatgttggggttgttcatatcaattggtttaattattgatagtcaaacgatgttgtttaaatttataacaatatatgcaaatgaagatttggcaaatattgatgagactattttatctcaaggaagatgttcttttctatcagaatctgtttctactttcggagtatctttctctttttgtgtattatcatctataattatgtatttaaaaaataaaaaaagattatgtagattattttattttatatgttctttcatgccattattgggtgcatggtttactgggtcaaggcaaatattatttgctgttgttttaatctttattgttggaattattgggctttttataaaaagcaaacataagataatattgattatctccctatttgttttttcttattttaccttttcatatttgtttttacctattatttctaccaatgagaatctattatatcgatatttaggtgataattcaacgaatgctgatagtgaaagaagtttagcatgggacgaaggcatgcaatatcttacagataataaacatgttatattattaggtaatggtctaggaagcgttgctgtaaaaggggggcttaaaggagaatttcagggtaaagcatatgaatctacatttcttgcgaaaatgatcgatatggggctttgtggcattctgatacttttatttcctgctttctacattatatggcagatatataaattgaaacataaaattttttttgatatcctttcattcacagtaattataaattatttgtttatttcattaatttctcctaatggagcatctgttagtactcaatatataatgtatttgttagttggcatctatatagtacgtccatattattgttttgaaaatgaa

SEQ ID NO: 12540 - DNA, 1044 bp, Bacteroides fragilis
atgaaagtaattgtagataacaaaataccttacatcagagaagctatcgaacaaatagcggacgaagtaatatacgcccccggaaaagattttacgcctgaactagtgcaagatgccgatgcgttaatcatccgtacacgcacccgttgtgatcgttcactgcttgccggaagcaaagtaaagttcatcgcaactgccacgatcggattcgaccacatcgatacggcttattgccgtgaagccggcatcacatggactaatgctccgggatgtaattcggcttccgtagcacagtatatccaatccgcactatttatcttacagcaaacccgtggtatgaaattgaatcaaatgaccatcggtattgtaggtgtgggaaatgtaggaagcaaagtagctgatgtagcccgaaaattaggaatacaagtgatgctgaatgaccttccgagagaagagagagaagaaagtacaatgttcgcttctttaaaaagtatagccgaaaaatgcgatattatcactttccatgtacctttatataaggaggggaaatataaaacgtatcatttggcggacaagcatttcttccattcactgaaaaaaggagcggtaatcatgaacacttcacgcggtgaagtcatcgaaacagaagcactgcttgaagctctccggtccggcattctgtctgatgctgtcattgacgtatgggaacatgaaccggatatcgaccttgaactgctggagaaagtaattataggcactccccacatcgccggatattcagcggacgggaaagcaaatgcaacccgaatgtcactcgaagccttatgccggttcttccggatagaaaccgactatcggattactcctccggaaccgaagaataaactgatttctactgcaacttatgaagaggcatcccttatgatttacgatcctcgcagagacagtgatgccctgaaatctcacccggggctcttcgaacaacttcggggagactatcctttaagaagagaggaaggtgcgtatcggatcgtaataactaaa

SEQ ID NO: 12541 - DNA, 1317 bp, Bacteroides fragilis
ttggcagaaatttttaacggaatatccgtaaacacaccttcattatcggcaataatagccattattctggcaggtttgctcctgctcgcctcgggctttgcttcggcatccgaaatcgctttcttctcactttcgccttccgatctgaatgatatagaagaaggcaatcatccttctgatgggaaaatcagcaatctgctcgcagactccgaacgtttgttggcaaccattcttatcacaaacaactttgtgaatgttaccattatcatgctctgtaacttcttcttcatgaatgtctttgtctttcattcgcctcttgcagagtttttgatactgactgttatcctgactttcctcttgttgcttttcggagagattatgcctaagatctattcggcccagaagacattggctttctgccgtttctccgctccggtcatctatgtgttgcgtaaagtatttgctcctatctctgctgtgttagtacattctacggctttcttgaataaacattttgccaaaaagaatcacaatatatcggttgacgaactttctcatgcccttgaactgaccgacaaggccgaacttacggaagaaaataatatactggaaggcatcattcgttttggtggcgaaacagccaaggaggttatgacttcccgcctcgacgtggtcgatcttgatatacgtactccttttaaagatgtaattcaatgtattatcgacaatgcatattcccgtatccccatctattcgggcacacgtgataatatcaagggggtactttatatcaaggatttgttgccccaccttaataagggtgacaatttccgttggcagtcactgatccgtccggcgtattttgtgccggaaactaaaatgatcgatgatcttttacgtgattttcaggcaaataagattcatattgccattgttgtggatgaattcgggggtacatcgggaattgtgacaatggaggatatcattgaagagatcgttggggagattcatgatgaatatgatgatgaagagcgtacctatacggtgattaacgatcatacctgggtgtttgaggctaaaacgcagttgaccgatttttataagattacgaaggtcgacgaagatgattttgacaaagtagatggagatgccgatacactggccggactgttgctcgagataaagggagaatttccggcactccatgagaaggttctctatcatcgatacgaatttgaagtgctggctatggatagccggagaatcctgaaagtgaagtttaccgttaacgagccttccacagaggaagaagcttcc

SEQ ID NO: 12542 - DNA, 456 bp, Bacteroides fragilis
atgtcagtaaataaagtgatattgataggaaatgtcggaaaagaccctgaagtgagatatttggatacaggtattgctgtagccagttttcctttggctacgaccgaccgcgcatatactttgtcgaatggtacacaagtgcccgaacggaccgaatggcacaatcttgtcctttggcgcggactggcagaaactgccgaaaagtatgtacataaaggtgataagctctatgtggaggggaaaataagaacccgttcttatgatgaccagaatggggctaaacgctatgttaccgagatttttgtggataatatggaaatgctcactccgaaaggtaccggttcgggatcgtatgctccggcacagcagcaggctgctactcccgtgagacctcaatcgcaacaaccgcagcaaccgatgtcttcgcaagataattcggcggatgacctgccattt

SEQ ID NO: 12543 - DNA, 924 bp, Bacteroides fragilis
atgattaacagagttcttattcgtctaaagatcatacagatagtgtatgcttactatcaaaacggcagcaaaaatttagactcagcggagaaagagttgttctttagcctctcaaaggcttacgatctgtacaactatttgctgatgcttatgattgctttgacggaatatgcacaaaaacgcatcgacacagcgaaagctaaactagcgccgactaaagaagagttgtatcctaacatgaagtttgtggaaaataaatttgttgcacaactcgaagtgaataaacaattgagcgaatttatagctaatcagaaaaggacctgggctaatgatcaggacttcattaaagaattatatgaaaagattattgcatccgatgtatacaaggagtatatggcttcttctgacaaatcttatgaagcagatcgtgaattatggagaaaactctataaaactttcgtttttaataatgattcgttagatcaggtgttggaagatcagagtttatattggaatgatgataaggagattgtcgatacatttgtattgaagaccattaagcgttttgaagaaaaacagggagctaaccaaccattgttacccgagttcaaagatgacgaagaccaggagtttgcacgccgtttgttccgtcgggccattttaaatgccgactattaccggcacttgatcagtgaaaatacaaagaactgggatttggatcgtgtagctttcatggatgtaattattatgcaatgtgcattagcagaaattcttagttttccgaacattccggtcagcgtttcgttaaatgagtatgtagagattgctaaactctatagtacagtgaaaagcggtagctttatcaacggtacattggacggaatagttaatcaattaaaaaaagaaggtaagttgacaaaaaac

SEQ ID NO: 12544 - DNA, 1923 bp, Bacteroides fragilis
atgaactacggattcgtaaaagttgcggcggccgttccccgcgtaaaagtagcagattgcaaatttaattctgaaagattggagggtcttattaccatagccgaaggtaaaggagtacagattctcacttttcccgaaatgtgcattaccggatatacttgtggagacttgttcgcccagcaacttttgcttgaacaggcagaaatggctttgatacagattctaaacagtacccgccaactggacatcatttccatactgggcatgccggtagtagtcagctccacagtaattaatgctgcagtagttatccagaaaggcaaaatactgggagtagtgcccaaaacttacctgcctaattataaagagttctacgagcaacgttggtttacatccgccctacaagtctcggaaaacagtgtgcggctttgcggacagattgtcccgatgggcaacaatctgttgttcgaaactgcggaaacaactttcggcatagaaatctgtgaggacctttgggctaccgttccgcccagttcctcactcgcactgcaaggggctgaaatcatctttaacctttccgccgatgacgaaggtattggtaaacacaattatctttgctctctgatcagccagcaatctgcacgctgcatctctggttatgttttttcgtcgagtggcttcggtgaatcgacaacagatgttgtttttgccggaaacggacttatttacgaaaacggatatctactggcacgaagtgaacgtttctgcttggaggaacagttgattatcaatgaaattgatgtggaatgtatccgtgcagagcgtcgggtcaacacaacttttgctgccaacaaggctaattgtccgggtaaagaggctgtcagaatttctacagagtttgtcaacagtaaagatctgaacctgacccgtacattcaatccacatccttttgttccgcaaggaagcgaactcaacagtcgctgtgaggagatcttctcgattcaaatagccggactggcacaacgtctgctacataccggagcaagaacagccgtaataggtatttccggaggacttgactcaacactcgccttattggtatgcgtcaagacattcgataaattgggattatctcgcaaagatattctgggtataaccatgccgggattcggaacaaccgaccgcacttatcacaatgccatcgacctgatgaattccttgggagtttcaatacgggaaatcagtatcagggaagcatgtatccaacactttaaagatatcggacacgatctcaatatacacgatgtaacatacgagaattcacaggcacgcgaacgtacccaaatcttaatggatatagccaaccaaacatggggtatggtgatcggaaccggagacctgtcggaactcgcattgggatgggcaacgtacaacggagatcatatgtcgatgtatggtgtcaacgcaggtattcccaagacactggtgaaacacttagtacagtgggtagccgaaaacggtatggatgaaacatccaaagcaactctgctggatatcgtggacactcctatcagtccggaactgataccggcagatgaaaacggagaaatcaaacaaaaaacggaagacctcgtcggtccttacgaactacacgacttcttcctgtattatttcttacggttcggcttccgcccgtcaaaaatctacttcctggcacaaactgcattcagtggagtttatgatgatgaaacaatcaaaaaatggttgcaaactttcttccgccgcttctttaaccagcagtttaaacgctcttgcctgccggacggaccgaaagtaggaagtatatccatcagccccagaggagactggcgcatgccaagtgatgccagttcggctgcatggctgaaagaaatagccgaattg

SEQ ID NO: 12545 - DNA, 1608 bp, Bacteroides fragilis
atgaacagactaagattgataaagacagcctacaccgctttggcagctctcatgctcgccgcctgtgcaagcgatgaactgacggatggcacggtgcaggacttgcccgaaggcatgtaccccttgcagatagcaggcgtaagtataacggcggaaagcaatgccgagccgtggggagcggatactccgcagacacgcatggtggaaaacacaactgacggaaagtacagcagtgcgtgggaaaacggagataagataaaggtacaaataggtgatgttacaccgggcacatacacttaccaaagcagcggtctgaccgtagcagatggcgatgcgtacgcttattgggcaagcaaagacaataatcagaccatccgggcgtggtacacctcgtctggcaacgaaacggtcgatctcagcgatcagacaaaaggtcttgcctatgtggtgacagcccggacaactgccaatttcaacacagaagtatcgctgacattctcccacgctcttgccaaggtgcgtgtggagcttaccggcgagatagcaagttttgtggataatgtcagcataaagggctacaccacctgcaccctttcacaaggtacgtggaatggtgcgaatgaaggtgaaataaaaatgtataaggtggccgacaaggtgtttgaagccaatgtatatccgggttatcagataaaagaagtcaaggtgaacaatgggacatggagtaaacttactaccgctgtctttcttgaagcagcgaaaatacacaagatgggaattggggtaacgggcaaaaccataacgttgtcagaccaaacgggagaagtctgtaccgttgaaagcggcaagtgtcttatcattgatggtggaggaaacgagctgaataaaaggatagccatccaagacaacgcaaaggtcatgttgaagaacgtaaaactcgctgcccctaccaccgaagtcaataccatagaaataaatggctctgcaacgctattgttatcgggtactaatgaaatcaacggtgccacgcagggatgcccgttaactgtcataagaggtacattgaccattaacggaacagataacgacaaattgacactgactggagagaattcttataatgctggatgcttgggccttcgtgaaggagcaagcctgattatcaatggtggagatattgtggctgatggtagtaagacacaacatggaagtggaattggggcctattggactgggtggaatgatcctcgctacggttctatcacaataaacgggggcaaaataaatgcatctggtggtggaaattcggcaggaattggatcaggaagccaatgtggcggtggcgatatcatcataacaggaggtaatattaccgctacaggtggaggtaatctgggcggagccggtattggcacaggtgactatggaaattgtggggatattacaatatccggaacaaatactgtggttacggcaacggtagtcaaagaaggctgcgataagataggtctcggttataatggacgctactgtggcaccgtcaccattaaagccggtgttacagtaaacaacactaagtataccagcgaccatgttggcaggattgaa

SEQ ID NO: 12546 - DNA, 1494 bp, Bacteroides fragilis
atgagtaaatttgtaatgactatctttggtgcttcgggtgacttgacgaagcgtaagttgatgccggcattgtattcgttgtatgtagccaagcgtcttccggaagaatttgaaattctcggggtgggacgtacggtttatgaagatgcggactatcggacttacatttataatgagatggagaaatttgtgaagtcggaagagcagaataaggagaagatggacgctttcgttggacatcttcactatctggcaatagacccggcattggaaagcggatacggacagcttcgcctacgcattgaagaactgagcggagatagccggccggatgacctgctgttttacctcgctacgcctccatcattgtatggtgtgattccgttgcacctgaagtcggtgcatctgaataaaggccgtgcacgaattatcgttgaaaagccattcgggtatgatctggaatcggctgagaaactgaataaaatttatgcttctgtattcgacgaacatcagatttaccgaatcgatcatttcttaggtaaagaaacggctcagaacctgttagcttttcgttttgccaatggtatttttgagcctttatggaaccgtaattatatagattatgtggaagtgaccgccgtggagaatctcggaatcgagcaacgcggcggtttttatgatactacgggtgcactgagggatatggtacagaatcatctgatccagctcgtggcattgactgctatggaacctcccgctgtgtttaatgcggataatttccgtaatgaagtggtgaaggtatacgagtctctgactcctttgaccgaaacggatttgagtgaacatattgtccgggggcaatatacggcagggggaaataaaagggggtatcgggaagagaagaatatttcacccgactcacgtaccgagacttatattgcaatgaaactgggtatcagtaactggcggtggagtggagtacctttttatatcaggaccggaaaacagatgccgacaaaagtgactgagatagtggtgcatttccgtgaaactcctcatcagatgttccattgcgcgggtggtaattgtccgagagccaataagctgatattgcgtttgcagcccaatgaaggtattgtgttgaaatttggcatgaaagtgccgggacccggatttgaggtcaaacaggtaacgatggatttcagttatgatcagttggggggcgtccccggcggagatgcctatgcccgtctgatagaagactgtatcctgggcgaccagaccctctttacacggagtgatgcagtagaagcatcctggcatttcttcgatccgattctgcgttattggaatgaacatcccgaggcgccgttgtatggttatcctgctggaacttggggacctttggagagtgaggctatgatgcatgagcatggtgccgaatggaccaatccatgcaagaacttaacaaacacagatcaatattgcgagcta

SEQ ID NO: 12547 - DNA, 396 bp, Bacteroides fragilis
atggatattgaagaaattaaagattttcgtccccttattcttgtggccgaagatgatgatagcaatttcaaattgattaaagctattatcggtaagaaatgtgacattctgtgggcgaagaacggtgaagaaatgttgaacttataccgtgaacacactcaagatgcacatgctatccttatggatattaaaatgccgattatgaacggattggaagcaacccggattattcgtgaagaaggagcttccctccctattattatgcagactgcttatgctttcagctcagaccgggagaatgccatgcaagccggtgcatccgaagtattggtgaagcccattacggtaagtgcacttcgaggctgtttaagcagctattttccggagatcaagtgg

SEQ ID NO: 12548 - DNA, 1239 bp, Bacteroides fragilis
atggctccggttggctcacgcgaatcgctcgcggcagctatccaggcaggagccgattctatttattttggtattgagaacctgaatatgcgtgcacgttcggctaatacatttaccatcgaagatttacgcgagatagcccggacctgtgatgaacatggaatgaagagttatctgacagtgaataccatcatttacgataaggatatcgaattgatgcgtaccattgtcgatgcggccaaggaagcgggcatttcggccgtgattgcggctgacgtggcagtgatgagctatgccaacaagattgggcaggaagtacatctgtctactcaattgaatatttcgaatgcggaagccctgaagttctatgcgcaatttgccgatgtagtggtgttggctcgtgaactgaatctggagcaggtggcggagatctaccggcagattcaggaagagcatatttgcggtccgagtggtgagctcattcgtatcgagatgttctgccacggtgcgctttgcatggctgtttcgggtaaatgctatctgtcattgcacgagatgaatcattcggccaaccggggagcttgcatgcaaatctgtcgccgtgcttacaccgtccgtgacaaagataccgatgtagagcttgaggttgacaatcagtatatcatgtcgccgaaagacttgaagaccattcacttcatgaacaaaatgatagatgccggggtacgtgtgttcaagattgagggccgagcccgcggtcccgaatacgtacgtactgtcgtcgaatgttataagcaggccatccgggcatatctggatgattcgtttaccgacgagaagattgcggcatgggatgaacgtctgaagactgtattcaaccggggattctgggatggctattatttgggacagcgtttgggcgaatggaccaagaactacgggtcggcagccactgagcgtaagatatatgtgggtaaaggcatcaaatacttctctaacattggtgtggccgaattcttggttgaagcggcagaggtaagtgtgggtgataaactgttgattaccggacctactaccggagctgtgtttgctacgcttgacgaagctcgtgtagatctgaaaccggtggagactgtgaaaaagggagaacacttctcaatgaaactggataagatacgtccgagtgataagttatataaattggtttcgaccgaagaactgaaaaaatttaaagggcttgaa

SEQ ID NO: 12549 - DNA, 1191 bp, Bacteroides fragilis
atgactgacagacagaattccagacggttcttattattatttttaggtgtattaagtgctttcggcccttttataatggatatgtatttgcccaccttaccggctatggcagattttttccacacttcatcttctatggtacaattgggactcaccaccagcatgattggcttggctgccggacaattaattttcggtcccttgagtgacaagtgcgggcgacgtcctccattacttctggccatgattctgttcctgctcgctacggtgggatgcatcttttcacattccatttcacaatttgtgacatcccgattcttacaaggcattgccggagcaggtggtgtagtgatttcccgctccatagctaccgacgagtattcgggacagcaactggccggcatgcttgccgttatcggcggaataaatggaatagctacagtcatcgcccctatcggaggaggtatactggctcagataacaagctggcaaggcatctttatctgcttattctttatgggagtggttctcctatccggaagcttacatttgaacgaatcacttccggcaaaacacagacagactgtgagttggcaagacttataccatagtttcggagaagtcctccgcaaccgccgctatgtaggctacgtcctgcaatatggtttcactatgggaatactgtttgtcaatatctcttctgcaccattcatcatgcagcaacactacggactctctcctctatccttcagcctctgtttcggaatcaatgcgatagcaatggttatctcttcagccatatcgataaaattgcctaccatggaacgggctttatatataggaagccggggcatgctgtcagtatctgcactattgatggtattcttgtccttgaaatctgatttttggatctacgagttattgatcttcgctctactctcgatgattggcatgacttttacagcatccaacaccttggccatggagtgtgagcgatggaatgcaggcattgcttcggcacttttgggagccaccgggtttgcattcggaggtattgtatcgccattggtaagtttaggagatatgatgacctctaccggaatattgtttttagcaggttctgcctgtgcctatgcatgcacccgatatgtactgtcacaatccgttcaaccctccggagtgctatatcat

SEQ ID NO: 12550 - DNA, 840 bp, Bacteroides fragilis
gtgaacatacccgcatgggccaaccgcattgtcagctttttgctctttgccggtatcggctatttcctgatagagctgaacaatacgtttgccatcatccgcatgagagcatccgtacaaacctcactttactttctgctcatcacggcctgccccggcatgcacctgctctatgcgggcgacgtcgctgctgtaacctttctcatttcgctctatttcctgttcaaaagctatcagcagcctcgtcctgccggttatctgttccattcgtttgctttgctgagcgccggcagtgtggcgtttcctcagctgacgtacttcatccccatctggctgatgggtgcatccggttttcagtcgctcacgttccgcagtttctgcggtgccataataggttggagcatcccctactggttcttattgggacatgccttttttcacaacgaaatagagcttttctaccaaccgttcatccatctggccgacttccgggacattgacttcggccgtgacttccaactatgggaagtcgtcacgctgggctatctattcatcctctacatagtcagttcgatacattgcatcgtggcaggatatgaggataagatacggacacgcgcttatctgcactttcttattttcctcaacttctgcatcttcctgttcattgtgttgcaacccgccctgagcatgaatctgctttcgctgttgctgataggcatcagtatattagtgggacacttgtttgtactgaccaacagcaaatcgtccaacctcttctttatcggttcgatgattacccttatcgctttattctgctttaatatatggacgctttta

SEQ ID NO: 12551 - DNA, 3375 bp, Bacteroides fragilis
atgacaattactgaactgcaacatcaatatgcggggcatccgaatgtagaggccctgaataaactgttgggggagcccgcagtcagacatatctattgcggcggcttatatgcttccgctgcttccttgttcgcttcggcgttggttgaaaagagtccttgcccgtttgtttttatattaggtgacctggaagaagccggttatttttatcatgatcttacccaagtgttgggtacagagcgcattttgtttttcccttcttcgtttcgtcgttcagtgaagtacggacagaaagatgccgctaacgagattttgcgtaccgaagtgctcagtcgcttgcagaagggtgaggagggattgtgtatcgtcacttatcccgatgcattagccgaaaaggtcgtatcacggcaggagttgagcgagaataccctgaaactgcacgtgggtgagcgggtggatacgggtttcattacggatgtattgcatagttacgggtttgaatacgtggattatgtatacgaaccggggcagtatgccgttcgtggaagtattatcgacgtgttttcattttcgtccgagtatccctatcgtattgactttttcggtaatgacgtggagagtatacgtacatttgaggtcgattcacagttgtcgaaagagaagaaagagagtattgtgattgtgcccgatcttgccgtaaccggaaaggttacaacttcttttcttgattttatcccgaaagataccactttggcgatgcgtgatttcctttggttgcgggagcgtattcaggatgttcacgatgaatcgctcacaccgcaggctcttgcttctcaggaggccgaagagaatggaggcattactttggaaggaaaattgatcgatgggagtgagttcactgttcgtgcgctcgatttccggcggatggagtttggtaacaagccgaccggcacaccggatgctaccttgacatttcatactacggcacaacctatttttcataagaatttcgatttggtggcggagtctttcaaagagtatctgaaccggggatatgcactttatatctgtagtgacagtacgaaacagacggatcgtatcaaagccatttttgaggatcggggagaccggattcagtttacggctgtggagcggactctgcatgaagggtttgcagacgataccttgaaactttgtttgtttaccgatcaccagttgttcgaccgtttccataaatataacctgaagagtgataaagcccgttcgggaaaggtcgctctttcgctgaaagagttgaatcagttcacccccggtgattatgtggtacataccgatcatggtgtgggacgtttttccggtctggtacgtattcctaacggagatacgacacaggaggtcatgaaactggtctatcagaatgaagatgtggtatttgtttctatccattcgttgcataaagtttcaaaatataaaggtaaagaaggagaagccccccgactgaacaaattgggtacgggcgcttgggagaaactgaaggagcgtacaaagacaaagattaaagatatagcccgtgacttgataaaactttattcacaacgtcgtgaagagaaagggtttgcatacagtcccgatagttttttgcaacgggaattggaggcttcgttcatctatgaagatacccccgatcagagtaaggctacggcggatgtgaaacaggatatggaacgggatatgcctatggatcgcctggtatgcggagacgttggcttcggtaagactgaagtggccatccgtgccgcatttaaagccgtagcagacaataagcaggtagccgtactggtgcctacaacggttttggcataccaacacttccagacttttcgtgatcgcctgaaaggacttccctgccgggtagaatatctcagccgtgcccgtacggcggcacaggcaaaggcggtaatcaaaggattggaagctggagacgtgaatattctgatcggtacgcaccgtatcttgggaaaagatgtcaagttcaaagacctcggactgctgattattgacgaagagcagaagttcggtgtgtcggtcaaggagaagctgcggcagatgaaggtcaatgtggatacattgacaatgacggcaacccctattccgcgtactttgcaattctcgctgatgggagcgcgtgacttgagtgtgatttcaactccacctcccaaccgttatccgatacagacggaggtacatacgttcagtgaagaggtgatagctgatgccattaactttgagatgagtcgtaatgggcaggtttttctggtaaacaaccgtatagccaatcttccggaactgaaagcaatgattcttcgtcacattccggattgccggatagccatcggacacggacagatggagccggcggaattggaacagatcattttcggctttgtcaattatgactacgatgtactgattgcaaccactattatcgagagtggaatcgatataccgaatgcgaacacgattattatcaaccaggcacaaaacttcggattgagcgatctgcaccagatgcgcggacgtgtgggacgtagcaataaaaaggcgttctgttacttgctggctcctccgttgtcttcgttaacccccgaagccaaacgtcgcctgcaggcgatcgagaatttcagtgatctgggtagtggtattcatattgccatgcaggatctggacattcgcggtgcgggtaatatgctgggagccgaacagagtggatttatcgccgatctgggttatgaaacttatcagaagatattgtcggaagctgtgcatgaactgaaaacggatgaatttgccgaactttatgctgacgaattaaaaggagaaggtgtcattagtggtgaagagtttgttgaagaatgtcaggtggaaagcgatctggaattgctgttaccggctaattatgtgacgggtagcagcgaacgtatgttgctgtatcgggaactggacggactgactctcgatagagatgtagatgctttccgttcacgattggaagaccgtttcggccctattccgcctgagactgaagaattgttgcgtatagtaccgttaaggcgcttggctgcccgattgggagtggagaaagtgttcttgaaaggaggacgtatgacactgttctttgtcaacaatgcagaaagcccgtattatcagagtgctgctttcggtaagatgatcgactatatgatgaagtatacccgaagatgtgatttgagagagcagaacggacgtcggtctatgttggtaaaagatattccgaatgtggaaacggctgtcagtgtactactggaaattgtggcattaccggtgaaagagaaagag

SEQ ID NO: 12552 - DNA, 372 bp, Bacteroides fragilis
atggcagatttgaaagcttttgcagaacaattagttaacttgacagtaaaagaagttaatgaacttgcaactatccttaaagaagaatatggtattgaacctgctgctgcagctgtagctgttgctgctggtcctgcagctggtgctgctgccgcagaagaaaaatcttctttcgacgtagtattgaagagcgctggtgcagctaaacttcaggttgttaaggccgttaaagaagcttgtggtcttggcttgaaagaagctaaggacatggtagacggtgctcctagtgtagtaaaagaaggtttggctaaagacgaagcagaatcattgaagaaaacattggaagaagctggagctgaagttgaacttaaa

SEQ ID NO: 12553 - DNA, 141 bp, Bacteroides fragilis
atgaaaagaacatttcaaccctctaacagaaagagaaaaaacaaacacggtttccgtgagagaatggctacagctaacggccgtagagtattggctgcacgtcgcgctaaaggtcgtaagaaactgactgtttctgacgaa

SEQ ID NO: 12554 - DNA, 633 bp, Bacteroides fragilis
atggaatgtgatatttgtatcagtaaggacagcgtattctatttattgcatgattctaccttggatcgtacgacgaatggaaccgggctgattagagagtggctttcggcagacatcgatacattggatgcaggttcatggtttggcgaaaagttcagcggacagtgtgttccccggttggacgttttattgcggaaggctaaacagaacggtctgaagctgacgctcgattatcgtacgggagactttggacagttgctggatctggttcgcagggaaggaatgttagagaattgtacatttactttctggtcggacaaggaggcaaaagcttttcgccaagtggctcctgaaattcggacattacaggcgtatgtaggaggtggtgccgaacttgataaggttatagctgaaataaatcccaatattgcggttattcggatcgattcactggataagctcctggtggaacggtgccataagaaaggattgaaggtgcttgcattggcactgggtactgacgatgtagaagagtctgaccggaaagctattgaactcggggtggatgtgctggccacggacagaccggagctgtttgtaaagaaatacagaccagagcatacatggacaaaa

SEQ ID NO: 12555 - DNA, 864 bp, Bacteroides fragilis
atgggaaacgataaacgggtgcgcaaacccgaatggcttaaaatcagcattggagccaatgaacgctataccgagaccaaacgcattgtcgaatcgcactgcctgcacaccatctgtagcagtgggcgttgccccaacatgggcgaatgctggggaaaagggacagctacgttcatgattgccggtgacatctgtacccgcagttgtaaattctgtaatacccagaccggacgacctctgcctttggatcccgacgaaccgacccacgttgcagaatcgattgccctgatgaaactctcacacgcagttatcacatctgtagaccgcgacgatctgcctgatttgggtgcagcccattgggcacaaacaattcgtgaaatcaaacgactaaatccggaaacaactaccgaagtactgattcccgatttccagggacgcaaagagcttattgaccaagtgataaaagcctgtcccgaaatcatctcccataacatggagactgtgaaacgcatcagtccacaggtgcgtagtgccgccaactatcacaccagcctggaagtgatccgccaaatagccgaaagcggtattacggcaaaatcgggcattatggttggtctgggtgaaactcctgctgaagtagaagagttaatggacgacctgatttccgtcggttgcaaaatcctcaccatcgggcaatatctgcagccaacccacaaacacttcccggttgcagcatacattactccggaacagtttgctgtttataaagaaacaggactgaagaaagggttcgaacaaatggaaagcgcaccgttagtacgctcctcgtatcatgcagaaaaacatatccgatttaataataag

SEQ ID NO: 12556 - DNA, 1107 bp, Bacteroides fragilis
atgattatcggagtacctaaggagattaagaacaacgagaaccgtgtgggcatgacgccctcgggagtcgccgagttagtgaaacgcggacatactgtatacatacagcacaccgcaggagagaacagtggttttcaggacgaggcatatacagccgtaggagcacaaatactgcccactatggaagagacatacgctatggcccagatgatagtaaaagtaaaagaacctatcgcaccggagtacagactgatccgcaaagaacagttgttgttcacttatttccatttcgcttccgatagagagttgactcttgccatgatagagaacggctcggtctgcctggcttacgaaacagtggaaaaagccgaccattctctcccgctgctgatacctatgagtgaagtagcaggacgcatggccatacaggaaggtgcccgttttctggaaaagccacaaggtggaaaaggcattttgccgggtggtgtaccgggggtaaagccggcaaaagtgttaatcctgggtggagggatcgtaggtagtaatgcggcccagatggcagccggattgggagccgatgtcacaattgcagacatcaacctgagccgtcttcgctacctgagcgagacgttaccgaaaaatgtaaaaacactatatgcctcggaagtgaggctgaaaaaagagttgccggacgtggatcttgtagtaggttcggtactgattccgggagacaaggctccgcacctgatcacccgtgatatgctgaaaatgatgcaaccgggtacggtattggtagatgtagccatcgaccagggaggatgtttcgagacttcgcatcccacaactcatagtgaaccgacgtatgtagtcgatggaatcgtacattatgctgtagccaatattccgggggcagtgccttacacctctacattggcattgaccaacgccactctgccctatgtcatagcattggcaaacaaaggatggagaaaggcatgcaaggaagatccggcgctggctttaggtctgaatgtggtagaagggaaagtggtatatcgagcgatagccgatgtattcggcctgaaatacgagcaattgaacttagaa

SEQ ID NO: 12557 - DNA, 1950 bp, Bacteroides fragilis
atgcagaccattcggttggctcggaacaagccgcgtacattcaaggaaaagctgattgaaatggtgtgggccacccgtttggaatttcgtaaatctaagaaagagatactgtcactttacatttcacatgcccccttcggaggaaacgtagtaggactggatgcggccgcctggcgatacttcggacattcggctgaagaactatcatgggcagaatcggccatgttggctgtactccccaactcacccgccatgatccatctttcgaaaagtcggcaagcactcctcgataaacggaaccgactattgacacacctgcataaaaaaggaattctggatacttcgacatatgaactggccatcagtgaaccactcccgcaggaacctttacctcttccacacatagcgcctcacctgacagactatttctatcaaacccgaaatggaaaatactccgtatcgaccatcgacagaggtatacagactcaaattgaaagtttggtagaacgatggaacagtgaattcaaacggagtgacatccgtaatctggcgattcttgtgattgacatccggacgaatcaggcgatagcctattgtggcaatgtacatttcgacaaagagcagagcggcaaccaagtagatgtcatccggtcgccacggagcaccggcagtattctcaagccttttctttattatgccatgctacaagaaggagaaattctcccaaatactttgttgccggacattcccgtcaacatcaatgggttcactccacaaaattttaatctgcaatttgaaggagccgtaccggcctcggaagccattgcacgctctcttaacataccttcggtaacaatgctgcaacgttacggggtacctaagttccacagtttcctgaaacaaatcggactgactaccctgaaccgtccctcaagccattacggactttctctgattctgggaggtgcagaagccacgttatgggatatcacttcggcctatgccaacatgggacgcagcctcaaccggttacctcaattcccgtgtacactcctcctgtcggattccacctccgttcatcgtccatcgttccaatccggagccgtctggcagacttttgatgcaataaaagaagtgaaccgaccggaagaaatagactggcgtaccattccttccatgcaaaccattgcctggaaaaccggcaccagttatggtttccgggatgcctgggcagtgggtgtaactcctaaatatgcagtgggtgtatgggtagggaatgctacgggtgagggaaaacccgggctggttggtgcccgtacggcaggccctgtcctgttcgatgtattcaacctgctcccttcttctccctggttcgaacgtcctcagggcgaactggttgaagcagaaatttgtcggcagtccggccatctgaaaggacgattctgtgaagaaacagatactttgctgatccttccggcaggtctcaaaacagaagcttgcccttatcatcacccggtcaccctatcggcaaatgaacggttccgaatatacgagaattgtgccaatagcgaaccggttgtccgccgtaactggtttacccttcctcccgtatgggaatggtattataagcaacatcacccggaatatcgtcctctccctccctttaaatcaggatgtggagaagaccggttccaaccgatgcaatttatttatccgccaatgggagcccgtatccatctgcccaaacagatggatggcagcaaagggcagttgactgtcgaactggttcacagtcatccgaatacaaccatctactggcatctggacgagacatacctgacgcaaacgcaggacttccacaaactttctctccgtccgtcccccggcaaacactccctgacggcagtggatgacgagggaaatacaatttcgacaacgttctttgtggaa

SEQ ID NO: 12558 - DNA, 1479 bp, Bacteroides fragilis
ttgttcggcggacagattcaggtggcaggagcagtaaaaagtaacaagatcaaaaagacggcaacttccgactggatggagatcgagaaacaacgtggtatctcggtgacaacttcggtgatggagtttgactatcgggactataagattaatattctggatactccggggcaccaggactttgccgaagatacctatcgtaccttgacggcggtagacagtgtcatcatcgtggtagatggagcgaagggtgtggaaacccagacccgcaagctaatggaagtctgccggatgcggaatgccccggtaatcatctttgtgaacaaaatggaccgtgaaggtaaagatccgtttgacttgctggatgaattggaagaagaactgatgattcaggtacgtcctctgtcttggcctatcgaacagggaccccgtttcaagggagtttataatatctacgaacagaaactggacctctatcaaccttccaaacaggtggtgacggagaaagtggaaatagatattcattctgacgagttggatcggcagatcggcgatacgctggcagataagttacgcggtgatttggaattgatagaaggtgtatatcccgaatttgatgtagaaacatatctgcagggagagtgtgcaccggtctttttcggttcggctttaaataattttggtgtgcaggaactgctcaactgttttgttgagattgcccccgccccccgtcccgtacatgcagaagaacgtgaggtgatccccgaggagcctaaatttaccggttttattttcaagattacggctaacatcgaccccaatcaccgttcgtgcgtggccttctgcaaaatctgttcaggtaagtttgtacgaaacgccccttatctgcatgtacgtcatggtaagactatgcgtttctcctcacccacccagtttatggcacaacgtaagacgactattgacgaggcttgggccggagatattatcggtttgccggataacggaacatttaagattggcgatacgcttaccgaaggagaacaacttcatttccgtggtttgccgagcttctcaccggagatgttcaagtacatagagaatgccgatccgatgaagcagaaacagcttgccaagggcatcgaccagttgatggacgaaggtgtggcccagttgtttgtcaatcagttcaacggtcgcaagattatcggtacggtaggtcagttgcagtttgaggttattcaatatcgtttgctgaacgaatacaatgcttcttgccgttgggagccgttgagtttgtacaaagcatgctggattgaaagcgatgacctggaagagttggaagcattcaagaaacgtaaatatcagtatatggccaaggatcgtgaaggacgcgatgttttcctggccgattcgaactatgtgcttcagatggcacagatggatttcaaaaatatccggttccactttacaagcgaattc

SEQ ID NO: 12559 - DNA, 1185 bp, Bacteroides fragilis
atgtacggtaaaatgaaagaacacctcagcaatacgattgctgaaatcaaagaagcaggcctctacaaagaggaacgcttaatcgaaagtgcacaacaagctgctatcaccgttaaaggcaaagaagtgctgaatttctgtgccaacaactaccttggattgtctaaccatccccgcctgatcgaaggtgcaaagaagatgatggaccgtcgtggatacggtatgtcttctgtacgtttcatctgcggaactcaagatatacataaggagctggaagccgcaatttcagactatttcaagaccgaagacacaattttgtacgcagcctgctttgacgctaacggcggtgtattcgaaccgttgttcaccgacgaagatgccatcatctccgactcgctgaaccacgcttccatcatcgacggagtacgtctttgcaaggcaaagcgctaccgttatgccaatgcagacatggccgacctggaacgttgcctgcaggaagcacaggctcaacgtttccgcatcatcgtcaccgacggtgtattctcaatggacggaaacgttgctccgatggacaaaatctgtgacctggccgaaaaatacgatgccctggtgatggtagacgaatctcactcagccggtgtggttggtgcaaccggtcatggagtaagcgaacagtacaacacttacggacgtgtagacatctacaccggtactctgggcaaagcttttggcggtgctttgggcggattcacaaccggccgcaaagagatcatcgacctgcttcgccagcgcagccgtccgtacctgttctccaactcactcgctccgggcattatcggtgccagcctcgaagtattcaagatgctgaaagaaagcaacgaaatccatgacaaactggtagacaacgtaaactacttccgcgacaagatgactgcagccggattcgatatcaagccgactcagagtgctatctgtgccgtgatgctttacgatgccaaactgtcacagatctatgcagcccgcatgcaggaagaaggtatctacgtaacaggcttctactatccggtagttccgaaagaccaggcacgtatccgtgtacagatttcagccggtcacgaaaaagaacacctcgataaatgtatcgctgcattcatcaaagtaggtaaagaattaggtgtactgaag

SEQ ID NO: 12560 - DNA, 1983 bp, Bacteroides fragilis
gtgaagaaagactctgtctaccaattgcaagagatagtggtatcgtcccaacagatacttgggagtaagtttaaagcaagaaaccgcacaggatcggcatattatatttcgcctgaggaaattcgcaggttgggatatacggatattaatcgtatgttgaaggccgttcccggagttaatatgtatgaagaagacggtttcggtcttcgcccgaacattagtttgagaggaacgaaagccgagcgaagtgaacgcatctcgattatggaggacggtgtactggcggcaccggctccttattccgctccggcagcttattatttccccaatgtagcccggatggaggccatcgaagtgctgaaaggaagtagccaggtacaatacggtccgttcactacgggaggagctattaatttggtatcgactcctattccgaacagtttttccggtaaagcgaacatttcttacggaagcaaaaatacgtttaagtcgcatacatctgtcggaagcagttggaagcatttcgggtatatggtagaatatttgcgttatcagtcagatggttttaagaaatacgaagatcatgctgccaaaggatttaaaagaaatgatattatagctaaaataagggttaaaacggatcatgtaaaaggagtgaatcatgctttggaactgaaattcggatacgcagacgaaaattcggatgaaacgtatgtgggactctctgcagatgattttaagaagactccttttctcaggtatgcaggttcgcaaatggataaacttaagaccgatcatcggcagtgggtagcaacttatctgctgactttttccaacaagttgaaaataacgaccaacgcctattacaactatttccaccgaaattggtacaaactgaatgatgtgcgcgcaggaatcacttcaaaagagaagagatccatcgccgatgtacttgtggatccggaaacgaatatccgttacttcgacattttgacggggaaaacagatcgggaagaggaagcactgttggtaagagccaataacagaacttaccgttccagaggtatacaaaccagggccgaataccgtttcaacctgaacgagtttttcttcgatctggagttcggacttcgttatcatgccgatgaggaagatcgttttcagtgggatgattcttactccatgaaaaataagaaaatggtactgtttatggagggtattcatggtacgaatgctaaccgtgttacttctgccaacgcgttagccggttacctgcttgctaaattaagatatgacgcgtggactgtcactgccgggctgcgatatgaggatgtagacttactgaaaaaagactatacgaaagaagatttggcacggtcgggtaaggtacgtattgaaactccgaatcatgcgcgtgtactgattccgggggtaggattacattatcaattgatgccggctgcttctgttttcttcgggattcataaaggctttgcccctccaagcgcggaattatatcaaaagcctgaaagcagtgtgaatatggaactgggtacacgtgttgctatcgggaattttagggcggaactaatcgggttctacaataattacagtaatatgctgggaagtgatctggctgcttcgggtggggccggaacacttgaacagtttaatgtaggggaggcccgggtaaaaggtgcggagtttctggtacgatatcagcctcttccgaagaactgtaatgtgaggttgccgttgcaggtatcctatacttatacggatactgaaattagaaattcgtttgaaagccattcatggggtaatgtggttagaggtgatgaaataccttacatcttcaagcatgctctgaacatgcagttgggtatagaatgtaaatggttttatgccaatatcggtacacgctataacagtgatatgcgtacttcacccgggcaggggacgattgcggagagagaaaaagta

SEQ ID NO: 12561 - DNA, 1209 bp, Bacteroides fragilis
atgcgcagtacattcaagctcttattctacatcaaccgtaacaaggtgaaatcggacggcacgaccgccgtcctctgccggatcagcatcgacggaaagaaatcggcagtcacgacaggcgtctattgcaaacccggggactgggacagcaagaagtgtgaaatcaaaacagccagggagaacaaccgccttgccgccttccgcagccggttggaagaggcgtacgggaacctgctgaggaaccagggagtggtcacggccgaactgctcaagaccaccgtgtcaggcgccaattccgtaccggaatacctcctgcaggccggagaggtggaacgcgaacggctcagggtccgctccaaggagatcaactccacttccacctaccgccagtcgaagaccacccagctcaacctcaggcagttcatcgaatcccgcgggatgaaggacatcgccttttcggacatcaccgaggagttcgccgaatcgttcaaggtctttctcaagaaggagctgggacacaggaacggacacgtgaaccactgcctgtgctggctcaaccggctcatctacatcgccgtggaccgggaaatactaagagccaatccgatagaggacgtggcatacgagaggaaagaaacacctaaactaaggcatatcagccgcagtgaactgaagcggatgatggaaaccccgctgcccgacccgatgatggagctggcacgcaggacgttcatcttctcctcgctgaccggtctggcctacgcggatacgagggctctccatccccgtcacatcggaacgacttcggaaggaagaaggtatatccgcatccgccgcgccaaaacggacgtggaggcgttcatcccgctgcatcccatagccggacagatactggagctttacaacaccacggatgacgacaggccggtattcccgctgccggtccgcgacgtcctctggtatgaggtacatggaatgggcgtggcattaggcatgaaagagaacctgtcctaccacatggcccggcattcgttcgggaccctgacactgaccgcaggtattccgatagagagcatcgccaggatgatgggccacacgaacatcgacagcacgcaggtctacgcccaggtcaccgaccggaagatatcctcggacatgaaccggctgatggaaagaagaaagcccgcggccggcaaggaagccgcaggc

SEQ ID NO: 12562 - DNA, 732 bp, Bacteroides fragilis
atgggacaaaaagttaatccaataagcaaccgtttaggaattatcagaggatgggattctaactggtatggtggaaatgattacggtgactctttgctggaagatagcaagatccgtaaatatcttaatgcaagacttgcgaaagcaagtgtatcaagaatcgtaattgaacgtacgctgaagctcgttactattactgtttgcactgctcgtccgggtattattatcggtaaaggtggccaggaagttgataagttgaaggaagagttgaaaaaggttaccgacaaagatattcaaatcaatatctttgaagtgaaaagaccggaactggatgctgtgattgttgctaacaacatcgctcgtcaggtagaaggtaaaattgcctatcgccgtgccattaaaatggctatcgcaaatacaatgcgtatgggtgcggaaggtatcaaaattcagatttcaggacgtttgaatggagctgaaatggcccgttctgaaatgtataaggaaggaagaactccgttgcacactttcagagcagacatcgactattgccatgcagaagcattgacaaaagtgggtcttctcggtattaaagtttggatctgtagaggtgaagtttttggtaagagagaattagctcccaactttacacaaagcaaagagagtggtcgtggaaacaatggtggaaacaacggcggcggaaagaacttcaaaagaaagaaaaataatcgc

SEQ ID NO: 12563 - DNA, 822 bp, Bacteroides fragilis
atggcagtacgtaaatttaagcccacaacaccggggcaaagacataagattattggtactttcgaggaaattactgcatcagtaccagaaaagtcgcttgtatatggtaaaaaatcatctggcggtcgtaacaacgaaggtaagatgacaatgcgctacttaggtggcggtcatagaaaagtgatcagaattgtcgatttcaagagaaataaagacggtgttccggcagttgtaaaaacgatcgaatacgatccgaaccgttcggctcgtatcgcattgttattttatgctgatggtgaaaaaagatatattattgctcccaatggattgcaagttggtgcgactttgatgtcgggagagaacgctgcgcctgagattggtaatgcgcttccgcttcagaatatcccggtcggtacagtaattcacaacattgaattgcgtccgggtcagggtgctgctctggttagatcagcaggtaacttcgctcagctgacttcaagagaaggtaagtattgtgtaatcaaattgccttcaggtgaagtaagacaaatacttagcacttgtaaagctactatcggtagtgttggtaactcagatcatggattggaaagctcaggtaaggcaggtcgctctcgttggcagggccgtcgtcctcgcaaccgtggtgttgttatgaacccggttgatcacccgatgggtggtggtgaaggacgtgcttccggaggtcacccaagatctcgtaagggattgtacgctaagggacttaagactagagctccgaagaaacaatcgtctaagtacattattgagagaagaaaaaag

SEQ ID NO: 12564 - DNA, 624 bp, Bacteroides fragilis
atggaagttaacgtatataacattaaaggtgaagacactggaagaaaggttacgttaaacgaatctatcttcggaattgagcccaatgaccacgctatctatctggacgtaaagcaatttatggctaaccagcgtcagggtactcacaagtcaaaagagagaagcgaaatcagcggatctactcgtaaaatcggtcgtcagaaaggtggcggcggtgctcgtcgtggtgacatgaattcaccggtactcgtaggtggtggacgtgtatttggtcctaaaccaagagactactacttcaagctgaataaaaaagttaagacattggctcgtaagtcagctttgtcgtataaagctcaggacaacgcaatcgtagtggtagaagacttcaactttgaggctccgaagactaaggttttcgttgaaatgacaaaaaatcttaaagtttctgacaaaaaactgcttgtagttttaccagaagcaaataaaaatgtatatttgtcagctcgtaacatcgaaggtgctaacgttcagactatctcaggattaaatacttacagagtattgaatgctggggttgttgtgcttactgaaagctctttgaaggctattgacaatatcttaatc

SEQ ID NO: 12565 - DNA, 615 bp, Bacteroides fragilis
atgccaggattattaggaaaaaaaatcggaatgacatccgttttcagtgccgatggtaagaatgtaccatgcactgttatcgaagcaggtccttgtgttgttactcaggtaaagaccgtagagaaagatggctatgcagccgttcagttgggtttccaggacaaaaaggaaaaacatacaactaaaccgttgatgggtcacttcaaaaaggctggagtaacaccgaagagacacttggccgagttcaaggaatttgaaaacgagttaaatctgggtgatactgttacagtagaactgttcgacggcgcagactatgtagacgttgttggtacttctaaaggtaaaggcttccagggtgtagttaaaagacatggctttggtggtgtaggtcaatctactcacggtcagcacaaccgtgcccgtaaaccgggttctatcggtgcttgttcgtatcctgcaaaagtgttcaaaggaatgcgcatgggcggacaaatgggtggcgacagagttactgttcaaaacttacaggtattaaaagtaatcgcggaacacaatcttcttttgatcaagggttctgtaccgggttgcaaaggttcaatcgtattaattgaaaaa

SEQ ID NO: 12566 - DNA, 600 bp, Bacteroides fragilis
atgttttccggaatcgtagaagagtatgctaccgttgtggcactggtgaaagaccaggagaatatacatttcacactgaagtgttcgtttgtaaatgaattgaagatagatcagagtatctctcacaatggggtctgcctgaccgtggtcagcatgactgaagatacctacactgtgactgccatgaaagagacactggaccggtcgaaccttcgtctgctgaaagtgggggacaaggtgaacgtggaacgcagcatgatgatgaacggacgtctggacggccatattgtgcagggacatgtggatcagaccgccgaatgtatcgatatcaaagatgcagacggaagctggtattttacgtttaaatatgctttcgacaaggagatggccaagcgcggctatattacggtcgataagggttcggttacggtcaacggtgtcagcctgacggtatgcaacccgactgacgatacttttcaggtggcgattatcccatatacctacgagcataccaatttccatactttcgggaagggcagtgttgtcaacctggaatttgatattatcggcaagtatatcagccggatgatccagtacaaa

SEQ ID NO: 12567 - DNA, 1539 bp, Bacteroides fragilis
atgaatcaaaaaattatttatagtagtgcattacttgtcggattaggcagcccgcaagcatttgcccataaagaaaaggcccatacccctcaaaaaccgaatatcatctttattatgtgtgatgatatggggtatggagatctgggttgctatggacagccatacatcagcacccctaatattgacaacatggcccgtgaaggcatgcgctttacgcaagcctatgccggaagtccggtgagtgcaccttcgcgcgcatcgttgatgaccggacaacataccggacattgcgaagtgcgtggtaataaagagtattggactcaggcgtctacagtgatgtatggcgataataaagaattttcagttgtcggacaacatccctatgatccggaacatgtcattctgcccgaaataatgaaagataacggatatacaaccggtatgtttggtaaatgggcggggggatacgaaggctcggcgtccactccggataaaagaggaatcgatgaatattacggatatatctgtcaatttcaggcacatctctattatcccaattttctgaatcgttatagtccgtcgttgggtgatacaggtgttgtacgtgttgtgatggaagagaatatcaaatatccgatgtacggtccagattatcataaacgtactcaatactcagctgatctgattcatcagaaagcgatggaatggatcgagaaacaggatggtgaacaacctttcttcggaatctttacctataccttgccgcatgcagagttagtgcaaccggaagactctattttgaatcattataagacacagtttgctgatgacaaagcttttggtggtcaaaaaggatccagatataacgccattacccatgtgcatgcacagtttgcgggtatgatcacccgtttggactattatgtgggcgaagttctgaagaagttggaagagaaaggatttgatgagaatacgattgtcatctttaccagtgataatgggccccatgaggaaggcggagccgatcctactttcttcgggcgtgacggaaagttacgtggcttgaagcgccagtgttacgagggaggtatccgtgttccgtttattgtccgttggcccggtcaggttgctgccggaacagtgaatgatcatcaatgtgctttctacgatgtcatgcctaccttgtgtgatttgacaggcgtgaagaacttcacgaaaaaatatgtgaataagaaaaaggaagcggattattttgatggtatctcttttgctccgaccatactgggtaaaaagaaccagaagaaacatgattttctctattgggagtttaatgaaacgaaccagatcggtgtacgtatgggagactggaaaatggttgtcaagaaaggtactcctttcctttataatctggcgacagatatccatgaagatcataatgtagctgccgaaaatcctgatattgtgaagaaaatggttgggattatccatcagcaacatacggaaaatccaaatttcaaggtaacattacctcctactatg

SEQ ID NO: 12568 - DNA, 1248 bp, Bacteroides fragilis
atggcatttcgctattacgatgccgagaaaatgattaacgggcgtagtatgaaagattggttaaagtttgcaatggcatggtggcatacactttgtgccgaaggcggtgaccagtttggaggcggaaccaaacagttcccatggaacggtgaccctgatcccgtgcaggctgccaagaataaaatggatgccggtttcgagtttatgcagaaaatgggcatcgggtattattgcttccatgatgtcgatttggttacggaagccgacagcatcgaagcctatgaggccaacctgaaagagctggttgcttatgctaagcagaaacaggccgaaacaggcatcaaactgttgtggggaacggccaatgtattcagccacgcgcgttacatgaacggtgcagccaccaatcccgattttgatgttgtggcccgtgccgctgtccagataaagaatgcgattgatgccaccattgaactgggaggtacgaattatgtcttttggggtggacgcgaagggtatatgtcgttgctgaatactgatcagaaacgcgaaaaagaacatctggcacagatgctgaccattgcccgtgattatggacgtgcacgtggtttcaagggcactttcctgattgaaccgaaacccatggaaccgacaaagcatcagtatgatgtcgatacagagacagttatcggcttcctgaaggctcacggactggatcaagacttcaaagtgaatatcgaagtgaatcatgccacccttgcaggacatacgttcgaacatgaactggcggtggctgtagacaacggaatgttggggtctatcgacgcaaaccgcggcgattatcagaacggatgggatacggatcaatttccgattgacaacttcgaactgacacaagccatgatgcagattatccgtaacgacggattgggtaacggcggtacaaacttcgatgccaaaactcgccggaactctactgacccggaagatatctttatcgcacatattgccggaatggatgctatggcacgtgccttggaaagcgcagccaatctgctcaatgagtctccttaccagaaaatgttgtccgaccgttatgcctcgttcgatgctggcaagggcaaggagttcgaagaagggaaactcagcctggaggaactggttgcttatgccaaagccaacggagagccgaagcagaccagcggccaacaggaactgtatgaagcactcgttaatatctactcatta

SEQ ID NO: 12569 - DNA, 744 bp, Bacteroides fragilis
atgggattattagatggaaaaacagccattgtgaccggtgcggctcgtggtattggtaaagctattgctttgaaatttgcttctgaaggagcaaatattgcatttacagatcttgttatcgatgagaatgcacagaatacagcaaaagaaatcgaagcaatgggtgtgaaagccaaaggatatgcgtcgaatgctgccaattttgaagatactgcaaaagtagtggaagagattcataaagatttcggccgtatcgatattctggtaaacaatgcaggtatcactcgtgacggattgatgatgcgtatgagcgaacagcagtgggatatggttattaatgtgaacctgaaatctgcttttaactttgtgcatgcgtgtactccgatcatgatgcgccagaaagccggaagcattattaatatggcttctgtagtgggtgttcacggtaatgccggacaagctaactattcagcttcaaaagcaggtatgattggtttggctaaatctatcgctcaggagcttggctctcgtggtatccgtgccaatgccattgctccgggattcatcattactgacatgacagccggcctttcggaagaagtgaaaacagaatgggctaagaagattccattgcgtcgtggcggtactcctgaagatgtggctaacatcgctactttccttgcttctgatatgtcttcttatgtatcaggtcaggtgattcaggtagatggtggtatgaatatg

SEQ ID NO: 12570 - DNA, 951 bp, Bacteroides fragilis
atgaaattagaggaaaaaacaaaaaagaaggatgagcaagggctgattatcaaaaagtaccaacagtatctgaaactggaaaagtccttatccaaaaacacactagaggcttacttgacagacctggagaagttactaagttttctatcagccgaaggcgtggagatacttgaagtcagcctgacagatcttcaacgctttgctgccggattacatgatattggtatccacgcccgttcacaggcacgtatcatttcaggtattaaatcctttttccactttttgattatagctgattatatagaagccgatcccagcgaattgctggaaggtcccaaaatcggatttaaacttccggaagtactgactgtagaagaaatagaccggattatttcgacaatagacctgagtaagaacgaagggcaacgaaatcgggcaatcctggaaacgctttacagctgtggattacgggtttccgagttaaccggactaaaactatcagacttgtactttgacgaaggtttcattaaagtagaaggaaagggcagcaagcaacgattagtccctatctctcccaaagcgatccaggaaataaagctttatttcttggatcgaaatcggatcaatataaaaaaagatcatgaagattatctgtttttaagcaggcgaggtacccatttatcacgaatcatgatctttcatctcatcaaagagctggccgatatggcgggaattaccaaaaatatcagtccgcacacattccgccactcctttgcgacacacttacttgaaggaggcgccaatctgcgggctatccaatgcatgttggggcatgagtctatttcgactaccgaaatctacacccacatcgaccgcaatatgttgcgaagtgaaatcatagaacatcatccacgcaacatcaaataccgacaagaaaaaaagccgtttcgg

SEQ ID NO: 12571 - DNA, 972 bp, Bacteroides fragilis
atgaaaataggccacatagacctgggcgaacgccctgtatttctggctccgatggaggatgtcactgaccccgcttttcgcctgatgtgcaaaaagtttggagccgatatggtatacaccgagttcgtctcgagtgatgctttgatacgttccgtcaataaaaccactcaaaaactgaccatctgcgatgaagaacgccccgtcgccattcaaatatacggtaaagacacggaagccatggtgggtgccgcccggattgtagaagaagcacaaccggatatattggatatcaacttcggttgcccggtaaagaaagtagcagggaaaggggccggagccggcatgttgcagaatatccccaagatgctggaaataacccgtgccgtggtagatgcagtcaaaatacctgtcaccgtgaaaacccgactgggatgggatgccgatcataaaataatagtggacctggcagagcaactgcaggattgcggcattgcggcactggccattcacggacgtacccgtgcgcagatgtatacaggcgaggcagactggaccctgataggagaagtcaagaataacccacgtatgcacatacctattataggaaacggcgatgtgactacggccgctggtgccaaagagtgctttgagcgatatggtgtagatgcgattatgataggacgcggcagtatcggccgtccctggatattccgcgaagtgaagcattatctggaaaccggagaagaacttccgcgagaatcattcgagtggtacctcgatgtgttgcgcgaagaggtgctgaacagtgtagcccgactggacgaacgcagagggatcatccatatccgccgtcatctggcagcaactcccctatttaaaggaatccccaatttccgtgagacacgcattgccatgctacgcaccgaatcggtagaagaactcttccggatattcgacggactcaccacagag

SEQ ID NO: 12572 - DNA, 3157 bp, Bacteroides fragilis
aaagtactgctgcttggttccggtgccttgaagatcggtgaggccggtgaatttgattattccggttcccaagcactcaaagccttgaaagaggagggcattgaaaccatcctgatcaaccccaacatcgctaccgtgcagacatcggaaggcgtggccgaccagatatacttccttcccgtgacaccctactttgtggagaaggtgatccggaaggaacgtcccgaaggcattatgctcgcctttggcggacagacggcattgaactgcggggtcgccctttaccgcgaagggattctggagaaatataatgtgaaagttctgggaactcccgtacaggccattatcgacaccgaggaccgtgaacttttcgtcgacaagctgaacgagatcgatgtgaagaccatcaagagcgaggcggtggagaacgcagaagacgcccgtcgtgctgcccgggaattaggctatccggtcattgtccgtgcagcttacgcactgggcggattgggttcgggtttttgtgacaatgaagaagaactggacctactcgtggaaaaagctttctctttctctccgcaggtattggttgagaagagcctccgtggctggaaggaggtggagtacgaggtggtgcgtgaccgttttgacaactgtatcacggtctgcaatatggagaatttcgacccgctgggcatccataccggtgagtctatcgtgatagctccttcacaaaccctgaccaataaggagtatcataaactgcgcgagctcgccatccgcatcatccgccacatcggcattgtgggagaatgtaacgtgcaatatgctttcgaccccgaaagtgaagactatcgcgtgatcgaggtgaatgcccgcctgagccgttcgtctgccctggcttccaaggctaccggttatccgcttgcctttgtggctgcaaaactcggacttggctacgggttgttcgacctgaagaactctgtgacgaaaaccaccagtgccttctttgagccggcactcgattatgtagtctgcaaaattccgcgttgggacctcggtaagttccacggtgtggacaaggaactcggctcttcgatgaagtccgtcggtgaggtaatggccattggccgcacttttgaggaagcgattcagaagggcttgcgaatgatcggacaggggatgcatggttttgtggaaaacaaggaactcgttatccccgacatcgacaaagcactgcacgaaccgaccgataaacgtatctttgtcatctcgaaggctttccgtgccggatataccatcgatcaggtgcacgaactgactaagatcgacaagtggttcctccagaaattgatgaatatcatgaatacttctgaggaactccatcagtgggggaacaatcacaagcagatagccgacttgcctgccgacctgctcaagcaagccaagcgtcagggattctccgatttccagattgcacgtgccatcggctacgaaggcgatatggaagacggtagcctttatgtccgcaattaccgtaagagcctgggcattgttcccgtggtgaagcaaatcgatacgctgggctgccgaatatccggcacagaccaattatctttacctgacctatagcggcacagccaacgacgtcacttacctgggtgaccatcgttctatcgtcgttctcggttcgggtgcctaccggatcggttcttccgtagagttcgactggtgcggggtgcaggcgcttaatacgatccgtaaggagggatggcgttcggtgatgatcaactataatcccgaaaccgtatcgaccgactatgatatgtgtgaccggctttactttgacgaactgacattcgaacgcgtgatggatgtccttgaactggagaatccgcacggagtcattgtttccaccggcggacagatacctaataatctcgccctgcgtctcgatgcccagaacatccacattctcggaacatccgcccagagcattgacaatgccgaggaccgcgacaaattctccgccatgctcgaccgtatcggagtggatcaaccggagtggcgtgcccttacttcacttgaggacattaactcgtttgtcgataaggtaggtttccctgtgcttgtccgtccgtcgtatgtgctcagcggtgcggcaatgaacgtatgctccaaccaagaagagctggaacgctttctgcaactggcggccaacgtatcgaagaagcatccggtagtggtcagccagttcatcgaacatgccaaggaggtggagatggatgctgtggcacagaacggtgaaatcatcgcttatgcaatctccgaacacattgagtttgcgggagtacattccggtgacgccactatccagtttccgccgcagaagttgtatgtagagacggttcgtcgcattaaacgcatcagtcgtgagatagccaaggcgctcaatatctccggcccgttcaacattcagtatctggctaaagacaatgatataaaggtgatcgagtgtaatcttcgtgccagccgttcgttccccttcgtcagcaaggtattgaagatcaattttatcgaacttgccacgaaagtcatgctcggcctgcctgttgagaagccggagaagaatctgttcgaactcgattatgtcgggatcaaggcgagccagttctcgttcaaccgcctccagaaagccgaccctgtattgggagtggatatggcttcgaccggtgaagtgggttgcattggcagcgatacttcctgtgccgtgctcaaggctatgctttccgtgggttatcgcatcccgaagaagaagattctgctttctaccggaacaccgaagcagaaagtggatatgctcgaggcagcccgtatgttgcagaagaagggatatgatattttcgcgacaggaggttccagcaagttccttaccgagaatggtgtggagaacacccgtgtttattggcccagtgaagagggacatccccaggcactcgagatgttgcataagaaagagatcgacatggtggtcaatattcccaagaatctgactgccggtgaactggacaatggttacaagatccgtcgtgccgctatcgacctcaacatcccgctgatcactaatgcccgcctggcgagcgcgtttatcaatgcgttc

SEQ ID NO: 12573 - DNA, 1337 bp, Bacteroides fragilis
atgaaaataggacgtaaaatcgcactcttttatacgttggtaacggtactgaccaccatggcagttatcggagtgttctacctgtttagttcaaggtatatcgatgggttgtacaggtcataccttcgggaaaaagcttttctgaccgctcagaaacactgggagcgagatgaagtggatgagcaaagctatcagaccattcaacggaagtatgatgagctgctgccggaggcaaagagattttgttggatatggatagtgatgccgtggtgcgtgatacgctgaataaatatctttccgccagccagcagaagcagcttctcgagtcaaaagagatgtcatcggtctctttcgtatatcaggatatgctgggagccgcactatactatcccgataatgaaggcaattttatcgtaattatcatgtcgcataacagttatggggtcaagatacaggaacacttgctgctcttatccgcctttctggtattatgcagctcggtattgatctttttcatcggacaactctattctacgagaatattgattcccttgcagcacgtcctgttacagttgaaacagatccgcggcaacagtctgaaccgcagattgaagaccaccggcaataaagatgaactggaccatctgatagaaaccttaaacagtatgctcgaccgtatcgatacggcatttagagcagaaaaatcatttgtcagccatgcttctcacgaactgaataatcctattaccgccattcagggtgaatgtgaaataagtctcctgaaagaacggagtaccgatgagtacatcgaagcactccggcggatagccggggaaagtaaacgcctgtccaatctgatcaggcatctgctgtttctgtcgagacaggaagaggacatccggaagaataatgtagaagagattcgtctggcagacctgttggaagaggctggagctgctaacccgcgcatccggctgcaatatccggaagatgccgcaaggtacgctgtggtcagtgccagcccttacttgtttaaaatagccttgcaaaacgtgatagacaatgcctgcaagtattcgcaaggcgaggtgcttatccggctttacaaggaagatgagcgatgggggatagctgtcaaagattccggaatcggcatcccggcggatgaaatggaacttatcttccagtcattctaccggggaagtaatacgagagaatacgccggtcaagggatcgggttaagtctttccatgaaaatcttttctgtctacaggggtaaggtcagcattcgttccgaagaagggaaggggacggaagtgagagttgtcttcgcataa

SEQ ID NO: 12574 - DNA, 774 bp, Bacteroides fragilis
atgaaaacaaagcaagaaatcgtagctaattggctaccccgttacaccaaacgtaacctggaagactttggagagtatatcctgttgactaacttcaacaagtatgtagaaatatttgcagagaaatttaatgttcccattttgggtaaagacgccaatatgatctctgccagtgcagaaggaatcacaatcatcaactttggcatgggaagtcccaatgccgccataattatggatctgctgagtgccatctctccaaaggcctgcctgtttctgggaaaatgtggcggaatcgataaaaaaaataaaataggtgacctgattctgccaattgccgctatccgcggtgaaggtacctcaaacgactatttcccgccggaggttccgtccctgccggcatttatgctgcagcgtgccgtatcatcggctatccgtgactatgctcgcgattattggacaggaacagtctatacaaccaaccgccgtatttgggagcatgatgacacctttaaagagtatctgaaaagaactcgtgcaatggcagttgatatggaaacggcaactctgttcagttgcggttttgccaatcatatcccgaccggagctttactactcgtatccgaccagcctatgattccggaaggagtgaaaactgataaaagcgacaacatcgttaccaaaaactatgtagaggagcatgtagagataggcatcgcctcgctacgaatgatcattgatgaaaagaaaactgtaaaacacctgaaattcgactgg

SEQ ID NO: 12575 - DNA, 3120 bp, Bacteroides fragilis
atgttttcaaagttctttatcaatcgacctatattcgccacggtactggcattgatcatcgtggtggccggattggtaacattaaatatattgcctgtcgcacagtttccggagataactccgcctacagtacaggtatctgccttctatccgggggcaaatgctgagaccgtagcccagactgtcggcattcccatagaacagcaagtaaatggcgtagacggtatgctgtatatgagctctacagcgtccagctcgggtgcctattcgttgaccattacttttgctgtcggtacagacatagatatggccactgtacaagttcaaaaccgggtaagcgtagcacaatcttcgttaccggaacctgtcatcgttcagggagtaacggtacagaagcaatcgtccaatattgtgatgtttctcacgatgcaggcacaagactctgtatacgacgggctttaccttacgaactacgctcagttgaatctggtagaccaattgacacgtgtacccggcgtaggggctgtcaatgtaatgggagcgggcaattacagcatgcgcgtctggctcgatccggaagcaatgcgcatccgtaacctctcgccggcacaaatctatcaggctatccagtcacaaaacatagaggtcagtgccggttatatcggacagcctattggcaaaaacaacaataatgcctatcagtataccttgaatgtacaaggtcgcctgacgtctcccgaagagttcggcaacattattatccgaactgaagaaggagggaaaatgctccggctaaaagatgtggcgcgcatcgacctcggcagttcttcgtacaacgtagtgtccaaactaaagggacaccctactgctgccatcgctatctatcaacaaccgggttcgaactcgctcgatgtctctaaaggagtcaaggcaaaaatgcaggagcttgcacaaaacttcccggccggagtcagctataacgtgaccttggatacgaccgatgtcatcaatgcatccattgatgaagtactcgttacttttctggaaacaaccttattggtggtactcgttatcttcctgtttctacaaaactggcgggctgtcatcattccatgtatcaccattccggtatcactgatcggtacactggcagtcatggcggcacttggattttcaatcaatactttaactctattcggattgatacttgccgtagcaatagtggtggatgatgcgattgtggtagtagaaaatgcttcacgtttgctggagacaggacagtattctcccaaagaagccgtcaccaaagcaatgggagaaatcacaggaccaattgtcggagtggtattggtattattggcagtttttatccctaccacattaatcagcggcatctccggacaactttataagcaatttgccctaaccattgctgcatctaccgtattaagcggtattaattcgttgacactgaccccggcattatgcgcactgtttctggagcataacaagccatccaatttcttcatatacaagggattcaataaggtatatgataagacacagaatctatatgaccgtatcgtgaagggattactcgtccgtcccggccttgcgttgatctcttatggtattattacggcagtggctgttatcctgttcatgaaatggccttcaaccttcgtccctgatgaagatgacggctacttcatagctgtcatccagttgccaccggcttcaagtctggaacgcacacaggctgtgggtcggaaagtcaatcagattctggacagttatcctgaagtaaaagactatatcggtatcagcggattttctattatgggaggtggcgaacagtccaacacaggtacttatttcgttgtcttgaaaaactgggaccaacggaaaggaaaagagcatactgctgcggctgtggtcgaacgtttcaacgagatggcttatggcatccaggaagcacagatattcgcaatggtacctccggccattcccggattaggagcttcaggagggttacagctacaattggaagatcgcaataacctggggccgactgaaatgcaacgggctgtcgaaaccctgatggctacttatcacactcaacccgctctcgcatccatatccagtatgtaccaggccaatgtaccacagtatttcctgaatatcgaccgtgataaagtacagtttatgggcattcagttggataacgtattctctacactgagttattatatgggagcggcctatgtcaatgactttgttcaattcggacgtatctatcaggtaaagatagaggccggagaacaagctcaaaaagtaattgacgacgtgctgaaactcagcgtccccaacgccaaaggagatatggtcccattttcatcctttaccaaagtcgaagagcgcttggggatggaccagatcagccgttacaacatgtactcgacagcatctatcacctgcaatgtggcttcgggaagcagttcgggtgagggaatacagcaaatggaagacctgattaaggagcaactgggtaacgagtttggctacgaatggacctcggtagcctatcaggagacgcaagcaggcaacacaaccaccatcgtattcatcatggcattattggtggcattcctggtactggcagcccaatacgaaagctggacaagccccttatcagcaattatgggattgccaatggctttattgggagcaatgataggttgttctgtcatggggacccctgtgagcatttatactcagatcggtatcattttactgatcgccctttctgcgaaaaacggaatcctcattgttgaatttgcacgcgacttccgtgccgaaggtaactctattcgcgatgccgcctatgaagccggacatgtccggctgcgtccgatcctgatgacctcttttgcattcgtattgggagtgatgcctcttctgttcgccacaggggccggagcgcaaagccgtatcgcactcggcgcagctgttgttttcggtatggccctgaacacgttactggcaacgatatatatcccgaatttctacgagctgatgcaaaagttccaggaaaacgtattggatcgcaagaaaaagaaa

SEQ ID NO: 12576 - DNA, 2031 bp, Bacteroides fragilis
atggacaataacagcaagaaacccaacaataaagtaaatatgcccaagttcaatctgaactggatgtatatgattatcgccctaatgcttttagggctgtatttcgctaacggaagcagttctgtcagtaagaatatctcttacgatgagttccagcagtacgtacgtgacggctatgtaagtaaagtgatcggttatgatgataattcggtcgagatttatatcaaaccccagtacgtaggaaccgtattcaaacaagattccacccgtgtaggccggaatccgatgatcactacggaagccccttcacgcgagaacctggataactttctacaaaaagaaaaagaggagacgcactttgacggttctgtcagctatgataagaaaaaagactatttcagtgcaatactttggaatgtactgccgattgtcttcctgattgctttatggatattcttcatgcgacgcatgggcagtggtgccagcggaggtgcaggcggagtattcaatgtaggaaagtcgaaagcccagctttttgaaaaaggcggttccatcaaagtaactttcaaagatgtagccggactggcagaagccaaacaagaagtagaagaaattgtggaattcctgaaagaaccccagaaatatactgacctgggaggtaaaattcctaaaggcgctctattggtgggccctccgggaacaggtaaaacgttgcttgcgaaagctgtggccggtgaagccaatgtacctttcttctctttggccggttccgatttcgttgaaatgtttgtcggtgtaggtgcatcccgtgtacgcgacctcttcaaacaagctaaagagaaagctccttgtatcgttttcatcgacgagattgatgctgtaggacgtgctcgcggtaagaatcctgcaatgggcggaaatgatgaacgtgaaaatacgttgaaccagttgctgacggaaatggatggtttcggctcaaatagcggtgttattatcctggcagccaccaaccgtgtggatgtactagacaaggcattgctccgtgccggacgtttcgaccgacaaatccatgtagatttacctgatctgaacgaacgtaaagaagtatttggcgtacacttgcgccccatcaaaatagacgatacggtagatgtagacttactggcacgccagacacccggattttcgggtgcagacattgccaatgtatgtaatgaagctgctctgatcgccgcgcgtcacggaaagaaattcgtaggcaagcaagactttctggacgcagtagaccgtattatcggcggacttgaaaagaaaacaaagattactacggaagccgaacgtcggtctattgccctgcacgaggccggacacgccagcatttcctggttattggaatatgccaatccattgattaaggtaactatcgtcccccgcggacgggccttgggcgctgcctggtatctgccggaagaaagacagatcacgactaaagagcaaatgctcgacgagatgtgtgctactttgggcgggcgtgctgccgaagaccttttcatcggccgtgtatcaagcggagctgctaacgatcttgagcgcgtaaccaaacaggcgtatggcatgatcgcatatttgggtatgagtgaaaagctacccaatttatgctattataataatgatgagtattcattccagcgtccatatagtgaaaaaactgccgaactgattgacgaagaggtcaaaagaatggtaaacgaacagtatgaacgtgccaaacagattctctcggaacacaaagagcaacacaacgaattggcacagctactgatcgataaagaagtcatctttgctgaggatgtagaacgtatctttggaaaacgtccttgggcttctcgttcggaggaaatcatggcagccaataacaaacaagaaaacgccgttcatcctgcagatggagaagatgtagacacaactactccgcaagcaacagagtctcaagagggcaatacgcaacaagagtcagcggcatcacaaaac

SEQ ID NO: 12577 - DNA, 597 bp, Bacteroides fragilis
atggtattattttcagaagatcatatacaagagactagaagaagaggaagaatcgaagtaatttgcggctctatgttttccggaaaaacggaagagttgattcgccgcatgaagcgggctaagttcgctcgtcaacgtgtagagatattcaaacctgccattgacacccgctattcggaaggcgacgttgtttcacacgacagtaattccatttcctccacacccattgactcttctgcaagcattttgctctttacatccgaaatagatgtagtaggcatcgacgaggcacagttcttcgacagtggattgatagatgtatgcaatcaactggccaataatggagtgcgtgtcattatagccggattggacatggatttcaaaggagttccttttggcccgatgcccgctctatgcgccattgccgacgaagtttcgaaagtacatgccatctgcgtgaaatgcggacagttggcttctttttcacaccgtaccgtaaagaatgacaaacaagttttactgggggaaacagcccaatacgagccgctctgtcgggaatgttaccaacgcgctttacaagaagatcgagaaaaatca

SEQ ID NO: 12578 - DNA, 1458 bp, Bacteroides fragilis
atgaatcagaaattattactcggaagtgcactgctcgtgggaatggcttctacacagcaggcgttggcccggcagaagaaagcaaaggaacaaacccgtccgaatgtcgttttcatattggctgacgatttgggatacggagacttaagctgttatgggcaggaaaagtttgagactcctaatatcgaccggttggcacagaacggaatgcgttttacccaatgttattcgggaacaacggttagtgctccctcacgttcgtgtctgataaccggaacccatagcgggcatacggctatccgtggaaataaagagcttgctccggaaggacaattcccattgccggaaaactcacagactattttcaatgatttccgtaatgccggttatcgtacaggtgcctttggtaaatgggggcttggctatatcggttccgcgggggacccttacaaacagggaatcgatcagttttacggatataattgccagttgctggcacacagctattatcccgatcatttgtgggacaacgataaacgggtagatttgccggacaataatctcaatgtgcaatatgggaagggtacttattcgcaggacctgattcactctaaagcattggcttttctggatgaagccgctaaggagaaagatcaacctttctttatgtggtatcctaccattattccgcatgccgaactgatagtacctgaagatagtattattaagaagtttcgtgggaagtaccccgagaagccttatcgtggagtggagcctggaagtcctgctttccgtaaaggaggatattgtactcagttctatccgcacgctacatttgctgcaatggtctatcggttggatgtatatgtaggacagattgtgcagaagttgaaagatatgggagtatacgataataccattatcatcttttcgagtgataatggtcctcatatggagggtggtgccgatccggactttttcaacagtaatggcatatggcgcgggtataaacgtgacgtgtacgaaggtggtatccgtgtacccatgatcatatcgtggcccggacacgtacaacccagtacggaaaccgatttcatgtgttcattctgggacttaatgcctactttcagggaagtgttgaatccgaaagcggatacccggaatatggatggtgtcagtatacttcctctgttacaaaaccgtaaaggacagaaagaacatgaatatctttatttcgaatttcttgagatgaatgggcgtcaggcagtccgcaaaggtgactggaagcttgttcacatgaatatacggggaaataagccctattacgaattatacaacctggcttctgatccgtcggagaagtacaatgtgctgaatcaatatcccgagaaagcggatgaattgaaagcgattatgaaagaagcccatatagaagattccaattggcctttatttaga

SEQ ID NO: 12579 - DNA, 555 bp, Bacteroides fragilis
atgagtaatactgcaagccttaagaaagaatatgcagagcgcattgctcctgcattgaagtcacaattccagtattcttctacaatgcagatacccgtacttaagaagattgttatcaatcagggtttaggtatggctgttgctgataagaagattatcgaagtggcaatcaacgaaatgacagctatcactggtcagaaggccgtagctactatttcgcgtaaagatatcgctaactttaagttgcgtaagaaaatgccgatcggagttatggtaactctgcgtcgtgaaagaatgtacgaattcctggaaaaattggttcgtgtggctttgccgcgtatccgtgacttcaaaggtattgaaactaagttcgatggtaagggtaactatacccttggtattcaggaacaaatcattttccctgaaattaatatcgatagtattaccagaattctcggaatgaatattacctttgtaacctctgcgcaaacagatgaagaaggttatgccttattgaaagaattcggtttaccgtttaaaaacgctaaaaaagac

SEQ ID NO: 12580 - DNA, 393 bp, Bacteroides fragilis
atgactgatccaatagcagattatttgacgaggttaaggaacgcaattaatgcaaagcacagagttgtagaagttcctgcttcaaatttgaaaaaagaaatcactaagattctttttgaaaaaggctacatccttaattataagtttgtagaagatggtcctcaaggaactattaaagttgccttgaagtatgattctgttaacaaagttaacgcaatcaaaaaacttgaaagaatatcttctccgggtatgcgtcagtacactggttacaaagatatgccgcgtgttattaatggtttgggtattgctataatatctacttccaaaggtgtaatgacaaacaaagaagctgctgaactgaaaatcggtggtgaagtattgtgttatgtatat

SEQ ID NO: 12581 - DNA, 567 bp, Bacteroides fragilis
atgtcaagaataggaaaattacccattagtattcccgctggagtaacagttactctgaaagatgatgtggttaccgtaaaaggacccaaaggtgaacttagccagtatgtgaacccggctatcaatgttgctattgaagatggacacatcactttaactgaaaacgaaaatgcaatgctggataatcccaagcagaaacatgcatttcacggtttgtatcgttcgttagtacacaacatggttgttggtgtttctgaaggatataagaaagaattggagcttgttggtgttggttaccgtgcttctaatcaaggaaatatcattgaattagcattaggatatacacacaatatctttatacagttgcctcctgaagtcaaagtagagacaaaatcagaaagaaataagaatcctcttattcttttagagtcttgtgacaaacaattgcttggtcaagtttgctctaagatacgttctttccgtaagcccgaaccgtataaaggtaaaggtattaagtttgttggcgaggaaattcgcagaaagtctggtaaatcagccggtgctaag

SEQ ID NO: 12582 - DNA, 516 bp, Bacteroides fragilis
atggcaggagttaataatagagttaagattactaacgatatagaactgaaagacagattagttgctattaatcgtgttactaaagtaaccaaaggtggtagaacttttagtttctctgcaattgtagttgtaggtaacgaagaaggtattatcggttggggacttggtaaagctggtgaagtaacagcagctatcgctaaaggtgttgaatcggctaagaaaaatctgacaagagtgcctgtactgaaaggtactgttcctcacgaacagtcagctaagtttggtggtgctgaggtattcatcaaacctgcttctcacggtactggtgttgtagccggtggtgctatgcgtgccgtattggaaagtgttggtgtaactgacgttttggctaaatcaaaaggatcttcaaatccgcataaccttgtaaaagcaactatcatggctttaggcgagatgcgtgatgcaagaatgattgctcagaacagaggaattagtgttgaaaaagtatttagagga

SEQ ID NO: 12583 - DNA, 859 bp, Bacteroides fragilis
cgcaaacaaaagggaagagatgagaagagaaatgaatttattgagacgcgtacgcaacaaacgtcccagaacatatccgcgcatcatagtttcttcgacaatggcaaccatggcgaaaaacaacccgcttaagagcaaaccgctccaatgcaaatggacaccgaggtgagcgaagacgaacgtgcccgtaatgcagtgcgtaatctctttgcccgccaggctgtcatcagcgcggatgcctaccgccgtctgctgaaaccttccatcgaaaccgaatttgcctccctcagtaaaagcacaggccgatgacgaagcgatccgggtctttgccgaaaacctgcgccaactgcttcttgccccacccttgggacaaaaacgggtaatgggtatcgatcccggctttcgcaccggttgtaaggtggtctgcctcgatgcacaaggcaatctcgtacacaatgaaaacatctatcctcacccgccggtagacaaaaaaactgaagcggcttcgaaactccgcaaaatgattgaagcttacaagatagaggccatcgccatcggtaacggaactgccagccgcgaaacggaaaacttcgtcacgcaccaacagttcgaccgtcccgtgcaggtctttgttgtcagcgaacagggtgcttccatctactcggcctccaaaacggcccgtgacgagtttcccgattatgatgtcaccgtccgtggggccgtctccatcgctcgccgactgatggatccgctggcggaactggtcaagatcgatcctaagcccatcggtgtcggccaataccagcatgatgtagaccagaccaaattgaaaaaatcactcgaccagacagtggagaac

SEQ ID NO: 12584 - DNA, 2046 bp, Bacteroides fragilis
atgaaaaataagatgtcagcttctatgtttcaaaaggagcaagtaatagaaagtatcaggcagtcgtttgtgaagttgaatccgcgaatgatgataaaaaaaacgattatgtttacggtagaagtggttaccgttattatgctggtggtaacgttactctctctcttcactccggaatatggtactttcggatataatttgtgtgtgttcttaattttgtttgtgaccttgttgtttgccaattttgctgaagcaatagccgaagctcgtggtaaagcacaagccgacagcttacgcaaaacgcgtgaagagactcctgctaaactggtaataggagacaaggttcagaccgtaagtagttctaaactgaagaagggggatgtttttgtttgtgaagccggtgatacgatccctgccgatggagagattattgaaggattggcttccattgacgaaagtgccattaccggtgaatctgctccggtgatccgtgaggcgggtggagataaaagctctgtgaccggtggtaccaaagtgctttcagatcatatcaaggtattggttacacagcaaccgggcgaaagctttcttgacaaaatgattgcgttggtcgaaggcgcaagcaggcagaagacgccgaacgagatagccctgaccattttgttggcaggctttacactggtctttgtcatcgtatgtgttactctgatcccgtttgctgactataccagtcttgaacatccgggaacagctatctcgattgcagccatcctctctctgtttgtctgtttgattccgactactatcggaggattactttctgccatcggtattgccggtatggatcgtgcattgcgtgccaatgtgattacaaagtcgggtaaagcggtggagacggcaggagatatcgatacactgttgcttgataaaaccggtactattacgattggtaaccgcagggcaacgaaattccattcggcacctggagtcggtccgcgggagtttgtaacaacctgtctgttggcttcgctttcggacgagacgcccgagggtaaatctattgtagagttaggacgtgaatcgggggtacggatgcggagtcttcagacggccggtgcccggatgattcagtttacggctgaaaccaaatgttcgggtgttgatctggccgatggcacacagatacgtaaaggagcgttcgatgcgatccgtaagattacggaagcagccgggaataaattcccgaaagaaatagaagaagtgatcggtgagatctctggtaatggaggtacaccgctggtagtgtgtgtcgaccggaaggtgaccggagttatcgagttgcaggatattataaaaccgggcattcaggaacgttttgaacgtctgcgcaagatgggagtgaagacagtgatggtaaccggtgacaatcctttgaccgccaagtacattgccgaaaaggcgggagtggacgactttatagctgaggcaaagcctgaagacaagatggaatacatccgtaaagaacaacagtccggtaagttggtggcgatgatgggagacggaacgaatgatgctcctgcattggcgcaggcaaatgtcggtgtggcaatgaatagcggtacgcaggcagccaaggaggccggcaatatggtcgacctcgataacgacccgactaaattgatagagattgtggaaatcggaaagcagttgctgatgactcgtggaaccctgactactttctctattgccaacgatgtggcaaaatactttgccattgtacctgctttgtttatggtggccattccagagttgggtgcgctcaatattatgaatctgcatagtccggaaagtgctatactctctgctgtcatattcaatgccatcattatcccgatcctgataccattggcgctgaaaggagtacaatataaaccgatcggtgcatcggctttgctccgtcggaaccttttaatctatgggttaggaggagtgatcgttccctttgtcggaatcaagttaatcgatttggttgtcagtttattcttt

SEQ ID NO: 12585 - DNA, 726 bp, Bacteroides fragilis
atgaaaatagcattaataggttacggaaaaatgggcaaagaaatcgaaaaggttgccctcagtcgcggacacgaaattgtcagcattatcgacatcaacaaccaggatgatttcgaatccgaagcgttcaaatcggcagatgtggccattgaattcactaatcccatggtagcctacagcaattatatgaaagctttcaaagcaggtgtaaagttggtttcgggcagtaccggatggatggcagagcacggtgacgaagtaaaagaactgtgtaacaaaggtggaaagaccttattctggtcatctaatttcagtttgggagtaactatcttctcggctgtcaacaagtatctggctaagataatgaaccaattccccgcctatgacgtaaccatgagcgaaacccaccacgtacacaagctcgatgcaccaagcggaacagcgatcacactggcagaaggaatccttgaaaatatggaacgcaaaagcgtctgggtaaaagaggaagcacatgcaaccaatgaattgccgatccactctattcgcgaaggagaagtattcggtatccataccatccgctatgactccgaagcagacagtatctccatcacccacgatgccaaaaaccggggaggtttcgcattgggagccgtattggcggctgagtatacagcagcccatgaaggctatctgggtatgagtgatttattcccattcttaaaagat

SEQ ID NO: 12586 - DNA, 1047 bp, Bacteroides fragilis
atggaaacaaaaaaattaaagaaaaatgccctcttcaatcccgaaggtgatacagaaacccgtctcagaaagatgatcggaggcaatacaaccaatctgaatgatttcaataacatgcgatacaaatgggtaagcgactggtatcgtcaggccatgaataacttctggatacctgaagaaatcaatctgacacaagataccaaggactatccccatctgaccccggccgaacgaacagcgtatgataaaattctgagcttcctcgtcttcctggattctttgcagagtaacaatctcccgacactcagcgaatacatcacggcaaacgaagtcaacctctgcctgcatattcaagcatttcaagagtgtgtacacagccagagctacagctatatgctcgactctatctgtagtccggaggaacgcaatgacattttgtatcaatggaaaacagacgaacatctgctaaggagaaatacgtttatcggcaattgctacaatgaattccaggaaaatcgtgacggatttgccttgatgaagaccctaattgccaattacatccttgaaggtatttacttctatagtggttttatgtttttctacaatctgagccgtaacggaaagatgtccggatcggctcaggaaatccgttacatcaaccgggatgaaaacacccatctctggctatttcgcaacatcattctggagttgaagaaggaagaaccagaactgtttacgcctgacaaggtgaaagtgtatgaagagatgatgcgtgaaggagtgaaacaggaaatcgcatggggacaatatgtaataggcgaccaaatccagggcctcaaccgacagatgatctctgactatatccactttctgggtaatctccgttggagtagcctgggttacactcctctgtacgaagacaaccggaaggaaccggaaagcatgcattgggtatcgcaatattcaaatgccaacatggtaaaaacggacttcttcgaagcgaaaagtacggcgtatgccaaaagtactgcgctggaagatgattta

SEQ ID NO: 12587 - DNA, 1147 bp, Bacteroides fragilis
ataattatggccaagaaagaagaaacaatcagcttgattgatacattttcggaatttaaggaactgaagaatatcgatagaaccacgatggtaagcgtgctcgaagagtcgttccgcagtgtgatcgcgaaaatgtttggcactgatgaaaattacgacgtaattgtgaatccggataagggtgactttgaaatatggcgtaaccgtgaggtagtggcagacgaggatttgactaacccgaatatgcaaatttcgttgactgaagcacaaaaaatcgatgcttcttacgaagtgggtgaagaagtaaccgatgaagtgattttcgctaagttcggtcgccgtgctattttgaatcttcgtcagacactggcttctaaaattcttgagcttgaaaaggacagtatttataataaatacattgataaagtaggtactatcatcaacgcagaagtataccagatctggaaaaaagagatgttgttgcttgacgatgaaggaaacgagttattgttgccgaaaacagagcagataccaagcgatttttatcgtaaaggagaaactgcccgtgcagtggtggcacgcgtggacaacaaaaacaacaatccgaaaattatcctctcgcgtacttctccggttttcctgcagcgcttgttcgagatggaagtgcctgaaataaacgatggcctgattaccatcaaaaagattgcccgtattcccggtgaacgtgccaagattgcggtagaatcttatgatgacagaattgaccctgtaggagcctgcgtaggtgtaaagggaagtcgtattcatggcatcgtacgtgaacttcgcaatgaaaacattgatgtgattaattatacatctaatatttcattgtttatccagcgtgctttaagcccggctaagatttcttctattcgtctgaatgaagaagaacgtaaagcagaagtattcttgaaaccggaagaagtatcgttggctattggtaaaggcggtttgaatattaaactggccagtatgttgactgagtacaccattgatgtgttccgtgagttagatgaaaacgcgcaggatgaagatatttatttggacgagttcagagatgaaatcgacggatgggtgatcgatgctatcaaggctattggcattg

SEQ ID NO: 12588 - DNA, 331 bp, Bacteroides fragilis
atgaaacgaccgacaatacctcttatgctgcttatagccgcatctatttttgtcttttttctgctgaatctgcttctgggctcggtttccattcccatcggttcggtatggaacatactttggggcggaacggatgaatccgttatctggcaaaatatcatctggaagtcacgggtaccgcaggctttgactgctttggtggcgggtgccggactttctatcagtggcttgcagatgcagaccgtatttcgtaatccgctggcaggaccttctgtacttggtatcagttccggtgccagcctgggagtggctttcgtggtattgttgtccg

SEQ ID NO: 12589 - DNA, 3225 bp, Bacteroides fragilis
atgccatacttcagtgaatcacaattagagcaggcatttgtcgagcttttcaagaaagaaggttacgactatgtgtatggagaaagcatttctcgtgatacacgggatgttattctctacgatgatttgcgcctttatctgcggaaaaaatatgaagccgaccatatcaccgaggatgaaatcagtcgggcaattgccagattggaaacttcggacggcggtggcgtgtatgcagagaatgtggaagcgttgcgacttctgcaagagggcttttcgttgaagcgaaccaatcctaagttaccacatcttcatatttatcccattgactataccgaatttgggaaaaacaatctcttcaagttcgtcaatcagtttgccattgacggtgagcaccatcgtattcctgacggtattgtatttgttaatggtctgcctttggtggtacttgaatttaaaaatgccatcaagcaaaataccacaatagaaaacgctttcaagcaactgacggtgcgttataggcgtgacatacctaaattgttccgctataatgcgtttgtagtaatcagcgatggcgtgaacaataaaatcggttcactttttgcaccatatgagttcttttacggatggcataaggtggaagctacggattctattcttgatggtgcttttgatactatgttcacgatgatgcgcggattgttcagaaaggaacgcctgcttgatgtattgcataactttatctatttgccagatactcccaaggacgaggataaaatcgtgtgccgctatccgcagtattttgctaccactcaactgttcaataacattctgaaacattcacgattgaatcttgatggtgatggaaaagggggcacatatttcggagctacagggtgcggtaagtcgtacaccatgttatttcttgcccgacaactgatgcgttccaaaaaattgagcagtcctaccattgttctgataacagaccgtacagaccttgatgatcagttgtctaagtcgtttttaaatgctaccaaattcattggagacaagacaatcgttcaagtagaaagtcgggagaaacttaaagaacaccttgaaaagcgtactgccggaggcgtttatctgacaacgattcagaaattcgaggaaagcacaggcttattgagcaatcgtgcaaacattatctgtatatccgatgaggctcatcgttcacaagccggtttagggcagaaaacaactatcacggaaaagggtgtaaagcatcattatggttttgccaagtatctgcgcgattctcttccgaatgctacatacgtaggatttacgggaacaccgcttgataatacgctggatgtgtttggcccgattgtagaccgttacaccatgaccgaagcggttgcggatgagatcactcgtaagatagtctatgaaggtcgtgctgctaaaatcatgattgactcggctaaggtgaaggaaatagagcttttctatgaccaatgtaagcaagaaggatcaggtgactatcagatagaggagagcaagaaaatgatgacgcgaattgatgttatcctgaatgaccctgatttactagccaaaatagcccgggatatggtggaacactacgaaaaacggattgaggaaggttcaacggtgttgggtaaagctatgattgtgtgtagcagtcgttccattgcttggaacctctatcaggcgattatccatttacgaccggaatgggcggaaatcaaagaatgtattgaaggggaaactctttcggagaaggaacgcaaagaaatcaagccgatgccgcgtattgctatggtcatcactcgcgacacggataatgattctgacgaactttataatctgctcggcaatgatgaataccggaaaacgttggacaaacagttcaaagaagagaaaagcaattttaagattgcgattgttgtggatatgtggataactggctttgacgtaccgagccttgatacgatgtactgcttcaaacctttacaaatgcacacgttgattcagaccatatctcgtgttaatcgtgtttatcccggaaaagagaaagggcttgtggttgattatctcggcataaagcggcagatgaatgaggcgcttcatcaatatggcggaaatggagaagtcgatggtccggacctcgaaactgttgaagaagcggtaaaagtggttaaggacgaattggatgtgattaagcggatgtttcatgcttttgactggtctggctatttcattggaacgcctcttgaacagttaggcattcttcaaacgggagcagaatacattcaacataccaaaaaacttgaaactcgttttatgcgacactgtaaaaagatgaaaggtgcgtatgatatatgctgcaactcagaacatctgacagaggcggaagacaacgatattcattttatgttggccatccgttccataatctctaaactgacgagagggaatgcgccggatgctgtaaagatgaataagcgtgtgagcgaaatgctgaaagatgccttgatgtctgaagcagtggaagaggtgactaaaatcggtgttgctgccgatgaagaaatagaccttctttcatcggaatacatgcaacgtcttgaccaaattccctacaagaacaccaaagtcaagttgatggagcaacttttgaaacaggttatagaatcgttacggaaaatcaacaggcaaaaaggcatagacttcacgaaacgcttggaggatattgtcaaaaaatacaatgaccgttcagacgatgcagcacttgccaacgatgtgattgatgatgtcgttggcgagatggtaaggcttatggaggatgtagcaagcgaacgcactgccggcaattctataggattgtcatttgaagaaaaggctttctttgatattctgaaatcagtggcgacaaaatatgagttcattgaaaactttccagatgagacattgacagagttggctaagcaaattaaaacgatggtagaggaacagtcggatgtgtcagattggttaaaccgtcctgaccttcgggcgacattgaagatgaatgtaattgtcctgttggctcgtgcaggatatccacctaaaattcgtgatgaggtattcaaggagattttggaacaggctgaaagtttcaaacggcacagccggcctcgcccttatgctattgacaatgattcttattcatcaatggtagcagaaccg

SEQ ID NO: 12590 - DNA, 3090 bp, Bacteroides fragilis
atgattctttttttcagaaccccttccaagagcgtgattgccgtagagagcaaccacgaacttaacgcgaacgacaacaacaaactctgctggctttttggtgaagccatgccggaaagtgaagaaaacctgcaaggctgcttcgtcgggccacgacgtgagatgattactccatggagtaccaacgcagtagaaataacccagaacatgggactcgacggcattagccgcatcgaggaatatttccccgtaaaagatgaaaatgcagaccatgatcccatgctgcaacgcatgtacaaaggtcttaaccaaaatgtattcactaccaaccgccagccggaagctattatttatatcgacgatctggaagcctacaatgaaaaagaaggccttgccctgtcaaaagaagaaatggactacctgaaaaaggtagaatctgatttaggacgtcgcctgactgattctgaagtattcggattcgcacaaatcaactcggagcattgccgtcacaaaatctttggcggaacgtttatcatcgatggcgtagaacaggagtcttctctctttcagatgatcaaaaagacgactcaggagaaccccaataagattatctcggcctataaagataatgtggcttttgccgaaggtccggtagtcgaacaattcgctccggcagatcactctaagcccgatttcttccggataaaggacatcaagagtgttatttcactaaaagcggaaactcacaacttccctactaccgtagaacctttcaacggcgcatctaccggtaccggtggtgaaatccgcgaccgtatgggaggaggtaaaggttcatggcccattgccggaactgctgtttacatgacttcttacccgcgcaccgaagaaggacgcgaatgggaagacatcttgccggtacgcaaatggttgtatcagactccggaacagatcctgatcaaggcatccaacggagcaagtgacttcggcaacaagtttggccaaccgctgatctgtggttcggtactaacttttgaacatacagaaaacaacgaaacttatgcctacgacaaagtgatcatgcttgccggtggtgtaggttacggcacacaacgcgactgtttaaaaggacagccggaagccggcaacaaagtagtggtcatcggtggcgacaattaccgcatcggattgggcggtggttctgtttcatcggttgatacaggtcgctacagcagcggaatcgagctgaatgccgtacaacgtgccaatgcagaaatgcagaaacgtgccaacaacgtggttcgtgctctttgcgaagaggatgaaaatccggtggtatcgattcatgaccacggttcggccggacacgtcaactgtctgtctgagttggtagaagaatgtggcggcctgatcgatatgagcaaattgcctatcggcgacaaaacgctgtcggctaaagaaattatagcaaacgaaagtcaggagcgcatgggactccttattaaagaggaagccattgaacacgtacgccaaattgccgaacgtgaacgcgctccgatgtatgtagtaggcgaaacaaccggcgaccatcgttttgcgttccagcaagcggacggtgtgcgtccgttcgatttggctgtggaccagatgttcggttcttctcccaagacctacatgatagacaaaaccgtagaacgtcactatacaatgccggaatatgaaacatctaaacttcacgaatacctgactcaggtgttgcaattggaagcagtagcttgtaaagactggctgaccaataaagtagaccgttccgttaccggtaaagtagcccgtcagcaatgtcagggcgagattcaattgccattgagcgattgtggagtagtagcattggattatcgtggcgaaaaaggtatcgctacttctatcggacatgcccctcaggctgcattggccgatccggcggcaggttctattctttctgtatccgaagcactgaccaacttggtatgggctccgctggccgaaggtctggacagtgtatcactctccgccaactggatgtggccatgccgctcacaggaaggagaagacgcacgcctctacacagctgtaaaagccttaagtgacttctgctgtgcacttcagatcaatgtacctaccggaaaggactctttgtccatgacccagaaatatccgaacggagaaaaagttatttctcccggaacagttatcgtatcagcaggcggtgaagtctcggacgtaaagaaagtggtctctccggtactcgtcaacgatgcaaaaaccacactttaccatatcgacttcagtttcgacaacctcaaactgggtggttcggctttcgcacagtcattaggtaaagtcggtagcgaagtaccttgtgtacaggatgccgaatacttccgtgatgcttttctggcagtacaagagttggtaaataaaggactgatccttgccggacacgacatctcagctggtggtctgatcacgactctgctcgaaatgtgctttgccaacgtagaaggcggtctggaaatcagccttgataaaatgaaagagacagatatcgtgaagattctgttcgccgaaaatccgggtatcgttattcagatcagcgacaagcataaggacgaagtgaagaaaatccttgaagatgcaggtgtcggtttcattaaattgggtaaaccgacagacgaacgccatatcttggtaaacaaagagggtgctacttatcagttcggcattgactatatgcgtgatgtatggtattcttcttcttacctgctcgaccgcaaacagtcaatgaacggatgtgctaagaagcgttttgagaactacaagatgcaaccgctcgaatttgcgttcatgccgggattcaaaggaaaactttcacagtatggcatcactcccgaacgtcgcacaccgagcggtatacgtgccgccatcatccgcgagaaaggaaccaacggtgagcgcgaaatggcttactcactctatttggtaggtttcgatgtaaaagacgtgaccatgaccgaccttatcagcggacgtgagacacttgggggatccatc

SEQ ID NO: 12591 - DNA, 255 bp, Bacteroides fragilis
atgcgtaaagtagctcgtgtgcgtttgactaaccagaaagaggtgaactcttacattccgggagaaggacacaacttgcaggagcactcaatcgtactggttcgcggtggtcgtgtgaaagaccttccgggggtacgttaccacatcgttcgcggtactcttgatacagcaggtgtagccggacgtactcagagacgttctaaatacggagctaagcgtccgaaaccgggacaagcagcaccggctaagaagaaa

SEQ ID NO: 12592 - DNA, 1296 bp, Bacteroides fragilis
atgatttggaatgagagcatcgaatgcatggaacgcgacaatttgcataaaatccagagcattagactgaagaaaatagtagaatacgtttatcataatacgccgttctatcgtaaaaaaatgcaagagttgggcatcacacccgatgatattaacgggatagaagatatatccaaattaccatttaccactaaattagatttacgcgacaattatccgtttggcttatgcgctgtacccatgagccagatcgttcgtatccatgcgtcctccggtactaccgggaaaccgactgtagtgggatatacccgtaaggacttatcgacttgggcagaatgtctgtcgcgtgccttcacagcttatggtgccggccgttctgatatatttcaggtatcttacggttacggtttgtttacgggcggactgggtgcacatgctggtgccgagaatatcggagcgtcggttatccccatgtcaagtggtaatacggaaaagcagattacattgatgcatgattttggctcgactgtgttatgttgtacaccgtcttatgctctttatctggctgatgcgattaatgactcaggttttccacgcgaagaatttaaactgaaggcgggtgctttcggtgcggaaccttggacggaaagtatgcgtaaagacatcgaaaccaaattgggcattaaggcttatgatatatatggattgagtgaaattgcaggtcccggtgttggatatgaatgtgaatgccagaatggtacgcacttgaatgaagatcacttcttccctgaaataatagacccgcatacattgcagcctgtagaacccggacagaccggggaacttgtttttacccatctaacgaaagaaggtatgcctttattgcgctacaggacaaaagatctgacggctttgcattatgaaaaatgttcttgcggacgtactttggtgcgtatggaccgcatcttgggacgtagtgacgatatgcttattatccgtggagtcaatgtattcccgacacagatagaatctgttattctggaaatggcggaattcgagccacattatctgttgaccattgaccgcaagaacaatacggatactatggaactgaaggttgaggttcgtcctgactattattcggatgaaattaacaagatgctggctttaaagaagaaattgacaggtcgcttacaaagtgtattaggtctgggagtagacgtgaagctggtagagccgcgcagcattgaacgcagtgtgggcaaagcgaagcgtgtgattgataatagaaaacta

SEQ ID NO: 12593 - DNA, 1797 bp, Bacteroides fragilis
ttggatatgaagatagaagataaacttgtgacgtccgtaatcagcggactcaaagcactttacggacaggatgtacctgccgcgcaggtgcagctgcaaaagacgaaaaaagagtttgaaggacacctcacccttgtggtattccccttcctgaaaatgtcgaagaagggcccggagcaaaccgcacaggaaatcggtgagtatctgaaagccaatgaaccggctgtggcagcttttaatgtgatcaaaggtttcctgaatctgaccgttgcgtcggctacgtggatcgaactgcttaatgaaattcatgccgatgcgcaatatggcattgtatcggcagatgaaaatgccccgctggtgatgattgagtactcttctcccaacaccaataaaccccttcacctgggccacgttcgtaataacctgttgggtaatgcgttggccaatatcgtcatggcgaacggcaataaggtggttaaaaccaatattgtcaacgatcgcggtatccatatctgtaagtcgatgctggcatggcaaaagtatggcaagggtgaaactcccgaatcatcaggcaaaaaaggcgatcatctggtaggtgattattatgtcgctttcgataagcattacaaagctgaagtagcagagctgatggagaaaggcatgtcgaaggaagaggcggaagctgcctccccgttgatgaatgaagcgcgtgagatgttggtgaaatgggaagccggtgatccggaagtgcgtgcgctttggcagatgatgaataactgggtatacgccggttttgatgaaacgtaccgtaagatgggagtcggtttcgataaaatctattatgaatccaatacatacctggaaggtaaagagaaagtgatggaaggccttgagaaaggtttcttcttcaagaaggaagacggttctgtctgggctgacctgacagccgaaggattggatcacaaactgttgcttcgcggcgatggaacttcggtatacatgactcaggacatcggtacggctaagctgcgttttgccgattatcccatcgacaaaatgatctacgtggtaggtaacgagcaaaactatcacttccaggtattgtctatcttgctggataaactcggatttgagtggggcaagagcctggtgcatttctcttatggtatggtcgaactgcctgaaggcaagatgaagtcacgtgaaggtacggtggtggatgctgatgacctgatggccgaaatgattgcgacagccaaagaaacctctcaggaattgggcaaactggacggcttgacacaagaagaggcggacgatattgcacgtatcgttggattgggtgcactgaaatactttatcctgaaagtggatgcccgtaaaaatatgactttcaatccgaaagagtctatcgactttaacggtaatacaggaccttttatccagtatacgtatgcacgtatccggtctgtgttgcgcaaagccgccgaagcgggtatcgtgattccggaagtacttccggccaatatcgaactcagcgagaaggaagagggattgattcagatggttgccgattttgctgcggtagtgcgccaggcaggtgaagactatagcccgtcgggtatcgccaactacgtttacgacctggtgaaagagtacaatcagttctatcatgacttcagtatcttgcgtgaagaaaatgaagacgtgaagttattccgtattgctctgtctgccaatattgccaaggttgtccgtttaggtatgggattgctgggcattgaggtgccggatagaatg

SEQ ID NO: 12594 - DNA, 942 bp, Bacteroides fragilis
atgaacagaatttcttctcttttcggtattcagtatcccattattcagggaggtatggtgtggtgtagcggctggaagcttgcttcggctgtcagtaatgccggtggtctgggactgataggctccggttcgatgtatcccgacgttttgcgtgaacatattcgtaaatgccgggcggctaccgacaaacctttcggggtaaatattccgttgatgtacccacagatagaggaaatcatgaacatcgtggtggaggaaggcgtcaaaatcgtatttacctccgccggaaatccgaaaacgtggaccggatggttgaaagagcgcggcatcacagtggcacatgtcgtttcttcctccaaatttgccatgaaatgtgaagaggcgggagtcgatgccatagtggctgaaggatttgaagccggcggacataacgggcgggaagagactacaactctttgcctgattccggcagtgcgtgaagccaccactttacctttgattgcagccggaggcattggtacgggagaggcgatttttgccctgatggcgttgggagccgaaggagttcagatgggcacccgttttgctttgacggatgaaagttcggcaagcgacatttttaaagagtattgcttgcggctgaacgaaggcgataccaaattattgctcaaaaaactcgcaccgacccggcttgtgaccaattcgtttcgtgatagggtagaggccgctgaaggacggggggcttctgccgaggaacttcgtgaactgttgggtagaggtcgtgccaagaaaggaatctttgaaggagacctggaggaaggagaactcgagataggacaggttgctgccctgttccgccgtagacaaagtgtggacgaagtgatgaaagaacttttagaaggataccggagggcttcggacaagatacgttctgccgggtta

SEQ ID NO: 12595 - DNA, 663 bp, Bacteroides fragilis
atgaagccaacaatcaaaaaagtgcaacccgtcaaagtcgtagctccgttccttaacagtcagtccgaaagtccggtcccactggatgcacttaccgaccaagagaaagtttccgatttgtacttccttaagggaaccgtacatcaaatagctaaaccttatctaagtattaataattgcactttcaaacaacaaatattcagcgaatgtcagtttaaatcagctcaactgacagacgtacgttttgaaaattgcgatttatccaacgtttcgtttgccggaactactttctaccgggtagaatttatatcttgcaaattgctgggaaccggtttcccggaagccaccctcaatcatgttttaatggatcattgctacggacaatacatcaatctctccatggtaaaaatgcgaacagtccgtttcagccattgcaatttccgaaacggcagcctgaatgacagcaaactgatgccggcagcttttgatacttgcgaattgttagaagccgacttttcgcacacttcactcaaaggtatcgacctgagaaactctagaatagcaggtattcaactcaatatagccgatctgaaaggagccatagtcagttcgttacaagcaatagatctgttacctctactagaggtcaaaatagaagacgat

SEQ ID NO: 12596 - DNA, 267 bp, Bacteroides fragilis
atggcacataagaaaggtgtcggtagttctaagaacggccgcgaatcacagagcaaaagattaggcgttaagatatttggtggcgaagcttgcaaagcaggtaacatcatcgttcgtcaaagaggtactgaattccacccgggtgaaaacatcggtatgggtaaggaccacactcttttcgctttagtagatggaactgtaaacttcaaagtaggtagagaagacagaagatatgtttctatcatccctgctgaagcaacagaagca

SEQ ID NO: 12597 - DNA, 363 bp, Bacteroides fragilis
gtgattaaagaccacccgacggagctaacttacatttatttatataagatgtacgcaattgtagaaatcaacggtcagcaatttaaagctgaagctggccagaaattgttcgttcaccacattcagaatgcagagaacggtgcaacagtagaatttgacaaagttcttttggtagacaaagacggaaacgttactgtaggtgctcctactgtagacggtgcaaaagtagtttgccagattgtttcaagcctggttaaaggtgacaaagttcttgttttccacaagaaaagaagaaaaggtcacagaaagttgaacggtcaccgtcagcagttcacagagttaacaatcacagaagtagtagct

SEQ ID NO: 12598 - DNA, 3330 bp, Bacteroides fragilis
atggcaattgtgtctcagacttgtccggcacaagtggcagtagagataaaaggtacagtacgctctgtaaccggagaaagtttgccgggagctacggtgatagtggaaggaactgcacgaggagttattacagatgtagaagggaggtttactctcaaggcccgaaaaggacagatgctgaaggtgagtttcgtaggaatgaaacctcgtctgattaaagcctcatccggcattatgaacatcatacttcaggataatgtgcaggagatagagggagtggtagtcaccggctatcaacaaattaaaaacagggtctttacgggagcggcagcttcggtaaagctggatgaaatcaagttgaacggtgtgtcggatgtgtcgcgcatgctcgaagggcgtattgcaggtctctccatacagaatgtgacaggtagctttggtgccgcgccccgaattaatatccggggtggtgcttccattatgggaaatgtacaaccgttgtgggtcatagacggggcagtatacgaggatcttgtttcacttacacttgatcaattggcttccggtgatgcggtaacccttatcagttcggctgttgccggactgaatgcatctgatatagaagatattcaggtattgaaagacgcctcggcaacttccatctatggtgcccgggcattgaacggagtgatcgtaattaccacccggtccggtaaaagaaatgcaccgaacagattttcttattcttatgagttaagtatgcgatctattccttcttatacaaatttcgatttgcttaattctcaagagagtatgtctgtttatcaagagatgggcagaaagggatatttctctttgcaaaatacgctatatggtcgtcgcagcggagtatattatcagatgtataaggcacttaataccattgatccggctaccggtcaatattatctggagaatacggatgatgtcaaaagggcattcatgcgtgaaagagagtatgctaacaccaattggtttaaagaactgtttacacataggcctatccatacacatactgtgaccttttcagggggaggggagaactctgcaatgtatgcttccatcggtttttatgatgacagaggatggactctggccgaccatgttaaaagaattacggccaacatcaagaactctttttactggaacgaagataagataaaggctactatatccgcacaaggaaatctacgtaaccagaactcgccgggaacaattcctcaacgtagaaatactgttatcggaacattcgaacgtgatttcgatatcaatccttttagttacgctttaagcacaagccgcactttacggccccataatgcggatggagaacgagagttctatcggaataactgggctccgtttaacattctgaatgaatatgaaaacaattacctgaaaacagaagtgctggatctgaaattacagggtgaactttcatacaggctcaatgatcatattgaagtaaaaggcttggcaatggtacgtcacgccgtaaccaagagttcacattttattgctgaagcatccaatgtggtacaggcttttcgtgccaatgagactccttacgtagccagagaaaacatttatctattgaagaataaagacgatccgatgcaactgcccggggtagcattgacacatggggggatattcaataaaacggaaacttccttgcgaagctatctgggacgtttggctttggattataacaggcaactgagtgaacataacatacgcgctttcggatttaccgaaatacgatatgccgatcgcagcatgaatccttttcaaggctatggaatacaatacgacagaggtaatcaggtcttttccaatcccctgatttttgaaaagctggccaatgaaggagatacttatttttctttaaccgaacgttatgaaaggggagtgacattatcgggcagcgctacatacggatatgccgggaaatacattttcaatggagtattcaattacgaaggggctaatactgcaggtaaatatagctgttcccgctggctgccaacctggaatataggagccaaatggaatctggatcaggagaagtttatgagaaaacacactaccatttcaaggctcgccctgcgtacgagttacgggttaaccgctaaaatgaatgaacaagctgttaactctaccacagttttcaagcatgtgatggtcaaccgtactcttttgaaagatagggagaatgcattgcgtattttacatttggaaaatcgcgatctgacatgggaaaaaatgtatgagctgaacttcggtcttgagctcggactgtttggcaatcgtatcagtgcgacattcgatgtgtaccaacgaaactcgtttgatctgatagaccttattcgtacctctggtgtgggaggtcagtattacaaatacgctaatttcggagatatgcgtacgcgtggagtggaactggccatacagacacaaaatatattgactgacaaattcagttggtctaccacagtcactatcagcggtatgaagcagaaaataacccggttactgaatacccctaacacttttgatatggtggccggaaccgggcgtggtaacatcgtgggttttccacgcggatctctgttctccttcaattttcagggacttaacagcaatggtctgccgaccttcgatttcggactgtacccctccaacaaaggagcaaatagcgagatttcgggagctgactttttggatgcacaatattcaaaatcataccttatttaccatggccctattgaaccccaatatataggaggtatatccaatacttttaagtataaaaattgggaattctcgtgttttgttaccatgcaggcaggtaataaaattcggatgaatccttcttttgatccggcatttgccgatcttaatgtattttccaaggagtactacaaccgttggttgaatcccggtgacgagcggaaaaccaatattcccgtaattccttctcaagatctgatacgcaatatcggaaaagaaaatatagaaaaagcctacaacacttataactattcacaaaacagggtggctgacggtagttttgtgcgtatgaaaaatatctcgttgggatatcgtttacctcaaagattcctttcacatcttaaaatcaaacagatgaacgtaaaggtgaatgtgacgaatccgttccttatctattcagacaggaaactgaatgggcaagatccggaattttatagatcaggaggggtttcattgcctactcccaaacaatatacgatgacattgaatgttgaattt

SEQ ID NO: 12599 - DNA, 2481 bp, Bacteroides fragilis
atggattttttgaacatcaatgaaacagttcagagcgtaatccgaatatcaaaaggtgtcgcccgtgagtatggcaatgccagctatgctccggcacaccttttgtttgccttgatgcacaaagaggtaggtctgcgttcgtttgtcgaatcgttgggtaaggacgccgattacttgcgtgaatgggcggaggtaagaatagaggagtaccccaaggctgccggcgcaggcgagataatgcccgatccgaaagttaacgaactgtttgagcaagccgataatgtacgaatcaagtggggactgctggaaatcaatccactttgcctgctggcagccattgctacacccgaagcaggtttcagtacggacgagttgcgctcgttccctattcgggagcgtgagatacatgacctcttcacgagcggaatgggtaatatgaaaaaatccgtaagtacgcagactgaccttccggggagtgaagcccccctatggacagccggggcgggcaatttagataagtactgtacggataagactgctcttgcggcagacaagaaagtatatcctatcgtgtgccgtgaccgtgagacacgcatgatgatggaaattctggggcggatgggtaagcccaacgtgctcatcatcggcgatgccggtgtgggtaagactgccttggtagacggtttggcatgcagcatcattgagggtacagttccccaatatctaaaggacatgactatctatgagcttgacacaggaacactgattgcgggtgctacctacaaaggggagatagaagaacggctgaaaggaatcatcaaagaattgtcggctcacggcaatgcgattctcttcattgatgaaatacatacgctgatcgaccccaagtcgggcaacagcggagcggcaagcatcctgaagccggagcttgccaaaggaaatataacggtaatcggagtcactacggtggacgaataccgtaaactgattgaaccggaccatgcccttaaccggcgttttgaagtattgcaagtatcggaacctgaccttgcatccaccgtaaatatgatacaggcagctttggaaagatatgaaagctaccacggtgtgggggtagatgtagattcgttgccggaatgcgtggcactcgccaagcgttatgtcaaggaacgccgtttgccggatgccgctattgatttgatagaccgtaccctctctgcggttaagatgattaaccagagcggggaaaaagatataaagggactggcagagcagcttgccgcgattgaagcggcggaagaccagcccgaagcggagcgcacggagaagttgcggttagtcaatttcaccatgaagaaccggttaagccctatccttctgggaatgctctccgatggacagaatgaaccggagtcatcagactacggtgaatggatggattatattttaggtgtacttgaccgattgcgtgaattgaccaaagagaaaatcgggaaaatcacttcccatgaggtagcagccgttgtttcttcttctacaggtatccctatcggcaagatagaatccggagagaaagaaaagttactcaacatggaagatattctgcgtcgtagagtggtgggacaggacaatgcgctgaaggtattgacagatgccattgtcgaatcacgaagtggaatgaacaaaccgggacaaccgattggctcattcttcctgctgggacctaccggaaccggtaagaccgagttggcaaaagcattggcagaagcacttttcaatgacgaaaaggcgatgattcgttttgatatgtcagagtttaaggaagaacattcggcagccctgctattgggagcgcctccgggatacgtgggctacgaagaaggtggcgtactcgtgaaccggatacgccgtcagccttacgcggtggtgcttttcgatgagatagagaaagcccattcttccgtttatgacatcttcctgcaaatcatggacgaaggcaagctacacgaccgtttgggcaaagagggtgatttttccaattctatcgtactgtttacatccaatgtaggtagcgaatggcttagcaaacagattaatgagggcaagaatccttctaccactgacctgatggaagtcatgggcagttatttccgtccggagtttcttgcccgtttgtcggaaatcgtgcctttctctcctattaacgaaacaatgctggttcgtatctttgagatacagttaaagggagttatagcattgcttgagaagcaacatattgacattgagattacggagaaggcaaagaacctgctcgctacccgtggcttcactccaaaatacggagcacgtcaggtggcgggtacgatacgtaactatatccgccgtcctatctcaaagatgattgttgcagggacattggcggcaggtaatacagttgttgtcgatgtggcggataatggagatattggttggaatgtaaaa

SEQ ID NO: 12600 - DNA, 1017 bp, Bacteroides fragilis
atgaaagaaatagactgggctaatctgtcattcggttatatgaagacagactacaatgtgagaatcaatttccgtaacggcgcatggggcgaactcgaaataagcagtagcgaggtgttgaacctgcacatggctgccacttgcctgcattatggtcaggaagccttcgagggtttgaaagctttccgtggtaaagacggtaaagtgcgtattttccgtctggaggagaatgctgcgcgtctgcagtccacctgtcagggcatcatgatggctgaattgccgacggaacgtttcaaggaagctatcctgaaagtggtaaaattgaacgaacgctttattcctccttacgagagtggagcttctctttacattcgcccgttgcttatcggaaccagtgcccaggtgggtgtccatccggcagatgaatatatgtttgttgtatttgtcacaccggtcggtccttatttcaagggtggcttctctaccaatccttatgtcattatccgcgagtacgaccgtgctgcgcctcacggaaccggtatctacaaagtcggtggaaactatgcagccagtctgcgcgccaataagaaggctcacgacttgggttattcctgcgagttctatctggacgcaaaagagaaaaaatacattgacgaatgtggtgcggccaacttctttggtattaaagacaatacctacatcactccgaagtctacttccatccttccttccatcaccaataagagcttgatgcagttggcggaagatatgggcatgaaagtagagcgccgtccggtacccgaagaagagttgagcactttcgaagaagcgggagcttgtggtactgctgccgttatcagtccgatcgaacgtattgacgaccttgagaatggcaagtcgtatgtgatttcgaaagatggaaagccgggaccggtttgtgagaagctttataataaattgcgtggcatccagtatggtgacgaacccgatactcacggatgggtgactattgttgaa

SEQ ID NO: 12601 - DNA, 2166 bp, Bacteroides fragilis
gtgctgggctatgtggttgccggatttcttgccagtccacatatgccctatacaccttcggtgatggatgtagccaatattaaaacctgggctgatattggagtcatcttcttgctttttgctcttggattggaatttagttttaagaagatagtcaaggtgggaggtacggctgttattgccgcctgtaccattatcttctgtatgattcttcttgggattgccgtcgggatggggttcggctggcaacgtatggatagcctgttcttgggaggtatgatcgccatgtcttctactacaattatttataaggcatttgatgacttaggattgcggaagaaacagtttactggtttagtactcagtattcttattcttgaagatatacttgccattgttttaatggtcatgctttcgacgatggcagtcagcaataactttgaagggacagaaatgctgggcagtatcggtaagttactttttttccttattctttggtttgtcgttggcatttatgccatacccgagttcctgaagcgctgtcggaaactgatgagtgaagaaacgctgttaatcgtatctttggctctttgtttcggtatggtggctattgctgccaataccggtttctcggctgcttttggtgctttcattatggggtctatcctggccgagacaattgaggcggaatctatcgatcgattggtaaagcctgtgaaagacttatttggtgctatcttttttgtatcggtcgggatgatggtagatcctgcgatgattattgaatatgcggttcctatcatagtcattacgttggcagtgattctgggacaggcctttttcggaacaatgggggttatgttggcaggacagcctttaaagaccgccatgcagtgtggctttagcctgacgcagataggggagtttgcttttattattgcttctctgggcttatcattacatgtgacaagtgatttcctatatccgattgtagtagctgtttccgtgatcacgacatttctgaccccttatatgattcgtgttgccgagcctgcctcaaacttcgtcgatcgtaagttacccgaatcctggagacgtttcctgatgcgatatactactggtacgcggactgtcaatcacgaaagtttgtggcggaagctattgtttgccttagcacgtattctggtggtgtattccattgtcagtatttcggtaattaccctttcgttccgttttgtagtacctttgctacgcgaacatttgccgggtatctggggcccattggcaggagctgtttttactatcttgtgcatatccccttttttgcgggccattatggtgaagaagaatcactcgatcgaatttataactttgtggaatgataatcgtgtcaatcgcggaccgctggtttccacggttgtatttcgtgtcgcagtgtcagttctgtttgttatgtttgtcattacccgtttgtttaaagcttcggtaggactgatgttcggagtggctttgttactggtgattctgatgatactttcgaggcagttaaaaaaacaatccattttgatagaacgtaaattttttcagaatcttcgttcacgtgatatacgcgctgagtatttgggagagaaaaaaccggcttatgccggacgtttgctttcaagagatctgcatctgactgattttgaaataccgggagagtcggcttgggccggaaaaaccttgcttgaactgaatctgggtaagaagtatggagtgcatgtagtctccattcttcggggaaaacgtaggattaacattccgggtggttctatccgtctgtttccgatggacaaaatacaagtgatcggtactgatgaccagttgaatatcttcgccgaagagatgtcgcatgttgctgtgatcgattcgggagtgtttgagaagagtgaaatgactttgaagcaattgttgatcgatacagactctgcttttctgggcaaaacgctgcgtgaatcgggcattcgtgataaataccattgcctgattgccggcgtggagcggggaggagaagctttgatgacgcctgacgtgaatgttccttttgaagaaggagatgtagtgtgggtggtaggtgagaatgaagatgtgtaccggttaataggacaaaattgtgatagaaaacgt

SEQ ID NO: 12602 - DNA, 1101 bp, Bacteroides fragilis
atggcattgcaatgtggtattgtcggacttccaaatgtaggtaagtcaacactttttaattgtctgtccaatgcgaaagcacaggcggcaaacttccctttctgtacaatcgaaccgaacgtaggcgtaattaccgtgcccgacgaacgtttaaataaactggctgaactggtacaccccaaccgcatcgtccccacaacagtagaaatcgtagatatcgccggacttgtgaaaggtgccagcaaaggtgaaggactgggaaacaagttcctggccaatattcgggaaaccgatgccatcattcacgtactccgttgcttcgacgatgacaatgtaacccatgtggacggaagtgtaaatccggttcgtgacaaggaaatcatcgattacgaattacagttaaaagacctggaaaccatcgagagccgtatccagaaagtacaaaaacaagctcagaccggaggagataaagccgccaaacaagcttatgacgtacttgttcaattcaaggatgcgttggaacagggcaaatcggcgcgtacggtaacgttcgaaacaaaagacgaacagaaaatagcgaaagaattgttcttactcaccagtaaacccgtaatgtatgtttgcaatgtggacgaagcaagtgcggtaaatggaaacaaatacgtagacatggtacgtgaggcagtaaaggacgaagacgccgaaatcctggtagtagccggaaaaacagaagctgacatcgccgaactggaaacctacgaagaccgtcagatgtttcttgccgaaatcggcctggaagaatcgggtgtggcacgtctcattaaatcggcctacaaactgttgaacctggagacttatttcactgccggtgtacaggaagtacgtgcctggacctacgaaaaaggatggaaagctccacaatgtgccggagtgatccataccgactttgagaaaggttttatccgtgccgaagttatcaaatacgaagacttccttcaatatggctcggaggctgctgtcaaagaagccggaaaattgggtgttgaaggaaaagaatacgtagtacaggatggagatatcatgcatttccgtttcaatgta

SEQ ID NO: 12603 - DNA, 384 bp, Bacteroides fragilis
atggaaaaattcagcaccagaaaaagaatacgaagcttcggatatgcctggaaaggtatccgaagttttgtaagcaaagaacataatgcctggatacattgcacggcaattattatagtaacagtggccggattctgtttcggcatcacccggaacgaatggatagctatcatactttgttttggagtagtactggcagcagagggattcaacacggctatagaaagattggtcaatcttgtatctccggaacgtaatccgatagcaggtgatgtgaaagatatcgcagcgggttccgttctgatatgtgctatagttgctgccattgtaggaattatcatcttcatgccttatgtacttgctgttttactgtgtaatatggga

SEQ ID NO: 12604 - DNA, 1095 bp, Bacteroides fragilis
gtggaactctgtgtaatctgtggtggactcaaaaccattacaattatgaataaaataatagaactgttgggaaatcaggctgaatattacctgaaccacacttgcaaaaccattgataaatcactgattcacgtaccgtcaccggatacaatcgataagatatggattgactctgaccgtaacatacagactttgcgcagtttgcagacattgctggggcatggtcgtctggcaaacaccggatatgtatccattcttccggtcgatcaggacatcgaacatacggccggagcttcgttcgctccgaatccgatttatttcgatccggaaaacattgtgaagcttgccatcgaaggcggttgtaatgcagttgcatccactttcggcaatctgggtgctgttgcccgaaaatatgcgcataagataccgtttgtagtaaaactgaaccataatgagttgttgtcttatcccaatacttacgatcaggttctgtttggcaccgtcaaggaggcttgggaaatgggggcagtggctgtaggtgctactatctatttcggttccgaacagagtcgccgccaattggtggaaatcgctgaggctttcgattatgcgcatgaactgggtatggccaccatcctgtggtgctatctgcgtaacaacgagttcaagaaagacggtatagactatcatgcggctgctgaccttaccggacaagccaaccgtctgggagttaccatcaaggccgatatcgtaaaacagaaattgccgactaacaatggtggtttcaaagcgattcatttcggaaagacggatgaaagaatgtataccgagctgactacggaccatccgattgatctttgccgctatcaggtggccaatggatatatgggacgtgtcgggctgatcaactccggtggagagtcacatggagcgtccgacctgaaggatgctgtcgttacggcagtagtaaacaaacgtgccggcggtatgggattgatcagcggacgtaaagctttccagaaacccatgaacgaaggagtggagttacttcacgccattcaggatgtctatctggatgcgtctgtcaccattgcc

SEQ ID NO: 12605 - DNA, 747 bp, Bacteroides fragilis
atgcgactcggacttttaaccgctttcatcctactcctgtcttttactacttcctgtcaatataaggaagcacagccccaccctgcatttaaagattccattgtcctcgtaactccagtgaaaccgcaaccgattgcaagtaaaagccaaaccgccttttatctggattccatcggtctgatgaatatcgccgaacttgattctacattcattatccggctcatgtacgccactccggacaattttaccggtcaacttctttatactgatttgaaagaagcatatcttcacccggacgcagctaaagctcttttagaagcacatctgttacttaaagcccaatatcccagctaccgcctgataatttatgatgcggcacgcccgatgtccgtacagaaaaaaatgtgggatgtggtaaaagggacctccaagtatatgtatgtatctaacccctcacgaggtggaggtctgcataattatggattggcagtagatatcagcatagccgattcactaggacatccgttacccatggggacagaagtggactatatggatgcagcatcacacataacaaatgaagcaaaattagtaagagaaggaaaaataacccaacaagaacgggaaaaccgaattctactaagacaagttatgaaaagtgcaggatttcgtgcacttcccagtgaatggtggcactttaacctatgcagccgagacgaagccaaacagaagtacaaactcataaac

SEQ ID NO: 12606 - DNA, 830 bp, Bacteroides fragilis
atcgacggactaaggttacaatgtcctcttaacttattattgagattaagaaacatggctcgttccgtattctactatcatttgaaacgcttaaaatcaagcgataaatatgcagaggagaaagatatgatagaatctatttttcatgagcataaagtcgctatggctatcaacgcattacagcggagatgcaaaaccgaggctttacaatcaatcataaaatcgtacgaagactgatgggcactatggggcttaaaagtaaaatcagaaagatccgctatcgttcgtacaaaggcgagatcggcaaaatcgctctaaatataatcaataggaactttattgctcaagcccccaatcgtaaatgggcaacggatgtcacgcagataaatataggttcagagaagttgtatctttcgcccatattggatatgttcaatggtgaaataatatcttataacctctccagaagccccaatatagagcagatatacgatatgcttgacaaggcgtttgctaagttcgacaatcttgacggactaattatacactttgatcaagggtggcaataccaacactacggttatcgacagcggcttacccagaatcatgtcttacaaagtatgtctcggaaaggtaattgtcttgacaacgccatggttgagaacttttttggtattatgaaacccgaactgctctatgctgaaaagttcaaatctgcagaagactttataaaggccttagacgaatatattgattactacaacaataaaagaattaaatcgagactatattgaaagagtccggtccaataccgaactctttcaatatag

SEQ ID NO: 12607 - DNA, 1182 bp, Bacteroides fragilis
atggaaatcaaactggattattcagatatcaagtttcggtatgatggcaagctgagactgttgattatagtcggtacccgtccggagattatccggttggctgccgtaataaataaatgccgtcgatattttgattgtattttggctcataccggacagaattatgattataatctgaacggagtcttttttcatgacctgggcttacaggctccggatgtctatatggatgctgtaggggatgatttgggttcgacaatgggtaatattttgaatgcgagctataaactgatgtcacacttacgccctgatgccgttttggttctcggtgataccaattcttgcctaagtgtaatcagcgctaaacgcttgcatattcctatttttcatatggaagccggtaaccgttgctttgatgagtgccttcctgaagagacaaaccggcgtattgtagacattatttctgatatgaatctttgctattcggagcatgccagacggtatctgaatgcttcgggtgtggcaaaggaacgtacttatgtaaccggttctccgatggccgaggttctgtctgagaacctttctgctatagaatcttcggatatccacgccagattgggtttgaggaaagggcaatatattctgctgtctgcacatcgggaagagaatattgatactgacaagaacttcgcttcattgtttgaaggcataaacgcgatggctgaaaagtatgacatgcctgtactttacagttgccatcctcgtagccgtaaccgcctggaatcaagtggatttaaactggatagccgggtgattcggcatgcccctctggggttccatgactataactgcttgcagatgcatgcttatgccgtggtcagtgatagcgggacattaccggaggaaagttcttttttcacttctgtcggtcactcttttccggctgtttgtattcgcacaagtaccgaacgtcccgaagctttggataagggatgttttattcttgcggggattgataaagcctctttgcttcaagctgtagatactgctgtggaaatgaataggaatggtgataatggtgtccctgttccggattatatggatcgaaatgtatcgacaaaggtggtgaagttgattcaaagttatacaggaatagtaaacaaaatcgtctggagaaaatcc

SEQ ID NO: 12608 - DNA, 1206 bp, Bacteroides fragilis
atgaatattttgtttctgacccttaaccgtgtttcagatctttctgaacgggggatatacacggatttgatgcgggaatttatttgtcatgggcataggatctatatggttgttcccgccgaacgtcgctttcatgaatctacttcaataaaagagagttgtggcgctcaaatattgagggtgaagacattgaatatccaaaagagcaatgtggtggagaaaggcatcggtacattgttattggaaatgcagtatcaatgtgccataaagagatattggaaggatatccggtttgatttgatactttattcaactcctcccattactttcaatagggtcatcagttcacaaaagagacgttgtaaggcgaaaagttatcttttattgaaagatatttttcctcaaaatgccgttgatttgggaatgttttcaaagagaagcttaatttatagacttttccgtaaaaaagagaaggatttatatcagatatcggactttataggctgtatgtctcctgccaatgtggattatgtgttgacacataatccggaaataaaggctgatagagtagagatatgccccaatagtattaaattgttagagaagtcattaatggcttcaactgtaagaaaaaacatattgcagaaattgcatattccaattaataagactctttttatatatggtggcaatttggggcgtccacaaggtctgattttcttgttggacgtgatagccgcaaatgaggaacgtaatgacagttatttcatcattgtaggcagtggcactgaatatggcaagataaagtcttggtttgaggcgaatcatccggataattcaatgctgctttcttcacttccaaagaaagagtatgatgatttggtaaaggcttgtgatgtcggtttgattttccttgataaacgttttaccatccctaattacccttcccgtttactctcttatttagaaaaccggatgcccgttttattggctacagacctgaatacggatatcggacggattgctgaacggaatggttatggcttttggacagaaaatgggaatttggatacatttatggaaatggtggattccttatctgcagacagagaaaaaataaaagtgatgggcgagaaagggtatgaatacttgaagtctaattatacagtagaaagagggtaccggatgataatgaaacattttgag

SEQ ID NO: 12609 - DNA, 606 bp, Bacteroides fragilis
atgtatcagtatgttattaaacgattaatcgattttgtagtcgtgttttttgtcctgattattatctggcctgtattgcttctcgtaactctttggcttcattttgccaataaaggtgccggtgctttttttcttcaggagaggcccggaaggcatggtaaaatctttaaagtcatcaaatttaaaaccatgacagatgaacgtgatgcagaagggaacttacttccggatgataaacgattgacgaaggttggtaagtttgttcgttctacttcgattgacgaactcccacaattaatcaatgttctgaagggtgatatgtcctttattggtcctcgtccgttgttacctcaatatcttcctttatacaataaagaacaggctcgtcggcatgaagtccgtcccgggataaccggttgggctcaggtgaatggacgaaatgccatttcgtgggtaaggaagtttgagttggatgtctggtatgtagaccattgttctttttttctggatttgaagatcttttttttgactataaaaaaagtttttgtgcgagagggtatcagttctgatactgcagtaacaatggaaccttttacagggaataat

SEQ ID NO: 12610 - DNA, 1836 bp, Bacteroides fragilis
atgagccaccgaacagcgggcaccataggcacgctggtattggcagcagtgacagtactctcgtacgtcacggccgtacattacttctcggcaccccgtctggcagacggaacgtttgccacactcattccttataactttgaatggcttccgttcacggaaacactaacgttcaacctgggcattttgctcgaccccatctcggtgatgatgctgatcgtaatttctacagtcagcctgatggtacatatctactctttcggctatatgaaaggcgaacggggattccagcgctactacgcattcttatccttattcaccatgtctatgctcggactggtagtggcaaccaacattttccagatgtacttattctgggagttggtaggtgtatcttcttacctcctgatcggtttctactatacccgtccggctgctattgccgccagtaaaaaagcattcatcgtgactcgctttgccgacctgggcttcctgatcggtatcctgatatacggatactacggaggtactttcggatttactcccgacacagtttcaatgttgagcggtggcgccggtatgttgcctctggcactcgggctgatgtttgtcggcggtgccggcaagagtgccatgttcccgctgcatatctggttaccggacgccatggaaggtccgactcccgtcagtgcactgattcatgccgccaccatggtagtagccggcgtttacctggtggcacgcatgttcccgcttttcatcgaatatgctccggacgtactccacctgattggttgggtaggtgctttcaccgctttttatgctgccagcgtggcttgcgtacagagtgacatcaagcgtgtacttgctttctcgaccatctcacaaatcggatttatgatcgtggcactgggtgtttgtacctcttccgatccgcatcacggagggttgggatacatggccggcatgttccaccttttcacacacgccatgttcaaggccttgctcttcctgggtgcaggcagcattatccatgccgttcactccaacgagatgtcggctatgggaggattacgcaaatacatgccgatcacgcatatcaccttcctgatagcttgtctcgccattgcaggtattcctccgttctcgggtttcttctccaaagatgaaattctggcagcttgcttccagtatagcccgacaatgggttgggtgatgaccgtcatcgcagctatgaccgccttttatatgttccgtctctactacggtatcttctggggtggcacagcaccggggcaaaagtcgacaagcgatgatacaagccacgtacatactccccacgaatctcccctgaccatgactgttccgttaatcttcctggccgccgtcacttgcgtggccggtttcattcctttcggacatttcatcagctccaacggtgaatcgtataccatccatcttgagacatcagtagccgtcacaagtgtagtgattgctgtggcgtccatcgtcctggccacttgcatgtacctgcgtcagcagcaacctctggcagataaacttgccaaacgttttgccggactgcaccgtgcagcctatcatcgtttctacatcgacgaggtgtatcagttcatcacacaccggattatcttccgttgtatctctacaccgatcgcctggttcgaccgccacgtggtagacggattcttcaacttcatagcctggggtacccatgctacaagcgatgagatacggggattgcaaagcggacgtgtacagcaatacgcttatgtattcctgctcggagcgctgatacttatcttaatattaatctta

SEQ ID NO: 12611 - DNA, 2433 bp, Bacteroides fragilis
atgaaagtaatgaaattcggcggaacgtccgtaggttccgtgaacagcattttaagcgtaaagaaaatcgtagagtctgccggtgaaccggtaatcgtagtagtgtctgcattgggcgggatcactgaccagttgatcagtacctcccgaatggccgccatgggcgatgcagcttacgaaggggcataccgggaaatagttcgccgccacgaagagatggtgcagggagtgattcctgccggagagactcagaccctgttgcactatcaggtgaatgaattgctcgacgaactgaaagatatctttcagggtatttatctgattaaagatctttctccgaaaacgtccgataccattgtcagttatggtgaacgtctgtcttcactgattgcgtcaagactgatccaaggggctgtatggttcgactcacgtacttttatcaagacagaaaagaaacataataaacatacactggacacggaactgaccaatcggttggtgcgggaggctttcaaagaaatcccccgggtttcgctggtacccggattcatctcttcggataaggtttcgggagacgtaacgaatctgggcaggggcggttccgactataccgcagctgttattgccgcagctctcgatgccgatagtctggagatttggacggatgtagacggcttcatgacagccgacccgcgtgtgatcagtacggcctatactatcagcgagctgacttatgtagaggctaccgaactttgtaatttcggtgcaaaagtggtgtatccgcctaccatctatccggtatgtcacaaaaacataccgatcctgattaagaatactttcaacccggatgcccggggaacggtgatcaaacaacacgtagaccacacgaagagcaaagctatcaaagggatttcgtccatcaacgacacgagcctgattaccgtacagggtttaggtatggtgggcgtgatcggtgtcaactaccgcatctttaaggcgctggcaaagaatggaatcagtgtgttcctcgtttcgcaggcttcatcggagaacagtacctctatcggtgtacgtaatgccgatgccgatctggcttgcgaagtgctgaacgaagagtttgccaaagagatcgaaatgggtgagatttcgcctatccaggcagagaagaacctggctacggtagctatcgtgggtgagaacatgaaacatacgccgggcattgccggaaagctgttcggtacgctgggacgaaatggcatcaatgtgatagcctgtgcacagggagcttccgagaccaacatctcgtttgttgtcgattcaaagtcgttgcgtaaatcgctgaatgtgattcacgactcgttcttcctctccgaatatcaggtgctcaacctctttatctgcggtgtgggcacggtgggaggaagtcttgtcgagcagatccgccagcagcagaagaagctgatggtggaaaatggcctgaaactccatgtggtaggtattatcgatgcgacgaaggcgatgttcagccgtgccggattcgatctggccaactatcgcgaagagctgaaagagaagggagtggacagttcgctggatactatacgtgacgagattatcggcatgaatatattcaattcggtatttgtggattgtacggccagtccggacattgcctctctatataaggacttcctgcaacataacatttctgtggtggcggccaataagattgctgcttcgtcggcttacgagaattaccgtgaactgaagctgatagcccgccagcgtggtgtgaaatatctgtttgaaaccaacgtgggggctggacttccgattatcaataccatcaatgacctgatacatagcggtgataagattctgaagatcgaggcagtgctttcgggtacgctgaactatattttcaataagatcagtgccgatgttcccttcagccgtaccatcaagatggcgcaggaagagcgttattcggaacccgatccgcgcattgacttgagcggtaaggacgtgatccgtaagctcgtgatcctggcgcgtgaggccggatacaagctggaacaggaagacgtggagaagaatcttttcgtaccgaatgacttctttgaaggttcactggaagacttctggaaaaaagtgcctagtctggatgctgatttcgaagctcgccgcaaggtgctcgagagtgagaataaacattggcgtttcgttgccaagctggagaacggcaaagcatccgtcggtttgcaggaagtggaccgcaaccatcctttctacggactggaaggcagcaataacatcatcttgcttaccaccgaacgctataaagaatatccgatgatgattcagggatacggtgcgggtgccggagtgacggcggccggtgtatttgctgacattatgagcattgcaaacgta

SEQ ID NO: 12612 - DNA, 1209 bp, Bacteroides fragilis
atgcccatgaccatcaaacccttgcctcaagagttttatgacgagatagagaatctttctttccgggaaatcgcttaccgggtggcagatgctttctttggagaagatgttccggcggaaacgctgaaagagatcgtttatgatacgttgaattttgatgtcccgttggtgccggtgaaggagaacatctattccctggagcttttccacggtcctacattggcttttaaagatgtaggtggacggtttatggcccgtttgttgggatacttcatccggaaagaggggcggaaacaggtgaatgtgctcgttgccacttccggagataccggtagtgcggtagccaatggctttttgggggtagagggtattcatgtgtatgtgctctatccgaagggaaaagtcagcgagatacaggaaaaacagttcactacgctggggcggaatattacagccctggaggtggacggaacgtttgacgactgccaggcgctggtgaaagcagcctttatggatcacgaactgaacgaacggttgttgctgacctcggctaactctatcaacgtggcacgtttcctgccgcaggcattctattacttttatgcctatgcgcaattgaagaaggccggtcgggcagagaatgccgtcatctgtgtgccgagcggaaactttggtaacattactgcaggcttgttcggcaaaaagatgggcttgcccgtccgccgttttatcgccgccaacaataagaatgatattttctatcaatatttgcagacaggacagtacaatccccgtccgtccgttgccaccattgccaatgcgatggatgtgggtgatccgagcaactttgcccgtgtgctcgacctgtatggcggttcgcatgcagccatcgctgccgagatatccggaacgacgtacaccgacgagcagattcgtgaaagcgtgaaagcgtgctggcagcagacgggttatctgctcgatcctcatggagcatgcggttaccgtgcattggaggaaggcttgcagccgggtgagacaggcgtattcctcgaaacggcccatccggccaaattcctgcaaacggtggagagcatcattggtaccgaggtcgaaatacctgctaagctccgggcttttatgaaaggcgaaaagaaaagtttgccgatgacgaaggagtttgctgatttcaagagctatctgttgggcaag

SEQ ID NO: 12613 - DNA, 1221 bp, Bacteroides fragilis
atggaaagagcaacttttagcctcctattctacattcgtaggacaaagttaaatcggcatggtgaggcgccgattctggtgtggattactgtaaacggtgttcgtgcggatgcatcaataaagaaaacgattttaccccaactttgggatgccgataaaggcagagccctagacaaaaaacgtgaggggaaggaattgaacctataccttgatgcaatccatatgcggattctgaaaattcaacgtgatttggaaattgaaggagcgaatgtgaccgcttcgaaagtacttgatcgttatcttagaaagggaggttttgttgatcgtagtttattcgatgtctttcgtgaacataatgataagtgcaagaagcttgttggaattagtatggctgctgcaacagcacaacgttatgagacaactctgcaacatacacaggactttgtttgggacacttaccgaaaaaagtttttttttctgagtgaaatgtcccagcagttcgtcgaagactatatgttttggttattgacaaagaaagggtgtagtcacaatacttcgactaaatatctgaagaactttaaaaagattatccttctttccctggcaaaaggatggttgaagaaagaccctttcgctgaatataaattcacgcttgaggcggtagaccgtgatttccttgaagattctgaaattcagagaatactcagcaaagaaattgcaatatcccggttggcccaggtacgcgatacttttatcttttgttgctttaccgggctggcattttcggatgtcaagcaattgaagcaggaagatattgtcgaagattccaacggggttaagtggatcaggaaagaacgtcagaagaccaagattatatgtaatatccctttgagggatattccgctgcagattctgaagaagtatgagaataatcctcagtgtgtcatcaagggagtgttgctgccgattctatgtaatcaaaaaatgaatgcgtacctgaaagaattgggagatatttgcggggttaacaagacgataaccatgcataccgccagacatactttcgcgacctatgcgctcgccaatggggtatcgatggaaagtgtggcgaaaatgctcggccacactaatctacagatgacacggcattatgcacgtacgctggataggatagtagtcaaggagttgtttcagattaaggacaattttgagatggcgaat

SEQ ID NO: 12614 - DNA, 1086 bp, Bacteroides fragilis
atgaaaccttatttgttattgacccccggaccacttactacctcagagactgtaaaggaaaccatgatgaccgactggtgtacatgggatgaagactataatttgcacattgtcgaagcattgcgtaaagagctggtcggcattgctacccgcaatacggaagagtatacatctgttcttttgcaaggaagcggaacctattgtgtagaagccgtgattggtgctgccatcggtaagaatgataaacttctgatttgcagtaacggtgcttatggtgaccggatggggaatattgccgaatattatcatatcgactacgagctccttgcttttgatgaaacggaacaggtatcggtagactatgtggacgactatctgagcaataattcagatgttactcatgtggccttcgttcactgcgaaacgactaccggtatcctgaatccgttgaaggagctggcacatgtagtgaagatgcatggcaagaaactgattgtagatgctatgagtagctttggaggtatcccgatggatgttagtgagttgggaatcgacttcctgatcagcagtgccaataaatgtatccagggagttccgggattcggatttatcatagcccgccgttcggaactggtgcgttgtaagggagtagcccgttctctttctctggatatttacgaccagtgggaaacgatggaaaaagggcatggtaaatggcgttttacttcaccgacccatgtggtgcgtgctttcaagcaggcccttaccgaactgattgaagaaggtggagtggaggcccgtcaccggagatattgtgagaatcaccgggtactggtagagggtatgcgttcactcggttttgtaactttgctcgatgacgcgatccagtcacctattatcacttcattcttgtatccgaaaaccggattcgactttaaggccttctataccgcccttaaatccaagggttttgtaatctatcccggaaaaatttcaaaagcggatactttccgtatcggtaatatcggagatgtacatccggaggactttgcccgtctggtggaggtgattagagagactgagtac

SEQ ID NO: 12615 - DNA, 1221 bp, Bacteroides fragilis
atgaatttagtagaacgttttttgaagtacgtaagctttgatacacagtcggatgaactgacaagacttacccccagcactccgggccaaatggtatttgcggaatatctaaagtctgagttggagtcgttggggttagaagatataacattggacgagaacggttatctttttgctactttacctgccaatacagagaaagaattgcctgtcatcggctttatagcacatatggatacgagtcccgatatgagtggaaaaaatgtcactccacgtattgtagaaaaatacgatggttcggatattgtgctttgtgccgaagagaatatcgtactttcaccgagtcagtttcctgagttgctcgatcataagggtgaggatctgattgttaccaatggtaaaactctgttaggggcagatgataaggcaggtattgctgaaatagtatcagctgttgtctatctgcaggaacatcccgaaattaagcatggtaaaattcggatcggtttcaatccggatgaagaaataggtgagggtgctcataagtttgatgttcagaagttcggttgtgagtgggcttatacgatggacggaggagaagttggagagttggaatttgaaaatttcaatgctgccgctgccaagatcacttttaaaggacgtaatgtgcatccgggatatgctaaacataaaatgatcaattcgatccgtatagccaatcagtttattactatgcttccccggcacgagactccggaacatacttccggatatgagggtttctaccacttaatcggtatccaaggagatgtggaacagagcactgtatcctacattattcgtgaccatgaccgtaataaatttgaggatcgtaaaaaagagatagaacatttggtgaataagatcaatgcagagtttggtgaaggcactgctacgctcgaattgcgtgaccagtactataacatgcgtgaaaagatagaacccgtaatgcatattatcgacactgcttttgctgcaatggaagccgtaggggtgaaaccgaatgtgaaacctattcgtggaggaacggatggcgcacaattatcattcaaggggttgccttgtcccaatatctttgccggtggcttgaattttcacggtcgctatgaatttgttcccatccagaatatggaaaaggcaatgaaggtcattgtgaagatcgctgaactggtagcttcgaag

SEQ ID NO: 12616 - DNA, 858 bp, Bacteroides fragilis
atggcagcggtgacagtaatgatatggggaacaactttcgttgctactaaagttttaataaaatatggcctgtcacctgtcgatattttattctaccgttttttattggcatatatttgcatctggtttttctctcctcgtgtgttgctggctaagagttggcaggacgagttgcggtttgtaggactcggactatgtggaggttcgctctattttgtagccgaaaatacggcattgggtatgacgcttgcttccaatgtatcgttaattatctgtacgactcctattctgactgcactgttggcaccctttttctataagggtgataaattaaaagcacgtctgataggtggttctctgatggcgcttatcggagtgggactggttgtgtttaatggtagtttcattttgcagcttagtccggccggtgatattctgaccctgatagctgcattaatgtgggctttttattgcttgcttctcaggaggatgaatactcattatccgacattgttcattacacggaaagttttcttttatggtttggtgactcttttacccctattcttagtgtatcctttacagacggatatacatatcctgttccggcccgttgtcgctctaaatctgctttttctgggggtgattgcctcgatgctgtgctatattatgtggaatacggcagtgaaacaattgggagtggtttgtgccaccagttatatttatgtagttccccttattactttgctgacctctgccattgtgatcgacgaaaccatcacaatagttgctttattgggatcggcactgattctgagcggagtgtatattgccgaaaggggagtgaacttgaagaaa

SEQ ID NO: 12617 - DNA, 558 bp, Bacteroides fragilis
atggtagacgtaaaaacgattatcgaagaatcacaagagaagatggatatggcagtgatgtatctggaagaagcactggcacacatccgcgccggaaaagcaagtacacgcttgctggatggtatccgtgtagactcttacggaagcatggtgcccatcagcaacgtagctgccgtaaccactcccgatgcacgcagcatcacgattaaaccttgggataaaagcatgttccgggttatcgaaaaagccattatcgactccgatctcggcattatgccggagaataacggtgaaattatccgcatcggtattccacctcttaccgaggaacgccgtaagcaactcgccaaacaatgtaaagctgagggtgaaacagccaaagtcagtatccgtaacgcacggcgcgacggcatcgatgcactgaagaaagctgtaaaagacggtttggctgaagatgaacaaaagaacgcagaagctaaactgcagaaggttcatgacaaatacattgccaaaattgaagaaatgctggctgaaaaggacaaagaaattatgaccgta

SEQ ID NO: 12618 - DNA, 1080 bp, Bacteroides fragilis
atgaaagtttccattatagttccttgttactcagttgcatcaaaactaccccgatgtgtgcataatctattggctcaaactttcacagactgggaacttattttaatagatgatgggagtacagacaacacatgggatatttgcaatagctttacaaagaacaatgctcatattcatgccgtacacaaagaaaacggtggtgtcagttcagccagaaatacaggaattgagatagctaagggagagttcataacttttatcgattcagatgactatgtaaagccggactaccttcagaaattggtagaaggccaggaagcagacttagtattatgtggctttcgtagttccacgggaatagacttcacaccagaacctcaatacctcattggagatgaccttagtaaaaatatacaagccatcgtagagaatgactatttactttattccccttggtgcaaactctttcgtcgtgatattatccaaaaacaccaacaccgctttgatcccgaaattcgtttaggtgaggacactattttttgttataagtacctgctctattgctcttccataaaggtagtggcatcaaacagctacttttatgacggcgtgtggggtggctataaaaagtatgtactaacacgacaggaagtagaatatctagataaagcagaaattacgacgctgcatgatataaatcaacactttaactgtcggatagacctgacatatcgtggctatcatgtagccatgctaaaaggattatatgaaaaattcagagattacgacaccttcgagatgtatacccgcacacacgatgtattaccaccggagcatttttttgccaaccataaacttagttatattttttggggtatcgtggaactggaaacgctctatgttgacaaagaatattgtgcaggtaaactcttcatgcaacgtctacatcatttttttactataccaaccaatcagttactctcgtattcctacaagatgcgtttgatacattacttggtaaaaagcaaacattacacgatggcccatgtgctcttaatattcctttcaatcttaaagcat

SEQ ID NO: 12619 - DNA, 2460 bp, Bacteroides fragilis
atgaatatctcttataattggctgaaagagtatgtcaatttcgatctgacgcccgatgaagtggcggctgcgctgacttctatcggactggaaacaggtggagtagaagaagttcaaacgattaaaggcgggttggaaggcctcgtgattggtgaggtgctgacttgcgtggaacatcccaattcagaccatttacacatcacaaccgtaaatttgggtaacggcgaacctactcagattgtgtgcggagctccaaacgtagctgccggacagaaagtcgttgttgccactttgggcacgaagctctatgatggtgacgaatgttttactattaagaaatcaaagattcgcggcgtggagtcgatcggtatgatatgtgctgaagatgaaatcgggatcggaacttcacatgacggcatcatcgtattgccggaagatgccgtaccgggtactcttgcgaaagattattataatgtaaagagcgactatgtacttgaagtagatattactccgaaccgtgctgacgcttgttcacactatggggtggcacgcgacttgtatgcttatctggtacagaatggcaaacaggctgcactgaccagaccgtctgtcgatgcttttgctgtcgaaaatcatgatctggatatcaaggtaactgtagaaaacagtgaggcatgtccacgttatgcaggtgttactgtgaaaggggttactgttaaagagagtccggaatggttgcaaaataaacttcgcatcatcggtttgcgtcctattaataatgtagtggatatcacaaattacattgtgcatgctttcgggcaaccgcttcattgctttgacgcaaacaaaataaaagggggcgaggtgattgtgaaaacaatgccggaaggaacaacgtttgtcacgctggatggcgttgaacgtaagttgaatgaacgcgatctgatgatctgtaacaaagaagacgctatgtgtattgccggtgttttcggaggtcttgattccggttctacagaggccacaacggatgtgtttctcgaaagtgcatatttccatccgacatgggtgcgtaagacggcccgtcgtcatggcttgaatacagatgcttctttccgttttgagagaggtattgatcctaatatcacgatctactgcctgaaattggcggctatgatggtaaaggaacttgccggaggtaccatttcttcggagattaaagatgtctgtgctgctcctgcacaggattttattgtcgagttgacttacgagaaggtacacagcctgattggtaaagtgattccggcagagacgataaagagcattgttaccagtcttgaaatgaaaattatggacgagacggccgaagggctgacattggccgtacctccataccgtgtggatgtacagcgtgactgcgacgtgattgaagatatcctgcgtatttacggatataataatgtggaaattccatcgacactgaagtcgagcctgactacaaaaggagattgtgacaagtcgaataagttgcagaacctggtggctgaacagttggtaggttgtggtttcaacgagattctgaataactctttaactcgtgccgcttattacgatggtttggaaagctatccttccaagaatctggttatgttgctgaatccgctaagtgcagatttgaattgtatgcgacagacactgttgttcggtggattggaaagcattgcccataatgctaaccgtaagaacgcggatttgaaattctttgaattcggtaactgttatcactttgacgcggagaagaagaatcctgaaaaggttttggctccttactcagaggattatcatttgggactgtgggtgaccggtaaaatggtatcaaattcatgggcacacgcagatgaaaacacttctgtctacgaattgaaggcttatgtggagaatattttcaaacgtttaggattggatttgcactctctggtagtgggcaacctgagtggtgatatttattctacggccttgacggtaaatactaaaggtggcaagagactggctacattcggtgtcgttaccaagaagatgctgaaagcttttgatgttgataatgaagtctattacgctgatttaaactggaaagagctgatgaaagcgattcgttcagtaaaagtaagctataaagagatttctaaattcccggctgtgaaacgtgacttggctctgttgctggataagaaggtacagtttgccgagattgaaaagatcgcttatgaaacagagaagaaactcttgaaagaggtttctttgtttgatgtttacgaaggcaagaatcttgaagccggaaagaaatcttatgctgtcagcttcttgcttcaggatgaaagccagactctaaacgataagatgattgataagatcatgtcgaaactggtgaagaacctggaagacaaactgggagccaaactcaga

SEQ ID NO: 12620 - DNA, 1110 bp, Bacteroides fragilis
atggcagacaacaatagtatattagaaaagctcgacggcctcgtagcccgtttcgaagaggtgtctaccctcattaccgacccggcagtgattgccgaccagaaacgatacgtaaaactgaccaaagaatacaaggagctggacgacttgatgaaagcccgtaaagaatacatgcaactactggctaacatcgaagaagctaaagatattctctcaaacgaatcggatgctgatatgagagaaatggctaaagaggaaatggacaacagccaggagcgtctccctgtattggaagaggaaatcaaattattactggtaccggccgaccctcaggatggtaagaatgccattcttgaaatacgtggcggtacaggtggtgatgaagctgcgatcttcgcaggcgaccttttccggatgtacgccaaattctgtgaaacgaaaggttggaaaatggaagtatccagtgccaatgaaggcgctgccggcggatataaggagatcatttgcagcgttacaggcgataatgtatacggtacactaaaatacgaatcgggagtacaccgtgttcaacgagtacctgcaacagagacccagggacgtgtacacacttcggcagcctcggtagccgtactacccgaagccgaagagttcgatgtagtgatcaacgaaggtgaaatcaaatgggatactttccgttccggaggtgcaggtggacagaacgtcaacaaggttgaatcgggtgtccgtttgcgctacatttggaagaatccgaatacaggagtagcagaagagatcttaattgaatgtaccgaaacccgcgaccaaccgaaaaacaaagagcgcgccctggcacgcctccgtacgtttatctatgataaggaacatcagaagtatatcgacgatattgcttcaaagcgtaaaacaatggtttcgacaggtgaccgttcggctaaaatccgcacttataattatccgcagggacgcatcaccgaccaccgcatcaactataccatttataacctggctgcctttatggacggcgatattcaggaatgtatcgataaactgactgtggccgaaaatgcggagcgcttgaaagagagtgaattg

SEQ ID NO: 12621 - DNA, 1620 bp, Bacteroides fragilis
gtgcctccccgactgatcgtctttatcggcgatccgggatggattgtttgccgtgaactttttgatgatgtctggaaagatgtaccggtcatcattaccaacgcccgcgaccgtctgccggctacactcgacatcttactttcacacgaagagctgaccgaatcgaatactgtccccgcttatgaatggcggaaaggatataacgtgactactctggggcaagtatattatgtgaaagaaaccatcggactgatgcggcagctgatgccggatatgaagcgtctggctttcatctcagacgacagatacatcagtgaggcagttcgcggagatgtagagcaggcaatgaccggatcttttccggagttggcctttgaacagctgtccaccaggaatatttctaccgagatgttactcgataccttgaagagttatgataaaaccacgggactcatttattattcctggttcgagactcataaccaggatgataacaattatctgttcgatcatattcaggagattattactcgcttcgtacattcccctctgtttttgttggctcccgaggatctgtccaacaatactttcgccggaggatattatgtttcagtggagtccttcggcgattcattgttacagctgattcatcgtgtcctggaaggtgagtttccgcgagacattcctcccgctctcggaggaaaacctgctgcttacctctgttatccggctttgcagtcgtatgacataccggtttccctttatccgaaagaggctgtgtacattaatctgcctgtcagcttcttcgagcagtataagaaggagattctgatgactgttgtcttgctgctggtggtggtcagtgccgtaggctattatattcatattcttaaaagagcccatcagcgaatgaaagaagcgcagctgaaagccgaggaagccaatcagcttaaatcggcctttctggctaatatgagtcatgagatacgtactcctctcaatgccattgtcggtttctcgaatctgctttctatggtagaagataaagaagaaatgctggagtatgccggtattatcgaaaccaataccgaacttttgcttcaactgattaacgatattctggatatgtcgaagatagaatccggaatgtatgactttcatgtgactcaggtggatgccaatcagttgatgtcggaagtcgaacaggtagcccatttgcgtatcaggacagacgaagtctccctctcgtttgccgaacgtttaccccaatgtgttttccatactgataagaaccgcttgatacaggttcttaccaatttggttgtcaatgccataaagttcacttcgcagggagagattcagatcgggtatcggctgcaagatgcccatacgttatacttctatgtatccgataccggttgtggtatgtccgccgagcaatgcgaacatgtttttgagcgctttgtcaaatacaacacttttatacaaggcaccggattgggactgtctatctgcaaaatgattattgagaagttggggggcgagatcggggttcagtccgagtccggaaaaggttctgtcttttggttcactcttccttaccgggcttcggcctctttg

SEQ ID NO: 12622 - DNA, 1032 bp, Bacteroides fragilis
atgagaacagagatagcaaccttaggtgaattcggactgatcaagcatctcaccgaaggaattaaattagaaaatgaatcaagcaaatatggagtaggcgacgatgcagccgtcctctcctatcctgccgacaagcaagtgttggtgactaccgacctcttgatggaaggtgtacatttcgacctaacctacacgccgttaaagcatttgggatacaaatctgctgtggttaacttctccgacatctatgcgatgaatggaacgcccaaacagattacagtttcacttgctctctccaaacgcttcagtgtagaagatatggatgatttttactccggactccgtctggcatgccaacaatataaagtcgatattgtaggtggtgacaccacctcttctttgacagggtttgccatcagtatcacttgtattggtgaagccgacaaagataaagtagtttaccgtaatggcgccaaagataccgacttgatctgtgtcagtggcgacttaggtgccgcctatatggggctgcaactgttagaacgcgaaaaagcagtctttaaaggcgaacaggatgctcagccggatttctccggaaaagagtatttgttggaacgacagctcaaaccggaagcccgcaaagacattattgagaaactgtccgccgcaaacatcgttccgacttctatgatggatatctctgacggactttcttcggagctattgcatatatgtactcaaagtaaagcaggttgccgtgtctacgaagagcatatccctatcgattatcaaactgcagttatggcagaagagttcaatatgaacctcaccacctgtgccatgaacggtggtgaagattatgaacttcttttcactgttcccattgccgatcacgaaaaagtatcggaaatggaaggtgtccgcctgatcggacatattacaaagcccgaattaggctgcgcactgatcacacgcgatggtcaggaattcgagttaaaagctcagggatggaatccactacaggaaaataaa

SEQ ID NO: 12623 - DNA, 1278 bp, Bacteroides fragilis
atgaaaagagacgattttattttcgatattatcgaaaaagaacatcaacgtcagttgaaaggcattgagctgatcgcatcagaaaatttcgtaagtgatcaggtgatggaggcaatgggatcttgtcttaccaataaatatgcggaaggatatccgggtaaacgctactatggtggctgtgaagtggtagaccaaagcgaacaaattgccattgaccgcctgaaagagatttttggtgcagaatgggccaatgtacaaccccactcaggagcacaggctaatgcagccgtatttctggctgtactgaatccgggagataaattcatggggctgaatctggcacatggaggacacctttcacatggttcattagtaaacacttcgggaatcatttatactccctgcgaatataatctgaaacaggaaactggtcgcgtagattacgatcaaatggaggaagtagcattgcgtgaaaagcccaaaatgatcattggaggcggttcggcctactctcgtgaatgggattataaacgtatgcgcgaaattgctgacaaggtaggagcaattctcatgatcgacatggcacatcctgccgggttaattgcagccggtctattggataatcctgtgaaatatgcacatattgtgacttcaaccactcataagactctccgaggacctcgtggtggcgtaatcatgatgggaaaagactttcctaatccttggggaaagaaaactccgaaaggagaaattaagatgatgtctcaactacttgattcagctgtattcccaggaatacaaggagggccgttggaacatgtgattgcagccaaagctgtagctttcggtgaatgtttgcaacccgaatataaagaatatcaaaaacaggtacaaaagaatgccgctgtattagcacaagccttgattgaccgtggtttcactattgtttcaggtggcacagataatcattccatgctggttgacttgcgtagtaaataccctactctaacaggtaaggttgcagaaaaagcactcgtatctgctgatataacagttaataaaaatatggttccgtttgatagtcgttccgcattccagacttcaggtatccgtttgggtactcctgccatcacaacacgtggtgcaaaagaagatctgatgttggaaatcgcggaaatgatcgaaaccgtattatctaacgtagaaaatgaagaagtgatagcacaagtacgtgcacgtgtcaacaagacaatggaaaaatatccgatcttcgcatat

SEQ ID NO: 12624 - DNA, 1503 bp, Bacteroides fragilis
atgatgaaccaagaattattaatgagtcccaaccgtttggtgacttttctgcaaaagcctgctgctgagtttacaaaagcagacatcattaactatatccaacagaatgaaatccgcatggtcaattttatgtatcctgctgcggacggacggctaaaaactctgaattttgtgataaacaatgcttcctatctggatgccatcctgacttgtggtgaacgggtagatgggtcgagtctgtttcctttcatagaagccggaagtagcgatctgtatgtaataccacgttttcgcacagcattcgtcgatccgtttgcagaaatacctacactcgtgatgctttgctctttctttaataaagatggggaacctttggaaagctctcccgaatatactctgcataaggcttgcaaagcatttacagatgtaacaggtatggaatttcaggctatgggagaattggaatattatgtaatttccgaagatgacggtctatttccggctaccgatcagcgtggatatcacgagtcgggaccttatgcaaaattcaatgatttccgtacacaatgtatgtcttatatagcccaaacaggtggacaaataaagtacggacactcggaagtaggcaattttatgcttgacggcaaagtttatgagcaaaacgaaatagaatttttacccgtcaatgccgaaaatgcggccgatcaattaatgattgccaaatgggttatccgtaatttagcttaccaatatggatatgatattacttttgctcccaaaattacagtaggtaaagccgggtcagggctacacattcatatgcgaatgatgaaagacggacaaaaccagatgctgaaagatggcgctctctcggataccgctcgtaaagccattgccggtatgatgcagcttgctccttccattacggctttcggcaataccaatcctacttcatacttccgtcttgtaccccatcaggaagcacctaccaatgtttgttggggtgaccgaaaccgttcagtattggtacgtgttccgttaggatggtccgcacaaacggatatgtgtgcactagccaatcctttggaatcggacagtaactatgatactactcagaaacagaccgtagagatgcgttcaccggatggctcagccgatctttatcaattattggcaggtcttgcagtagcttgtcggcatgggtttgagatagagaacgctttggctattgcagagcaaacgtacgttaatgtaaatatccatcagaaagaaaatgcagacaagttgaaagctttagcccaacttcccgatagctgtgcagcatctgcagattgtttacagaaacagcgtactgtatttgaacagtacaatgtattcagtcctgctatgatcgatggtattatcagtcgattacgaagctataatgatgccactctacgcaaagatatacaggacaaaccggaagagatgctggcactggtgagcaaattcttccattgtgga

SEQ ID NO: 12625 - DNA, 477 bp, Bacteroides fragilis
atgaaaataaaagtaggttttggtttcgacgtccaccaattggtcgaaggacgtgaactttggttaggaggcattcttttggaacatgaaaaaggattgttgggacattcggatgccgatgtattggtgcatgctatttgtgatgctttgctgggtgctgccaacatgcgtgatatcggttatcacttccctgacaatgccggtgaatataagaatatagacagcaagattttattaaagaaaacagtggagctgattgctaccaaaggctatcagatcggtaatatcgacgccactatctgtgcggagcgccctaaactgaaagcccatatcccttcgatgcagcaagtgcttgccgaagtgacggggatcgatgcagacgatatttccattaaagccactaccaccgagaaacttggttttaccgggcgggaagaaggtatctctgcctatgcaaccgtgctgatcaatcgcgtg

SEQ ID NO: 12626 - DNA, 612 bp, Bacteroides fragilis
atgaagattatagctgttggaatgaattatgcccggcacaacgaggaactgggacatacgttggagaataaagagccggtaattttcatgaaacccgattcggctatccttaaagatggcaaacctttctttattcccgatttttcgaatgaagtgcattatgaaacagaactggtagtgcgcatcaatcgcttgggaaagaatatagcttcacgctttgctcatcgttattatgatgcggtgacagtcggcatcgacttcactgcacgcgatttacagcgcaggtttcgtgaggtcggcaatccttgggaattatgtaaaggtttcgatagttccgctgccattggcacatttgtaccggtggagcaactggccgatgtgcagaatcttcatttccacctggatatagacgggaaaacggtacagcaggggcatactgccgatatgctgttccggatagacgatatcattgcttatgtcagccgctttgtgactctgaaaatcggtgaccttcttttcaccggtacgcctgtaggagtcggtccggtcagtatcggccagcatttggagggataccttgaaaccgagaagttgcttgatttctatatccgg

SEQ ID NO: 12627 - DNA, 1647 bp, Bacteroides fragilis
atgtcgctggagaaagaacgtattgaaaaggaacatattgaagagatgaaccaagctaaactacgattctttaccaatgtgagccatgagtttcgtactcctttaactcttattataagtcaggtagagcttatgttacaaaagaatacgatacctccatctttgcataatagtattttcaggataaggaagcatgcccaacaaatgaaacttctaatttcagaattgcttgactttcggaaattcgatcagaactatatccaattaaaactatcggaacaaagtctgaatacatttttagaagaagtctatctttctttttctgcttatgcctctcagaagtccatttcttaccatctgaagctgttggagcaggatatatctatttggatagatgactggcaaatgcgaaaagttttgtttaatttgctttcgaacgcatttaaacatgttccggataaaggagaaataagcatattaacctctaccacaccggatcaggttgttattgcagttaaggattccgggaatggcattagtaaagaagaacaggaacggatattcgatcgtttttatcaggcggacaatcggaataaagcgcttcatgttggcactggtatcggactcgcattaacgaaaagtatcattcagctacatcatggtacaattgaggtagaaagtgagttaaatgaaggaagctgttttattgtgaagttacctaaaaaccgtgattgttttgaaaaggatactgaagtcgtttttctggaatctccggaaaaggaacctatggtacaagagaataccataccggatgagaattttatgaaaaaggatgattctacattcgaaactcccttgatagatgaacgggaagggaaacggaaagtattattggtagaagataatgtggagcttttgcaggtactcaaagaaatattttcatcactttatcaggtggtgacggctgctaatggcgaggagggactgaaacaggcttttgcagaagttcccgatttgatagtgagtgatgttatgatgccggtaatgacaggaacggagatgtgcctgaaaataaagaataacataaacctgtgtcacattccggttgtgttgttgacagcacttgacactgtagatcaaaatatagaagggctacgccgtggagcagacgattatatcaccaagcctttcaatgcaaaaatcttaataacccgttgcaataatttgattcgtaaccgcttgttgatgcaaagccgttttgccaaagatcagattttagaaatcaacctgttggcagctaatccaatagataaaggcttcttggatagagtcattaaggtagtagataaacatattgataatgaggattttgatattggtatgttatgtcaggaacttggaatggggcgaacattgttgcacaccaaatttaaagcattgacagggatgacacccaatgaatttattctaaatcaccggttgaaaatagcatcgctgatgttaaagaacgaaccttatttacaggtagcggaaatatccgatagattaggtttcggttctccacgctatttcagccgttgttttaaaaatcaatataacgttactccgatggaatatcgcaaaggggctaaacaggaaaatcttaaa

SEQ ID NO: 12628 - DNA, 915 bp, Bacteroides fragilis
gtggatgaattacgcgggttgatcgggtccggacgggttacctctccttatctgcatatcggaggggggagcaacttattgtttactaaagactacgaaggtactatcctgcattcacgcatcgggggcgtagaggttgtggccgaaacggatgacgatattgttgtgcgtgtgggggcaggtgtggtctgggacgacttcgtggactattgcgtgcaacggcattggtacggcgtggagaatctttcactgatccccggagaggtgggagccagtgcggtgcagaacatcggggcctacggggttgaagttaaagatctgattgtccgggtggaaaccctgaacattgaagggaaagagcatgtttatgatgtaacggagtgtggatattcttaccgggacagcatcttcaagcgccctgagaataagagcgtttttgttacctatgtcagtttcaggctgagcaagagggaacattatacattagattacggtactatccgccgggagctggagaagtatcccggagtgacattggatgtggtgcgccgggtgattatcgctatccgtgaagagaagttgcctgatccccgggtaatggggaatgcgggaagtttctttatgaatccgattgtgggtcgtgagcagttcgaagccttacaggcagaatatcctcaaatgcctttttacgagatcgatactgaccgggtgaagattccggccggatggatgattgatcagtgtggctggaagggtaaagcattagggcctgcggcggtacacgataagcaagcgttggtgctggtgaatcgcggaggcgcaaaaggagcggatgtcatcgcattgtccgatgccgtgcgtgcttcggtccgtgcgaagtttggcatagacattcatccggaagtgaattttatc

SEQ ID NO: 12629 - DNA, 1122 bp, Bacteroides fragilis
atgaaatttatcgtttcaagtactgcacttttcagccatttacaggctgttagccgtgtgataaactcaaaaaatgcactgcctattttagattgttttctctttcagttggaggacggaacactgtctgtgactgtctctgatagtgaaactacaatggtaacctcggttgaggtgaacgagagtgattctaacggaaaatttgctgtagctgcaaaaacattgctcgatgcattgaaggagataccggaacaaccgttgacattcgatatcaaaccggatacttatgaaattacggtacagtaccagaatggtaaatatagcctgatgggacagaatgccgatgaattcccgcaatcggctacacttggcgataatgcagttcgtgtagagatggaagcacagattctactgggaggcattaaccgttcggtatttgctacggctgatgatgaacttcgtccggtgatgaacggtatctactttgacattacgacggaagacattacgatggtggcttcggacggacacaagttggtgcgttgtaaaacattggctgcgcgcggaaacgaacgtgccgcatttattttacccaaaaaaccggcgactctgttgaagaaccttttgcctaaggaatcgggtatggtagtgatcgagtttgacgaacgcaacgctgtcttcacgcttgaaagttatcgtatggtatgccgtctgatagagggacgctatcctaattataattcagtaattccgcaaaataatccgcataaagttacggtggaccgtatgcaactgatgggcgccttgcgtcgtgtatctattttttcttcgcaggcaagcagccttataaaactccgcatgcaggaaaaccagatcgtggtttcggctcaggatattgacttctctacctctgcagaggaaacacaggtatgccaatatgccggtgcagccatgagtatcggtttcaaatctactttcctgatcgatatcctgaataatatctcggcggacgaagtggttatcgaattggctgatccgtcaagggccggtgtcattatcccggtagaacaggaagaaaatgaagacttgctgatgttgctgatgccgatgatgctgaacgat

SEQ ID NO: 12630 - DNA, 1551 bp, Bacteroides fragilis
atgagtaaccagcttgaaaaagtaaaagagcttattgaacttcgtgctcaggctcgtttaggtggtggcgaaaaggctattgaaaaacaacacgccaaaggcaaatatacagcccgcgagcgtattgcacagttgcttgacgaaggtagtttcgaagaactggatatgtttgttcaacacagatgtaccaatttcggacaagagaaaaaacatttcctcggcgacggtgtggtaaccggttatggaacgatagaaggtagattagtatatgttttcgcacaagatttcacagtattcggtggttcactgtcggaaaccatggcacaaaagatctgtaaagtaatggatatggccatgaagatgggtgcccctgttatcggtatcaacgactcgggtggcgcacgtattcaggaaggcatcaacgccctgtccggttatgctgaaatcttccagcgcaacatcatggcttcgggtgtcatcccacagatttcaggtattttcggtccgtgtgccggcggtgcggtttactctcccgccctgacggacttcacgctgatgacggaaggtacatcttacatgttcctcaccggaccggctgttgtgaaaacagtaacgggtgaagacgtgtctcaggaagatctgggtggtgcaagcgtacatgccagcaagtccggtgtaactcacttcactgccgaaaccggtgaagaaggtctggcgattattcgcaagcttctcagctttattccgcaaaacaacctggaagaagctccattggtgaactgtaccgaccccatcgaccgtatggacgacctgctgaacgagatcatccccgacagcccgaacaaaccgtacgatatgtacgaagtgatcggcgccatcatcgataacggagaattcctggaagtacagaaagattatgcgaaaaatcttattatcggttttgcccgtatgaacggacagtcggtaggtgtggttgccaatcagcctaaatacctcgccggagtactcgacagcaatgcttcacgcaaaggtgcacgcttcgttcgcttctgcgacgcattcaacattccgctggtgacattggtagacgttccgggattccttccgggtacgggtcaggaatataatggtgtaatcctgcacggagccaagttgctgtacgcttatggtgaagccactgtacccaaggtaactgttaccctgcgtaaatcttacggtggttcgcacatcgtaatgagttgcaagcaactccgcggcgacatgaactatgcatggccgacagccgaaatcgccgtaatgggcggtgccggtgcagtagcggtattgtatgccaaagaagccaaagatcaggaaaaccctgctcaattcctggcagacaaggaagccgagtacactaaactgttcgccaacccgtacaatgcagccaaatacggttacattgacgatgttatcgaaccgagaaacactcgtttccgcgtgatccgcgccctgcaacagctgcagaccaaaaaattaaccaaccctgctaaaaagcacggtaatattccattg

SEQ ID NO: 12631 - DNA, 1122 bp, Bacteroides fragilis
atgaacttatttgatgtatatccacttttcgatataaacataataaaaggaaagggttgtcacgtctgggacgagaatggaaccgaatacctggatctttatggaggccatgccgttatctctatcggacatgctcatccccattatgttgacatgattagcaagcaggtggcaaccctgggcttctattcaaactccgtaatcaacaagctgcaacaacaggtagccgaacgtctcggaaaaatatccggatatgaagattattccctattcctgataaacagtggtgccgaagcaaatgaaaacgcgttgaaactggcttcgtttcataacggacgtaccaaagtgatctcttttgggaaagcttttcacggacgcacttcactagcagtcgaggccacagataatcctaaaattatagctccgatcaatgccaacggacacatcacctaccttccgctaaatgacatagaggctgcgaaagccgaattggcaaaagaagatatttgtgctgtcatcattgaaggcatacagggagttggcggtatcaaaataccgactcccgaattcctgcaagagctccgcaaagcctgtacagaacacggaacaatcctgattctggatgaaatacaaagcggttacggacgtagtggcaaattcttcgctcaccaatatgccggaatcaaaccggatattattacagttgccaaaggaatcggaaacggattcccgatggccggagtactgatcagtcctatgtttacacccgtatatggcatgcttggaacaactttcgggggcaatcatctggcttgctcggctgcattggcagtaatggatgtcatcgaacaggagaatttagtagaaaatgcagccaacatcggctcctatctgctggaagaactgaaaaaattcaatgaaatcaaagaagtgcgcggatgcggattaatgatcggaatggaatttgaccaaccggtaaaggaaatccggagccgcctgatccacgaacaaaaagtatttaccggtgccagcggtacgaacgtaatccgattgttgcctcctctctgcctcagcaaagaggaagccgatgaattcctcgcccggctaagaaaagtactcggt

SEQ ID NO: 12632 - DNA, 1389 bp, Bacteroides fragilis
atgaaacggcatctgataatttactccctgctttttcttcttttctgtgtattgtcttgccgcaacaaacaagcagtagctacagaggagtcctctgcacacgatctggaacaaatcaaagatagcggagagctcgttgttctgactctttatagttctacttcttatttcatctatcgtgggcaagacatgggtttccaatacgaactcagtgaacaatttgccaaaagtttaggagtgaaattgcgaatagaagtagccaaaaacgtaccggaactcatccgaaagttactaaatggcgaaggagatattatcgcatacaatattccgattactaaagaattaaaagacagcctgatctattgtggcgaagaagtaatcacccaccaggtaattgtccaacgaaccaatgggaaaacaaaaccgctaaaagatgtaaccgagttggtcggaaaaaatatatatgtgaaaccgggcaaatattacgaacgattggttaacttgaataaagagctgggaggaggcattctgattcatcaagtaaccaatgacagcattactgccgaggatttgataacccaagttgcacaaggtaaaattccttatacagtggctgataatgatgtcgctaagttgaatgcgacttattaccctaacctgaataccagtctgtctatcagttttgaccaacgcgcttcctgggctgtacgtaaagattgtccgcaactggcagcagcagcagacgagtggcataaacagaatatgacttcgccggcatataccgcaagtatgaaacgatattttgagatcagtaaagcaatgcctcattctcccattttatccttaaaagagggtaaaatctctcattatgacaacttattcaagaaatatgcgcaagagataggttgggactggcgtctgttggcatccttggcctataccgaatcgaacttcgatacaactgccgtatcatgggccggagcaaagggactgatgcaattaatgcctgccaccgcccgtgcaatgggggttccaccgggcaaagagcaaaacccggaagaaagtatcaaagctgcggtgaaatacattgcagcgacagatcgcagcctaagcatggtaccggataaacaggaacggattaagtttatactcgcttcatataatgccgggctgggacatatttttgacgcaattgcactggcagataaatacggtaagaataaaaccgtatggacagacaatgtggaaaattacatcctactaaaaagcaatgaagaatatttcactgatccggtatgcaaaaacggatattttcgtggaatagagacctacaatttcgtcagagacattaactcaagatatgaatcatataagaagaaaataaaaagt

SEQ ID NO: 12633 - DNA, 2286 bp, Bacteroides fragilis
atgaacaaaatcattagcaaagaacacttttcggagaaagtattcaaacttgtcattgaagctccgttgatagcaaaatcacgcaaagcaggtcatttcgtgattgtgcgtgtcggtgaaaagggagaacggatgccactgaccattgcagccgccgacccgaaggcaggaacgatcaccctggttgttcaggaagtagggctctcttctacccgcctttgcgaactaaacgaaggagactatatcaccgacgtagtaggtccattgggacaagctacccacattgaaaacttcggaacagtagtatgtgccggaggtggcgtaggtgtagctccgatgctacccatcgtacaggccctgaaggcagccggaaaccgtgtgatcaccgtactggcaggacgtagcaaagaactgatcattcttgaaaaagaaatgcgtgaaagttcggacgaagtgatcataatgaccgatgacggatcatatggtcgcaaaggcttggttaccgaaggagtagaagaagtaatcaaacgggagaaagtgaacaaatgttttgctatcggcccagctatcatgatgaaatttgtttgtttgctgacgaagaaatatgaaattccgacagaagtatcattaaatacaattatggtggatggcaccggaatgtgcggcgcctgccgtattactatcggaggaaagaccaaattcgtatgtgtcgacggtccggaatttgacggtcaccaagtggacttcgatgaaatgttgaagcgcatgggagctttcaaaaccatcgaacgtgaagagttgcataaactcgatgaatgtgaagcaaccaaagtcatagatgaaaacggacgtacagccccttggcgcgaagcactccgtaaagctatcaaagctaaagaccgtgcgaacattgaacgctgccaaatgaacgaactcgatccggagtaccggtcacacagccgtaaagaagaagtcaatcaagggctgactaaagagcaggcagttacggaggcacagcgctgtctggattgtgccaacccaggctgcatgacaggttgcccggtaggcatcgacattccccgtttcatcaagaacatagaacgtggagaattccttgaagcagccaaaacactgaaagagaccagtgccctgcctgccgtatgcggtcgtgtatgtccgcaggaaaaacaatgcgaatcaaaatgtatccatctgaaaatgggcaaagaagccgtagccattggtcacctggaaagatttgctgccgactacgaacgagaaagcggacaaatctccgtacctgaagtaggcgagaaaaacggtatcaaagtggctgttatcggttccggtcctgccggactatcctttgcaggggatatggccaaatatggatatgatgtaacggtattcgaggcgctacatgaaattggcggtgtactgaaatatggtattcccgaattccgtctacccaacaaaatagtagacgtcgagattgagaatcttgccaaaatgggagttacattcatcaaagactgcattgtagggaaaacgatcagcgtagaacagttggaagaagaaggttttaagggaatttttgtagcctcaggagccggacttcccaactttatgaacatcccgggtgagaactcgatcaacatcatgtcttccaacgaatatctgactcgtgtaaatctgatggatgcagccagtcccgattccgatactccggtagccttcggaaagaacgtagctgtaattggtggcggtaacactgccatggactctgtccgtacagccaaacgtcttggagccgaacgggctatgatcatctatcgccgttcagaagaagaaatgccagcacgtctggaagaagtgaaacatgccaaagaagaaggtatagagttcctgaccttacacaacccaatcgaatatctggcagacgagcaaggacgtgtcaaacaagtaatcttgcaaaagatggaattgggtgaaccggatgcctccggacgacgtagccccgtccccatcccaggagcaacagaaaccgttgatatcgatctagccattgtcagtgtcggggtatctcccaatcctatcgtccccagttctatcaaaggtctggaattgggccgtaaaggaacaatcactgttaacgatcagatgcaatcgtctattcccactatttatgcgggaggagatattgtacgcggaggagctactgtcatccttgccatgggagacggacgccgtgccgcagcagcaatgaacgaacaattgagttccaag

SEQ ID NO: 12634 - DNA, 1023 bp, Bacteroides fragilis
atgtcattatttaaagagaaaattttattaattaccggtggaacaggttccttcggtaatgccgtactacgtcgttttcttgattctgatatcagggagattcgtatattctctcgtgatgaaaagaaacaagatgatatgcgtcaccatcttcagaatcccaaagtaaaattctatattggcgatgtccgtgacaagcgctctgtggatggaattatgaatggagtggattatatcttccatgccgctgcgctgaagcaagttccttcctgtgagttttttcccacacaagcggttaggacaaatgttctcggtacagaaaatgtgttggattccgccatagctcacggtgttaaaaatgtggtggtactttctaccgataaagctgcctatcctataaatgcaatgggtatcagcaaagccatgatggagaaagttgctatcgccaaaggtcgtcagttgggtaattgtggaggaacaacgatttgctgtacccgttatgggaatgttatggccagtcgtggttctgtgatacccttgtgggtagagcaaattaagaaatgtaatccaataacaataaccgatcccaacatgacccgcttcatgatgactttggatgatgctgtcgacttggtgctttatgcctttcagcatggaaaaaatggtgatttgtttgttcagaaggcgcccgctgctactctggatgtattagccgatgcattaaagtctctttaccatagtaacgcggatgtcaaagtgattggtacccgtcacggtgagaaactctatgaaactcttgttacccgtgaagagatgtctaaagcagaggatatgggtgattattatcgtatcccatgtgatacgcgtgatttaaattatgataagttttttgtggaaggaagtgaggaggtctccaaaatagaagattaccattctcataatacccgtcgtcttgatgttgaggggatgaaagaacttctcttgaaacttaattttattcgcgaagatcttggccttgaaaaa

SEQ ID NO: 12635 - DNA, 2487 bp, Bacteroides fragilis
atggcaaaaaagaaatcagataaggaagcagagcagaagccggcttccacaaaaaaatatgtggctttcttcaggaacgaaacaattcactttgtaatcgggttggtactggtcattttctcagtctatttgttactggcctttacctctttctttttcactggagcagctgaccaaagtattattgatagcggaaatgcccaggaccttgctgctgtgaacaatcacgtaaagaactatgcaggttcccggggagctcagttggcaagctacctgatcaatgattgttttggtatttcctctttctttattttaatctatctggctgttgccggactcaaattaatgcgtgtgcgtgtggtacgcctttggaaatggtttatcggatgttcattgctgctcatttggttttctgttttccttggtttcgtttttatggaccattatcaggactccttcatctatctgggtggattgcatggttataacatcagtaactggctgatttctcaagtcggcattccgggtgtatggctgattcttctggcaacaggtatttgtttccttatatatatgagtgcccgcaccatcatttggctgcgtaagctttttagtcttagtttcttgaagcgtaaacaaaaagaagaacttgctgaagttactcaggcccctcaatcacatgaatatgataacccaaaacctcaggaagtggaatttgatgtaaatcgtactttccgtcaggaagtaccggtgaaaaaggtggaaactactgttgtgtctgaaacacctgtcgaatcttcaaccgaaatgcctgtgactccggaagacagggatgtgacatccgatggtgatgtgactatgacttttgaacagacagctcctgatcccgtacctccttttcgggcagcgtcggcagataaagagcctgagttcgagatagagcctgctgccgatgatgaaaattatcagggtgcggagaccgaaccttacaaccctaaattggatttagagaactatcattttcctactatcgatttgatgaaacactatgaaaatagtgagcctaccatcaatatggaggaacagaatgcgaataaagaccgtattatcaatacattgcgtagttttggcattgaaataagtacgattaaagctacggtaggacctacggtaactctttatgagatcactccggaacaaggagtacgtatttcaaagattcgtggcttggaagacgatatcgctttgagcctttctgcgttgggcattcgtatcattgctcccatacctggaaaaggtacgatcggtatcgaggtgcctaactcaaatccgaagatcgtttcaggacagtctattataggtagtaagaagtttcaggagtcaacctatgatttgcctattgcacttggtaaaaccattacgaatgaggtattcatggttgatctttgcaaaatgccgcacgtattggtggcaggtgctaccggacaaggtaaatctgtcggcttgaacgctatcatcacttcactgctttataagaagcatcctgccgaattgaagtttgttctggtggatcctaagaaagtggaattcagcatttattctgtcattgagcatcattttcttgcaaaacttcccgatggtgaagatgctatcatcactgacgtaactaaagtggtgcagaccctcaattctgtttgtgtagagatggacagccgctatgatttgctgaaaatggctcatgtgcgcaacattaaagagtacaacgagaagttcatcaatcgccgcctgaatccggaaaaggggcataaatttatgccttatatcgtagtggttattgatgagtttggtgatttgattatgacagccggtaaggagatagaactaccgatcgcccgtattgcgcagttggcacgtgccgtaggtattcatatgattatcgcaacccaacgtccgactaccaatatcattacaggtactattaaggccaacttcccggcacgtatcgcatttcgcgtgtcagcgatgatggactcacgtaccatcctcgaccgtccgggagccaatcagttgatcggtcgcggtgatatgctcttccttcagggagccgatccggtacgtgtacagtgtgcatttatcgatacgcccgaagtggaagaaatcaccaagtatatttcacgtcagcagggatatcctaccgccttcttcctgcccgaatatgtgagtgaagatagcggtagtgatttgggtgaagtcgatatgggacggctcgatccgttgtttgaggaagctgcccggttgattgtgattcaccagcagggatctacttcgctgatacagcgcaaattctccatcggctacaatcgtgccgggcgtttgatggatcagctggaaaaggccggtattgtaggtccctcacagggaagcaaggcacgcgatgtgctgtgtgtggacgaaaatgaccttgaaatgcgtttgaacaatattcaa

SEQ ID NO: 12636 - DNA, 1110 bp, Bacteroides fragilis
atggaactacttttgggtattgtgattgtcgttacctgttggatggttgttcgtattattcgttcaagcaaaaatcaggaaggatataaaaggtggagggccggtaactatgccagtgaaaatccttatgccaaagaaaaagcaagtggtccgctttcccaaggtctttttagtaagagagtcagaactaccggtgtgaggcggttcgatgacggagctatcaggtggtgtgccaatctgctggcaaccgaagaatccagattgagggaagtgttggattatataccgcgccaatatacctgttttcatgttcggaaaagaagtggcggatttcgttatatttcggctcccgcaggtgattttcgttccatgcaacaaactatctatcaccgtattttattgttagctaacatacatcccgctgttaccggattttgtccgggaaagtccgtatccgataatgcacgggtgcatctggggcgaaagaatgtattaaaagtagatcttcacgacttttttccttccatacgttcacccagggtgagagcagtttttagggagatggggtactcacgttccatcgcgaaagttttggcggaactttgttgtctcagatgttgtcttccgcagggagcgcctaccagtccggctctcagtaatattatagcctatccgatggataaaaaaatgatggcgttggccggtgaatacgggttggtttatacgagatatgccgatgatcttaccttttcgggtgattatttgccgaaagatgaagttctggtacgaatccacaggattattcgggaagaaggtttcacgatgaatgtcaaaaagacccgcttcttgtctgaacataaacgtaagattattacgggagtatcggttagctcaggcaagaagatgactctgcctaaagtgaagaagcgggagattcgtaagaatgtgcactacgtcctgacaaaagggttggtcggacatcaggaacatattggttctaccgatcccgtttacttgaagcgtttactgggcagtttgtgttactggcgttccatagaaccggacaaccgatatgtatccgattccatcacagctttgaagagattaatg

SEQ ID NO: 12637 - DNA, 990 bp, Bacteroides fragilis
atgccgagtgagcgcaaggttcataaacgtgccattccccgtttgggcggtgtctctttctttcccaccatcctgctttcctcctgtggagtgttcgcccttcgcatcctgatgggttatgatgttcccgccctccgtgcggtgtacttgttgcccgagtgcttgtttctggtctgcgggatgactttgctctacctgacgggtattgccgatgaccttgtcggagtgcgctaccgtcagaaatttgtgatccagatcatctgtgcttcgttttttcccctggccggcctttggatcaataacttctacggtcttttcggcctgtatgcccttcctgcctggataggtatgccttttacggttcttctggttgtctttgtcaccaatgccatcaatctgattgacggtatcgacggtcttgcctccggtctgagcagcgttgccctgcttgtcttcggcttcctgttcatgcagaaagaactttggacgtacagcatgctcgcctttgccacgttcggtgtgctggtccctttcttttactataacgtcttcggcagtgcggaacgtgcccgtaagatttttatgggtgatacgggcagcctgactttgggctatgtgctctctttccttgccatcaaatacagccagtacaatccggatgtcaccccgtataccgaaggtgctttcgtgattgctttcagtacgctgattgtccctgcattcgatgtgatccgtgtggtgatggttcgtgttcgcagtggcaagagccctttcgaaccggacaagaaccatattcatcataagttcctggcaatgggtttcacaccaagaaaggcgatgataacgatcttgctgatttcttgtgcgtttagtgcggtgaatattctgttggttccggtgattgacaacacggtgatgcttttggcggatattgctgtgtgggtgggactgaatttatggttcgacagggtaagagataaaaaacagaaa

SEQ ID NO: 12638 - DNA, 759 bp, Bacteroides fragilis
atgagcatattaagtaaaaatagaataaaatatattcgttcgctggaattaaagaaaatcaggaaagaggaaaaagtttttttagcagaaggtccgaagcttgttggtgatgtattaggatatttcccttgtaaactattgatagcaacatctgattggcttgaggaacatcctgcagttcaagcagcagaagtcattgaagtaacttcagaggagctttcccgtaccagtctgttgaagacaccacaacaggtattagcattgtttgaacaacctgaatatgaaatcgatatggaagctatccgcaattctttgtgtttggctttggacgatatacaagatcctggaaatcttggtacgatcattcgtcttgccgattggttcggaattgagcacattttttgttcgcccaacacagttgatgtgttcaatcccaagacaatacaagccactatgggaggaattgccagagtaaaagtgtattatacagctttaccggacttgatgcattcgttagggaatgtacctgtatatggtactcttttagatggagaaaatatgtatgaacaacctttgtcgaagaatggaattataataatgggcaacgaaggaaatggtatcagccctgagatagagaaactggtaaaccgtaagttatatatccctaactatcctgcagaacgagagacttcagaatcactaaatgttgctattgctactgcaattgtctgtgcagagtttcggcgacaggctgcattg

SEQ ID NO: 12639 - DNA, 2535 bp, Bacteroides fragilis
atgcttgaacaagacagaattataaagattaacatcgaggaggaaatgaagtcatcgtacattgactactccatgtcggtcatcgtttcacgtgcccttcccgatgttagagatggatttaagcccgttcaccgcagaattctctacggaatgatggaactgggaaatacgtcagacaaaccctataagaaatcagccagaatcgtaggtgaagtacttggtaagtatcacccgcacggagactcttctgtatattttgcgatggtacgtatggctcaggaatgggcaatgcgctatccgctggtagacgggcaaggtaacttcggttctgtagacggcgacagtcctgctgccatgcgttacactgaagcacgtctgaacaaattaggtgaagaaatgatgcaggacctctacaaagagactgtagatttcgaacctaacttcgataatacgctgatggaacccaaagtgatgccgacacgtattccgaatttgctggttaacggtgcttccggtattgctgtaggtatggcaaccaacatgccgccccataatctgtctgaagtcatcgatgcctgcgaagcatatcttgacaataaagatgtgaccgtagaggaactgatggaatatgtaaaagcgcccgacttccctacaggaggatatatatatggcataagcggcgtacgtgaagcctatcttacgggacgcggacgcgtggttatgcgcgcgaaagcagaaatcgaatccggacagacacatgataagatcgtcgttacagagattccctacaacgtgaataaggcagaattgattaaagcaattgctgatcttgtcaatgaaaaaagaatagaaggcatatcaaatgccaacgacgagtccgaccgtgaaggtatgcgcatcgttattgatatcaaacgggatgcaaatgcaagtgtagtgctgaacaagctctataaaatgacagccttgcagacgtcattcggtgtaaataacgttgcactggtcaacggacgccctaaaatgctgaatttacgcgacttgattgtttacttcgtagaacatagacacgatgtggtaattcgtcgtactcaatttgacctgcgtaaggccaaagaacgtgcacacatcttggaaggtctgattatcgcttcggataatattgacgaagtaattcgtatcatccgcgccgccaaaacaccaaacgatgcaatctccggactgatggaacgcttcaacctgagcgaaattcaggcacgcgccatcgttgaaatgcgcctgcgccaattaacaggtctgatgcaagatcagctccatgctgaatacgaggaggttatgaagcagatagcatatttggaaagtatcctggccgatgatgaagtatgccgtaaagtaatcaaagacgaattgctggaagtaagagctaaatatggtgacgaacgccgttctgaaatcgtttattcatcagaagaattcaatccggaagacttttatgcggatgatcagatgattatcaccatctcacacatgggatatatcaaacgtacaccattgacagaattccgtgctcaaaaccgcggtggagtaggctcgaagggtactgaaacccgtgatgaagactttgttgagcacatctacccggcaacaatgcacaacacgatgatgttctttactcaaaagggtaaatgttactggctgaaggtatatgaaatacctgaaggaacaaagaactctaagggccgtgctatccagaacttgctgaacattgactcggacgatgctgttaatgcatatttgcgtgtgaagagtttgaatgaccaggaatatattaacagtcattatgtactgttctgtaccaagaatggcgttataaagaagacatctttggaacaatactcacgcccgcgccagaatggtgtcaatgcaattactatccgtgaagacgaccgagtaatagaagtgcgtatgaccaacggaaacaacgaaatcatcatagccaaccgtaacggacgcgcaatacgtttccatgaagcagcagttcgcgtaatgggccgtacagctaccggagttcgtggtatcacactggatgacgacggacaggatgaagtaataggcatgatttgcattaaggatctcgagacagagtccgtaatggttgtctccgaacaaggctatggtaaacgttctgatattgaagattatcgtaaaacaaaccgtggcggcaaaggtgtgaagaccatgaatattaccgaaaaaacaggtaaactggttacaatcaagtctgtaacagacgaaaacgacctgatgatcattaataaatcgggtattacaattcgtctgaaagtagctgatgtccgcatcatgggccgtgcaactcaaggagtccgtctgatcaatcttgaaaaacgtaacgaccagatcggttctgtatgtaaagttacatccgaaagcctggaagatgaagttccggaagaagaaagagaaggaaatattccaagcgatccggaaacaaatacaccggtaaatgaaacagaagaa

SEQ ID NO: 12640 - DNA, 1140 bp, Bacteroides fragilis
atgaataaagaaattattaaagaaggacagggtgatgccttaagagtcataataaccggtgttggtaccggagggcatatctttccggccgtatccattgcaaacgccataaaagagttacgtcccgatgcacaaatcctgtttgtaggagccgaaggcagaatggaaatgcaacgagtaccggatgcaggctatcagattatcggattgcctgtagcaggattcgatcgtaaacatctgtggaaaaatgtcgccgtattattaaaattggtatgcagccaatggaaagcacgaaacattatccggcaattccgtcctcaggtagcagtaggagtaggcggatatgcaagcggtcctactttaaaaatggcgggaatgataggagtacctactttaatacaagagcagaattcatacgccggagtaaccaataaactattggcacagaaagcacgaagaatttgtgtggcgtatgacggaatggagaaattctttcctgccaataaaatcattatgacaggtaacccggtacgtcagaatctgctggcggaaaaaccggaacgtgaacaggctattcgttctttcgggctgaatccggaaaagaagaccattctgattttgggtggaagcctgggggcacgcaccatcaataacacattgattgcgggattgcaactgattcgccggactacagacgtgcagttcatctggcaaacgggaaagatttatcatcaacaagtgacagaagctgtaaaagcagcgggagagatacccaatctgtttgtaacggactttatcaaagatatggctgccgcttatgctgctgccgatctggttatttcacgtgccggtgcagggtctatttccgagttctgcttgctgaataagcccgttatcctagttccgtctcctaatgtggcagaagaccatcagaccaaaaatgctttggctttggtaaataaacaagcagccatctacgtaaaggatgtggaagcagaaaacaaactattaccggtagcactggaaacgattgccaatgccgagaagctgagcgaactcagtgaaaacattgcacatctggctttaccggattctgctgtcgttattgcaaaagaagttataaaattagcgcaacaatca

SEQ ID NO: 12641 - DNA, 1623 bp, Bacteroides fragilis
atgacccaggaaatgatgatcatggctgccatacttgtggcggtaatcttaattacatttatcggtattctttcacgctaccgcaaatgtaaaagtgacgaagtattagtagtatatggtaagacaggtggagataagaaatcggcaaagttatatcatggtggtgccgcctttgtatggcctattgtacagggatatgagttcttgtcaatgaaacccatgcagatagactgcaagctgacaggagcgctttcggctcaaaacatccgtgtagatgtacccactactatcacagtagctatcagcacagatcccgaagtaatgcaaaatgcggctgagcgtatgttgggattgaccatggacgataaacaaaacctgattacagatgtggtttacggacagatgcgtctggttattgccgacatgacaattgaagagttgaactccgaccgtgataaatttctttccaaagtgaaagacaacatcgatacagaactccgcaaattcggtttatacctgatgaatatcaacatcagcgatattcgtgatgctgccaactatattgtcaacttaggaaaagaggccgaaagtaaagcgcagaacgaagctcaggccaatattgaagaacaggaaaaactgggtgctatcaagattgccaaccagataaaagaacgcgaaaccaaagtggccgaaacccgtaaagaccaagacattgccattgcggaaaccaagaagttgcaagaaatctctgtagccaacgctgataaagaccgtatctctcaggttgctattgccaatgcggagaaggaatcacaggtagccaaagcggaagctgaaaaaaacatccggatagaacaggccaataccgaaaaagaaagccgcattgcggaactgaattccgacatggaaatcaaacaggcagaagcacaaaagaaagctgccatcggacgaaacgaagcacaaaaagagattgcgttgtctaactccgaactagctgtaacccaagctaatgccgataaacaagccggtgaggcatccgctaaatcggaagctgccgtgcaaaccgctaaggaaatagcacaaaaagaagtggaagaggcgaaagcacgtaaagtggaatcatctctgaaagcagaaaagatagttccggcagaggttgcccgccaagaggccatcttacaggcagaagccgtagctgagaaaatcactcgcgaagcggaagcacgtgccaaagcgacactggcacaagctgaagcagaagcaaaagccattcaattaaaacttgaagcggaggctgaaggtaagaaacgttcattgctggccgaggcagaaggttttgaagccatggttaaagcagccgaatcgaatccggcgattgctatccaatacaagatggtagatcagtggaaagaaatagcaggcgaacaggtaaaagccttcgaacatataaacttaggcaatatcactgtcttcgacggaggaaatgggggcacgagcaacttcctgaacacattggtgaaaactgttgcgccgagtttgggcgtgttagacaaattacctatcggagaaacagtgaaaaatatgattcatccggaagaaaagaaagaagaaacagagaaaaaa

SEQ ID NO: 12642 - DNA, 774 bp, Bacteroides fragilis
atggaaaagttaatcattgcgggacgtgaattcaactcccgcctcttcctgggaacaggtaaattcagctcaaacgaatggatggaacagtcgatactggcatcgggcaccgaaatggtgacagtggccatgaaacgtgtcgacatggagagcacagaagacgacatgctgaaacatattgtacatccgcacattcagttgcttcccaacacatcgggcgtacgcaacgcggaggaagcggtgtttgccgcacaaatggcacgcgaggctttcggaaccaactggctgaaactggagattcatcccgacccgcgctatctgctgcccgactcggtggagaccctgaaagcgactgaagaactggtgaaactcggattcgtcgtgctcccctattgccaggcagatccggtgctctgcaaacaactggaagaagcgggagccgccacggtaatgccgctgggagcacctatcggaaccaataaaggactgcaaaccaaggagtttctgcaaatcattatcgaacaggcaggaatcccggtagtggtggacgccggaatcggagcaccgagccatgcggcggaggctatggaaatgggtgcatcggcatgcctggtaaacacagctatcgccgtagccggcaacccgatagaaatggcaaaagccttcaagcaggcagtagaagccggacggacggcatacgaggccggactgggtatgcaggccatagggttcgtggcggaagcaagctcaccactgacggcatttttaaacgaa

SEQ ID NO: 12643 - DNA, 612 bp, Bacteroides fragilis
atgttaagtctacaatttatcacccatcaaacagagaattactcctatctggaatcggcgcgcatggctctcgaagggggctgtaaatggatccaactgcgcatgaaagaggcatcgccggaagaggtggaggcagtggcactgcaactgaaacctctctgtaaagctaaagaagcgatcctgattctcgacgaccacgtagagctggccaaaaagctggaagtggacggggtgcacctgggcaaaaaagacatgcccatcggcgaagcccggcagatgctgggcgaagcattcatcattggcggaacggccaacacctttgaagacgtaaagctgcatcatgccgccggagccgactatctgggcataggccctttccggtttaccaccactaagaaaaatctgagcccggtactgggactcgaaggctacacctccatactggcacagatgaacgaggccggtatccggataccggtagtagccatcggagggatcgtggcggaagacattccggccattatggaaacgggggtgagcggcatcgccctctccggagcaatcctgcaagcaccggacccggtagaagaaacaaaaagaattctaaacata

SEQ ID NO: 12644 - DNA, 810 bp, Bacteroides fragilis
atgaaagatatattatctgaaatcattgccaataaacgttttgagatcgacctgcaaaaacaggccatcccatcggaacagcttcaggagaagttatctgacgaggtacagccgggctactccatgaagcaggcactggcctcttcggctaccggtatcattgccgagttcaaacgccggtctccgtccaaaggctggatctatgaaaatgcatgtccggaacaagtcgtgccggactatatagccgccggtgcttcggcgctttctatactcacggatgaaaaattcttcggaggaagcctgaaggatattcgcacagcacgccctttggtgaatatcccgatcctgcgcaaagattttataatcgatgaatatcaactgttccaggccaaaattgtgggagctgacgccatattgctgatagccgccgcactggaggccgatcaatgtcatgcgcttgccgcaaaagcccatgaattgggactggaagtcttgctagagattcatactgccgaagaactgccatttataaataaggagatagacatggtaggtatcaataaccgcaacctgggcactttcttcacagatgtagagaattctttccggttagccggacagttgcctcaggatgcgctgttggtatcggaaagcggcatctcggatccggaaacagtgaaacgcctgcgtaaagccgggttccggggattcctgatcggagaaacgtttatgaaaacccaacagcccggacagaaattaaaagaatttataaacgacctgaattcaccacagagtgacacagagtctcac

SEQ ID NO: 12645 - DNA, 1665 bp, Bacteroides fragilis
atgggattattcataaagaaaccctttgaagccctattggcagaggccaatgcgtcgggcagtaaatcattaaaacgagtattaggcccctggagtctggtagcactgggcgtcggtgttatcatcggagcaggactcttctcaatcaccggcaccgtagcagcgggctacaccggaccggccatcaccctttcattcgccatagctgcactcggatgctgcttcgcaggactctgctacgctgagttcgcttctatgattccggtggcaggcagtgcttatacgtattcatacgccaccatgggcgaactgatagcctggatcatcggctgggatctcgttctcgaatataccgtagcagccactaccgtcagtatcagttggagccgatatctcgtcgtctttcttgaaggactcaatatacatctgccgcaagccctgaccgcctgcccatgggatgggggaatcgtcaatatcccggcgttcatgatcgtagtgttgatgagcatcttcctgattcgcggaacagaaggcagctccatcttcaacggcatcgttgtatttctcaaagtatcggtgatcgccatattcgttgtcctaggctggaaatatatcaatgccgacaactatactccatacatccccgccaatacaggtacacttggcgaatacggtctctcaggtgtcctgcgtggagccgccatcgttttctttgctttcctgggattcgatgccgtcagtacggctgcacaggaaacaaaaaatccgaaacggaatatgccgatcggtatcctggtatcacttttggtatgtaccgtactttatatgctgtttgcccacgtaatgacaggagtagcccattataccgaatttagcggccagcagggcatcgcaccggtagccattgccatcgaacacatgggacatgccgatgcaacaggcatcattcacccggattatccgtggctgaaccgtgccatcgttcttgccatcctgttcggctattgttcggtcattatggttactttattggggcaaagccgtgttttcctgagcatgagccatgacggactacttccccccttcttttcacacatcaacgagaagttccgtacaccggcgcgcagcaacctcctgtttatgctgatagtgggcctgctcgccgcatttgttccggcacgcctggcgggagagatgaccagcatcggtacactgatggctttcacgctggtatgcgcagccgtcctcgtagtgcgaaagaccatgccgaacgtaccccgttcatttaaaactccgtttgtgcctctcgtccccattcttggaatactcacttgtctgtgcatgatgcttttccttccggccgatacctggatacgattagtactgtggatgctgatcggactggacatctatgtcggctacggcatgaaacacagtaaactggaacatggtgtgaaaaatcgccagggacaatcggcattgaacatgatcggcattgcactgtctctgctttgtgtcattaccggcttatggcatcagcagactgtaggttggaatgaaagtaaagtattgctgatcatctcgtttgttttcgcatttacgcattgtgcatattatatgatgcgaatatggaaagggacaacaaaacaaacgaatgacaacggt

SEQ ID NO: 12646 - DNA, 2148 bp, Bacteroides fragilis
atgatagtttgcatagccgaaaagccctctgtggcacgtgatattgctgatattttaggagcccgcgaaaggaaagaagggtatattgaaggaaacggataccaggttacctggacattcggtcatctttgtaccctgaaagaacctcacgaatatactcccggctggaagtcatggagcctgggcagcctgcctatgattcctccacgttttggcatcaaactgatagagaatcctacttacgagaaacaattccatattattgagggattgatgcaaaaggctgatgagataataaactgcggtgatgccggtcaagagggagaactgattcagcggtgggtgatgcagaaagccggagcgcggtgtccggtaaaacgtttgtggatctcttcactgacagaagaagctattaaagaaggatttgcgaaactaaaagatcagaaggattttcaaccactttatgaggcggggatgtcccgggctattggtgactggttgctggggatgaatgccacgaggctctatactgtaaaatatgggcagaatcggcaagtgctttcgatcggacgagtacagacccctacactcgcactgatcgtcaacaggcaactggatattgaaaattttcagcctaaacaatattgggaactgaaaaccatgtatcgtgatacaactttctcggcccttattcgtaaaagtgatgaagagctggcggctgaagaagaaaagtccggtggtaaggctaagaaaacagagaaccggggcattgatccgatagctaatcgtgaagaggggatggcattggtggaacgcattaaagatctgccttttgtcgtgacttctgtggctaaaaaagacggaaaggagtatgctccccgtctgttcgacttgacttctcttcaagtggaatgcaataagaagtttgcctattctgccgatgaaactctgaaacttatccaatctctttatgaaaagaaagtgactacctatccacgtgtagatactactttcctgagtgacgatatttatcctaagtgtccgaatatcctgaaaggactgaaagattatgaagtacttactacgccgttggcaggagcttcattgcctaagtcgaaaaaggtttttgatagttcgaaagtaaccgatcaccatgccattattcctacaggagttcatccgcaaaacctgacggatatggagcgtagggtatttgatttgatagctcgccggtttatagcggttttttatcctgattgtaaagtttctactacaacagtgatgggagaggttgatagtatcgagttcaaggtaaccggtaagcagattctggaaccgggatggcgggtagtatttgccaaagacgtaaaagatccgaatgaagaaaaagaaggtgaagatgaaaacgtgcttcctgctttcgtgaaaggggaaagtggtccgcatataccggatttgaatgaaaaatggactcagccgcctaaaccctatacggaagctaccctgcttcgtgcgatggaaacagccggcaagctggtggataacgatgaacttcgggatgcattgaaagaaaatggtatcggccgtccttctactcgtgcagctattatcgaaactctctttaaacgtaactatatccgtaaggaaaagaagaatctgatagctacccctaccggagtggaattgattcagttgattcatgaagagttgctgaagtcggctgaactgacgggtatctgggaaaagaaattgcgtgagatagaaaagaaaacttacgatgctcgtcaattcctggaagaattgaagcaaatggtgtctgagatagtaaatagtgtgctatctgataatacgaaccgtcgtatcaccattcaggaggctacagcgatagaagaagaaaagaaaaagaaagaaccgaaaagacgggaacggaaatctgctactccgaaggaaaagaaaggtaaatcggagcctgcaacagtcgatgtgtcttctaccggtcaatctgttcgggcggatgccttaaaagaaacagattctttggtagggaaactttgtccggtttgtggaaagggagtgataatcaagggtaaaactgcttatggctgttccgaatggaaaaatggatgcacttatcggaaagcgttcgaa

SEQ ID NO: 12647 - DNA, 1074 bp, Bacteroides fragilis
atgttcaattcatttggcaatattttcagactaaccagctttggcgaatcccatggtaaaggaatcggaggagtgatcgatggatttccagcaggtatcgtcatcgatgaggagtttgttcagcaggaactaagccgtcgtcgtccgggacaatcggtaattactacctcccgaaaagaagctgataaagtagaattcctttcaggcattttcgaaggaaagtctaccggatgccctatcgggtttatcgtatggaacgaaaaccaacattctaatgactacaataacctggagaaagtataccgtccgtcacacgccgactacacatacaccgtaaagtatggaatccgcgatcaccgtggcggtggtcgttcttcggcacgtgaaaccatttcaagggtagtaggcggtgcattggccaaattagcattacgccaattgggtattcacatcacggcatatacttcacaggtaggtcctataaaactggaaggcaattacacggattacgatctggacttgatcgaaaccaacccggtgcgctgtcccgatccggagaaagcaaaagaaatgcaagacctgatttacaaaatcaaaggagaaggagataccattggcggtgtactgacttgtgtcatcaaaggttgtcctatcggacttgggcaacccgtatacggcaagctccatgctgcattgggcaatgctatgctaagcatcaatgccgcaaaggcttttgaatatggagacggattcaaggggctcaaacaaaagggatcggaacaaaatgacgtattctacaacaataatggccggattgaaacacgtaccaaccactccggaggtatacagggaggcatcagcaacggacaggacatctttttcagggtagcgtttaaaccggtggctactgttttgatggagcaggaaactgtaaacatagacggtattgatacaacactaaaggcccggggacgccatgacccgtgtgtattgccacgtgcagtgcctattgtggaagctatggcagcaatgaccatactcgactattatttattagatagaatgacacaactt

SEQ ID NO: 12648 - DNA, 1854 bp, Bacteroides fragilis
atggataaaaacaccatcacaggcctcgttttaataggtatattactggtaggattcagttttctgagccgtcccagcgaggagcaaatagccgctcaaaagcggtattatgactctatagccgtggtacagcagcaagaagaagcactgagagccaaaaccgaagctgcgctggctaacgaaaaagaagaaacagcagccgactcagcatcgctcttcttcaatgccaccaaaggtaaagaggcgtttactactatccagaataatttggtagaaatcactctggataacaaaggcggccgtgtttactctgccctgttgaaaaactacatgggacaggataagaaaccggttgtgttgttcaacggcagcgatgcttccatgaacttcaacttctataacaagaagggggccctccagacaaaagacttctattttgaagcagtcaataaaacagatagcagtgtaacgatgcgtctagctgccgacagtgccagctatatcgatttcatttatacactgaaacctgataactacctgatgagctttgtgatcaaagctacgggaatggacggaaaattggctgccagcacaaactatgtggacatctcatggtcacaacgtgcccgccagatcgaaaagggatatacttacgaaaaccgtttggcagacctcacctacaaatacaccggtgatgatgtggataacctttcggcaagtaaagacgacgaaaagtccgtttcggaacgtctggactggatcgctttcaagaatcagttcttctcttccgtattcatcgcagaacaggatttcgaaaagactacggttaaatcgaaaatggagaaacagggaagcggttacataaaggactattccgccgagatgagtacgttctttgatccgaccggcaaacaacctaccgatatgtatttctacttcggcccgaaccactacaaaacgttgactgcgttggataagggacgtgaagagaaatgggaacttaacaacctggtatatctgggctggccgctgattcgttggattaacaaatggatcaccatcaacgtattcgactggttgtccggctggggattaagtatgggtatcgttctgttgttactcaccatcatggtgaaaatagtcgttttcccggcaacatggaagacctatatgtcatcagccaaaatgcgggtgctgaaaccgaaaatcgatgagatcaacaagaaataccccaaacaggaagatgcgatgaagaaacagcaggaggtgatgggattgtacagccagtacggtgtaagcccgatgggtggctgtctgccgatgttgttgcaattccctatcctgatggcattgttcatgttcgtaccgagtgctatcgaacttcgtcagcagagtttcctttgggcggatgacttatcgacttatgacgcattcatcactttcccgttccatattccattcttgggtaatcacctcagtttgttctgcttgctgatgactgttaccaacatcctgaatacgaaatacacaatgcaacagcaggatacgggtgcccagccgcaaatggctgcgatgaagtggatgatgtacctgatgccgatcatgttcctcttcgtcttgaacgactatccttcgggattgaactattactacttcatttcgactctgatcagtgtagtaaccatgatcatactgcgccggacaactgacgaaaacaaattgcttaccgaactggaagctaagaagaaagatccgaaacagatgaagaagaccggatttgccgcacgcctggaagctatgcaaaaacaacaggaacaattggcaaaagaacgggctaataagcagaataagaaa

SEQ ID NO: 12649 - DNA, 1599 bp, Bacteroides fragilis
gtgggagaaacaaagtatattttcgtcaccggtggtgttgcctcttctttaggaaaaggtatcatttcatcttccatcggtaaattgctgcaagcaagaggttataaagtaactatccagaagtttgacccgtacatcaacattgacccgggaacattgaacccttatgaacacggagaatgctacgtgactgtagacggccatgaagccgatcttgacttaggacactacgaacgtttcctgggcatccagacaacgaaggccaacaacatcacgacaggccgtatctataagagcgtcatcgataaagaacgccgtggagattatttggggaaaaccattcaggtgattcctcatatcaccgatgaaatcaaacgtaacgtcaagttactgggtaacaagtataagttcgactttgtaatcacagaaattggcggaacagtaggtgatatcgaatctttaccttatctggaaagtattcgtcagttgaaatgggaactgggtcagaatgccttgtgtgtacacctgacttatgtacctttcctgtccgccgcccaagagttaaaaaccaaaccgactcaacattccgtaaaagagttgcaatcactcggtgtacagccggatatcctggtgctacgtaccgaacatgacctgaataccaacttgcgcaagaaggtcgctctgttctgtaatgtagccgaaaacgcagttgttcagtcaatcgacgcttcaactatttatgaagtacctctgttgatgcaagagcaaggcctggacgaaaccatactccaaaagatgggtctgcctgtaggcgaacgtccgccgttgggtccttggaaagatttcctgaaccgtcgtgccaatgcaactgaaacagtaaccattgcaatggtgggtaaatatgttgaattgcaggatgcctacaaatctattctggaatccttgtcacaagctgctacctacaatgaccgtaaagtaaaaatagaatatgtatcatccgaacatctgactccggacaatgtagacgaacaattgggacatgtaaacggagtagttatctgtccgggattcggttcacgcggtatcgaaggtaaattcgttgctgccaaatacacccgcgaacacaacattccgacattcggtatctgtctgggtatgcaatgtatggctatcgagtttgcccgtaatgtgttgggttatgccgatgccaactccattgaaatggatgaaaagaccaagcacaacgtgatcgacatcatggaagagcagaaagccatcaccaatatgggaggtaccatgcgtctgggagcttacgaatgtgtattgaagaaagactctaaggtatacgaagcctacaaagaagaacacattcaggagcgtcatcgccaccgctacgaattcaacaacgactatcgcaaacaattcgaagaggccggcatgaagtgtgtaggtatcaaccccgagtccgacttggtagaaattgtagagattcctacattgaaatggtacatcggaacacagttccatccggaatacagcagtaccgtactacacccgcatccgttgttcgtgtcgttcatcaaggctgcaatcgataag

SEQ ID NO: 12650 - DNA, 990 bp, Bacteroides fragilis
gtgaaagacggaaaatcgggagcagtaggtacaggtatcggtttggctttttccaaatcactggctgaagcacaccatggtacgttgagccttgaagatagtgtatatggtggatcctcttttgttctcactttgccttggggtgaagaggctgtatccgaagaaccggaagtagtgataccggatggtcgggaagcggctgacgaagaacagggtaccgagttatcgggcagtaaatttaccattctgttggtggaagataatgtcgacttgctgaatctgacccgggaatctctgagtacctggtttaaagttttgaaagctcagaatggccggcaggcacttgaggtacttgccaacgagacagtggatgtgattgtcagtgatgtgatgatgccggagatgaacggtctggagttaacggcaaaagttaagtcggacattgaatactcccatatacctgtcatcctgttaactgcaaaaacgacactggaagccaaggtggaaggcttcgagtgtggtgccgacgtatatattgaaaaaccgttctctatccgtcagttacgcaagcagattgagaatttgctgaagctgcgccaagccttccataaaatgatgtctgaattatcaggtggcaatggggctgcccctatcagcccggtagaatattctgtgtctcagaaagattgtgaattgatggctaaggttcgggcagcggtcgaggcacagctttcggacgagaacttctccgtcgatacactggcagagtcactcaatatgagccgttccaatttctatcgtaagataaaggccttggccggtatgccgcccaatgattacctgaagactatccgtttgaataaagctgccgagctgctgaaaagcggagtgcgcataaccgaagtgtgtgagaaaatcggcttcagttcttcgtcctattttgccaaatgctttaagattcagtttggagtattgccgaaagattatcat

SEQ ID NO: 12651 - DNA, 1332 bp, Bacteroides fragilis
atgaaaagaattgtagtattaggagccggtgaaagcggtgcgggagcagccgttctggccaaagtaaaaggattcgatactttcgtatcggatatgtctgctatcaaggataagtataaaactctccttgacggccatggcattgcctgggaagaaggccgacacacagaagaactgattttgaatgctgacgaagttgtgaaaagccccggaattcctaatgacgccccactgattctgaaattgagagaacagggcacacctatcatctcggaaatagaatttgccggcagatacaccgatgccaaaatgatctgtatcaccggctcgaacggaaagacgaccacaacctcgcttatctatcacatttttaaaagtgcaggactaaatgtgggacttgccggaaacatcggtaaaagcctggcattgcaagtggccgaagagaaacatgattattatgtaatcgaattgagttcattccagttggataacatgtataacttccgtgccgatatcgctgtattgatgaacattacgccggaccatctggaccggtacgaccattgtatgcagaactatattaacgcaaagtttcgtattacgcagaatcagacttcggaagacgcgtttatcttctggaacgatgaccctatcatcaaacgtgaactggacaaacatggcattcgtgcccacctctatccattctcggcaatcaaagaagaaggatctatcgcctatgtggaagaccatgaagtagtaattaccgaaccgatcgctttcaatatggaacaggaacagttggccctgaccggccaacacaatctttataactctttagccgccggtatctccgccaaccttgccggtatcaccaaagaagatataaggaaagcgctcagtgactttcagggggtagaacaccgcctggagaaggtggcacgcgtacgtggcattgattttatcaatgactccaaagcaaccaatgtaaactcttgctggtatgccttgcagagtatgactactaaaacggtattgattctcggaggaaaagacaagggaaacgattatacggaaatagaagaactggtacgggaaaaatgctcggcactggtctacctaggattgcacaacgaaaagcttcatgagtttttcgaccgtctcggactccctgtagccgaagtacagaccggcatgaaggatgccgtagaagcagcttacaagctggcgaaaaagggcgaaacagtattgttaagtccatgttgcgcctcctttgaccttttcaagagctatgaagaccgtggcgaacagtttaagaagtatgtaagagaatta

SEQ ID NO: 12652 - DNA, 1455 bp, Bacteroides fragilis
atgaaactaaaagagattctaacatctatccaaccggtgaaaattaccggaaatcaggatatcgagataaccggggttgacatcgactccagacaggtagagtccggccatctgtttatggccatgcgcggcacacagaccgacggacatgcctacattccggcagcggttgaaaaaggtgccacggccattctttgtgaagagttacctgcagaacttgcagaaggagttacctacattcaggttgccgacagcgaagatgccgtaggaaaagcagctacgactttctacggaaatccgagctcaaaattggaactggtaggcgttaccggaacaaacggaaagacaacgattgccaccttattatataatacgttccgatacttcggctataaagtgggattaatctccacggtatgcaattatatagatgatgaagccattcctaccgaacataccactcccgacccgatcacattgaatcgtttattgggacgcatggcggacgaaggttgcaaatatgttttcatggaggtcagttcacactccatcgcacaaaaaagaatcagcggactgaaatttgccggcggcatcttcaccaacctgacacgcgatcatctggactatcataaaacagtagagaactacctgaaagcaaagaagaagttcttcgacgatatgcctaagaactctttcagtctgaccaacctggacgataaaaacggactggtgatgacacagaacaccaagtcgaaagtatatacttactctctccgcagtctgagcgacttcaaaggaagagtactggaatctcatttcgaagggatgcttctcgactttaacaaccatgaactcgcagttcagtttatcggaaaatttaatgcatcgaacttactagctgtatttggtgctgccgtattgctgggcaagaaagaagaggacgtgctggttgctctcagtacgctgcatccggttgccggacgcttcgatgccatccgttctccacaaggatatacagccattgtagactatgcacacacaccggatgccctggtcaacgtcttgaacgccatacatggagtgctcgaaggaaaaggcaaggtaattaccgtagtaggtgcaggcggtaaccgcgataaagggaaacgccctatcatggcaaaagaagcagcccgggcaagcgaccgggtcatcataacttcggataatccccgtttcgaagagccgcaggatatcatcaacgacatgctggcaggactggataccgaggataagaaaaaaacgctaagcatcgcagaccgtaaagaagctatccgcacggcttgtatgctcgcagaaaaaggagatgtgattctggttgccggaaaagggcacgagaattatcaggacatcaaaggagtgaagcatcactttgatgataaagaagttttaaaagagattttttcattgactgtt

SEQ ID NO: 12653 - DNA, 2313 bp, Bacteroides fragilis
gtgttatttttcaagctgcaaatatacttcttttcaagattagtcaaagcattttgccgcgttcttcgttccaaaattgaaaaaaatcaaattcctgctaactttttatctcattttcacgatattagtgcaataaatgtatatctttgcgggaattttgaaagaaagatattagataaaacaatttttatgattaacccaattgttaagacgatcgagttgggagatggcagaaccatcacactcgaaacgggaaagctggcaaaacaggcagatggttctgtgatgcttcgcatgggaaacaccatgttgttagctactgtttgtgccgctaaagatgcagttcccggaacagatttcatgccgcttcaggtagagtataaagaaaaattcgcagcattcggccgctttcctggtggttttacaaaaagagaaggaagagcatctgattatgagatccttacttgccgtttagtagaccgtgctctccgtcctttattccccgataactatcacgcagaagtttacgtaaacatcatccttttctcagcagacggtgtagatatgcctgatgcattggccggattggctgcttccgcagcactggctgtttcagatattcctttcaacggaccaatttcagaagtacgtgttgcgcgtatcgatggtaaattcgttatcaacccgactttcgatcagcttgaacaagctgatatggatatcatggttgccgctacttatgaaaacatcatgatggtagaaggtgaaatgagcgaagtgtcggaagccgaactactggaagcaatgaaagtagctcacgaagccatcaaagtacattgcaaagcacagatggaactgactgaaatggttggtaagactgttaaacgcgaatattgtcacgaagaaaacgacgaagaactccgtaaagccgttcatgatgcctgctatgataaatcatatgctatcgcagcttccggcaacagaaacaaacatgaacgccaggatgctttcgatgcaatccgcgacgaattcaaagcacagttctcggaagaagaactggaagaaaaaggtgctctgatcgatcgttattatcatgacgtagagaaagaagcgatgcgccgttgtattcttgatgaaggaaagcgtctggacggacgtaaaacaactgaaatccgcccgatttggtgcgaagtaggttacctacccggacctcacggatcggctatctttactcgtggtgaaactcaatcattgacttcagtgactctgggtactaaactggatgagaaaatcatcgacgatgttctcgctcacggaaaagaacgcttcctattacactataactttcctcctttctctacaggagaggctaaggctcaacgcggtgtaggacgtcgtgaaatcggacatggaaatctggctcacagagcattgaaaagaatgattccggaagactatccttatgtagtacgtgtcgtttcagatatccttgaatcaaacggttcttcatcgatggctaccgtatgtgccggaactttggccctgatggatgccggtgtgaaaataaaaaaacctgtatcgggtatcgctatgggattgattaaaaacgcaggtgaagaaaaatatgcagtgttgtctgacatccttggagacgaagaccacttgggcgatatggacttcaaagtgacaggtactaaagacggtatcacagctacccagatggatattaaggtagacggtctgtcttacgaaatcctggaacgcgccttaaatcaggcaaaagaaggacgtatgcacatactcggtaaaatagaagaaacaatttccgaaccacgtactgagctgaaagatcacgctcctcgtatcgaaacaatgactattccgaaagaattcatcggtgctgtaatcggcccgggcggaaaaatcattcagggaatgcaggaagaaacaggtgcaacaatcactatcgaagaaatcgacaacgtgggtcgcatcgagatctcaggaactaacaagaaatcgattgatgacgcaatccgcttgattaaaggtatcgttgctgttcccgaagtaggtgaggtatacaaaggtaaagttcgctctatcatgccttacggtgcatttgttgaattccttccgggaaaagacggtttactccatatctctgagattgactggaaacgtcttgaaactgtagaagaagccggcattaaagagggtgacgagatcgaagtgaaattgatcgatattgacccgaagacaggtaaattcaaactttcaagaaaagttttattgccacgtccggaaaagaaa

SEQ ID NO: 12654 - DNA, 1326 bp, Bacteroides fragilis
ttgatttataaactctccgaggcaatgaaggattgtacccggattgataacgaattgtttccaaaatttgacgttaaacgggggcttcgcaatgaagacggtacaggtgtattggtcggattgactaagattggtaatgtcgtaggatacgaacgaatccccggaggtggtctgaagccgatcccgggaaagttattttaccgtggatatgacctggaagatttagcccacgccattttaaaagaaaaacgtttcggatttgaagaggtggcctacctgctgttatccggcagtttgcccgataaggaagaactggcttcgtttcgcgagctgatcaatgataatatgcctttggagcagaagaccaagatgaatatcattgaacttgaaggaaacaatattatgaatattctggcgcgcagcgtactcgagatgtatcgtttcgaccctaatccggatgatacttcacgtgacaacctgatgcgtcagagcatcgatctgatctcgaaattcccgaccattattgcttatgcttttaacatgttgcgtcatgccaccttcgggcgttcgttacacattcgtcatccgcaggagaatctgtcgattgccgaaaactttctctatatgctgaaacgcgattataccgagctggatgcgcgtacactcgaccttttgttggtgcttcaggcagagcacggaggaggtaacaactctacgtttactgtccgggtaacttcgtctaccggtacagatacatactcggccattgccgcaggcatcgggtcgctgaaaggcccgcttcacggaggagccaatattcaggtagccgatatgttccatcatttacaggaaaatattcaggactggaccaatgtagatgaaatcgatacttactttacccgtatgttgaataaggaggtttacaataagaccggattgatatatggcatcgggcatgccgtatataccatttccgatccgcgagctgtgttgctgaaggaactcgcacgtgacttggcacacgagaaaggtcgtgaacgggagtttgcttttcttgaacttttggaagaacgtgctatcgctactttcggtaagattaagaataatgggaaaacagtatccagcaacgttgatttttattccggttttgtttatgagatgattggcctgccgcaggaaatctatacccccttgtttgccatggcgcgtatcgtgggttggtgtgcccatcgcaacgaagagttgaattttgaaggtaaacgtatcattcgtccggcttataaaaatgtgttggaagaagaacaatatgtaccgttaaagaaacgg

SEQ ID NO: 12655 - DNA, 1275 bp, Bacteroides fragilis
atgaccgcggatatcatgcatccggggctgatccatattattcatgaagctactaaatacggtgatgtcatcgtcggtctgctgacggacaaggccatcgccgaacacaaacgcctcccttaccttacctatgatcagcgtaaggaggttgttgagaatatcaagggggtttgcgaggttgttccccaggaggattggagctatgttccgaatctggaaaaactcaagcctgactatatcatccacggtgacgactggaaaacgggtccgttgcgcgaggtgcgcgaacaggtttttgaggtgatgaacgcccaggggggcaaggtaatcgagatcccttatacccggggcatcaactcctcctcgctcgacaaggatatcaaggcgatcgggactacccctgacgtacgtcttaagtccctccgccgcctgatccaggccaagcctgtggtccgtatcctggaggctcacgacggtctttgcggtctgattattgagaatcttgaagtccagaagggtgataagcgcgaggtctttgacggcatgtggtccagcagcctgaccgactccacgagtaagggtaaaccggatattgaagcggtcgaccttaccacccgtttacaggacctgaacaatatccttgaatgtaccaccaagcctattatttttgatggagacacgggtggcaagatcgaacactttgtctttactgtgcgcactctggaacgtcacggcatttctgcggtaatcattgaagataaagtcggtctgaagaagaattccctttttggtactgacgctatccagactcaggatagtatcgagggtttctgcgataagatcagagcagggaagaatgcccaggtcaccggtgactttatgatcattgcgcgtatcgaaagccttattgccggcaaacccatgagtgacgccctcgaacgtgcttatgcctatgtacaggcgggtgcggacggcatcatgatccacagcaaggataagtcgggtgaggatatccgtgagttctgccggactttccgcaaagaatacgcccatgttcccattgtcgttgttccgacgacttatgaccatgtgcacgaatccgaacttcacgaatggggtgccaacgtagtcatttacgccaaccaccttctccgtgccgcttatccggccatgatgaacgtggccaggaccatccttgaaaacgagcgcgccgaggaggtccgtccgctttgtatgcctatcaaggaaattctggaattgattccggtcactaaa

SEQ ID NO: 12656 - DNA, 1386 bp, Bacteroides fragilis
atgactgccatgattacactgaaagagaagatcggttacggactgggcgatatggcttcgtccatgttctggaaactgttcgggtcctatctgatgattttttataccgatgtattcggcttgcctgctgccgtggtaggaaccatgtttctgattacccgggtatgggattcggctttcgatccgatcgtgggagtgattgccgatcgcacacagacccgctgggggaaatttcgtccttatctgctgtatcttgccgttccttttgcactgattggtatttttactttcaccactccggagttgaatgataccggaaaactggtctatgcctacatcacctattctttgatgatgatggtatattcggctatcaatgtgccttatgcttcactgctgggagtgatgagtcctgacccgaaagaacggaataccctgtccacttaccgtatgacttttgcctatatcggcagttttattgctttgctgctcttcatgccgatggtcaacctgtttggtggtgcagaagacgagcaacggggatggatgttgagtgtggtggtgattgctgtgatgtgtgcggctctgttttatctttgtttcgccttgacacgtgaacgggtaaaaccgatcagggaagtacaaaactccctgaaagacgatttgaaagatttgcttcacaaccgtccgtggtggattctgctcggagccggagtggcagctttggtattcaattctattcgtgacggagctacggtttattacttcaagtactttgttgtggaagaggattactccacggtttccttctttggcgtttcttttgtgctgagcggcctttatctggcagtgggacaggctgccaatattgtgggagtgattcttgcagctccggtcagtaaccgtattggcaaaaaaaacacatacatgggagccatgagtctggctactctcctttccgttatcttttattggtttgggaaaggagacatcaccctgatttttgtttttcaggtgctgatcagtatctgtgccggaagtattttccctttgctctggtccatgtacgccgactgtgctgactattcggaactgaagaccggcaaccgggctacaggtctgatcttttcgtcttcgtccatgagccagaagttcggttgggctatcggaagtgcactgaccggttggttgttggcttacttcggctttcgtgccaacgaagtgcagagtgcagaggctattcatgggattaagatgtttctcagctggttgcccgctgtcggaacagttctgtccgtcgttttcatcagtatgtatccgctgtcggagaagaagatgagagaggtgacttcagagttggagaagagaagaaaggctattcaatca

SEQ ID NO: 12657 - DNA, 2685 bp, Bacteroides fragilis
ttgcatgacgtagacaatgcccacaagatacttcaactgacatccgacacactgatcttggtggacaaaaacggcacgtgtctggacatcgacccacacagcgatttgtggttcctgcaagaagacagactcttggggaaaaatctgttcaacctgcttcccgaccataccttccagaaactgctaccggacttcaggcgggtgacccaacaggggataacggtgaaccgtaactaccggctgccactggaagggggcgaaacgtattacttcaaatgtatcatgcagccgtacgacggtgacaaggtgctgtgccaatatcgcgacatcacggcgcgcagcaacgtgaaactgcaactggaacgcaccaactacgagctgaaggagatacaaaaagcggcacaaatagggcaatggaaatattcatcgcgagagaggacattctattaccggggatacaacggaatcgtatgcacggaagaagagcggagcatcaactttcaggattactacgaaaccatcctgagcgaagatctgcccgccgtgaacacatggatggaagccaaccgccgcgaactcctaaaggaatacatcgaataccgcatcctgctggaaggacaggtatattatatgcgccagcaatgctacctgcggaatgaagaagaagatggcaacatcgtcctggaagggtatatacagaacatcaccgacatacagcggaaacgaaacgacatcaacacgctgacgcatgccatcaacaatgccaaagaaagtgtgtacgcggcacgcagagacggcacgctgatatttgccaacaggcagttcaggctgaaccaccggatcgcggaacaggcagacttgtcactgatacgggtgttcgatgtcgtgggcgatatgacctgcatagaggactgggaagaacgttaccgcagcatacgggaaggccagaccctcaacttcctggcctaccaacccctgaagcacgataaaaacacactggcctttgaaggcaccatgtacagtgtgacaacggacgatggagaagaaaccttctggtcgttcacccatgacatatcggaacgtatccggtacgaatcgcagatcaaacgcttcaatcgcatcatggataccacgatggagaacatcccggcaggtatcgtggtaaaagatatcgagaacgatttcaggtacatctaccgtaaccgggagtcgtacaaccgggacatcagctcagaaaacgccatcggaatgaacgacttcgactactacccgccggaaatggcacagcagaagcggaaagaggatatggaaattgccgctaccggaaaagggatgcactggattatggagggcaaggacaaaaacggaaatctgctgattctcgacaagcaaaaaatcatggtggaaagcgaggacttctctcccatcattgtcagcatcgaatgggacatcacccagctggaactgatgcgccgtgaactgatagaatcgaaagagaaagcggaaacatcggacaaactgaagtcggctttccttgccaacatgagccacgaaatacgcacgcccctcaatgccatcgtaggattctcgcgcatcatctcggagagtgacaatgcggaggaaaggagggagtattacgagattgtagacgccaacaacgaacggctgttgcaactgatcaacgaaatattggatctttccaaaatagagtcgggcatcgtagagttcacttacgggccggtgaggctgcacacactttgcaaagagattcatgatgcacacgtattccgctgtccgcagggagtggaactgaggttcgactcgccggacgaagcgctaagcatccactcggacaagaaccggatcttccaggtattctctaacctgataggcaacgcgttcaaatttaccacagaaggcagcgtaagctatggttacaaacaggaaggcgagcgagttgtattctacgtcaaagataccggactgggtatcgagcccgaaaagttgggaagggtatttcaacggtttgccaaactgaacaattttgcccagggtacgggtctgggattgtcaatctgtaaaacgatcatcgaacggctaggcggagagattgcggtctcctcggaagtgggcacaggaaccacattcaccttctggctgcctcttgagaatgtcatacaagatacggaaacgggaacgaacagccacttgcccggcgaagccgtcggaacacagccgtcggaagtgctcccggccaaagaggatacgccccgccccaaagaggaaacgacggaaaaggaagaggaccttcgggcaaccgcagccggaacggagcaagccaccatactgatagccgaagacacagacagcaacttcgacctgctgaacgctattctgggtagaaaataccgcttagtacgcgccagagacggcatggaggccgtgaccatgtatgacgaggtaaatccggatctgatattgatggacatcaagatgcctaacttagacggactggaagctaccagaattatcaggcaactgtccgcggaagtacccatcattgcacaaagcgcatacgcttacgaacacgaccggaatgcagccgaagaagccggatgcaatgactttatctcaaaaccgatcgctcaggaaaagataaaggaaaagataaagaaatggctgaaa

SEQ ID NO: 12658 - DNA, 606 bp, Bacteroides fragilis
atgtattgtttttttttgaaacgtgtaattgatttttgtcttgttttttgcgctttggtgatttgttgtcctgtacttttcattatagctctttggcttcattttgccaataaaggtgccggtgctttttttcttcaggagaggcccggaaggcatggtaaaatctttaaagtcatcaaatttaaaactatgacagatgaacgtgatgcagaaggaaacttacttccggatgataaacgattaacgaaggttggtaaatttgttcgttctacttcgattgacgagcttccacagttgattaatgttttgaagggtgatatgtcctttattggtccccgtccgttgttacctcaatatcttcctttatacaataaagaacaggctcgtcggcatgaagtccgtcccgggataaccggttgggctcaggtaaatgggcgtaatgctatttcatggacaaggaagtttgagttggatgtgtggtacgtagatcattgttcgtttttacttgatttgaaaattattgttctgaccattaaaaaggtttttgtacgtgagggtatcagttctgatacttctgttacgatggagccttttactggtaataat

SEQ ID NO: 12659 - DNA, 2616 bp, Bacteroides fragilis
atgttgactgcaaaagaaaccagagattcgtttaagaatttcttcgagtcaaaaggacatcagattgttccttcggctccaatggtgattaaagatgaccccaccctgatgtttaccaatgcagggatgaaccagtttaaagatattattttgggtaaccacccggcgaaataccacagagtcgcggactcacaaaagtgccttcgtgtaagcggcaagcacaatgaccttgaagaagtaggacatgatacctaccatcacaccatgttcgaaatgctgggtaactggtcgttcggtgattacttcaagaaagaagccatcagttgggcatgggaatatctggtagacgtcctgaaactgaatccggaacacctgtatgcaacagtattcgaaggtagcccggaagagggcctggagcgtgataacgaggccgcctcttactgggagcaatacttgcctaaagaccatatcatcaacggaaacaaacatgataacttttgggaaatgggtgatacaggcccttgcggtccgtgttcggagatccacatcgacctccgtcctgcagaagagcgtgccaagatttcaggacgcgacttggtgaaccacgatcatccccaggttatcgaaatctggaatcttgtattcatgcaatacaaccgcaaagccgacagcactcttgagccgcttccggcgaaagtgatcgataccggtatgggattcgaacgcctgtgcatggctttgcagggtaaaacatccaattacgacacggacgtattccagccgttgattaaagcaatcgcccaaatggccggaacggaatatggcaaaaatgaacagaacgacattgccatgcgtgttattgccgaccacatccgtaccattgcgttctcaattactgacggacaattgccttcgaatgccaaggccggttacgtgattcgtcgtatcctgcgtcgtgccgttcgttacggatatacattccttggacagaaacaggcatttatgtacaaattacttccggttctgattgacagcatgggagatgcctatccggaactgattgctcaaaaagagttgatcgaaaaggttatcaaagaagaagaagaatcattcctccgtactttggaaaccggtatccgcctgctcgataaaacaatggctgacaccaaagctaacggaaagactgaaatcagcggtaaagacgctttcacattatacgatacattcggtttcccactcgacctgacagagttgattctgcgtgaaaatggtatgacagtcaatgtcgaagagttcgatgccgaaatgcaacagcagaaacaacgtgcccgcaatgcagctgccatagagacaggtgactggatcatactgaaagaaggaactactgagtttgtaggttacgattacacggaatacgaaacttccatcctgcgttatcgccaggtaaaacagaaaaaccagactctgtatcagatcgtactggactacactccgttctatgcagagagcggtggccaggtaggcgacaccggtgtattggtaaacgaattcgagactatcgaagtaatcgacaccaagaaagaaaataatcttccgatacatattacaaagaaactgcccgaacatccggaagctccgatgatggcatgtgtagacacagacaaacgtgccgcttgtgcagccaatcactcggctacccacttgctggacgaagcgctccgtgaagttttaggcgaacatgtagagcagaaaggatcattggttacaccggactctctgcgttttgacttctctcacttccagaaagtgacagacgaagaactccgcaaagtagagcatctggtaaacgccaagatacgtgccaatgttccattacaggaacaccgcaacatccctatcgaagaagcgaaagaactgggcgcaatcgccctgttcggcgagaaatatggtgaccacgtacgtgttatccagtttggctcatccattgaattctgtggaggtacccacgttgccgctaccggaaatatcggtatggtaaaaattatctctgagagttcggtagctgccggtgtacgccgtatcgaagcatataccggagctcgcgtagaagaaatgctggatacgatccaggatactttgagcgacttgaaagctcttttcaacaatgctcccgaccttggtgtggccattcgcaagtatatcgacgaaaacgcaggactgaaaaaacaggtggaagacttcatgaaagaaaaagaagctgccgtcaaagaacgcctgctgaaaaatgtacaagagattaacggcattaaagtcattaagttctgcttgccgatgcccgccgaagtagtgaaaaacatcgctttccaacttcgtggtgaaattacagaaaatctcttctttgtagccggaacagtagatgccaataaaccaatgctgactgttatgatcagtgacaacctggttgccggcggactgaaagcaggtaatctggtgaaagaagctgccaaactgattcagggtggcggtggcggtcaacctcacttcgcaacagccggtggcaagaatccggacggactgaacgctgctgttgagaaggtactggaactggcaggaatc

SEQ ID NO: 12660 - DNA, 2241 bp, Bacteroides fragilis
atggacactgagaaccagaaagaaatagctgaagagcagatgattgaacaagcgtttcaggaattgctgaacgattatcttgctaccaagcaccgcaaacgtattgagattataaccaaggccttcaatttcgccaaccaggcacataaaggcatcaaacgacgctcgggggaaccgtatatcatgcaccccattgccgtcgcgaagatcgtatgcaatgaaataggccttggctcgacttccatttgtgccgctttgctgcacgatgttgtcgaggacaccgattatacagtagaagatatcgaaaatatcttcggggccaagattgcacagattgtcgacggactgaccaaaatctccggaggtatttttggtgaccgggcttcggcacaagcagaaaacttcaagaaactcctgctcaccatgtctgatgatatccgggtgatcctgatcaagattgccgaccgcctgcacaacatgcgtacactcggttccatgttgcccaacaagcaatataagattgcaggcgaaaccctttatatttacgcccctcttgccaatcgcctgggactgtataagatcaagacggaactggaaaacctcagtttcaaatatgaacatcctgaagaatatcaggagattgaagaaaagctgaacgcaacagccgccgaacgcgataaggtattcaacgaattcaccgctcccatacgcgagcagttggataaaatgggattaaaatatcgaatcctggcacgtgtgaagtccatctactctatctggaacaagatgcagaccaaacatgttcctttcgaagagatttatgatcttctggctgtacggatcattttcgaaccacgcaacatagacgaggaactgaacgactgtttcgatatttatgtttctatctccaaaatctataaaccgcatcccgaccgtctgcgcgactgggtgagccaccccaaagctaacggataccaggcactgcacgtcactttgatgggcaataatggccagtggatcgaagtccagatacgcagtgagcggatgaacgatgtagccgaacagggatttgccgctcactggaaatataaagaaggaggaggcagcgaagacgaaggcgaactggagaaatggttgcgtaccattaaagagatactcgacgatccgcagccggatgccatcgactttctcgatacaatcaaattaaacttattcgcctcggagatctttgtcttcaccccgaaaggagagctcaaaaccatgccgcagaactccactgccctggatttcgccttctcactgcacacggatataggaagccactgtataggtgccaaagtgaatcataaactggtaccgctaagccataagctgcaaagtggtgaccaagtggaaatcctgacatccaagtcacagcgtgtacagccccaatgggaagtgtttgccactactgcgcgtgcaagagctaagattgcggctattctgcgtaaggaacgaaaaaccttccagaaagaaggagaagaattgttgaatgaattctttaagaaagaagagatccgcccggaggcagccgtcatcgagaagttgtgcaaactgcataacatgaagaacgaagaagagtttcttgtagccatcggtaacaaaaccatcgttctgggagatgccgacaaaaatgaactgaaagagaaacaaagcagcaactggatgaagtatctgactttctcttttggcaataataaggataaacagcaggaggaaaaagaaccgcaggaaaaggaaaaaatcaacaccaaacaaattctcaaactgacggaagatgccctgcaaaagaaatatatcatggccgaatgttgtcatcccatccccggtgacgacgtactgggatacatggacgagaatgaccgcatcatcatccacaagcgtcaatgtccggtagcggccaaactgaaaagcagctacggcaaccgcatcattgccactgaatgggatacacacaagaaactttcgttcctggtatacatttatattaaaggaatagataatgtagggctgctgaatgaaattacacaagttatttcacgccagcttaatgtgaatatccggaaactggatatggaaacggacgatggcattttcgaaggaaaggtccaattgtatgtgcacgatgtggaagatgtaaaagctatttgcaacaacctgcgcaagattccgaatataaagtcggtgacacgtgtagaaaac

SEQ ID NO: 12661 - DNA, 1374 bp, Bacteroides fragilis
ttgcagcctgataattatctaaacgacaatatgaaacttgatttacttacggccatctctccgattgacggccgatatagaggcaaggctgaagctttagctgcatatttttctgaatatgcgttgattaaataccgtgtgcaggtagaagtagagtattttattactttgtgcgaactgccgttgccgcaactgaagggaattgataagagtgtgttcgagtcattgcgcaatatctaccgtaattttacggaagccgatgcgcagcgtatcaaggatattgaaagtgtgaccaaccatgatgtgaaagccgtagagtatttcctgaaagaagagtttgataagttgggtggattggaagagtacaaagagtttattcattttggactgacttcgcaggatattaacaatacatcgatccctctttctatcaaggaagcattggagcaagtttattatccgctgattgaagaactgattgcgcagttgaaaacgtatgctactgaatgggaatccattccgatgcttgccaaaactcacggtcagccggcatctccaactcgcttgggaaaggaaattatggtttttgtttatcgcctggaacgtcagctggctactttgaaggcttgccctgtaactgctaaattcggcggtgcaaccggaaattataatgcacaccatgtggcttatcccgaatatgattggaaagcattcggaaatcagtttgttgcagagaaactgggattggaacgcgaggaatatacaacacagatttcgaactacgacaatctgtcggctatcttcgatgccatgaagcgtatcaatacggtgatgatcgatatgaaccgtgatttctggcaatacatctcgatggaatatttcaagcagaagataaaagccggagaggtgggatcgagtgcgatgccgcataaagtaaatccgattgattttgagaatgcagaaggtaatctcggaattgccaatgccattctggaacacctcgcagtgaaacttcccgtatcacgtttgcaacgcgacttgacagattctactgtgctgcgtaatgtaggtactccgttcgggcatattgtgattgctattcaaagttcgctgaaaggattgcgcaagttgttgctcaacgaaacggctatctatcgtgatttggataattgctggagtgtggtggctgaggctatccagactattcttcgtcgtgaggcttacccgcatccgtacgaagccttgaaggctctgactcgtacgaatcaggctatcacagaaacttctatcaaggagtttattgaaggattggatgtgaacgaagaaatcaaaaaagaattaagagtaattactccccattcgtatacgggaatt

SEQ ID NO: 12662 - DNA, 1401 bp, Bacteroides fragilis
atggaaaagattagtagaacaaaaattgtcgacctgatgaagcgcgaagattttggcgctatggtcaatgtgaaaggatgggttcgcacccgcagaggcagcaaacaagttaactttatcgcactgaatgacggttctacaataaataacgtgcaggtcgtagtcgatctggcgaactttgatgaagagatgctgaagcaaatcacgaccggtgcttgtctgagcgtgaacggtgtgttgacagagtcggtaggcgccggacagaaggctgaagtgcaggctcgtgaaattgaagtgctgggaacttgtgacaatacgtatccgctacagaagaaagggcactctatggagtttttgcgtgagatagcccatttgcgtccgcgtaccaatacttttggagcagtattccgtattcgtcacaatatggctattgctattcataaattcttccatgaaaagggattcttctattttcatacacctatcattacagcgtctgactgtgaaggtgccggacagatgtttcaggtgactaccatgaacctatatgatctgaaaaaagatgaaaacggttctatcgtgtatgatgatgacttctttggcaaacaagccagtttgactgtttcgggacagttggaaggtgagttagctgctaccgctttaggtgcaatctatacgtttggtcctactttccgtgccgaaaattctaacactccgcgccacttggccgagttctggatgattgaaccggaggtagctttcaacgaaattcaggagaatatggatttggctgaagagttcattaaatattgtgtgagatgggctttggataactgtgcagatgatgtgaaattcctgaacgacatgttcgataaaggattaattgaacgtttggaaggtgtacttaaagaagacttcgtccgtctgccatacacggaaggtattaaaatactggaagaagctgttgccaaaggacataaattcgaattcccggtttactggggagttgatttggcttctgaacacgagcgttatctggtggaagaccactttaaacgtccggtgatcctgactgactatccgaaggaaataaaggccttctatatgaaacagaatgaggatggtaagactgtgcgtgccatggatgtacttttccctaaaatcggagagatcattggcggttcggaacgtgagtctgattataacaaattgatgacgcgtattgaagaaatgcatattccgatgaaggatatgtggtggtatctggatactcgtaagttcggtacttgtcctcactccggattcggactgggatttgaacgcttgttgctcttcgtgacgggtatgtctaatatccgcgatgtaattccattcccgcgtaccccacgtaatgccgatttt

SEQ ID NO: 12663 - DNA, 459 bp, Bacteroides fragilis
gtggatactttaagttacaagaccatttctgcaaacaaggcaactgtaaccaaagaatgggttatcgttgatgctacagaccaaactttaggtcgtctgggagcaaaagttgcgaaactgttgagaggaaagtataaaccaaactttactcctcatgtagactgcggtgataacgttattatcatcaatgcagacaaagttaaattaagtggtaacaaatggaatgacagagtttatttgtcttatactggctacccgggtggtcagagagaaatgactcctgctcgtttgatcgccaaacctaacggtgaagacagattactgagaaaagtagtgaagggcatgcttccgaagaacagactgggagctaagttgttgagcaatatgtatgtttacgcaggtagcgaacacaaacacgatgcccagaacccgaaagcaattgatataaactcacttaaa

SEQ ID NO: 12664 - DNA, 384 bp, Bacteroides fragilis
atggaagtagtaaatgcattaggcagacgtaaacgtgctattgcacgcgtattcgtaagcgaaggtacaggaaagattactattaacaagagagaccttgcagagtactttccatcaactattcttcagtatgttgttaaacaaccattgaacaagcttggtgttgctgagaagtatgacatcaaagtgaacttgtgcggtggtggttttactggtcagtctcaggctttgcgtttagctattgcccgtgcactggttaagatcaacgctgaagataagccggcacttcgttctgaaggcttcatgacacgtgatcctcgttctgttgaacgtaagaaaccgggtcagccgaaagctcgtagaagattccagttcagcaagcgt

SEQ ID NO: 12665 - DNA, 948 bp, Bacteroides fragilis
atgaattcacatcaaggattattcggtggaaatattccacaagatgtaactggaaaacaaggcgaaaacgctatcttcattgtctacgggctgaaacaatcgaataacactataaaacaagtaaaagacctatgtgctaacttttccgcactgatacgcagtatgcgtaaccgatttcccgaaatgcaattcagttgtacgatcggattcggagctgatgcctggaaacaactttttccggagcaggacaatcctaaggaattaaagacttttgaaacaattaaaggagctaaatatactgcggtttcaacccccggtgatattcttctacacatccgggcaaaacagatgggactctgctttgagtttgcctccattatcaacgaaaagctgaaaggggttgtagattcaatcgatgaaactcatggattcaggtatatggatggaaaagcaatcatcggttttgtggacggtaccgaaaatccggcagtagatgagaatccctatcattttgcggtgataggtgacgaggacccggactttatcggtggcagttacgtcttcgtacaaaaatacattcacgacatgactacatggaattcacttccggtcgaagcccaggaaaaggtaatcggccgtcataaatacaatgatgtggaattgtcggacgaggaaaagccgcaaaatgcacacaacgctgtcactaatattggagacgacttgaaaatagtacgtgccaatatgccgtttgccaatacttcgaaaggagaatacggaacatattttatcggctatgcaagtaccttcagcaccacccacaaaatgttggagaatatgtttatcggtgaccctgtgggaaacaccgaccgtttactggacttcagcactccgataacaggaaccctgtttttcgcaccttcatacgatctgcttgctaaactcggagag

SEQ ID NO: 12666 - DNA, 1407 bp, Bacteroides fragilis
atgaagaaactgaacttatttattttattctctttttgtttttcgattatcacttggggacaagccaattttgcagcgattgattcacttattaaaaaagaactgcctcaaggttcggaggttggtatttccgtgtatgacctgactgcccgaaagacactttacacctatcgtgataccaaactttcgcgtccggcatctaccatgaaacttttgactaccattactgcgcttgcccggccggacgcagatgaaccttttcgtactgaagtgtggtataaaggtacaatagaacatgatacacttcgaggagatatctatgtggttggcggattcgatccggagtttgatgatgaaggaatgaatgcattggtagaagaggtgattactttccctttctcggtattgaaagggaatatctacggagatatatcgatgaaagattctctctattggggaagcggttgggcatgggatgatactccctcctcttttcaaccttatctatcaccattaatgtatcataaaggcatggtgaaagtgacagctgttccgggggcgacacgaggtgactcggcacgtttaagctttgagccgtcatcgtcttattatactatgaccaatgaaactaaaacacgtacatcctctgccggtaagttttctgtgtcaagaggttggttggaaaataaaaataatcttattgtcagtggaaatgtagagaatagaagaataggtgatgtaaatgtatattcttcgcaggactttttcatgcatacttttgtcgaacgtttacgtaataaaggtatagagatttccaatcattatgctttcgacagtttccggtctgacagtctttctatctgtatggcacgttgggagtgcccggttcaggatgtgatagaccagattatgaaagagagtgataatttgagtgcggaagcactgctttgccgtttaggtgcccgggccacaggtaagaagcaggtttcggctaaggacggaattgaggaaatatatcggttgattcaggatttgggacatgatccggataactataagatagctgatggttgtggattgtccaactacgactacctctctcctgccctactggttgattttctgaagtttgcttattcgcggacagatattttccggaaattatataaggcccttccggttgcaggcatcgatggaacattaaaaaatcggatgaaacaaggggcggcgtttaagaatgtacatgccaagaccggttcttatactgctatcaatacattagccggttatcttaagatggctaatggacaccaagtggcttttgccataatgaaccagaatatactttcagccgctaaagcaaggaattttcaaaataaagtatgtgagatactggcaaaccatcaa

SEQ ID NO: 12667 - DNA, 809 bp, Bacteroides fragilis
atgaatcgaaaaactatcatgattccctttcgagaaagagaaggggtgaggaggaagttcctctttcttcttttttcctgcctcttgtctgtttccctttctgcccagacctatcaggaactttctgaaaaggctgtggagtgtgtcggaaaagacagtctggtacaagctgaagacctcctgaaacaagctttgaaactggagccgaagaacgcccataatgctctgctgttctccaatctcggcttggtacaacgcaagttgggacgttataatgatgctgtcgagtcgtatacttatgcactcaacattgctccgcttgccgtacctattttgttgaatcgtgctgccatttatctggaacagggtatgcaggacaaggcttatgtggactattgccaggtgatggatgtagataagaagaatacggaggcgctgttgatgagggcgtatatttatatgttgcgacgggattataaaggtgcccgtttggattatcagcgtttgctcgaaatcgatccgaagaactataacggacgtctcggattggcgactctggaacagaaagaaaacaagttccgtgaagctctggatatcctgaaccaattactggtggagtttcccgaagatgcggttttgtatgtggctcgtgccgatgtggagcgggatatgaaacatgatgatcttgcattggtcgatctggacgaggccattcgcttggcgcccgactcgatcgatgcctatctgttgcggggtgacatttatctcgatcagaaaaagaaatcgctggcaaaagcggacttcgaaaa

SEQ ID NO: 12668 - DNA, 2082 bp, Bacteroides fragilis
gtgatcatctgtgtgatttgtggtgaaaatcctaaacccactttaaatatgaagaaatacgatataaaaaccactgacgaacagactctccgcaagtggtatcatttaatgactttggggcgtgcgctcgacgagaaggcacccgcctatttgctgcaatctcttggctggtcctatcatgctccttatgccgggcatgacggcatccagcttgctatcgggcaggtttttactcttggtgaggactatctttttccttattaccgggatatgctcactgtgctttctgccggaatgactccggaggaactgattctgaacggtatttcaaaagctacagacccgggtagtgccggacgtcacatgtccaatcactttgccaaaccggaatggcacatcgagaatatctcttctgctaccggtacgcacgatcttcatgcggcaggcgtagggcgtgccatggtttattatgggcataagggggttgccattacttcacatggtgagtctgccacatccgagggatttgtctatgaagctatcaacggggccagcaacgaacgtcttccggttatttttgtattccaggacaacggttatggcatttccgtccctaaaaaggatcagactgccaatcgtaaagtggccgataacttctccggttttaagaacctccgcatcattcattgcaatggaaaggatgtatttgactcgatgaatgccatgaccgaagcccgtgaatttgctatagccaaccgtactccggttatagtacatgccaattgcgtacgtatcggttcgcactccaactctgataagcatactctctatcgcgacgagaatgagttggcatacgtgaaggaagccgatccgctgatgaagttccgccggatgctgttgcgctacaagcgcctgaccgaagaggacctccaacagatagaagctgccgccaagaaagaactggctgccgccaatcgtaaagcgttggctgcacccgatccgattccggagagcatttacgactttgtccttcccgaaccgtatattcctcaaaagtataaagacggacttccggggcctgtcgaaggtgagaagagtttcatggtgaacgccattaatgaaacgctcaaagaggagtttcgccgcaatcctgatacctttatctggggacaagacgtggccaataaagataaaggaggcgtattcaatgttaccaaggggatgcaacaggagttcggtgatgcccgtgtgttcagtgctccgatagccgaagattatattgtgggaacggccaacggaatgtgccgtttcgatcctaaaatacatgtggttattgaaggcgctgagtttgccgattacttctggcctgctgtcgaacagtacgttgagtgtacacacgagtattggcgtagcaacggtaagtttactcccaatattacacttcgccttgcttcgggtggatacattggcggtggattgtatcattcgcagaaccttgaaggggctcttacgactttacccggtgcccgtattgtttgtccgtcgtttgccgacgatgctgccgggctgctccgcaccagtatgcgttccaagggattcactctttatctggagcccaaagcgctttacaactcagtagaggctgctgccgttgtgcccgaagagtttgaagttccctttggtaaggcccgtatccgccgcgaaggaaccgatctgactataattacttatggcaatactacccatttttgtctggatgttgccgaacgtcttgcccgggaaggggtggggagtgtcgaagttatcgatctccgttcgctgattccgttggataaagaagcgatttttgcttccgtacggaaaaccggtaaagtgatggtggtgcatgaagacaaagtcttctccggattcggtgccgaaattgcagcgcagattgccggggaaatgttccgttacctggatgccccggtacaacgtgtgggctccacctttactccggtaggtttcaatccgatattggaacgggctatcctgccgaatgatgaaaagatatataaagcagccaaagagttgctggagttc

SEQ ID NO: 12669 - DNA, 1371 bp, Bacteroides fragilis
gtgtatatggcaagattcgaaataaaaatgcccaagttgggcgaaagtattaccgaaggaaccattttatcatggtcggtgcaggtaggtgacgtggtcaatgaggacgacgtacttttcgaggtgaatactgctaaggtcagtgcggagatcccttctcccgttgccggaaaagtggtggaaatattgtttaaagaaggcgatacggtaccggtaggtacggtagttgccattgtagatatggatggagaaggttccggagaggcatcggaaaccgcaggctctgtagaaacggcgtctgctccaaaggctgccgaggtgtcgggcactgcgtctgttccgaaagttcaggcggaagtaaccgctcccaaagtggaacgttggtattcgccggcagtacttcaattggcacgggaggcgaagatttctcaggaagaactggattcgattcccgggacaggttatgaaggtcggctgagcaaaaaagatatccgcacttacatcgagatgaagaaaggtgctccggcagccgacgtctctactacggtggtttcgacggtttcggcaaataattcgggctcttctcctgttccttctgcagaagtacaaaagaaggctgccgctgcggctcctcaggctcagcatggacaatctgcttctgccgtttcttcagatgcatcggtagaagtcaaagagatggatcgagtacgtcgcatcattgccgaccatatggtgatgtcgaaaaaggtttctccgcatgtgactaatgtggtcgaagtagatgtcacccggctggtgcgttggcgcgaaaagaccaaagatgatttcttccgtcgtgaaggtgtgaagctgacttatatgcctgccattgctgaggccactgcccaggcgttggctgcctatcctcaggtaaatgtctcggtggacggatacaacatcctgtataagaaacatatcaatgtgggcattgctgtttcgcaagatgatggaaacttgattgttcccgtagtgcatgatgccgatcgtttgaatcttaacggacttgccgtagctatcgattcgttggcgaaaaaggcacgggttaataagctgatgcctgatgatatcgacggaggaacattcacaatcaccaatttcggtacgtttaagatgttgttcggcactccgatcatcaatcagccacaggtggctattctcggagtgggtgtcattgagaaaaagccggctgtggtggagactcccgaaggagatgtgatagccattcgccataagatgtacttgtcactctcttatgatcaccgtgtggtggatggttcgctgggaggtaacttcctgcacttcattgccgattatctggagaactggaaagaa

SEQ ID NO: 12670 - DNA, 1503 bp, Bacteroides fragilis
atgtttttattaggttatgatataggcagctcttcggttaaagcgagcctggtagatgcagaaacaggtaaatgtgtcgcttctgcgttctttccgaaaacagaggcgggcatcattgccatacgtcccggatgggcagagcaagaaccggaaagttggtgggagaacttgaaactctccacccgatccattctatcggaatcacgggtagatgccaaagacatcaaagccatcggcatctcttatcagatgcacggtctggtgtgtgtggacaaacagcaacgcacactgcgtccggccattatctggtgcgattcacgtgcggtctcctatgggcagagggcattcgaggcaatcggtgagaagttctgtctggcacatttgcttaattctcctggaaactttactgcttcaaaactggcatgggtgaaagaaaacgaaccggatatctatgaacagatcgataaaatcatgttgccgggagattacatcgccatgaaactgagcggtgaagtatgtacgacaatagagggactctccgaaggaatgttctgggacttccgaaacaaccgcccggccgacttcctgatgcaatattacggaatcgatccttcgctgatagccgacatccggcctactttcgccgaacaggggcgactgacaggtacggctgcccgggaactcgggctacaagaaggcactccgatcacttaccgtgcaggagaccaacccaacaacgctctttccctgaatgtgttcaatccgggtgagatagcttccacagccggaacatcgggagtcgtatacggagtaaacggcgaaatcaattatgatccgcagtcacgtgtcaacacctttgcccatgtcaaccatactgctgccgatccccgcctcggcgtattgctctgtattaatggaacggggattctcaactcgtggatcaggcgcaatgttgcccccgaaggtatttcgtacgccgagatgaaccgttttgcttcatccgttcccatcggcagtgcaggtatcagcatccttcctttcggcaacggagcagaacgaatgctcgataatcgggcaaccggctgcggtatacacggcgtagacttcaacaggcatgacaaatcacatctgatccgggcggcacaggaaggaatcgtcttttcatttaaatatggcatcgacattatggaagagatgggcatccccgttaaaaagatccatgccggacacgccaatatgtttctgagttccgtttttcgcgagacactggccggtacgacggaagccaccatcgaactctatgacacagacggttccgttggtgcagccaaaggagcaggaatgggagcgggcatatataaaaaccatgaagaagcattcgcaactctcgataagctgacagtcgtagaaccggatgccggcaaacaacaggaatacactgatgcttacgcacggtggaaacaatgtctgactcagtccatgcagacagaaacagagaataag

SEQ ID NO: 12671 - DNA, 729 bp, Bacteroides fragilis
atgcatgacatacccaaacaaatcccattggcaaacaatcacatctcagtggactgtgtagtgatcggttttgacggagaacagctcaaggttctgctgattaatcggataggagaggaaaacggaaaagtttatcgtgacatgaaacttcccggaagtctgatctatatggatgaggacctggacgaagcagcccagcgggtcttattcgaactgaccggtatccgaaacgtcaacctgatgcaatttaaggcattcggttccaaaaaccggacgagcaatcccaaagatgtacattggttggaacgggctatgcaatcgaaagtggaacgcatagtcaccatagcttatctgtcgatggtaaagatagaccgggcactggacaagaatctggatgaatttcaagcctgttgggtagcgttgaaagacataaagacattggctttcgaccataacttgataatcagagaggcgctgacttatatccggcaattcgtagagtttaatccttcgatgctattcgacttgttgccgcgtaagttcactgcatctcagttacgaatcctgttcgaactggtatatgacaaaacagtggatgtgcgtaacttccataaaaagatagctctgatggactacgttgtaccgctggaagagaaacaaaccggagtagcccatcgggcagcccgttattataagttcgacaggaagatatataataagacaagacga

SEQ ID NO: 12672 - DNA, 885 bp, Bacteroides fragilis
atgaaagcatttgtattccccggtcaaggtgcccaattcgtaggtatgggtaaggacctgtatgaaacttcagctttagcaaaagaattgtttgaaaaagcaaatgatatcctgggatatcgcattacagatattatgttcaacggtacggacgaagatcttcgtcagaccaaggttactcagcctgctgtattccttcactctgttatttctgcactttgcatgggtgacgacttcaaacctgaaatgactgccggacactcactgggtgagttttctgcattggttgctgccggcgctctgtcttttgaagacggcttaaaattggtttatgcacgtgctatggctatgcagaaagcttgtgaggcaactccttctacaatggctgctattatagctttaccggatgagaaagtagaagaaatctgtgcttctgttaccgctgaaggagaagtttgtgtacctgccaattacaactgtccgggacagattgtaatttccggatctgtaccgggtatcgaaaaagcttgtgaactgatgaaagcagccggagctaagcgtgcgcttccgttgaaagtaggcggtgcattccattctcctctgatggatcctgccaaagtagaattggaagctgccattaacgcgactgagttccacacaccgaaatgtccagtttatcagaatgtagatgccctgccccatacagacccgcaggaaatcaagaagaatctggttgctcagttgactgcttctgtacgttggacacagaccgtaaaaaatatggttgccgatggtgctaccgacttcacagaatgtggaccgggtgccgtattgcagggattgatcaagaagatcgactctacagtttcggctcacggaatagca

SEQ ID NO: 12673 - DNA, 1842 bp, Bacteroides fragilis
atggaaaactatatcgtatccgcccgtaaataccgcccttccacttttgagtcggttgtgggacaacgggcactgaccactacactgaaaaatgctatcgccactcagaaactggcgcatgcttacctgttctgcggaccgcgcggagtgggtaaaacgacttgtgcacgtatctttgccaagaccattaactgtatgaaccttacggcagatggcgaagcctgtaatgaatgtgagtcgtgtgtcgctttcaacgagcaacggtcgtacaatattcacgagctggatgcggcgtccaataactcggtagacgatatccgtcagttggtggagcaagtacgcattccgccccagattggcaaatataaagtatatatcattgacgaggtacacatgttgtcagcttcggcattcaatgcttttctgaaaacacttgaagagcctccccgccacgccatatttattcttgcaacaacggagaaacataagattcttcctaccatcttgtcgcgttgtcagatttacgactttaaccgtatcagcgtagatgatactgtgcaccatttgacttacgtagcgtctaaagaaggaatcacggcggagcctgaagccttgaacgtgattgcgctcaaagcggatgggggtatgcgtgacgctctctctatctttgatcaggtggttagtttcaccggaggaaatatcacctacaagagtgtgattgagaatctcaatgtattggattacgagtattacttccgtttgacagactgttttcttgagaataaagtgagcgatgccttgttgctttttaacgatgtgctcaacaagggattcgacggaagtcactttattaccggactttcatctcatttccgcgacttgctggttagtaaagatgccgccacgctccagttgcttgaggtaggtgccggtattcgtcaacgctatcaggaacaagcgcagaagtgtgcgttacctttcttgtaccgggccatgaagctttgcaatgattgtgacatgaattatcgtgccagcaaaaacaagcgtttgctggtggaactgactttgatacaagttgcgcagcttaccgtcgagggggatgatggtagtggtgggcgtggccctaaacaagctataaaacccgttttcacgcaacccgccgctgctcagcagcctcaggtagcacctattgcttcaccatctcagagtatgaatgctgctacacctgttgctccgcaggctgtgtctcaacaggttggtagtttcccggctgtcaatgtacgtccgggtggagcagtttctccatcgggtgctatgcccgatgcggtacggatggctcaatttaaagaggaaaagaagattcctgtcatgaaaaagtccagccttggactttccatcaagcatccgcaaaaggaggaagaacagcggggagcgggtgttgtccatactgctcaggtgtcgacgcagcagatcgaagaagattttattttcaacgaacgggatctgaattattattggcaggagtatgccggacgtatgccgatcgaacaaaaggcgatagccatgcgtatgcagaatatgcgtttgtcattgctcaacgacacgacttttgaggtagtggtagataatgaaatcgttgcgaaagatttcacggctctgattcccggtatacaagcttacttgcgtggttcgctgaagaatcgtaaggtgacaatgactgtccgcgtcagtgaagcaaccgaaaatgtacgtgctgtcagtcgtgtggaaaagtttcagatgatggctcaaaagaataatgcattgttgcagttgaaggaagaatttgggttggaactctac

SEQ ID NO: 12674 - DNA, 1038 bp, Bacteroides fragilis
atgcttgcatatacatatgtcgaacatgggaagtttgaacttttggagaagttgaggccacaaataaaagatgcccgggatgcaatcgtacgtgtaacacttggcagtatctgcaccagtgatcttcatattaaacatggcagtgttccgcgtgcagttcctggtattacagtcggccacgagatggtgggcattgtggaggaagtaggctccggcgtcatttccgtcagacccggtgatagagtgacagtcaatgtcgaaaccttttgtggagaatgtttcttttgtcggcacggatatgtgaacaactgtactgaccccgacggaggatgggcattaggttgccgtattgatggcggacaggcggaatatgtcagggttccgtatgccgagcagggattgaatcgtattcccgataatgtcagtgatgaacaagctctgtttgtaggtgatgtgcttgcgacggggttctgggctacccgcatttcggagatatccgaagatgatacggttttgattataggtgccggccctaccggaatctgtactttgctctgtgtgatgttaaagaagccacggcgcattattgtttgtgaacggtctgctgagagaatccggtttgttcgtgaacattatcctgacgtgctggtgacagaacctgaaaactgtagggattttgtactctgcaacagcgatcatggtggagcggatgtcgtgttggaagtggcgggttccgaagaaactttccgtctggcgtgggagtgtgcccgccccaatgccatcgttaccatcgtagccctttatgacaaacctcagtttttacctttgcccgatatgtatggcaagaacttgatcttcaaaacaggtggggtagatggttgcgattgtgctgagattctcagtctgattgagcaaggcaggatagacactactcctcttattacgcataggtttccgttgaacgaaatagaggaagcttatcgtatctttgaaaacaagctggaaggagttatcaagatagctataacgggaggcagg

SEQ ID NO: 12675 - DNA, 969 bp, Bacteroides fragilis
gtgcccgattatatcctgactaatgatgagatatccagaattgtagataccaccgatgaatggatcatgggacgtatcggaatcaaagaaagacgcatcctgaatgaagaaggactcggcacctcatacatggcacgaaaagctgtcaaacaactgatgcaacgtactcaaagtaatccggatgatattgacctggtaattgtagctaccaccactcccgattatcggcttccttcaacggcttccattttatgcgaaagagtggggttgaaaaatgcatttgccttcgacatgcaagcggtctgcagcggtttcttatatgcattagaaaccggggctaactttatccgttcgggaaaatacaaaaaagtcattattgttggtgccgataaaatgtcgtctgtgatagactataccgatcgtgccacctgtcctattttcgctgatggtgcagcagctttcttgttggaacccacaacagatcatttaggagttatcgattccgttttaagaacagacggcaaaggacttccttttttacacatgaaagccggtggttcagtttgttccccttcttattttacagttgacaaccacatgcattaccttcaccaagaaggacgtacagtatttaaatatgctgtagccaatatgtcagatgcatgtgagtcgatcatcgaaagaaaccaactgacaaaagatgaaatagactgggtcgttcctcaccaggccaatcaacgtatcatcagtgctgttgcccaacgtctggatgtaccattagaaaaggttatgatcaatatcgaacactacggcaataccagtgcaggtacgcttccattatgcatttgggatttcgaaaataaactcaaaaaaggtgataatttgattttcaccgctttcggagccggatttgcctggggagctgtttacgttaaatggggatatgatggcaagacaaataacgcatgt

SEQ ID NO: 12676 - DNA, 969 bp, Bacteroides fragilis
atgtatccgttaaaattcgaacccattctgaagcagacgctttgggggggcgacaaaattatcccgttcaagcatttgaatgatgatttgaagggagttggggaaagctgggaaatatccggcgtagagaacaacgaatctgtcgtagctaacggcccggataaaggccttacactgaccgatatggtgaaaaaataccgtgaggaactggtaggcgaagcaaactatgcccgttttggcaatgagtttcctttgctgataaagttcattgatgcgaagcaagacttgtctatacaggtgcatcccactgatgaactggctaaaaaacgccacaactcaaaaggtaaaactgaaatgtggtatgtagtgggtgctgacgaaggagccaaactgcgttcgggattttctgaacagattacaccgaaagaatataaagaccgcgtgcataataatacaattacagatgttcttcaggaatatgaaattcatccgggagatgttttcttcctgcctgcagggcgtattcacagtattggtgccggggcatttattgccgaaattcagcagacgtcggatatcacttaccgtatttatgattttaatcgtaaagacgctaatggaaaaacacgtgaattgcataccagccaggcacttgatgcgatcaattatgaagtgctcgatgactatcgtaccaaatatgaacctttgaaagatgaaccggttgagttggtggcatgtccttatttcacgacttcggtttatgatatgagtgaacagatcagctgtgattattcggagctggattcattcgtaatctttatttgtatagaaggctcttgcctgatgacagataatgaaggcaacgaagtgcgactgggtgcaggagaaactgttttgcttcctgccactactcaggaattgaccattgtgcctcaagaagggaatgtgaagttattggaaacatacgtg

SEQ ID NO: 12677 - DNA, 3033 bp, Bacteroides fragilis
ttggctggtttagttgtatcagcgcttttgggagtaggagcgaaagttcctgcttctatggatgcccctgtccgtgaggtttttcatactcctcccggtatgtctgctcctatagaacctttgttgctttatcaggcttcccaggacgaaaagtgctgtcactgggtagattctgtctacaatcggatgaatctgagagagaaggtggggcaattgtttatttacaccattgcgcccgtgcagaccaagcgtaatatgcagttgttgcgtgatgcggttcatacttataaagtcggtggattacttttttccggcggaaagatacagaatcaggctacattgaccaacgaagcgcaacggatggcccgctgtccgctgctgattaccttcgatggtgaatgggggctttccatgcgtttgcgtggtactcctgtctttccgagaaacatggtattaggatgtatccaggacaaccgtttgatttatgaatatgggcgggagatggcccgacagtgtcgtgagatgggagtgcaagtcaattttgctccggtggcagatgtgaatatcaatccggacaatccggtcatcaatacccgttcgtttggtgaagatccggtgaaagtggccgataaggtgattgcttacgcttcggggctggagagtggtaaagtcctttctgtctgcaagcatttcccgggacatggtgatacggacgtggattctcataaggcactgcctgtgttaccatttacgcgtgagcgcctggacagtgttgaactgtatccttttaaagaagctattcgtgccggggtcagtggtatgatggtaggacacttgcaggtacctgtcatcgagcctataggtgatttgccttcatccttatcccgtaatgtggtttatggacttctgaccgaggaattggcatttaagggacttatctttaccgatgcccttgctatgaagggagttgccggcaataagagcgtatgtttgcaagctttgcaagccggtaatgatatggtgctggctccccgcaggctgaaagaagaaatggacgctgtattggaagcggtggaaaaaggagaacttccggaagaagaaattaatgcaaaatgtcggaaagtactcacttacaaatatattttggggctggaacgtaaaccgtttgtgaaactatcgggattgggaacccgtattaatacacctcagacacgtgatttgattagcaggctgaatctggctgcaattactgtgctgaataataaaaatgatgtattgcctttgcatcccgatctgaaagaggcggccatactgaatgtaggcaaaccggaagagattgagccttttgaccgcaaaatgaaaaagtatacttcatttgcccgttttcaattgcgtaaagatctgccggaagccgagcaacaaaagttgcgtgactctcttgctgcctaccggcgtgttatcgttactgtgacagagcagcgccttgctccctatcagtcgtttttcgccaagtttgctccggaatctcctgtaatatatgtattctatacgccggctaagtcgatgttacagatacagcgggctgtatcggctgctgaggctgtggtattggctcatgcctctcgtgacgacgttcaggaacgtgtggctgatttacttttcggtaaagcaacggcagatggaagactgtcggccagtattggcggattgtttcctaccggttcgggtgttacgattactccgcatactcctttccactttgtacccgaagaatatggaatgaaatcggaagtgctccgccgtatcgacacgattgctttggagggaatcaaggagggagcttatcccggttgtcaggttctggtgatgaaggatggtaaggctttgtatgaccggtgcttcggataccatacagatgcaaatagcgagaaagtgaagccgacggatatttatgatttggcttctctgtctaaaacaacaggaacgttgttggccataatgaagctttatgataaaggtcgtttcaatctgaccgataaagtttcagattatctgcctttcctgcgcaagacgaataaagagaacctgaccattcgtgaattgctcttgcatcagtctggcttaccttccggtctgcttttctatcaggaggccattgacgggaaaagctataaaggttcgctgttcaagcagtcgaaagatgccttacatacggtacggttgggtgtccgtacctggggaaatccaagattccggtttaataaggggatgacgtctaaagagaagaacggtgattatactcttcaggtttgtgacagtttatggttgaaccggtcgttccgtgaagagatacggaagaaaatagccgaagcaccgttaaaagacaagagttatcgttatagtgatgtcgggtttatcttgttgcagatgcttgcagaagagcttagtggaaaaccgatggatgaatatttatggcaagagttctatcagccgatgggattggaacatactgcctatctgccgttgcgttacttcgataaaaaagaggtagtaccttctgcagtagaccgtttcctgcgtaagactactttgcagggatttgtccatgatgagtcggctgctttccaggggggaatttcgggtaatgcggggcttttctctaatgctcgtgaagtcggacgtatttatcagatgttgctcaatggaggtgagttggatggaagacgttatctcagcaaggaaacttgtgctctattcactaccgaaaagtctaaaatcagccgtcgcggtttaggttttgataagccggatgtggtgaatgaaagtaaaagtccgtgcgctgcttctgttccggttactgtttatgggcataccggatttacaggaacttgtgcctgggtagatcccgacaatggcttgatttatgtatttcttagtaatcgtacctatcccgatgcttgggtgaacaaattatctaaacttgagattagggaaaaaattcaagaaacgatttacgaagcgatgaaagaaaag

SEQ ID NO: 12678 - DNA, 741 bp, Bacteroides fragilis
atgaatgaaaaggtagcaatggtaacgggtgcagcggcaggtatcgggctggcctcggcagaagcatttgcaaaagtaggtgcaaccgtagtattggtggacatcaatgaaccgaaagaacaagccgggaagttggtttcagaagggtataaagctgtggcatatcgctgcgatgtgtccgacatgcgggctgtaaaggagatgatcgactggaccgttgcgacttacggcagactggacgctgcattgaacaatgccgggatacagaccccgcaacgaccgatggccgagattaccgacgaggagttcgaccgtacggtagctgtcgatctgaaaggtgtctggaactgcatgcgttacgagattatccagatgctgcaacaaggcggtggtgctattgtcaatacctcatcgcaaggcggcgttacgggattccccggacaagcggcctatatcgcctgcaagcatgcggtaatcggtctgacccgtacggctgccatcgactactcggcaaaaggaatccgtatcaatgccgtctgtccgggtgtgatccgaacacctatggcggaagaactgatacggcgtaaccctgatctggaaaaggaactggttcgtgatattcctgccggacgtctcggtaagccggaagagatagccaatgccgtattgtggctttgctcaccgcaggcaagtttcgtagacgggcacgcccttttagtggacggggcattttccatccat

SEQ ID NO: 12679 - DNA, 1068 bp, Bacteroides fragilis
atgaagttacaagcaatcgccatactgacattcctgacctttgcgaatgtcatggcacaagaaacgacaacaacaaaatatataaattcaaccgatatggaagcattgaaattgacgcaggaatgggataagacctttccgcagagcgataaggtggaacatacgaaaatcatgtttcacaaccgttacggcatcacgcttgccgcagacctttacaagccgaaaaatacgcaaggacgtctggcagccattgccgtcagtggcccttacggtgcggtgaaagaacaagtgtcaggccgttatgcccagacacttgccgaacgaggctttctgaccattgctttcgatccctcctattacggcgaaagtggtggtacacctcgctatcttacgtcacccgaaatcagcacggaggatttcagcgcggcagtcgattatctgacatcccgtgcggacgtcgatccggaacgtatcggaatcttaggcatctgcggttggggcgggtttgcacttaatgctgcggccaatgaccctcgtatcaaagcgacggtaacatccactatgtatgatatgagccgggtaaatgccaacgggtatttcgacgccatgagctccgatgaccgttacaaattgcgcgaacaactcaacgcacagcgtactgaggattatcgtgatgacagctatgtacgcgatggtggcgtacttgaccccgtaacggacgatactccgcaattcgtcaaggagtatcacgactactacaagacggaacgaggctaccatcgccgttcaccgaactccaacgagggaatcacgaaaacaagcgtattggcattcatcaatatgccgctgctcacctatatcagcgaaatccgcagtgccgtgttgatgattcatggagaaaaagctcattcccgctatttcagtgaggatgcctacaaacggctgacgggtagtaacaaggaactgttgattatacccggagccaaccatgtcgatttgtacgataatctcaacgtgattccgttcgacaagatagatgctttctttaagaatgccttaaaggagaaa

SEQ ID NO: 12680 - DNA, 834 bp, Bacteroides fragilis
atgctaatggcatacaacctctacaaggaggatgtgtcctctatttatgaccctgctacggctattgaagtttatcataactatactcttttgcatgacgatttgatggatcgggctgatatgcgccgcggcaagacaactgtccataaagtatggaatgacaatactgcgattttgtcaggagacgctatgctggtgctggcctatcagtatatggctgccagttcatcggaacacctcaaagaagtgatggatttgttcagcctgacagcacttgaaatttgtgaggggcagcaaatggatatgaattttgagtcccgtgaggatgtaaaggaagaggagtatctggaaatgatccgtttgaaaacggcggttttgttggctgccagtttgaaaatcggagctattttaggtggagcttctcctgaggatgccgaaaatctgtatgattttggcatgcagatcggagtagccttccaattgcaggatgatttgctggatgtatatggtgatcctgctgtgtttggtaaaaacatcggtggagacattctatgcaataaaaagacgtatatgctgattaaagcactggaacgtgccgaccgggatcagttggagggattaaatcattggttaagtgcaacttcattctgtcccgaagaaaaaatcagtgctgtgaccgaattgtacactcagattggcatcaaggctgtttgcgaaaacaagatgcgtgagtattacactcgtgcgatgacaagcctgggcgccgtgtctgtcattgaggataagaagagtgagctgaaaaagttgatgaagcatttaatgtaccgcgagatg

SEQ ID NO: 12681 - DNA, 633 bp, Bacteroides fragilis
atggctaaagatttagccaaagaaataggatacatctacatcgacagtggagcgatgtatcgtgccgttacattatatagtatagaaaatggcatctttcacggtgatacaatcgatacggatgaattaaaacgacgtatcggcgacatccacatctctttccggatcgatccggagacaggacgccccaacacttacttaaatggagtgaatgtagagaacaaaatccgcacaatggaggtttcttctaaagtaagcccgatcagtgcactcggttttgtccgggaagcgatggtggctcagcaacaggaaatgggaaaagccaagggtattgttatggatggtcgtgacatcgggacgaccgtattcccggatgcagaattaaaaatattcgtaaccgcctccgccgaaattcgtgcccaacgccgctatgacgaactgaaagccaagggtcaggaaaccggcttcgaagagatactggaaaatgtgaagcaacgtgaccacatcgatcagacacgtgaagtcagcccattgaagaaagccgacgatgctttgctattagacaacagccatctcaccatcgccgagcaaaaagagtggctgatggcagaatatcagaaagcgataaaagca

SEQ ID NO: 12682 - DNA, 1017 bp, Bacteroides fragilis
ttgttatctttgcaacgtcaattaaaaaacatgattgttatgggaacagttaagtgtgttggtattttaacttccggtggtgatgcaccgggaatgaacgctgctattcgtgcagtaacgcgtgcagcaatctacaacggactgcaagtaaaaggtatatatagaggatacagaggcttggtgacaggagagatcaaggagtttaagagtcagaatgtaagtaacatcattcaactgggaggaacgatcctgaagacagcacgttgcaaagagtttacaactcccgaaggacgtaaaatggcatacgacaatatggtgaaagaaggaatcgatgcccttgtagtgatcggtggcgacggttcgctgaccggagcacgcatctttgcacaagagtatgacattccatgcatcggacttccgggaaccatcgacaatgacctttacggcaccgacacgaccatcggatacgatacggcgctgaacactattttggatgctgtcgacaaaatccgtgacacggccacttctcacgaacgtctgttcttcgttgaagtgatgggacgtgatgccggtttcctggcattgaacggtgcgattgcttccggagcagaagctgccatcatccccgaattcagtacagaagtcgaccaattggaagaatttataaagagcggtttccgtaaatcaaagaacagcagtatcgtactggtagccgaaagcgaactcaccggaggagctatgcattatgccgaacgcgtgaaaaacgaataccctcaatacgacgtccgtgtcaccattttagggcacttgcagcgcgggggtagtccgacggcacacgaccgtattttggccagccgtctaggcgcagccgctatcgacgctattatggaagatcaacgaaatgtcatgattggcattgaacacgacgagattgtatacgttccgttcagtaaagccatcaagaatgataaacctgtcaagagagatctcgtcaatgtattgagagaactgtctatt

SEQ ID NO: 12683 - DNA, 1395 bp, Bacteroides fragilis
atgaatcaagacacaatttgcgccatagcaaccgctcaaggaggagccatcggaagcattcgtgtttccggtcctgaagctattaccatcaccggccgtatttttaccccggccaaatccggaaagctactgagtgaacagaaaccttatacgcttactttcggccgaatttataacggagaagaaatgatagatgaagttcttgtcagtctcttccgggctccacactcttatacaggggaagacagcactgaaatcacctgtcacggatcatcttatattttacaacaagtgatgcaactactgattaagaacgggtgtcgcatggcgcaaccgggagaatatactcaacgagcgtttcttaatggtaaaatggatttaagtcaggccgaagccgttgccgacctgattgcctcttcctctgctgctacccaccgtcttgccttgagtcaaatgcgaggtggctttagcaaagaattgacaactctacgtgagaaactgctgaacttcacttcaatgattgaactggagctggacttcagtgaagaagatgtagagtttgcggaccgttccgccctacgccgactggctgacgagatagaagaagtcattgcacgtctggccaattcgttcagtgtagggaatgtcataaaaaatggtgtaccggtagctattatcggagaaaccaatgcaggaaaatcaactctactgaatgtcctgttgaatgaagacaaggctattgtaagcgatattcacggcactacacgggatgtcatcgaggatactgtgaatataggtggtatcactttccgttttatcgatacagccggtatccgggagaccagtgatacgatagaaagcctgggtatcgaacggacttttcaaaaactcgatcaggcagagattgtactgtggatgattgattcggctgacgcaatttcacagttaacactgctctccgataagattcttcctcgttgtgaacacaaacaattgattttagtctttaataaggtagaactgataaatgaaactcagaaaaacgaacttgcctcacaattttctgagcatataggttcggaaatagaatctatttttatttctgcgaaacaacgtttgtacacggatgaactccaacagagactcgtagcagccgctcatttaccagcagtcacccagaatgatgtcattgtaacaaacgtccgccattacgaagcactaacacgtgcgctggatgcaattcaccgggtacaagaaggattggacgcaaatatctccggagattttctgtcacaagacatacgcgaatgtattttccatttatccgatatagcaggggaagtgacaaatgatatggtgctgcaaaatatatttgcgcatttctgcatcggcaaa

SEQ ID NO: 12684 - DNA, 1110 bp, Bacteroides fragilis
atgttagaatgtaaaacagtaacattgagaacacgtcctttgaaaaacgggatgctttcttactatctggattattatccaggctatcgtgaccaggaaacaatgaagaccatccgccacgaaggattgaacatttatatttatgccaatcccaagaatgagcatgaacgtaacttcaatgccactatgtcggaaaaggcagaagccatccgatgcagacgctttgaatctatcgtaaatgacaggtatgatttctttgacaggcacaaactcaaagcggattttctggaatactaccgcaggcaacttcgtaagcatgaccaaaagtgggaatttgtataccaccatttctacaacttcgttcatggcaaatgtacttttgaagaaattgatattgacctttgtaataagtttcgtgagtatctgctaaatgccaagcaactcaggcgtgacggtcacatttcaaagaactctgcttccggctattggtcaacattcaggggacttttgaaaatcctttatcgcaatcggctaatcaaaaccaatatcaatgactttttggataaaatcgaaacagaagatactccaaaagattatctaagtgtggaagaattatacaaattggcagaaacaccttgcaaaaagccaattctgaaaacagcggcattgttctcatgtctgaccagtcttagaatcagcgacatactatcgttgcaatggcatgaaatcattgactttgcagctggaggaaaatgtgtccatacaattacccaaaagaccaaaacagaggacatcattccaatcagtgacgaagccctgcaattaatcggctattctccggaaaaaaccggattagtatttaaaggattgaaacgaagttggacacagcaacccatgaaagagtggattcgcgaagccggtattaccaagaatatcactttccactcctaccgaagaacatacgcaacacttcaaggagcagccggcacagacatacgtaccattcaaagtaacatggcacataaaagtattaccacgacacaacggtacatgaaagttgtggacagcaacaagcgtgaagccagcaacagaatctctttaatccgcaag

SEQ ID NO: 12685 - DNA, 1338 bp, Bacteroides fragilis
gtgttaatgaataagctgttaataactctttgccttgcagcgtcgtttatgctttccggttgttacaattccggtgagccccgcgaaaaggtattgaaaatttataactgggccgattacatcggcgacggagtgctggaagatttccaggcatattataaggagcagacaggcgaggatattcgtattgtctatcaaactttcgatatcaacgaaatcatgttgaccaagatcgaaaaagggcaagaagattttgatgtggtatgcccttcggaatacatcatcgagcggatgttgaagaaagacttgctgttgcccatcgacaccgtttttccccattcgcccgactacatgaatgacgtgtctccttatatccgggaacagatcgataagttgagtcaacccggacgcgttgccagtcattatgccgtgtgttacatgtggggaacggccgggatactgtataacaaggcttttgttcccgatgcggatgccgaaagttggagttgcctttgggatcggaaatatgccggcaagatattgatgaaagacagttaccgcgatgcgtacgggacggccatcatttacgcacatgcccgtgatctggccggaggcaaggtgacagtagaggatctgatgaacgactattctccccgtgcaatggagattgccgaaaaatacctcaaggcgatgaaacccaatatagccggttgggaggcagacttcggtaaagagatgatgaccaaaaataaagcatggcccaatatgacctggagcggagatgccaaatgggccatcgaagaagcggatgcggtaggagtggacctggactatgtagtgcctcgggaaggaagcaacatctggtatgacggctgggtgattcctaagtatgccggtaatccggaagctgccagctatttcatcaactttatgtgccgtcccgacattgctttgcggaatatggaagcgagcggttatgtaagtgctgtggcttcgcctgaaatcatggaggcgaagacagacaccaccctgacttattattcggatttgagctatttcttcggaccgggagcagacagcctgcagattgacaagatacagtacccggaccgtaaggtggtagaacgttgtgccatgattcgtgatttcggcgataagacgaaagatgttcttgaaatctggtcgcgcattaagggagacaatctgggagtgggcattacgatcctgatcttcgtggtagtaggtgtgatgagcggctggatgatttataaacggatacagcgctataaacacaagaagatgcagaggcgccggagccgtaggcggaagaaacagagg

SEQ ID NO: 12686 - DNA, 801 bp, Bacteroides fragilis
atgatagaacaactgaagaacaataaaacaggaaattttttcctgttagccggtccttgcgtcatcgaaggcgaagagatggctatgcgaattgcagaaaaaatagtaaatatcaccgataaactgggtattccctatgtatttaaaggttcataccgtaaagccaaccgttctcgcttggattcattcatgggaattggtgatgaaaaagcgttgaaagttctcgagaaagtacacaataccttcggagtgcctaccgtaaccgatattcacgcagccgatgaagcagccatggcagccgattatgtagacatcctgcagatacccgctttcctctgccggcaaacggacttactggtcgctgctgctcaaaccggaaaaacgattaatatcaaaaaaggacagttcctctctccgcttgccatgcagtttgcagcagacaaggtgatagaggccggcaacaagaacgttatgctgactgaacgtggaacaactttcggttatcaggacctggtcatcgactaccggggcataccggaaatgcaatctttcggttatccggtcatcctggatgtaactcattcattacagcaacccaaccagacgaacggtgtaacaggcggtatgccgcaattgatcgaaacggtagccaaagccggcattgccgtaggagccgacggtctctttattgagacacacgaaaatccggcagtagccaaaagcgacggtgccaatatgttgaaacttgaccggttggaaggcttattgactaaactggtgaaaattagagaagcaattatg

SEQ ID NO: 12687 - DNA, 1149 bp, Bacteroides fragilis
atgttgactcaaattatcaatggacgcatatttactccgcaaggttggttgaacgaaggttctgtgttgatgagagatggaaaaattctggaagtaactaattgcgacctggcgctgatcggtgccaatctggtggatgccagaggaatgtatattgttcccggctttgtttgtatgcatgcccatggtgggggaggacacgattttacagaatgtaccgaagaggctttccgtacggcgatagctgcacacatgaagcacggtgccaccagctttttcccgacactttcttcttctccgttctccgaaatacgcaaagctgtagatatatgtgaaaaactgatggccgaacccgatagcccgatactcggcttacatgtggaaggcccttacctgaaccgtaagatggcgggagaacagtttgcaaaccaagtgaaagaagtcgatgtggcagaatacacctctttgcttgaaagcaccgattgcatcaagcgttgggatgcctctcccgaactgcccggagcacttgactttgcacgttatctgaagtcgaagggaattgtaggagctgtttcgcatacggaagccgaatatgatggcataaaggaagcatacgaggcgggatttacacatgctgcgcacttctacaatgcaatgccgggctttcataagcgtcgcgaatataaatacgagggaacggttgagagtgtatacctgaccgatggcatgactatcgagctgattgctgacggcattcatttgccttccactattttgaaactggcttataagctgaagggtgtggagcatacttgtctggtgaccgacgcactttcatatgcggctgctgaaggtaaggcgatcgacgatccccgtattattatagaagacggtgtgtgcaagcttgccgaccgttcggccttggcaggtagtattgctaccatggatcagttggtacgtacgatggtgaaggctgatattcccctggcagatgccatacgtatggcttctgagactcctgcccgtattatgggagtttatgaccgtaaaggatctctccagaaggataaagatgcggatattctgattctggatcgtgatctgaacgtcaaggcggtatgggctatggggcagttggtgaaagagtcg

SEQ ID NO: 12688 - DNA, 1863 bp, Bacteroides fragilis
atgaatagaagactttctatattcgtaatcattttgtttttcctgttacctgttgccgcacgggcacaggtaacaggttctttccgcttcgcacagttgacagacatacatctcaatcccaacaatccgaagccgacagaagacttgaaacgttccgtcgaacaaattaacgccacaccgggagtagactttgtattagtcactggagaccttaccgaagagggtgatcgcacgaccatgttagttgtaaaatctatcctggaccgactgaaagtgaaatattacgttataccgggcaaccacgaaacaaagtggagtgattcaggttgcactgctttcagcgaaatattcgggggagaacgctttaaattcgaacacaaaggattcttgtttttagggtttaattcaggaccactgatgcgtatggcctacgggcatgtagtaccgcaagacatcacatggatgaaacaagaaatggataaagttggaaaagataagcctgtaatcctggtcacccattatcctatgcaggatggggatgtggacaattggtatgatgttaccgatgccgtacgtccatacaatatccgcacttttatcggaggacactatcatcgtaatcgcttcctctcatacgacggtataccaggtattcttacccgctcaaacctacgtgacaaaaacggttcaagcggctatagcatttttgatatcactccggactctatcattacttacgagcaacgcatagatgaaccaatgaaacgctggactgccctatcactcaccaaatcttattataaccgtaccggaaaggcagtgaaatatcccagtttttcggtgaataaagagtatccacaagtaaaaataggctggcaggtgcagaccggtgtcggcatctattgttcacctgccctctggaaaggcagagtttatgtaggtgatgacttgggtttcctaacttgctacaccctgaaggaaggacgtaaattatggagtttccaatcagggaaacgcattgtgggcacacctgccgcaaccgacgggattgtggtttttggctccgctgaccacaacatctacggattggatgctgtaaccggtaaagaacgctggagggttacggttgcccaaccggtattgggagcggtaactattgaaaaaggtatcgcttacataggtggcagtgattccacttttcgcgccattcgtatcaaaaatggtaaagtagtatggacttataccggtatcaaaggttacatcgaaacaaaacctctggtagaaggtgacaaggtcatattcggtgcatgggacaatactctctatgctctcaataaatccaacggcaaggaactctggaagtggaccggcggactgacccgtatgcacttctcccctgctgccgtatggcctgtagcagcacatggaaaagtattcatcaccgacccacaacgtgccatgaccgctatcagcctaaaaacaggaaaaacagtttggcgtaccttccagtcaatggttcgagaaacaatcggtctatccgcaaacaaaaatcagatttatagcaaaacgatgaatgacagtgtcgtatgctattccaccatcagcgacactccgaaagagatctgggcatctaatgtaggctttggctacgaacatgctccatccatgcagatggaaaaagacgatatagtattcagtagtaccaaagaaggacttatctttgcattggatgcaagtaccggacaagtattgtggaaacataagatcggcaattcactgattaacaccgtactccccatcagccgccatcaagtactgtttacagccaccagtggtgaaacaggcttacttgagtggaaagaa

SEQ ID NO: 12689 - DNA, 1056 bp, Bacteroides fragilis
atggaaataataaaaaccggattggctgcttttggtatgtcgggacaggtgtttcacgctccatttatcagcacgaatcctcattttgaactttacaaaatagtagagcgtagtaaggaactctctaaagaacgatatccgcaagcatcaatagtacgtagttttaaggagttgacagaagatcctgaaatagatcttatagtcgttaacactccggacaatacacattatgaatatgccggaatggctcttgaagccgggaaaaatgtagtagttgagaaaccgtttacttctaccaccaaacagggtgaagaattaatagctttggctaagaaaaaaggtttgatgctaagtgtatatcagaatcgcagatgggatgcagatttcttaacggtacgtgatattcttgccaaatccttattaggacgtttggtagaatatgaatctacatttgctcgttatcgtaattttataaagcctaatacttggaaagagaccggagagtccggtggtggattaacctataatttgggttcacatctgatcgatcaggctattcagctttttgggatgcctgaagctgtttttgcagatttaggtatcctgcgtgaaggaggaaaagttgatgattattttataattcatctgttacatccttcgttggcaccaaatgtgaaaatcaccttgaaagcaagttacctgatgcgagaagccgaaccacgttttgccttacatggaacactaggttcgtatgttaaatatggagtcgataaacaggaagctgctctattagctggtgaaatacctgaacgtccgaattggggagaagaatcagagcaggaatggggattattacatacagaaataaatggaaaagaaatctgccgaaaatatccgggcatagccggaaattatggtggcttttatcagaatatttatgaacacttatgtttaggacaaccattggaaacacatgcacaagatattttgaatgtgatacgaataatcgaagcggcttatcaaagccatcgagaaaataaaattgtcaatcttaaa

SEQ ID NO: 12690 - DNA, 1212 bp, Bacteroides fragilis
atggtacaaagtcagactcagccggttcgtagaattgcatttcctatattaattgcattaagtgtatctcactgtttaaatgatcttttgcaatctgtcatttcggctgtatatcctctttttaaagaagatctttcgttaagtttcgctcagattggattgataaccctagtttaccagatgtctgcttctgtatttcaaccactgaccggccttatttttgataaacgtcctatagcttggtcgcttcctatcggaatgagtttcactttgataggtatgctgaatctggcttttgcatccaatctgaattggctgcttgcttctgtctttatcattggaataggttcgtctgttctccatccggaagcatcccgtatcacctttttggcttcgggagggaaacggggattggcacaatcactttttcaggtaggtggaaatctggggggatcgttaggccctttattagtcgcattattagtggctccttatggcaggcatcatattacactatttgctatccttgctttggcggctatttgtgtaatgtttcctatttgccgctggtaccgttcttatctgaaccatcttaaaaaacgtccgatccatgcaaaagcatatatcgagcgcccgcttcctcctcaaaagactgtatttgctatcacgatactgatgattcttatattctctaaatatatttatatggcaagtctgaacagctattatacattttatctgatccataagtttaatgtaagcattcagcagtcgcaactctttttatttgtatttctggtagccactgccattggtacattgatgggaggccccattggagacaagataggccgtaaatatgttatttgggggtcgatcctgggaacagctccttttagtttattgatgccacatgccggactcgtatggactataattcttagtttctgtgtcggcttaatgctttcgtctgcttttccagctattctgttatatgcacaagagctgcttcccaacaagttaggactgatttccggactttttttcggttttgcatttggagtggcaggcattgcatctgctgttcttggcaatatggccgataagtttgggattgatgctgtatataatgtttgtgcatttatgccgttgttaggattggtgacctggtttttaccggatctgaagaaagtgagaagtgaaaaacaagaa

SEQ ID NO: 12691 - DNA, 1737 bp, Bacteroides fragilis
atgacagatataaaaaacgaagaagcaggcgaaaagaaaagcctcaatttcattgaacaggcagtagaaaatgatttgaaagctggaaagaacgggggaaaagtacaaacacgcttcccgccggaaccaaacggttacctgcacatcgggcacgctaaagccatttgtctcgacttcggcatcgctgccgcacacggcggtgtgtgcaaccttcgtttcgacgacactaacccgacgaaagaggatatggaatatgtagaagccatccaggaagatatccggtggctgggattccaatggggcaacgtatattatgcctcagattatttccaacaattatgggactttgccgtcactctgattaaagaaggcaaggcctacgtagacgagcagacttcagaacagatagcgcaacagaaaggcactcccacccaacccggtgtcgagagtccgtaccgcaaccgtccgatcgaagagagccttgccctgttcgaaaagatgaatagcgacgaagtcaaggaaggttccatggtgcttcgtgccaaaatagacatggcaagccccaacatgcacttccgcgacccgatcatgtaccgcatcctgcatgtggcacaccaccgcaccggaacccaatggaaagcctacccgatgtatgactttgcacacggtcagagcgactatttcgaaggagtcacccactcactctgtacactcgagttcgtgcctcaccgtcctctttacgatctgttcatcgactggctgaaagaaggcaaggacctggacgacaaccgtccccgtcagacggagttcaacaaactgaacctgaactacacgctgatgagtaaacgcaacctgctgatcctggtgaaggaaggactggtgaacgactgggacgatccccgtatgccgactctctgcggattccgccgtcgcggctattctcccgaatccatccgtaagttcatcgataaaataggttacaccacttacgatgcactcaacgacttcgccctgctcgaaagcgccgtacgcgaagacctgaatgcccgtgccacccgtgtatctgccgtactgaacccggtgaaactgatcatcaccaactatcccgaaggacaagttgaggaactggaagccatcaacaaccccgaagatacgacagccggaagccataccatcgaattcagccgcgaactgtggatggaacgcgatgacttcatggaagacgcaccgaagaaatatttccgcatgactccgggacaggaagtgcgtctgaagaatgcctacatcgtaaaatgtacaggctgcaagaaagacgagaacggcaccgtgaccgaggtatactgcgaatacgatcccaacaccagaagcggcatgcccgacgccaaccgcaaagtgaaaggcaccctccattggctcagctgcaaccattgcctgccggcagaggtgcgtctgtacgaccgtctctggaaagtggaaaacccgcgcgacgaaatggcagccatccgtgaagccaaaggttgcgacgccctcgaagccatgaaggaaatgatcaatccggattcactgaccgtactgccccattgctatatagagaagtacgtggccgacatgcccgcgctctcttatctgcaattccagcgtatcggttatttcaatatcgacaaagattccacccccggacatctggtattcaaccgcaccgtaggactgaaagatacctggggaaagatcaataaa

SEQ ID NO: 12692 - DNA, 1533 bp, Bacteroides fragilis
atggaagatataaataaagcttatgccacgttcgccgaacgtgatcgcatcgcttctctgggtggaggcgcagccaagattgatatacagcacgaaagcggaaaaatgaccgcccgcgaacgcatcgacatgttgctggataagggtacatttgtagagctggacaagctgatggtgcaccgttgcaccaactacggcatggaccggaacaagattccgggagacggcgtcgtgtcgggttacggaaagatcgacggacggcaagtatttgtctatgcctatgacttcaccgtttacggcggttcgctatcggcatcgaatgccaagaagatagtcaaggtgcagcaactggctttaaagaacggtgccccgatcattgcactgaacgattcgggcggtgcacgtatccaggagggaatcgaaagcttgtcgggttacgctgacatcttctaccagaatacgatggcaagcggagtgattccccagatctcggccattctgggtccttgtgccggaggagcctgctactctcccgcactgacggatttcatctttatggtgaaagagaaaagccacatgttcgttaccgggccggacgtcgtgaaaacggtgatccacgaagaagtcagcaaagaagagctgggcggcgccatgacacacagcagcaagagcggtgtgacacacttcatggccaacaccgaagaagagctgttgatgtcgatccgcgagctcctctcattcctcccgcaaaacaacatggacgaggcacgcaagcagaattgcaccgacgacgtcaaccgtgaagacgcctcactgaacagcattgtccctgccgaccccaacgtaccgtatgacatgaaggagatcatcgaaagagtagtcgatggaggctatttctttgaggtgatgcagaactttgccaagaacattattatcggttttgcacgcatgggcggacgctcggtaggcatcgtagctaaccaaccggcttatctggccggagtgctcgacatcgacgccagcgataaagcaagccgcttcatccgcttctgcgactgcttcaacattccgctgattacattcgaagacgtaccgggtttcctgccggggtacacccaagagaacaacggcatcatccgccacggagccaaaattgtgtatgcttttgctgaagcaacagtacccaagttgaccgtaatcacccggaaggcttacggcggtgcttacatcgtaatgaactccaaacagacgggagcagacgtgaactttgcctatccgagtgcagagatcgctgtaatgggtgccgaaggtgcggtgaacattctgttccgcaaggcagacgcagagacgaaagcccaagagctgaatgcctacaaagagaagtttgccaccccctatcaggctgccgaactgggattcattgacgaaatcatcctgccgaagcagacccgcaaacgcctgatacaggcattggagatgacagagaacaagatgcagaccaatccgcccaagaagcacggaaacatgccgctt

SEQ ID NO: 12693 - DNA, 1512 bp, Bacteroides fragilis
atgattaaaagaatcttagtcgccaaccgcggtgaaattgccgtgagggtgatgcgctcctgtcgggagatggaaataacgagcattgccgttttctcggaagcggaccgaacagcgaaacatgtgctttacgccgatgaagcttattgcatcggaccggcagcatcgaaagagagttatctgaatatagaaaaaatcattgaagtggcaaagtcatgccacgcagacgccattcacccgggatacgggttcttatcggaaaatgcaacctttgcccgccgttgccgggaagaaggcatcacctttatcggtcctgacccggaaacaatggaagccatgggagataaaatctcggcacgcatcaagatgatcgaagccggggtaccggtagttccgggcactcaagacaacctgaaaagtgttgaggaagcagtagaactctgcaaccaaatcggctatccggtaatgctgaaagcctcgatgggcggtggcggaaaaggaatgcgactgattcatcatgcagacgaagtggccgaagcctatacaacagccaagagcgaatcgctttcctcgttcggagacgacacggtctatctggagaagtttgtggaagaaccccatcacatcgagttccagatactgggcgacaagcatggcaacgtaattcacttgtgcgaacgtgaatgctcggtgcagcgccgcaaccaaaagatcgtagaagagagcccttcagtttttatcacaccggaactgcgccgggatatgggcgaaaaggcagtagccgctgccaaggccgtgaactacatcggcgcgggaaccattgaattcctggtggacaagcaccgcaattattactttctggaaatgaacacccgcctgcaagtggaacatcccatcacagaagaagtagtcggcgtagatctggtaaaagaacaaattaaggtagccgacggacaggtactgcaactgagacaagaggacatccagcaacggggacacgccatcgaatgccgcatctgtgcggaagatacggaaatgaacttcatgcccagcccgggtgtcatcaagcaaatcacagaacccaacggtatcggagtacgcatcgacagctatgtatacgaaggatacgagattccgatttattacgatccgatgatcggcaaactgatcgtgtgggccaccacacgggaatatgccatcgaacggatgcgccgcgtgcttcacgaatataagttgacgggcgtaaagaacaacatcagttacctgcgcgccatcatggatacacccgactttgtggaaggacactatgacacaggcttcatcgccaaaaacggtgaagtgcttcagcaatgcatcacgcgcaccagtgagcgtgcggaaaacattgcgctgattgccgcctacatggactacctgatgaacctggaagaaaacaacagcggactggcagcggataaccgcccgatcagcaagtggaaagaatttggattgcacaaaggggtattaagaata

SEQ ID NO: 12694 - DNA, 2262 bp, Bacteroides fragilis
atgtcacatttacctaccttgattgctgaccttgccttaatactgatgtccgcaagtatcattactcttttatttaaatggctgaagcaacccctggtcctgggatatatcgttgccggattgctggccgggccttatgtccgcatcttcccgactgttggcgatatggagaacatcaatacctgggctgagataggagttgtctttttgctttttgctctcggactcgagtttagctttaaaaaattgatgaatgtcggatcggcagcgtttattacggcaacaatcgaagtgatcagtatgttactgatcggttttatggtggggcatctgttggggtggagtacgatgaattctgtgtttctgggtggaatgttgtccatgtcgtctaccacgattattattaaagcctttgatgatcttggtttgcgcagccaacggtttacaggcattgtgttcggaaccttggtggtcgaagacctgatcgctatcctgatgatggtcatcctttctactatggcggtgagcaaagagtttgtgggtgaggaactcttgatgagtgtcctgaaagttgcctttttcctgattttgtggtttctggtcggtatattcatccttccgttcttcctgaaaaaagcaaagcggttgatgaataatgaaactctgttgattgtctctctcgggctttgcctggcaatggtcgtgctggctacccgtaccggtttttcggctgcgttgggtgctttcattatgggatctattcttgctgagacggttgaggccgaacatatagaacacatcatacagccggtgaaagatcttttcggagctattttctttgtatccgtcggtatgctggtcaatccgtctgtcctgcttcagtatgcctggccggtggttatcattacattggtgactcttgtgggtaaatcgattttctcttcattgggagtcttgctgtccggcgaaccactgaaggtttccgtcaagtccgggttcagtctggcccagataggagagtttgcttttattatcgcgggattgggagcctcgctcaaggtgctggacccgtttgttcccccgattatcgttgcggtatccgttatcactacctttaccactccctattttatccggttggcaaatccgttttccgaatggctttataaagtactttcccctcggacccgtgaattcctggaccgttacgcttccggcaagaagaccgtcaatcatgatagtgactggaaacggttactgaaaacgattgtcggaagagtgattatttacagtgtcctccttactgctatttggctgttgtccgttcagaccgtatacccgacgataaacggaatgtttgattccccgggacgatggctgagtgtagtgatgtgcctgctcacccttttgctgatgactcctttcttgtgggcccttgtttcagataagtacaattctccggacgtgtttctgaagttgtggaatgacgacaattacaatcacgggaggctggtagcgttgattctgttccgtgtttcggtggctgtttttttcatagcgggagttgtcatcagttattttagtcttaattacgggataggtattgtcatagctgttgccgtgttgggactgatacttcttctcagggagaacctcacccaatattcgcatttggagaaccacttcctgaccaatctgaacggaagggaggaagcagcccggaatcgctatccgctgaagagccgtttcaacagtgagtttagtgataaagatatcgagttgacctccgtttgggtatctccttattcatcttatatagggaagtcgctggaggaacttcctttcaggcgtgagtttggtgtcaatgtagtggggattgtcaggggagaacggaggatatacattccgcaaagtgacgagtgcatttatccgcaggataagttgatcgtggtcggtacagacggccagttacagaagtttcgttcggaactcgacatccggcaggattttccggacgaaaagaatgtgcgacaagaggtgacgcttcactctttcacggtagatgaagaatctccgctcctgaataaaagtattgcccagtcacggttgggaaaacagtatgacagccttatcgttgccattgagcgggaagacgagttgatttccatgaatcaaagtacggttttccgtttgggagatctggtatggatagtgggtgacagggagaagatcagacaactcctgatgcggaaaaagcatgtg

SEQ ID NO: 12695 - DNA, 1644 bp, Bacteroides fragilis
atggcaacacctccgtttaagtatcaacctatgttcgaacatggggaagataaaaccgagtattatctgcttaccaaagactatgtgtcagtaagcgagttcgaaggaacacctgtgctgaaagtacagaaagaaggtctgacagcgatggctaatactgctttccgcgacgtatctttcatgcttcgccgtgcgcacaacgagcaggtagcgaagattctgagcgacccggaagcaagtgaaaacgacaaatacgtggcattgactttcctgcgcaacgctgaagtggctgccaaaggtatacttcctttctgccaggataccggtacggctatcatccacggtgaaaaaggacagcaggtatggacaggctattgcgatgaagaagctttgtcattgggtgtttacaagacatatacggaagaaaacctgcgttattcacagaatgctccgctcaacatgtacgacgaggtgaacacgaagtgcaatctgccggcccagatcgatatcgaggctacggaaggcatggagtacaaattcctgtgtgtgaccaagggtggtggttctgccaataagacttatctgtatcaggagacaaaagcgattctgaatccgggcactctggttccgttcctggttgagaagatgaagacactgggtacagcggcttgtcctccttatcatattgcattcgttatcggcggtacttcggctgagaagaatctgctgactgtgaaactggcttctacccactattacgacgagttgccgactaccggtaatgagtatggtcgtgctttccgcgacgtagaactggagaaagaggtacttgccgaagcccaaaagatcggtttgggagcacagtttggcggtaaatatctggcacacgatgtacgtatcatccgtctgccccgtcacggagcttcttgtccggtgggcttgggtgtatcttgttctgccgaccgtaacatcaaatgtaagatcaataaagacggtatctggattgaaaaactcgattctaatccgggcagtctgattcccgcagaactgcgtggcgcaggtgaaggcgatgtagtgaagatcgacctgaaccagccgatggcggatatcctgaaggaactgactaaatatccggtagctacacgtctgtcactcaacggtacgatcatcgtaggccgtgatatcgctcacgctaaactgaaagaacgtctggatcgcggtgaagatctgccccaatatatcaaagaccatccgatttattatgccggtccggctaaaactcctgccggcatggcttgcggttcgatgggaccgactactgccggacgtatggacccctatgtggacttgttccagagccatggcggcagcatgattatgttggcaaaaggtaaccgtagccagcaggtgaccgatgcttgtaagaagtatggcggtttctaccttggttcaatcggtggtccggctgctatccttgcccagaacaatatcaagagcatcgaatgcgtagaatatccggaattgggtatggaagctatctggaagatcgaagtagaggacttccccgcatttattcttgtagatgacaagggtaacgacttctttaagcagataaaaccccgttgcggttcttgcagcaacaaa

SEQ ID NO: 12696 - DNA, 2544 bp, Bacteroides fragilis
gtgagagagggtacgagttatataatatttactatgaaaatacatatcttatttggaatgatcgggttcattctgctgtccggttgtaaccgggcagcagaaaagaaccctcgtttttatgatgccggcgtttccagggaactggccgggcaccgcaaggtccagattaagaatctgaagtatgaacttagtttcaatatcccgcgacagaaagaggttgccattgagggagatattaccttgcgctttgatttggcttcccgacaggaagtcctgatagactttcgggaagagcttgagaagatcaaagaggttatagccaacggagtgccgatggacaaggtgcgttttgagaatgagcacatcattctgcctgcttcgtcgacagtggaaggagcgaatgaaatacggattcgtttcaccgccggcaatcagtcactgaaccggaacgacgaatacctctacacattgctggtgcctgaccgtgcccgtaccgtattcccctgttttgagcagcccaatttgaaggcggagttcactttacagcttgaacttcccgcagactggaaagctgtttctaatacatacatccggagtgagacggtaaccgacgatcgtaagaccgtctgttttgcaccgaccgaacctcttagtacgtacctgttctcgtttgtagccggaaagttggagcgtcgggagtatacccgggacggacgtaccatcgctgcttattaccgggagaccgatcctaagaaagtagctcagttggatattgtcttcgggcaggtgatggcatcgctccattggcttgaagagtataccggcattgcatatccgtttgccaagtacgattttattgttctgcccggttttcagtttggcgggatggaacatacaggggctaccttatataatgataacgggattttcctgagtgaacaccctacgccggacgaggagttgaatcgggctgagctgattgcccatgaaacgtcgcacatgtggtttggcgatttggttaccatggattggtttgacgacgtatggactaaagaagtttttgccaactattttgcagcccggattgtcgaacccctgtttccggagatcaatcacacccagaataaactcaagacctttacggcagcttcactttccgaggatcgtactatggggacgaatgccatccgccaaccgcttgataacttgcgtaatgccggattgatctatgggcagatcatctataacaaggctcccgtgatgatggaaaaactggtcgacaagatgggggaagccaatttccggagtggtatacaggagtacctgaagacctactcgtacggtaatgccacctgggacgacctgatccgtattctggacagtaagacggccgaagacctggccgccttcagtgatgtatgggtgaaccggaaagggatgcctacgttaattttccggacagacgggcaagaactggaaattcgccagcacgatccctacaaccggggattgctctggccgcaacgttttgccgtcactctttgcggagagcgcgattcggtgatccgggtgaatatgacagataccctgttccggatgcaacttccgtttgtgccttcgcgcgtattgcccaataccgatggcagaggctatggggtatttgtgcccgacgagcctgctctgcattggctggcggcacattggtgggagatagaagatgatacggcccgccaatcgcttctgatggtactctatgaaaattatctggccaaacacatctcggcggacgactgggtcaacagcctgataacagggcttccggccgagaagaacgctttggtggcttctacagccagtggttatctggcgaatgtcatgtgggagatagctccggcaaaccgggcagaagtagaagcccgcatttatacgatgacacagaatcatccgttgccttcgtgccggatacaattgatgcgccttttcatgcagaatgccatttccgaaccgatggtgaagaagctctacattttgtggcaacagcagtccgacaaacatctgaaccgacaggattatacaactttagcctacgaactggctattcgcatgcctttggagagcgaacagatactccgcacacagcgggcacgtattgacgatccggatcgtttgcggcagttcgactttatctcacgggcagccgtatccgatactgcgcggctcgatactctgttcaacagcctgctggcggcagaaaaccgccggatagagccttggacgactgctgtcattcgatacctgaaccatccgttgcgtgaggatcagtcggtgaagtacattcgtccgggactggaggtgctggaagaggtacaacgcaccggagatattttctttcccaaaaattgggcggcagctttgctgggcaatcatctcagttcatcggcttacgaagaagtggtacgcttcctgaacgagcgtcccgattattcaccgcttttgaagaacaagatactgcaggcagcctatccgttgtaccgggcaaacaat

SEQ ID NO: 12697 - DNA, 1302 bp, Bacteroides fragilis
atggcttcatttgtaatcgaaggagggcacagacttagtggggaaattcatccccaaggtgccaaaaacgaagtgttgcagattatctgcgctacattgcttactgccgaagaagtaacagtgaataacattccggacatcctggacgtcaataacctgattcagttaatgcgggatatgggcgtgacggttgcaaaaacaggtgtcgattcgtatagttttaaggccgcaaatgtcgatctggcctatctggaaagtgacaacttcctgaagaagtgttccagcctgcggggatctgtgatgctgatcggtcctatggtcgcccgtttcggtaaagccatgatttcaaagccgggaggagacaagatcgggcgtcggcgtctggatacgcattttataggaatccagaatctgggagccgattttacttataatgaagagcgggaaatatacgaaatttcggccgaagaattgaaaggtacatctatgttgctcgatgaagcttctgtgaccggaactgccaatatcgtgatggccgctgtactagccaaaggtaaaacgacgatttataatgcggcctgtgagccctatctgcagcagctttgtaagatgctgaaccggatgggagcgaagatcagtggaattgcttcgaacttattgactatcgaaggagtggaggaacttcacggtaccgatcacactgtgttgccggatatgatcgaggtgggtagcttcattggtatggctgccatgacccgtagcgaaatcacaatcaaaaatgtgtcatacgaaaatctgggtattattcccgaaagtttccgccgtctgggtattaaactcgaacagagaggagatgatatttttgttccggcacaggattgctatcagatcgagtcgtttatcgacggttccatcatgaccattgccgatgctccctggccgggactgactccggacttgttgagcgtcatgctggtagtggctacccaggcaaaaggtagtgtactgattcatcagaagatgttcgagagccgtcttttctttgtcgataaactgattgacatgggcgcacagattattctttgcgatccgcaccgtgcggttgttatcggacataatcatggatttactttgcggggaggcaatatgacctctccggatatccgtgccggtatcgctttgcttattgcggctatgagcgccgaaggtatcagccggattcataacatcgagcagatagaccgcggatatcaaaatatcgaaggtcgactcaacgctatcggtgcaagaattacacgaata

SEQ ID NO: 12698 - DNA, 1293 bp, Bacteroides fragilis
atggaacaactgtacaactacttgccggaaaagctggtgacctttatcctggttaccttgttttcacttttaataggactttcgcaacgtaaaatcagtctgaaacgtgaaggagaaaccactcttttcggtactgaccgcacctttacgtttatcggaatgctggggtatcttttgtatatcctcgatccggaagagatgcaccttttcatgggaggtggtttgatactcggcattcttttagggctcaactattatgtgaagcagtcccaattccatgtattcggggtgacgactattatcatcgcactgatcacctactgcattgctccgattgtgtctacacagccttcatggttttacgttatggtgattgttactgttttattgcttaccgaactgaagcatacttttacggagatcgcacagcgaatgaaaaacgatgaaatgattacgttggccaagttcttggctatcagtggtatcatccttccgatgttgcctaatgaaaatattatccctgacatcaacctgacgccttataccatctggctggccacagtagtggtttcgggtatttcatatctttcctatttgctgaagcggtatgtctttcgtgaatcgggggtattggtgtccggcattatcggcgggctctacagtagtacggctacaatctcggtactcgcccgtaaaagccgtaatgcacattcgcaggaagcatccgaatatgttgccgccatgcttttggctgtcagcatgatgtttttgcgcttcatgattctaattcttattttcagctccactatttttacttctatctatccttatctattgattatggccgccgttgcagccgttgtagcctggtttatccacactcgtcggaagcggacacccgacgctgaccttgtggaagaagaagatgacagcagtaatccgttggagttcaaggtggctttgatttttgcagggttatttgttatatttaccgtactgacacactataccttgatttatgccgggacaggagggttgaacctgctgtcgttcgtttccggttttagtgatattactccttttatcctaaacttattgcagggcacgggaagtgtagcggctactgtggtgatggcttgtaccatgcaggccattatcagtaacattgtggtcaacatgtgttatgcgcttttcttctcgggtaagcagagtaaattgcgctcgtggatattgggcggattcggatgtgtaatcgcagcaaatgttgtcgtactttttttcttttatctgatt

SEQ ID NO: 12699 - DNA, 1081 bp, Bacteroides fragilis
gaacaacttaaagacgtgaaagagcgcactgatgcgctgaggaggtatctttgacatcgacgggaagaaaattcaggtcgaagaagaacaattaagaacgcaggctccgggtttctgggatgaccagaagaaggccgaagcacaaatgaaactggtgaagggactgcaaaagtggattgagggatacaatgatgtcaagacactgacagacgaactggaactggctttcgatttttataaagacgaactggttaccgaacaagaagtagacgaggcctatgcaaaggcattagagcatgtcgagaatctggaattgcagaacatgcttcgtgatgaggccgaccaaatgagttgcgtactgaagattaactccggtgccggtggtacggagagtcaggattgggcatcgatgctgatgcgtatgtatctccgttatgccgagaccaatggttataaagcaaccatggccaacttgcaggaaggtgatgaagcgggtatcaaaacttgtaccatacagattgaaggcgactatgcctacgggtatttgaaaggtgagaacggtgtacatcgtttggttcgtgtttccccttataatgcgcagggtaagcgtatgacttcttttgcttccgtatttgtcactccattggtggatgacagcatcgaggtaaatattttgccggcctgtatctcttgggatactttccgttcgggaggtgccggtggacagaacgtcaataaggtagagtccggcgttcgtttacgctatcaatacaaggatccttataccggtgaggaagaggaaatcctgatagagaataccgaaacccgtgaccagcccaaaaatcgtgaaaatgcaatgcgtcagttgcgttctattctttacgataaagaattgcagcaccgcatggcagaacaggctaaagtggaagccggtaagaaaaaaatcgaatgggggtcacagatacgaagctatgtctttgacgaccgtcgtgtaaaagaccatcgcactaacttccagacctctgatgtaaacggagtgatggatggaaaaatagaaggatttatcaaagcctatctgatg

SEQ ID NO: 12700 - DNA, 1176 bp, Bacteroides fragilis
atgcataaagtatatcttaaacccggcaaagaagactcattgaaacggttccacccctggattttttctggtgccatcgcccacttcgacggcgaacccgaggaaggtgaagtagtggaagtgtacacctcaaaaaaagaatttattgccaaagggcatttccagatcggaagtattgctgtacgtgtactttcgttcaaacaagaagagattaaccacgatttctggaaacacaaattggaagtggcctacgacatgcgacgcagtattggcatcgctaccaatccgactaacaatacctatcgcctggtacatggagaaggcgataatctgcccggactcgttatcgatgtttatgcccggactgctgtgatgcaggcacattctgcaggaatgcatgtagaccgtatggccattgccgaagctttgtccgaagttatgggtgatcagattgaaaatatctattataaatcagaaacgaccctcccatttaaagcggaccttttcccggagaacggtttccttaaaggaggaagcagcgacaacatcgctcaggaatatgggctgaaattccatgtagactggctgaagggacaaaaaacaggattttttgtagaccagcgtgagaatcgtgctctactggagcgttatgccaaggggcggtcggtattaaatatgttctgttataccggaggcttttccttttacgccatgcgtggaggtgccaaacaggtgcactcggtagacagttctgcaaaagccatcgatctgactaataaaaatgtagaattaaacttcccgggagatacccgtcatgcagcctttgctgaagatgctttcaaatatctcgaccgtatgggtgaccagtacgacttgatcattcttgatcctccggcatttgccaaacataaggatgcgctgcgcaatgcccttcagggctaccgcaagctcaatgccaaagcatttgagaaaatcaaaccgggtggtatcttattcaccttctcatgttcgcaagtagtgaccaaagataatttccgtactgctgtatttactgctgccgccatgtcgggcagaagtgtacgtatactacatcagttgacccagcccgcagaccatccggtgaacatctatcacccggaaggggaatatctcaaaggattggtgctctatgtagaa

SEQ ID NO: 12701 - DNA, 687 bp, Bacteroides fragilis
atgcacgtattttatacccctgatatacaaaccagcacagaacttcctgaagaggaagcacagcactgtgtacgtgtgctccgcctgacagccggagatgaaattagtctcaccgacggaaagggaaacttctatcgggcagagatcagcgtggcaacccataaacgttgcctagtgaatattaaagaaacaatttaccaagagcctttatgggacggacatctgcacattgctatggcacccacaaaaaatatggatcgtaatgaatggtttgctgaaaaagcaactgaaatagggttcgacgaattaacattcctgaactgccgcttctccgaacggaaagtaattaaaaccgaacgcattgaaaagatattggtgtctgccatcaagcaatcgttaaaagcacgtttaccgcgtctgaacgagatgactgatttttgcacatttatcgaaaaagactttaaagggcaaaagttcattgcccactgttacgaaggagagaaacctttactgaaagatgtcttgacaaaaggagaagatgccctggtgttgatcggaccggaaggtgacttcagcgaagaggaagtcaagaaagcaatcgagaaaggatttgtccctattagtttaggcaaatcgcgactgcgcacagaaacagcagcattggtggcttgccacacaatgaatatg

SEQ ID NO: 12702 - DNA, 1230 bp, Bacteroides fragilis
atgaagtataaactgttagtccttgatgtagacgggacattgctcaatgatgagaaggagattactcctcgtacccttgccactttgttaaaagtacagcagatgggagtacatattgttttggcctccggtcggcccacttatgggattttgcctttggcaaagaaactggagctgggtaactatggcggatacatcctgtcctataacggcgcacaggtcattaatgccaaaaatggggaagtattgctcgaacggcgtattaaccccgaaatgttgccttatctggagaagaaagcccgtaaaaacggatttgcaatctttacttacaccgaagaccgaatgattgctgatcaggcagataatgaacacattcttcaggaagcattcctcaatcggatggagttgattgaagaacccgaattttcggttgccgttgattttgctccttccaaatgtatgttggtcagtgatgacgaagaggcgcttatcggattggaagaacattggaaaaaacgtttgaacggagcgctcgatgtattccggtcggaaccctatttcctggaagtcctgccatgtggcattgacaaatcaacttcgttgggagccttgctttcccatttggatatcactccggaagaaatcattgttatcggtgatggcgtttgcgatgtttccatgatccagtttgccggattgggtatcgccatgggcaatgctcaggattcggtaaaggtatgtgccgatgtggtgacggcttcgaatgaagaagacggagttgctcttgccgtagaaaaagcgattctttctgagattcgtccggcagagattcctctcgatcaattgaacgagcgtgcacgtcatgccttgatgggaaatctgggcattcaatatacctatgcttccgaagaccgggtagaggctactatgccggtagacgagcggacccgtcagcctttcggcattctgcatggaggtgccacgttggcactggccgagactgttgccggactgggttcgatgattctctgccagcccgacgagattgtggttggtatgcaggtcagcggtaaccacatgtcatctgcccacgagggagataccgtacgtgccgtcggtaccattatccacaaaggacgttcatcacatgtctggaatgtagacgtatttacgtcgacggacaagttggtgtcttccatacgggtagtgaatagtatattaaagaaaaga

SEQ ID NO: 12703 - DNA, 2826 bp, Bacteroides fragilis
atgcaggaaacagaatatataaatgtgtatggtgcgcgcgtacacaatctgaaagacattgatgcggaaataccacgtaatagcctgactgtaattaccggacttagtggaagcgggaagtcatctcttgctttcgatacgatatttgcagaaggacagcgccgctatattgaaactttttcggcttatgcccgcaactttttgggcaatctggagcgtccggatgtagataagataacaggattgagtccggttatttccattgaacagaaaactacgaacaaaaatccccgttctacggtcggaaccactacggagatttacgactatctacgtttgctttatgcccgtgccggaatagcttattcttatctttcgggagaaaagatggtgaaatacaccgaagaacagatattggaacttattctgaaagattataaagggaagaaaatctatatgctggcccctctggtgcgttcgcgtaagggacattataaagaactctttgaacaaatccggaaaaaaggatacctgtatgtccgtatcgacggggaggttcgtgagattacacatggtctgaaactggatcgttataagaatcatgatattgaagtagtcgttgacaaactgatcgtagaagataaggatgataaacggctgaaacagagtgttgccaccgctatgcgtcagggagacggattgctgatgattctcgatgcgcagacagagagtatccgacattatagcaaacgcttgatgtgtcctgttacgggattgtcgtaccgggagccggctccgcataatttttcgttcaactccccgcaaggtgcttgtccgcgttgtaaaggattgggagtagttagccagattgatgtggataaagtgattcccaataaagagatgtcgatctatgaaggggcaatagctcctttgggtaaatataagaatgcgatgattttctggcagatcggtgctctgctggagaagtacgatgcgtcactgaagactccggtaaaagacctgcccaatgatgctattgatgaaattctgtatggttcggatgaacgtatcaaaataaaaagctcattgataggtacttcttccgactattttgtaacgtatgaaggagttgtgaagtatatccagatgttgcaagagaaagacgcttcggccactgctcagaaatgggcggaacagttcgctaaaactacggtttgtcctgaatgtaagggggcgaagttgaataaggaggcgcttcatttccgtatccatgacaaaaacatcaatgaactctctaatatggacatcaacgagctgtatgactggttgatgaaagtagataagttcctgacagataaacagaaaacgattgccgccgagattctgaaggagatacgtacccgcttgaaattcctgttggatgtggggttggattatctttcgttaaatcgcagctcggtcagtctgtccggaggagaaagtcagcgtatccgtctggccacacaaattgggtctcagttggtcaatgtgctttatattcttgacgagccgagtatcggattgcatcaacgtgataacttgcggctgattaattctctgaaagaactgcgtgatatgggtaactccgtgatcgtggtagagcatgacaaagacatgatgcttgctgccgactacgtgatcgatatgggacctaaggccggacgattgggaggagaagtcgtttttgccggtactcctgaagagatgttgaagaccagtacactgacttcgcagtaccttaacggacaaacggctatcgaagtaccttctaagagacgtcccggaaacggcaagtctttatggttacggggcgcgaaagggaataacctgaaaaatgtggatgtggaatttccgttgggtaaattaatttgtgtaaccggagtttccggtagtggcaaatcgactctgattaatgaaactttgcaaccgatactttcgcaaaaattctatcgttctttgcaggatcctttggaatatgattcgatcgaaggacttgagaatatagataaggtggttaatgtggaccagtcccctttggggcgtaccccacgttccaatccggctacttatactggggtcttttctgatatccggagcctgtttgtcggactgccggaagctaagatccgcggttataagcccggccggttctctttcaatgtgtccggtggccgctgcgaggcatgttccggtaacggctacaaaacgattgaaatgaatttcttacccgatgtatacgttccgtgcgaagtctgtcatggtaaacgctataaccgtgaaacgctggaagtacgttttaagggaaaatctattgctgatgtgctggatatgactattaatcgtgcagtagagttctttgagaatgttcctcagatcctgaataagatcaagaccatccaagatgtaggattggggtatatcaaactgggacaatcgtcaacaactctttcgggaggtgagagccagcgtgtgaaattggctactgaactttcaaaacgagataccggaaagactttgtatattcttgatgaaccgactaccggcctgcattttgaagacatacgtgtgttgatgggagtcctgaataaattggtagataaaggcaataccgtgatcgttattgaacacaacctggatgtgattaagatggcggattacataatagatatggggcccgaaggtggtaagggaggaggagaacttctcagtttcggaacaccggaagaagttgcgaagagcaacaaaggatatactccgaagtttcttcgcgaggaattgaaaatcaat

SEQ ID NO: 12704 - DNA, 858 bp, Bacteroides fragilis
atgagacaactaaagattaccaaaagtatcactaacagagagagcgcttctcttgacaagtatttgcaggaaatcggtcgcgaggacctcattactgtagaggaggaagtagaactcgctcaacgcattcgtaagggtgaccgtgtggcattagagaaactgacacgcgccaatcttcgtttcgtcgtatccgtagctaagcagtaccagaaccaaggcttgagtttgcccgacttgattaatgaaggcaatttaggactgatcaaagctgccgagaagtttgatgaaacacgtggcttcaagtttatcagttatgctgtatggtggattcgccaatctattttgcaggcattggcagagcagtcccgtatcgttcgccttccgttgaaccaggtcggttcgttgaataagatcagcaaagccttctctaagtttgaacaggaaaacgagcgtcgtccgtcgcccgaagagttggcaggtgaactggatattccggtcgacaagatctccgatacgctgaaagtatccggccgccatatctcggtggacgctcctttcgttgaaggagaagacaacagcctgctcgatgtgttggtgaacgatgattcgcccatggcagaccgttctctggttaatgagtctcttgcgagggaaattgatagagctctttctacgttaaccgatagggaaaaagaaatcattcagatgtttttcggtatcggacagcaggaaatgacattagaggaaatcggcgacaaatttggtctcacacgtgagcgtgttcgtcagattaaagaaaaagcaatcagaagattaagacaaagtaatcgtagtaaattgctcaaatcttacttggga

SEQ ID NO: 12705 - DNA, 1563 bp, Bacteroides fragilis
atgaataaaaagaatagtatgaaacagacaacaaaaaacattctcgggataggagcagtagttcttctcagtgcaggagttgccggagtgacaacctatacgatgttgaagccggagaacagagacagcctgtcgtttaatgaacagttccgtcagaatcccggtgctcgcttggctgcttatgacgccattaatgcccagcctgtagatctgacgcaggcggcggaaaattcgcttcatgctgtagtacatataaaatcgactcaacaggctaaagaacaaactgtgaccgtacgcgacccgtttgcagagatattcggggatatcttcggtaatggcggcagacagcagcgccgtgtacagacccagccgcgtgtcggcttcggttccggtgtcatcatttccaaagacggttacatcgtcaccaataatcacgtgatcgacggtgcggacgaaattatcgttaagctgaatgacaaccgcgagttcaaaggtcgcatgatcggtaccgacccgaattcggatttggctctggtcaagatcgagggagacgatttcccgaccatccccgtgggcgattctgatgccttgaaagtaggagagtgggtattggcggtaggtaacccgttcaatcttacctcgactgtaactgccggtatcgtcagtgccaaagcgcgtacgctcggtgtgtacggcatcgggggagtagaatcgttcatccagacagatgccgccatcaatcagggaaacagcggtggagctttggtgaatgcaaaaggtgaattggtaggtatcaatgccgtgctttcttcgcccacaggcgcttatgccggatacggttttgccattccgaccagtgtgatgaccaaagtggtcagcgacctgaaacaatacggaaccgtacaacgtgcgttgctgggtatcaagggtacttcgcttgcgggtgacggtgatatgatgtccgatcagccgatcgacaaatcgggagccacactgtccgataagcgcaaagagttcggcgtagtggatggcgtttgggtacgcgaaatcgtagatggaggttctgctgccggttccgatatcaaggtagatgatgtcatcatcggtatcgatggcaagaaagtgcagaactttgccgatctgcaggaagccattgcacagcatcgtccgggcgataaagtgaccgtgaaggtgatgcgtgacaagaaagaaaagaatatcaatataacattgaaaaacgaacaaggtacaacaaagattgtgaaggatgcgggtatggagattctgggcgctgccttcaaggagttgccggacgacttgaagaaacaactcaatctcggatacggcttgcaggttaccggagtcacttcgggcaagatggcggatgccggtgtgcggaagggcttcatcatcctgaaagccaacgatcagcctatgcgcaaagtcagcgaccttgaagaagtgatgaaagctgctgtgaagtcaccgaaccaggtactcttcctcacaggagtattcccttcaggaaaacgcggctattacgctgtagacttgactcaggag

SEQ ID NO: 12706 - DNA, 1335 bp, Bacteroides fragilis
atgaacatcgaaaaaatcatgtcctctcttgaggcaaaacatcccggtgaatctgaatatcttcaggctgtaaaagaagtattactctctatcgaagatatctacaaccaacacccagaatttgaaaaggccaaaatcatcgaaagactggtagagcccgaccgtattttcacattccgtgtaacatgggtggatgataaaggtgaagttcagaccaatctgggatatcgtgttcagttcaacaacgctatcggcccatacaaaggcggtatccgtttccacgcttctgtcaacctctcgatcctgaaattcctgggattcgaacagactttcaaaaatgcactgacaactttacctatgggcggtggcaaaggaggttccgacttctctccacgaggaaaaagtgatgcggaaatcatgcgtttttgtcaggcattcatgcttgaattgtggcgtcatctagggccggatatggatgtgcctgccggtgatatcggtgtaggaggacgtgaagtcggctatatgttcggcatgtacaagaaactgacccgtgagtttacaggaactttcacgggtaaaggacttgaatttggcggttcactgattcgcccggaagccaccggattcggcggattgtatttcgtcaaccaaatgttgcagaccaagggtatcgacataaaaggtaaaactgtggctatctccggattcggaaacgttgcctggggagctgctaccaaagctaccgaactgggagccaaagtagttaccatctccggaccggacggatatatctatgatccgaatggaatcagtggagagaagatcgattatatgcttgagttgcgtgcttcgggcaacgatattgtggctccgtatgcagatgaatttccgggttctacattcgtagccggtaaacgcccatgggaagtaaaagcagacatagcgcttccttgcgccactcaaaacgaattgaatggcgaagatgccaagaacctgatcgacaacaacgttctttgtgtcggagagatctccaatatgggttgtacacccgaagctatcgatctctttatcgaacacaaaacaatgtacgctcccggcaaagctgtcaatgcaggcggtgtggcaacatccggactcgaaatgtcacaaaatgcaatgcacttgagctggagtgcagccgaggtagacgagaaactgcattctatcatgcacggcattcatgcacaatgtgtgaagtatggtacagagcccgacggatatatcaattatgtaaaaggtgccaatattgcaggtttcatgaaagtagcccatgcaatgatgggacaaggaatcatc

SEQ ID NO: 12707 - DNA, 1944 bp, Bacteroides fragilis
ataaagaactcgaaacaaaattcatagcctataaagaaggactgaaaaagaaaatcgtaaaggctaacgaagaactgaaagaaattaagtacgagtttaaaacaaactaaaaagatggatttattcaactactcccgacgggaaacttcggaagtgaatattggggccgttccgttgggcggccccaatcctatccgtatccagtcgatgacaaatacccccacacaagacaccgaggcttgtgtggcccaggcaaagcgcattgtagatgccggcggagaatatgtccgtctcactacacagggggtaaaagaggccgaaaacctgatgaacatcaatatcggcctgcgcagtaccggctatatggttccgcttgtggccgatgtacacttcagcccgaaagtagccgatgtagcggcacaatatgccgagaaagtgcgcatcaatcccggcaactacgtagatcccggacgcactttcaaacaactggaatataccgacgaggaatatgccgccgaactgcaaaagatacgtgaccgcttcgtccccttcctgaatatctgtaaagagaatcatacagccgtccgtatcggggtgaaccacggctcactgtccgatcgcatcatgtcacgctacggtgacacgccggaaggtatggtagagtcgtgcatggaattcctgcgcatctgcgtagacgagaagtttacggatgtcgtcatctcaatcaaagcatccaacacggtggtaatggtaaagaccgtacgtctgttggtatcagtgatggaacaggaaggcatgtcattccctctccacttgggtgttacggaagccggagacggagaagacggacgtatcaaatcggctttgggcatcggcgcattgttggctgacgggctgggcgatacgatccgtgtctcgctgagtgaagaaccggaagccgagattcccgtggcacgcaagctggtggactatattacaagtcgccggaaccatccgtacattcccggcatggaagctccggatttcaactacctttctccggtacgccgtaaaacacggccggtacgcaatatcggcggagaccatctgcccgtggtacttgccgaccgcatggacggacgtatggagacccatccgcaatttacaccggattacatttatgccggacgtgctttacccgaacagacggaacccggagttcagtacatcctcgatgccgacgtatggaaaggagaacctgacacgtggcctgccttcaattatgcacaattggagttaatggaaacatgcgcagccgaactgaaattcctctttaccccttacatggcgcttacccgggaagttgtcgcatgcctgaagcaacaccccgaaacagtcgtggtctcacaaagcaaccacccgaaccgcgtaggcgaacatcgtgccctggcacatcaactgacggtggaaggattacagaatccggttatcttcttccaacactatgccgaagatacagccgaagacttgcaggtcaaagccggcgcggatatgggagccttgatctttgacggattgtgtgacggaatttatctcttcaaccaaggcaaactgagccatgcagtgattgatgccactgctttcggaattctgcaggcaggacgtatccgtaccagtaagactgaatatatttcttgcccgggatgcggacgaacactgttcaacctgcaaagtacgattgcccgcgtcaaagaagccacctcccacttgaaggggctcaagataggcatcatgggatgcattgtcaacggaccaggcgaaatggcagacgccgactacggttatgtaggagccggacgtggcaaaatcagtctttataaacagaaggaatgcattgaaaagaatattccggaagaagaagccgtagaaaagctgatagaactgattaaagcaaacggggactat

SEQ ID NO: 12708 - DNA, 1089 bp, Bacteroides fragilis
atgggaaaagaaaaaatcatattaacaggcgaccgtcctaccggaaagctccacatcggacactacgtaggctcgctgaaacggagagtcgaactgcaaaactccggctcgtttgacaaaactttcatcttcattgccgatgcacaggcactgaccgataatatcgacaaccccgaaaaagtacgtcagaacgtaattgaagtagctctcgattatctggcttgcggactcgacccggaaaaatcaaccatcttcatccagtcccagattccggaactgtgcgaactgactttctattatatggatctcgtcaccgtatcgcgcctgcaacgtaatcccactgtgaaaacagaaatccagatgcgtaactttgaaaccagtattccggtaggtttcttcacttaccccatcagtcaggctgccgacatcactgccttccgtgccacaaccgtaccggttggtgaagaccaggagcccatgatcgagcaagccagagagattgtccgccgtttcaattatatctatggagaaaccctggtagaaccggagatccttttaccggataatgcagcctgcctgcgcctgcccggtaccgatggaaaagccaagatgagtaaatcgttaggcaactgcatttatctggccgaagaagctgatgaaatccaaaagaaagtgatgagcatgttcaccgaccccgatcatctgcgcgtgcaagatccgggtaaaatcgagggtaacaccgtatttacatacctggatgcattctgccgtcccgaacacttcgaacgttacctgcccgactatccgaatctgaacgagttgaaagcccactatcagcgcggcggtttgggtgatgtaaaggtaaaacgtttcctcaactccattatacaagaagagttggagcctatccgcaaccgtcggaaagaattcgaaaaagatattcccgccatctatgaaatgctgagaaaaggctgtgaagtagcaagagctgccgctgccgataccttgtcggatgttcgcaaagccatgaagataaactacttcgatgatgccgaactgatcaacgaacaagtgaagcgattcaacaaa

SEQ ID NO: 12709 - DNA, 3234 bp, Bacteroides fragilis
atgacaataaaagaaatggaaaaggaaatgaaaaaagttcttgttttgggttcaggcgcactcaaaatcggacaagccggagagtttgattattccggttcacaggcattgaaggccttgaaagaagaaggtatcaattcggtattggttaacccgaatatcgcaaccattcagacttccgagggaattgctgataaggtgtatttcctgcccgtgactacttatttcgtagaagagattattaagaaagaacgccccgacggtattctgctcgcattcggcggacagactgccctgaattgtggtgcggaactttatacaaaggggattctggataaatatggcgtgaaagtattaggtacttcggttgaggctattatgtatacggaagaccgtgacttgtttgtgaagaaactcgatgaaatcgagatgaaaactccgatcagccaggcggtggagagcatggaagatgctatcgctgctgcgcgacgcattggctatccggtgatggttcgttcggcttatgcattgggaggactcggcagcggtatttgtgccaatgaagaagagttcctgaaactggccgaaagttcgtttgctttctctaaacagattttggtagaagagtcgctgaagggctggaaagagattgagtttgaggtgatccgcgatgcgaacgatcactgctttacagtggcaagcatggagaattttgatccgctgggcattcataccggtgaatcgatcgtagtagctccgacttgttcattggacgacaaagagttgaaaatgttgcaggaactgtcaaccaaatgtatccgtcacttgggtattgtcggtgagtgtaacattcagtatgcgttcaattcggatacggatgattatcgtgtgatcgaggtgaatgcacgtttgagccgttcgtcggcattggcttcgaaggctaccggttatccgttggcatttgtggctgcaaaagtggcattgggttacacactcgaccagatcggtgagatgggaactccgaattccgcttatgtggctccacagcttgattattatatttgcaagattcctcgttgggacctgaccaagtttgccggtgtatcccgtgagatcggatcgagcatgaagtcggtaggtgagattatgtcaatcggacgttcgtttgaagagattatccagaaagggcttcgtatgatcggacaaggcatgcatgggtttgtcggtaacgatgacgtacattttgaggatctggacaaggaactttctcatccgacagatctgcgtatcttcgcattggctcaggctatggaggaaggttataccatagagcgtattcacgaactgacaaagattgatccgtggttcttgggtaaacttaaaaatattgttgactataaggctaagctgtctgcctatgataaagtagaggatatcccggccgatgtgttgcgtgaggctaaagttctgggcttctccgacttccagattgcacgatttgtgctgaatccggtgggaaatatggagaaagagaatctgatggtacgtgcacgccgtaaagaactgggtattcttccggcagtgaaacgcattaatacaatcgcttccgaacatcctgaattgacaaactatctgtatatgacttatgcggttcagggctatgatgtgaactattataagaatgaaaaatcagtagttgttctgggttcaggcgcttatcgtataggtagttcggttgagttcgactggtgttcggtaaatgctgtgcagactgcccgcaagctgggatataaatcgattatgattaattataaccccgaaacggtgtctactgactatgatatgtgtgaccgtctgtactttgatgaactttcgttcgaacgtgtactcgatgtcattgacctggagcaacctcgtggtgtgattgtatctgtaggtggacaaattccgaataacctggctatgaaactctatcgtcagtctgttccggtattgggtacttctcctatttctatcgaccgcgccgagaatcgtaataagttctctgcaatgctcgatcaactggggatagaccaaccggcatggcaggagctgaccagtctggaagatgtgaagggatttgtggagaaagtaggttatccggtgctggttcgcccgtcttatgtgttgtcgggtgctgcaatgaacgtttgctatgacgacgaagaattggagaacttcttgaagatggctgctgaggtatccaaagagtatccggtggttgtttctcaattccttgagaataccaaggaaatcgagtttgatgcagtagctcagaacggagaagtagtagaatatgctatctctgaacatattgaatttgccggtgtgcactccggtgatgctactttggtattccctgcacagaaaatctattttgcaacagcacgccgtattaagaaaatcagtcgtcagattgcaaaagagctcaatatttcgggtccgttcaatattcagttcctggctcgtaataacgaagtcaaagtgattgaatgtaacttgcgtgcttcacgcagtttcccgtttgtttcgaaggtgttgaaacgcaattttatcgaaacagctacccgcattatgcttgatgccccatacagtcgtcctgataagtccgcatttgacattgattggatcggagtaaaagcgtctcagttctccttctcgcgtctgcataaggccgatccggttctgggcgtagatatgtcgtctaccggtgaagtgggttgtatcggtgatgatttttcggaagcattgctgaatgcgatgatcgctacaggctttaagattccaggaaagggagttatgttctcttcaggtgcaatgaagtcgaaagtcgatttgttggaggcaagccgcatgttgttcaaccaagggtataagatttatgcaacagccggtactgctgctttcctgaatgcacatggggtagatactactccggtttactggccggatgagaaaccgggagctgaaaataatgtgatgaagatgattgccgatcataaatttgatttgatcgtaaatattccgaagaatcattcgaagcgtgaattgacaaacggttaccgtatccgtcgcggtgcgatagatcacaatattccgttgatcactaatgctcgtctggcaagtgcgtttatcgaggcattctgcgatctgaaactggaagatattcagataaagagctggcaggaatataaa

SEQ ID NO: 12710 - DNA, 1341 bp, Bacteroides fragilis
atggcacagaaactttgggaaaaatcagttgaggtaaataaggatatagagcgatttaccgttggacgtgaccgtgagatggatctttatcttgcaaagcatgatgtacttggttcgatggctcatatcacgatgctcgaaagtatcggattgctcacaaaggaggaattagctcagttgctgaccgaactgaaagatatatatgcttctgcggagagaggcgagtttgtaatagaagaaggagttgaagacgtgcactcgcaggtagaactgatgcttacgcgtcgtttgggtgatgtcggtaagaagattcatagcgggcgttctcgtaatgatcaggtgttgcttgatctgaaacttttcactcgtactcagatcagagaagtagcagaggctgtagagcaattgtttcatgttctgattcgtcaaagtgagcgttacaagaatgttctgatgccgggttatactcatttgcaaattgcgatgccttcttcgttcgggctttggtttggagcgtatgctgagagtttggtagatgatatgcttttcctgcaggctgcttttaagatgtgcaataagaatcctttgggctccgctgccggatatggctcttcattcccgctgaaccgcacgatgactacggaattgctgggattcgattctttaaactataatgtagtgtatgcccagatgggacgtggaaagatggaacgcaatgtcgcttttgccttggctacgcttgcaggaacgatttctaaattggcttttgatgcttgtatgttcaatagccagaattttggtttcgtgaagttgccggatgaatgtacaaccggatcaagcattatgccacataaaaagaatccggatgtgttcgaactgacacgtgccaaatgtaataagttacaatcgctgccgcagcagattatgatgattgccaataatctgccttccggatattttcgtgatttacagattataaaggaagtctttttaccagcttttcaggagttgaaagattgtctgcagatgactacctatatcatgaatgaaattaaggtgaacgagcatatcctcgatgatgataaatacctttttatttttagtgtagaagaggtgaatcgtctggcacgtgaaggtatgccattccgggatgcttataagaaagtagggctggatattgaagccggtcacttttcgcatgacaagcaagtacatcacacccatgaaggaagtattggcaatttgtgtaatgatgagatttccgcattgatgcaacgtaccatcgagggtttcaactttcaaggtatggaacaggcggagaagaccttgttggggcgtaaa

SEQ ID NO: 12711 - DNA, 750 bp, Bacteroides fragilis
atgttagagataaaagacctgcatgccagcattaacggcaaagagatattgaaaggcattaacctgacggtgaagccgggcgaagtacatgccattatgggacctaacggttcgggtaaaagtacgctttcgtctgttctggtaggtaatcctgctttcgaagtgacgaaaggaagcatcacgttttatggtaaaaatcttttggaattgagccctgaagatcgcagtcacgaaggtatttttcttagttttcagtatccggtggagatcccgggcgtgagcatggtgaactttatgcgtgctgctgtcaatgaacagcgtaagtacaaaggattacccgctttgacagccagtgagttcttgaaattgatgcgtgaaaagcgtgcagtggtcgagttggataataaattggccaatcgttcggtaaatgaaggtttctcgggtggagagaaaaaacggaatgagatttttcagatggctatgctcgaaccccgtctcagtatcttagacgagactgattccggactcgatatcgatgcgcttcgtattgtagccgaaggagtaaataaactgaaaactcccgataccagttgtattgtcatcacccactatcagcgtctgctggactatataaagccggacattgtacatgttctttacaaaggacgtattgtaaagactgccggtccggaactcgctcttgagttggaagagaagggatatgattggattaagaaggaattaggagaa

SEQ ID NO: 12712 - DNA, 3045 bp, Bacteroides fragilis
atgacgataaggttaaacaaagttacaagagatttaaatgtaggaatcgcgacggtagttgagttcttgcaaaagaaggggtataccgttgaggcaaacccgaatacgaaaattaccgaggagcagtatgctatgctcgtgaaagagttcagcacagataagaaccttagacttgaatcggaacgtttcattcaggaacgtcaaaacaaagatcgcaacaaggcatctgtttctatcgatggttatgataagaaggaaccggagaagactgttgctgacgatgtgattaagacggtcattccggaagatgtgcgtccgaagtttaaacctgtcggaaaaattgatttagataaactgaaccggaaggttgagaaagaaccggtgaaagaagagccaaaaccacaacctgtagctgctgaggaaaagaaagtagcggaagaggttaagcctgttgtaaacgaagtgaaaaaagaagaagtcactgtgactcctgctacttcggaaccgaaaccggtgaaagaagaaccgaaaccggtggtggttgaaaagcctgttgaaacagaaaagaaagtggttgaggaagtcaagaaagaagaaccaaaagtcgtggtgtctccagaaaaaacagagaagaaagaagagaaaccggtagcagaagcaccggttactccagtagagaaggaagaggagggcgtatttaagatccgtccgactgagtttgtatctaagattaatgttatcgggcagattgacttggctgcattaaatcagtcgacacgtccgaaaaagaaatcgaaagaggaaaagcggaaagagcgtgaagagaaggaaaagcttcgtcaggatcagaagaaacagatgaaggaagccatcatcaaggaaatccgtaaagaagatagtaaacaagctaaggtcgttggtaaggaaaaccttgatcctaacggtaagaagaaacgtaatcgcatcaacaataataaagaaaaagtagatgtgaacaatgttgcttctaattttgcacaccctactccaaacagtgagcgtacgaataataaccgtggaggaaatcaacaaggtggcggcggacagaatagaaaccgtaataacaataataaagaccgcttcaaaaagcctgtagtaaagcaggaagtaagcgaagaagatgtagcaaagcaggttaaagaaacgttggctcgtctgacaagcaaaggtaagaacaaaggtgccaaatatcgtaaagaaaaacgtgacatggcgtccaaccgtatgcaggaactggaagatcaggaaatggcagaaagcaaggtactgaaactgacagaatttgtgactgctaatgaattggcaagcatgatgaacgtatctgtaaatcaggttatcggaacttgtatgagcattggtatgatggtttctatcaatcagcgtctggatgcagaaacgattaatcttgtggctgaagaatttggatttaagactgaatatgtcagtgcagaagtagcccaagccattgttgaagaggaagatgcgccggaagatctggaacatcgtgctccgattgttacagtcatgggacacgtagaccatggtaaaacttcgttgcttgactacattcgtaaagcaaatgtaattgcaggtgaagccggaggtatcacacagcatattggtgcatatcatgttacattggaagatggacgtaagattacgttcctcgatactccgggacatgaggcatttactgcaatgcgtgcccgtggtgcaaaggtgaccgatatcgcaattattattgtagctgccgatgatgatgtaatgccccagaccaaagaagccattaatcatgcagcagcagcaggtgttcctatcgtatttgctattaataaaatagataagcctcatgctaatcccgagaaaattaaagagacattggctcagatgaattatctcgtagaagagtggggtggtaaatatcagtcacaggatatctcggctaagaagggtctcggagttcctgaactgatggagaaagtacttcttgaagcagaaatgctcgacttaaaggcaaatccgaatcgtaatgctacgggttctatcatcgaatcaactttggataagggacgtggatatgttgcgactgtattggtctctaacggtacgctgaaggtgggtgatattgtacttgccggaacaagctacggccgtgtaaaagccatgttcaatgaacgtaaccagcgtgtagcccaggcagggccatcggaaccggtattgattctgggtttgaatggtgctcctgctgcaggtgatactttccacgtgattgagactgatcaggaagcccgtgagattgccaataaacgtgaacagttacagcgtgaacagggtctgcgtactcagaaactgttgacactggatgaagtgggacgtcgtattgcgctgggtaacttccaggaactgaacgtaattgtgaaaggtgacgtggatggctctatcgaggccttgagtgattcgttaatcaagctgtctaccgaacagatccaggtaaatgtgatccataaggctgtaggtcagatttcggaatcggatgtgacattagcagctgcttcggatgctattattattggattccaggtacgtccatcggcttccgcacgtaagtttgccgaacaggaaggtgtggacatacgtttgtactctgttatctatgcagctatcgaagaggtgaaggctgctatggaaggtatgcttgctccggaagtgaaagaggtagtaactgctactatcgaagtgcgtgaggtattccacattactaaggtgggtacagtagccggtgctgttgtgaaagagggcaaggtgaaacgttcggataaggctcgcctgatccgtgatggtatagtaatcttctcaggttccatcaatgctttgaagcgctttaaagatgacgtgaaggaagtaggtacaaacttcgaatgtggtatcagtcttgttaactacaacgatttgaaggtaggtgatatgattgaaacttacgaagaagtagaagtgaagcaaacttta

SEQ ID NO: 12713 - DNA, 3120 bp, Bacteroides fragilis
atgacctccctctgcttccttgcagtggtgatttttggtctcttctctttgtcaaaattacctatcgacttgtatccggacatcgatacaaatacgattatggtaatgaccgcctatcccggagctagtgcttcggatatagagaacaacgtgactcgtccgttggagaatacgctgaatgctgtcagtaacctgaagcatatcacctcccgttcgtctgaaaatatgtctctgattacattggagtttgaatacggtaatgatatcgacgtactgactaatgatgtgcgtgacaagctggatatggtcagctcgcagcttccggatgatgtggagaatcccatcatctttaagttcagcaccgacatgattccgattgtgttgctgtcggtacaggccaatgaaagtcagtcggcactttataaaatcctggacgaccgcgtcgtgaaccccttagcacgtattcccggtgtgggtacggtatccatcagtggtgctccccagcgtgagatccaggtttattgcgaccccggtaaactggaagcctataatctgaccatcgaaacaatcagttcgattatcggagccgagaataagaatattccgggcggtaacttcgatatcggtaacgagacctattcgttgcgtgtcgaaggagagtttgacgattcgcgacaattggaagatgttgtggtgggtagctacaatggagcgaatgtctatctgcgcgatgtggcccgcgtggtcgataccgtggaggagcgtgctcaggaaacatataataatggggtaaaaggagccatgattgtggtgcagaaacagtcgggtgccaactctgtggatatttcaaagaaagtggccgaggctttgccgaagttgcagaagaatttgccgagcgacgtgaagctcggagtgattgtcgatacatccgacaacattctcaacaccatcgacagtttggccgaaaccgtactgtacgcccttttgtttgtagttatcgtggtgttcctcttcttgggacgctggcgtgccacattgattatttgtattactattccgctttcactgatcgcctcgtttatttacctggcagtcaccggaaatacaattaatattatctcgctttcatctctctctattgccatcggtatggtggtggacgatgcgattgtggtactcgaaaatgtgactacccatatcgagcgcggttctgatccgaaacaggctgccgtgcacggaacgaatgaggtggctatttccgtaattgcctctacactgaccatgattgcagtgttcttcccactgacaatggtaagcggtatgtcgggggtgatgtttaagcagttgggttggatgatgtgtgccatcatgttcatctctacagtagctgctttgtcactgacaccgatgctctgttcgcaattgttacgtttgcagaagaaacagtctaagactttcaaacttcttttcggtcctattgagaaaggtttggatgctctggatacaggctatgcccgcatgttgaattgggcggttcgccatcgtccgattgtcatcttcggttgtatcgtgttctttgtggtcagcttgttctgtgccaagagtatcggaaccgagttcttcccggcacaggataatgcccgtatcgcggttcagttggagttgcctatcggaacacgcaaggagctggcacaggaggtctcagagaaactgactaaccagtggctcaataaatacaaaggtgtaatgaccgtatgtaactataccgtaggtcaggccgactcagacaatacctgggcctctatgcaggacaatggttcccacatcatttcgttcaatatcagtctggtcgatccgggagatcgtgacatcagccttgaacaagtctgcgacgagatgcgtgaggacctgaagaaatatccggagttcagcaaagcacaggtgatcctgggtggtagcaacacgggtatgtctgctcaggcaagtgccgacttcgaggtatatggttatagtatggaagaaaccgacagtgtagctgcacgtttgaaacgtgaactgctgaatgtgaaaggtgtatcggaagtaaacatcagccgtagtgattatcagccggagtatcaggtagacttcgatcgtgagaagctggctttgcacggactgaacctggcaactgcaggtaactatctgcgtaaccgtatcaatggtgccattgcctccaagtatcgtgaggatggagacgaatacgatatcaaagtgcgttatgcaccggagtatcgtaccagtattgaaagtatcgagaacattcttatttataacagtcgtggcgaagccgtacgtgtgaaagagttgggtaaagttgtcgagcgctttgctcctcctactatcgaacgtaaagaccgcgaacgcattgtgaccgtttcggctgttatctcgggcgaagcgttgggtaatgtagtgaatgcgggtaatgccatcatcgataagatggatattccgtcggacgtaacgattcaggtagccggttcgtacgaagaccagcaagattcgttccgcgacctgggtacgctggctattcttattgtggtactggtgtttattgtgatggcagcgcagttcgaatcattgacttatccattcatcatcatgttctcactgccgtttgccttcagtggagtgttgatggcgcttttctttacaaagagcacgctgagtgtaatgagcctcttgggagccatcatgttgatcggtatcgttgtaaagaatggtattgtacttatcgactacatcactctttgccgcgaacgtggactggctgtgctcaactctgtcgtaacagcaggtaagagccgtcttcgtccggtattgatgaccactgctactacagttctcggtatgatcccgatggcaattggtggtggacagggttcggagatgtggagcccgatggcgattgccgtaatcggtggtctgactgtttccactattctgactttggtcctgattcctactttgtactgcgtctttgccggtacaggtatcaagcatcagcgtaaggtattgagacggaaacgtgagctggaggcttactttgaagagcataaagatgaaatgattaagaaa

SEQ ID NO: 12714 - DNA, 1494 bp, Bacteroides fragilis
atgaacaatgtttattatgtaggctccggtgaactgactttcagtatcatcgaacgcatcattaacgaaaacctgaaacttgaactggctcccgaagccgaacagcgcatccggaaatgccgtgattatctcgaccggaaaattgcggcttccaccgagccactgtatggcatcactaccggtttcggttcgttgtgcagtaaaaacatatcgtccgatgaactcaacaccttgcaagagaatcttgtgaaaagccatgcgtgcagtgtgggtgaggagttacgcccggtcattatcaagctgatgctgttgcttaaagcccatgctctttccctgggtcacagcggggtacaggtcatcaccgtacagcgcattctcgactttttcaataacgacgtaatgcctattgtctacgatcgcggatccttgggggcttcgggtgatctggcgccgttggccaacctctttttgcctttgattggagttggcgatgtttattataaaggtaaaaagcgggaagccatcagtgtgctcgacgaatttggttgggagcctgtgagattgatgagtaaggagggacttgctttgctgaatggtacccagttcatgagtgccaacggagtttttgcattgctcaaagcccggaggctttcaaagaaggcagatatgattgctgccctttcacttgaagcgttcgatgggcgcatcgatccttttatggagtgtattcagcagattcgtccccatcccggtcagattgagacgggagagatatttcgtcgcctgctgcatggaagtgagctgatagcccgtaccaaagaacatgtacaggacccttactcttttcgttgtattcctcaggtgcatggggcaacgaaagatgccatccggtacgtctcttctgttttgttgactgagataaattcagtgacggacaatccgaccattttcccggatgaagatcagatcatatccggcggcaactttcacggacaaccgctggccctctctttcgattttcttgccatcgcaatggccgaactgggcaacatttccgagcggcgtgtagcccagttaattatggggttgcgtggtcttccggaatttttggtcgccaatccgggacttaattccggttttatgattcctcagtacgctgctgcctctatggtcagccagaataagatgtactgctatgcggcctcgagtgattcaatagtctcttccaacggtcaggaagatcatgttagcatgggagccaatgccgctaccaaacttttccggatcatggataatctggagcacatccttgccattgagttgatgaatgctgcgcagggaatcgagtttcgtcgtccggcaaaaacttctcccatccttgagcgctatctggctgcatatcgcaaagaggttccgtttgtaaaggatgatatcgtgatgtacaaagaaattcataaaacggtagcttttctcaatcggaccagatccgagtat

SEQ ID NO: 12715 - DNA, 3327 bp, Bacteroides fragilis
atgggatttaatgaatttttaagctcgattttcggaaacaaatccacacgagacatgaaagaaatccaaccctgggtagacaagatcaaagccgcttacccggaggttgctaagcttgacaatgacggcctccgtgcaaaaacagaggaacttaaagaatacatccgtaactcggcaagtaaagaacgcgccaaggccgatgaactcagagccggcatcgaaaatgtagagctggaagaccgcgaagaggtatttgctcagatcgacaaaatcgaaaaagaaatattggaaatatatgaaaaagcactcgatgaagtattaccggttgctttctctattgtaaaagaatcggccaagcgtttctctgaaaacgaagaaatagtggtgacggccactgactttgaccgcacattggcagcaactaaggactttgtccgcatcgaaggtgacaaagccatctggcaaaaccattggaacgccggcggcaacgacacggtgtggaacatggttcactatgacgtacagttgttcggtggcgtggtactgcacaaaggtaaaattgccgaaatggcaacaggtgaaggtaaaaccttggtggctaccctccccgtattcctgaatgcactgaccggaaacggcgtacacgtagtaaccgtgaacgactacttggcaaaacgtgactccgaatggatgggaccgctttacatgttccacggactcagcgtagactgcatcgaccgtcatcagcctaattccgacgcacgccgccaggcctatctggcagatatcacattcggaacgaacaatgaattcggtttcgactacttgcgtgataacatggccatcagcccgaaggacctggtacagcgccagcacaattatgctatcgtcgacgaggtggactcagtattgatcgatgatgcccgtactccgttgattatctctggtccggtgcctaaaggcgaagaccaactttttgatcaactccgcccattggtagagcgactcgtggaagcacaaaaagtattagcaaccaaatacctctcagaagccaagaaacttatcaactcggacgataagaaagaggtggaagaaggattccttgcgttgttccgcagccacaaggcactgcctaaaaacaaggcgttgattaaattcctcagtgaacagggtatcaaagccggtatgctgaagacggaagaggtctatatggaacaaaacaacaagcgcatgcacgaagcaacagatccattgtacttcgttattgatgaaaagctgaacagcgtagacctgacagacaaaggtgttgatctgatcacaggcaactcggaagatccgactctattcgttttgccggacattgccgcccaactttccgaactggaaaatgaacatggattgagcgacgaacaaaagcttgaaaagaaagatgccttattgaccaattatgctatcaagtcagaacgcgtacacaccatcaaccagttgttgaaggcatataccatgtttgagaaagacgatgaatatgtagtgatcgacggacaggtgaagattgttgacgagcagacaggacgtatcatggaaggccgccgttactcggacggactgcaccaggccatcgaagccaaagaaggtgtgaaagtggaagctgccacacagacatttgctaccatcacgctgcagaactacttccgcatgtaccacaaactctcgggtatgaccggtacggccgaaacagaagccggtgagttgtgggacatctacaaactggatgtagtagtgattccgaccaaccgcccgatagcccgtaaggatatgaatgaccgcgtttacaagacgaaacgtgaaaaatataaagccgtaatcgaagagattgaacagttggttcaagcaggacgcccggtattggtgggtactacttcggtagaaatttccgaaatgctgagcaaaatgctgacaatgcgcaagatagaacacaacgtgctgaatgcgaaactccaccagaaggaagcagacattgttgccaaggccggtttgagcggtacggttactattgctaccaacatggcgggccgtggaacggacatcaagctgagccctgaagtaaaagcggcaggcggtctggcaatcatcggtaccgaacgtcacgagtcacgtcgtgtagaccgtcagttgcgtggccgtgcaggacgtcagggtgacccgggttcatctgtattcttcgtttcactggaagatgacctgatgcgtctcttctcttctgaccgcatcgccagcgtgatggataaactgggattccaggaaggtgaaatgatcgaacataaaatgatttcaaactccatcgaacgtgcacagaagaaagtagaagaaaacaacttcggtatccgtaaacgtctgttggaatatgacgatgtgatgaacaaacagcgtacggtggtttacaccaaacgccgccacgcccttatgggtgagcgtatcggaatggatatcgtcaatatgatctgggaccgttgcgcggccgcaatcgaaaacaatgcagactacgaagaatgtaaactggacttgctccaaacactcgcaatggaggctcctttcacagaagaggagttccgcaacgagaaaaagggcaagctggcagacaaaacattcgatgtggcaatggctaacttcaagcgcaagacagaacgtctggcacaaatagccaaccctgtcatcaaacaggtgtacgagaatcaagggcatatgtacgaaaacatcctgattccgattacagacggaaaacgcatgtacaacatctcttgcaacctgaaagcggcttacgaaagtgaatcgaaagaagtagtgaaatcatttgaaaaatcaattcttcttcatgtcattgacgaatcctggaaagaaaatttacgcgaactggatgaactgaaacactcggtgcagaacgcaagttatgaacagaaagacccgctgttgatctacaaactggaatctgtgactctgtttgacaacatggtaaacaagatcaataaccagacagtgtctatcctgatgcgcggccagattcccgtagccgagcctacagaggaacagcaagaagcagccagacgcgtagaagtacgtcaggcagctcctgagcaacgccaggacatgagcaaatatcgcgaacaaaaacaagacctgaatgatccgaatcagcaggccgctgcccagcaggatactcgcgaagccgtaaaacgcgaaccgatccgcgctgaaaagacagtggggcgcaatgatccttgtccgtgcggaagtggaaagaagtacaaaaactgccacggacggaacagt

SEQ ID NO: 12716 - DNA, 1041 bp, Bacteroides fragilis
atggcacaattgaattttggcggtgttacggaaaatgtagtaacccgtgaagaatttcctttggaaaaagctcgtgaggtattgaagaatgaaacaatcgctgttatcggttacggtgtgcagggaccgggtcaatcactgaacctgcgcgataatggcttcaatgtaatcgttggtcagcgtccgggaaaaacatatgaaaaagcagtggcagacggctgggttccgggtgaaacactgttcggcatcgaagaggcatgcgagaaaggtactattattatgtgtctgttgtcagatgcagccgtaatgtctgtatggcctactatcaaaccttacctgactgccgggaaagcactctatttctctcacggtttcgcaattacatggagcgatcgcaccggtgttgttccacagaaagatattgatgtcattatggtcgctccgaagggttcgggtacttcactccgtacgatgttccttgaaggtcgcggactgaactcttcgtatgccatctatcaggatgctaccggcagagctatggagagaaccatcgcattgggtatcggcgtaggttccggatatctgtttgaaacgacttttgtccgtgaagctacttccgacctgacaggtgaacgtggttcgctgatgggagctatacaaggtttgctgttggctcagtatgaggttttgcgtgagaacggtcatactccatctgaggcatttaacgaaacggttgaggagttaactcagtcattgatgccgctgtttgctaagaatggtatggattggatgtatgccaactgctcgactacggctcagcgtggtgctcttgactggatgggcccgttccacgatgctattaaacccgttgttcagaaattatataatagtgtaaagaccggtaacgaggcacagatctctatcgactctaattcaaaaccggattatcgcgagaaactggaggccgaactgaaggcattgcgtgaaagcgaaatgtggcagacagctgttactgttcgtaaacttcgtccggagaataat

SEQ ID NO: 12717 - DNA, 1362 bp, Bacteroides fragilis
atggcagcaaaaccaggtatacctaaaggaacacgtgatttttcgcccgtagagatggcgaagcgtaactacatattcaataccattcgtgacgtttatcatctgtatggtttccagcagatagaaactccttccatggagatgctttctaccctgatggggaaatatggtgaagaaggtgacaaactactttttaagattcagaattccggtgattatttttcaggcattactgacgaagatctgttgagtcgcaatgcggctaagctggcaagtaaattctgtgaaaaaggtttgcgttatgacctcacagtgcctttcgcccgttatgtagtgatgcaccgtgacgaaataactttccctttcaaacgttatcagattcagcccgtatggcgtgccgaccgtcctcagaaaggacgttaccgtgagttttaccaatgtgatgctgatgtcgtaggcagtgattcattgctgaacgaagttgaattgatgcagattgttgatacggtgtttacccgtttcggtatccgcgtttgcattaaaatcaataatcgtaagattctgaccggtattgccgaaatcataggagaggcggataaaatagtagatattacagtagcaatcgataaactggataaaattggtttggacaatgtcaataaagagctggccgagaagggtatcagtgaagaggctattgccaaactgcaacctatcattcttctgagtggaaccaatgctgagaagttggctacactgaagactgtactttccgatagcgaaacaggtttgaagggagtggaagagagtgagtttattttggatacccttcaaacgatgggactgaaaaacgaaatagagcttgacttgacattggcacgtggattgaattactatacaggtgctatttttgaggtgaaggcgcttgatgtgcagattggcagtatcaccggtggaggtcgttacgataacctgactggtgtattcggtatggcaggagtatcgggcgtaggtatttcgtttggtgccgaccgtattttcgatgtgctcaaccagttggaactgtatccgaaggaggccgttaatggaactcagcttctgtttattaacttcggtgagaaagaagctgctttttctatgggtattctgtctaaggcccgcgcagccggtattcgtgccgagatattccccgacgctgcgaaaatgaagaaacagatgagttatgcaaatgttaagaacattcctttcgttgctatcgtaggtgagaatgaaatgaatgaaggaaaagctatgctgaaaaacatggaaagcggtgaacagcaattggttactgctgaagaactgattggcgctttaacaaaa

SEQ ID NO: 12718 - DNA, 1902 bp, Bacteroides fragilis
atgaaacagaatttttttcatcggtatctttctgcgaaggtactgcccatttggactattctattgattgatatatttattatcgtcgcatcctgcttgctcgcttactcgcttcgttacgattttcgcagcattttcttggattcgtcgacaatagataagaccattctttggacggtagtggctaacttaatcttcttccgggtattccgtacctattcaaatgtgcttcgcttttcttcgtttgtagacattatgcgcatatttgtgtcgcttacggtctcctatggggtattgatgattctgagtcttctgctggatgcttacctgggcattcggattggtgccatcagtgtactgtttatggcatatgtgatcaattttgctatgatggcctgttcgcgtattgtggtcaaaatgttcttcgaggtactcaattttgacggtagccacacgaccaacgtctttatttatggtgctaaagaagccggagtaaacatcgccaaatccctgcgtgtcaatttgcgtaatcattatcgtcttcgtggtttcattgccgatgaacccgaactgattggtaaggtgatgatgggggcgaaagttttcccgaatgatgaagcattgattgaaaacatgaatgaccgtgatgtgcataccatcattgtttctccggctaagatggaaaagctgaagaaatcagatatgattgatactctgctttccaataatgtgaagttgcttactgctccccctttgagtgaatggggtgggcaggcactgaataaaactcagttgaaggaaatacagattgaggaccttttgcaacgcgaaccgattgaggtggacatccataagatagcttctcacctggaaggtaaacgtgtaatgattacaggagccgccggttctattggtagcgaaatcatgcgacaggtcgcttctttcaatccatataagttgatcctgattgatcaggctgaaactccgttgcatgacattcgtctggaattgcaggatcgttggcgtgacattgatgctgaaacgattgtagctgatatttcgaacgcaactcgtatggaggccattttccgtgaatacaaacctcagtatatattccatgcagctgcctataagcatgtgccgatgatggaagacaatgtttcggagtctattcagattaatgtatcgggtacacgtacgcttgccgatctggctgttaaattcggttcagagaaatttgtaatgatttctacggataaagccgttaatccgacaaatgttatgggttgttcaaagcgtatttgtgagatctatgtacagtccttagccaagaaattacagaaggaaggcacacgttcggtacagttcatcaccactcgtttcggtaatgtattaggatctaacggttcggttattccccgtttccgcgatcagattcagcgtggaggacctgtcacagtgacccatcccgaaataatccgttatttcatgaccattccggaggcttgtcgtctggtactggaagcaggaagtatgggtaatggtggggaaatctacatcttcgatatgggtaaaccggttaagattgtcgatctggcaaaacggatgatcagtctttcgggacgtacggatgtgaaaattgagtttaccggtttgcgtcatggtgagaaactgtacgaagagttgctcaatgtgaaggagctgaccaaacctacttatcacgaaaagattatgattgccactgtgcgtgagtatgattatgacgaagtgaaagagagaatccagaaattaattgatgtaagctatacctatgatcagatgaagatcgtggctgccatgaaagatattgtccctgagtttgtgagcaaaaactcttgttttgaggcgttggataagaaagac

SEQ ID NO: 12719 - DNA, 1149 bp, Bacteroides fragilis
atgggacctcgcaaggcagcagaaatgttcctcacacgacatcctgaagcagcatcgttcaaagtgaccctctacggaagcctggcggcgacaggaaaaggacacatgacggatgtagccatcattgacacactgaaacctactgcaccggtagatattatatggcaacccaaaatctttcttcctttccatccgaacggaatgaactttgtggcacttgatgccggcggcaatgaactggaaaactggactgtctacagtgtagggggaggtgcattggccgaagacaacaaacagccgtctattgaaagcccggaagtatactccatgaacagcatgaccgaaattctggattggtgcgaacataccggaaaaagttactgggaatacgtgaaagaatgcgaagatcctgatatatgggactatctgaaagaagtatgggatacgatgaaggagtctgtccagcgtggtctcgaacaagaaggagtgctgcccggcccattgaacctgagacgtaaagcttccacatattatatccgcgctaccggatacaaggcttctttgcagtcacgcggattggtatttgcctacgcgcttgccgtaagtgaagagaatgcctcgggaggcaaaatcgtaacagcacccacatgcggatcgtgcggagtgatgcctgccgttctttatcatcttgccaaaagccgtgaattcagtgagatgcgtatccttcgcgcattggcaacagccggattgataggtaacatcgtcaagcaaaatgcttccatctccggagcagaagtaggctgccagggagaagtaggcgtggcatgtgccatggcatcggctgccgccaaccagttattcggaggaagtccggctcaaattgaatatgctgccgaaatgggactggaacatcacttgggcatgacttgtgatccggtatgcggattggtacagattccttgtatcgagcgtaatgcttatgcggccgcccgcgcattggacgccaatctatactcttcatttaccgatggaatgcaccgtgtctctttcgacaaagtaatacaagtgatgaaacaaaccggccacgacctaccctcactttataaagaaacaagtgaaggcggactggcaaaggattataagccgatg

SEQ ID NO: 12720 - DNA, 2496 bp, Bacteroides fragilis
atgatatatccccagaattttgagcagaaaataggattcgaccaaatcagacaattattaaaagacaaatgtctcagcacattaggagaagagagagtgaatgaaatgaatttttccgatcactttgaagaagttgatgaactgctgaatcaggttgcagagtttgttcgcatcatacaagaggaagataactttcccgaccaattttttttcgatgtccgtccctctttgaaacgaatccgaatagaaggaatgtacatggacgaacaagaattgtttgatctacgacgttcgttggagaccatccgggacatcgtccgtttcctgcagcgcaatgatgaagaagaatcggattgtccctaccccagcctgaaaaaactggccggtgacataactgtctttccacaacttatcaccaagattgatggcattttaaataaatatggcaaaatcaaggataatgcttcgaccgaactgtcacgcatccgacgggaactggctaacacgatgggaagtatctcacgttcgcttaacagcatactccgaaacgcacaatccgaaggctatgtggacaaagacgtggcaccaaccatgcgcgacggtcgattggttattccggtggctccgggattaaaacgtaaaatcaaaggaatcgtccacgatgaatcggccagcggaaaaactgtatttatcgaaccagcggaagtagtggaagccaacaaccgtatccgtgaactggaaggggatgaacgccgggagatcatccgtatcctgactgagttctctaacaccctgcgtccttctatcccggaaatactgcaatcgtatgaatttcttgccgagatagacttcattcgtgccaaaagtcacttcgccatccaaacaaacagtatcaaacccagcctggagaacgagcaattattggactggacaatggccgtccacccactattacaactttcgcttgccaaacatggaaagaaagtagtgccattggacatagaactgaacctcaaacggcgtatccttattatatccggtcccaacgcaggaggtaaatccgtatgtctgaaaacagtcgggttactacaatatatgctgcaatgcggcatgctcgtacccatgcatgaacgaagtcatgtaggcctgtttggcagtatcttcatcgacatcggtgatgaacaatccattgaagacgatttgagtacctattcttcacacttgaccaatatgaaaatcatgatgaagaactgcaacgaacgaagtctgattttaattgacgaattcggtggaggtacagaaccccagatcggcggagctattgccgaagctgtactgaaacgattcaacataaagggtactttcggtgttataactacacactaccagaatctaaaacattttgcagaggatcacgaaggtgtagtaaacggtgccatgctatatgaccgtcatctgatgcaggcacttttccaacttcagatcggtaatccgggtagttcattcgctgtagaaatcgctcgtaaaatcggattaccggaggatgtgatcgcagatgcttctgagattgtgggaagtgaatatatcaatgccgacaagtatttgcaggatatcgtacgtgacaaacgttattgggaaggaaagcgtcagactatccgccagcgcgaaaagcatatggaagaaaccattgcccgctatcaggctgagatggaagaattacaaaagtcgagaaaagagatcatccgtcaggcaaaagaggaggcggagcggttgttgcaagaatcaaatgcacgtatcgagaacaccatccgtaccataaaagaggcacaggctgaaaaagaaaaaacacgtctggtacgccaggaactggcggacttccgtgaatcgatagacaacctgacttccaaggaacaggaagataagatagcccgaaagatggagaagctgaaagagaagcaaaaccgcaagaaggagaaaaagcaaaacggcaccaaagaacagccggcagttcaacaaactcccaaagcgactcccatcaccgaagggtgtccggtacgtatcaaaggacaaagttcggtcggagaagtacttgaaatcaacgggaagaatgccgtggtagccttcggcagcatcaaaacaactgtaaagacggagcggctggaacgcagcaacgcaatcccccaaaaacaagagtctgccaaaagttcttttgtcagcaaccagactcaggacagcatgtacgaaaaaaagctgaacttcaagcaagatatcgatgtacggggaatgcgaggagacgaagctctacaagctgtaacctactttgtagacgacgccatcctggtcggtatgagccgggtacgcatcctacatgggaccggtacgggtatcctgcgtacccttatccgccaatatttgcaaaccataccgggagtccgccattttgccgacgaacatatccaattgggaggtgcaggtatcacggtagtcgatttggca

SEQ ID NO: 12721 - DNA, 1341 bp, Bacteroides fragilis
atgaaataccaggttattattatcggtggagggcctgccggctatacggctgctgaggctgccgggaaagcaggactgagtgtgttgctttttgagaaacaaaatttaggaggtgtttgtctgaacgaagggtgtatcccgacaaaaacgttactctattcggctaaaacctatgatggtgctaaacatgcgtcaaaatatgctgtaacggttccagaggtcttttttgatcttcctaagatcattgctcgtaaatcgaaggtggtacgtaaactggttttaggggtaaaatcgaagttaacgtccaataatgttactattataagtggagaggcaaccattttggacaagaatacggttcgttgcggtgaagaaacttatgaatgtgataacttaattctttgtacaggttccgaaacttttattcctcctatttccgggattgatagtgtaaactattggacacatcgtgaagcattagacaataaggagttgccggcttcacttgccattgtgggcggtggagtgatcggtatggagtttgcgtcctttttcaatagtctgggtgtgaaggtgaccgttattgagatgatggatgaaattctgggaggcatggataaagagctttccgccctgttgcgtgccgactatgcaaagcggggcattcagttcctgttaagtaccaaagtcgtttcattggcacagacggaagaaggtgctgtggtttcttatgaaaacgccgaaggggcaggaagcgtgattgccgaaaagttattaatgagtgtgggacgtcgtccggtgacaaaaggctttgggcttgagaaccttaacctgcaacggacagaacgtggaagtattgtagtgaacgggcaaatggaaagctcgttacccggagtctatgtttgcggtgatttaaccggattctccttattggcacatactgctgtccgtgaagcagaagtagccgtacatgcaattcttggaaaagaagataggatgagttatgccgctatccccggggtagtttatactaatcctgaaatagccggtgtcgggcagacagaagaatctctgactgcaaaaggcattgcttaccgtgccgtaaaacttcccatggcatattccggacgttttgttgctgagaatgaaggagtgaatggagtatgtaaggtgctgcttggcgaggatgatactattttgggagcacatgttttgggtaatcctgcttctgagattatcacgttggcagggatggctgtagaaatgaaactgaaggcagccgagtggaagaagattgttttcccacatcctacggttgccgagattttccgtgaagcatta

SEQ ID NO: 12722 - DNA, 1611 bp, Bacteroides fragilis
atgtcagatctgatggcaggtatcatagtaggtatcgtagccttacctctggccatcgcattcggtatcgcatcaggtgtatcacccgagaaaggaattattacagctatcattgcaggattcatcatctctttgctcggaggaagcaaggtacaaatcggaggaccgaccggagcattcatcgtcatcatttatggcatcatccagcaatatggagaagcgggattaatcgtagctacactgatggccggcatactcctgatcctattaggagtatttaaattgggagcgattattaaatttattccctatccgatcattgtaggctttaccagcggtatagccgtcactatttttacaacccagattgctgacatattcggattgaattttggtggagagaaagttccgggagactttatcggaaaatggatgatctatttccggcatttcgacacagtcaactggtggaacgctgtcgtaagtattctcagcatcatcattattgccattactccgcggttttcgaaaaagataccgggttctcttattgctattattgtggtaacgataggagtatatgtattaaagacatatgccggcattgattccatcgataccattggcgatcgttttaccatcaaatcagaattgcccgaagcagccatacccaccctcaactgggaagccatcaaggatttatttccggtggccattacaatcgctgtattgggagctatcgaatcattactatcggcaaccgtagccaacggtgtgacaggagataaacacgattcaaataccgaactgatcgcacaaggaacagccaatctgatcacaccgttatttggtggcatccccgcaaccggagccattgcccgcacaatgactaatatcaataatggcggtaaaacaccggtagccggtatcattcatgctatagttttattgctgatcctcctgtttctgatgcctctggcgcaatacatcccaatggcctgcctggcaggtgtattagtcatcgtatcatataatatgagtgaatggcgtacattcaaagcattgctgaagaatcccaaatcggatgtgaccgtattgctgatcaccttcttcctcaccattatcttcgatctgactattgccatcgaagtaggtttggtgatcgcctgtatcctgtttatgcgacgtgtgatggaaacaaccgagatatctgtcatcaaagatgaaatcgatccgaatgacgaactggacattgccgtatgcgaagagcatctgataatccctgccggcgtggaggtatatgaaattaatggtccgtacttttttggtattgccaccaaatttgaagaaacaatggcacaattgggtgaccgtcctaaagtacgcatcatccgtatgcgtaaagttccattcatcgattcgaccggtattcacaacctgaccagcctttgtaaaatgtctcaaaaggaaaagatcactatcgtactctcgggagtaaacgagaaagtacacaaaacccttgagaagtcgggtttctatgaattactgggaaaacaaaacatctgcccgaatataaatgtagcgttggacagagccaaagaaattataaat

SEQ ID NO: 12723 - DNA, 585 bp, Bacteroides fragilis
atggaaagtgaaaaagaaaaaatgggtacaggcaggctttacgatgctaattatgatacagaattgatagccgaacgccaggcttgcaaagagttgtgttataccttaaatcatttgcctccctcgcagatagctgaacgggaggccattatccgtcggttgttttgcaagacgaaagaacgttttctgttggaacagcctttttattgtgactatggctataacattgagattggtgaaaatttctatgccaatatgaactgtgtcattctggatgaggctaaagtaacgttcggtgataatgtctttatcgctccatcctgtggcttctataccgcgggtcatcctttggatgtggaacagagaaatcgagggttggaatatgcccgtcccattcgtgtcggaaataatgtgtggattggggcacaagtgtgcgtattaccgggcgtgacgattggtgacaacacagtgataggtgcgggaagtgtagtaaatagagatattcctgccaatgtgattgctgcgggtaatccttgtcgcgtaattcgggaaattacggaagaagataaaacaaaatatttatta

SEQ ID NO: 12724 - DNA, 843 bp, Bacteroides fragilis
atgaatagtaatatagaaaaatcagataaaccctccttcatcaaaatctctgagcagccctcactttacgacgatcttgaaaagaagtcggtccgcgaaatactggaagacatcaataaggaagaccagaaagtagctattgccgtacagaaagcaattcctcaaatagagaaactagtcacacaaatagttccccgaatgaaacaggggggacgcattttctatatgggagccggcaccagcggacgcctcggagtactcgacgcttcagaaatcccacctaccttcggtatgccccccacattaattattggcctgatagcaggcggtgatactgctttacgcaatccggtagaaaacgccgaagataatacgatccggggctgggaagaactgacagaacataacatcaatgacaaagatacggttatcggtattgcagcctcaggcaccaccccttacgtaatcggagctatgcatgcagcccgcgagcatggtatcctgaccggctgcatcaccagtaacccgaactctccaatggcagcagaggccgatatccccatcgaaatgatcgtgggtcccgaatatgtaacgggtagttcacgtatgaaatcgggaacgggacaaaagatgatcctgaatatgatcacaacctcggtaatgattcaattaggacgcgtgaaaggtaacaaaatggtcaacatgcagctcagcaaccggaagctcgtagaccgtggtactcgtatgattattgaagaactcggacttgaatatgataaagcaaaagccttattgctgatgcacggttccgtgaaaaaagcaatagatgcttataaagccgga

SEQ ID NO: 12725 - DNA, 2007 bp, Bacteroides fragilis
atgaacgatagtaaacttatgaatcgtgcggctgataatatccgcatattagctgcgtcgatggtggaaaaagccaattcgggacaccccggaggcgccatgggtggtgctgattttgtgaacgtactcttctctgagtttttggtatacgatccgcaaaacccacgctgggaaggtcgcgaccgctttttcctcgacccgggacacatgtcaccgatgctttattccgtattggctttcaccggaaaatatacattggacgaattaaagcaattccgtcagtggggcagccctactccgggacaccctgaagtgaatgtagaccgtggcgttgaaaatacttccggcccgctgggacagggacacacttatgcagtaggcgcagccattgcagccaaattcctgaaagcccgctttggcgaagtaatgaaccagactatttacgcatatatatccgatggaggtatccaggaagaaatctctcagggtgccggccgcattgccggtacactcggactggacaacctgatcatgttctacgattcaaacgacgtacagctttctaccaacacagaagatgtaacaacggaaaacgtagccatgaaatatgaagcatgggactggaaagtaatcacaatcaacggtaacgatcctgacgagatacgcaaagctctgactgaagccaaagctgaaaagaaccgtccgaccctgatcatcggtaaaacgaccatgggtaaaggagcacgccgggccgatggaagcagctatgaagccgactgcgcgacacacggcgcaccattgggcggagacgcatatgtgaatacaatcaagaacctgggtggaaatccggagaatccattcaccattttccccgaagtagccgaactgtatgccaaacgtgcggaagaactgaagaagattgttgctgacaaatatgcagcaaaagcagaatgggcaaaagcaaaccctgaaaaggcagctaaactggccgaattcttctctggaaaagccccgaaagtaaactgggatgccattgaacagaaagccggcggcgcaacccgtgccggatctgcaaccgtattaggagcattggccactcaggtagaaaatatgatcgtttcatcagccgacctgtctaactcagacaagacagacggattcctgaaaaagacgcacgcattcaaaaaaggagatttcagcggcgctttccttcaagcaggagtttcagagttaagtatggcttgtatttgtatcggtatgtctctgcacggaggtatcattgctgcatgcggcacattctttgtgttctcagactacatgaaaccggccctgcgtatggctgccctgatggagcaaccggtaaaattcatctggactcatgatgcgttccgtgtaggagaagacggacctactcacgaaccggtagaacaagaagcacaagtacgcctgcttgaaaaactgaagaaccacaaaggacacaactctatgttggtacttcgcccggcggatgtggaagagacaaccattgcgtggaaacttgcaatggaaaacatgtcgactcctacagcactgatcctttcacgtcagaatatcgttaacctgcccgcaggaaccgattattcacaagctgcaaaaggtgcttatatcattgccgacgccgatgaaaacccggatgtgatcctagtagcttcgggttcggaagtttcaacgctggtggccggtgccgaacttctgcgcaaagaaggtgtgaaagtacgtattgtttccgctccgtccgaagggttattccgtaatcaaagcaaagagtatcaagaatccatacttcctgcaggagccaaaatctttggtctgacagccggacttccggtgaatcttgaaggtttggtaggttccaacggtaaagtgttcggtcttgaatcatttggtttctcggcaccctacaaagtgctggatgagaaactgggattcaccgcagaaaacgtatacaatcaggtaaaagcaatgctc

SEQ ID NO: 12726 - DNA, 432 bp, Bacteroides fragilis
atgaagaaaattggaatttgttgcgaccacgccggtttcgaattgaaagaatacgtaaggggctggctggaagcaaaaggttgggaatacaaagacttcggaacttactcgacagacagctgtgactatcccgattttgcccatccattggcactggctgttgaagccggcgaatgctatccgggaattgccatctgtggtagcggtaatggtatcagcatgacattaaacaaacatcagggtattcgtgccgcactctgctggacagcagaaatcgcacacatggcacgcctgcacaacgatgccaacgtattggttatgcccggccgttatatcagcacggaagaggcggatatgattatgacggaatttttctcgacagagtttgaaggcggacgccaccagaaacgcattgataaaattcctgtaaag

SEQ ID NO: 12727 - DNA, 1197 bp, Bacteroides fragilis
ttgggacaaacctttttcgggtatgaccgcacgcaggaacacgaacattttctggactggctggccggtgtcctcactaagaacaagattgatgtactgattgttgccggagatgtctttgatgtttccaatccgtctgctgcttcccagcggatgttctatcgtttcattcacagggtgacgactgagaatccgcgattgcagttggttgttgtggccggcaatcacgattcggccgcccggctggaatctcctctgcctttgttgcaggagatgcgtacggagattaaaggaattgtccgtaaacagaatggcaaaatagattatgagcatttgctggtagaattgaagaatgcggcgggggaggtagaagccctatgtctggcggtacctttcttgcgacagggagactatccggtggtagagactgaaggcaatccctatgcggaaggggtgaaggaactgtatgcccgtttgttgaaatatgcgttgaagaagcggactgacggacaggcattggtggctgtcggacacctgctggcaaccggttcggagattgccgagaaagatcatagtgagcgcatcatcatcggtggtctggagagtgtatcgcccgagtcttttcccgaacagattgtttatacggctttagggcatatccacaaggctcagcgcgtatcgggcagggagaatatccgttatgccggcagtcccttacctatgtcgtttgccgagaagcattatcaccacggagtggtaaaagtgactctggatgaaggttgggcggttgagatagagaaacttgaatatactccgttggtgcgtttgctaagtatccctgccacagaagctgcggctccggacgaggtgctggatgaattgcgcgggctggaactaccggaagatgaaccgatgccctatctggaggtcaaggtgaaactaagcgaaccggagccgatgttgcggcagcaagtggaagaaatactggaaggcaagccggtccggctggcccgtatcgtttctttctatcggcaggcggcagaggggagcgtggaagaagaaaccctgaccgccggattgcaggagatgaatcccttacagattgtgaaagcaacctttgagaacagttaccagacggagatgccggaagaactggtaaatttgttccaggaggcttgccggaccatcaatttagaa

SEQ ID NO: 12728 - DNA, 861 bp, Bacteroides fragilis
atgaacaaattgaatggtttcctttacggtttgctgtcgtcggcctctttcggccttattcctcttttcacgatccctgccatgcgtgaaggaatgaacttcgagtccattctgttctaccggttcctgtttgcctgcctggcattgggatgcatcctattgctagacaagcagtctttccatatcaagcggaaagagatcccgtcattaatgttacttgcttttctgtatctgatgtccgcagtctttctgttctggggatataaatttatggcaagcggcgtagccaccaccattcatttcatgtatccggtattgaccactctgatcatgatgatcttcttccgcgaaaggaaatcgacgtggcgtttctttgctatcgccctcgcagtggtcggtgtctcctgcctctcttatggcgacagttcgggaggaattaccgccctcggattgtttatcgtcctcctgtcggctttgggatatgcactttatctggttacggtcagccagctcaaaatcggacagatgaagggattacggcttactttctatgttttcctgttcggcacgctcttattgctggcaggcataggtactactacaggcatacaaaccatccctgactggcacacgggtggaaacctggtactcctggcactgatcccgacagtggtctccaacctggcattggtacgggcggtaaaaagcatcggctccacgctcacttccgtacttggagccatggagccggtgacagctgtttgtgtaggtatctttatattcggagaaccctttacccaaagcatcgggatcggtattctgctgattatttcggcagtaatcgttattatactgaaacgt

SEQ ID NO: 12729 - DNA, 1824 bp, Bacteroides fragilis
atgataaaacaacgtaaaatagaattgctggctccggccaaaaatctggaatgtggcatagctgctattgatcatggagcggatgctgtgtatatcggtgcgccgaagtttggtgcccgcgcggcggcagtcaattcattggaggacatagctgctttggtagagtatgcccatctgtacaatgcccggatttatgtgacagtcaatactatcttgaaagatgaagaactgcaagagacggagaagatgatttgggctttgttccgtgccggtgtagatgcactgattgtgcaggatatgggaatcaccggtctgaatctgccgcctattccgctgcacgccagtacccagatggataaccgtacggtggagaaggtgcgatttctggctgatgccggtttccggcaagtggtgttggcgcgcgaactttcgctgcgtgagatcagcaagatacacgaagcctgtccggatgtacctttggaaatattcgtgcatggagctctttgtgtcagctatagcgggcagtgttatgtcagtcaggcttgtttcgggcgtagcgccaaccggggcgaatgtgcccagttttgccgtttgccgttcagtctggtcgatgctgagggacgggtgatcgtgaaggacaagcacctcctttcactcaaagacctcaatcagagtgacgaattggaagcactgctcgatgccggtgcctcttctttcaagatagagggacgactgaaggatgtctcttatgtaaagaatgtgacggctgcctatcgccggaagctggatgccatctttgcccgccgcaaagagtacgcgcgtgcctcgtccgggagttgccgttatgcctttaaccctcagctcgacaagagtttcagccggggctttacccattattacctgcatggacgtaccaaggacgttttttcgttcgacacccctaagtcgttgggcgaggagatgggtacgatgaaagaggcaagaggaaactatctgaccgtagcgggattgaaatcttttaataacggtgacggggtgtgctacatcgatgagcaaggcaggctgcaaggcttccgcatcaaccgggtggagggcaataagctttatccgcaggagatgccccgtatcaagccccgtacggtgttatatcgaaatttcgatcaggagttcgaaaagattctggctcgtaagtcgtccgagcgcaggatagctgtgtctgtccgattgacggatactcctttcggattcgccctgacactgacagatgaagatgataacagtgtaaccctgtctctggcacgtgagaaagagccggcacgtacaccacaggaagagaatttgaaaacacagttggctaagtttggcaacacccctttcgaagcggtacgcatcgatatcgattttgccgggaactggtttctacctgcttcggtactcgccgattttcgccggcaggccgttgagaaactgatttccgcccgccgtatcaattatcggagggaattatttgtactgaaacctaccgctcatgcctttccacaaagcacgcttacctatctgggaaatgtgatgaatgcacaagccgtttctttctataccgggcacggcgtggcaagcatcgctcctgcttttgagcgggcaccggcagaaaaggcggtattgatgttttgcaaacattgcctgcgctacagcatgggatggtgtcctgtccatcaacgggaacgctctccgtaccgtgagccttattacctggtgtcgacagatggtaaacgcttccgcctggagtttgactgtaagaactgccaaatgaaagtgaatgccgta

SEQ ID NO: 12730 - DNA, 792 bp, Bacteroides fragilis
atgaaacaatatttagacctgctcgaccgagtgttgacggagggaatagaaaaaggtgaccgcaccggaacgggaaccatcagtgtcttcggacaccagatgcgtttcaacctggacgagggattcccttgcctgactaccaagaaacttcatctgaaatcaatcatttacgaactactgtggttcctcaaaggagacacgaatgtgaaatatctgcaggaccacggcgtacgcatctggaacgaatgggcggacgaaacaggagatctgggacatgtatatggataccagtggcgttcgtggccaacctacgacggaggatttatcgaccagatcagcgaagctgtagatgccatcaagcacaatcccgattcacgccgcatcattgtcagtgcatggaatgtaggagacctggatcacatgaacctccctccttgccacgcattcttccagttttacgtagcaaacggacggctgagcctgcaactctatcaacgcagcgccgatatcttcctgggggtacctttcaatatagcatcttatgcattgctgctgcagatgatggcgcaagtcaccggtctgcaggcaggagactttatccacacactgggcgacgcacatatctacctgaaccacctggaacaggtgaaactccagctcagccgggaaccgcgcccactaccacaaatgaagatcaatccggacgtgaaaaacatcttcgacttccaattcgaggactttgaattagtaaattatgatccgcacccgcacatcgctggaaaagttgcggta

SEQ ID NO: 12731 - DNA, 2052 bp, Bacteroides fragilis
gtgatcgataccacccaggaacctctggtaggtgccaccatcaccctgaaagaaaaaccgtctgtcggcaccaccaccgatacggaaggacgctacaccctgacactgccggaccagaaagaatataccgtacaggtctcttttgtgggatatgtgaccgctacaaaaaaaacaacagctgcccgtcaaagtcgtctcgatttcattctgaaagaagatcagatgaatctgagtaccgtagttatcaccggaacacgtactccgaaactactgaaagatgctccgatcatcacccgggtaatcacagccggcgatctgaagaaagtggacgcaacccatatcggacaattgcttcaggtagagctaccgggtatcgagttctcttattcaatggatcagcaggtaaagctcaacatgcagggatttggcggtaatgccgtcctctttctggtagatggcgaacgtctggccggagaaacactggataacatagactacaaccgcctcaacctggacaatgtagaacgagtggaaatagtgaaaggcgcggcctctacgctgtatggttcaagtgccatcgggggggtaatcaatatcattaccaaagcttcggacgatccgtggaatctgaacctcaatactcgtttcggagtacataatgatcagcggcatgggggtacggtaggattcaatgccggcaagttctacagccagaccaacgtacaatataccaacatagactccattcacgtaaaacagggggattatacgaccatcaacggcaataaaacctggaacgtgaaggaacgcctgatgttcaccccgaacgagcaattgcgactgacggcacgtgctggctattatttccgtgaacgggatgcctcctcggaaaccaagaaccgttatcgcggattcagtggcggactgaaaggaaactacgacttcaacacgaaaagtaacctggaactggcctacacattcgaccagtacgacaaaagtgactatctggtatcgtataagaatgatatccgcgactacagtaatgtgcaacacagtgtacgcgcgctttacaattatacgttcaacgataagaacacgctcaccgtcggaggagactatctacgagattatctgatgtcgtatcagttcaaagaaaacgccgattataccatgcattccgccgatgctttcggacagttcgactggaatcccacggaacacttcaacgtgattgccggattgaggttcgactacttctccgaatcgaacgtgcgccatttctcaccgcatctgggattgatgtacaagataggaaactgctcgctgagaggctcttatgcgcaggggttccgttcgcccaccttgaaagagatgcacatgaacttctatatggcaaacaccatgatgatttatggtaacccggatctggagccggaaaccagtcacaacttctcgctctccggagaatataccaaaaaccgttataattttacgctgacaggatattataacctggtgcacgaccgcatcgagtatacctctttcagagataccgacggaatgatcgcacaaaaatatatcaataccccacgggtagacattgccggaatcgatgccaatgcctctgccaaatatccttgcggcataggtgcacgtatctcgtatacgtacatccacgagttcatgcgtgacggacagaccaaactcagctctacccgcccccattcggctacggtacggttggagtatggcaagacatgggatcattatgacttcaatctgtcactcgacggacgggccttgtcacaggtgaaaaccaatcaatatacttccaatgatccgaatgcgggaacggaaaaggtaacttatccgggatataccatgtggaacctgacgctcacacaaagagtatggaaggggatcaatgtgaatatggccgtcaataacctgttcaactaccgacctgactattattatgccaattcaccctatacgacgggaaccaacttctccgtagggctgtcgctggacattgaccaaatgttcagaaaa

SEQ ID NO: 12732 - DNA, 1164 bp, Bacteroides fragilis
atgttaacccaattaattaatgcacgtatactcaccccccaaggatggatgaaagacggttccgtgcttatcagagacaataagattttagaagtcacaaactgcgatctggccgttatcggagctgaacttattgacgtcaaaggtatgtatgtagtccccggtggagtagaaatccacgtgcatggtggtggaggccgcgactttatggaatgtacggaagatgctttccgggcagcggtccatactcacatgaaacatggcacaacaagtatcttccccacactgtcatcatctacagtccccatgattcaacaagctgcagaaacctgtaccaagttgatggaagagaaaaacagccctatcctgggactgcacctcgaaggtcattacctgaacatgaaaatggcaggaggacaaattccggaaaacattaaaaatcctgatccgaatgaatacattccgatcgtagaacagtatcattgcatcaagcgttgggatgctgctccggaactcccgggagccatgcaattcggtaaatatattgctgccaaaggcatactgccttccgtagcacatacacaagccgaatttgaagatatccgtacagcttatgaagccggatacactcatgcaacccacttctataatgcaatgcccggcttccacaaacgcagagagtacaagtacgaaggtacagtcgaaagcatttatctgttggatgacatgacagtagaagtagtagccgacggtattcacgtcccccctacgatcctgagactcgtatataaaataaaaggtgtggaaagaacctgtctgatcaccgatgcccttgcatgtgccgatagtgatagcaaagaggctttcgacccgcgcgtaattatcgaagacggagtctgcaaactggccgaccattctgctttggcgggaagtgtcgccaccatggaccgcctgatccgcaccgttgtgcagaaagcagagatcccactggaagatgcagttcgcatggcttccgaaactccggcacgcatcatgggggtatatgatcgcaaaggttccttgcaaaaaggtaaggatgccgatattctggtactggacgaagacctcaacgtaagagccgtatgggccatgggtaagttggtacctgaaacaaatactctgttt

SEQ ID NO: 12733 - DNA, 873 bp, Bacteroides fragilis
gtgtttttcctaacggatgaaacattttgggacaagttgattcttaccttgcctactggtatggccataaaatcgttggacgacaacgagcctaagctgaaaaatgcccttccgcagcagattttcacaaaaacagctcttgaaccgggcgttttgaaaagcgttgtggatgaaataaacaagatagatcctcagaaatttaatgaccatgacctcataggacgtgtatatgagtcttttttacaggctttctcaatcaacgcagacaaagaggaaggggaattttacactccgcattctatcgtagagcttatcgcgtcccttatagaaccttttgatgggacggtctatgacccttgctgtggttccggcggtatgttcgttcaagctgcaatattcatagaggctcacggcggaaatactaaagctgtcaatgtgtatgggcaggaatccgaaccggccacctatcgccttgcaaagatgaatttagctatccgaggcatctcttaccatttgggggatagagccgtgtccactttctctgatgaccagcataaggaactcaagtttgataacaccatggctaacccattaaagaaatatgccgaatatggaggttttgagactgatcctcgatggcaaggctatggagtccctccgacaagtaatgccaactatgcgtggattcttcatatcctaaataaactgaatgtcagttgcggaattgcaggattcctgcttgccaatggtgctttgggtgatagtgatacgcagggaatacgcaaacagctaatcgaaagcgacaaagtagaagcgattatcgtttcgccgcgaaatatgttctattctaccgatatatcatctgtcaccctt

SEQ ID NO: 12734 - DNA, 1509 bp, Bacteroides fragilis
atgataaaaaagatattagttgcgaatcgtggcgaaatagccatgcgtattttccgtacctgccgggtaatgaatattgccacagtggctatctacacccgggtagatcggggtgccttgcatgtgcgttatgccgaagaggcttattgtatttccgattctccggaagatacgtcttatctgaaaccggaaaagattctgcaaatagccaaaaagacaggagctgccatccatccgggatatggctttctgtctgagaatgcggacttcgcccgtcgttgtgaggaagaaggggtaatctttattggtccgagtgccgatattattgcccgaatgggtatcaagactgaggcccgccggattatgcgtgaagccggtttaccgatcgtaccgggcacggaagatccggtgaaaggcattgccgaagccaaaaaggtggctgccgaagtaggatatcccatcatgctgaaagcactggctgggggtggtggaaaaggtatgcgtctggtacgcagtgaagaagaaatggagacggcattgcgcctttcacagtctgaagccggaacgtcgtttggcaacgatgctgtttatattgaaaaatatatcgagaatccccatcacattgaagtgcagatattgggagataaatatggaaatgtaattcatctttatgaacgggaatgttccattcagcgacgcaatcagaaagtaattgaagaatcgccttctccttttgtgaatcccgaaacacgtgccaagatgctgaaggttgcagtggaggcctgtaagcggattaattattacagtgccggaacgctggagttcatgatggataaagaccagaatttttattttttggaaatgaatacccgcctgcaggtggaacatccggtgacggaagagtgtaccggggtcgatctggtacgcgacatgatactggtagctgccggcaatcgtctgccttacaggcaagaagatgtcgagttccggggagctgccattgaatgtcgcatttatgccgaagatcccgagaataacttcatgccttcgcccggggtgataaccgttcgtgaagctcccgaaggacgtaatgttcgtttggacagtgcggcttatgcgggatttgaggtttcgctgcattatgatccgatgattgcaaagctctgttgttggggacgtaatcgtgattcggctatttcgaacatggcccgtgcgttgcgcgaatataagattctgggtatcaagactacgattcctttccatcagcgtgtgttgaagaatgcggctttcctgaaaggagagtacgatactacctttatcgatacgcgcttcgataaggaagacctgaaacgcaggcagaataccgatccgacggtagcggtgattgctgctgcgctgaaacattacgaagaagagaaagaggctgcttcacgcgccactacgcttccggtagtaggagattcgctttggaaatattacggcaagttgcaaatgactgccaataactat

SEQ ID NO: 12735 - DNA, 1542 bp, Bacteroides fragilis
atgaaagagcttatcaatcgcctggaagagttgaacaggcaagccgaaaaaggtggtggagacgcccgtatcgagaaacaacattctgtcggaaaattgacggcacgtgaacgtatcgacctgcttctggagaaaggatcgtttattgaactcgataaactggtgacccatcgttgtacggatttcggcatggagaaacagaaaatatccggtgatggagttgtaaccggatatggtatgatcggcaaacggcttgtgtatgtttttgctcaggacttcaccgtttttggcggtgcattgtccgaaacgtatgccaggaagatttgtaaagtgatggatatggctatgcagatgggagcacccatcatcgggctgaacgattcgggaggagcccgtattcaggagggagtccgttcgctggccggttatgcggagatattcctgcgtaattctttggcttccggtgtcatccctcagatcagtgccatcatgggtccgtgtgcgggtggggcggtctattcgcctgcattgaccgattttatcctgatggtgaaaaattccggttatatgtttatcaccggtcccgatgtggtgaagagcgtgacacaggaagaagtcagcaaagaagatctgggaggggcggatgtccataccatgaagtcgggggtggcacacctctctgccgaaaatgatattgaatgcatcaattacattcgtgaactgatttcttatctgcccggaaataatatggaagagcctccgtttgttgctactaccgattctccgacgaggcttacgcccgaactgtcggatctggtgcctaccaatcctaatcagccgtatgatatgaaagagatgatccgtgcagtggcggacgataacagtttctttgaattgcaggaagagtttgcccgtaacatcgttatcggttatattcgcctgaacgggaagacgataggggtggtggccaatcagccgttggcattggccggaacgctcgatatcaatgcctctgttaaggcagcccgttttgtccgtttctgcgatgcgttcaatattccattgctcacactggtagatgtaccgggattccttccgggggtagatcaggagtatggcggcatcatccgcaacggtgccaagttgctttatgcctattgtgaagctacggtgccgaaggttacggtgattgcccgtaaagcttatggcggagcttatgatgtaatgagttccaagcacatcaggggagatgtgaatctggcttatcccactgccgaagtagccgtgatgggccccgatggagcggtgaacattcttttccgcaaagagattgacaaagctgccgacactgaagccaggcgtaaagagttgcaggatgactatcgcagcaagtttgccaacccctaccgggctgccgagttgggctacgtggacgaggtgatcgatccggccataacccgtatgcgcctgatacgcagttttgagatgcttgccaacaagcggcagtctaatccgcctaagaaacattcaaatcttccactt

SEQ ID NO: 12736 - DNA, 1269 bp, Bacteroides fragilis
atgcaaccattagcggaaagacttcgcccaaagacattggatgattatatcggtcagaaacaccttgtgggaccgggtgctatcctgcgcaaaatgattgacgcagggcgtatctcttcatttattctttggggacctccgggagtgggtaagaccacactggcccaaatcattgccaataagctggaaactcccttctacaccttgagtgctgtcacctccggggtgaaagatgtgcgcgaagtgatagatcgcgccaagagcaataagtttttcactcaatccagccctatcctgtttatcgatgaaatacacaggttcagcaaatcccaacaagattcgctactgggagccgtcgaacatggcacagtcacgctgataggtgccaccaccgaaaatccgtctttcgaagttatccgtccgctcctttcccgctgtcagctctacacactgaaatctctggaaaaagaagatttactggaattgctgcaacgtgccattactaccgacgtagtgctgaaagaacggaaaatcgaattgaaagagaccggtgccatgcttcgcttttcgggaggcgatgcccgcaaattactgaacatactggaactcgtggtagaatcggaaacagaagaaaccgtaatcatcactgatgacctggtaacagaacgcttgcagcaaaacccgctcgcatacgataaagacggtgaaatgcattatgacattatttcggcgtttatcaaatcgatacggggaagtgaccctgatggcgccatctattggctggcccgtatggtagaaggaggcgaagatccggcattcatcgccaggcgcctggtcatctctgccgcagaagatatcggcctggccaatccgaacgcattgttattggctaatgcctgttttgacacattgatgaaaatcggctggccggaaggaagaattccactggcagaaataacgatttatctggcaacaagccctaaaagcaattcggcctacaatgccatcaacgatgcactggcactagtccgcgaaaccggtaatctgcctgttcccctacacttgcgcaacgctcccaccaagctgatgaagcagttaggatatggccaggagtacaaatatgcacataattacgaaggcaattttgtaaaacaacagttcttaccggatgaaatcaaggccaaacaactatggcaaccccaacacaatccggcagaacaaaaacatgccgagcgaatgaagcaactatggggaaatgaaaagaactat

SEQ ID NO: 12737 - DNA, 1545 bp, Bacteroides fragilis
atggccgaacaaagaagaaatacccgcagtactgctaagtctaaggtgcaacccgtaaatgattacgggcgtatccaaccgcaagcgccggaactggaagaagccgtgctcggggccttgatgattgaaaaagatgcctattcgctggtgagtgagattctccgtccggaatcgttttacgaacataggcatcaattgatttatgcagctattaccgatcttgccgttaatcaaaaaccggtagatattcttactgtgaaggagcagctcagtaagcgtggcgagctggaagaagtcggaggaccgttttatattactcaattgagcagtaaagtggcatcttccgctcatattgaatatcatgcccgtattattgcacaaaaatatttggcaagagagctcattacttttacaagtaacatacagagtaaggcttttgacgaaactctcgatgtggacgatcttatgcaagaggccgaagggaaactctttgagatttcacagcggaacatgaagaaggactatacgcagatcaatccgattattgccgaggcttatgaacagattcagaaagccgccgcacgtaccgatggtctgagcggattggagagtggatataccaaactggataagatgacttccggatggcagaaatccgacttgataattattgctgcccgtccggccatgggtaaaacggcttttgtactttcaatggctaagaatattgccgtgaatttcaggaatccggtagccttgttttctcttgaaatgagtaacgttcagttggtcaatcgtctgatctcgaacgtttgtgaaattccgagtgaaaaaatcaagagcggacaattggcagcttatgaatggcaacagctcgattataaattgaaggatttgctggatgcaccgctttatgtcgatgatactccctctctgtccgtatttgagcttcgaaccaaggcacgtcgattggttcgtgagcatggagtaagaattatcatcattgactacttgcagttgatgaacgccagcggtatggcatttggcagccgtcaggaagaggttagtaccatttcacgttcgttgaaggggcttgctaaagaattgaatattccgattatagctctgtctcagttgaatcgtggtgtcgagagtcgtgaagggcttgaaggaaaacgtcctcagttgagtgaccttcgtgaatccggtgcaatcgagcaggatgccgatatggtgtgtttcattcaccgccccgaatattacaagatatttcaggatgataaaggaaacgatctccgtggaatggccgaaattattatcgctaagcatcgtaatggtgcggttggcgatgttctgctacgatttaaaggtgagtatacccgtttccagaatccggatgacgatatggtaattccgttgcctgatgccggggccatgcttggatcacgaatgaataataccggaacagtacctccgcctcctgctgaatttgcccctcagaatagtaatccgttcggaggtggaaatgacggacctctgcctttt

SEQ ID NO: 12738 - DNA, 1275 bp, Bacteroides fragilis
atgagtgctgatattattcatccagggcatttgaatattattcatgaagcacaaaaactagggaatgtgactgtaggtgttttaacagatgctgctatagccagttataaacgtttaccttatttaacttatgaacaacgttccttaatagtacaaaatctaaaaggtgttgatgaagttattccacaaactaccttagattatattcctaatcttgaattgctaaaacctgattttgttgttcatggagatgattggaaagaaggcgttcagaaggaaacaagacaacgggttattgaaactctttctaaatggggcggacaagttattgatataccttatacacaaggtatatcctcaacaaaactcaattcaaagcttaaagaaatagggacaactcctgaagtgcgtttgaaaagattaaaacgtttgattgaagctaagtccattgttcgtatttgtgaatcacatagtggattaacggggttaatcatagaaaatacgtctgttgaggtaaatggtatgaagcgtgaatttgatggaatgtggtctagtagtttaactgattcaacatcaaaggggaagcctgatattgaagctgtagatttgacgacccgtttacatgatttaaatgatgctttggaatgtacaacgaaacctgttatttttgatggtgatacaggaggaaaaattgaacattttgtttttacagttcgtacgttagaacgtttgggtatttctgctataataattgaagataaagttggattgaaaaagaattctttatttggaactgatgttattcagacacaagatacaattgagggtttttgcgataaaatatcagcaggaaaacgtgctcaaataacggatgactttatgattattgccagaattgaaagttttattgctggtaaaggtttagatgatgctatgaaaagagcattagcttatattgaggcgggagctgatggtataatgattcacagtaaagataaatcaggtgaagatattagacttttttgtaaggcgttacgagaggttaatcaatcaattcctatagtagtagttccgacaacttataatcatataacagatgaagagttgtctacatggggtataaatgtggtcatttatgcaaaccatatgttacgtagtgcttatcctgctatgctaaatactgcgaaatctatattattacatgcccgttcatatgaggcaaatgatttatgtatgccagtaaaagatatattagaattaataccaggtacaaaa

SEQ ID NO: 12739 - DNA, 2439 bp, Bacteroides fragilis
atggatgaccagaatgataacgcattttcattaattgccgattttgacggaaacgaagatcaagtgtttgacataaaggttggtgaaactcttccggtactccccctccgtaatatggtattgttccccggagtatttatgcctgtttctgttggcagaaaatcatctttgagattggtgagggaagccgataagaaaaaatcttatattgcagtagtttgccagaaaatggcggaaacggacgagccggcatttgaggacttgcacccgatcggaaccataggtaagattgtgcgtgtactcgaaatgcccgaccagacaacaacagtcattatccagggaatgaaacgcctggagctgaagaatatcacggagacacatccgtacctgaagggtgaagtgaacattgttgaagaagaaatcccttcaaaagatgataaggagtttcaggcattggtggaaacctgcaaggatttgacaatacgatatattaaatcatcggacactttacatcaggaatcagcgtttgccatcaaaaacctgacgaaccacatgtttctggtggactttatctgtacgaaccttccgttgaagaaggacgagaaaatcgaactgttgcgcattgattcgttgcgtgaacgtacctatcggttgcttgaaatcctgaatcgtgaagtgcagttggccgaaataaaggcatctatccagatgcgtgcccgtgaggatattgaccaacagcaacgtgagtatttcctgcagcagcagattaaaacgatccaggacgaactgggtggtagcggccaggaacaggaaatagaagagatgcgccaaaaggcagaacacatgaagtggagtaccgaagtgcgggaaactttcctgaaagagcttgccaagctggaacgtacccatcctcaatcgccggattacagtgtgcagttgaattatctgcagacaatgctcaatctgccatggggagtttatactaccgacaatttaaacctaaagaatgccgagaaaacgctgaataaggatcattatggtctggagaaagtaaaggaacgcattctggaacatttagccgtacttaaattgaagggtgacatgaagtctcctattatctgtttatacggtcctccgggagttggtaagacttcactgggaaaatcgattgccgcagccttgaagcggaaatatatccgtatgtcattgggaggtgtgcacgatgaagcggaaattcgcggacaccgtaaaacttatatcggtgcaatgccgggacgtattatcaaaaacctgattaaagcgggttcttcgaatccggtatttattctggatgaaatagataaagtgagtgccgaccgtcagggagatccttcatcggctttacttgaagtgcttgatccggaacaaaatacggctttccatgataatttcctggatgtggattacgacttgtccaaagtgatgtttattgctacggcaaacaacttgaataccattcccggaccattactcgatcgaatggaactgattgaagtgagtggttatatcacggaagaaaaagtggaaatagcacgaaagcatttagtgccgaaggagttggaagcaaacggaatgaagaagaccgacattaaaattccaaaagatacgctggaagctattatcgaatcgtacacacgtgaaagcggtgtgcgtgagttggaaaagaaaatcggtaagattcttcgtaaatcggcccgccaatatgcaacagatggtttcttcttaaaaacagaaatcaaaccgactgatttgtatgacttcctaggtgctccggaatatactcgtgataaatatcaaggcaatgattatgccggtgtggtgacaggattggcatggacagccgttggaggtgaaatcttatttgttgagaccagtctgagccgcggcaagggcggacgtctcacattaaccggaaatttgggtgaagtgatgaaagagtctgctatgctggcacttgagtatatcaaagcacatgcttcactcttaaatctggatgaagagatctttgataactggaacatccatgtccatgtccccgaaggagctattccgaaagacggtccgtcggcgggtatcacaatggctacttcgttggcttctgctttgacacaacgtaaggtgaaggctaatctggctatgaccggggaaatcacgttacgtggcaaggtacttccggtaggtggtattaaggagaagattctggcagctaagcgtgccggcatcaaagaaattattatgagtgccgagaacaaaaagaatattgacgaaatacaggatatatatctgaaaggactgactttccattatgtgaatgatgtaaaagaggtctttgccattgcattgactcaagagaaggttgccgatgccattgatttatccgtaaagaaagccaaccaggaa

SEQ ID NO: 12740 - DNA, 1128 bp, Bacteroides fragilis
atgacattcgaattacaatatacagacgcaaaaagtaatgcccgtgccggtctgattacaacagaccacgggcaaatacaaacccctatatttatgccggtaggtacaatcggcagtgtgaaaggagtacatcagactgaattgaaagaggatattcaggcacagatcattctgggaaatacatatcatctttatttgcggccgggactggatgtactcgaaaaagccggtggattgcataagttcaatggattcgaccgtccgatgctgaccgatagtggtggttttcaggtgttttctttgtccggtatccgtaaattgcgtgaagaaggggccgaattccgttcgcatattgatggcagcaagcatatctttactcctgaaaaggttatggatatcgaacgtatcataggtgccgacatcatgatggcatttgacgaatgcccgccgggggattcggattatgcatatgccaaaaagtcattgggattgacacaccgctggctcgacagatgcattcaacgattcaatgagacggaacctaaatatggttatagccagtctctttttcctatcgtgcaaggatgtgtataccccgacctgcgtaaacaatctgcagaatacatagcttcgaaagatgcagacggtaatgccattggcggacttgccgtaggcgaaccggtagataagatgtacgagatgattgagttggtgaacgagatacttcccaaggacaaaccacgttatctgatgggagtcggcacaccggttaatattcttgagggtattgaacgtggagtagatatgttcgactgtgtgatgcctacccgtaacggacgaaacggaatgttgtttacgaaagacggtatcatgaacatgcgtaataaaaaatgggaagcagacttctctcctattgaagctgacggtgcttcgtatgtagacacactgtacagcaaagcatacttgcgccatttattccatgcgcaggagttgctggccatgcagattgcatctatccacaatctggcgttttatttgtggctggtaggagaagcacgcaagcacattatcgcaggagacttttcaacctggaaacctatgatggtgaaaagagtgtcaacaagacta

SEQ ID NO: 12741 - DNA, 249 bp, Bacteroides fragilis
atgaaaaaaggtcttcatcctgaatcataccgtccggtagtattcaaagatatgtcaaacggtgatatgtttttgtctaaatcaactgtagctacaaaagagaccatcgaattcgaaggtgaaacttatccgttactgaaaatcgaaatctctaacacttctcacccgttctatacaggtaaatctacattggtagatacagccggacgtgttgacaagttcatgagccgctacggtaaccgtaagaaa

SEQ ID NO: 12742 - DNA, 1002 bp, Bacteroides fragilis
atggttaattacaaagatttaggtctggtaaacactagagatatgtttgctaaggctatcaagggtggatatgcaatccctgcattcaacttcaacaatatggaacagatgcaggctatcatcaaggctgctgtagaaactaagtctccggttattttgcaggtatcaaaaggtgctcgtcagtatgctaacgctacattgttgcgttacatggctcagggtgctgtagaatatgcaaaagaactcggctgcaaaaatcctgaaatcgttttgcacctcgaccacggagatactttcgaaacttgcaaaagctgtatcgactcaggcttctcttctgtaatgatcgacggttctcaccttccttacgacgaaaacgttgctctgactaagaaagttgttgaatacgctcaccagttcgatgtaactgtagaaggtgaacttggcgtattggcaggtgtagaagacgaagtttcttctgaccaccacacatatactgaaccggacgaagtagttgatttcgttaccaagacaggttgcgattcattggctatctctatcggtacttctcacggtgcttacaaatttactccggaacagtgccacatcgatccgaagacaggccgtatggttcctcctccgttggcattcgacgtattggacggtgtaatgaaagaacttccgggattccctatcgttcttcacggatcatcttcagttcctgaagaagaggttgcaactatcaaccagtttggtggtgcactgaaagctgctatcggtattcctgaagaggaactgcgtaaagccgctaagtctgctgtttgcaaaatcaacatcgactcagactctcgcctggctatgactgctgctatccgtaaggtattcgcagaaaaaccggctgagttcgacccgcgtaaatatctgggaccggctcgcgacaatatggaaaaactctacaagcacaaaattatcaacgtgctgggttctgacaacaagttagctgaa

SEQ ID NO: 12743 - DNA, 1041 bp, Bacteroides fragilis
atggcaaagaaagaagacgaattaaactttgaaacagataataataaaatggcatcaagcgaaaaattaaaagccttacaggctgccatggacaagatagagaaaagcttcggtaaaggttctatcatgaaaatgggtgaagaagtggtagaacaagtagaagtaattccaacaggttcgatagcactgaatgctgcattaggcgtaggcggttatccccgtggaagaatcattgaaatttatggtccggaatcatccggtaaaacgacactggccatccacgccattgcagaagcacaaaaagccggtggaattgccgctttcattgatgcggaacatgcttttgaccgcttctatgcggctaaactgggagtagatgtggataacctgttcatctcgcaacccgataacggagaacaggcgttggaaattgcagagcaattgatacgctcttcagctattgacatcatcgtagtggactctgtagccgccttgactccgaaagctgaaattgaaggggatatgggtgacaacaaagtgggcttgcaagcccgcctaatgtcacaggcattacgtaagttaacatcagctgtaagcaagactcgtacaacctgtatcttcatcaaccagttgcgtgagaaaatcggtgtaatgttcggtaatccggagacaacaaccggtggtaatgcattaaaattctatgcttccgtacgtttggatatccgcggttcacagcagatcaaagacggtgaagaagtgattggtaagcagacgaaagtcaaagttgtgaaaaataaggtagctcctcctttccgcaaggcagaattcgatattatgtttggtgaaggcatatcacattcgggagaaatcattgacctgggagcggatttgggaattatcaagaaaagcggttcatggtatagctacaacgacacaaaattgggccaaggtcgcgatgcagcaaaacaatgtatcgccgacaatccagaacttgctgaagaactggaaggactgatctttgaaaagttgagagagcacaag

SEQ ID NO: 12744 - DNA, 1533 bp, Bacteroides fragilis
atgttagtaacaatagtagcatccattgcatgcttcatcgtaggaggaatcttatcgtacgtattgtttaaatacggactaaaggccaaatatgataatgtcctgaaagaagcagagacagaagcggaagtgattaagaaaaacaaactgctggaagtgaaagagaagtttctcaataagaaagcagatttggagaaagaggtagctctacgtaaccaaaagatccaacaggccgaaaataagttgaagcaacgtgaaatggtgcttagccagcgccaggaagagattcagcgtaaaagagccgaggctgatgcggtcagagaaaatctggaagctcaattgggtattgtagacaagaagaaagaagaactggacaaactccagcatcaggagattgagaagctggaagcactttccggtttgtcggccgacgaagccaaagaacgtctggtagagtcactgaaagaagaagcgaaaacccaggcacagtcttatatcaatgatatcatggatgatgccaagttgaccgcaagtaaagaggctaaacgcatcgtgatacagtctatacagcgtgtggctacagaaacagctattgaaaactcagtaactgtattccacattgaatcggacgaaatcaagggacgcatcatcggacgcgaaggccgcaatatccgtgctctcgaagctgctaccggtgttgaaatcgtagtagacgatacccccgaggctatcgttctttctgcgttcgaccctgttcgccgtgaaatagcccgtctggcattgcaccagttggttactgacggacgtatccacccggcacgcatcgaagaggtggttgccaaagtgcgtaagcaagtggaagaagagattatcgagacaggtaaacgcaccactatcgaccttggtatacacggattacatccggagttgattcgtatcatcggtaaaatgaaatatcgttcgtcttacggacagaacctgttgcaacatgctcgcgaaacggctaatctttgtgctgtgatggcatccgaactgggactgaatccgaaaaaggcaaaacgtgccggattgctgcacgatattggtaaggtgcccgatgaagaaccggaattgccacatgctttgttaggtatgaagcttgctgagaagtttaaggaaaaaccggatatttgcaacgctatcggtgctcaccatgatgaaatagaaatgaccagtctgcttgcacctatcgtacaggtgtgtgatgctatttcaggagcacgtccgggtgcacgccgtgaaattgttgaagcttatatcaagcgtctgaacgatctggaacaattggctatgtcttatccgggtgtgaccaagacttatgccattcaggcaggacgtgaacttcgcgtcattgtcggagcggataagatagacgataagcagacggagaatctgtcgggtgaaattgcgaagaagattcaggatgagatgacctacccgggacaggtgaagataaccgttatccgcgaaacacgtgcggtgagctttgcaaag

SEQ ID NO: 12745 - DNA, 1386 bp, Bacteroides fragilis
atgactctaatcaaatctatctctggtatccgtggaaccattggcggaggcgcaggcgaaggactgaacccgcttgacattgtaaaattcacgtcggcttatgccactttgattcgcaaaacatgcaaatcaaaaagtaacaagatagtagtgggccgtgatgcccgcatttccggtgagatggtaaagaatgtcgtagtcggtaccatgatgggtatgggctgggacgtagttgatatcgatcttgcttctactccgacaaccgaactggctgttacaatggaaggggcttgtggcggtatcattctgactgcatcacataaccccaaacaatggaatgcattgaaattgctgaatgagcatggagaattcctgaatgcagccgaagggcaagaagtacttcgtattgctgctgccgaggagttcgattatgcggatgtcgatcatttgggatcttatcgcaaagacttgacttataataaaaaacatatcgacagtgtattggcactcgatttggtagacgttgaggctatcaaaaaagctgatttcacagtggctatcgactgtgtgaactctgtaggaggtatcatcctgcccgaattgttggaacgtctgggggtgaaacacgtcgaaaaactctattgtgaaccgaccggaaactttgcccacaatccggaaccgttggaaaaaaatctgggagatatcatgaacctgatgaagggtggaaaagctgatgtagcgtttgtcgttgacccggacgtagaccgtttggcgatgatctgcgaaaacggtgtgatgtatggtgaagaatatacactggttacggtggcagactatgtattgaaacatactccgggcaatactgtatccaatctgagttctacccgtgctttgcgcgacgtaacccgcaaatatggtatggaatacaatgcttctgctgtaggcgaagtaaatgttgtgaccaagatgaaagcaacaaatgccgtgatcggtggtgaaggaaacggtggagtgatttatccagccagtcactacggacgtgatgctttggtaggtatcgcattattccttagccatttggcacacgaaggtaagaaggttagtgagttgcgtgcaacctatcctccttatttcattgccaagaaccgtgtcgatctgactccggaaatcgatgtagatgccattcttgctaaagtgaaagatatctataagaatgaagagatcaatgatattgacggtgtgaaaattgactttgccgataagtgggtacacttgcgcaagagtaataccgaaccgatcatccgtatatatagcgaagcatcgactatggaagctgctgaggagatcgggcagaagattatgaacgtaatcaacgaattggctaag

SEQ ID NO: 12746 - DNA, 759 bp, Bacteroides fragilis
atggatacaacagtaaaaattgatgcgcgtgacgtgaacttctggtatggtgacttccatgcactgaaggggatcagtatggagattgaagaaaaatcggtagtcgcgtttataggtccttccggatgtgggaaatctacttttctacgcctttttaatcggatgaacgacttgattcctgcaacccgcctgacgggagagatccgcatagacggcgaaaacatctatgacaagggagtgcaggtggacgagctgcgtaaaaatgtaggcatggtgttccagcgtcccaatccttttccgaaaagcatttttgaaaacgtggcttacgggtttagagtgaacggagtacaagataatgcctttatccgtcagcgggtggaggagaccctgaagggtgccgcgctttgggatgaagtgaaggacaaactgaaagaatcggcttttgccttgtccggcggacagcagcagcgtctttgtatcgcacgcgcaatggctgtatcgccttcggtgttgttgatggacgaacctgcttcggcgctcgaccctatttcgacggcaaaggtggaagagttgatacacgagttgaaagaacggtataccattgtgattgtgacgcacaatatgcagcaggctgcacgtgtcagtgataagacggcgtttttctatatggggcagatggtggagtttggcgacacgaagaagatctttacgaacccggagaaggaagcgacacaaaactatataaccggacgtttcgga

SEQ ID NO: 12747 - DNA, 1260 bp, Bacteroides fragilis
atggaattaaagagagttgtagtaacaggtctgggcgccattactcctgttggcaataatgtcccggaattctgggagaacctcgtgaacggggttagtggagcaggacctattactcatttcgatgcatcgcaattcaagactcaatttgcatgtgaagtcaaaggcttcgatgcaactcaatatatcgaccgcaaagaggctcgtaaaatggacctgtacacacagtatgccgttgccgttgccaaagaagcagttgcagactcgggtcttgatatcgaaaatgaggatttaaacagaatcggcgttatttttggtgccggtatcggtggtatacgtacatttgaggaggaaacgagtaattacgcccttcacaaagaaaacggtcctaagtacaatccgttcttcatccctaagatgatttcagatattgctgccggacagatttctattatgtatggcttccacggcccgaactacgcaacttgttctgcatgtgcaacttctactaacgccatcgccgatgcattcaacctgatccgtctgggtaaggcaaacgtgattgtatccggtggttcggaagccgctatcgcagctgccggtgtaggaggtttcaatgctatgcatgcattgtcaactcgtaacgacgaaccacaatctgcatctcgtccgttcagtgcaagccgtgacggctttgtaatgggtgaaggtggtggatgtttgattcttgaagaactggaacatgcaaaagcccgtggcgcaaaaatctatgcagaagttgccggcgtaggtatgtctgctgatgctcaccacctgacagcatctcatccggaaggactcggtgcaaaattggtgatgaagaatgccctggaagacgcagagatgagtcctgaagaagtggattacatcaatgttcatggaacatctactccggtcggagatatatcggaagccaaagcaatcaaagaagtatttggtgaacatgcttttgagttgaatatcagttcaaccaaatcaatgacaggtcacttgttgggcgctgccggtgcggtagaatcaattgcaagtattctggctattaagaacggcatcgttcctccgactatcaatcatgccgaaggtgacaatgacgagaacattgactataatcttaatttcacgttcaacaaagcacagaaacgcgaaattaatgttgccctttcgaatacattcggattcggcggtcacaatgcttgtgtaatcttcaagaaatacgctgaa

SEQ ID NO: 12748 - DNA, 363 bp, Bacteroides fragilis
gtgagtgatacgatgcagatcatcgctaacggtttgacaactgtgcctacacacgagcttctggatttcattactaattatgtgaaacaggaatcggtggaacgtattattataggtctgcccaagcagatgaataatgaggtctctgagaatatgaagaatatagagccttttgtgcgttcgctaaaaaaacgtttgcccgatatgcctgtggagtatgtagatgaacgtttcacttctgtcctcgcacatcgcacgatgcttgaagccggactgaagaaaaaagacaggcaaaacaaggcattggttgatgagattagtgcaactattattttgcaatcttatttggaaactaagcgtttg

SEQ ID NO: 12749 - DNA, 414 bp, Bacteroides fragilis
atgaagactttaaattatacacatttggaagaaaaaggagctaacaccatcgtactgtcattacagcaactgcttgccgattttcagattcattatgcaaacctgagaggatttcactggaacatcaaaggacacggtttcttcgtactgcacagcaagtttgaagatttatataacggagccgccgaaaaggtggacgaaatagccgaacgtatactgatgctgggaggaactcccgccaataaatacagtgactatctgaagatggcgcagatcaaggaagtagacggagtgaataaggccgacgacgctctgaatcatatacacgatacttacgggcatctgattacggaagaacgtaaaaaccagacacacgccacaacacacaacgacgaagtaacagtgaccatgatg

SEQ ID NO: 12750 - DNA, 771 bp, Bacteroides fragilis
atgaaactcaacctaaagaatcctatcgtcttttttgatctggaaacgaccgggacaaatatcaactcagaccgaatcgtagaaatctgttatcttaaagtgtatcccaatgggaatgaagagtcgaaaactctccgtatcaatcccgaaatgcctatccctgccgaatcatctgctgttcacggtatttatgatgctgatgtagccgattgtcctacttttaaggaagtggcaaagagtattgccaatgatatcgagggttgtgatctggctggtttcaattccaaccgttttgatattcccgtgttggcagaagaatttctgcgtgcgggtgtggatatcgatatgagtaagcgcaaatttgtcgatgtacaggtgattttccataagatggaacagcgtacccttacggctgcttataagttctattgtggccgtaatctggaagatgcgcatacagcggaagctgatacccgtgccacgtacgaggtactgatggctcaactcgatcgttatccggaagagttgcagaatgatatgtctttcctggccgattattcaagctataacaagaatgtggattttgcaggacgtatggtatatgacgacaatggggtagaggttttcaactttggtaaatacaaaggacagtcggtgagtgaagtactgaaaaaagatccgggatattacagttggattctgaacagtgatttcacgttgaatacaaaagccatgttgaccaagattcgtctgcgtgagttaaccggaaaa

SEQ ID NO: 12751 - DNA, 606 bp, Bacteroides fragilis
atggaagaaaataataatatatatccgatattcgaccggatgctgacccggcaggataaagaagaactcttgaaacagcgtggtgtgatgatctggtttaccgggttgagcggatcgggtaagagtaccattgccatcgctttggaacgcgaactgcataaacgcggattgttgtgtcgtatcttggatggagataacatccgtacaggcatcaacaataatctgggcttttccgaaactgacagggtagaaaacatacgccgtatagccgaggtttcgaaactttttattgatacaggcattattacaattgctgctttcatcagccctaacaacgatatccgtgagatggctgcccgcattgtcggaccggatgactttctggaaatatttgtcagcactccgctcgccgaatgtgaaaagcgggacgtaaagggattgtatgccaaagctcgtcggggagaaataaaaaactttaccggaatatccgcccctttcgaagctcccgaacatccggctttgtcacttgacacttccgtattgtcacttgaggagtctgtcaatcgattactggaaattgtgttgcctcgggtaagcagacatgaa

SEQ ID NO: 12752 - DNA, 672 bp, Bacteroides fragilis
ggatatatgggcgaggtggctctttcgttggcggccgttatcggtgccctgtcggtgatggcgcttattgtgtatgtatcccaaaaagtgaaaggaaatgtaactttgttgattatcggtgtgatgattggctatgtggcgagtgccgttatcggtgtactcaaatattttagtgtggaagaagacatccgcgcctacgtcatttgggggttgggtagctttgcccgcgtctccggtgatcagatgaccttgttcgtctgtatcatggttgtgctgattccgctctctttcctgttgattaaaaccatgaatctgatgctgcttggcgatgggtatgcacgtaacttgggattgaacatcaagcgtgcccgcctgttggtcatttcatgttcgggagtgcttgtagccatcgtgaccgcttattgcggaccgattatgttcattggtttggcggttcctcatctttgccgtgccatctttcatacctcggatcaccgcatcctgatgccggccactttgctggcaggtgcttcgttggctttggtatgcaatctagttgcccgcatgccgggctttgagggagctcttccggtcaactccgtgactgcgctggtaggcgcgccggtcgtggcatcagtgttgttccgtaagcgtaaaagtgaattaagtgaa

SEQ ID NO: 12753 - DNA, 1170 bp, Bacteroides fragilis
atgaaaagttttttagttgatcaggatggctattacggagaatttggaggtgcttatgtacctgaaatcctccacaagtgtgtagaagagttgcagaatacttatctcgacgtaatagagagcgaggacttcaagaaagagttcgaccaattgttgcgtgactacgtaggacgcccttccccactctatccggcccgccgcctgtcagagaagtacggttgcaagatgtatctgaaacgggaagacctgaatcacacgggtgcccataaaatcaataacaccatcggacaaattctactggcaagacgcatgggtaagaaacgtatcattgcggagaccggtgccggacagcacggggtggcaacagccacagtctgtgccctgatgaacatggagtgcatcgtatacatgggcaaaacggatgtagaacgccagcacatcaatgtagaaaagatgaaaatgctgggagcgacagtggttccggtcacttcgggcaacatgactctgaaagatgccacgaacgaagccatccgagactggtgctgccatccctcggatacgtattacatcatcggttctaccgtagggccgcacccatatccggacatggtggcccgtttgcagtcggtcatcagcgaagagataaaaaaacagcttcaggagaaagaaggacgtgactatccggactatctgattgcctgcgtgggcggaggaagcaacgctgccggaaccatctatcattatatcgacgacgaacgggtacggatcgtattggccgaagccggcggcaagggaattgaaaccgggatgacggcagccaccatccaactcggaaaaatggggatcattcatggggcacgtacgtttgtgatccaaaacgaagatggacagattgaggaaccttattccatctccgccggactggactatcccggtatcggcccgatgcacgccaacctggcagacaaaaaacgggcaatggtactggctgtcaatgatgacgaagccatccgtgccgcttacgagttgacccggctggaaggaatcattcctgccctggaatcggcccacgcattgggagccttggaaaaaataactttcaagccggaggatgtagtcgtactgacggtatcgggacggggagataaagatatagaaacttatctggga

SEQ ID NO: 12754 - DNA, 999 bp, Bacteroides fragilis
atgatcaatcctatttattcagccgataaagcaagatactccggtgggatgaagtaccgttgttgtggtaaaagcggtatactgttaccggaagtttctctgggcctctggcataattttggtgatgttgacacattagccaacagcctccggatggctcactttgcattcgacaaaggtatcacacatttcgacctggctaataactacggtccctcttacggctcagccgaagaaacgttcggactcatcatgaagaaatcctttatgccctatcgggatgaactattcatatccaccaaagccggccatgatatgtgggaaggtccttacggaaactggggctcccggaaatacctgatgagcagtctcaaccagagtttaaaacgtatgaatctggagtatgtcgatattttctatacccatcgttacgaccccgaaactccacttgaagaaactcttcaggcgctcgtcgatattgtccggcaaggtaaagccctctacatcggtatatccaaataccccaaagaaaaggcagagttcgcctaccgatatctggaagaacgagacgtgcattgtctactctatcagggacgatacaacctgtttaaccgcgaaccggaagaacaaggcattctgcaacaagccaaagaaaatggtacgggctttatcgccttttctcctctggctcaaggtctgctcaccaaccggtatctaaatggaattccggaagactcaagaatagcccgcggaggtttcctgaagaaagagcaattgaccgagcaagtattcaataaaatcaaagcattgaatgaagtggcaggtagtcggggacagaccttagctgaaatggcattggcctgggtcttaaaagatgatctggtaacctctgttatcgtcggcgcaagctccgtcaagcaactggaagacaatctgaaagtgacggaaaactgtaagttcagtacagacgagattcaacgtatcgggaacattcttcaa

SEQ ID NO: 12755 - DNA, 1182 bp, Bacteroides fragilis
atggctaaagagaaatttgaacgtaccaaaccgcacgtaaacattggtacaatcggtcacgttgaccacggtaaaaccactttgactgctgctatcactactgtgttggcaaagaaaggtctttctgaacttcgttctttcgattctatcgataatgctcctgaagaaaaagaaagaggtattactatcaatacttcacacgttgagtatgaaactgctaaccgtcactacgcacacgttgactgtccgggtcacgctgactacgtaaagaacatggttactggtgctgctcagatggacggtgctatcattgtagttgctgctactgatggtccgatgcctcagactcgtgagcacatccttttggctcgtcaggtaaacgttccgaagctggttgtattcatgaacaagtgcgatatggttgaagatgctgagatgttggagcttgttgaaatggaaatgagagaattgctttcattctatgatttcgacggtgacaatactccgatcattcagggttctgctcttggtgcattgaacggcgtagaaaaatgggaagacaaagtaatggaactgatggaagctgttgatacttggattccactgcctccgcgcgatgttgataaacctttcttgatgccggtagaagacgtgttctctatcacaggtcgtggtactgtagctacaggtcgtatcgaaactggtgttatccatgtaggtgatgaaatcgaaatcctcggtttgggtgaagataagaaatcagttgtaacaggtgttgaaatgttccgcaaacttctggatcagggtgaagctggtgacaacgtaggtctgttgcttcgtggtgttgacaagaacgaaatcaaacgtggtatggttctttgtaaaccgggtcagattaaacctcactctaaattcaaagcagaggtttatatcctgaagaaagaagaaggtggtcgtcacactccattccataacaaatatcgtcctcagttctatctgcgtactatggactgtacaggtgaaatcactcttccggaaggaactgaaatggtaatgccgggtgataacgtaactatcactgtagagttgatctatccggttgcactgaacatcggtcttcgtttcgctatccgcgaaggtggacgtacagtaggtgctggtcagattactgaaattatcgac

SEQ ID NO: 12756 - DNA, 1452 bp, Bacteroides fragilis
atgaagagtaaatggcgtatgccacatccggcaacgatgttcttcctgtttacgctggcagtcatctttctatcctggatattcgatatttatggattaagggtgcaactaccacagacaggagcagagattcgtgtacaaagtctgctgagtccggagggtattcgctggatgttgcgaaatgcaattactaatttcacaggatttgcaccattgggaatggtgctaatagcaatgtttggtatcggggtagctcaacattccggttttattgatgcttgtgtccggcaaggggtgaaaaatcgaaaaaataccaagaggatcatcctgtgggtgattattcttggattgctatcgaatatagtaggagatgcaggttatataatattgcttccgatagcagccactttgttttattcggtaagattaaatccggtagcgggaattattaccgcatatgtttcggtttcctgtggctacagtgccaatgtagtgctgagcaccatggacccattaattgcccgtacgacacaggaagcagccattgattccggagtatatcagggaaatacgggaccattgtgcaattattattttatgtctgtctctacattcgtcatcggagccataatttacaggataacctgcaaacgactgattccttctctgggacaatatgaggggaaacagatatttgaaggctataaacaattgtcacgcaaagaacgccgggccatgacaatggcaatcgttatgggaatgctttatgctgcaatcattttatgggccactttttcttcctggggtatcttgcgtggagtaaatggagggctgatacgttcaccattcattatggggattttgttcttattgtctctgggagctgctattatgggaatggtctatgggtttagttccggacgctactgttcggataacgatgtgatagaaggattggcacaacccatgaaattattaggtggctatctcgttattgccttttttgcagcccagatgtttgcttgcttggaatattcacatttagataaatgtgtggctatcataggtgccaatttactgtcttctgtgcaggcaggtcctttatggactttgattttatttatattgttcaccgcaaccattaatctgattatggtttctgctactgctaagtgggcatttatggcatttatcttcgtaccggtatttgcacgaatagggattgaaccggatatgacacaatgtgctttccggataggtgacagcgcaactaatgctatcactccattcatgttctatatgcctttagtgttgacctacatgcaacagtatgataagcaagccacttatggttcactcttaaaatacacttggcgatattcggtatatatactgataggctggacaatgttactttttatttggtacttaactggcttacctttaggatta

SEQ ID NO: 12757 - DNA, 1150 bp, Bacteroides fragilis
atgattaatcggtttatattagacgaagtttcttacttcggtccgggagcacgtgaagtgctcccaaagagatttcacgtttggggctgcacaaagcatttgtcgcaacagacaaagatttgataaagtttggagtagctgacaaagtacttaaggtgctggaagctgccaagattccttatgaaatattcagtgagattaagcccaatcctacagtgtcgaatgtgaaagccggtgtcgaggcatttgcatcttccggtgcagactttattttggctataggtggcggatcttctatggatacggcaaaggcgattggtattattaccaataacccggaattcagtgatgtcgtttcattggagggagtggcagataccaagaagaaatctgttcccatcatcgcgttgcctactactgcaggaactgcggcagaggtgactatcaactatgtgataacggatgaaaagaaccagaagaagatggtttgtgtagatcctaatgatattccgtctattgcgatagtggatgctgagttgatgtacacacttcctaaaagtctgactgcagctacgggactcgacgcactgactcatgctattgaaggtttaataaccaaaggggcatgggagatgagtgatatgttcgaaattaaagctattgaaatgatcaatcgttatcttgtgactgccgttgaagaaccatcgaatgcagaggcacgtaacggtatggcagtggctcaatatattgcaggtatggctttttcgaatgtaggtttgggagttgtgcatggtatggcacatccgttgggagctattttcgatattcctcatggtgtggccaatgctctattattgcccattattatggagttcaatgctcctgcagctcttgacaaatatgttgagatagctaaagcgatgaatgtgtattctactgacatgactaaagaaaaggcggcagaagcagcagtcgaagctgtaaaaacattatctttgagggtcaatattccgcaacacttgtcggacttgggtattcaggaaagtgatcttgaccgtctggccacagcagcgtttgctgatgtatgtacgccgggcaatccacgggaagtaacaaaagaaattattcttgatttatataagaaagcatt

SEQ ID NO: 12758 - DNA, 867 bp, Bacteroides fragilis
atgagcatacttattgataaatctacccgacttttggtgcagggtatcacaggcagggatggactttttcatgccaaaaagatggctgaatacggaacaaatgtggtgggcggaacatcacccggcaaaggaggaacaatgatagacgatacctttccggtattcaacaccatgcatgaggctgttcgccgaacgcaagccaatacatctgttattttcgtaccggcacgctttgctgccgatgctattatggaggctgccgatgccggtatccgactgataatttgtatcacagaaggaattcctacattggatgtaataaaggcctaccggtttgtcgaactgaagggagctaaactcattgggccgaattgccccggcctgatctctcccggagaaagtctggtaggtattcttccggggcaagtgttcactccgggcaatataggagtaatcagccgtagcggtacgttgacctatgaaatcgtatcacatctgactgctaaaggtatgggacagtccactgccattggtatgggaggtgatccggttgtcggactttattttcgtgatcttttgggaatgttacaaaatgatccgcaaactgatgctattgtgatgattggtgagattgggggtaacgcagaagagttggccgcaacatacattcgtgaacatgtgactaaacctgtggtggcatttattgcagggagatctgccccgccgggtaaacagatgggacatgccggagctattatatccggaagttccggttctgcaaccgaaaagatttcagcattggaagctgcaggaatcagagttgccggtgaaccctcggaaataccggatttactgaaaggcagtttc

SEQ ID NO: 12759 - DNA, 1392 bp, Bacteroides fragilis
atgaatacattatttgataaaatatgggatgcacacgtagtgactacagtggaagatggccctacacagctctatatcgacagattatattgtcatgaagtaaccagtcctcaagcttttgccggattgcgtgcacgcgggattaaggtgtttcgtccggagaaagtatattgtatgccagaccataatacgccgactcacgatcaggataaacccattgaagatcctgtttcaaagactcaggtggatacactgactaagaatgcagctgattttggtttgactcattatggaatgatggacaagcggaatggtattatccatgtggttggtccggagcgaggacttactttacctgggatgaccattgtttgcggcgattcacatacttccactcacggcgcgatgggagcggttgcttttggtatcggtacaagtgaagtcgaaatggtacttgcttctcagtgtattttgcagtcacgtcccaagaccatgcgcatcacggtggatggtaagttgggcaagggagtaacagccaaagacatcgctctctatatgatgtcgaaaatgacaacgagtggtgcgaccggatattttgtagaatatgcgggtgaagcgatccgtagccttacaatggaaggtcggttgacgctctgcaacctttctattgagatgggggcccgtggaggtatgattgcaccggatgaagtgactttcgaatatatcaaaggccgtgagaatgcacctcagggagaagaatgggatcaggcagtgcagtattggaaaactctgaagagtgaagatgatgcggtttttgataaagaagttcattttgatgctggggatattgagccgatgattacttatggaactaatccgggtatgggtatgggcattacgcagcatattcctacaacggatggaatgaatgaaacaaccaaagcttcattcctgaaatctttggattatatgggatttcagccgggggaagcattgttggggaagaagattgattatgtgtttctgggtgcttgtacgaatgggcgtatcgaagatttccgtgcatttgcttctattgtgaaaggacatcagaaagctgaacatgtgatagcatggctagtgccgggctcttggatggttgatgcccagatacgcgaagaaggattggataagattctggaggatgccggttttgctattcgtcaaccgggatgttcggcttgcttggctatgaatgatgataagattcctgccggaaagtattcggtttctaccagtaaccgtaactttgaaggacgtcagggacccggagcgcgtacactattagctagtccgcttgtggcagctgccgctgcgataacgggagtgatagctgacccgagggaactgatg

SEQ ID NO: 12760 - DNA, 1635 bp, Bacteroides fragilis
atggcaaaagaaatattattcaatatcgaagctcgcgatcaattgaaaaaaggtgttgatgctttggctaatgcagtaaaagtaacactaggcccgaaaggacgtaatgtgattattgaaaagaaattcggtgctcctcacattactaaagatggtgtgactgtagcaaaagaaattgaactgacagatgcttaccagaataccggtgcacagttggtgaaagaagtggcttctaaaacaggtgatgatgccggtgacggtacaactactgcaactgttttggctcaggctattattgctgagggtctgaagaatgtaactgctggtgcaagccctatggatattaaacgtggtatcgataaggcggttgccaaagtggttgattctattaaacaccaggcagagaaagtgggtgacaactatgacaagattgagcaggttgctactgtttctgctaacaatgatccggttatcggtaaactgattgccgatgctatgcgtaaggtttctaaagacggtgtgattactatcgaagaagctaaaggtactgacactacaatcggtgtggtggaaggtatgcagttcgatcgtggttatctgtcagcttactttgtgactaacacagagaaaatggagtgtgagatggagaaaccgtatatcctgatttacgataagaaaatttctaatctgaaagacttcttgcctatccttgaaccggccgttcagtctggtcgtcctctgttggttattgcagaagatgtagacagtgaagcgttgactacactggtagtgaaccgtctgcgttctcagttgaagatctgtgcagtgaaagctccgggattcggtgaccgtagaaaagagatgttggaagacattgccgtattgacaggtggtgtagtgatcagtgaagagaaaggtctgaaactggaacaggctactatcgaaatgttgggtactgctgacaaagtgactgtttctaaagacaacactacaattgtaaacggtgccggtgctaaagaaaacatcaaagaacgttgcgatcagattaaagctcagattgctgctactaaatcagactacgatcgtgaaaaattgcaggaacgtctggctaaattatcaggtggtgtagctgttctgtatgtaggtgctgcttcagaagtagaaatgaaagagaaaaaagaccgtgtggacgatgctcttcgtgctactcgtgctgctatcgaagaaggtattgtagccggtggtggtgtagcttacattcgtgctattgaatcacttgacggattgaagggtgagaatgatgacgagactaccggtattgctatcatcaagcgtgcgattgaagaaccgcttcgccagattgttgccaatgcaggtaaagaaggtgcagttgttgttcagaaggtgagtgaaggtaaaggtgactttggttacaatgcccgtaccgatgtttacgaaaatatgcatgctgcaggtgtggtagatcctgctaaagtgacacgtgttgctttggaaaatgccgcttctatcgcaggtatgttcctgactactgaatgtgtgattgtagaaaagaaagaagataaacccgaaatgccgatgggtgctcccggaatgggaggaatgggtggaatgatg

SEQ ID NO: 12761 - DNA, 1287 bp, Bacteroides fragilis
atgaaaatagaaaaaattacaggacgagaaattctcgactcaagaggtaaccctacagtagaagtagacgtagtattggaatcaggcattatgggacgtgcatccgttccatcgggtgcatcgaccggtgaacacgaagcgcttgaactccgcgacggtgataaacatcgttatggcggcaagggtgtacagaaagcagtagagaacgtcaataaagtcattgctccgcatctgatcggtatgtcggccctcgaccaaataggcattgatcatgccatgttggcattggatggaacaaagacaaaagccaaactgggtgccaacgctattctgggtgtttcgcttgccgtagctaaagctgctgccaactatctcgatattcctctttacagatacatcggaggtacgaatacgtatgtattgcctgtaccaatgatgaacatcattaatggaggctcacacagtgatgctccgatagccttccaggagtttatgatccgtccggtaggtgcaagttcttttaaagaagggttgcgcatgggtgccgaagtattccatgctttgaaaaaagtattgaaagaccgtggtctgagtacagctgtcggtgatgaaggcggttttgctcccaacctggaaggaacagaagatgcacttaactctattcttgccgctatcaaagctgcaggctacgaaccgggcaaagatgtaatgattggcatggactgcgcctcttccgaattctatcatgacggtatttacgattacaccaaatttgaaggtgaaaaaggcaaaaaacgtacagctgacgaacaaattgactatttggaaaaacttatcaacgaatatccgattgattccattgaggatggtatgagcgaaaatgactgggaaggctggaagaaattgactcaacgcatcggggatcgctgtcagttagtaggcgacgatttattcgtaactaacgttgacttcctggcaaaaggtatcgaaaagggttgcgctaactctatcctgatcaaggttaatcaaatcggttcactgacagaaacactgaacgctattgaaatggcacaccgccatggatatacaacggtcacttcacaccgctcaggcgaaacagaagatgcaaccattgcagatattgccgtagcaaccaacagcggacaaatcaagaccggttctctaagtcgttcggaccgtatggcaaaatacaatcagctgcttcgtattgaagaagagttgggagaccgcgctgtatacggatataaacgaattgtagtaaaaggc

SEQ ID NO: 12762 - DNA, 1881 bp, Bacteroides fragilis
gtgaagaaaaactatgtattgaacactgccattatcaatcgggggaatgcgaagaccattttggcacagtccgaacaactcaaccactaccagaaaagaatcaaccggcagaagcaggaagaagataatttattgtctcgtttcaagttcctgcgcaactctactatcctgattttggcattgatgttgctcattatccctttgctgggatatgtaatgtacatgaacctccgggttaaaaataagaataaagaactgcatgataaaaatcagcttgtagaagctcaaaaagaagaactggctgtcaagaatagccagattgagaatatctccaaccagaaactacaattttttaccaatatctcccatgaaatccgtactcctcttacactgatacttggaccggtcaataaattgataaagaactccaagcttgatccttctattcaagaagacgtggctttgatgaaacggaatgtagaccggctctacaggattgtcaaccagatactcgatttccgaagaatcgacaacgataagatgaaattgattttgcgtcaggtagatttgatcggtatggtaagggaagttttcgactactttaccggtattgccgaagagaagcagattcattaccggttctctaccaatattgacgaactgaacatttacatagatgtcaataagatagagcaggtgttggtaaatatcatttcgaatgcctttaaatattcggatagtgggggagatatttctgtccggattaccggtgaagcggaaactgtcctgctggaagtggaggatcacgggcggggaatttcaaaagagagtatggaacacctgtttgaacgcttctataccggtaataagactttcggtacagtaggctttggcattggactcaatctttcaaaagagtatgtcgacctgcatgacggtgaaatccgtgcagagagtcaaccgggagagtatactttattcagcgtccggctttataaagatatcgctcactatacacacgagtatatactggaagagaccgatcgcttcaatctcagttatcacgatatggaggtggatacgacggtggtcaacgaaatgctttctaaaacctatgattaccacgtcctggtcgtggaagacgatcccgatgtacgatatagcttacggaaagagctgtccgccaattttcaggtagaagtggcaggtaatggtaatgaagcattggacttgttgggacagggtgatgcttttcacttgattctgagcgatgtattaatgcccggtatgaatgggttccagttggttaaccgggtgaagaatgatcttgctttcagccatatccccatcatactgctgacagccttgtccgaagacagccagcgcatctacggcattgctgagggggcagacgagtatattcccaaacctttcaacatcgacttcctgaaaatacgtatcatcaacatgatttcggaacggcagaagatgaaggaagcttatatgaagaatctccgggccggtacgatggacaatgtggaggtatgcaaactgatgaaggtagacgagttgttcagggacaagctgctgagtattgtcgacacgcaatatgaaaactccgatttcagcatcgaagacctgagtgaacatttgggattgtcgagggtgcacctttaccggaagatgaaaacactgttcggggtttcccccaccgattacctgaggaattaccggctcaataaagcaatgcttttgcttaaagcccggcagtacaatatcagtgagatagcttatatgaccggttttacttcgcccgcctatttcactaaatgtttccgtacactttatggggtcactccgacagaggcaatggtggctaac

SEQ ID NO: 12763 - DNA, 636 bp, Bacteroides fragilis
atgaaaaatttagagagattattcgccgagaagttgttgaagattaaagctattaagcttcaaccggcaaatccgtttacatgggcttccggatggaaatcaccgttttactgcgacaatcgtaaaaccctttcttatccttctcttcgtagttttgttaagttcgagattacacgtttggttctggaacgtttcggacaggtagatgctattgccggagttgcgacgggggctatccctcaaggggctttagtggctgatgcattgaatcttccgttcgtgtatgttcgctctaccccgaaagaccatggtctggaaaatcttatcgaaggcgaacttcgtccgggaactaaagtcgttgttgtggaagatttaatctctaccggtggaagcagtttaaaagctgtagaagctattcgtcgggatggttgcgaagttattggtatggtagctgcttatacttacggatttcctgttgccgaacaggcctttaaagatgctaaagtgcctttggtaacattgactaattatgaagctgtgttagatgttgcacttcgtaccggttatattgaagaagaagacattgcaacgttaaacgaatggcgcaaggatccggctcattgggaaaccggaaaa

SEQ ID NO: 12764 - DNA, 2202 bp, Bacteroides fragilis
atggaccgctttatcgaccagttaatgaaaaagatgacgctggaggagaagatcggccagctcaacctgcccgtgaccggagagatcactaccggacaggcgaaaagcagcgatgtagccaaacgaatccgtaacggagaggtgggaggactgttcaacctgaaaggagtgaaacgcatccgtgaagtacagcggcaggcggtggaggagagccgcctcggcattcccttgttgttcggtatggacgtaatccacggatacgaaaccattttccctattcctctcggcctgtcgtgtacctgggatatgaaagccatcgaagagtccgcccgtatagctgccgtcgaagccagtgccgacggtatctcgtggacattcagcccgatggtggacgtcagtcgtgatccccgttgggggcgcgtgtcggagggaaacggtgaagacccgttcctcggcgcagccatcgcccgtgccatgatacgcggataccagggaaaggatatgagccggaatgacgagataatggcttgtgtgaagcatttcgccctttatggagcatcagaggcggggcgcgattataatacggtggatatgagccgccagcgtatgttcaatgaatacatgctgccctaccaggccgcagtcgaggcaggtgtcggcagcgtaatggcttcgttcaatgaagtggacggtgtgcctgccaccggaagcaagtggctgatgaccgatgtgctgcgcaagcagtggggcttcgacgggtttgtggtaacggactataccggtatcaacgagatgatagaccacggcatgggtgaccagcagactgttgccgccctcgccctgaatgccggggtggatatggatatggtgagcgatgccttcagcggcactctgaagaagtcggtggaggaaggcaaagtatccgcagctgccatcgacgccgcctgccgccgtattttggaagcgaagtataagttgggactgtttgacaatccttataagtattgcgacgtgaatcgtcccaagaagcagatcttcaccaaggaacaccgtgccattgcccgtaagactgcttcggagagctttgtgctgctgaagaatgaaggtgtgttgccactcagcaagaaaggaaccattgccgtagtcggtccgttggcgaacacccgttccaacatgccgggcacctggagcgtagctgctgtgctggataacgctccctcgctggtcgaaggactcagggaagtagtcggtgaccgggcaaaagtggtaaccgccaagggaagcaatctgattggcgatgccgactatgagaagcgcgccaccatgttcggacgtgaactgcaccgggataaccgtacggatcgcgaacttctggacgaagctctgaaagtagctgccggggccgatgtcattgttgccgcactgggcgagtcgtccgaaatgagtggagaaagcagttcgcgtaccaacctggagatgccggatgtacagagagcgctgttgcaggaattactcaaaaccggaaagcccgttgtgcttgtgctttttaccggtcgcccgctggtgctcacctgggaagaagaacacgtgcctgccatcctcaacgtatggttcggagggagtgaagccgcttatgccatcagcgatgtgcttttcggcgatgtcaatcccagtggaaagctgaccgctacttttccgcaaaatgtaggccagattccattgttctacaatcataaaaacaccgggcgtccgttgcaagagggacgttggtttgagaagttccgcagcaattacctcgacgtgagcaacgagccgctctacccgttcggctacggattgtcttatacgacttttgcctacagtgatattcacctgagcagcacggagatgagtgctgatggcgaactgacggcgactgttaccgtcaccaataccggcagccgtgacggagcggaggtggttcagctttacatccgcgacctggtgggcagcgtcactcgtccggtgaaagaactgaaaggttttgagaagattttcctcaaggccggagagtctcgtaaagtaagcttcagcatcacgccggaattgttgaagttctataattacgatttgcagtttgtctgcgaaccgggtgatttcgatgtaatgattggcggaaacagccgggatgtaaaaaaggcacgatttcttctgaagggagaa

SEQ ID NO: 12765 - DNA, 894 bp, Bacteroides fragilis
atgaatgatacccctcaagacaagtacctgacggcattggccaagtatgacacgcaactgaatgatgctgatgtacaggttcaggttgctgcattaatcgagaaaaaggttcccgaaaacaatacggaagaagtgaagaaattccttttcaactgtattgacctgaccactctcaatacaacagacagtgatgaaagtgtcatgagattcactgaaaaagtaaatcggtttgatgatgaattccctgacctgaagaacgttgcagctatctgtgtatatccgaattttgcacaagtagtaaaagacacacttgaggtagaaggtataaacattgcctgtgtatcaggaggctttccctcttctcagacatttaccgaagtaaagatagcagaaacagctatggcattggctgacggagccgatgaaatagatatcgtaattcccgtaggggcatttctgagtggcgactacgaaacgatgtgtgaagaaatcatggaattaaaagagacttgcaaagaacaccatctgaaagtaatcctcgaaacaggcgctttaaagactgcctctaacattaaaaaagcctctatcctatccatgtattccggagccgatttcatcaaaacatccaccggaaaacagcaaccggcagcaaccccggaagcagcttatgtaatgtgccaagctatcaaagagtactacgaacagacaggaaacaaagtcggtttcaaacctgcaggcggcatcaataccgtaaacgatgcattgatttattataccatcgtaaaagaagtattgggtaaagaatggctcagcaacgagctgtttcgcttaggaaccagccgtttggctaatcttcttttatctgaaattaaaggtgaagagctgaaatttttc

SEQ ID NO: 12766 - DNA, 1791 bp, Bacteroides fragilis
atggaaaacttaaagaacgttgctcctattgaagacttcaactgggatgcgtatgaaaacggcgagagcttcgctggtgccagccacgaagaactcgaaaaagcttacgacggtacgcttaacaaagtaaatgaccgtgaggttgttgacggaactgtaatcgcaatgaacaaacgtgaagttgttgtgaacatcggttacaaatcagacggtatcattcctttgaatgaattccgctacaatcctgatttgaaagtaggtgatactgttgaagtatacatcgaaaatcaggaagacaaaaaaggacagttggttctgtcacacagaaaagctcgcgctactcgctcttgggatcgcgttaatgctgctctggaaaacgaagaaattatcaagggttacatcaagtgtcgcactaagggtggtatgatcgttgacgtattcggtatcgaagcattcttgccgggttctcagatcgacgtgaaaccgatccgtgactatgatgtatttgttggcaaaacaatggaattcaaagtggttaaaatcaaccaggaattcaaaaacgtggttgtttctcacaaagctcttatcgaagctgaactggaacaacagaagaaagaaattatcggtaagctcgaaaaaggacaagttcttgaaggaaccgttaagaatatcacatcttatggtgtattcatcgacctgggtggcgtagacggattgatccacatcactgacctgtcttggggccgcgtaagcgatccgaaagaagtggttgaactggatcagaagttgaacgttgttatcctcgacttcgatgacgagaagaaacgtatcgctttgggtctgaaacaactgactccgcacccatgggatgctttggatccgaaccttcaggtaggtgacaaagtgaaaggtaaagtagtggttatggctgactacggtgcattcatcgaaatcgctccgggtgttgaaggtctgatccacgtttcagaaatgtcatggtcacagcatttgcgttctgcacaagacttcatgaaagtcggtgacgaagtagaagctgtagttctgactttggatcgcgaagaacgtaagatgtctttgggtatcaaacaactgaaacaagatccatgggaaactatcgaagagaagtatcctgtaggttctaagcatactgctaaggttcgtaatttcactaacttcggtgtattcgtagaaatcgaagaaggtgttgacggactgatccacatttctgacctttcttggactaagaaggttaaacacccgtcagaatttactcagattggtgctgatatcgaagttcaggtattggaaattgataaagaaaaccgtcgtttgagccttggtcacaaacaacttgaagagaatccttgggatgtattcgaaacagtatttactgtaggttctgtacacgaaggtacaattatcgaaatgctggataaaggcgctgtagttgctcttccttacggtgttgaaggtttcgctactccgaaacatctcgttaaagaagacggttcacaggctcagatggacgagaaactggaattcaaagtgatcgagttcaataaagatgctaagagaatcatcttgtctcacagccgcattttcgaagatgttgctaaggcagaagaaagagctgaaaagaaggctgcttctaacgcaaagaaatcttctaagagagaagaaactcctgctatccagaaccaggctgcttctacaactctgggtgatatcgatgctttggctgctctgaaagaacagttggaaggtaagaag

SEQ ID NO: 12767 - DNA, 1344 bp, Bacteroides fragilis
atggcaaagaatgatttacatttgactcgtaatatcggtatcatggctcacatcgatgccggaaagacaacaacttctgaacgtatcctgttctacaccggattgactcacaaaatcggagaggtacacgatggtgctgcaacaatggactggatggagcaagagcaggaacgtggtattactatcacttctgccgctacaactactcgttggaagtatgctggtgatacttataaaatcaacctgattgacactccgggacacgtggactttactgctgaggtagaacgttcacttcgtatccttgatggtgctgttgctgcttactgtgctgtaggtggtgtagaacctcagtcggaaactgtatggcgtcaggctgacaaatataacgtaccgcgtatcgcttacgttaacaaaatggaccgttcgggtgctgacttctttgaagttgttcgccagatgaaggctgttttgggtgcaaatccgtgtccggttgttattcctatcggtgcagaagaaaacttcaaaggattggttgatctgatcaaaatgaaagctatctactggcacgatgaaacaatgggtgctgactataccatagaagaaattcctgctaatctcgttgacgaagccaacgaatggagagataaaatgcttgaaaaagtagctgaatttgatgatgcgttgatggaaaaatactttgatgacccttctactattacagaagaagaagtattgagagctcttcgcaatgcaactgttcagatggctgtagttccgatgttgtgcggttcttcattcaagaataagggcgtacagactttgcttgactatgtttgtgctttcttgccttctccgttggatgctgaaaacgtagttggtacaaaccctgataccggtgccgaagaagatcgtaaaccgagcgaagacgataaaacttcagctttggcatttaagatcgctactgacccgtatgtaggacgtttgactttcttccgtgtatactctggtaagattgaagccggttcttatatctacaactctcgttcaggtaagaaagaacgtgtttctcgtctgttccagatgcactcaaacaaacagaatccggtagaagtgattggtgccggtgatattggtgccggtgtaggtttcaaggatattcacactggtgatacactgtgtgacgaaacagctccgatcgttcttgagtcaatggacttcccggaaccggtaatcggtattgctgtggaaccgaaaactcagaaggatatggacaaactgtctaacggtttggctaaactggctgaagaagacccgacattcacagtgaaaactgacgaacag

SEQ ID NO: 12768 - DNA, 885 bp, Bacteroides fragilis
atgagtgcaattatagaatgtaagaacctgacccattattacggtcagcgcaagatttatgagaacttgagctttgaagtgcctcaaggacgtatcttgggactgttgggtaagaatggtacagggaaaacgacgaccattaatatattgagcggttatcttcagccgcattcgggcgaatgtcgcatctttggtgagaacattcagaccatggatcctgctttacgcaggaacatcggtttgctcttggaggggcatgtccaatatcagtttatgaatatcacacagatagaaaagttttatgcttctttttatccgggacaatggaagaaagaagcttattatgatttgatgaacaaattgaaggtagctccgggacaacgtatttcgagaatgtcgaacggacagcgttcgcaagtggcattagggctgattctggcacaaaatccggagttgttaattctggatgacttctctttaggacttgatccgggttatcgtcgtctttttgtagattatttacgtgattatgcccgttccgagaacaagacggtttttctgacttcccatattattcaggatatggagcggctgattgatgattgtattattatggattatggttctatccttatccagcaacctattgaaactttgatgaaagggttgagaaaatatacttgtactgtccccgaagggtaccagcctcaattgccggtgacttgctatcatccggctgttattcgtcagactttggaaacatattcttttttgcctccttcggaatgtggaggggctattgaaggaaaatcaagttccctttactggtttgcagcacgaaaatgtaggtctggaagatgcctttatcggtctaccggaaagtat

SEQ ID NO: 12769 - DNA, 620 bp, Bacteroides fragilis
ctgcaaaaggaagcacaagctgtgctgaatattcctgtgactgatgcctacgaaaaggccgttgagttaatagtggaacaaatacacagaaaaaaaggcaaacttgtaacttccggcatgggtaaagccggacaaatagcgatgaacatcgccactacgttttgttcgaccggaattccctctgtcttcctgcaccccagcgaggcacaacacggcgatctgggcatcctgcaagagaacgacctgttattattgatttcaaattcaggtaaaacccgtgaaatcgtagagttaacccagctggcccacaacctgaatccgggcctgaaattcattgtcatcaccggcaatccggacagtccgcttgccagcgaatcggatgtatgcctgagcacaggacatcctgccgaagtttgtaccctggggatgactccgaccacttcgactacggtaatgaccgtcatcggcgatattctcgtagtgcaaaccatgaaaaggaccgaatttactattgaagaatactccaaacgccatcacggtggttacttgggcgaaaaatcaagaaaactatgcgtaaagtaatcggcatcggagagactatactcgatatcatcttccgg

SEQ ID NO: 12770 - DNA, 966 bp, Bacteroides fragilis
atgggcggaggaagctgggctacagccatcgcaaagatgtgtctggctcaggaagagtctatcaattggtatatgcggcgcgacgaccgcatcgccgatttcaaacggctcgggcataatccagcctatctgacaggcgtaaagttcgacatgaagcgcatcaatttcagctccaacatcaacgatgtggtgaaagagtctgatacgctaatcttcgtcaccccttctccatatctgaaagctcacctgaaaaagctgaaaacacggatcagagacaagttcattattaccgctatcaaaggtattgtccccgatgacaatctgattgtctcggaatactttaacaaggaatatggcgttcctcccgaaaatattgccgtactggccggtccatgtcatgccgaagaagtggctctggaacgtctctcttatctcaccatcgcttgtccggacaaggataaagcacgcgtttttgcccgccgactgggcagcagtttcatcaagacttctgttagcgatgacgtgataggaattgaatacagttccgtactgaaaaatgtatatgccatagcagcaggcatctgtagcggtttgaaatatggagacaacttccaggccgtactgatatcaaacgctatccaagagatgaatcgcttcttaaatacggtacatccgataaacagaaacgtagatgaatctgtttatctgggtgatttgttggtgaccggctactctaacttcagccgtaaccgtacgtttggtaccatgatcggtaagggatactctgtaaaaagtgcccaaattgaaatggagatgatagcggaaggatattatggaacaaagtgtattaaggaaatcaataaacatcatcacgtaaatatgccgatactggatgctgtatacaacatcttatatgagcgcatatctccgatgattgaaataaaattgctgactgactcgtttaga

SEQ ID NO: 12771 - DNA, 1152 bp, Bacteroides fragilis
atgaaaaaaattatgttggtattcggtactcgtcccgaagccattaaaatggcacctctagtaaaagagttccagaaatatccaaaggagtttcaaactatagtttgtgttacaggacagcatcgtgaaatgcttgatcaagttttacatctttttcatattcgtcctaattatgacttgaacatcatgaagcaaggacaagatttatatgatgtaactgctcgtgtcttgatagggatgcgtgatgttttggctgaagtgcgaccggatctgttattagttcatggtgatacgacaacttctactgctgctgctttgtccgccttttatcagcaaatacctgtcggacatatagaagcggggttacggacccataatgtatatagtccttggccagaagaaatgaataggcaggttacagggcgtattgcgacttatcatttttcacccactttattaagtcgccagaacttattgaatgaaggagtgaaaggagattttattattgtgacaggtaatacggtaattgattctatttatatggttgtggatagaataaggcatgataagttattagaagtacaattaagaaatgttttgagtacttctggctatgatgtcaaacgtctatctaatgataaaaaattagtattaataactggtcatcgtagagaaaattttggtgatgggtttatatctatgtgtcaagctataaaagcattaagtgaaaaatatcctaatgtcgattttgtatatccaatgcatttgaatcctaatgtccgtaaacctattcatgaagtattcggagatgaattatcagatttgaataatctgttttttattgaaccattagaatatctctcttttgtgtacctgatggaaaaatctataattgtattgacagacagtggtggaatacaggaagaggctccaggtcttggtaagccagtattggtaatgcgtgacacaacagaacgtcctgaagccttagaagctggaactgtaaagttagtagggactaattatgataaaatagttaatgaggtttcagctttacttgatgattcagactattataacactatgagtaaagctgttaatccttacggggatggaaaggcttgttcgaaaattgttaattttttgttggca

SEQ ID NO: 12772 - DNA, 363 bp, Bacteroides fragilis
atgcgcaaagacgtatttcaagactgcctggtgctctatccggaagaggtctggaatgaagaactggacgaacttcggcagcgactgaataaatggaacgccaaccaccaacttatcttccgccagttcgtcagtgacgtcgaaatcatcacgatggacggcaacggacgtatactgataccgaaacgctatctgcaaatcaccggtatacaaagcgacgtacgctttatcggggtagacaataagatagaaatctgggcgaaagaacgtgcggagaaactctttatggaacccgaagcattcggagcagccttggaagagattatgaaagaagaacggagaacaacgaacaacgagctaaaa

SEQ ID NO: 12773 - DNA, 1305 bp, Bacteroides fragilis
gtgggcaaatgtccttcgtgtggcgaatggaatacctatgtagaagagattgtccgcaaggaagttccgaataaacgtccggtatcaggcatcgaatcgcccaaagccaaacccgtcaccctgagcgagatcgaagcagatgaagaaccccgcatcgacatgcacgacgaggagctgaaccgggtgctgggaggcgggctggtacccggatcgctggtactgatcggtggcgaacccggcatcgggaagtccacactggtgctccaaaccgtactccacatgcctgagcggaggatactctacatctcgggagaagagagcgcaaggcaactgaaacttcgtgccgaccggttaacccgaacttcgagcgactgcctgattgtctgcgaaacatcgttggaacagatctatgtacatatcaaaaatacacgtccggacctagtaatcatcgactccatacagacgatatcgaccgaaagcatcgaatcgtcaccgggaagcatcgcgcaagtccgggagtgctcggcatccatcctccgttttgccaaagagacgcataccccggtgttactgatcgggcatatcaacaaagaaggcagcattgccggaccgaaggttctagagcacatcgtagacaccgtactccaattcgagggagaccagcattatatgtaccgtatcctgcgcagcatcaagaaccgctttggaagtaccgctgaattgggcatctatgagatgcgtcaagacgggcttcgccaagtcagcaacccttcggaattgttactgtcgcaggaccacgaaggcatgagcggggtagccatcgcatctgccatcgaaggggtaagacccttcctgatagagacgcaagcacttgtcagctctgcggtttacggcaatccgcaacgttcggcaacgggattcgatattcgccgcatgaacatgctgctggccgtattagagaaacgtgtcggatttaagctggcacaaaaagatgtctttctaaatattgccggaggactgaaggttaacgaccctgccatcgacctggctgttatcagtgccatcctttcatccaatatggatgctgccatcgaacctgaggtttgcatggccggagaaatcggattatccggtgaaatccgtccggtaaaccggatcgaacaacgtatcggtgaagctgagaagctcgggttcaaacggttcatcctacctaaatacaacatgcagggcatcgatacaaagaagctgaggatagaactggttccggtaagaaaggtggaagaagcattccggacgctcttcggg

SEQ ID NO: 12774 - DNA, 1458 bp, Bacteroides fragilis
atggaaaataaaaaactcacagcagctaatggtcgtcctatcgccgacaaccaaaacagccagacagcaggacctcgcgggcctattatgttacaagacccatggttgattgaaaaacttgctcatttcgaccgtgaagttatccctgaacgccgtatgcatgccaaaggctccggagcttacggtacatttaccgtcacacatgatatcaccaagtacacacgagcagctattttcagtcaagtaggcaagcaaacagaatgttttgtacgtttctccactgtagcaggagaacgcggagctgctgatgcagaacgcgatatccggggatttgccatgaagttttatacagaagaaggaaactgggatttggtaggtaacaatactcccgtcttcttcttacgcgacccgctaaaatttcctgatttaaatcatgctgtaaaacgcgatccacgcaacaacatgcgtagcgctaacaataattgggatttctggaccctgttacccgaggctcttcatcaggtaactatcaccatgagtccgcgtggcattccggcttcctatcgccacatgcacggattcggcagccatacttacagtttcctaaacgcagaaaacaaacgaatttgggttaagtttcatctaaagactatgcagggcattaaaaacctgactgatcaggaagctgaagcaatcatcgccaaagatcgtgaatcgcatcaacgtgacctatacgaaagcatcgaacggggtgatttcccaaaatggaagttccagattcagttgatgactgaagaagaagcagataactatcgtatcaatccgttcgatcttaccaaggtttggccacacaaagatttcccattgcaagatgtaggtattcttgaattgaaccgtaatccggaaaactattttgcagaagtagaacaatcggctttcaatccgatgaatattgttgaaggtatcggcttctctcccgacaagatgttgcaaggacgattattttcttatggtgatgcacaacgttaccgattgggtgtaaactcagagcagataccggtaaacaagccacgttgtccgttccacgctttccatcgtgacggagcaatgcgagtggacggaaactatggttcagccaaaggttatgaaccgaatagttatggcgaatggcaagactcgcctgagaaaaaagaaccgcctttaaaagttcacggagatgtattcaactataacgaacgtgaatatgatgacgattactacagtcagccgggtgatttgttccgactgatgcctgcggatgaacaacaattattgtttgaaaataccgcacgcgccatgggtgacgcagaattgttcatcaaacaacggcatgtacgcaactgctacaaagctgatccggcttatggcacaggagtagctcaagcattaggtattgatctggaagaagccttgaaagaa

SEQ ID NO: 12775 - DNA, 429 bp, Bacteroides fragilis
atgaaacaatataaatataaaatcaacggcaacctttacaacgttacagtgaacgatgtagaagataacatagccaacgttgaagtgaacggaacctcttataaagtagagttggacaagcccgtcaaagccgctccgaaaccggtgacccgtccggcagccgctccgaaaacggaaacaggtgctccggtagtaaccaaacaaccgacagcttccaaaaaagacggtgtgaaatctccgcttccgggcgttatcctcgacataaaagtgaaagaaggggataccgtgaagagaggccagacgatcatcatccttgaggctatgaagatggaaaacaacatcaatgccaataaagacggaaaagtagcagaaattaaagttaataaaggagattctgtacttgaaggtacagacctcgtaatcattgaa

SEQ ID NO: 12776 - DNA, 1218 bp, Bacteroides fragilis
atggacttttgttacctgtttgttacttataacagaataatgtctatatttataactaaaaacatacaaacaaataatatgaaaaaagaagtaaggattaaagaaccggtcaggatcaggactaaacgtctgtcgaacggttgtgagtctatatatttagatatttatatggatggaagaagacgatatgaatttttaaagctatatataatacccgagcatacacggacggataaagatttaaatcagagtaccatgaaactggccagtgcagtgaaggcacaaaggattatagaattgcagaatggagtatacggctttaaccatcaacaggaaaagaaagatataatgctgatagattatatcaagtatttggcagacaaagatatagaaaaaacttcaaggaaagtgtctatgtatacactgatataccatcttcagcattatgataagatgggtatcaggctcagacaggtagataaaaagtatatacttggctttgttgaatacttgaagacggcaactcagaaacactgtaaaagtgtgaagaatataagtgccaatactcaagttcattattataaggtttttcatcattgcctgaatagtgctgtaattgatgaaattataacttcaaatccaatggataagataaaaaatgaggaaaagcctaagcggagaaggactgaacgggcatttctgactattgatgaattgaaaatattgtcacaaacagattttcataatgcgactttaaaaaaggcttttctattcagttgtttttgtggactgagacatagtgatatagtggcacttacatggggaaatctgaaaaagggaaaagtcggtaaaatggagctgcatatgacgcaacagaaaactcaggaaatcctctctcttcctctgagcaaggaggctttgaaacaacttcctgtccgcggaaaagtacctgatacagagaaagtgttcaaagggcttatcagtttaggaagaaccaatgaaatattacccaaatgggctgctaaagccggtattcaaaagcatattacttttcattcggcacgacatacccatgccacaatgatgattactctcggtgccgatctttatacggtatctaaactcttgggacataccaatattcaaacaactcagatttatgccaagatagtggatgaaagtaaagagaaggctatcgatttaattccggatataact

SEQ ID NO: 12777 - DNA, 1551 bp, Bacteroides fragilis
atgaatacatttacacttggactgattgtgatagcctatctgctgtcactggcctatcttggttttttaggttataagaaaacatcctccgccagtgattacctggtaggaggtcgacagatgaatccgtttgtcatggcactctcttatggtgccacttttatatcagcctctgctattgtcggctttggtggggtagcagcagcttttggtatgggtattcagtggctttgctttttgaatatgtttataggtgtagtgattgcctttatttttttcggactccggacgcggcgaatgggtgctaaattgaatgtaagtacatttcctcaattgttaggcaggcattatcgttcacggggaatacaagtctttgttgccgcagtgattttcctcggaatgcctttgtatgccgcagtggttatgaaaggtggtgctgtctttatcgaacagattttccagattgattttaatatttcacttttaatatttacattggtaatagctgcctatgtgatcgcaggaggtatgaaaggagtaatgtatacagatgctttacaggcagttattatgtttggctgtatgctgtttctgcttttttcgttgtatcgggtactggatatgggctttactgaagccaatcaggctctgacggacatagctcccttagttcctgaaaaatttaaggcgttgggacatcaagggtggacggctatgcctgttaccggttcacctcaatggtatacattagtcacttctcttatcttgggagttggaatcggttgtcttgcgcagcctcagttggttgtgcgttttatgacggttgaaagtagcaaacaactaaaccgtggggtttttatcgggtgtttttttctgattattaccgtaggtgctatttatcatgcaggtgcattgagcaatcttttctttcttaagaccgaaggtgttgtagctacggaagcagtcaaagatatggataaaatcatcccatactttataaataaggcaatgccggattggtttgccgctctttttatgctctgtatcctttctgccagcatgtctacactgagttcacagtttcatacgatgggagcttcggttggttccgatatttatggtacttacaagcctcgttcacgtggtaaattgactaatgtgatccgtttgggagttttattttcaattttagtgagttatattatctgctatatgttgcccaacgatattatagcccgtggaacttctatttttatgggtatttgcgctgcagctttcctgccggcctatttttgtgctttatattggagacgtgctacccgtcagggagtgatggcaagcctttggatagggactataggtagtttgtttgcgctggcctttctgcaccagaaagaggctgcggcaatgggggtatgcaggtggcttttcggtaaggatgtgttgatcgaagcctatccttttccgatgatagatccgatattgtttgcattgccattatcggtagcagccgttattattgtgagtttgttaacagagaaagggaaaaaa

SEQ ID NO: 12778 - DNA, 1581 bp, Bacteroides fragilis
atgtctgaaaatataagagtaagcgaagtatccgacattctgcggcagcagcttgaagggatcgagaccaaagtgcagcttgacgaaataggtacggtgctacaggtaagcgatggtgtagtgcgtatttatggtctacgcaatgccgaggccaacgaactacttgaatttgacaatggtatcaaggccattgtgatgaacttggaagaagataatgtaggtgccgtgttgctgggaccgacggataaaatcaaggagggatttacggtgaaacgtaccaagcgaattgcttctatccgtgtgggagaaagtatgttgggacgcgttatcgacccgttgggtgaaccattggatggaaaagggctgataggaggtgaactttatgaaatgccgctggagcgtaaagctcccggggtcatctatcgtcagccggtgaatcaacctttgcaaacgggtctgaaggctgttgatgcaatgatccctatcggtcgtggacagcgtgagctgataatcggtgaccgacagacgggtaagacatcgatagccattgatacgatcatcaatcagcgaagtaattatgaagcaggtgatcctgtatattgcatttatgtagctatcggacaaaaaggttccacggtagcttctatcgtaaacaccttacgccaatatggtgcgatggattatactattgtggtggcggctacagctggagacccggctgcattgcaatattttgctccgtttgcgggggctgccatcggtgagtattttcgtgataccggccgacatgcactggttgtttatgatgatttgtcgaaacaagcagtatcttaccgtgaagtgtctttgattctccgtcgcccctcgggacgtgaagcctatccgggcgatattttctatttacactcccgtttgctggagcgtgcagccaagattattaatcaggaagaagtggcccgtgagatgaacgatttgcccgaaagcctgaaaggtaaagtgaaaggtggaggttcgctgacagcattgcctattattgaaactcaggccggagacgtttctgcctatattccgactaatgtgatctctattacagacggtcagatattccttgatacggatttattcaatcaaggtaatcgtccggcgattaatgtaggtatatcggtttcccgtgtgggaggtaatgcgcagattaaggctatgaaaaaagtggccggtacattgaaaatcgatcaggcacaatatcgcgaattggaagcattctccaaatttagtggagatatggatccggttaccgcactgaccattgacaaggggcagaaaaacgcccgtttgctggttcagccccaatactctccaatgccggtagagaagcagattgccattctctattgcggtatccacggattattgcgaaatgttccgttggataaggtagaagattttgaagcagcgttcctcaatacactcgctctcgatcatcaggcggatgtgctggatgtattgaaaaccggagtgatcaatgacgaggtaacgaaggccattgaagaaacggcggcaatggttgccaaacaatatagt

SEQ ID NO: 12779 - DNA, 1344 bp, Bacteroides fragilis
atgagaaaagctattgaaacattaaagaatatatggaaaattgaggatctgagacaacggatcctcattaccatattgtttgtggcgatttaccgtttcggttcgtacgtcgtgcttcctggaatcaacccgggtatgctgacacaattgcatcaacaaacaagcgagggccttttagccttgttaaacatgttctcaggaggagcattttctaatgcatctattttcgcattaggaattatgccttatatctctgcatcaatcgttatccagttgctgggaatcgctgtgccgtattttcagaaacttcagcgagagggagaaagtggcagaagaaagatgaatcaatatactcgttatttgacgattgctattttgttggttcaggccccttcttatttgctcaatcttaaaatgcaggctggaccttccttaaatgcttcattagattggactctgttcatggttacttctaccattattttggcagctggaagtatgtttatcctgtggcttggtgaaagaatcacagataaaggtattggtaatggtatttcatttattatcttgattggtattatcgctcgtcttccgcagtcattattccaggagttgatttcccgtatgaccgacaagactggtggtttgatcatgttcttatttgaaatagtattcctgctgatcgtaattgccggagctattcttttggtacaaggtacaagaaaaattcctgtacagtatgcaaagagaatcgttggtaataaacagtatggcggtgcaagacagtacattcctttgaaagtgaatgctgccggtgtaatgcctatcatttttgctcaggcaattatgtttattccgatcactttcattggtttttctaacactaacaatgtgagtggtttcgttcatgcatttactgaccatacgagtttctggtataattttgtttttgcagtaatgattatcttatttacgtacttctatactgcgattaccattaacccgactcagatggctgaggatatgaagagaaataatggtttcattccgggaattaagccaggtaagaaaactgctgagtatatcgatgatatcatgtcacgtattactttgccgggttctttctttttggctttcattgctatcatgcccgcatttgccggtatctttggtgtgaaggctgagtttgctcaattcttcggtggtacgtctctgttaattcttgtaggtgttgttttggatacactgcaacaagtcgaaagtcatttgttgatgagacattatgatggtttgttgaagtctggtcgtatcaaaggacgcaccggtagtagtgtagctgcatat

SEQ ID NO: 12780 - DNA, 1308 bp, Bacteroides fragilis
atggacgagatagtacaattcgatttccctacagattcaccgaaaatcatcaaagtgattggtgtaggaggtggtggaggtaacgccgtcaaccacatgtaccgggaaggcatacacgacgtaacattcgttctctgcaataccgacaaccaagcattggctgagtctcccgtaccggtcaaactgcaactgggacgttccatcacacaaggactcggtgccggaaaccgtccggagcgtgcacgtgatgctgccgaagagagcatcgaagacatcaaaactctgctgaacgatggtaccaaaatggtgtttatcactgccggaatgggtggaggaaccggaaccggagccgctcccgtcatcgcccgtatcgctaaagagatggacatcctgactgtcggaatcgttaccatccctttcatttttgaaggcgaaaagaaaattattcaggctctggacggtgtagaacgcatcgcacaacatgtagatgctttgctggtgatcaacaacgaacgcctgcgtgaaatctactctgacctgacttttatgaatgcattcggcaaggcagatgatacgttatcaatcgcagccaagagcatagccgaaattatcaccatgcgaggtacggtcaacctggactttgcagatgtgaaaacgattctcaaggacggcggtgtagccatcatgagtaccggattcggcgaaggagaaaaccgtgtgaccaaagcaatagacgatgcactgcattcacctctgctcaataataatgatattttcaacgccaagaaggtaatgctgaacgtctccttctgtcctgcttccgaattgatgatggaagaaatgaacgaagtacacgagttcatgagcaaattccgcgaaggtgtggaagtgatctggggtgtggctatggacaactcactggatacgaaagtaaagatcaccgtattggctaccggtttcggtgtagaagacgtaccgggcatggacgacctgcacgaaaaacgcagtcaggaagaagaagagcgacagttgcaactggaagaagagaaagagaagaacaaagagcgcatccgcaaagcatacggtgaaagtgccagtggaatcggaacacgcaatctgcgtaaacgccggcatatctatctcttcaatgcagaagacctggataacgatgacatcatcgccatggtagaggactctcctacttacttacgcgacaaaacaactttgggtaaaatcaaagcaaaagccgcactggaagaagagatagcaacagaagaggctatagatgacagtggagttatcacattt

SEQ ID NO: 12781 - DNA, 2331 bp, Bacteroides fragilis
atgattaaaaagatagtaaaaggcctttgggttttctttgcactgatggtgctggcaggaattgcagtgtttgcctctatcgcttacggatggattggatatatgcctcctgtagaagaactggaaaacccgaattacaaatttgccaccgaaattctttcggaggatggcaaggttttgggtacgtggtcgcttagtaaggaaaatcgtgtatacacctcttataatgaactttcacctaacattgtcaatgcgttgatcgccacggaggacgttcgctttaccgaacattcgggtatcgatgccaaagcgctgatacgtgctgtggtaaagcgtggattgctgatgcagaaaaatgcaggtggaggcagtacgctttcacaacagctcgccaagcaattatttacggacgaagttgccagaaatacgctgcagcgcctgtttcagaagccgatagagtgggtgattgccgtaaaactggaacgttattatacaaaggaagaaattttgagtatgtatctcaataaatttgacttcctgaataatgcagtaggaattaaaacggcttcatatacctatttcggatgcgaacccaaagatctgaaaatagaacaggctgctacgctgatcggtatgtgtaaaaacccttcgctttacaatccggtgcgcttcaacgagcgttcgcgcggacgacggaatacagtgctagatcaaatgagaaaggccggatatatcacagcggaagagtgtgattcgttgcagaatctgccgttggaattggtatatcaccgggtggatcacaaagaaggattggcaacttatttccgcgaatatctacgtggtgtgatgactgctcctaaaccggtccgcagcaattatcgtggctggcaaatgcagaagttttatgaagattcgatcgactgggaaatgaatccattgtatggttggtgtgagaagaataagaaaaaggacggttcaaactataacatttatacggatggactgaaaatttatacaactatcaactcacacatgcagcgctatgccgaggaagcagtggaagaacatgttggggagtacttgcaacctttgtttttcaaagagaagaaaggacgcaaaaaggcaccatacagtaatcagctgactcaagaggaaattgaccgcatcctggacagggctgtgaaacagacttcccgttatcaaacgatgaaggaagccggaatttcggaagcggaaatcaaaaaagcattcaataagccggaatctatgtcggtgttcacttggcatggtgtgaaagacactataatgtccccaatggactctatccgatattataagcacttcctgcgtgcaggatttatgtcgatggaccccataaacgggcaagtaaaggcatatgtaggtggtccgaactacacttattttcaatatgacatggcaatggtgggacgtcgtcaagtgggatctaccattaaaccgtatctgtatgcattggctatggaaaacggattctcgccttgtgacgagacacgtaatgtagaaatcactctaattgatgaaaatggaaaaccttggtcacccaaaaacacttcaaaaggacattatggtgaaatggtgactttgaaatggggacttgcaaactcaaataactggatttcggcatacttgatgagtaaactgaatccgtatgctttggcacgtttgattcactctttcggcgtacgcaataaagaaattcaacctacagtctctctctgcctcggtccgtgtgagatttcggtgggagagatggtaagtgcatatacggcatttgccaataagggaatccgggtggctccattgtttgtgactaaaatagaggatagcgaaggcaatgtattggctaccttctcgccacagatggaagaggtgatcagtgcatcgagtgcttataagatgttggtaatgttgcgtgccgtaatcaatgaaggtacaggagcacgtgtccgcaggtatggaataactgccgatatgggtggtaagaccggaacgactaaccgcaactcggacggatggttcatgggattcaccccttcactggtatccggatgctgggtaggcggtgaagaacgtgatatccatttcgatacaatgacttatggtcagggggcttctctggcattgcctatctggacaaaatatatgcataaggtgtatgccgaccagacattgggatatgatccgaaagagacttttaatttgcctgacggatttgacccgtgcaaagacttcagtatttcaggagatagcattatagatgaaccggaatcagggttggacgatttgtttaat

SEQ ID NO: 12782 - DNA, 1797 bp, Bacteroides fragilis
atgcaaaatattcgaaacattgcaattattgcccatgttgaccatgggaaaacgactctcgtcgataaaatgcttttagccggaaacttgtttcgcggcaaccaaacaagcggagaattaattctggataacaacgacttggagcgtgaacgagggataacgatcctctctaaaaacgtttctatcaattacaacggaactaagattaatattattgatactccgggacacagcgacttcggtggcgaagtagagcgtgtgctcaacatggccgacggatgcattctgttggttgatgcttttgaaggcccgatgccgcaaacgcgctttgtgctgcagaaagctttggaaatcggattgaaaccgattgttgttattaataaggtagacaaaccgaactgtcgtccggacgaagtacacgagatggtcttcgacctgatgttcagcctggatgctaccgaagagcaacttgattttccgacaatctatggttcggccaagaataactggatgagtacggactggaaagagcagacggacagtattgtgcctttgctggattgtattgtagagaacattcctgctccggagcaattggagggtactcctcagatgctgatcacttcacttgactattcttcatatacaggccgtattgctgtagggcgtgttcatcgtggtacactgaaagaaggtatgaacgtgtctttggctaagcgtgacggcagcattgtgaaatctaagattaaagaggttcatgtattcgaaggtctgggtcgtgtgaagacgactgaggtctcttcgggagatatttgcgctttggtaggtattgacggattcgagatcggagatacgatctgtgattatgaaaatccggaagcattgccacctattgctatcgatgaaccgactatgagtatgctgtttgccatcaacgactctccgttctatggtaaagatggtaaatttgtaacttcacgtcatatccatgatcgcctgaccaaggaattggataagaatctggctttgcgcgtacgtaagagcgaagaagacggtaaatgggttgtatcaggccgtggtgtgcttcacctttctgtcttgatcgaaaccatgcgtcgcgaaggttacgagttacaggtcggacagccgcaagtaatctataaagaaatagatggagtaaaatgtgaaccgattgaggagcttacgattaacgtacctgaagaatattcaagtaagatcatcgatatggtaacccgccgtaaaggtgagatgactatgatggagaataccggtgaacgcatcaaccttgagtttgatatgccttcgcgtggtatcatcggtcttcgtacgaatgttctgacggcttcggcaggtgaggctatcatggcacaccgctttaaggaatatcagccgttcaaaggagacatagaacgtcgtaccaatggttcgattatcgctatggagagtggtactgcatttgcttatgctatcgacaaattgcaggatcgtggtaaattctttattttccctcaggaagaggtgtatgcaggtcaggtagtgggtgagcatgctcacgaaaaagatttggttgtaaatgtgactaagtcgaagaagttgactaatatgcgtgcttccggttctgacgagaaagcccgtttgattcctcctgtacagttctctcttgaagaggccttggaatacattaaggaagacgaatatgtagaagttactccgaaagcaatgcgtatgcgtaaggttattctggatgaaactgaacgtaaacgcgccaataagagc

SEQ ID NO: 12783 - DNA, 1656 bp, Bacteroides fragilis
atggtgggagtaagcaaagctttccaacctaacaagaatgtactaaaagacatttatctttctttcttctatggagcgaagattggtattatcggtctcaatggttcgggtaaatctactttgctgaagattattgccggtctggagaaatcttatcagggggaagtggtcttttctcccgggtactcagtgggctatctggcacaggaaccttatctggataacacaaagactgtgaaagaaatcgtaatggagggtgtgcaacctattgttgatgccctgaacgaatacgaagaaattaatcagaagttcggtttacctgaatattatgaagatcaggacaaaatggatcaactttttgcgcgtcagggagagttgcaggacattatcgatgcaacggatgcctggaatctggatagtaaattggagcgtgcaatggatgctcttcgttgcccgcccgaagatcagtcggtggctaacctgtccggtggtgagcgccgccgtgtggctctttgccgactgttattgcaaaagcctgatattttgctgctcgacgaaccgacgaaccacttggatgctgagtctatcgactggttggagcaacatttgcaacagtacgaaggtacggtaattgcagtgacgcacgaccgctacttcctcgatcatgttgccggatggatccttgaacttgaccgcggtgagggtattccctggaagggcaactactccagctggttggagcagaagaccaaacgaatggaaatggaagaaaagactgccagcaagcgtcgcaaaactctggaacgtgagctcgagtgggtacgtatggcacccaaggcccgccaggctaagggtaaagctcgtttgaactcgtacgataagctgttgaacgaagatgtgaaggagaaagaagagaagttggaaatcttcattccgaatggtcctcgcttgggtaataaggtgatcgaggcaaaacatgtggcgaaggcttatggtgataaactactgtttgacgatctgaactttatgcttcctccaaatggtattgtgggagttatcggtccgaatggtgccggtaaaacaactcttttccgtctgatcatgggactggaaacagtcgataaaggtgagtttgaagtaggggagactgtgaaagtggcttatgtagaccagcagcataaggatatcgatccgaacaagagtgtttatcaggtgatctccggtggtaatgacttgatccgtatgggaggtcgcgatatcaatgcgcgtgcatacctttcgcgcttcaatttctccggagccgaccaggaaaaactttgtggtgtgctttcgggtggagagcggaatcgtctgcatctggctatggcactgaaggaagaaggaaacgtgttgttgctcgacgagccgaccaatgatatcgatgtcaatactctgcgtgcactcgaagagggtctggaagattttgcaggttgtgctgttgtcatttcgcatgaccgttggttcctcgatcgaatctgtacgcatattcttgctttcgaaggcgattcgaatgtgttctactttgaaggttcttattcggagtacgaagagaataaattaaaacgacttggcaacgaagaacctaagcgtgtgagatatagaaagctaatagctgac

SEQ ID NO: 12784 - DNA, 1800 bp, Bacteroides fragilis
atgaaaaagcagttacgcagttcgttcagcacacagggtcgccgcatggcaggcgcccgggcactttgggcagccaatggtatgaaaaaagagcaattaggcaaacctatcattgccatcgtcaattcgtttactcagtttgttccgggacatgtacatctacatgaaataggtcagctggtgaaaaaagaaattgagaagctgggatgctttgctgcggaattcaatacgattgccattgatgatggtattgccatgggacatgacggaatgctttattcccttccttcccgggatatcattgccgatagtgtggaatatatggtgaatgcccataaagcggatgccatggtatgtatcagcaattgtgacaaaatcactccggggatgttgatggcggctatgagactgaatattcctactgtatttgtatccggaggtccgatggaagccggtgaactggatggacagcatttggacctgattgatgcgatgattaagtcggccgacgaaagtgtgagtgatgaagaagtctccaagatcgagaatcgggcctgtcccacttgcggatgttgttcgggaatgtttaccgccaattcgatgaactgcctgaacgaagcgatcggtctggctctccccggaaacggaacgattgtggcgactcatgccaaccgtacccaattgttcaaagatgctgcgaaactgattgtagaaaatacctataaatattatcgggacggtgatgaaagcgtacttccccggagcattgccacccgtgaggcattcctgaatgccatgacgctggacatcgcgatgggaggatctaccaatacggtacttcacctgctggcgatagcccatgaagcggaggcggactttaaaatggacgatattgatatgctttcacgcaagagcccatgcttgtgtaaggtggcgccgaatacacagaagtatcatattcaggatgtaaatcgtgccggaggtatcatggggattatgggacaacttgccaaatccggattgatcgatacgtctgtagtgcgtatcgacgggatgacattgggtgaggcgatagataaatatgatataactagcccgaacgtatgtgaagaggctattaaaaagtataagagtgcggctgccggaaagttcaatctggtgctcggctctcaggacgtctattataaagagctggatacggaccgtgccgaagggtgtattcgcgacatagagcacgcatatagcaaagacggaggactggccgtactgaaaggaaatattgcccaggatggttgtgtggtgaaaacggccggagtggacgagagcatctggaagtttaccggtccggcaaaggtgttcgattcacaggaagcagcctgcaatgggatactcggaggaaaagttgtcagcggagatgtagtcgtcatcacgcacgagggtccgaagggaggtcccggtatgcaggaaatgctttatcctacctcttatatcaaatcgcgccacttgggcaaggagtgtgcgctgataaccgacggccgtttcagcggaggtacatcgggactcagcatcgggcatatctctcccgaagcagcagccggaggtaatatcggaaagattaaggatggtgatatcatcgaaatcaatatccccgaacggactatcaacgtgcgactgaccgatgaagaactggctgcacgtccgatgactccggtcactcgtgaacgctatgtgcctaaaagtcttaaagcgtatgccagcatggtaagctctgccgataaaggagcggtgagactgattgat

SEQ ID NO: 12785 - DNA, 603 bp, Bacteroides fragilis
atgctcttaccttggttaaacgaagaactgatagaagccggttgtgatgaagccggacgcggttgtctggcaggtgcggtttatgctgctgccgttatcttaccgaaagattttgagaatgaattgttgaatgactccaagcagttgtcggagaagcagcgatatgctttgcgcgaagtgattgagcgggatgcggttgcctgggccgtcggcattgtttcgcccgaagagattgataagataaacatcctgaatgcatcgtttctcgccatgcaccgggcggtagaccggctgaaaacccgtcctcagcatctgctgatcgatggaaaccgtttcaagaagtaccccgacatacctcatactactgttataaagggagatggcaaatatctttcgatagctgctgcttctatccttgccaaaacttatcgtgatgactacatgaacaaactgcatcaggaattcccatgttatgactgggagcataacaaaggttatcctacgaaaaagcaccgtgcggctattgccgggcacggtactactccgtatcatcgcatgactttcaatctgttgggcgacggacagttggaattgttctcaaaa

SEQ ID NO: 12786 - DNA, 3726 bp, Bacteroides fragilis
ttgaagtcattccaagactttctacaactagataccccacctgagaagcgtaaaaaagagggattgtataaagtatttgccgaaaacttcccaattgccgacacaagaaacaattttgttcttgagtttctggactattatattgatccgccgcgctataccattgatgattgtatagagcgtgggctcacatatagtgttccattgaaagcgaaactcaagctttactgtacagaccccgatcatgaggatttcgatacagtgattcaagatgtgttccttggtcctataccttacatgactgacaaggcaacttttgtcatcaatggtgctgagcgtgtagttgtgtcgcagcttcaccgttctccgggcgtattcttcggtcagagtgtacatgctaatggtacaaagttgtactcagcccgtatcatcccgtttaagggatcatggattgagttcgctaccgatattaacaacgtaatgtacgcttatattgatcgtaagaagaaattgcctgttactacgctgttaagagctatcggctttgagaacgacaaggacattcttgagatttttaacctggctgaagatgtgaaggttaataagactaatctcaagaaggtagtaggtcgtaaactggctgcgcgtgtcttgaaaacctggattgaagatttcgttgatgaagataccggtgaagttgtttctattgaacgtaatgaagtcattatcgaccgtgaaacagtaatcgaaccggaacatatagatgaaataattgactcgggcgttcaaaacatccttattcacaaggaagaaccgaaccagtccgactactctattatatataatacccttcagaaggacccgagtaactcggaaaaggaggctgtgctttatatctaccgtcagttgcgtaatgcagaccctgccgatgatgccagtgcccgtgaagttattaataacctgttcttctctgaaaaacggtatgaccttggtgatgtaggtcgttatagaatcaataagaaattgaacctgacgacagacatggacgtgcgtgtcctcactaaagaagatattatcgagatcatcaaatatctgattgagctgattaactcaaaagcagatgtagatgatatcgaccacttgagcaaccgtcgcgtacgtactgtaggcgaacagttgtccaatcagttcgctgtcggtttggcacgtatgtcacgtaccatccgcgaacgaatgaacgttcgtgacaatgaggtgtttactccgattgacctgatcaatgcgaagactatttcttctgtgatcaattcattcttcggaactaacgcattgtcacagtttatggaccagacaaacccgttggctgaaatcactcacaaacgtcgtatgtctgctcttggtcctggtggtttgtctcgtgaacgtgccggatttgaggttcgtgacgttcactatacacactacggacgcctttgtccgattgaaacaccggaaggtccgaatatcggtttgatttcgtcactttgtgtgtttgccaagatcaatgatctcggctttattgaaactccttaccgtaaggtagataacggaaaggtagatctgtctgagaacggactcgtttacctgacggctgaggaagaagaagctaagatcatagcacagggtaatgctccgttgaatgatgacggtacatttatccgtaataaggttaagtctcgtcaggatgccgattatccggttgtagaaccttcggaagtagagttgatggacgttgctcctcaacagattgcttctatcgctgcatctttgattcccttccttgaacatgatgacgctaaccgtgcgttgatgggatcgaacatgatgcgtcaggctgttcctttgctgagaagcgaagctccaatcgtaggtacaggtattgaacgccagctggtacgtgattcacgtactcagattgctgccgaaggtgatggagtgattgattttgtagatgctactactattcgtattctatacgatcgtacagaagatgaagagtttgtaagttttgagccggcattaaaagaatatagaataccgaagttccgtaaaacgaaccagaatatgacaatcgaccttcggccaacttgcaataaaggtgatcgtgtgacgaaaggtcagattctgacagaaggttattctactgaaaatggagaactcgctttgggtaagaatctgttggttgcttacatgccttggaaaggttataattacgaggatgctatcgtgttgaatgaacgtgtggttcgtgaagacttgctgacttcagtacacgtagaagagtattcactcgaagttcgtgaaaccaagcgaggaatggaagagttgacttctgatattcctaacgtgagtgaggaagccactaaggatttggacgagaatggtatcgtacgtgtcggtgcacgtattcagccgggtgatatattgattggtaagattacaccgaaaggtgaatctgatccttctccggaagaaaaattgcttcgtgctatctttggtgataaagccggtgatgtgaaagatgcttctttgaaagcatctccttctctgaagggggtaattattgataagaaattgttctcacgtgtcatcaagaatcgtagttctaagttggctgataaggcgttgcttccgaaaattgacgatgaatttgagtctaaggtagctgacttgaaatgtatcttggtaaagaaattgatggtattgacagaaggaaaggtatctcagggcgtgaaagactacttgggagctgaagtcatagctaaaggctctaagtttagtgcttctgacttcgattcacttgatttcaccgcgattcagctgagcgactggaccaatgatgatcatgcgaatggtatgattcgtgacttgatcctgaactttatcaagaagtacaaagaacttgatgctgaactgaagcgtaaaaagttcgctatcacaatcggtgatgaactgcctgcaggtatcattcagatggcgaaagtatatattgctaaaaaacgtaagattggtgtaggtgataagatggccggacgtcacggtaataaaggtattgtgtcacgtgttgttcgtcaagaagacatgccgttccttgaagatggaactccggtagacattgtattgaacccgttgggtgtgccttctcgtatgaatatcggtcagatttttgaggctgttctcggacgtgccggaaagaatttgggtgtgaagttcgctacgccgatttttgacggtgcaactttggatgacttgaacgagtggacagacaaagctggtctaccacgctattgcaaaacttatctttgtgatggtggtacaggcgaacgctttgaccaaccagcaaccgtaggtgttacctatatgttgaaactcggtcacatggttgaagacaagatgcacgcacgttctatcggaccatactcattgattactcagcaacctcttggtggtaaagctcagtttggtggtcagcgtttcggagagatggaggtttgggcactcgaaggtttcggtgcatcgcatattctccaggagatcctgacaatcaagtcggacgacgttgttggacgttctaaggcttacgaagccattgtaaagggcgaacccatgccacagccgggtattccggaatctctgaacgtgttgttgcacgaattaagaggattgggcctgagcatcaatttggaa

SEQ ID NO: 12787 - DNA, 1645 bp, Bacteroides fragilis
cgagctaatatcatgaaaaaattattgttactcttaggttcattcctactgtcattaaccacttatgcagccatgaacatatccaaaatcgatccgcccttctggttcaccggtatgaacaatccggaactccagttaatggtatacggtgaaggcatcggccaggcatccgtatcagtaaattatcccggtgtatcgctcagcagcgtcgtgaaactggaaagcaacaattacctgcttgtctacctacatctcgataaagaagtaaagccgggcaagatgcccatcacatttacggtcggaaagaagaaattggtgaaagagtacgaattgaaagcacgcagcaaagccggagtcgatcacaaaggttttgacgcatcggatgcattatacctgctgatgccggaccgttttgccaatggcaatccggataacgaccggatagaaggcatggccgaatataaagtggaccgcaacgacccgaacgcacgtcacggaggcgacctggccggtatcgaacaaaatctggactattttaccgacttgggagtgaccgcactctggttcaccccggtactcgaaaataatatgaaaggcggctcatatcacggatatgcaacaaccgattattacaaggtagacccacgtttcggcactaacgaggaatatcgctcactgatagcgaaagcccacaaccggggcattaaggtcgtgatggacatgatcttcaatcattgcggagtagaacatccctggatcaaggacatgccttcaaaggactggttcaaccatgcggacttcaagaacaactttgtgcaaacttcctacaagctgactccacatgtagatccgtatgcctcggagtacgatttcgaccagatgaacaacggctggttcgtggaagccatgcctgacctcaaccaaaagaaccctcacgtatacaaatacctcttgcagaacagcctgtggtggattgagtacgccgatatcgacggcatccggatggacacctacccgtatgccgattacgatgccatgagcaactggatgaaagaactgaacgaagaataccccaactacaacacggtgggcgaaacctgggttaccgaaccggcctatacagcctggtggcagaaagactccaagctctccgccccgcgcaacagtcacttgaaaacagtcatggatttcagcttcttcgacaaagtcaacacggccaagaatgaacaaacggacacttggttcaaaggattggaccgtgtctacaacaattttgtatacgattatctgtatcccaatccggcttccgtactggctttcatcgagaatcatgacaccgaccgtttcttgggtgaaggcgaaaacctcgatatgctgaaacaggcctccacccttttattgaccacccgacgcatcccgcaactctattatggaacggaggtgatgatgaacggagtaaagagtaaaagcgacggctatgtacgaaaggacttcccgggcggatggacggacgataaagagaatgccctgactcccgagggacgtacccgattgcagaatgaaagctataacttctaccgcaacctgctgaactggcgtaagggcaacgatgtgatcgccaaaggcagcatgaaacagttcatgg

SEQ ID NO: 12788 - DNA, 1797 bp, Bacteroides fragilis
atgaaaacagccattattgtcatatcagaagccggcatagcactggccaagacactggaacaggaacttcccgaatcagagatcttttctaccggcacagacacagattgccactctatttccaatcttcaggaggccgttcctgagatattccataaattcgatgctattatcttcatcggagctatgggaatttgtatccgtgccattgctccccatattgaagacaagcataaagatcccgccgttgtctgtgtagacagcacaggacgttatgctgtctctgtcctgtccggacatattggtggagccaacggactgacccggtatgtggcaagcattctgggagccgaacctgtgattaccacccggagtgaccgtaccggtctttgggctctcgatactcttggcaaaaaatacggttggcaaacagtcccggccgaatcatcggatatgaatcatctgatcacactctttgtcgattgcaaaccaacagctctattactcgacattcgcgacgaaggcacaacacagttggaacataccttgcctcctcacgtcgatgtattctacaaatttgaggatatggatctccggaaatatgacttgcttctgcttgtcactccattcatttacaacacctctgacactccggcactctactacgtcccaccggtattgcatatgggaatcggactggcccgcgatgcccatccggtggatactgtcattacccatctgatggatgttgtggtgcaagccaacatgatccctcttgccatacgtaccgtatcttccattgaagaaaaaaaagacgaaccggtgctcaaactacttgcagaggcttatcagacccggctttacaccgccagtcaactcagcaaaatagaggtgcccactccaagtgaagtggtcaacaagcacatgggtactcccagtgtatccgaagcctctgccctactctcttccggaggcggtcccttactcctacccaaacaaaaaggcactaactttactgtagccatcgccatggacgctgcctccgtacgtcaggggcacatcgaaattgtcggagccggtcccggcgatccggagctgatctccgtacgcggacgtcgctttctcgaagaagccgacctgatactttatgccggcagtctcgtcccccgcgaactgacagaatgtgccaaagccggtgctaccatacgcagttcggcttccatgactctcgaagagcaatttgccttgatgaaagagttttatgaccgtggacagttggtagtccgtctgcatacaggcgacccttgtatctatggtgccatccaggagcaaatgaatttcttcgaccaatatggtatgcattaccacatcactccggggatctcttcatttcaggctgccgccgctgctctccaatcccaattcaccattccggagagggtacagaccatcatcctcactcgcggtgaaggtcgtacaccgatgcccgagaaagagaaactcagcctgctggcacgttcgcaaagcaccatgtgcatcttcctcagcgcaggcgtagtcgatcaggttcagcgagagctcctcgagcactatccgcccactacacctgtagctgcctgttatcatctgacctggaaagacgaacgcatctttcgcggacaattgcaggatttagctaagatcgtaaacgaaaaccatctgactctgactaccatgattgtcgtaggcgatgccatcgataatcgggaaggactgtcacgactatattctcaccaatttaaacacttattccgtaaa

SEQ ID NO: 12789 - DNA, 432 bp, Bacteroides fragilis
atgttacaaccgaaaaagacaaaattcagaagacaacaaaagggccgcgctaaaggtaatgcacagagaggcaaccagctcgcttttggatcttttggtattaaggctttagaaactaaatggatcacaggccgacagattgaagctgctcgtattgcagtgacaagatatatgcaacgtcagggacagatttggattcgtattttcccggataaaccgattactagaaaacctgctgatgtacgtatgggtaaaggtaagggtagccccgaaggattcgtggctccggttacaccaggtagaattattattgaagctgaaggagtatcttacgagatcgcgaaagaagctttgcgtttggcagctcagaaacttccgattactacgaagtttgtcgtgagacgtgattatgatattcaaaatcaaaatgcg

SEQ ID NO: 12790 - DNA, 1164 bp, Bacteroides fragilis
atgatcattcgtaccatactcgatacagacctttataaattcactacttcgtatgcttatatcaaactattcccgtacgcaataggcactttcagcttcaaagacagggacgggactgaatatagcgacgagtttgtggaaagattgagaacggaaatcagtcagctatcacacgtggcactgaccgaaaaagaactggaatatatgataaagaactgccgcttcctgcccagggtctattgggagtggctctcttctttccgtttccaacccgagaaaatagaaatccgtctggacgagaatcggcagcttcacatcgaagtgaacgactatctttacaaagcaacgctttatgaagtacctctactcgccatcgtttcggagataaagaaccaatcgtccggcaatgttgccaacctggaagacatcctgtacaaactgtccgaaaagacagaactgtccaataagcatcagctacttttctctgaattcggaacccgaaggcgcttttcgttcgatgtgcagaatcaagtcatcgggcacctgaaacagacagcccattactgtatcggcacttccaattgccatttcgccatgaaatacggcatgaagcccatgggtacgcatccccatgaatggttcatgtttcacggagcgcaattcggctataaacatgccaactatatggcccttgaaaattgggtaaatgtatacgatggcgaccttggcatcgccttgtccgacacttatacatctgccatctttctaagcaatctaagccgcaaacaggctaagttgtttgatggcgtgaggtgtgattccggtgatgaattccggttcatcgatcagctgaccgcacgttataaagagttgggcatcgacccgaccaccaagacaatcgtattcagtaacgcactcgactttggcaaagcactggatatccagaagtattgccggggaaagatccgttgctctttcggcatcgggacaaacctgaccaacgatacgggattcaagccatcaaacattgtcatgaagctatcgcaatgcaagatgaacatgaaccaggagtggcgcgaatgtgtgaaattatcagacgacatagggaaacatatcggcagcccggaagaggtgcgtgcctgtctatacgacttgcggttggag

SEQ ID NO: 12791 - DNA, 1029 bp, Bacteroides fragilis
atgggcgcagcctgccaattgaaaattttatcatacctttgcggaaaaggtatattcattctaacaaagacaattatgaagaaatttacttgcgtacaagacatcggcgacctgaaatcagcccttgccgaatcattcgagatcaagaaagaccggttcaaatatgtagaactgggacgtaataaaactctattgatgatcttctttaactccagcctccgcacccgtctcagcacccagaaagctgctctcaacctgggtatgaacgtaattgtactggacatcaatcaaggggcctggaaactggaaaccgaacgcggcgtcatcatggacggtgacaaaccggaacatctgctggaagccatcccggtgatgggatgttattgtgacatcatcggtgtacgttcgtttgcccgcttcgaaaaccgtgagtatgactataatgaagtgatcatcaatcagttcatacaacattccggacgcccggtgttctctatggaagcagctacccgtcatccgttgcagagctttgccgacctgatcaccatcgaagaatacaaaaagacagcccgccctaaagtagtaatgacctgggctccccatccgcggccattgccacaggcagtgcccaactcgtttgccgaatggatgaatgccacagactatgagtttgtcatcacccaccccgaaggttacgaactcgatccgaagtttgtaggaaacgcacgggtagaatatgatcagatgaaagctttcgaaggagccgactttatatatgccaagaactgggcagcttatacaggcgacaactacggacagattctgagtacagaccgtaattggactgtaggcgaccgtcagatggccgtcaccaataatgcctacttcatgcactgcctccctgtaagacggaatatgattgtgacggatgatgttatcgagagtccgcaatccattgtcatcccggaagccgcaaaccgtgaaatctcggcgacagtggtactgaaaagactgctggaaaatctacca

SEQ ID NO: 12792 - DNA, 1005 bp, Bacteroides fragilis
atggagagtattctaattaccggagcgagcggatttatcggcagtttcattgttcaggaagcattgaagcgcagattcggcgtctgggcggggattcgtgcatccagcagtaagaaatacctgaaagaacgtaagatccactttcttgaattggactttgcacatcccaatgaactgcgggcacaactgtccgggcataaggggacatataataagttcgattatatcgtccattgtgccggcgtgaccaaatgtgcggacaaaagcgactttgaccgtgtcaactatttgcagaccaaatactttgtcgacacgttgcgtgagctcaatatgattcccaagcagttcatctacatcagtaccctgagcgtattcggtccgatacgcgaaaaggactattcacccattagtgaagaagatactccggctccgaatacggcttacggattaagcaagctgaaagcagagctctacattcagagcatacccggttttccgtatgtcatctatcgtccgacgggggtatacggtccccgggaagcagactatttcctgatggcaaaatccatccggcagcatacggacttctccgtagggtataagcggcaagatctgacatttgtatatgtgaaagatattgtacaggccattttcctgggaatcgagaaggaggtttcccgccgcgcttactttctgtctgacgggaaggtatataaaagccgggctttctccgacctgattcaaaaagaattgggtgatccgtttgttattcacatcaaatgtccgttaattgtgctaaaagtcgtatctttgctcgccgaatttatagcgacccgttcgggaaagagcagcacgctgaattcggacaaatataaaataatgaaacaaaggaattggcaatgcgacataactccggctgtgaaagaactgggatatgctcctgagtacgacttggaaaaaggagtgaaagaaacaattgcctggtataagaatgaaggatggctt

SEQ ID NO: 12793 - DNA, 789 bp, Bacteroides fragilis
atggttagtatggcgatgctaatttcatgtgttgcctcgtgtgattccggcagtgatgctgtttcatacggtgtaggaacattgagcctcgggctctctgccaatccttctttttccacgaaaacccgttccgtcaacgaagcggaatataaaaaagccgataattatcaagtgacggtcaaggatgccgacggtgcctctttatacaatggtttgtacaaagacatgcccttgtccattgatctgactgccggtaaggggtataccgtaaaagctttctatggcgagaatgtgaacgcaggcttcgacaagctatatgtggaaggtagtcaggagttcacggtcagtgaaggcgaacaaaagaatgttattttgtactgcaaaccggctaatgtcaaagtatcggttatctataccgaagattttctgaaatattattcggattgtaccgtatccctctctacttcacacctgactgctccttttgaagtgaatatgaaaaaagattccggtaaggatgcttatctgaaagcaaatgccgatggcgagaaggtatcgatcactgtaggaggtttcagagataaagaaggcaatgaggtggtgatggaagctttggttgccgagaaaaaagtggctcccaaaacacaccttactattacagtcgatccggaagttattactatttccacgggtacggcgtcgttggacgtaacagtggataccggtacagaagataaggatgtgaatatcgagattccggaagagtattggccgggtaatgcaagtaag

SEQ ID NO: 12794 - DNA, 1048 bp, Burkholderia fungorum
agcctcgacgcgaacgaagccgcggccgcccgccgcacgtggcgcccaggccagagcgccggttcgaacggcaacggcgagaccgactcgatgtacgagcgctccaaactgaacccggttctgaccttcgacaacttcgtgaccggtaaggccaaccagttggcgcgcgccgcggcgattcaggtcgcggacaatcccggcatctcgtacaacccgctgtttctgtatggcggcgtgggtctgggcaagacccacctgatccacgcgatcggcaaccagcttctgatggacaaggcgggcgcacggattcgctacatccacgcggaacagtacgtgtccgacgtagtgaaggcgtaccagcgcaaggcgtttgacgatttcaagcgctactaccactcgctcgacctgctgctgatcgacgatattcagtttttctccggcaagtcgcgcacacaagaggaattcttctacgcgtttgaggcgctggtcgccaacaaggcgcaggtgatcatcaccagcgacacgtatccgaaggaaatttcgggtatcgacgaccgcctgatctcgcgcttcgactccggcctgaccgtcgcaatcgagccgcccgagctggaaatgcgcgtcgcgattctgatgcgcaaggcgcaatccgagttcgtgagcctgaatgaagacgtcgcgttcttcgtcgccaaacacttgcgttcgaacgtgcgtgaactcgaaggcgcgctgcgcaagatcctcgcgtattcgaagttccacggccgcgaaatcacgatcgaagtcaccaaagaagcgctgaaagacctgctgaccggtgcagaaccggcagatttcggtggagaacatccagaagaccacggctgacttctacagtatcaaggtcgcggacatgtattcgaagaagcgtccggcgaacattgcgcggccgcggcagatcgccatgtatctggcgaaggagctgacccagaagagcttgccggaaatcggcgagctgttcggcgggcgcgaccacaccacgtgcgcacagccgtgcgcaaagggg

SEQ ID NO: 12795 - DNA, 606 bp, Burkholderia fungorum
atgcactattacgtgccggcagaagggcacggcctgccacacgatcctttcaacgccatcgtcggcccgcgaccgatcggctgggtctcttcgcgaagcgcggacggcgtgctaaatctggcgccttacagtttcttcaatgccttcaactacacgccgccgatcgtcgggtttgccagtgttggctataaagatagcgtgaataacattgcacagaccggcgaattcggctggaacctggcgacgctcccgctagccgaggccatgaaccgcagttcggctatggtgtcgccagaggtcgacgagttccaactcgccggtctaacgccggttgcatcaaacacgattgccgtaccacgtgtcgcggaaagcccggtctctttcgaatgccgtctcacgcagctggtccagcttgaaaccgcgaatcatgacaaggtccagacctggcttgttctcggtgaagtcgtcggcgtccacatctcgcgccatttgctggttgacggtgtatacgacactgcggccgcacaaccgatcttgcgtggaggcggtcctgccgactacttttctatcgcgcgcgaaggattgttcaagatgcgccggccaggt

SEQ ID NO: 12796 - DNA, 1380 bp, Burkholderia fungorum
atgaccacctctgttcgcacccgtttcgcaccgagtcccaccggcttcatccacctcggcaacattcgctccgcgctttatccgtgggcgttcgcgcgcaagatgaaagggaccttcgtgctgcggatcgaggacaccgacgtcgagcgctccacgagcgaatccgtcgacgccattctcgaaggcatggcgtggctcggcctcgatttcgacgaaggtccgttctaccagatgcagcgcatggaccgctaccgcgaagtgctcaagcagatgcaggacgaggggctggtgtacctgtgctacatgtcgacggaagaactggacgcgttgcgcgaacgccagcgcgaagccggcgaaaagccgcgctacgacggcacgtggcgcccggagccgggcaaggtgctgccggaaccgcctgcgggcgtacagccggtgctgcgcttccgcaacccgctcaacggcgtggtggcatgggacgacgccgtaaagggccgcatcgagatttcgaacgaggaactcgacgacctcgtgatcgcgcgcccggacggcacgccgacctacaacttctgcgtggtggtcgacgatctggacatgcgtatcacgcacgtgattcgcggcgacgatcacgtcaacaacacgccgcgccagatcaacattctgcgcgcgctcggcggcgagccgcccgtctatgcgcacctgcccaccgtgctgaacgaacagggcgagaagatgagcaagcgtcacggcgcaatgagcgtgatgggttatcgcgacgccggttacctgccggaggcggtggtcaactatctggcgcgtctgggctggtcgcatggcgacgcggaaatcttctctcgtgaacagttcgtcgagtggttcgatctggagcatctgggcaagtccccggcccaatatgaccacgacaagctgaactggctgaatgcgcactacatcaaggaagccggcaacgtgcgcctcgcggagttggcgcggcccttcttcgctgggctcggtatcgacgaagccatgcttgcccagggcgccgatctgaccgccgtggtgggcttgctgaaggatcgcgcgtcgacggtaaaggaaatcgcagagaatgccgcgatgttctatcgcgcgccggcgccggacgccgagtcgctcacgcagcatgtgaccgacgcggtgcggccggcgctcgccgatctggcggccgcgctcaaggcagtggagtggaccagggaagccatcgcggccgcgttgaaggcaacgctcggcgcgcacaagctgaagatgccgcagcttgcgatgccggtgcgtctgctggtggcgggcaccacgcacacgccgtcgatcgacagcgtgctgatgctgttcgggcgcgatgtggtg

SEQ ID NO: 12797 - DNA, 1403 bp, Burkholderia fungorum
  misc_feature (1354)..(1403): n=g, a, t or c
atgtcagcacccgcaaccgacctctccgcaggcgcgccgtcaggccgtcgccagattctcgtcacgtcggcccttccctatgcgaacgggcaaatccatattggccatctggtcgaatatatccagacggacatctgggtccggacgttgcgaatgcacggacacgaggtctactacgtgggcgccgacgacacgcacggcacgcccgtcatgctgcgcgcggagaaagaaggtctcacgccgaagcagctgatcgaccgcgtctggcaggaacacaagcgcgacttcgacagcttcgggatttcgttcgacaattactattcgaccgactccgaagagaaccgcgttctcagcgaaaacgtctatctggcgctaaaggaagcaggcctgatcgacgcgcgcgacatcgaacaggcgtatgacccagtcaaggaaatgttcctgccggatcgcttcatcaagggcgaatgtccgaaatgcggcgcgaaagaccagtacggcgacagctgcgaagtgtgcggttcaacgtatctgcccaccgagctgatcaatccgtactcggtcgtctcgggcgccacgccggttcgcaagacctcgacacactatttcttccgtctctccgatccgcgttgcgaaaatttcctgcgcgcatgggtgggcggtctggcgcagcccgaagccaccaacaagatgcgcgaatggctcggcgacgccggcgaagccaagctcgccgactgggacatctcgcgcgacgcgccgtatttcggtttcgaaattccgggcgcgccgggcaagtatttctatgtgtggctggacgcgccggtcggctactacgcgagcttcaagaacctcgccgaaaaacgcggcctcgatttcgacgcgtgggttcgcaagggttcgaaggccgagcagtatcacttcatcggcaaggacattctgtatttccacacgctgttctggccggccatgctcgagttttcgggccaccgcacgccgaccaacgtgttcgcgcacggtttcctgaccgtggacggcgcgaagatgtcgaagtcgcgcggcaccttcatcaccgcgcagagcgtgatcgagacgggcctgaatccggaatggctgcgctattacttcgcggccaagctgaacagcacgatggaagacctcgacctgaacctcgacgacttccaggcgcgcgtcaatagcgatctggtcggcaaatacgtgaacatcgcgagccgcgcggccggcttcctgatcaagcgcttcgacggccgcgtgcaggacagcgcgatgcagcatccgctgctcgcctcgctgcgcgccgccgtgccgcaaatcgccgcgaactacgaaagcccgnnnnnnnnnnnnnnnnnnnnnnnnnnnnnnnnnnnnnnnnnnnnnnnnnn

SEQ ID NO: 12798 - DNA, 705 bp, Burkholderia fungorum
atggggcggaaagaaaaacccgtttccccggaaacgtcggggatcggcatcaagccggtgtcgcgtgaaggaacggagcgtctggtgcgcaaggcgatccagtacgcgatcgaccacgatcgccgttcggtcacgctggtgcacaagggcaacatcatgaagttcaccgaaggcgcgttccgcgactacggttacgcgctggcgcaaaaggaattcgccgcggaactgatcgacggcggcccgtggatgaagatcaagaatccgaaaacgggcggcgacgtcgtcctcaaggacgtgatcgccgacgcgttcctgcagcagatcctgctgcgtccggctgaatacgacgtgatcgccacgctgaacctgaatggcgactacgtatcggatgcgttggccgcgcaggtcggcggtattggtatcgcaccgggcgcgaatatgtcggattcagtcgcgatgttcgaagccacgcacggcaccgcgccgaaatacgccggcaaggactacgtgaatccgggctcggaaattctctcggcagaaatgatgctgcgccatctcggctggaccgaggcggcggatctgatcatcaagtcgatggaaaaatcgattctgcaaaaacgcgtcacatacgatttcgcgcgcttgatggaaggcgcgactcaggtgtcgtgttccggatttggtcaggtgctgatcgaaaatctg

SEQ ID NO: 12799 - DNA, 954 bp, Burkholderia fungorum
atgagcagccatgacggcctgatggtttttactggcaacgcaaatcccgcgcttgcacaggaagtcgtcaaaatcctcggtattcccctcggcaaagcaatggtcagccgtttctcggacggtgaaatccaggtcgagattcaggaaaacgtgcgtggcaaggatgtcttcgtcctgcagtccacgtgcgcaccggcgaacgacaatctgatggaactgatgatcatggtcgatgcgctcaagcgcgcatccgcaggccggatcaccgcagccatcccctacttcggttatgcccgtcaagatcgccgcccgcgttccgcgcgcgtcgccatctcggcgaagatcgtggcgaacatgctggaaatcgccggcgtcgagcggatcattacgatggatctgcacgccgaccagattcaaggcttcttcgacattccggtcgacaacatctacgctacgcccgtgctgctcggcgatctgcgcaagcagaactacgagaatctgctggtcgtttcgccggacgtcggcggcgtggtgcgtgcccgtgcattggccaaacagctcaattgcgatctcgcgatcatcgacaaacgccgcccgaaggcgaacgttgccgaagtgatgaacatcatcggtgaagtcgaaggtcgtacctgcgtgatcatggacgacatggtcgatactgccggcacgctctgcaaggcagctcaggttctgaaggaacgcggcgcgaaacaggtgttcgcttatgccactcacccggttctgtcgggcggcgcgggcgagcgtatcgctgcctccgcactcgacgaactcgttgtcacggacacgatcccgctcggcgaagaagcccgctcgtgcgcgaagatccgctcgttgaccagcgctggcctgctggccgaaacgttctcgcggattcgccgcggcgattcggtgatgtcgctgttcgctgaaagt

SEQ ID NO: 12800 - DNA, 1525 bp, Burkholderia fungorum
gagaaagcgcccgctcaggcagaagccaagccgcaggcagccgaggctccggctgccgctccggccaaggcggcggcgcccgcgccgcaagccggcagctattcgggcagcgcggatatcgagtgcgacatgctcgtgctcggatccggccccggcggctactcggcagcgttccgctcggccgacctcggcatgaagacggtgctggtcgagcgttattcgacgctcggcggcgtgtgtctgaatgtcggctgtattccgtcgaaagcgctgttgcatacggctctcgtgatcgacgaagccgaagcgctcggcgcacacggcattacgttcgccaagccgcaaatcgatctcgacaagctgcgtgatttcaagtcgggcgtcgtcaggaagctgaccggcggtctcgccggcatggcgaagatgcgcaaggtcgaagtggtgacgggtaacggcgcgtttgtcgatccgtatcacatggaagtgcagaccgaaggcggcaagaaagtcgtcaagttcaagcaggcgatcatcgccgccggctcggaagcggtgaagctgccgttcattccggaagatccgcgcgtggtcgattcgaccggtgcgctcgaactgcggcagattccgcaacgcatgctggtgatcggcggcggcatcatcggtctggaaatggccacggtgtatgccacgctcggcgcgaagatcgacgtggtcgaaatgctcgacggcctgatggccggcgcggaccgcgatctggtcaaggtctgggagaagtacaacagcaagcgtttcgcaaacgtcatgctgaagaccaaaaccaccgcagccgaagcgaaagacgacggcatccatgtctcgttcgaaggcgaaaaagccccggccgaagcgcaacgctacgacctcgtgctggtggcagtcggccgtacgccgaatggcaagaaaatcggcgcggacaaggccggcgtcgcggtgacggatcgcggctttatcgacgtcgacaagcagatgcgtaccaacgtgccgcacatcttcgcgatcggcgatatcgtcggtcagccgatgctcgcgcataaagcggtgcacgaaggccacgttgccgccgaagccgcgcatggtgagaaggcgtacttcgacgcgctgcagattccgtcggtggcttacaccgatccggaagtggcgtgggccggcaagaccgaagaccagttgaaggcggcgggcatcaagtacggcaaggcggtgttcccgtgggccgcttcgggccgcgcgattgccaacggtcgcgacgaaggcttcacgaagctgttgttcgacgaggaaacgcatcgcgtgatcggcggcgggatcgtcggcctgaatgcgggcgacctgatcagcgaagtgtgtctcgcagtcgagatgggtgcggacgcaacggatatcggtaagacgattcatccgcatccgacgctcggtgaatcgatcggcatggccgcccgagttgtatgaaagcgtgtgcaccgacttgccgccgcagaaaaagaagtag

SEQ ID NO: 12801 - DNA, 277 bp, Burkholderia fungorum
accagcgcggacgggcggatcgtgtggcaggcgaagtaccaactgtgggacaacaccgtgtgcgagagcgagccggagagctatgcggtgcgccagaattgcggtaccaggggcagtatctggaccgggaaacgggctgcattacaacacgctgcggtattatgatccggatattgggaggtttactacgcctgatccgattgggttggcgggcggggtgaatctgtatcaatatgcgcccaatccactcggctggcttgatccgtgggggcttcga

SEQ ID NO: 12802 - DNA, 843 bp, Burkholderia fungorum
atgccgcgcgccgccaggaaaaatccggcttccgcgagcgtgccgcccgacgaggcggtcgctggcgcaaagccggacaccaccatcatccagtcgctggacaagggattgtccatcttcgagtacatccttaaggccggacggccgaagaggctgaacgaagtggcatcacatttcgacatcgacaagagttcggccttccgctttctcaacaccctcgaacgcacgggtctcgtcgtcaaggacgcggcactgaagacctatacgcctggcccgaccttgtcggcgtggagccggatggtacgcaccgatgcgtcgctggtcgaagttgctcgcccgtttctgaagaagctgtcggtcatgacgaagcagacctcgcatctggcggtactgcaggacgaccgtgtcgtcctgattgaggtgatgcccgcggacaatgtggtttccgtcagacagaccgccggtgactgggaaccgctgtattgcaccggggtaggcaaggcgatcctcgcccacctgcccgaaaacgagcgcaaccggctaatcgacaggattacattccgggaacacacacccacaacgctgaccacgccggaaatgctccggctggaactggcccggaccgtcgaagaaggcctcgcatatgacaatggcgaggccaatccgcagttgtgctgtattgcggcgccggttctcgacgcaaacggctatccggtaggatcagtcgggatttcgatgatatatcctctctttcctgacggcccgcgtgcgcagaccgcattcatccgcgccgtcgagcagacggctcagggcatcagtgcatcgctcggaaacgcgcgcgaa

SEQ ID NO: 12803 - DNA, 1248 bp, Burkholderia fungorum
atgaactattgcgcgattgacttcggtacttccaactcggccgtggccgttcctgacggcggcgcgctcaggctcgcgccggtcgagggcgcctataccacgctgcccacctcggtctttttcaataccgacgaggacacccgcgaattcgggcgggcggcgctcgccgcgtacattgacggcttcgacggccgcctgatgcgttccatgaagagcattctcggctcgccgctcgcggagaactccacggatctgggcgacggttccgcgatcaggtacaccgacgtgatcgcgattttcatcgatcacctcaagcgctcggccgaacaaagcgtcggcggcccgattcatcgcgccgtgctgggccgcccggtgtttttcgtcgacgacgacccgcgtgccgatcagatggcgcagcggcaactcgaagccgccgcacgctcggtcggtctgcaggagattcactttcagtatgagccgatcgcggccgcgttcgactacgagtcgcatctggcggaagaagggctcgtgctggtggccgacatcggcggcggtacctcggacttctcgctggtgcgggtcgggcccgagcggatgaagcgcgtcgagcgcaaggacgacgtgctggcccaccacggcgtgcacgtcgccggtacggatttcgaccgccgcgtggaactggcgacgatcctgcgtgaactcggctatcagacgctggacccggaaggccgcgagatcccgaaccgggtctacttcgatctcgcgacctggcatctgatcaacaccgtctactccccgaagcgggtcagcgaactcgcgctgatgcgccatctgttcacggaggtcaagcatcacgaccgcctgatgcgcgtcgtggaccggcgcctcggccatgcgctggccgcgcatgcggaagaggcgaagatcggcgtggcggcgggtggagagaccgtgatcgatctcgacgaagtggaagacgacctgcgcctcgcgttcgacgaagcacaactcatcaaggccggccacgacgaaacgctgcgcatcgtgcaggcggcgcgcgatacggtgcaggcggccggggtcgcgacacgcgacgtcgacgccatctatttcaccggcggctcgacgggtctggcgtttctatcgggcgcattggcggcggcatttcccgatgccagggcggtattcggcgaccgtctcgcgagtgtggcgacgggactcggtattcacgcgcggcgtgtgtttgga

SEQ ID NO: 12804 - DNA, 2193 bp, Burkholderia fungorum
ttggtgactaacgccgcaggcgaaacgacgcgctattggcgaaatcgcaggggacgcctgcttaggacccgtcacgccgacggcaccggcgaggaattcacttacgatattcacggtcgcctgattgcgcacaccgatgcgcacggggccagcacgcaatgggagcgggccgccgatggcctgccggtgacgcgtatcgatgcgctggggcactgtctgcgctacgagtatgatgcggcgcgccgcttgcaaacgctgaccaatgaaaacggcgcgccgtaccgcttcacctacgatacggccggccgtctggtcgagcaacagggtttcgacgggcgtctgatccgttaccgctacgacgcggccggatggttgacggagcagatcgaactgggcgcgtacgaagatcacgcggccgccgacggcaaccatcccgataccttgcgtaccacgtatgagcgggacaaggccggacgcatcaccgcgacaacgataagccgcgcgggcgacgaacgtaccgagcgcatcacatggcggtatgacgcagccggtcggctgattgaggcgagcaacgattgctgccgtcttgagcgcggctacgatgcggtgggccgactgagcagcgaaaccagccatgtcgcgggccggtcgctgacggtgagctacgagcatgacgcgttgggcaatcacatcagaacgacgttgccggacggccgccacatcgactacctctactatggttctgggcatttgcaccagatcagcatcgacggcgaagtgatcagcgatatcgaacgcgatgcgctgcatcgggaagtgagccgcacgcagggggaactcgtcagtcactatcaatatgaccttcagggtcggcacattggacagcaaacaatgggtcgcgccgtgtccgggcattcggcgatcacgctcatctcacgcacgtatcggtatgacgaggtgggtaatgttcgcgagatgacggatcggcagtccggtgtgcatcgctaccggtacgatccgctcggacaactgatcgaatcagagcacgagacttttgccctcgatcccgcgcacaacatcctggattcgagggatctttcgccggtcgtcggcaatcgggttatgcagtttggacaacaccgctatgtctacgatatgcatggcaatgttgtcgaaaagatcagcggcgcgcacacgcgcatccgtctcgactattcgccggctcatcgaatcgaacgtgcgcgggtcgcccgcaacggcaccgaagagcgagtggaatatggctacgacgcactaggccgacgcgtgttcaggaagaacgcatcgggcatcacgctgttcgtgtgggagggcaatcgcctgctgagtgaagtgcgggacgatcgcacgtttgtctacgtctatgcacacaacagttttgtgcccgtcgcacagatcgagtcgcgtaatgctcagaacggccgggcacgtgatgatctgcccattcgttactaccacaccgatcagatcggcttgccttacgagtcgacggacgacgctggacggacgcaatggcgcgcgcgctacgcggcatggggcaggttgctgggagcgaatggcggtcatgagcagatgcatgagtccggcaggcaggctcaccagccgctgcggttccaggggcaatacttcgacgaagaaaccggcctgcactataaccggcaccgatattacgatccggacgccgggcgtttcatgacgcaggacccgatcgggctgagagggggcatcaacctgtatcgttacgcacccaaccccgggcgatggattgatccgttggggcttgcggtggatctttcgctagtgggccctcactacgcatgcaacctgaacaattttcctaatacgttccaggtgttaggtcatggctcgccagggggcaacatagcggacctgtctggcgaaaccctcacgccgagtgaattgggcgactatatgagagaagcgtcgaactacaggcaggggcagcctgtgacgctttatgcttgccacctaggcgcaggcggaaaaaactcctatgcccagcaactgtccaattaccttggcgcggacgtgaatgcgccgacagatgtattgaagaccatcgaccttggagacggagacgtcatggcccttgtcgctaacggcggaggatggcagaaattttcgccgatttgc

SEQ ID NO: 12805 - DNA, 1505 bp, Burkholderia fungorum
gtcgttaaggaagtgaaggtcaaggtcggcgacaattgtgtcaggaaggttcgctgatcgtcgtgctggaaggcgctgaaggcggcgcggccgcgccggcaccggcgcctgcggccgcaccggcagcggctcctgcgccggcaccggctgcggcccccgctgctgcgccggcgcccgcgcccgccgcgagcggcggcggtctgcaggaagtcaaggtgccggatatcggcgactacaaagacattcccgtgatcgaagtcgcggtgaaggtcggtgatcgtgtcgagaaagagcagtcgctagtgacgctcgaatccgacaaggcgaccatggacgtgccgagctcggccgccggcgtcgtcaaggaagtgaaggtcaaggtcggcgataccgtgtcggaaggctcggtgatcgtcgtggtggaagcggaaggcggcgcggccgcgccggcaccggcgccgaagcagcaagccgtcgagcagccgtcggatgcgccggccacgccgtcgccggctccggcggcgccttcggcgctcgctcaggcgccggtgattccggctggcgaaggcggcgcgcgtcacgcgagccatgcgtcgccgtccgtgcgcaagttcgcgcgcgaactgggcgtcgacgtgacgcaggtgcagggtacgggtccgaagggccgcattacgcaagccgacgtgactgccttcatcaagggcgtcatgaccggtcagcgtgcggcgccggctggtgcggccgcaccggctgcggcgggcggcggcgaactgaatctgctgccgtggccgaagatcgacttcacgaagttcggtccggtcgatccgaagccgctgtcgcgcatcaagaagatttcgggcgcgaatctgcatcgcaactgggtcatgattccgcatgtcacgaacaacgacgaagcggacatcacggaactcgaagcgctgcgcgtgcaactgaacaaggaaaacgaaaaggccggcgtgaagatcacgatgctggcattcgtgatcaaggcggttgtttcggctttgaagcagttcccgacgttcaacgccagcctcgacggcgacaacctggtgttcaagcagtacttccatatcggctttgcggccgacacgccgaatggtctggtcgttcctgtcattcgcgatgcggacaagaagggtttgatcgatatcgcgagggaaatggccgagttgtcgaaggctgcgcgcgacggcaagctgaagccggatcagatgcaaggcgggtgcttctcgatctcttctttgggtggcattggcggcacgaacttcacgccgattatcaatgcgcctgaagtcgccattcttggtctgtcgcgcggtgcgacgaagccggtttgggatggtaagcagttcgtgccgcgtttgatcctgccgctttctttgtcgtatgaccatcgggtgatcgatggcgctgcggcggccaggttcaatgcttatcttggggcgattcttgccgatttccggcgtgtgattctttga

SEQ ID NO: 12806 - DNA, 831 bp, Burkholderia fungorum
atgctctccaaactcactcaatggctcggcacacgccgccgcgagcgcgcgctgcgcgactacgcgatcgacgactcgctctggcaagccacgctcgacggcctgccgttcctcgcgcacctcgacgcgccggacctcgtgcgtttgcgcgaactgacgagcctcttcctcgcgcaaaaggaattttcgaccgcgcacgaactcgaactcaccgacgcgatgaccgtggcgatcgccgcccaggcctgcctgccagtgctgaacctgagcctcgatctgtatcgcggctgggtcggcgtgatcgtctatccgggtgagttcgtgatccgcaagaccgtcgaggacgaagacggcgtggtgcacgaagtcgaacaggacgcgagcggcgaagcgtgggaaggcgggcccgtggtgctgtcgtgggaagacgcgcagatgacggacggcacggacgcctacaacgtcgtgattcacgaattcgcgcacaagatcgacatgctgaacggcgaggcggacggccacccgccgctgatgcgccgctggcacgcgccgctcgattcgcagggttgggccgacgtgttcgacaatgcctacgaccgcttctgcgccaaagtcgacgcggtgccggagcgccgctgggcgcgcttcgaacgcgagtcgctgatcgatccgtacgcggcggaccatccatcggaattttttgccgtttgcagtgaggcgctgtttgtcaggccgcaagcgttcgaagcagaatatccggagctttaccggctgctcgcgcgctattaccggcaggacccggcgcgggtcggcctgacgttcaccgccggc

SEQ ID NO: 12807 - DNA, 264 bp, Burkholderia fungorum
atgaaagaaggcattcacccggattaccgcgaagttctgttcatcgacgtgtcgaacgacttcaagtttgtgacgcgctcgaccatccagacgcgtgaaaccgccgaattcgaaggcaagacctacccgctcgccaagatcgaagtgtcgtcggaatcgcatccgttctacaccggccagcaaaagatcatggacacggcaggccgcgtcgagaagttccgcaacaagttcggctcgcgcgctaccggcaaggtcgcagcgaag

SEQ ID NO: 12808 - DNA, 1345 bp, Burkholderia fungorum
ccgaaagtcggctttgtctcgctcgggtgcccgaaagccctggtcgattccgagcagatcatcacccaattgcgcgccgaaggttacgagatttccggcacgtacgacggcgcggacctcgtggtcgtcaacacctgcggtttcatcgacgaagcagtgcaggagagcctcgacgcgatcggcgaagcgctcaacgaaaatggcaaggtgatcgtgaccggctgcctcggcgccaaaaagagcgcgagcggttcggggctgatcgaagaagtgcatcccaaggtgctggccgtgaccggcccgcacgcgctcggcgaagtcatgcagcacgtgcatatgcatctgccgaagccgcacgatccgttcgtcgacctcgtgccggccgcgggggtgaaactcacgccgcgccattacgcgtatctgaagatttccgaagggtgtaatcatcgttgcacgttctgcatcatcccgtccatgcgcggtgacctggtgtcgcgtccggtcgccgacgtcatgctcgaagcggtaaaatctgttcaagtccggcgtgaaggaactgctggtgatttcgcaggacaccagcgcgtacggcgtggacgtcaagtaccgcaccggattctggaacggcaagccgatcaagacgcgcatgaccgatctggtcggcgcgctcggcgaactcgccgcgcaatacggcgcatgggtgcgtctgcattacgtgtatccgtatccgagtgtggacgaagtgattccgatgatggccgaaggtccgttcaagggccacgtgctgccgtatctggacgtgccgttccagcacgcgcatccggaagtgctgaagcgcatgaagcgcccggccaacgccgagaaggtgatggagcgcgtgaagaagtggcgcgagatgtgcccggatctgaccattcgcagcacgtttatcgccggcttcccaggcgagactgaagagcagttccagacgctgctcgatttcattcgcgaggcggaactggaccgggtcggctgcttcgcctattcgccggtcgaaggcgcgacggccaacgaactcgacggcgcgttgcccgacgaagtgcgtgaagagcgtcgcgcgcgtttcatggaagttgccgaagaagtatcggcgaagcgtatcgcgaagaaggtcggcaagacgctgaaggtgctggtcgacgagatcaacgccgacggcggcatcggccgcacggcggccgacgcgcctgagatcgacggcgtggtgtatatcgcgccggctgtaaaggcgtccaaacgttacaaggtcggcgatttcgtgtcggtgaagatcaccggcgccgacggtcacgacctgtggggcgag

SEQ ID NO: 12809 - DNA, 1020 bp, Burkholderia fungorum
atgagccgcatctatctcgccccaatggaaggcctcgccgactacgtattgcgcgacgtgctgaccggcatcggcggattcgatggatgcgtgtccgagttcgtccgcgtgacgggctccctgctgcccagccgagtctacgaaagagaagcgcccgaagtgctcgacggaggtcacacgcccaatggcacgccgatggtgatccagctgctcggcagcgatcccgaatggatggcgcggaatgccgcccacgcggccagcctgtcgccgcatggaatcgacctgaacttcggatgtcccgccaaggtcgtcaatcagcacggcggcggcgccatgttgctggccgaccctgaacaactgaaccggatcgtgtcgtcggtacgggccgccgtgcccgccggtgtccccgtgacggcaaaaatgcgccttggcgtgtccgacacgtcgctggcgatcgaatgcgcagtcgcgctcgcggaaggcggcgccgcctcgctcgtcgtgcacgccagaacgcgcgatcacggctaccggccgccggcccactgggagtggatcgcgcggatcgatgccgccgtggacgtgccggtcgtcgcgaacggcgaggtatggacggtggccgactgggagcgctgccgcgcggtcagcggctgcgcgaacgtcatgctcgggcggggcgccgtgtcggacccgttcctggcactgagaatacgcggcctgatggagcggaccccgtcccacggggaatggcggcacgtgctgggccacatcgccggttatctgaggaaattgcagacgcgcgtcgcatcgcgtcatgagcacgggcgggtcaaaaagtggctcagctacctgcagcgcacctggccgcaggcggccgagctgcatgcggcgatccgccgggtgcaggattcgcacgaaattctggcgatgatcgaacgcgcattgggattcgatgaattaatggcgacgcatcgattcgcgtccgccagtcaactcgacgtagcggacctcgcagccggt

SEQ ID NO: 12810 - DNA, 1833 bp, Burkholderia fungorum
atgcgattgagtcggatcgttatcaagaacttcagaaacttcaagcacttcgatgtccggttgggtgagcatgccgttgttctcggcgagaacaaggtcggcaagaccaatctcctgttcgcgctgcgactgatccttgatcccgcgcttcccgattcatcgcgcagactgcgtattgatgacttctgggatggactggcgcgcccgctgaaggcggaggacgtcatcgaggtgtccgtcgaatttcgggacttcgaaaacaacgagaatctgcttgcagtattggcggaccatttggtgcggccagatccgatggtggcgcgcgtcacgtatcgctatcagccggtgcaggggctcgaaggagcgccgcggagcgaggcggactatgagttcattctcttcggtggaggtcggatcgaaaacgcgatcggttatgaactgaggcgatggatgccgatggatttgttcccggccctacgcgacgccgagtcggacctcgcgcgctggtcgagatcaccacttcgaccgctgttggaccgtgcagcaaagacggtagatgcgaaagcgctcagcgcgatcgctggcgaggtccatgcaacaacctcgaagattgcggcgctccctgagctgtccgatgtggtgagtcaagtcaacgatcagctcactgtcatggttggggataagcacgcagttaaaacagccttggggttcgcaccgaccgaaccggagcgcttgctgcgcgcattacaaatgatgatcgatagcggaaagcgcggcgtggccgaggccagcctcggttccgccaatgtgctttatcttgccctgaagcatcttgagcaccagtacttggtagatgaaggggaacgtcaacacaccttcttagccatagaagagcctgaggctcatctgcatccgcacctccaacggctcatttaccgaaactacctgcagacgcgcgacgaggttcaggccgatacagagccacgcagcattcttctcacaacgcactcacccaacgtagcaagtgtggcgccgctcgccaacgtggttgtcctacgccatgttgtcgatgcaggacataccgttgggcgttctctcaagggagtcaagctcaataccagcgatcgcgaggatctggagcgctacattgacgtcacgcgcggcgagctttttttctcgaagggtgtcatcctggttgagggcgatgcggagaagttcctattgcccacgctggccaagctgaatgacaaggctttggatttcgatgctatgggtatctccgtctgttccattgctggaaccaactttgcgccctatgttcaattgttgggccagaaaggacttgatattccgtttgtggtgctgacggatttcgatcccaagaatcaagcggtgagccaggaggacgcagaccctgacgacaatggtgtgggaaacagctatggcaaaaatcgtgtcgttaatcagatcatgcgtcatcttctggacgaggaagtctgggacaagagcagctatggagaggttctcgagctcgcgccgaagcatggcatcttcctgaacgagttcacgttcgagattgatctctttaaggcgggggctgaggattattttcatacagcgatcggttcgctaaccaccaacaagaaaatgcatgcgcgctttaagggcatgtccgcagaccccgactcgctcgatccctcgcagttcctcaaggacatcgattccatcggtaaaggaagagtggcacagcgccttgcagcggtcctcgtggaggagagcgtcgatgtatgcccaacgtacataaagaaggctctgaagtatttgaaagccaaa

SEQ ID NO: 12811 - DNA, 1455 bp, Burkholderia fungorum
atggtcatcggtggcgagcgtgtcccctcagcgtccggggtatggctcgaaagcatcgacccttatacaggtgaaccgtgggcaaaggtgccacggggcgatgcgactgacgcagaggctgctgtgtctgcagcgcgtaaagcactgaccaccggggcttggcatcagctttcggccacccagcgtggcgcgcttttgcgccgcctcgctgatctgatatctcgcgactgggaacgtcttgccgagatcgagattcgggacaacggaaaggtcatcagtgaagtcggtccgcagatccgctatctggcccagtacttccactattacgctggactggcagacaagatagaaggagcggtgattccggtcgatcgcccggggatgcttaactatacgcgacacgagccggtgggtgtcgtggtagccatcacgccctggaactcgccgttaatgctggcttcgtggaagatcgcccccgcgctagccgccggatgcacggtcattctcaaaccgtccgaacatacgtcggtgtccagtctcgttttctctgacctgttcgatgaagccggtttccctcccggtgttgtcaacgtcgtgacaggattcggggcggagattggcaatgcacttgtctcacacccggacgttgcgaaagtcgccttcaccgggggtgatgtagctggtcaggctgtatacgaacgtgcggcggcgggattaaagcgcgtgactctggaactcggcggtaagtcgccccacatcgtgtttgacgatgctgatctcgacggggcgctcgccgcagccatggacggcgtcttttccagcagcggccagatgtgcgttgcgggttcgagactcatgttgcacgaccgtattcatgacgaatttgtagctcgacttttggaccgagtgcggactttgaagttgggagcaccgatgaatccggccacctcgatcggaccggttactacgcaagcgcaatttgagcgcattctgagctacatcgacgtcgcgaaacaggaaggagcgcgctgcctggtgggaggcgttgcatcgccggaggcggagggcggtagcggctggttcgtcgcgcctaccgtttttggtgacgtgaagaacgacatgcggatcgcccgtgaggaggtgttcggtccggtgctgtcaatcatccggttttcgactgacgatgaggctgtccatctggccaatgacagtcgctacggcctggcttcggggatctggacgcgcgacgtcggacgcgccatttcggtcgcagatcgcattcaggcgggaacggtatgggtcaatacgtatcgagccgttagtgcggcatctccatttggcggcatgaaacgctccgggatcggacgcgagaatgggcaggaagccatcatgggcttcctgcagacaaaaagtatctggatttctacgacttccaggccggtggcggcctggtcc

SEQ ID NO: 12812 - DNA, 716 bp, Burkholderia fungorum
gtcatcgccgccgatatcggcggaggcacttcggatttctcgctggtgcggatcggcccgcagcgaatggggaagatggatcgcaagcgggacgcattcgcgcatcacggcgtacatgtcgccgggacggatatcgaccgacgggtcgaactggcagccatcctgcaggaggccggctaccgcagcctggacaccgaaggacgcgaaataccgaccacgcctatttcgagctcgcgacctggcacctgatcaattcgctctacacgcccaaacggccagcagagcttcgactcatgcgccacctgtatcggaatccggttcaccacgaccgactaatgcgtgtggtgaaacgacggcccggtcacgcgcttgccgcgagcgcggagcaggcaaaaatcgcgatcgccgccgggggtgacacgctcatcgggatcgacccgatcgagccgggcctgagcgtcgctttcggtcaacagcaactggtcgacgcgacgtgtgaagaaagcatgcggatcgttcacgccgcccggaaaacggcgcgactggccggcgtcgctgccgggaaagtcgacgccgtatatttcaccggcggttccaccggccttgcgtccccgacgcgtgcgcttgcgggtgtgttttcgttttccgaagccgaacaggtgttcggtgatccgctggcgagcgtagcaaccggcctcggcattcacgcaaaaacg

SEQ ID NO: 12813 - DNA, 774 bp, Burkholderia fungorum
gtgttgacatttttcagggtgcaccctagactcgttttcatggaaactgatcacatctcccccaccgtctcgctggctgacttccgggcgcacacattgaccggcgtggttcagcacgagatcgagcgaatgattctgagcggcgaattgaagccgggtcagcggctcaatgagaaggcggtcgcagacaggctttctgtgagccgcgggcccgtgcgtgaggcgtgccgcgcgctcgccgaactcggcctcgtgtatctgatcccgcagcgtggcgtattcattcagcgtgtcacacgtgacgacgcaattgaagtctacgatttgcgcgcgggactcacggcattgtcggcatcgctgctcgcgccgctaatgaccgaagagatggccacccagcttgacgcttatgtcgacgagatgcaggaggccgcgcaaaaaggggatttttcgcggttcgatccactaaacctcgaattccacgactacatcgtgcgttcaaccggtaactcgcggctgatcaagctctatcgcggctttgttaaggaatttcatctgttccgggttcacggaatggttcagcgtggcgcgttgcttcagtcgaatgacgagcatcgcgagatcgtcaatgcgctcaaatcccgcaacgccagcctgagctatgagacgagtttcagccacgtgtcgaaggggaaggaacgcatgctcgtcgcgttggacggtctggtgaaatccggagaagaaaacgccgtgccgcccgccgccgatcagctcgcc

SEQ ID NO: 12814 - DNA, 1425 bp, Burkholderia fungorum
atggacgccatatcaattgcatatgagaacaagaagtcagccggcttccaagggctgctggcgcgagtcctcgacacctcgctgatcgtcggcggcgcagtcgcggcggcgcagatccgtttcgagaatctgactggggatcacgtcgacaccggcttcatcgcatttgccgcggccttcgctttggcgctgtttccagtatttggtgtctatcaatcgtggcgaggccgctccatgcttcgcatgatcggccagatctgtctcgcatggctagtcgtgcaaggctgcgggctggttctgatgtttgcgctgcatagaacggattttatatcgcgactctggttcgcctactggaccggcacgaccggcgcagcgctaatcgtcgcccgatcatcgacttatgcgttgctgcgccatgtacgcaatgcaggactgaatttgcgtagtgttgcggttgttggccgcggatcgcattgccggcaggtgatgcgcggcatcctcgcagcgcgcgctagcggtttccgggtggcggccgcattcgacctgcacccaggcgctgagcgagctgccgaatgccccgtcccgaacatacaactgttcgatgatttcaccgatttctccaggttcgttcgagtcgagaatattcaggagatctggcttgcgcttccgctgtcggaagaaagcatgatttcgcgttgtctgcacgaattccgcgacgatctggtcaacattcgcttccttccagatgtgagcagtcttgctctgttcgatggcagcgtcatcgatctcattggtgtgccggctatcaatctcgtcgcgtctcctctgtcatcgcatgcgttactgaagaaagaggtattcgatcgggcattttccctcgccgcgttgctctgtctcgcccctctgatgatctgtgtcgcagtcgccgtgaagctatcgtcgcccggccccgtcttcttcgttcaaaagagaaagggagccgacggaagggtattcaagatctataagttccggacgatgcgagtgcacgcgtccgagcctggcgtcatcaagcaggcatcacgcaacgacccacgcattacccgaatcggcgccttcttgcggcggacgagtctggacgaattgccgcaattcctcaatgtgctaagaggcgacatgtcggtagtcggaccacgcccacatgccattgaacacgacgacctctaccggaccatcgttcacggatacatccaccggtaccggatcaaaccgggaatcacaggatgggcacaggtgaacggtttccgtggtgaaaccgatcgtgtcgagaaaatgcagaagcgcgtcgagcatgacctgtattacctgacgaactggtcgttcgggctggacatgcgcatcgttctggcaaccgtagtacgcgggttgatacatcgcaatgcgtat

SEQ ID NO: 12815 - DNA, 159 bp, Burkholderia fungorum
ttggtgaggttcgagtacttccatctcacggacttcgaagacgtcgacgcattaaggacaggcctggagggctacatcgactactacaaccggcaccgcatcagatcgaaacttggtggactgagtcccgtggaatatcgaatgcgagcgggaaaaaat

SEQ ID NO: 12816 - DNA, 1557 bp, Burkholderia fungorum
gctcttccgtacagcatgatcgcccacaacggcgaaatcaacacggtgaagggcaacgtcaactggctgaacgcccgtaccggcgccatcgcgtcgcacgtgctcggcgacgatctgccgaagctctggccgctcatctatccgggccaatccgatacagcgtcgttcgacaactgtctcgaactgctggtaatggccggctacccgctcgtccacgccatgatgatgatgatcccggaagcctgggagcagcacacgctgatggacgacaaccgccgcgcgttctacgagtaccacgccgcgatgatggagccgtgggacggccccgctgcaatcgcctttaccgacggccgtcagatcggcgccacgctcgaccgtaacggcctgcgtccggcgcgctacatcgtcacggacgacgacctcgtcatcatggcgtcggaagccggcacgctgcctatccccgagtcgaagatcgtcaagaagtggcgtctgcagccgggcaagatgttcctgatcgacatggagcacggccgcatcatcgacgacaaggaactgaaggacaacctcgcgaacgccaagccgtacaagagttggatcgacgccgtgcgtatcaagctcgacgaaatcgaggcgaaggccgaagacgtggccacggaacgccgcgaagccgctgctttgctcgatcgccagcaggcgttcggctacacgcaggaagacctcaagttcctgatggcaccaatggcgcaagccggcgaagaagcggtcggctcgatgggcaacgactcgccgctggcggtcatgtccaacaagaacaagacgctgtatcactacttcaagcagctgttcgcgcaagtgacgaacccgccgatcgacccgatccgtgaaaacatggtgatgtcgctggtgtcgttcgtcggtccgaaaccgaacctgctcgacacgaacaacatcaacccgccgatgcgcctcgaagtgtcgcagccggtgctcgacttcaaggacatcgcaaagatccgcgcgatcgatcagtacacgggcggcaagttcagttcgtatgaactgaacatctgctatccggtggcatggggcaaggaaggcatcgaagcgcgccttgcctcgctgtgcgcggaagccgtggatgcggtgaagtccggctacaacatgctgatcgtgtcggaccgcaagaccgaccgcgacaacgtcgcaattccggcgctgctggccactgccgcgatccacacgcacctcgtgcagcaaggtctgcgcacgagcacgggtctggtcgtcgaaaccggctcggcgcgtgaaacgcaccacttcgcgctgctcgcgggctacggcgcggaagccgtgcacccatacctcgcaatggaaacgctcggtcagctcgcagcgggcctgaagggtgacctgtcgccggagaaggcggtctacaacttcaccaaggcggtcggcaagggtctgcagaaggtcatgtccaagatgggcatttcgacctacatgtcgtacacgggcgcgcagattttcgaagccgttggccttgctgaagatctggtg

SEQ ID NO: 12817 - DNA, 1071 bp, Burkholderia fungorum
ctcgacgccggcggtgaatacgcgtaccgcgtgcgcggcgaagaacacatgtggacgccggatgcgatcgccaagctgcagcactcggcacgcagcaactcgtaccagacgtacaaggaatacgcgcatctgatcaacgatcagaccaggcgtcacatgacgttccgcggcctgttcgaattcaagttcgatccgaccagggccatcccgctcgacgaagtcgaaccggcgaaggaaatcgtcaagcgtttcgccaccggcgcgatgtcgctcggctcgatcagcacggaagcgcacgccacgctggctatcgccatgaaccggatcggcggcaagtcgaacacgggcgaaggcggcgaggacgtgaaccgttaccgcaacgaattgcgcggcattccgatcaggaacggcgacacgatgaagtccgtgatcggcgacgaagtgatcgtcgacattccgctgaaggatggcgattcgctgcgctcgaagatcaagcaggtggcgtcgggccgtttcggcgtgacggcggaatacctcgcctccgctgatcagatccagatcaagatggcgcaaggcgcgaaaccgggcgaaggcggtcagttgccgggccacaaggtgtcggaatacatcggcaagctgcgttactcggtgccgggcgtcgggctgatttcgccgccgccgcaccatgacatctactcgatcgaagatctggcgcagctgattcacgacctgaagaacgccaactcggcagccagcgtctcggtgaagctggtgtcggaatcgggcgtcggtacggttgccgcgggtgttgcgaaggccaaggccgatcacgtcgtgatcgccggccatgatggcggcacgggcgcgtcgccgctgtcgtcggtgaagcatgccggcacgccgtgggaactgggtctggccgaaacgcagcaaacgctggtgctgaaccagttgcgcggccgtatccgcgtgcaggccgacggtcagatgaagaccggccgcgacgtcgtgatcggcgcgctgctcggcgcggacgagttcggtttcgcgacggcgccgctcgtggtcgaa

SEQ ID NO: 12818 - DNA, 546 bp, Burkholderia fungorum
atgaaaaccgttggcgataaagtcgaagcgttcaccgtcactgctgcaaagccgggcttcaaccatcacgaggaaaacggcgtctcggcgttcgaagagatcacggagcagtcgttcccgggcaagtggaagatcatctatttctacccgaaggatttcacgttcgtgtgcccgacggaaatcgtcgagttcgccaagctggccaaagatttcgaagaacgcgacgcggtgctgatgggcggcagcgtcgacaacgaattcgtgaagctggcatggcgccgtgagcacaaggacctggacaagctgaaccactacgcgttcggcgacgtgaaaggcgagctgatcgaccagctgggcgtgcgcgacaaggaagccggcgtcgcgctgcgcgccaccttcatcgtcgatccggacaatacgatccagcacgtatcggtgaacaacctgaacgtcggccgcaatccggaagaagtgctgcggattctcgacggcctgcaaacggacgaactgtgcccttgcaaccgtgcagtcggcggcgcaacgctc

SEQ ID NO: 12819 - DNA, 711 bp, Burkholderia fungorum
gtgacttcccgtctatttgccctgattccgtgcgcaggcaccggcagccgttccggcgccgcgatgcccaaacaatatcgcactgtcgccggccgcgacatgttgcatttttcgctggcggcattcgacgcctgcagcgagtttgcgcaaaccctcgtcgtgatcgcccctgatgacgcccatttcgacgcgcgccgcttcggcggcttgcgttttgccgtgcgccgcagcggcggagcctcgcgccaggcgtcggtgctcaatggcctgcacgcgcttgccgagttcggcgcccatgacgacgactgggtactcgtgcacgatgcggcgcgtcccggcatcacgcctgcgctgatccgcacgctggtcggcgcgctgaaggacgacacggtaggcggcatcatggcgttgcccgtggcggacacgctcaaacgcatcgacgcgaattcggccgacggccggatcgcccgcaccgaggcgcgcgacggcttgtggcaggcgcagacgccgcagatgttccgcatcggcatgttgcgcgcggcgatcctgcgcgcgcaggccgacggtcacgacctgaccgacgaagcgagcgcgatcgaatggttgggtcacgcgccgaaactggtgcagggcagcttgcgcaacttcaaggtgacttatccggaagacttcgatctggccgaagccattctgagccggccagcggtttcg

SEQ ID NO: 12820 - DNA, 1728 bp, Burkholderia fungorum
atgacaacgcatgtgtcaggcgaaggtgcactcatcgaacccaaagacgggctgtcgtacgtccgcgggccgaccgacattccgttgagcgaagcgaccatcggccagtttctgcgtgatacggcggagcgttttccggatcgtccagcagtggtgtttcgtgagcagcgcattcgctggacatggcaggagttcgtggaagaagtcgacgtgttggcggccggcctgctcgcactcggcatcgagaagggcgaccgcgtcggcatctggtcgccgaatcgcgtggaatggttgctcacccagtttgcgaccgcgcgcatcggcgccgtgctggtcaatatcaacccggcgtaccggctcgcggaactcgagtacgccttgaacaaggttggttgcaaggcgatcattgccgccgagcgtttcaagacatccatgtacctggagatgttgcaggaactcgcacccgagctggccacgcaagcgccgggcgagctgcacgcatcgaggctgcccgaattgcgctacgtgattcgcatgtgcgatacggaaacgccgggcatgttgagcttttccgacgtgatcgaggaaggccgcgcgtcgctggacgtgccgacgctcgacgccatcggcgccacgctctcgtgccgcgacccgatcaacatccagttcaccagcggtaccacaggcaatccgaagggggcgacgctgacccatcgcaacgtggtcaataacgcgcgctacatcgcgatggcgatgcggctgaccgagcaggacggcttgtgcatccccgtgccgttgtatcactgcttcggcatggtgttatcggtgctggcgtgcgtgtcggttggcgccaacatggtgtttccaggcgaaggattcgacccggccgcaagcctggccgcagtcgcggaagagcagtgcaccgcgctgcacggggtgccgaccatgttcatcgccgaactcgatcacccggacttcgccacgtacgatttatcgcgcctgcgcaccggcatcatggcgggctcgccatgcccgatcgagaccatgaagaaggtcgtctcccgaatgcatctgggcgagatcaccatcgcctatggcatgacggaaaccagcccggtctcgttccagagttcgaccaccgatccactcgacaagcgcacaaccacggtcgggcgcatccagccgcatctggaagtgaaaatcgtcgatccccttggcaacattgtgccagtgggcgaaaccggcgagctgtgcacgcgcggctattcggtgatgcaaggctattgggacgatgaggcgaagacacgcgaaagcattgtcgacggctggatgcacaccggcgatctggcgacgctcgatgccgaaggctactgcaacatcgtcgggcgtctgaaggacatgctgattcgcggcggcgagaatatctatccgcgcgaaatcgaggaatttctgttccgccacccgaaaatccagagcgtgcaggtgttcggcgtgcccgactcgaagtacggcgaagaggtttgcgcgtgggtcgtattgcgcgcgggcgagcaggcaaccgctgaagagatccagcagttctgccaagggcagattgcgcactacaaggtgccgaagtacatccgttttgtcgacgaactgcccatgacggtaaccggaaaggtgcagaagttcatcatgcgcgagcggatgatcagcgaattgaagttgcggcaggacaagacggcg

SEQ ID NO: 12821 - DNA, 735 bp, Burkholderia fungorum
atggatcgcaaggtcaaactgctgtctggactggatctgtcgagtgcaatcggtgcggaaatcggtgcgctttgccgacccgtggtgacgcgcccggagggcacggtttattacatcgaccacgccagtacagaagttctgcgcgaaaaatataaacacgatccgaatgtcgatatcaacgcgctcgtggacgtcgatgccgtatggggccagcaatcgctgtccgaagcgctcggcggcaagctggtcgattacgtgatcgcctcccatgtggtcgaacatgttcccgatctcgtcggctggctcgccgagatcggtgcaatactcaaacccggcggccagttgcggctcgccgtgcccgacaagcgtttcaccttcgatctgatgcgggaggattcgcgcatcagcgacgtactgggcgcccatgtggtgcgggcgcgcattccgcagccgcaggccatcatcgaccatatcgtgaacgtgcgatacgacgtcagcgcaggggagatctgggccggcatatgttcgaatggaaggccggcgcatacattcgcggatgcgattgcctctgcccaggacgcctttgcaaacggcaactatcatgacgtgcacgtctgggtcttcacgccgctcacgtttgcaaggatctgccgccaactcgttgaaaacggattgttgagcatgtcatgcgctaactttttcgacaccgcgagaaacgactcgagtttcagggta

SEQ ID NO: 12822 - DNA, 839 bp, Burkholderia fungorum
atagtgcttgaactgaggcaggaattccccttggccgaccttctccgggctgcggggttgccacgcagtacgtactactatcgggccaagacgttggccgccccagaccggcatcgtggactcaaggcgaagattcaggctgtctatgctgcacatcgcggcttgtatggctatcgtcgcatcaccttaactatccgcagtgatggcgagctagtcaatcacaagaaggtgcagcgcctcatgaacgaattgggaatcaggtcgagggtgcgccggaagaagttccggtcataccagggcgaggtcggcgaggccgctccgaacctgctcaatcgtgaattcaccgcatcgagcccaaacgagaagtgggtcaccgatgtgaccgagttccgggtcgcggggaaaaagctgtacctttctccggtcatggacctctacaatggggaaattgttgcctacgagtcgagccatcgccccgacttcccaatggtcatgggcatgctcaggaaagctgtcaagaaatgcgggaatgcgggaatgcggctacaccgatgcttcattcagaccagggttggcactatcgcatgcaaccgtaccgagcggcactggcgcgctacggaatgaagcaaagtatgtcgagaaaaggaaattgcttcgataacgcggccatggagagcttctttggcactctgaaggccgagtacttccatctcacggacttcgaagacgtcgacgccctaagggtaggcctgaagggctacatcgattactacaaccggcatcgcatcaaatcgaaacttggtggactgagtcccgtggaatatcgaatgcgagcggga

SEQ ID NO: 12823 - DNA, 525 bp, Burkholderia fungorum
gtgaggaaattcgatgtaaagtttaaggggaaggtggttcgcgagtatctcgctggcaaagggggctataagctccttgcggcgaagttcggtattgctgaaagcatggtgaggcgatgggtcgcggcatatcgtcaccatggtaacgctgggctcatccgccagcgtggcgcttacacccttgagttcaagcttgaggtggtgcaccggggcgtggctgagaacctttcctgtcgagagctggctgccatttacaatatcggcaatccgcacagcatcacgatgtggcaacaacagaaagcacggggagagctccgttcgctaaagggcatgcacccgtcgggacaggatgtttcggtgccagcaaagaaaaagacctcgaaccagtcgttagaagctccgcgatctgaggagtcagaccaactgcttcgtgagaatcagcagttacgcgcggaggtcgcgtacctaaaaaaattcaatgccttggttctagcaaagaagttggcgcggcagaaagagccaaaa

SEQ ID NO: 12824 - DNA, 675 bp, Burkholderia fungorum
cgtatcttcacgcgtatcggcgcagcggacgaccttgccggcggccgctccaccttcatggtcgagatgaccgaagccgccgcgatcctgaacgacgccacgccgcaaagtctcgtgctgatggacgagatcggccgcggcacgtccaccttcgacgggctcgcgctggcgtgggcgatcgcgcggcatctgcttgcgcacaacggctgccatacgctctttgccacccactacttcgaactgacgcaactgccggcagagtttccgcaggcggccaacgtccacctgtcggcggtcgagcatgggcacggcatcgtgttcctccacgccgtcagcgaagggccggccaatcagagctacggcctgcaggtcgcgcaactcgccggcgtgccgaacgcagtgattcgcgcggcgcgcaagcatcttgcgtatctcgaacagcagtcggccgcgcagcccgcgccgcaactcgatctgttcgccgcgcccatgccgatgctgctcgaagacgcggacgacgagcgtgattcgaaagccgaagcgcttgtgccgcccgccatgcaggcgcttgtcgagcgtctgcgcggcatcgatccgaacgatctgcggccgcgcgaagcgctcgatctgctgtacgaattgcatgaactggccgccgcgccggatgcggatcat

SEQ ID NO: 12825 - DNA, 880 bp, Burkholderia fungorum
tcgcgaaggctgccgctgtatcgctacttcggcggctcgggcgcgatgcaactgccggtgccgatgatgaacatcgtcaacggcggcgcgcacgcgaacaacagcctggatatccaggaattcatgatcgtgccggtcagccagccgagcttccgcgaagcactgcgctgcggcgccgaagtgtttcacgcattgaagaagatcctgtcggatcgcggcatgagcacggcggtgggcgatgaaggcggcttcgcgccgaacttcggcagcaacgacgaatgcctgtcgaccatcctgcaagcaatcgaaaaagcaggctaccgtgccggcgaagacgtgctgctcgcgctcgactgcgcagccagcgagttctaccacgacggcaagtaccagttggccggcgaaggcctgcaactgtcgtcgacggaattcgcggactacctggcgaatctcgccgacaagttcccgatcgtgtcgatcgaggacggcatgcacgaaagcgactgggcgggctggaagacgctgaccgacaagctcggcaagaaaatccagctggtgggcgacgatctgttcgtcaccaacacgcgcattctgaaggaaggcatcgagaagggcatcgcgaactcgatcctgatcatgatcaaccagatcggcacgctgacgggaaactttcgcggcgatcgaaatggccaagcgcgccggctacacggctgtgatctcgcatcgttcgggcgaaaccgaagattcgacgattgcggatatcgccgtcggtctgaacgccgggcagatcaagacgggttcgctgtcgcgttcggaccgcatttcgaagtacaaccagttgctgcgcattgaagaagaccttggggcgatatcgccggct

SEQ ID NO: 12826 - DNA, 448 bp, Burkholderia fungorum
ggtatccagccgacgtgtagacgacctgcacgggcgtgatatcttcctcaagctgctcgatcaaggtcaggcgggcgacaatgtgggtatccttctgcgcggcacgaagcgtgaagacttggagcgtggccaggtgctggccaagccgggttcgatcaacccgcacacgcacttcacggctgaagtgtacgtgctgagcaaggacgaaggtgtccgtcacacgccgttcttcaacaactatcgtccgcagttctacttccgtacgacggacgtgacgggctcgatcgagttgccgaaggacaaggaaatggtcatgccgggcgacaacgtgtcgatcacggtgaagctgatcaacccgatcgcgatggaagaaggtctgcgtttcgcaatccgcgaaggcggccgtacggtcggcgcaggtgtggttgccaagattctcgagtaaaat

SEQ ID NO: 12827 - DNA, 429 bp, Burkholderia fungorum
ttgacgtatttgctgcaagtggtgcccggagccgggcgccggccctcagcggccgcccggctctacgttctttactgtttggcggtgcaataccgcctcgctcttttccaaggaattgtcatgcagaaccagaaaatccgcattcgcctgaaggctttcgactatcgcctgatcgatcaatcggctgctgaaatcgtcgacacggcaaagcggactggcgcaatcgttcgtggtccggttccgctgccgacccgcattcaacgcttcgacatcctgcgttcgccgcacgtcaacaagacgtcgcgcgatcagctcgaaatccgtacgcaccaacgcctgatggacatcgtcgatccgacggacaagaccgttgacgcactgatgaagctggacctgccggctggcgtggacgtggaaatcaagctgcaa

SEQ ID NO: 12828 - DNA, 657 bp, Burkholderia fungorum
atgagccttggactcgtaggtcgcaaggttggcatgacccgtatcttcacggcagaaggggattcgattcccgttaccgtgctggacgtgtccgacaaccgcgtgacgcagatcaagactgttgaaaccgacggctacacggccgtacaggttgcattcggtacgcgccgtgcatcgcgtgtgacgaagccgttggccggtcatctcgccaaagccggtgttcaagccggtgaaatcctcaaagaattccagattgatgctgccaaggctgccgagttgtcgaacggcaccgtggtcggtcccgacctgttcgaagtaggccagaaggtcgacgtgcaaggcgtgtcgatcggtaagggctacgccggtaccatcaagcgttacaacttcgcatccggccgtgcatcgcacggtaactcgcgctcgcacaacgtgccgggttcgatcggtatggcgcaggatccgggtcgtgttttcccgggtaagcgcatgaccggtcacatgggtgacgacacggtaacggtgcaaaacctcgaaatcgctcgtatcgacgctgaccgcaagctgttgctggtcaagggcgccgttccgggtgcgaagggtggcaaggtattcgttacgccggccgtgaagacgcgtgccgtgaaaggagcgaaa

SEQ ID NO: 12829 - DNA, 618 bp, Burkholderia fungorum
atggaacttaagctcctgaatgccaatggtcaggaaggtgcaggcgttagcgcgtcggacgtcgtgttcggtcgcgattacaacgaagccctgattcaccaggttgtggtggcgtatcaagcgaatgcccgtagcggcaaccgcgcgcagaaggaccgtgagcaagtcaagcacacgaccaagaagccgtggcgccagaagggtacgggccgcgcccgtgccggtatgtcgtcgagcccgttgtggcgcggcggtggccggatcttcccgaattcgccggaagaaaacttttcgcacaaggtcaacaagaagatgcatcgcgcaggtctctgttcgatcttctcgcagctggcccgcgaaggccgcatctcggtggtcgacgagctgacgctcgaagcgccgaagacgaagctgctggccgaaaaattcaaggcgatgggtctcgactccgtgctggtgattaccgacacggttgacgaaaacctgtacctcgcgtcgcgcaacctcgcccatgtggcagttgtcgagccgcgttacgccgacccgctgtcgctgatctacttcaagaagatcctgatcacgaaggctgcggtcgcccagatcgaggagttgctgtca

SEQ ID NO: 12830 - DNA, 825 bp, Burkholderia fungorum
atggcaatcgttaaagttaagccgacttcgccgggtcgccgtgcgatggtcaaggtggtcaacaaggatctgcataagggcaagccgttcgcaccgctgctcgactcgcaatccacgaccgccggccgtaacaacaacggccacatcacgacccgtcataagggtggtggtcacaagcatcactatcgtgtcgtcgatttccgtcgcaataaggacggtatcgcagcgaaggtcgaacgtctcgagtacgacccgaaccgtagcgcgaacattgcgctggttctgtacgcagacggcgaacgtcgctacatcattgctccgaagggtgtcaccgtcggccagcaactgatgtcgggttcggaagcgccgatccgcgctggcaacacgctgccgatccgcaacatcccggtcggtacgacgatccactgcatcgaaatgctgccgggcaagggcgcgcaaatggcgcgttcggctggtacgtcggcgatgctgctggctcgtgaaggtatctacgcacaggtccgcctgcgctcgggtgaaatccgccgcgtccacgttgagtgccgcgcgacaatcggtgaagttggcaacgaagagcacagcctccgtcaaatcggtaaggctggcgcaaaccgctggcgcggtatccgcccgacggtgcgtggcgttgcaatgaacccggtcgatcacccgcacggtggtggtgaaggcaagacggctgcaggtcgtgatccggtgagcccgtggggcacgcctactaagggttatcgcacccgcagcaacaagcgcacgacgagcatgatcgtccagcgccgtcacaagcgt

SEQ ID NO: 12831 - DNA, 327 bp, Burkholderia fungorum
atggaagtgaaagcaattcatcgcggtgcccgcatctcggcgcagaaaacgcgccttgtggctgaccagatccgcggtttgccggtcgacaaggcgctgaacgttctgacgttctcgccgaagaaggctgcgggaatcgtgaaaaaggtcgtgctgtcggcgatcgcgaatgcggagcataacgaaggcgccgatatcgatgagctcaagatcacgagcatctacatcgacaaggctgcgtcgctcaagcgttttaccgcgcgcgctaaaggccgcggtaaccgcatcgagaagcaatcctgtcacatcactgtgacggtcgggaat

SEQ ID NO: 12832 - DNA, 691 bp, Burkholderia fungorum
atgggacagaaaattcatccgactggcttccgtttggccgtcagccgcaattgggcgtcgcgttggtacgcgaacaacaacaatttcgcggcgatgttgcaggaagacatcggtgttcgtgaatacctgaagaagaagctgaagaacgcttcggttggtcgtgtcgttatcgagcgtccggcgaaaaacgcgcgcatcacgatttatagttcgcgtccgggtgtggtcatcggtaagaagggcgaagatatcgagctgctgaagtcggaactgcaacgccgcatgggcgttccggtccacgtcaacatcgaagaaatccgcaagccggaaaccgacgcgcaactgatcgcggattcgatcacgcagcagctcgagcgccggatcatgttccgccgcgcaatgaaacgtgcgatgcaaaacgcaatgcgtctgggtgctcagggacatcaagatcatgagcgctggccgcctgaacggtatcgaaatcgcccgtacggaatggtatcgcgaaggtcgcgtgccgcttcatacgctgcgtgctgatatcgactacgcaacgtcggaagcaaagacgacgtacggcatcatcggcgtgaaggtgtgggtctacaagggcgacacgctcggccgcaacgacgcaccggtggttgaagaagtcgccgaagaaaagcgtccgcgccgcaacgcacgt

SEQ ID NO: 12833 - DNA, 414 bp, Burkholderia fungorum
atgctgcaaccgaaacgcagaaagtatcgcaaagagcagaagggtcgtaacaccggtatcgctacccgcggcaacgcggtgtcgttcggtgagttcggcctgaaggctatcggtcgtggtcgcttgaccgcgcgccagattgaagcggcacgtcgtgcaatgacgcgtcacatcaagcgtggtggccgcatctggatccgcatcttcccggacaagccgatctcgcacaagccggctgaagtacggatgggtaacggtaagggtaaccctgagtactacgtcgcagagattcaaccgggcaagatgctgtacgaaatggacggcgtaaccgaagagctggcacgcgaagcgttccgtctggctgcagctaagctgccgctcaagacgacgtttatcgtgcgtcagctcggcgcc

SEQ ID NO: 12834 - DNA, 819 bp, Burkholderia fungorum
atgctaaaaacccgtgtcatcacggcgatcatcctgctggcggtattcctgccggtcacgttgttcgcgccggtgggcgcgttcggcgcgctgatcgccttcgtcgtcgtgttcgccgcatgggaatgggcgcgtctgctcaaactgggcggtgcgggcccggtcatttacgcgctggtggcggcggtggcgctggtcgccagcacgcgcctcggcgccggcatcgagcaggcgaggccgctctttcaggcggccgcgattttctgggtggtcgccggtccgttcgtgctgctgcgcaagcccacgttgtcgcagggcgcctggcgcccctttctgtttcttgccggcattgtgatattcgtcgcgtgctggcatgctctcgtcgccgcgcgcatgcagggcgtgccgttcgtgctgtcgttgctgctgttggtatggctggccgatatcggcgcatacttctccggaaaagcgttcggaaaacacaagctggcgcctgccatcagtccgggtaagacttgggaaggcgcaatcggcggctggttggcggtgatgatcgtcgcggcggcggcggtctttttgcatgcgttcgagccgaccctgtattctgcgttgctggcgcattggggcgccgtgcgcacattgctcgccctgaccctgctggtcgtgttcagcgtggtgggcgacctgttcgaatccatgatgaaacgccaggccggggtgaaagattcaagcggcctgttgccggggcacggtggcgtgctcgaccgcatcgacgcattgttgccggtgctgccgcttgccatgctgctgctcggc

SEQ ID NO: 12835 - DNA, 780 bp, Burkholderia fungorum
atgacctataccagctcaaccgtgcgcgtgcctgatgtcgccgcggtgccgcgacatatcgcgatcatcatggacggcaacggccgttgggccacccagcggcgcctgccgcgcgtggcgggccatacgcgcggcgtcgacgcggtgcgtgcggccgtcgaggcgtgcgcccgtcagggtgtcgaatatctgacgctgttcgctttcagctcggaaaactggcgccgtcccaacgacgaagtgtcgttcctgatgcgcctgttcgtgaccgcgctggagcgcgagatcggcaaattgcacgcgaacggcatccgtttgcgcgtggtgggcgatctgtcgcgcttcgacacacgcatccgcgacctgatcaggcgcgcggagaccaagaccgcgcgcaatacccgtctgacgctcacgatcgccgcgaactacggcggccgctgggacatcatgcaggccacccgcaagctcgccgagcagtcggcgctggcgggcaaggcggtcgaagtgaccgaggaatcgttcgccgagcacctctcaatggcttatgcgccggagccggacctgttcatccgcaccggcggcgagcgccgggtcagcaacttcctgctgtggcagcttgcctacaccgagttctacttcacagacacattctggccggatttcgacgccgacgcgctcggccacgccatcgcttcgtacgcggagcgcgaacgccgcttcggccgcaccagtgctcaactcgagccgcaatcgcaaaacgtcgattcgcttccatgc

SEQ ID NO: 12836 - DNA, 519 bp, Burkholderia fungorum
atgcagcgctccatcgacgcgttcaagaacgacctgtcgaagatccgcacgggccgtgcgcacacgggcctgctggatcacatccagtgcgactactacggttcgccggtgccgatttcgcaagtggcgaacctgacgctgatcgacgcccgcacgatcggcgtgcagccgtgggaaaagaagatggttccggttgtcgaaaaggcgatccgcgagtcggacctcggcctgaacccggccacgcaaggcgacgtgatccgcgtaccgatgcccgcgctgaccgaagaacgccgccgcgaactgaccaaagtggtcaagagcgaagcggaaacggccaaggtggcggtgcgcaacctgcgccgcgacgccaacgagcaactgaagaagctcgtgaaagacaaggaaatttcggaagacgacgagcgccgtgcgggtgacgacgttcagaagctgacggacaggttcgtcgccgaaatcgacaaactcgtcgtgacgaaagaagccgagatcatgacggtc

SEQ ID NO: 12837 - DNA, 711 bp, Burkholderia fungorum
atgcccactgcctataaacgcgtcctgctcaaactctccggtgaagctctgatgggcgacgatgcctttggcatcaatcgcgcgaccatcgaacgaatggtggcggacgtggccgaagtggtccgtctcggaacgcagctggccgtggtgatcggcggcggcaatatttttcgcggcgtcgcgggcggcgcggcgggtatggatcgcgccacggccgactacatgggcatgctggccaccatgatgaacgccctggcgctacaggacgccatgcgccacgccggcatcgaggcgcgcgtgcaatcggcgctgcgcatggaccaggtggtcgagccgtacatccggccccgcgcgattcgccagctcgaagaaggcaaagtcgtgattttcgcggccggcaccggcaacccgttcttcacgaccgacacggccgccgcgctgcgcggctcggaaatcggcgcggaagtcgtgctgaaagccaccaaggtggacggcgtctattccgccgacccgaagaaagacccgagcgcgacccgctacaccacgatcagcttcgacgaggcaatcggccgcaatctgcaggtcatggacgccacggcgttcgcgctgtgccgcgaccagaagctgccgatccgcgtgttttcgatcgtcaagccgggcgcgctcaagcgcatcgtacaaggtgaggacgaaggcacgctcgtccacgtg

SEQ ID NO: 12838 - DNA, 882 bp, Burkholderia fungorum
atgatggcggcaattaccgcaagcatggttgcagaactgcgcgcaaagaccgacgcgccgatgatggaatgcaagaaagcgctgacggaagccgacggcgacatggcgcgcgctgaagagctgctgcgcgtgaagctgggcaacaaggccagcaaggcagcgtcgcgcgtgacggctgaaggcgtggtcgcatcgttcatcggcggcaacgcgggttcgctggtcgagctgaactgcgaaaccgacttcgtttcgaagaacgacgacttcctggctttctcgaagaaggtcgcggagttggtcgctacgcaaaacccggctgacgtcgccgcgctgtcggcactgccgctggacggctcgacggtcgacgcagtgcgcctcgcgctggtcggcaagatcggcgaaaacctgtcgatccgccgtttcgtgcgtttcgacacagccaacaagctggcagcctacctgcacggcacgcgtatcggcgtgctggtcgagtacacgggcgccgacgagcaggttggtaaagacgtggcaatgcacatcgccgcaatgaagccggtttcgctgtcgtcggaagacgtgccggcggaactgatcgccaaggaacgtagcattgccgagcagaaggccgcggaatcgggcaagccggctgaaatcgtcgcgaagatggtcgacggcagcgtgcagaagtacctgaaggaagtttcgctgctgaatcagacgttcgttaagaacgacaagcagacaatcgaacagatgctgaaggccggcaacgcgagcgtccagaagttcgcgctgttcgtggtcggcgaaggcatcgagaaaaagcaggacgacttcgcagctgaagtggccgctcaagtcgctgctgcaaagcaacaa

SEQ ID NO: 12839 - DNA, 897 bp, Burkholderia fungorum
atgcgctggcttgtcctgttgctgtttgcagtcagtgcggcctggacgcactcgcgcggcaaggtgcgtcacggatttttccggcagctgtcggatcactcgacatttaccgcgccgctgaacggtttcgtctatctcttttccgctcttccagcacaaccgtatctgccgccctcgcgctttcccgaattgaagcttctaaaagaggagtggcgaaccattcgcgacgaagcattcgccttgcgcgatgccagtcacatccgcgccgccacagcatataacgacattggattcaactcgttcttccgcaacggctggcgccgcttctatctgaaatggtacggtaggccccatccgtcggctgtggcgctttgccctcgcacggttgaactactcggacggataccttccgtgaaggccgccatgttcgcccagttgcccccgggcggacggctgggactgcatcgcgatccctacgccggcgcattacgctaccacctcggtctcgccacaccgaaccacgatggctgcgccattgtcgtcgacggcgaaacatactcgtggcgagacggcgaggatattgtctttgacgaaacctatttgcattacgccttcaatgacacccaggaggaccgcatcatcctcttttgcgacatcgagcggccgatgaaatatcgctgggcgcgggccatcaatcgcgcaatcggcagtttcctgatgcgcgcggcggcgtcgccaaacgaaaccggcgattatactggcggactgaacaggatcttccgttacctttacatggtccgccgcgcgggcaagcggctgaaggcgtggaaccgcacggtctattacgttgtgaagtggtgcctgttcatcgcaattgcactggccatcttctggcga

SEQ ID NO: 12840 - DNA, 1442 bp, Burkholderia fungorum
ataaagctcaacgatcaagcattgcttcgtcagcatgcatacatcaatggtgaatggcagaccgccgataacggatccacctttactattaccgacccatcgagtggagacttgctggcgcaggttccaatgatgggtgctgccgaagcccgtcgcgccattcacgctgcttgtatcgcgtggtcggtctggcgaaaaaaaaccgcgaaagaccgtgcaatagttatgcgtagatggttcaacctggtgttggagaacgccgacgacctcgcgaccatattgacggctgaacaaggcaagccgctagccgaggctaagggagagattgcatatgccgcgtccttcattgaatggttcgcagaagaaggcaaacgggtttctggtgatacgcctgctactcccgatgcagacaaacgtatcatgttaccaaagaaccgataggcgtgtgcgctgcgattacgccatggaactttccagccgcaatgattacgaggaaggtcgcgcctgcgcttgccgctggttgcaccatagtcgtcaaaccggcagaagcaacaccgctgacggcgctggcactcgcggttctggccgaacgagcaggcatcccatcgggcgttcttaatgttatcaccggggatcccagggcgatcggagctgaattgactgccaatcctggggtgaggaagctatcattcaccgggtcgaccgccattgggcgaatgctaatggcgcaaagcgcgcccacgattaagaaggttacgctggagcttggcggcaatgcgccgtttattgtatttgatgatgctgacattgataacgccgtggaaggagcggtggtgtcaaaatatcggaacagcgggcagacctgtgtttgtccgaaccgcttttacgtgcacgatgcggtgtatgacgcctttgtcgagaagctgtcgaaggctgtttttgagctaaaggttgggagcggacgcgatccaggcgtctctatcggtccgctcattagtgaggcggctgtgaagaaagtcgaggcgcacattgcagacgcattgcagaaaggcgcgaaacttgaggtaggaggggcgcgacacgaacttgggcacagtttctttcagccgacggtgttgagcgacgttacaccagatatgatgctttccagggaagaaacgttcgggccgctagccgcggtatcccgattttcttcggaggatgaggtcgtccggcttgcgaatgataccgagtatggcttggcagcgtatttctatagtcgcaatatcgcgcgagtatggcggcttgctgaggcgcttgagtatggcatggtaggaattaacaccggcttaatatccaatgaggtggcgccgttcggaggagtcaaagaatcgggaattggtcgtgaggggtcacgttacgggattgaggattacctggtgatcaagtatctatgtctcgca

SEQ ID NO: 12841 - DNA, 276 bp, Burkholderia fungorum
atggctaactccgcacaagcacgcaagcgcgcccgccaggccgccaaggcaaactcgcacaactcggcactgcgctcgaagttccgcacggccatcaaggctgtccgcaaggcgatcgacgccggcgacaaggccaaggccgctgagatcttcctggcatcgtcgaagaccatcgacatcatcgccgacaagaaaatcgttcacaagaacaaggctgctcgccataagagccgcctcgctgcagccatcaagggtctgcaagcgcccgcagcgcag

SEQ ID NO: 12842 - DNA, 1548 bp, Burkholderia fungorum
atgaatctattccgagccctgctgacggtcagcggcttcacgctgctgtcgcgcgtgaccggactggcccgcgaaacgctgatcgcacgcgcgttcggtgccagtcaatacactgacgcgttttacgtcgccttccgcattccgaacctgctgcgccgcatctccgccgaaggcgcgttctcgcaggccttcgtgccgatcctcgccgagttcaagaaccagcagggccacgacgccaccaaggcgctggtcgacgccacgtcgacagtgctcgcctgggcgctcgcggtcctctcgctgatcggcgtggtaggcgccacgggcgtggtgttcgtcgttgcctcgggtctcgcgcatgaaggtcatgcgtacgcactcgcggtcaccatgacgcgcatcatgttcccgtacatcattttcatttcgctgacgtcgctggcgtcgggcgtgctgaatacgtacaagaacttctcgctgcccgcgttcgcgccggttctgctgaacgtcgcgttcatcgtcgccgcggtgttcgttgcgccacgcctgcaaacgccggtctatgcgctcgcctgggcagtgatcgcgggcggcgtgctgcagttcctggtgcaactgccgggtctgaagaagatcgacatgattccgcgcatcggcctgaatcccgtgaaggcgcttgcgcatcgcggcgtgaagcgtgtgctgtccaagatggtgcccgcgatgttcgctgtctcggtcgcgcagatcagcctgatcatcaacacgaatatcgcgtcgcgcatcggccccggggccgtgtcctggatcaactacgccgaccggctgatggagtttcccaccgcgctgctgggcgtcgcgctcggcacgatcctgctgccgagcctctccaaggcgcacgtcgacgccgacccgcacgagtattcgtcgctgctcgactggggcctgcgtgtcaccttcctgctcgccgcgccgagcgctgtcgcgctgtttttcttcgcgcagccgctgaccgccacgctgttcaactatggcaagttcgacggcaactcggtggtgatggtcgcccgcgcgctggcggcttacggcgtcgggctgatcggtctgattctcatcaagatccttgcgccgggtttctacgccaagcaggacatcaagacgccagtgaagatcggtgtcttcgtgctgatcctcacgcagctgagcaattatgtgttcgtgccgattttcgcgcacgcgggtttgacgctgagcgtcggactcggcgcttgcggcaatgcgctgctgctgtttctcggtctgcgcaagcgtggcatctatacgccgtcgagcggctggctcagattcttcgtgcagttgttcggcgcctgtctggtgctggccggcgccatgcattggctggcgatcagcttcgactggatcggcatgcacagccggccggtcgatcgcatggtgctgctcgcagcgtgcctcgttctgttcgccgcgctatatttcggtatgctttggctgatgggcttcaagtacgcgtatttcaaaaggcgagcgaag

SEQ ID NO: 12843 - DNA, 564 bp, Burkholderia fungorum
atggcgctggtggaggtcattgtcggctcggccacatccgacgagacacttgcccgctcgctggattacatccagcagattcacaagacgcccatcgtcgtgcgcgacggctacggcttctatacgacccgctgcgttgaagcgtacatccgcgaaggggtacgtctgctcgccgacggggtgaacccggtcctgatcgagaacgctggcacggcattaggcatgccggtgggtccgctgacgctggccgacgaagtcggcatcgacgtactgcaccacattgtcagtctgtttcgcgaccgcgagcatggtcgctgggccgacgacaagcacggcgctggcaacgcgatcctctgccggctcgaactggcagggcgcttcggtcgcaaggccgggcggggcttcttcgcctacccgcccggcgagcccaggcatcttgagctgggcgatctggatctagtgtggccacacggcgtgcggcctccgtggcgtagccgtgtccccaccctttccgggcaagacgccagccgatctcgattccaggtccgacggcatcgtagggtg

SEQ ID NO: 12844 - DNA, 1344 bp, Burkholderia fungorum
ttggctaacagcccgagtctcgcaaaacccggtcgcagcgcggcgaagttcggcgatctgcgtcggcgtgcagtgttcctgctgctggcgttgatcgtctatcgcatcggcgcgcatattccggtgccgggtatcgacccggaccagctggcaaagttgttccaaagccagtcgggcggcatccttggcatgttcaacatgttttcgggtggcgcactttcgcggttcacgattttcgcgctggggatcatgccgtatatttcggcgtcgatcatcatgcagttgctggcaattgtctcgccgcagctcgaagcgcttaaaaaagaagggcaggcggggcagcgcaagatcacgcagtacacgcgtatctttacggtcctgttggcgacgttccaggcgttcggcattgccgtcgcgttggaaaatcagccgggcctggtgattgatccggggatggtttttcggttgacgacggtcgtgacgctggtgaccggcacgatgttcctgatgtggctgggtgagcagatcacggagcgtgggcttggtaacggtatttcgatcattattttcggcgggattgcagcgggtttcccgaatgcgattggcggacttgtttcgctggtgcaaaccggctcgatgagcccgatatccgcgattatcgtcgtcgcactgattgctgctgtgacgtatctggtggtgttcatcgaacgcggccagcgcaagattcttgtgaactacgcgaagcggcaagtcggtaacaagatttacggtggacagtcttcgcatctgccgttgaagttgaacatgtcgggcgtgattccgccgatctttgcgtcgtcgatcattctcttcccggcaaccatcctgaactggtttagttcgggatcgcgtaccggttggttcgcagacacgttgcacaacgtagccgaagcccttaagcccggtcaacccgtgtacgtgttgctgtacgcgttggcgatcgttttcttctgcttcttctacaccgcgctggtgttcaacagcagagagacggccgacaacctgaaaaagagtggcgctttcgtcccaggtattcgcccgggcgatcaaacggcgcgatacatcgaccgcatcctgacgcgtttgacgctggccggtgcgatctacatcgtgtttgtttgtctgctgcccgagtttctggtgctgcgctggaacgtaccgttttattttggtggaacgtcgctgctgatcattgtcgtcgtcacaatggatttcatggcacaggtgcagtcgtacgttatgtcgcaacagtatgaatcgctgctgaagaaagctaatttcaaaggcggcggcgtcccgatgcgt

SEQ ID NO: 12845 - DNA, 366 bp, Burkholderia fungorum
atgatccagaccgaaactcggcttgaagtggccgacaacacgggtgcacgtgaagtcatgtgcatcaaggtgctcggcggctcgaagcgtcgttatgccagcattggcgacatcatcaaggtgaccgtcaaagaagcaacgccgcgcgggcgcgtgaagaaaggcgaaatttataacgccgtggtggttcgtaccgccaagggcgtgcgccgtcaggacggctcgctgatcaagttcgatggcaacgccgctgtgttgttgaatgccaagctcgaacctattggcacccgtattttcgggcctgtcacgcgcgagttgcgcagcgaacgattcatgaagatcgtttcgttggcacctgaagtgctg

SEQ ID NO: 12846 - DNA, 228 bp, Burkholderia fungorum
ttgaaaggacttatggccaaagacgatgttatccagatgcagggtgaagtcatcgaaaacctgcctaatgctaccttcagggtgaagctggaaaacggccatgtcgtattgggacacatatctgggaagatgcggatgcattacatccggatcttgccgggcgacaaggtgacggttgaattgacgccttacgatctgtcgcgtgcgcggatcgtgttccgggcgaag

SEQ ID NO: 12847 - DNA, 306 bp, Burkholderia fungorum
atgaacaagattcgcaaaggtgacgaagttatcgtcatcaccggcaaagataaaggcaagcgcggcgtcgtgctgtccgttggcgaaggcaaagtgattgtcgagggtatcaacctcgtcaagaagcacgtcaagccgaatccgatgaagggtacgacgggcggtgtggaagccaagacgatgccgctgcaaatttcgaacgtcgcattggtcgacgcgaatggcaaggcgtcgcgtgtaggcatcaaggtcgagggagacaagaaaatccgtttccttaaaacgaccggtgccgagctgagcgcc

SEQ ID NO: 12848 - DNA, 363 bp, Burkholderia fungorum
atggctcgtatcgcaggggttaacatcccgaatcaccagcataccgaaatcggcctgacggctatttacggtatcggccgcacgcgctcgcgcgacatttgcgtcgctgctggtgtggcattttcgaagaaggtcaaagacctgaacgacgcagacctcgaaaagctgcgtgaagaagtcggcaagttcatcgttgaaggcgatctgcgccgtgaaacgacgatgaacatcaagcgcctgatggatctcggctgctaccgtggcgttcggcatcgtaagggcttgcccctgcgcggccaacgtacgcgtacgaatgcccgtacgcgcaagggtccgcgtcgtgcagcgcaatcgctgaagaag

SEQ ID NO: 12849 - DNA, 537 bp, Burkholderia fungorum
atggctcgtttgcaagagttttacaaagaaaaggttgtacccggcctcatcgagaagttcggttacaagtccgtgatggaagtgccgcgcatcaccaagatcacccttaatatgggtcttggcgaagcggtcgctgacaagaagatcatcgaaaacgccgttggcgacctgacgaagatcgcaggccagaagccggtgatcacgaaggcacgcaaggcaatcgctggcttcaagatccgtcaaggctatccgatcggtgcaatggtcacgttgcgtggtcaggcaatgtacgaatttctggaccgtttcgtgacggtcgcgctcccccgggtgcgtgacttccgtggcgtgtcgggtcgtgcgttcgacggtcgcggcaactacaacatcggtgtgaaagagcagatcattttccccgaaatcgactacgacaagatcgacgcgctgcgtgggctgaacatcagcatcacgacgactgcgaagaccgacgacgaagcaaaggctctgctcgccagcttcaagttcccgttcagaaac

SEQ ID NO: 12850 - DNA, 303 bp, Burkholderia fungorum
gtggctaaactggcactgatcgaacgtgaaaagaagcgtgctcgcctggccgctaagtacgctcccaagcgtgcagagctgaaagcgattatcggcgatatgagcaagtcggacgaagagcattacgcagcacgtctggaattgcaacaactgccgcgtaactctaatccgacccgtaagcgcaaccgttgtgcaattaccggtcgcccgcgtggcacgttccgtaaattcgggctggcgcgtaacaagattcgcgaaatcgcgttccgcggcgagatccctggcctgaccaaggcgagctgg

SEQ ID NO: 12851 - DNA, 393 bp, Burkholderia fungorum
atgagcatgagtgatcctatcgccgatatgctgactcgcatccgcaatgcgcagatggttgagaaagtctcggtgactatgccctcgtcgaaagtcaaggttgcgattgcgcaggtcctgaaggacgaaggttatatcgatgatttcgcagtgaagtccgaaggtgcgaagtctgaattgaacatcgtgttgaagtactacgctggccgtccggttatcgaacgcattgaacgcgtctcgaagcctggtctgcgtgtgtaccgcggccgtaacgacatccccgtggtcatgaatggcctcggcgtggcaatcgtgtcgacgccgaagggcgtgatgacggaccgcaaggcgcgtgcaacgggcgttggcggcgaagtcatctgctacgtcgct

SEQ ID NO: 12852 - DNA, 528 bp, Burkholderia fungorum
atgtctcgagtaggtaaaagccctgtcgcgctgcaaggcgcagaagtggccctgagcgacgaacgcattaccgtcaagggcccgctgggtacgatttcgcaggctgccaacagcctcgtgaaggtggtgaacgacaacggcacgctgaagttcgagccggttgacgaaagccgcgaagcgaatgcgatgtcgggcacgatgcgcgcactggttgcgaacatggtgaacggcgtgacgaagggtttcgagcgcaagctgacgctggttggcgttggttaccgcgcacaagcgcaaggcgacaagctgaacctgtcgctgggtttctcgcaccccgtggtgcaccagatgccggaaggcatcaaggctgaaaccccgacgcaaaccgaaatcgtgatcaaggggatcaacaagcaacaagttggccaggtcgctgcagaagtgcgcggctatcgcccgccggagccctacaagggcaagggtgtgcgttacgccaatgaggttgtgatcctcaaagaaacgaagaagaag

SEQ ID NO: 12853 - DNA, 363 bp, Burkholderia fungorum
atggataagactcaatctcgcctgcgccgcgctcgtcagacgcgtatcaagatcgctgagctgcaggtcgcgcgtctcgccgtgcatcgcacgaacacgcacatctatgcgcaagtgttctcgccgtgcggcaccaaggtgctcgccagcgcgtcgacgctcgaggccgaagtgcgtgcgcaactggctgatcagacgggcaagggcggcaatgtcgctgctgctacgctgattggtaagcgcatcgcagaaaaggctaaggctgccggcatcgaatccgtcgccttcgaccgttccggtttccgttaccacggccgcgtgaaagcgctggctgatgcggcgcgcgaagccggactcaagttc

SEQ ID NO: 12854 - DNA, 516 bp, Burkholderia fungorum
atggcaaagatgcaagcgaaagttcaggctgacgaacgcgacgacggcctgcgcgaaaagatgatttcggtcaaccgcgttaccaaggttgtgaagggcggccggattctcggttttgccgcactgaccgtggttggcgacggtgatggccgcatcggcatgggcaagggcaaagcgaaggaagttccggttgctgttcagaaggcaatggaacaagctcgccgcaacatgttcaaggtgccgctgaagaacggcacgttgcaacacgaagtgcatggtaagcatggcgcatctgcagtcctcctcgctccggcgaaggatggtacgggcgtgatcgctggcggcccgatgcgcgcagtgttcgacgtgatgggcgtgcaaaacgtggttgctaagagccacggttcgacgaacccgtacaacctcgttcgtgcaacgctcgatggtctgcgcaagcagtccacgccgggtgacatcgcggcgaagcgcggcaagtccgtcgaagatattctgggc

SEQ ID NO: 12855 - DNA, 432 bp, Burkholderia fungorum
atggaattgaataacctgaagccggctgaaggcgcgaagcacgcaaagcgtcgcgttggtcgcggcatcggctccggcctcggcaagaccgctggccgtggtcacaagggtcagaagtcgcgttcgggcggctttcacaaggtcggcttcgaaggcggtcaaatgccgctgcaacgtcgcctgccgaagcgcggctttacgtcgctgacgaaggaattcgttggtgaagtgcgtctctcggatctggaaaagctgccggtcgacgaaatcgatctgctggctctgaagcaagccggcctggtcggcgagctgatcaagagcgccaagatcatcgcgacgggcgagctgaagcgcaaggtcgttgtgaagggtctgggtgcgacgaagggtgcgcgcgctgctattgaagcagctggcggctcttttgccgag

SEQ ID NO: 12856 - DNA, 861 bp, Burkholderia fungorum
atgaacctgacgatcatcggtagtggctacgtaggcctcgtgacaggcgcgtgtctggccgacattggccacgacgtgttctgtctcgacgtcgatcagcgcaagatcgacgtgctcaacaacggcggcgtgccgatccatgaaccgggtctgcaggagatcatcgcgcgcaatcgcaaggccggccgcctgaagttttcgaccgacgtcgaagcggcggtcgcgcacggcgatatccagttcatcgcggtcggcacgccgtccgacgaagacggatccgccgacctgcaatacgtgctggccgccgcgcgcaacattggccgccatatgacgggcttcaaggtgatcgtcgacaaatccactgtgccggtcggcacggcctcgcgcgtgcgtgacgtgatcgctgccgaactggccggccgcaacgctgcgcacatgttctcagtggtgtcgaatcccgagttcttgaaagagggcgcggcggtggaagacttcacgcggcccgatcggatcgtgctcggttgcgacgaagacgtgccgggtgaaaaagcgcgcgagctgatgaagcgcctctacgcgccgttcaaccgcaatcgcgaacgcacgctgtacatggacgtgcgctcggccgaattcaccaagtacgcggccaacgccatgctcgccacgcgtatttcgtacatgaacgaactcgcgaatctggccgaccgcgtcggtgcggatatcgaggcggtgcggcgcggcatcgggtccgatccgcgcatcggctacgacttcctgtatgccggttgcggctacggcggttcgtgctttccgaaggacgtgcaggcgctgatccgcacggccgccgaccacaaggcg

SEQ ID NO: 12857 - DNA, 1400 bp, Burkholderia fungorum
gaggggcagcgcatgctgagcgttctatcgagaatcatcgacatcgccatggtcgcgctcggtgccgccattgcggcggccgtgcacagcgggaaagccgtgtggctggacgacatgcaaagcgtctcgctcgcgttcgactgcctgctggtggtggtatttttcccggcgctcgggatctatcagtcgtggcgcggcaagccgctgtacgacctgctgtgccgcgtggcgggcggctggctgctggtggaagtcaccggcgtgctgatcagcttcagcctgcaccgctcggacagcctgtcgcggttgtggctcgtttattgggctgcggccacgatcgtgctgctgatcgtcaccaaggtgatcgtctattcgatcctgcgcggactgcgccgcgaaggcttcaatcagcgcgcggtggcgatcgtgggcggtgcgccgtacgggcgctttctgatccagcagatgcgcagccgtccggatgcgggcttcagccccgtcgtcgtgttcgacgaggacggcaccatcaatccgtatgaggaccccgacgcgggcgaggcgatcgaaggcgtgccagtcgagcgcgactatcagcgcatgctgcacctcgtgcgccagcgcgcgatccgcgagttgtggcttgcgctgccgatctcgaaggagaaagcgattcaccgcttcgtgatggatttgcgcaacgacttcgtgaacatccgcttcattcccgacgtgcgcagcctcacgctcttcaatcagccaatggtcgatctgctcggcgtgccggcgatcaacctcgccgcttcgccgatcaccgatctgcgcgtgctgcccaagcgcgtgttcgaccgcctgttcgcgctcgccgcgttgaccgcgctcgcgccggtgatggtcgtgatcgcggtgatggtcaagctgagctcgcccggtccggtgttcttccggcagaagcgcaagggtatcgacggcaaccagttcgagatctacaagttccgctcgatgaagatccaccacgaagaggccggcaagatcacccaggccacgcggcgcgatccgcgcatcaccgcggtcggcgcgttcctgcggcgcaccagcctcgacgagttgccgcagttcatcaacgtgctgcgcggcgagatgtcggtggtgggtccacgtccgcacgcgctcgaacacgacgacatctacaaggatctggtgaagggctacatgcaccgctaccggatcaagccgggcattaccgggtgggcgcagatcaacggctatcgcggcgaaaccgatcgcatcgaaaagatgatgggccgcgtcaagctcgatctgtactacatgcagcactggaccttctggctcgacatcaagatcgtcgtgctaacgctgtggaagggctttgtgggcagcaa

SEQ ID NO: 12858 - DNA, 1341 bp, Burkholderia fungorum
atcgcggaggtgctggtcaacctcggctatcaggtgagcggctcggatctgacgagcaacgcgattaccgatcgcctcgccgcactcggcgcgcgcatcgcgatcggtcacgctgcggagaacattgaaggcgcgaacgcggtagtcgtttctaccgcggtgcgtagtgacaatccggaagtgctggccgcgcgccatcgccgcattccgatcgtgccgcgtgcggtgatgctcgcggaactgatgcgcctgaagcagggcattgcaattgccggcacgcacggcaagaccacgaccacctcgctggtggcgagcgtgctcgccgccggtggactcgacccgaccttcgtgatcggcggccggctgatcagcgcgggcgcgaatgcgcggctcggtacgggcgacttcatcgtcgcggaagccgacgagtcggacgcgtcgttcctgaatctgttcccggtgatcgaagtcatcacgaacatcgacgccgatcacatggacacctacggccacgacttcgcgcggctcaagcaggcgttcatcgaattcacgcaccgtctgccgttctacggcatcgcggtgctgtgcgtcgacgatccgaacgtgaaggaaatcctgccgttcgtgtcgaagccgatcatccgctacggcttcgcgccggacgcgcaggtgcgcgcggtgaacgtacaggcacgcgacggcaagatgcattttacggcgatgcgcgaagacgcggcgccgctcgacatcgtgctgaacctgccgggcgagcacaacgtgcagaacgctttggccgccattgccattgcgactgaacttgaagtgaaagatgccgatatccagcgagcgctggcggatttcaacggcgtgggccgacgcttccagcgctacggcgaggtgccggtgttcagcgaaggcagcacgaacggcgcgtacacactggtcgacgactacggtcatcacccggtcgaaatggcggccacggtggcggcggcgcgcggcgcatttccgggccggcgtctggtgctggcattccagccgcaccgcttcacgcgtacgcgtgactgcttcgaagattttgtgaaagtgctgtcgaccgtcgacgcgttggtgctgaccgaagtctattcggccggcgagtcgccgatcgtcgccgcggacggccgcgctctcgcgcgtgcgctgcgggtggcaggcaaggtcgaaccggtgtttgtcgatacggtggatgaagtgccggacgcgctctcggcgatagtgcgcgacggcgatgtggtgatcacgatgggcgcaggttcgatcggcggtgtgccggctcgcctcgcgcaggaaacaaaggtg

SEQ ID NO: 12859 - DNA, 948 bp, Burkholderia fungorum
gtgagtgagatgagcagtatcgaccccaaacagttcggcaaggtggcagtgctgctcggcggtaattccgccgagcgcgaggtgtcgctcaattccgggcgtctcgtgcttcaaggtctgcgcgacgccggcatcgacgcgcatccgttcgatccggccgagcgtccgctcgccgcattgaaggaagagggcttcgtgcgcgcgttcaacgcgctgcacggcggctacggcgagaacggccagatccagggcgcgctcgatttttacggcatccgctacacgggcagcggcgtgctcggctcggcgctcggtctggacaagttccgcaccaagctcgtgtggcagcaactcggtattccgacgccgccgttcgaagccgtgctgcgcggcgacgactacgaagcgcgcgccaaggagatcgtcgcgaagctcggtttgccgcttttcgtgaagccggcgagcgaaggttcgagcgtcgcggtaatcaaggtgaaaagcgcagacgcgctgcccgccgcgttgatcgaagcagtgaagttcgacaggatcgtggtggtcgaaaagagtattgaaggcggcggcgaatacaccgcgtgcatcgccggcaatctggatttgccggtgatccgcatcgtgccggccggcgagttttacgattaccacgcgaagtacatcgcgaacgacacgcagtatctgattccgtgcggtctgacggcggacgaggaggcgcgtctgaaagtgctggcgcgccgtgccttcgacgtgctcggctgcaccgactggggccgcgcggatttcatgctcgacgccgacggcaacccgtatttcctcgaagtgaacacggcgcccggcatgaccgatcactcgctgccgccgaaagcggcgagagcggtgggcatcagttatcaggaactcgttgtcgccgtgttggcgctgacgctcaaggac

SEQ ID NO: 12860 - DNA, 750 bp, Burkholderia fungorum
atgtggaacaacgttcgccagctcaatttcgcctccaacgcattgcatgtgttgctggtgcttgtgctgctggcggcaggcggttactggctgatccagcgtccgaatttcgcgctgcgccaaatccagatcgacggcgacaccgagcacatcaattcgccgacggtgcgcgcgggtgtcgtggggcgtttgaagggcaacttttttacggtggatctcgacgtggcgcgtcaggcgttcgagcagatgccgtgggtgcgtcatgcgagcgtgcggcgcgtctggccgaatgcgctggctgtcacgctcgaagagtacaaaccgctggggacgtggggcagcgatcagctggtgagcgtcgacggcgagttgttcaccgcgaatcagggcgagctcgaagaggatctgcccgcgttcgacggtccggacggcacggcaaaagaggtggtcgcgcggtatcacgacttccagaaatggtttgcgccgttgggcgcgacgcctgaagaagtgacgctgtcgccgcgctacgcgtggacggtgaagctctcgaacggcacgcaggtggaacttgggcgcgagcgcaatcaggacacgctactcgatcggagccgccggctgactgcggcgtggaacgcggtgacgcaacgttggggaaaggatatcgagtatgcggacttgcgctatccgaacggtttcgcgattcgcgcggcagggatgcgctttatcaccgaacccgacaagggcaagaag

SEQ ID NO: 12861 - DNA, 1230 bp, Burkholderia fungorum
atgagtaaagactataaagatctgctggtcgccctcgacatcgggacgtcgaaggtcgtggccatcgtcgccgagttgaagggcgaaggtcactacgaggtgatcggcctcggccagagcgaatcgaaggggctcaagaaaggcgtggtggtgaatatcgaggccaccgtgcagtccattcagcgcgcgctcgaagaagccgagctgatggccgactgcaagatcacgaacgtatttaccgggattgccggcagccatatccgcagcttcaattccagcggcatggtcgcgatcaaggagaaggaagtcacgcagacggacgtggcgcgcgtgatcgaaacggcgaaggcgatcaacatcccgaccgatcagcaggtgctgcatatcctgacgcaggaattcatcatcgacgggcaggaagatgtgcgcgagccgatcggcatgagcggcattcgcctcgaagtgaaggtgcatatcgtcaccggcgcggtgagcgcggcgcagaacatcgtgaagtgcgtgcgccgctgcgggctcgaagtgaacgatctgatcctgcagccgctcgcttcgtcgctcgcggtgctgacggaagacgaaaaagaactcggcgtggtgctggtggatatcggcggcggcacgacggacatcgcgattttcagcgaaggcgcgatccggcatacggcggtgattccgatcgccggcgaccagatcacgagcgacatcgcgatggcgctgcgcacgcccacgccggacgcggaagacatcaaggtggattacggcatcgccaagcaggcgctggccgatccggacgaaatgatcgaagtgccgggactcggcgagcgcggcccgcgcacgctgtcgcgccaggcgctggcggcggtggtcgagccgcgtgtcgaagaactgttttcgctcgtgcagcaggtggtgcgcgagtcgggttacgaggaactgctgagctccggcgtggtgctgaccggcggcgcgtcgatgatgctcggcatggtcgagctcggtgaggacattttcctgaagccggtgcggatcggcgtgccggaatacgcgggcggtctcgccgacgtggtgcgcaatccgcgctactcgacggcgatgggcctgctcgtcgaagggcgctcgcaacgcatgcgcggccgcaaggtcgccgtgcagtcgggctcgatgggccaggtgttcacgcgcatgaaggactggttcctcggcaacttc

SEQ ID NO: 12862 - DNA, 1194 bp, Burkholderia fungorum
atggatttccaaatgctggaaaccgaaacgaacggcaccatcatcaaggtgatcggagtaggtggcgctggcggcaatgccgttcagcacatgatcaacaaaggcgtgcaaggcgtcgacttcatcgtgatgaacacggacgcgcaggcgctgtcgcgttcgcgcgcctccgcggtgatccagctcggcaacacgggtctgggcgccggcgcgaagccggaaatgggccgcgccgcagcggaagaagcccgtgagcgcatcgccgacgcactgcgcggcgcgcacatggtcttcatcacggccggcatgggcggcggcacgggcacgggcgcagcacccgtggtcgcgcagatcgccaaggaaatgggtatcttgaccgttggcgtggtcagcaagccgttcgaattcgaaggcggcaagcggatgcgcgtcgcggaagccggttcgcagcaactggaggatcacgtcgactcgctgatcgtcgttctgaacgacaagctgttcgaggtgatgggcgatgacgccgagatggacaagtgcttccagtgcgcagacgacgttctgaacaacgcagttgccggcatcgcggaaatcatcaacgtcgacggtctggtgaacgtcgacttcgaagacgtgaagacggtgatgggcgagcagggcaaggcaatgatgggcacggcgacggttgccggcgtcgatcgcgcgcgtctggccgccgagcaggctgtcgccagcccgctgctggaaggggtggatctgtcgggtgcgcgtggcgtgctggtcaacatcacgtcgagccgttcgctgcgtctgtcggaaacgcgcgaagtgatgaacaccatcaagagctatgctgcggaagatgccaccgtgattttcggcgcggtgtacgacgatgcaatgggcgacgcgctgcgcgtgacggtcgtggcaacgggtctgggccgtgcggcgaagaagcagcaatcggcaccgatgacgctgctgcgcaccggcaccgacaaccagccggtcaacgcgcacgctgcgtacgcaccgcagtcggcgcacgccagcaccgccgattacggtgcgctggatacgccggcagtgtggcgcacgtcgcgcgatacggccgcttcgcatgtgcaggcgctccaggaaaagggcgtcgacacgtacgacattccggcattcctgcgcaagcaggcggac

SEQ ID NO: 12863 - DNA, 1143 bp, Burkholderia fungorum
atgaatcgggacgcttccgggctgaggaatgacgcggcggttggcattatcggcgccgggacaatgggcgcaggcattgcgcagatcgcagcagcagccggacatcgggtcctgctcttcgacgcgaggagcggcgctgcggcgcaggcactggataagctcaacgctgatctgaaaaagcgggtcgacgcgggaaaactcgattccactgatgccagggccctggttgcgcgaatcgagcctgtcgatgctattgccgccgtcagcgaagccggtattgtgattgaagcaattgttgaacgtctcgacgccaagcgtgaactgcttgcgcaactcgagagtctcgtggctgaccggacgatccttgcgtccaatacatcatcgatttccgttaccgcgttaggtcgtgatctgcgcttgccgcaacggctcgtcgggatgcattttttcaacccggtgcctgtcatgaaactcgtcgaagtcgtctccggcgcggcgaccgacagcgctgttgcgcacgcggtggccgatctggcggtgcgttggggcaaggtgccgatccacgcacgctccactccgggttttgtggtcaaccgcattgccaggccgttctacgcggaagcgctgcttctgctgcaggatcaatatgcgacgccgtcgcaaatcgacgctgcgctgcgtgccgcgggcttccggatgggcccttgtgagttgatggacctgatcggtcacgacgtcaatttctcggtgaccgagtcgatgtttgcggccagcttttttgaccggcgctataccccatccatcgtccagcgagaactggtagatggtggcttgctgggccgcaagagcgggcgaggtttccatgattacccggcggaacccctggcagaagctgctgcgatgcccgcacaggtcgataccgacccaccgtgcgtgagcgtgtccggtgacagcttcaccattgcaacgctaggcgctgaactgtccggcgagggatgggacgtcgaatatgccgatcccgccggtgcctcactggggcgtaccgacaatatattgatgaaggacacgctgcttgctggcgatacgctaatttgcgtaacggacggccgtcctgccgcacagatcgctgcacaatctggtcac

SEQ ID NO: 12864 - DNA, 403 bp, Burkholderia fungorum
atcctcgatcacccgctgatccagcacaagctgtcgcacatgcgcgaccgggatacctcgacgcgcacgttccgcgaactgctgcgtgaaatcacgctgctgatgggctacgaaatcacccgcaatctgcccatgaccacgcgccgcctgaccacgccgctcgtcgagatcgacgcgccggtgatcgccggcaagaagctggcgatcgtgccggtgctgcgggccggcatcggcatgtcggacgggctgctggaactggtgccctcggcgcgggtcggccacatcggcgtgtatcgcgcggaggaccatcgcccggtcgaatatctggtgcgcctgccgggaactcgaagatcgcgtgttcattctgggcgatccgattgtcgcgaacgggtaatccgcctgt

SEQ ID NO: 12865 - DNA, 1225 bp, Burkholderia fungorum
  misc_feature (1176)..(1225): n=g, a, t or c
atgactgaacataatgcaaccaggtccatgttcgacccggcgctggtgcgcccggcgatcgtggactccttcaagaagctcacgccgcgcacgcagttccgcaatccggtgatgttctgcgtgtacgtgggcagcattctcaccaccattctctggatcgccgcgctcggcggccaggccgaggcgcccgcgggcttcattctcgcggtcaccttgtggctgtggttcacggtgctgttcgccaacttcgcggaggcgctcgccgaaggccggtcgaaggcccaggccgcgtcgctgcgcagcgcgaagaaagacgtgatggccaagaagttgaacgagccgcatccgaagtcgccgatccgcattctgacggcttccgacctgcgcaagggcgatgtcgtgctggtcgaaaccggtgacgtgattccggccgacggcgaagtggtcgaaggtgtcgcgtcggtcgacgagtcggcgatcacgggcgaatccgcgccggtgatccgcgagtcgggcggcgacttttcgtcggtgacgggcggcacgcgcgtgctgtcggactggatcgtggtgcgcgtcacggcgaatccgggcgaggcgttcctcgatcgcatgatcgcgatggtggaaggcgcgaagcgtcagaagacgccgaacgaaatcgcgctgaccattttgctggtcgcgttgacgatcgtgatgctgctggccaccgccacgctgctgccgttctccatgttctctgtcgaagccgcgaaagcgggccacgtggtgacgattaccgcgctggtcgcgctgctggtgtgtctgattccgaccacgatcggcggcttgctgtccgcgatcggcgtggcgggcatgagccggatgatgcaggcgaacgtgatcgccacctcgggccgcgcggtggaagccgccggcgacgtcgacgtgctgttgctcgacaagaccggcaccatcacgctcggcaatcgccaggcttcgcagttcgtgccggcgccgggcttgacggaagaagcgctcgcggatgccgcgcaactgtcgtcgcttgccgacgaaacgccggaaggccgcagcatcgtcgtgctggcgaagcagcgcttcaatatccgtcaacgcgatatggcttcgctgcatgccgtgtttctcgcgttcaccgcgcaaacgcgcatgagnnnnnnnnnnnnnnnnnnnnnnnnnnnnnnnnnnnnnnnnnnnnnnnnnn

SEQ ID NO: 12866 - DNA, 740 bp, Burkholderia fungorum
ctcaagtttctcacgaaagatatgaggggcttggaaattggtccgtggttcaacccacttgctccaaaggcagaaggatataattgtttggtgctcgacgttttcgattccgacgcgttgcgtgagcgggctcgaagcgttgcgaatgtcccgatgatcttgtgggacagaattgaagacgtggatgttgttggttcgtcaacgcacattgacgaactgattcatgaggtggcgagctcggcacgttcgactatatcgtgtcatcgcacaatttcgagcaccttcccaacccgatccgatttcttcgaggctgtgcgaaagtgctccgtccgggcggcgttatttcgatggcgattcctgatcgtcgcgcatgctttgactattttaggcctgtgacaacgctttctgcatggattgctgcgtttctggaggatgtaagtcgtccaagccgggcccaatatttcgatatggtgacgtgtaccggtctctttgatacaggagacagtaagactatctctttccatcgtggtgttgaaccagaaaaggtgtcggcggggttacgactcgacgaatctttcgctgagtggacagatcaatcgcgtgacggtgagtattttgactcacactgctcggtgttcacgccgtcatcatttgagttgctgattagagatgtggcttatcttggactggctccatttgaggttgtggagatcttcgattcgcccggagtggaattctat

SEQ ID NO: 12867 - DNA, 855 bp, Burkholderia fungorum
ccactgtttgctccacatcggaaggatttcacgtgtgtgtatcaggaacagcatctgccgcctgtcgatccgcaggccgaactctggttccagcaggcactcgcatcggaacttgatcccaacatctattgggaggacaaggactggagaaagatctaccagctttaccagcaggccgccgagcgcaaccactggaaagcgatgctcaacctcgccgcgttgatacttagcggctacccggttcccgtgagggacccggagatggcgatccgctgggtggagaaagcgatgcagcttgaggtgcccgatgcatgggacacgatgggtgtctatcacatgaagggcatcgtcaagggtggagacgcaacgagcgcgtacgcgtttttccagaaagcggcggacatgggtagcccgtcggctcaatcatttctgggtgcggcgctggacgccggctgggacaatccgggtagcggcttctgggctaatctgcctgttggtgtgaagatgctggaatgcgccgtaggccaaggctacggcgacgcggcgcatgaactcgggtttgtatacgcacgtcctaatacgccggaagccaggcttcgcgcgctgagggttttacatgacggggtaaagctcggaagtggacaatgtgcaaattacctcggtagtcagtttaggggtatggatctgaccgaaggtgaaaaccttgctggctatatcgataaagcccgggccgatcgctacaccaaactaagcgatatcctcaagtggtacgaaggcaccctgaagctccccaatctcgacaaagtgttgcctcttcctccagccccattgccgaaatgggacggcgacgtgcaa

SEQ ID NO: 12868 - DNA, 273 bp, Burkholderia fungorum
atgagtcacacggttcaggaaaaacagaagcttcttaacagggttcgtcgtatcaaggggcaggttgaagccatcgaacgggcgctcgaagaagagcacggctgctcggatgttttgcagcggattacaagttgccggggcgcgatgaacgggctgcttgcagttgtgctggaagatcacatcaggaaccaccttgtcgacgcggataacggcgaggaccacggtggcagcgcgatggaacaattcattgaagttgttcacagctatttcaag

SEQ ID NO: 12869 - DNA, 864 bp, Burkholderia fungorum
atgcgtaacgtccgtgccaaaacgccgagcgccgaaccggccgactccgcggaagcgttgctttctgaaccgcgcgtgcgggagaaggccgacaccaccatcatcatgtcgcttgaaaagggcttaaacattttcgagcacatcctgatggcagatcgcccgctcaagcttcacgaaatcgccacgcatttcgatatcgacaagagttctgcattccgctttctcaacacacttgaacgcagcgcgctcgtcaacaagaatgccgcgctgaagacatacacgccgggcccaaagctggccgcctggagcaggttgattcgtacggacgcgtccctggtggaaaccgcgcgaccgctcctgaaacggttgtccacgatgacgaaacagacgtcgcatcttgctgttctgcagaacgaccgggttgtgctgatcgaggtgatgccggccgacaacgtggtctcggtcaagcagacgccgggcgactgggaacccttgtactgtaccggggtaggcaaggcgattctggccttcctgcctgagcacgagcgcaatcgcctgatcgatcagatcaccttccgagagcaaaccccgcagacgctgacgacccccgaaatgcttcggatcgaactcgaccgtgtcagggacgaaaagctagccttcgatgttggcgaagcaaatccccagttgtgttgcattgctgcgcccgtattcgaccccggtggctatccagtcggatccatcggtatctcgatgatctatccggtgtttccggatggcccacgggcccagatagcgttcatcagcgcagtaaggcagacagcgcacgaagtcagtacagcgcttgcgcgtggtgccatttcccgg

SEQ ID NO: 12870 - DNA, 828 bp, Burkholderia fungorum
atgaatgagatcaaacgcctggaaacgaccgtgcgcggtcaaaccatcagttaccttgaactcggagacgggcctcgaaccctgttgctcctacatggcatcacgagcgatgcgagcaactggctgagcaccatgccggcacttgcacaacgtggctggcgcgtaatcgcacccgaccagttgggatttggtcaatcatctaagcccagcgtaccggttcgtccgcgcacgctctcggacatggttgcgcctctgctggatgcattggggctcgagatggtatcgatcgtgggtcagtcgatgggtgggcatgtcgcgggcctgtttgccgcgcagtatccggagagagtcgaagcgctcgtcctcgtcaacgctggctacggccttgcccttcctgaggtgaaggatcctcgtgacctcggccatgcggtcacgcccggtggtctttgggcattgaacccggctacgcgcgatgattcacgacgtctgctggaaatggtctttcatgatcagggattggtgacggaggaactgatcgacggtttttatgcagaccgtctcggcaaaggcgatggcgcggtgatcagatcaatcagcgaatcgtgggcgcgcagggaagacacactcgaaagcgctttcacggggctcgaacgccgccctgttctcgtgatccaggcgcgccaagacaaggttgcgccctatcacctcggacgcgcgatacacgaaggaatcgccggatcgagatttgtcgttctcgaggattgcggccacgcgccgccgctcgaagcgccggaggtcttcaacaaaactttgacggaatttctggtt

SEQ ID NO: 12871 - DNA, 945 bp, Burkholderia fungorum
atggccacaatcgcgagaaatacgatgatctacagcatgactggctatgcgagcgccacgcgcgaactcgtcggggcctcaggcacaggcggcgtgagcgtatcggtcgaactgcgcacggtgaactcgcgctttctcgatctgaacttccgcatgccggaagacgtgcgcgtgagcgaacccacgctgcgcgaaatgttgatgaacaagctgtcgcgcggcaaggtcgatatccgtatcaatctgcaacgcagcgagcagtccgccaacgcgggctcgatcaatcgcgaagcactggcgcaactcgcgctgctcgaacgcacggtgctctccacgtttccggaagcggggcggctgcgtaccggcgaaattctgcgctggcccggcattcttgcggaaagcggcgtggcgcccgaagtgctgcgcgacgccgtgctcgcgtgcggcaagcaggccattacggacctgatcgacgtgcgcgcccgcgaaggtgcgcaactggcgaccatgctgctcgccaacgtcaccgaaatggaagcgatcgtcacgaagatcacgccgctcgtgccggaactgatcgccaagcaccagcagaagattgtcgagcgcttgcaggaagcgctcggtatcgccgcgccggatacggcggcgacgagcgtctcgcgcgaagaaatcaatgaacggattcgccaggaagtgacgatgtacggcatccgtatcgacatcgccgaagaactgtcgcgcctcacggcacacctgaacgaaacgcgtcacgtgatccagaagggcggcaaggtcggcaagcgcctcgacttcatgatgcaggagctcaatcgcgaagcgaacacgcttggttcgaaggcggccgcgaaggaactggcggattcgtcgatgaccctgaagctgctcatcgaacagatgcgcgaacaggtacagaatctggaa

SEQ ID NO: 12872 - DNA, 2355 bp, Burkholderia fungorum
atgagcacgaccccgcccaccgccacggaagtggaacacgacgccgactcgccctcgtctgcacgcaagtacatcgacgcggtcctcgaacagtcgtttcgccatctgttcggccccaccgccacgccggagcaaccgcgccggcatgacgtagtctccattgccaagctgacctccgccttatccggctatctgcagccggaagagatcaaggaagtcaaggcggccttccatttcagcgacgaagcccacctcggccagtaccgccagagcggcgagccttacatcacgcatccggttgccgtcgcggaaatctgcgccggctggaatctcgacgcccagtcgatcatggcggcgctgctgcatgacgtgatggaagaccagggcgtgaccaaggccgaactcgccgagcgtttcggcgcgaaggtcgcggaactggtcgacggcttgtccaagctcgacaagatggagtttcgcaatcgcgaggaagcgcaggcggaaaacttccgcaagatgctgctcgcaatggcgcgcgacgtccgcgtgattctggtgaagctcgccgaccggctgcacaacatgcgcacgctgggtgccgtgccggccgaaaaacgccgccgcgtggcgcgcgaaacgctggatatctatgcgccgatcgctcaccggctgggcctgaacaatacgtatcgcgagttgcaggacctgagcttcgcgaacttcaatccgcaccggtacgccacgctcgaaaaagccgtcaaggcggcgcgcggcaaccggcgcgaagtggtcggcaagattctcgagtcggtgcagcgcgcgattgccgacgcgaagctcgacgccgaagtcaccggccgcgaaaaaaccatcttcagcatctacaagaagatgcgcgacaagcagttgtcgttctcgcaggtgctcgacgtgtatggctttcgcgtcgtggtggaaagcgcgctggagtgctacacctgcatcggcgcgctgcatgcgttgtacaagccggtgccgggcaagttcaaggattacatcgccatcccgaaggtgaacggctaccagtcgctgcacaccacgctggtcggcccgttcggcgcgccgatcgagtttcaggtgcgcacgcgcaagatgcacgaaatcgccgaagcgggcgtggccgcgcactggctgtacaagaacggcggcgccgatctgaacgacgtgcagaagcgcgcgcaccaatggctgaagtcgctgctcgacattcagagcgaagcaggcgattcgagcgaattcctcgagcacgtcaagatcgatctgttcccggacgcggtgtacgtgttcacgccgaagtcgaagatcatggcgctgccgcgcggcgccacggcgctcgacttcgcgtattcgatccacagcgacctgggcaaccagtgtgtcgcggtgaagataaacaatgaactgctgccgctgcgcaccgagctgaagagcggcgatatcgtcgaagtcatcacggcgccgtattcgaagccgaatccagcgtggctcggattcgtgcgcaccggcaaggcgcggtcggcgatccgccattatctgaagaccatgcgcctgaacgagtccgttcagcttggtgagcgtctggtcgatcaggcgctgaagggttatgggctggcgctctcggacgtcacgccggaagcgtgggaaaagctcgtgcagtggacgggcaacaagaaccgccaggaaattttcgcggacatcggccttggccggcgtgtcgcggcggtcatggccaagcgcatcgaagtgctgatgagcggccgcgacgccgacgacgacggctcgcgctccgacagcaacgcgccgcatgcgccgccggtggtcatcaccggtacggagggcatgtcggtgcaactgtccgcatgctgccgtccgattccgggcgacgacatcatgggctatatcggcatcggcctcggcatggccattcacaccacggattgccgcgtcgcgcagcgtatccaccggcgcgatccgggccgctggatcgacgttgcctgggcgccgcaaccggggcgtctgttcgacgtcgccgtgaaggtgctggtcaagaacaccaagggcgtgtttgcgcgcgtggcggcggatattacgtcggcggatgccaacatcgtccacattgcaatggacgaagatctgtcgcaggaatccacggtgttgcgcttcgtgattcaggtcagcgaccgcgtccatctggccaacgtgatgcgccgtgtgcgcacgaacccggacgtcatgcgcattgcacgcgaacggccgagcgaggaaggccatcaccgtcacgagggcgggatgcggatcgaccgcgagcgggcggactac

SEQ ID NO: 12873 - DNA, 2664 bp, Burkholderia fungorum
atgtccaaagcactgatcatcgccgaaaagccttccgtcgcgaacgacatcgcgcgcgctttgggcggctttaccaagcatgacgaatactacgaaagcgacgagtacgtcctttcctcggcagtcggccacctgctggaaattgccgcgcccgaagactacgaagtcaagcgcggcaagtggagtttcgccaatctgcccgtcatcccgccgcacttcgatctcaacccgatcgccaagagcgagtcgcgcctgaaggtgctgaccaagctgctcaagcgcaaggacgtcgaccgtctgatcaacgcatgcgacgcggggcgcgagggcgagctgatattccgcctgatcgcgcagcacgcgaaagcgaggcagccggtgcagcgcctgtggctgcaatccatgacggcgggcgcgatccgcgacggcttcgcccgtctgcgcagcgacgaagagatgcaaccgctcgccgatgccgcacgctgccgctcggaggcggactggctggtcggcatcaacggcacgcgggccatgaccgcgttcaacagcaagggcggcggcttcttcctgaccaccgtcgggcgggtgcaaacgccaacgctgtcgatcgtggtcgagcgcgaagagaagattcgccgcttcgtgccgcgcgactattgggaagtcaaggcggagttcgtctgctcggccggcttctacgagggccgctggttcgatccgaaattcaagcgcgacgagttcgatccggaaaaacgtgattcgcgcctgtggtcgctacccgcggccgagacgatcgtcgccgcgtgccgtggccagatcggcacggtgactgaggaatcgaagccgtccacgcaactgtcgccggcgctcttcgacctgaccagcttgcagcgggaggccaacggccgcttcggcttctcggcgaagaacaccctgggcctcgcccaggcgctgtacgaaaagcacaaggtgctgacctatccccgtaccgacgcgcgcgcgctgccggaagactatatggatacggtcaaagagacgctcggcatgctcaaggagagcaacaactatctgccgttcgcgaagcaggtgctcgacaagggctgggtgaagccgaacaagcgcatcttcgacaactcgaagatcagcgaccacttcgccatcatcccgacactgcaagcgccgaagaacctgtccgagccggaacagaagctctacgacctcgtcgtgaagcgattcctgtcggtgttcttccccgccgccgaattcaaggtgacgacgcggatcacggaagtggtcggccatcacttcaagaccgaaggcaaggtgctggtcgagccgggctggttgcaggtctacggccgcgagatcagcggcgaagacgcgaacctcgtgccggtgcagaaggacgagaaggtcaagacggacaggatcgccgcccagcaactggtgacgaaaccgcccgcacgctacaacgaagccaccttgctgtcggctatggaaggcgcaggcaaactcgtcgaagacgacgagttgcgtgaagcgatggccgccaaagggctcggcacgccggccacgcgcgcggcgatcatcgaaggtttgctgggtgaaaagtatctgattcgcgaaggccgcgatctgattccgaccgccaaggctttccagctcatgacgctgttgcgcggtctcggcgtgaaggaactgacggcgccggaattgaccggcgagtgggaatacaagctctcgcaaatggaacgcggcaacctgccgcgcgacgcgttcatgcaggaaatcgcccgcatgacgcagaccatcgtgaagcgcgcgaaagagtacgactccgacacgatcccgggcgactacgcaacgctggaaacgccgtgtccgaattgcggcggtcaggtgaaggagaactaccggcgctttgcctgctcgaagtgcgagttctcgatttcgaagattccgggcggacgccagttcgagattccggaagtcgaagagttgctgcagaacaagacgatcgggccgctgtcgggtttccgcagcaagatgggccggccgttctcggcgatcctgaagctctcgttcgacgacgagatcaagaactacaagctcgaattcgacttcggccaggatgccggcggcgaagacggcgaaccgcccgacttctccgatcagcagccggtcggcgcgtgcccgaagtgcaagggccgggtgttcgagcacggcatgagctacgtctgcgagaactcggtcgccaatccgaagacttgcgacttccgctccggcaaggtgatcctgcagcaggaaatcgcccgcgagcagatggccaagctgctcgaagaaggccgcacggacctgctgacgaacttcaagtcgtcgcgaaccggccggaatttcaaggcattcctcgtcaagcagaacgacggcaagatcggcttcgagttcgagaagaaggagccgtcggcgaagactgtcgcgaagaccgcggcggccaaggcagcggcggaagcggcggattcggagtccgaggacggcggagcgccggtggccgtgaaggcagcgccggcagcaaagaaggctgcggcgaaaaaagcgcccgcaaccaaaacggcggcagccaggaaagcgcccgccaggaaaacagcggcgcgtaaaaccggctcg

SEQ ID NO: 12874 - DNA, 1047 bp, Burkholderia fungorum
atgatcatcgattgccacggtcactatacgaccgcgccacctgcgcacgaagcctggcgcgatcagcagatcgccgcgctcagggacggcggtacgccgccgccccggcctgtcattagcgacgacgagattcgcgagagcatcgaaaccggccagttgcggattcagcgcgaacgtggcaccgatctgacgattttctcgccgcgagcagccggcatgggccatcacctcgccaccgccgaagccaacgcacgctggtcgagcgaatgcaacgacctcgtgcaccgcgtgtgcggactttttccgagcaactttgtcggcgtgtgccagttgccgcaggcgcccggcgtgccgcccgcgaactgcatcgccgaattgcggcgttgtgtcgaagagctcggttttatcggctgcaatctgaatccggatccgtcgggcggccactggtccggcttaccgctcacggaccgctgctggtatccgctttatgaagcgatggtggaactcgacgtgccggcaatgatccacgtctcctcgtcgtgcaatccgaatttccatgcgacgggcgcgcattacatcaacggcgacacctcggcgttcatgcaactgctgcagggcgacctgttcgccgactttcccacactgcgcttcgtcattcctcatggcggcggcgccgtgccgtatcactggggacgctatcgcggactcgcgcaggacatgaagcgcccgttgctcagcgaatacctgctgaacaacgtgttcttcgacacctgcgtctatcaccagcccggcaccgaactgctcgccaaggtcattccggtcggcaacatcctgttcgcgtcggaaaccatcggcgcggtgcagggcatcgatccggagaccggccactattacgacgacacgcgccgctatatcgacgccatcggatggctcagcgacgcggaccgccagcgtatctacgaagacaacgcgcgcgccgtgtatgcacggctctcgcggcaactcgatcgacaactcgctacaccggcaactcaaggagcaacggta

SEQ ID NO: 12875 - DNA, 810 bp, Burkholderia fungorum
gtggtcgcgcaccccaatggcggggtaaaggaacagaccgcgggcctccacgcccagcgtctggccgaacagggctacatcacgatcgcgatggatgccgcgtatcagggcggcagcggcggcgagccgcgcagcacggacaagccgcaatttcgcacagaggacatccacggcgcggccgatttcatcacccgctatccgggcgtcgatcccgaacgcctagggctgctcggcatctgcggcggcggtggatattccctgaatgcggccaaatccgacaagcgcttcaaggcggtggcaacgctgagcatgttcaactccgggcgcgttcgccgcaacggctttgcggattcgcagttgaacacgatccagcaacgcctcaaacaggcctcggacgcgcgcgctcaggaaaaggccggcggaaagatcctctacgccggcgacgccgacatgaccgacgcgcagatcgccgcgttgccgttcgagatgtaccggcagggctaccagtactactggcgcaccaacgcgcatcccggctcgaccttcaagtacaccatgagcagcctggtcgatctgatgcgctgggatgccaccgatcagatcgacctgatcgagcagccgctgttgatgatcgccggcagcaaggccgacagtctctacatgaccgaagacgccttcgccaaggccaccggcacgaaggacaaggagctgttcaagatcgacggcgccacgcacatcgagacctactgggttcccaagtacgtggacgccaccatcggcaagctgacgccgttctacgcgagaaccttg

SEQ ID NO: 12876 - DNA, 987 bp, Burkholderia fungorum
atgaagacgcgcaaactcggcaacagtcaacttgaagtatcggccatcggtctgggctgcatgggcctgagccacggttacgggccagcgatggacaggccggcagcgattgcactgatccgtgccgccgtggaccggggcgtgacctttttcgataccgcagaggtctacggcccctggctcaacgaggaggtggtcggtgaggcgctcgccccgacgcgcgacaaggtggtgattgccaccaagttcggcttcaccttcggcgacgataacaggcagcagatcctcaacagccggccggatcacattcgttgggctgtggaaggctcgctcaagcgcctgcgcaccgacgtgatcgatctgttgtaccagcaccgtgtcgatcccgaggtgccaatcgaggatgtggccggcacagtcagggacctgatcgccgaaggcaaggtcaagcacttcggcctgtccgaggcgggcgcgcaaaccatctgccgcgcccatgcggtacagcccgtcaccgccgtacaaagcgagtattcgctgtggtggcgcgagcccgagacggagatcctgccgactctggaagagcttggaattggctttgtgccgttcagcccgctgggcaaggggttcctgacgggagcgatcaaggaaggcacgaccttcggcagtgacgacttccgcagcatcgtgccgcgattctcgcaggaagcgctgcaagcgaaccagacgctggtggacctgctcggccagattgccatggacaagggtgtgacatctgcccagatcgcacttgcctggctgctggcgcagaaaccgtggatcgtgccgatccctggcaccacgaaattgcaccggctggaagagaatctcggcgccgcgtcggtggaactgtccggcgacgatctgcgcacgatcaccagagctcttgaacaggtcgaggttcagggcgaccgttatcccgccgcgctgcaggcgcgcgtgggacgg

SEQ ID NO: 12877 - DNA, 990 bp, Burkholderia fungorum
atgaaaacccgcaaactgggaaacagcctggaagtttccgccctcggtctgggctgtatgggcatgactgccgtatacgggccgcccgccgacaggcaggagatgatcagactcatccatgccgcgcatgatcgcggggtgaccctgttcgacaccgccgaggcctacggcccgttcgcgaatgaagaactggttggcgaggccctgcaaccgatccgcgaccaggtcgtcattgccaccaagttcggctttgatatcgaccctgagaccggcaagcgcggagccggcacgaacagccggccggagcacatcaagctcgcggtcgaaaaaatgttgcggcgtctgcgcaccgaccgcatcgacctgctgtaccagcaccgtgtcgacccggctgtgccgatcgaggatgtggctggtgcggtcaaggagctgattgccgaaggcaaggtcaagcacttcggtctgtccgaggcgggcgtgaagacgatccggcgcgcccatgccgtccagaccgtgacggcagtacagagcgagtattcgctgttctggcgcggaccggaactggagctgctgccggtgctggaggagttgggtatcggttttgtgccattcagcccgctgggcgccggcttcctgaccggcaagatcgacgagaacaccactttcgatccgacggatttccgtaacaacgtgccacgcttctcgcccgaagcgcgcagggccaatatggcgctggtcgaggtcgtcaagtccgtcgccgatcgcaaggggaccacaccagcgcagatcgctcttgcgtggctccttgcccagaagccctggatcgtgccgattcccggtaccaccaaactgcaccgcctggaagagaacctgggcgccatcgatgtcgaactgacagcggatgatcttggcgtgattgacgaggaggtatcgaagatccaggtccgcggcgaacgcctccccgaggccgcgctgaagatgaccggccac

SEQ ID NO: 12878 - DNA, 1305 bp, Burkholderia fungorum
atggccgattcgtatttcccccgctggcgcgcgcagcccgcggctgccgaaggccgcatcgtcggcaccgacgagcggctcgcgtggccgcagatgttcgcgatgggcgtgcaacacgtcgtcgcgatgttcggctcgacggtgctcgcgccgttgctgatgggcttcgatccgaacctgtgcatcttcatgtcgggcatcggcacactgttgttcttcgtgctggtgggcgggcgcgtgccgagctatctcggttcgagcttcgcgttcatcggtctcgtgatcgcggtgactgggtacggcggccacggtccgaacctgaacattccggtggcgctgggcgggatcatcgcgtgcggcgtggtgtatgcggtgatcggcctgatcgtgtcggcggtcggcacgcgatggatcgaaacgctgatgccgcccgtcgtgacaggcgcgattgtctgcgtgatcggtctgaatctggcgccgatcgcggtgcatggcgtgagcggcagcaacttcgattcgtggatggcgctcgtcaccgtgctgtgcgtcggcgcggtggcggtgttcgcgcgcggcatgctgcagcgtctgctgattctggtcggcctgctgatggcatatgtgatctatgcgatcgtcaccaacggtctcggcatgggtaagccgatcgatttcacgatcgtcgcgaacgcagcgtggttcggtatgccgcacttcacggcgccggttttcaacatgcaggccatgaccctgctcgcgccgatcgcggtgattctggtggcggagaacctcgggcatatcaaggcggtgagcgcgatgacgggccagaacctggaccgctacgtcggccgcgcatttctcggcgacggactcgcgacgatcgtctcgggcttcgccggcggcaccggcgtcacgacgtatgccgagaacatcggcgtgatggccgtcaccaaaatctattcgacgctggttttcgtgatcgccgcagtgatcgcgctggtgctgggcttttcgccgaagttcggcgcggtgatccagaccattccgggaccggtgctgggcggcgtgtcgatcgtcgtgttcgggctgatcgccgtgaccggcgcgcggatctgggtcgtcaacaaggtggacttctcggacaaccggaatctgatcgtggccgcggtcacgctcgtgctcggcgccggtgatttctcgctgaagctcggcggcttcggtctgggcggcatcggtaccgcaacgttcggcgcgatcattctctatgcgctgctgagaaggaagccggtgcaaggtccggtggcc

SEQ ID NO: 12879 - DNA, 1653 bp, Burkholderia fungorum
atggatattgtctttaccgtactgattcttttgctcgccgtcgccgcatcgggcgtcgtcatccgcatcctgcccatcgcgttgccgctgccgctcgtgcagatcgcgatcggcgcgctgctcgcgtggccgaagctcgggctgcacgtcaccttcgatccggaaattttcatgatgctgttcattccgcctctgctgttcgcggacggatggcgcattcccaagcgcgagttcttcatggcgcgccgctcgatcctgatgctcgcgctcgggctggtcttcgtgacggtgctggtggtcggctacttcgtgcatgcactggtgccgtcgatctcgctgccggtggcgttcgcgctggccgcggtgctgtcgccgaccgatgcggtggcgctgtccggcatcgtcggcaagggcaagattcccgggcggctcatgcacatactggaaggcgaagcgttgatgaacgacgcgtcgggactggtcgcgctgaagttcgcgattgccgcggcgctgaccggcgtgttttcgctgcgcgacgcgtcgatcagtttcgtgatcatctccgtgggcggcatcgcgacgggcgcggcggtgagctggctgttcagcttcgtgtcggcgcgcttcctgaatctcactgaagacggcgatccggcgcccggtgtcgtgatgacgctgctgattccgttcgccgcctatctgatcgccgagcgcttcgaattgtcgggcattctggccgcagtcgccgccggcatgacgatgaactacgcgaccctcgcgaatgccgggccggtgtcctcgcgcgtgcgcgccaacagcacgtggacgatgatcgagttcgtcttcaacggcatggtgttcattctgctggggctgcagtttccgcacattcttggccgcgcgctgctcgatgcacacgagacgagcaacgcgcaggtcgggctgctgatcggctatatcgcggcagtggctgctgccctctatgcgatgcgcttcgtgtgggtgtggctgctgcgctgggtcgcgagccgcggcgccacgaagcggggcatggcgaatgcggtgccgggcttgcgcacggtcgcggtgacgacggtggccggcgtgcgcggagccgtgacgctcgccggcgtgctgtcgttgccggaggtgttgccggatggcgtcccgctgccgggccgcgatctggcgatcttcattgcgtccggcgtgatcctgctctcgctgctggtggcggtggtggcgctgccgctgttgctgagcggctggcggcgcggcaaggatccacatgccgccgaggagttgctcgcgcgtacgctggccgcgcaagccgcgattcgcgccgtcgacgaggtgcacgacaccgagtgcgcggatctggacgaatccgcttcggcgtatgcggccgatgtcaccgcgcgcgtgatggatctctatcggcgccgcctcgccacgctcgacgaagagcaggaaccgcgcgaactggcgcgccgcgccgacgcgctggagttcaggatgaagctcgcggccatgcgcgccgagcgcaagacgctgctcgcgctgcgcagcagccaggctatcaacgacgagacgttgaacaagctcatgcgcgaagtggatctgtcggagactgcgctgacggcgcgaaggaaa

SEQ ID NO: 12880 - DNA, 1962 bp, Burkholderia fungorum
atgacaactggctcgcgacgggttccaacgccttgcgcacctcagcgcagcgcgattcacagaccctcgcgcgccggcttcgcgctcgtgccgcgttcatggcgctcccgttgcgcagccatgctgtgcggtgtgctggcggtggcgggtttcctcgtggcgccgggggcgcatgcggtctatgcgatcgcgcaatacggcgacccgaaatatccggcgaatttcaagcacttcgactacgtcaacccggacgcgccgaagggcggcacgctggtgctggccaatccgagccgcctcacgagcttcgataaattcaatccgttcacactgcgcggcaataccgcacccggtgtggatctgatgttcgaaagcctcaccaccggcagcagcgacgaagtggcgtccgcctatgggttgctcgccgacgacatcagcatcgcgccggacggcttgtcggtcaccttccacatcaatccgcgcgcgcgcttttcgaacggcgatccggtcaccgccgacgacgtcaagttttcgctcgatacgctgaaaagcccgcaggccgcgccgcaattcgcatcgatcttcggcgagatcacgcgtgcggtggtggtcgatccgcagacgatccgcttcgagtttcgccagcgcaatcgcgagttgccgttactcgccggcggtatgccggtgttctcgcgcaagtgggggatgaagccggacggcagccgcattccgttcgaccagctcgcgttcgaaaagccgatcagcagcggtccttatctgatcgagcagtacgacaacggccgaacgatcacgtaccggcgcgacccgaattactggggcgcggcgctgccggtgcgcgtcggcacgaacaacttcgatcacattgtctacaagctgtattcggacagcacggcgcgcctggaagcgttcaaggcgggcgagtacgatgcgctggtcgagtatgtcgcgcgcaattgggtgcggcgtgacgtgggcaagaagttcgataacggcgagctgatcaagcaggtgtttccgcaacataacggcaccggcatgcagggcttcatgctgaacacacggcggcctttgtttcaggacgtgcgcgtgcgcaaggcgctcgatctcgcgctcgatttccagtggctcaaccgccagctgttcttcaatcagtacacgcgtatcgacagtttcttcgccaataccgatctgcaggcgaaggggctgccgtcgccaggtgaattggcgttgctcgaaccgtggcgcgcgaaactcgacccggcggtgttcggtccgccgcccaggcagccggacaccgatccgccgggctcgctgcgcgccaatctgctgcaggcgcgcgcgctattgcaggaggccggctggacctatcgcgacggcgcgttgcgcaatgccaaaggcgagccgttccgcttcgagattctcgacgactccggctcgtccgcgcagatggagccgatcgtcgcgaccttcatccgcaatctgcagaagctcggcatcgaagccacgtttcgcgtgtcggactttgcggtctatcagaagcgtctggacagcttcgatttcgacaccaccaccatccgcatgccggatgtgcaggtgcccggttcggagcagatcgagcgcttcggcagcaaggccgcggatacgcaaggctccgacaacatgatcgggctgaagtcgcccgcggtcgatgccatcctcagcgcgctcgtgcatgcgcagacgcgcgagcagctgatcgacgccacccacgcgctcgaccgcgtgctgatgcatggctactatgtcgtgccgcactggtacagcgcgacgcaccgggtggcgttcaagcgcggcctcgcgtggccaaaaacattgcccctgtactattcagcggaaggctggatcacgtcgacgtggtggttcgcgcagccacaagcgcagccgcaagcccaggcccagccgcgc

SEQ ID NO: 12881 - DNA, 789 bp, Burkholderia fungorum
atgggcttcctcgctggcaaacgtatcctgctgaccggcttgttgtcgaaccgctcgattgcatacggtatcgcgcaagcctgcaggcgcgaaggcgccgagttggcgttcacctatgtcggcgagcgcttcaaggatcgcatcaaggagttcgccggcgaattcggcagcgacctggtgttcccctgcgacgtcgccgacgacgcgcagatcgacgccctcttcgcttcactgaagcaacactgggacggcctcgacggtctggtccattcgatcggctttgcgccgcgtgaagcgattgccggcgatttcctcgacggcatgacgcgcgaaaatttccgcatcgcgcatgacatctccgcgtacagcttccccgcgctcgccaaggccgcgcagtccatgttcacaccggacgcgtcgttgctcacgctgagctatctcggcgccgagcgcgcaattccaaactacaacacgatgggtctcgccaaggcttcgctcgaagcgagcgtgcggtatctggcggtctcgctcggcgccaaaggcgtgcgcgtcaacggcatttcggcgggcccgatcaggacgctggctgcgagcggtatcaagggcttcggcaagattctcgagttcgtcgaacagaatgcgccgctcaggcgcaacgtgacgatcgaacaggtcggcaacacggcggctttcctgctgtcggatctggcggccggcgtgaccgcggaaatcgtgcacgtcgatagcggcttcaatgcggtggtgggcggcatggctgctgttgccgag

SEQ ID NO: 12882 - DNA, 372 bp, Burkholderia fungorum
atgccggccgacccggttcagcgcgcccgcgcacgcctgttcctgctgaacttcgagaaagagctgttcgtgcacgtcggcacgctcgagaacgaaaagggcaaggccgccgagaagaatcacgagaaggcccgtctcgcgatccgcgatcgtctgacgcaactcgcaccgatcttcctgaagaacaagtacatgctcggcgaagagttctcgatgctcgacgtcgcgatcgcaccgctgctgtggcgtctggatcattacggcattgaactgtcgaagaatgccgcaccactgatgaagtacgctgagcgcattttcagccgcccggcttatatcgaagcgctgacgccttcggaaaaggtgatgcgtcgt

SEQ ID NO: 12883 - DNA, 1269 bp, Burkholderia fungorum
gtgcttcatcaaatcatcgaccgcaggttggcaggcaagaacaagagcattgcgaatcgcgaacgttttttgcgtcgcgtcaagaactacattcgtcgcgcagtttcggaagccgtgcgcgatcgcagcatcaaggatattcagaacacccagagcatcaccattccgcgcaaggacattgcggagccgtcgttccggcatgggcccggcggcaagcgggaaatggtgcatccgggcaattccgactacatccgcggcgacaagatccagcgcccgcaagggggcggcggcggaggcgggggcaatcaggccagcaatgaaggcgagggtcaggacgacttcgtgttcgagctgagccgcgaagagttcatgcagtatttcttcgacgacctcgaactgccgcgtctcgtcaaaacccatctgatggccgtgcccacgtggaaaagcatccgcgcgggctgggctgcggaaggcacgccgaataacatcgacgtggtccgttcgctgcgcagcgcgctcggccgccgcatcgcgctcggtgcgccgctcgtcaaccagttgcacgagatggaacggcaactcgagacgatgaaagccgatcccgacgatcgtcgcgaagagatcaagctgctcgaagaggaaattcaccatttgcgcgggcgcatctggcggattccgttcatcgatcccttcgatctgcgctacgtgaaccgcgtgaagcagcccacgccttcgagccaggcggtgatgttctgtctgatggatgtgtccggttccatggacgagcagcgcaaggacctcgccaagcgcttcttcatcctgctgtatctgtttctcaagcgcaattacgagcgtatcgaggtggtgttcatccgccaccatacgcgcgccgaagaggtcgacgaagacaccttcttccattcgaccgaaagcggcggcacggtagtatcgagcgcgctggagctgatgaagaaggtaatggacgagcgttattcgccgactgaatggaatatttacggcgcccaggcgtcggacggcgacaactggaccgacgactcgccaaagtgccgcaagatactctcggatgacatcctggagaaggtgcgctattttgcgtatattcaggtgacaccggaagagcagaacctgtggctcgaatatgcgcaactggcattgagccagccgcacatggcaatgaagaaggtcgagaccgcggccgatatttatccggtgttccgggagttgtttgaaaagcaggcggctaattca

SEQ ID NO: 12884 - DNA, 1716 bp, Burkholderia fungorum
atgacgagcaagcacctgcacaacgaagcgcgcggctatcagccggagcgtgggaaaggcgtgccgcagcagcaacagtcggggcatgccgaggcaaaggcggacgataccggagccgccgcagccggagcagtcgacaccgctgcagcacggggacacaccggaacgcccactgcggggcaaagggaagtccgtatgaacgtagccgatagacggcctctgccgtgcccgtccgactggaccttcgaattgatcgaagagtacgactcgcatattgcccgtgttgcagagcaatatgaactcgacgtgtatccgatccagctcgaactcatcagcgccgaacagatgatggacgcgtacgcgtccgtcggtatgccggtgaactaccgtcactggtcgttcggcaaacactttctctccaccgaaaaaagctaccgtcgcgggcagatggggctggcgtacgagatcgtcatcaattcgaatccctgcatcgcgtatctgatggaagagaacacgatgacgatgcaggcgctcgtcatcgcccatgcggcctacgggcacaactcgtttttcaagggcaactacctgttccgtttgtggacggatgcgcacgcgatcatcgactatctcgtctacgcgaagaattacattgccgagtgcgaggagcgcttcgggctcgaccgtgtcgaagaactgctcgattcgtgccacgcgctgatgaactacggcgtggaccgctacaagcgtccgcagaagctgtcgctcgaaaaggaattcgcggcgcgccgcgaacgcgaagcgtatttgcaatcgcaggtgaatgaactgtggcgcaccttgccgacccggcatacgccgttgccggaggaaatcgaggaacgctatccgccggagccgcaggaaaacctgctgtatttcgcggagaagaacgcaccgctgctggagccgtgggagcgggaagtgatccgcatcgtgcgcaaggtcggccagtatttttacccgcaacggcaaacccaggtaatgaacgagggctgggcgacgttctggcattacaccttgctcaacaccatgtacaaccagggcaagctggaagacggcttcatgatggagtttctccattcgcacagcaatgtggtctatcagccgccggtcaccaagccgtattacagcggcatcaatccgtacgcgctcgggttttcgatgatgagcgacattcgccgcatctgtgaggcacccacggaagaagaccgcaagtggttccccgaactggcgggcagcccgtggttgcccgccatgcactatgcgatgcgcaacttcaaggacgagagtttcgtcgcgcagtatctgtcgccgcatctgatccgcgaaatgcgccttttctcggtgctcgacgacgacatgcgcgacgcgctcgaagtctccgcgattcacgacgacagcggctaccagtacgtgcgtcaggcattgtcgcggcagtacgatatgcatcaccgcgagccgaacattcaggtgtggtcggtgaatacgcgtggcgaccggagtttgacgctgcggcatttcatgagcgacaaccggcacctttccggcgacagcgacgaagtgctcaagcacatggcgcgactgtggcagttcgacgtgtatctggagagcgtcgatgagaatggaacggtccgcaagcgctatgaatgccggtatgtgccgcctgcggtgagggtg

SEQ ID NO: 12885 - DNA, 1259 bp, Burkholderia fungorum
atgtgcggcttccagcgccttgcatcccgcatcgcaacgctgcctgccgctcccgccggtctcgtgccggccgcgcgcatcggcgcgcgctctcaccacgccagatcatgttcagctttttcaaacgattcaagggttcgaaagagtccgataacgcgcccgaagagtcgcaaagcgcgccagaaggctcgacgcccgaagccgccgtgcaggcacccgcgcctgtcgcgccggtcgcaccgcgcccggcggcggccccggctcgcgtcgagacagccgcggcgcccgcaatcgggcccgagccggaagaatccgcgcccgggaccgtcgaaatcgttccgccgccgctgccggacgcgggcgcgaagcgctcgtggctgacacgcctgaaaaccggcttgtcgaagacgagttcgagcctgactggcatctttgtcggcacgaagatcgacgaagatctgtacgaagagctcgaaaccgcactgctcatgtcggacgcaggggtggacgccaccgaatacctgctcgaagcgctgcgcgaaaaagtgcgcaccgagcgcctcaccgatcctcagcaggtcaaggcagcgttgcgcacgctgctggtcgatctgctcaagccgctggaaaaatcgctgatgctcggccgcgcgcagccgctcgtgatgatgatcgcgggtgtcaacggcgcgggcaaaaccaccagtatcggcaagctcgccaagcatctgcaaagcttcgatcagtcggtgctgctggcagcgggcgacacgttccgcgccgccgcgcgcgagcaactggccatctggggccagcgcaacaacgtgacggtggtgtcgcaggaaagcggcgacccggcggcggtgatcttcgacgcggtcggtgccgcgcgtgcccgcaagatcgacgtgatgatggcggacacggccggccgcctgccgacccaactgcatctcatggaagaactgcgcaaggtgaagcgcgtgatcggcaaggcacaggaaggcgcgccgcacgaggtgctgctggtgatcgacgccaacaccggccagaacgcgctcgcgcaagtgaaggctttcgacgacgcgctcggcctcaccggcctgatcgtcaccaagctcgacggcacggcgaagggcggcattctggccgcgatcgcgcggcagcgtccgatcccggtgtatttcatcggcgtcggcgaaaaggtcgaggacttgcagccgttcagcgcggaagagttttccgacgcattgctgggc

SEQ ID NO: 12886 - DNA, 255 bp, Burkholderia fungorum
atggccttgatgattaccgacgagtgcatcaattgcgacgtctgcgagcccgagtgcccgaacgacgcgatttcgatgggcccggaaatctatgtgatcgacccgaagaagtgtaccgagtgcgtcgggcatttcgacgagccgcaatgtattcaggtgtgcccggtcgagtgtatcccgcgcgatccggagcatctggagacgcccggcgagttgatggcgaagtaccacgcgctacaggctgcaaagggcgag

SEQ ID NO: 12887 - DNA, 1299 bp, Burkholderia fungorum
atgaccccgtcagatgttaaagccacgctatcgttcagcgacaattcgccgagcgttgaaatgccgatctacaagggcactctcggcccggacgtgatcgacatccgcaaactgtacggccagaccggcaagttcacgtacgacccgggcttcatgtcgacggcggcgtgcaattcggcgatcacctacatcgacggcgataagggcgagttgctgtaccgcggctacccgatcgacaacctcgcggaaaacgccgacttcctcgaaacctgctatctgctgctgaagggcgaactgccgaacgcacagcagaacgccgaattcgtgaagacggtcacgaaccacacaatggtgcatgagcaaatgcacttcttcttccgtggtttccgtcgcgacgcgcacccgatggcgattctggttgccgcagtcggcgcattgtcggccttctatcacgactcgctcgacatcaacaatccgcgtcaccgtgaagtgtcggctattcgcatgatcgcgaagctgccgacgctggtggcaatggcgtacaagtacagcatcggccagccgtttgcgtacccgaagaacgacctgtcgtacagcgcgaacttcatgcacatgatgttctcgaacccgtgcgaagagtacaaggtcaacgacgtgctggtgcgcgcgctcgaccgtatcctgatcctgcacgccgaccacgaacagaatgcgtcgacctcgaccgtgcgtctcgccggttcgtcgggtgcgaatccgttcgcgtgtatcgcggccggtatcgcgtgtctatggggcccggcgcacggcggtgcgaacgaagccgcactgaacatgctggaagaaatcggctcggtggacaacattcccgagttcatcaagcaggtgaaggacaagaactcgggcgtgaagctgatgggcttcggtcaccgcgtctacaagaactacgatccgcgtgccaagctgatgcgcgaaacctgccacgaagtgctggaagaactgggcctgcacgacgacccgctgttcaagctggcaatggcgctggaaaagatcgcactggaagacgaatacttcgtgtcgcgcaagctgtacccgaacgtcgacttctactcgggcatcgtgcagcgcgcgctgggcatcccgacctccatgttcacgtgtatcttcgcgatggcgcgtacggtcggctggatcgcacagtggaacgaaatgatcgcggatccggaacagaagattggccgtccgcgtcagctgttcattggcgacacgcaacgtgaagccaagccgatcgcgcaacgt

SEQ ID NO: 12888 - DNA, 1773 bp, Burkholderia fungorum
atggctgcaatcaagaattctctgccgcgtcgcaagtttgacgtggttatcgtcggcgcaggcggctcggggatgcgcgcttcgctgcaactcgcgcgcgccggtctgtcggtctgcgtgctgtccaaagtgttcccgacgcgttcgcacacggttgctgcccagggcggcatcggcgcttcgctcggcaacatgagcgaagacaactggcactatcacttctacgacacgatcaagggttccgactggctcggcgaccaggacgcgatcgagtacatgtgccgcgaagcgccgaacgcagtctacgaactcgaacacttcggcatgccgttcgaccgtaatgcagacggcacgatttaccaacgcccgttcggcggccataccgcgaactacggcgaaaagccggtgcaacgcgcttgcgcggccgccgaccgtaccggtcacgcgctgctgcacacgctgtaccagcagaacgtggcggccaagacgcagttcttcgtcgaatggatggcgctcgacctgatccgcgacgccgaaggcgacgtgctcggcgtgaccgcgctggaaatggaaaccggcgacgtctacattctcgaaggcaagaccacgctgttcgccacgggcggcgcgggccgcattttcgcggcttccacgaatgcattcatcaacacgggtgacggcctgggcatggccgcgcgttcgggcatcgcactgcaagacatggaattctggcaattccaccccaccggcgtggccggcgcgggcgtgctgattaccgaaggcgtgcgcggcgaaggcggcattctgcgcaactcgaacggcgagcgtttcatggaacgctacgcgcctactttgaaggatctggcgccgcgcgacttcgtgtcgcgttcaatggaccaggaaatcaaggaaggccgcggcgtgggtccgaacaaggatcacgtgctgctcgacctgtcgcacatcggcgccgagacgatcatgaagcgtctgccgtctatccgcgaaatcgcgctgaagttcgcgaacgtcgattgcattaaagagccgatcccggtcgtgccgaccatccactatcagatgggcggtattccgacgaacattcacggccaggtggtgggcacgtcgaagggcgcggaagatccggtcaacggtttctacgcagtgggcgaatgctcgtgcgtgtcggtgcatggtgcgaaccgtctcggcacgaactcgctgctcgacctggtggtgttcggccgcgcggccggcaaccacatcgtcaagcacgtgaaggaaatcaaggagcacaagccactgccggccgacgccgctgatttcgcactgtcgcgtctggctaagctcgatagctcgtcctcgggcgagtacgcgcaatcggtcgcgaacgacattcgcggcacgatgcagaagcacgccggtgtgttccgtacctcggcgttgctggctgaaggcgtcgagcgcatccgcgaagtggccgaccgcgtcgacaacatccatctgaaggacaagtcgaaggtgttcaacacggcgcgtatcgaagcgctggaagtggcgaacctgatcgaagtggcacgcgccacgatggtttccgccgaagcgcgcaaggaaagccgtggcgcgcacgcgcaggacgacttcgaacatcgcgacgacgaaaactggctgcgccatacgctgtggttcagcaaaggcgatcgcctcgactacaagccggttcacatgcaaccgctgacggtcgaatcggttccgccgaaagcgcggaccttc

SEQ ID NO: 12889 - DNA, 1185 bp, Burkholderia fungorum
atgagcgagacaacgcaaaccgccggcacacccggcggcaacgaacccaaaagcggcttcaaaccgaaaaaatccgtcgccctgtcgggcgtgacggcgggcaacacggccctctgtacggtcggcaagaccggcaacgacctgcactatcgcggctacgacattctcgatatcgccagcgcctgcgaattcgaagaaatcgcgtacctgctggtccacgaaaagctgccgacgcaagccgaactcaccgcgtacaaaacgaagctcaaggcgctgcgcggcctgcccgcgaacgtcaaggccgcgctcgaatggatcccggccgccgcgcatccaatggacgtgatgcgcaccggcgtatcggtgctcggcaccgtgctgccggagaaagacgatcacaacctgccgggcgcgcgcgacatcgccgacaggctgatggcctcgctcggttcgatgctgctgtactggtaccactactcgcacaacggcaagcgcatcgaggtggaaaccgacgacgattcgatcggcggccacttcctgcatctgctgcatggcgtggagccgtccaacgcatgggtcgacgcgatgcacgtgtcgctgaacctgtacgccgagcatgaattcaacgcatcgaccttcacgggccgcgtgatcgcgggcacgggctcggacatctactcggcccttaccggcgcgatcggcgcgctgcgcggaccgaagcacggcggcgcgaatgaagtcgcgttcgagatccagtcacgctaccagacgccggacgaagccgaagcggatatccgccgccgcgtcgagaacaaggaagtggtgatcggtttcggccaccccgtgtacacgatttcggacccgcgcaacaaggtcatcaaggaagtcgcgaagaagctctcgaaggaagcgggcaacaccaggctgttcagcattgccgagcggctggagtcggtgatgtgggacgcgaagaagatgttcccgaatctggactggttcagcgcggtctcgtatcacatgatgggcgtgcccacggccatgttcacgccgctcttcgtgatcgcgcgtacggcgggctggagcgcgcacatcatcgagcagcgtatcgacaacaagatcatccgtccgagcgcgaattacaccggacccgagaatttgaagtacctgccgctaaataggagaaaa

SEQ ID NO: 12890 - DNA, 1329 bp, Burkholderia fungorum
gtggagaatcaggaatttgatatcgcattcactcatgcgacgctgctgacgggcgatccggcgcagcgggaattgcgggacgcgacgcttgcagtcgcgaaagggcaaatcgcctggctcgggccagatttgccagaacatgcgcgctgcaaacgcatcatcgacgcgcgtggaaaggtcatcactccagggtttgtcaacgtacacacgcattcaatcttgacaatggttcgcggcgtcgccgcagatctgggttttgcaccgtcctatacgccgggaattccgaagggaacgcaggtctcgccggagcaggcccgtgttctggcgcggcttggcgcgctggaagcgctaatgttcgggtcgacgctgattggcgataatttcgtgtatgccgacctcaccacggaagcaatggcggacctgggaatgcgtctaactccgagttggcgaatccatgatgttgacttcacgaaagtggcagacggacgttgggagtacagcacacgcattggcgctcagttgttgcaggccgggctcgatctggccgacaggtggaaagaccatccgctcgtgaatgtgcagcttgctgcccacgcggtcgatacgtgttcggacgcctttctccgggagatcgcgcacgcgtcacgcgagcgcgggctgcgagtaaacacgcacctcggccagagcagactagaagtcgaacgggtccgcgagcgtacgggcaagacgtccacggaggtgctgaacgatgtggggctgttgaatgagcgcctactgggtggtcattgcatttacgtcaccgatagcgatatcgcgttgatggccggtgccggtgcgcatgcagtccacattcccaagtgtaatgcgacatcggggcgccttgcaccgactccaaagatcaaacgggcaggtatcaacctggcacttgcaaccgacacgcagcacggcgacatggtcgaactgatgcgctgggcgcttatgacagcgcgcgtccaggagggtgcagtcaacagcgactggcagccgcagcacgcatttcatatggccacgcttgggggagccaatgcggtcgggatggctgaccgcattggcagcctcgaaacaggcaaggatgctgatctggttatgttcgatttcggcagaccacatctgacgccgcggacaaacgcgcttggtacccttgtgcatacgggccaaggtcgtgatgtcgagatggtgatggtcaatggctcgattcttgtggaggggggaaggccgacgcgggtcgacatggacgagatctgcgcagaagccgaacaggtgtgcgaggcgctctggcgcgatgctcat

SEQ ID NO: 12891 - DNA, 1548 bp, Burkholderia fungorum
atgcgtttgcgcgctttgccgaagcagtacgccggtgaaaaaatacagctttcgggcacgctttcgcgtgttcatctcgattcccaatttcacgctcaatcatccatgagttttctcggcatcgacctgggcaccggctctctcaaagtggcgatcgtcgacgaaaacggtcgcgagcaggcggtggcgagcgtcgcttatgcaatcgaaacgccgcatgcgggttgggcggagacgtcggtgcaaacgtggtggcgcgcgctgtgcgaagccgccgcacgtctgccggacggtctgcgccgcgaggtgcgggccattggcttttccggccagatgcacggcgtcgtgctgatcgacgaggcgggcgaggccgtgcggcccgccatgctgtggcccgacacccgcgcgctggccttgctcgacgcgtggcccgagccgcagccgaatccggttgcgccgggcatggccggtccgctgctgcgctggatcgtgttgcacgaaccgcagtccgcgagccgcacgcgttgggcgctgcaaccgaaagactggctgcgcgtcgcgctgggcggcgctgtcgtgaccgatccgtccgatgcctgcgccaccgcgctcgccgatccagcgggcatgtgggacgcggcgctactcgatcggctcggtattccgcgcgcgtggttcgcgccgctggcgccgtcttatgccgcgggtggcgtgctatcggaaaaggcggcacaggctctgggtttgcgccccggcatcgtgctcgcgacgggcgcagcggatacgccgtgcgccgcactcggcagcggactcgcgcacgacggcgacgccttgctgaccaccggcaccggcggacaaatcgtcgtactggccgagtgtgcgcctgcggcggccagaggcttgcatcgctatcgggcggcgagcgaccactggtaccggatggcggcaatgcagaacgtcggcattgcgctcgaacgggtacgcggctggctgtcgtatgaatgggccgatgcgtatcgtgacgcgttcggcgacgcagccggcgcgagcacaacggctgcgtcgggcctcacgtttctgccttatctcacgggcgaacgcacgccctggctcaacccgatggcgcgcggcggctggctcggccttgccctcgatcacacgcgcggcacgatgatgcgcgccgcgttcgaaggcgtcgcgttctcgttgcgcgccggcctcgacgcgattcgcgcgagcggcgcgacggtgacggcattgaagctggcgggcggcggttccatcgacgcgcactggcggcagttgctcgccgatgcgttgaacgtcgaactgcacgcggtcgattgtccgaacgccgcgccgcgcggcgcggccattctcggcggccttgcgagcgggcactggcacgcgcgcgatctcgccgcgctcgcgcccggcgcgacgcgtgtcgccggtccgcgaggcgatgcggcgctcgccgaacgctacgcgcgctttctcgatctctatgggcgcgtcgaaacatggttcgacggcacgcattcgcgg

SEQ ID NO: 12892 - DNA, 855 bp, Burkholderia fungorum
atggcgatgcttgaacttctgtcgtcgcacgcctgtcacggcggcgagcagcgcatctatcggcacgactcgcagaccatcggcctgccgatgcgcttctccatctatctaccgccgcaggccttgcaggccaatgcgaacgtgcccgcgctgttctacctcgcgggtctcacgtgcacggaagagacgtttccggtcaaagccggcgcgcagcgcttcgcggcgcagcacggcattgcgctcatcgcgccggacaccagtccgcgcggtgcgggcgtgccgggtgaaagcgcggcgtgggacttcggcgtgggcgcgggcttttacgtcgacgccacgcagcagccgtgggcgcagcactatcgcatgtactcgtacgtgcgtgacgaactgcgcgaaacggtgctcgcgaatctgccggtagacggcgcgcgtctcggcatcttcgggcattcgatgggcggtcacggcgcgttgatgctggcgctgcgcaatccggagatctatcggtcggtatcggcgttcgcgccgatcgccgcgccgacgcgttgcccgtggggtgagaaagcgttcagcggttatctgggcgcagaccgcgaagcgtggaagcagtacgacgcgagcgagctggtcgcgcaggcgtcgcgcaagtttgcggaggggattctggtggatcagggcctcgcggatcagttcctcgcggagcaactcaatccggacgtgttcgaagccgcctgccaggccgcgggtcagccgctgacgctgcgccggcacgcggggtacgaccacggctactatttcatctccacgttcatcgaggatcatctcgcgcatcacgcgaaggtgctgctcggc

SEQ ID NO: 12893 - DNA, 1521 bp, Burkholderia fungorum
gtggacaatagatgtccctatatcgcagcgtcgcgggctgcggtgatagcaaaaccagcatgctctcatcctgaatatggaggctctcccatggaacctgcgacttcaccccgtacgctgctcgacaagctgtggcaaagccacgtcgtcgcggaaacgcccaacggcccaacgctgctttatgttgaccgccatctcgtttacgaggtgacaagcccacaagcgttcgaggcgattcgcctgtcgggccgcaaaccctggcggcctgaaacagtactcgcggtcgctgaccataacgtaccgacgatcgccgcggagcgcacgagcatggacgcgatcgctgacccactctcgcgcattcaggtcgcgcagctcgacaaaaattgcaaggagtttggtatcaagtcgtacggtatccggaacccgcagcaaggaatcatccacgtagtcggcccggaactcggggcgacgttgccgggcatgacggtcgtggcgggagactcgcacacgagtacccacggtgcgttcgccgcactggcgttcggggtgggcacgtcggaagtcgagcacgtgctggcaacccaatgcctgtcggttgggaaaatgaagtcgatgctcgtgaacgttgagggcgtactgccggtgggcgtcacggccaaggacgtgattctcgcgatcatccgcaggaccggtaccgccggcggcaccggttacgcaatggaattcgcgggcagcacgatccgcacgctgtcgatggagggtcgcatgaccctgtgcaacatggcgatcgaggcgggcgcccgggtggggctgatcggcgtcgacgatgtcacgatcgactatgtgaaggggcgtcccttcgcgcccgcagaagcacactgggatgcggcggtcgcctattggcgcacgctggtcagcgatgcggacgcccggttcgacaagatcgtcaacatcgacgcaacgcagctacggccgatggttacctggggcacgtcgcccgaaatggtggtcacggtcgacgacgctgtaccgaatccgttggacgatcccgatcccgttcgccgcgccaccatggccggcgcgcttacgtatatgggacttgagccaggtacgtcgctcaagagcatttcactcgacaagattttcatcggctcctgcacgaatgcacgcatcgaggatctgcgtgcagccgccgcgatcgtcaagggcaggcacgtcgcgccgaccgtccagcttgcgctggtggtgcccggctcgggtctcgtcaaggcacaggccgaggccgaggggctggacgccatattcaaggaggccggctttgaatggcgcgaaccgggttgttcgatgtgcctcggcatgaacgacgaccgcctgcgtccgggggagcggtgtgcgtctacatctaaccgaaattttgaaggccgtcaggggcctggtggccgcagccacctcgtcagtcctgcgatggcagccgcggcagcgattgcaggtcacttcgttgacgtttcccacggaggcttc

SEQ ID NO: 12894 - DNA, 1284 bp, Burkholderia fungorum
gtggccgctgtggcttttgcttttgtcatctatgaaaaaggggttaccgtgagccgccgtcgtgttgttgttacaggcctggggctgatttcgcctgttggcaataatgttgccgacggctgggccaatctggtcgccggcaagtcgggtattgccaatatcacgaagttcgatgcgtcgaacttttcgactcgttttgccggcgaggtgaagggcttcaatatcgaggactacatccccggtaaggaagcgcgccacatggatacgtttatccactacggcgtggctgcaggcatccaggcgatgcaggacagcggcctcgaagtcaccgacgagaattcggagcgtatcggcgtggtggttggttcgggcatcggcggcttgccgatgatcgaagtgacgcaaaccgaactgctcaatcgcggcccgcgccgtatttcgccgttcttcgtgccggcgtcgatcatcaacatgatctccggccatctgtcgatcaagttcggcatcaagggtccgaatctggctatcgtcacggcctgtaccacgggcctgcactgtatcggcgaggcgtcgcgcctgatcgaatacggcgacgcggacgtgatgatcgcgggtggtgcagaatcgaccgtatcgccgctcggcgtcggcggctttgcggcggcgcgcgcgctgtcgcaacgcaatgacgatccggccacggcgagccgtccgtgggacaaggatcgcgacggtttcgtgctgggcgagggcgccggcgtcatggtgctcgaagagtacgagcacgcgaaggcacgcggcgcgaagatttacgccgaagtcagcggctatgggatgagcggcgacgcctatcacatgaccgccccgctggaagacggcgacggcgcgcgccgctgcatgctggcggcgttgaagaacgcaggcatcaacctcgatcaggtgaattatctgaacgcgcatggcacgtccacgccgctcggcgacctggcggaaaccaccggcatcaagcgcgcctttggcgatcatgccaaagacatggtcgtgaactcgaccaagtcgatgaccgggcacctgctgggcggcgccggcggtctggagtcggtgtttaccgtgctggccgtgcatcatcaggtgtcgccgccgacgatcaacatcttcaaccaggatccggcctgtgatctggattactgcgccaataccgcgcgggagatgaagatcgacgtcgcgctgaagaactcgttcgggttcggcggcacgaacggcacgctggtcttcaaacgcgcc

SEQ ID NO: 12895 - DNA, 717 bp, Burkholderia fungorum
atgagcggcacgctctatctgatcccgaacacgctgggcgaaggcgacgccgaagcgctggacgccgttctgcctgcgccggtacgcgcccgcgcggcttcgcttcactactacatcggcgaaaacgcgaaaaccacgcgcgcgttcctgaaaaaagtcggcacggaacggccgatccaggaaatcgagattcgcgaactgaacgtcaacacaccggctggagaaatcgacaagctgctcgccccgcttctggccggcaccgacgccggcctggtttccgaagcgggctgcccggcagtcgccgaccctggcgccctactggtgcggcgggcccatgaacgcggcgtgaaggtcgtgccgtttgtgggcccgagctcgattctgctggctttgatggcttcggggctcaacggccagagttttgcgttccacggatacctgccggtcgacgccacggagcgggccaagcgcctgcgagacctcgaacagcagtcgcgcaaaggcaagcagacgcagattttcatcgagacgccctaccggaaccgggcgctgctcgatacgttactggcgacgtgcgcaccttccacgctcgtttgcgtggcggtcgatctgacgctggaaacggagacgatcgtcagccgcaccgtgactgactggaagaagaaacctgcgatcgacctgcacaagcggccagctatttttctgatcctggccgtt

SEQ ID NO: 12896 - DNA, 615 bp, Burkholderia fungorum
atgtcagattccctcaatcgcccgccacgcctgattctggcgtcgagttcgccctatcgccgcgaactgctccagcgcttgcgcgtgccgttcgatgtcgccgtgcccgcgatcgatgagacgccgctcgccggcgaaacacccgaagtcaccgcgctgcggctggcacaagccaaagcacgcgcggtagccggcggactgggcgcaggcgttgccgcgctcgtgatcggttccgaccaggtcgccacgtatgacggcttgcagatcggcaaaccaggcacccacgccaacgcgctggcgcaactccaggcgatgcgcggccgcgaagtgcagttccatagcgcgctgtgtctgttcgacagccgctcagggacagtgcaagccgtcgacgtggtgacccgcgtgcaattccgcgacctgccggatgccgcgctggaggcctatctgctggccgaaacgccctacgacgtcgcgggcagcgccaaatccgaagggctcggcatcgcgctgctcgaggccattcattccgacgatcccaccgcgctcgtcggcctgccgttgatcgcactgtcgcgcatgctgctcgcagtgggttatccactattgggggcccaa

SEQ ID NO: 12897 - DNA, 987 bp, Burkholderia fungorum
atggctcaatcgacaatttattcccgcgtgctgggcacgggcagttatctgccgcccaaccgcgtcaccaatcaggatctggcgaaacgtctcgccgagcagggtatcgagacaagcgacgagtggatcgtcgcccgtaccggcatccacgcgcgctacttcgcggaaccggatgtcacgaccagcgatctggcgttcatcgcttcgcagcgcgcgatcgaagccgcggatatcgacccgcaatccatcgacctgatcatcgttgcaacctccacgcccgacttcgtgtttccgagcacggcgtgcctgttgcagaacaagcttggcatcaggaaccacggcgcggcgttcgacgtgcaggccgtctgttcgggttttgcctatgcggtggcgacggcggacagcttcattcgcagcggtcagcatcgtacggcgctcgtgatcggcgcggaaaccttctcgcgcattctcgacttcaaggaccggaccacctgcgtgctgttcggcgacggcgcgggcgcggtgatcctgcaggcgtccgacgaaccgggcgtgcttgccagcgcgttgcacgcggacggcagccattcgaacattctttgcacgccgggcaacgtgaacggcggtgtggtatccggcagcgcgttcctgcatatggacgggcaggccgtgttcaagctcgccgtcaacgtgctcgaaaaagtcgcggtcgaagcgctcgagaaagccaatctgtcggctgagcagatcgactggctgattccgcatcaggcgaatatccgcatcatgcaaagcacctgccgcaagctcggtttgccgcaggaacgcatgatcgtcacagtgggcgagcacggcaacacgtcggctgcgtccattccgctcgcactcgacgtcgcggtgcgcgacggccgcatcaagcgcggccagaacgtgctgatcgaaggcgtcggcggcggcttcacgtggggcgcgtcggttatccgctac

SEQ ID NO: 12898 - DNA, 933 bp, Burkholderia fungorum
atgaaatttgcgttcgtttttcctgggcaaggttcgcagtcggtcggcatgctcaacgcattcgccgatcaggcggtcgtgcgtgagacggttcaggaagcctccgatgcgctcaatcaggacctcggcaagctgatcgccgaaggccctgccgaagatctgaacctcaccaccaatacccagccggtcatgctgactgcctcgtacgccatgtatcgcgcgtggctgcaggctggcggcccgaagccggcaatcgtcgcgggccacagcctgggcgaatacaccgcgctggtcgcggcgggcgcgattgcgtttcgcgatgccgtaccgctcgtgcggtttcgcgcgcaagccatgcaaacggcggtgccggtcggtgaaggcgcaatggccgcgattctcggtctcgacgacgatacggtgcgcgcggtgtgcgctgaagcgtcggttgcgggtgtcgtcgaagcggtcaatttcaatgcgccggcgcaggtcgtgatcgcgggcaacaaggctgcggtcgaaaaggcctgcgaggtcgcgaaggcgaagggcgccaagcgcgcgttgccgttgccggtctcggcgccgttccactcgtcgctgctcaagcccgcgtcggaccagttgcgcgagtacctggcgagcgtcgacgtgcaggtgccggctattccggtcatcaacaacgtggacgtcgccgtggtcaacgaaccggccgcgatcaaagacgcactggtgcgccaggcggccggcgcggtgcgctgggtcgaaagcgttcaggccatgtcggctcaaggcgtcacgcacgtgatcgaatgtggtccgggcaaggtccttgcgggtttgaccaagcgtatcgacggcaacctggtcggtgcctcgatcttcgatccggcttcgctcgaagagacgctcaaactcgtgaaggcaggc

SEQ ID NO: 12899 - DNA, 747 bp, Burkholderia fungorum
atggaaaagactctcgacaagcagatcgcaatcgtgaccggcgcttcgcgcggtattgggcgagcaatcgcattggaactggcgcgccagggcgcgacggtgatcggcacggcaaccagcgaaagcggcgcggccgccatcagcgaagcatttaacgcagccggtgcgagcggccgaggcgcagtgcttaacgtgaacgacgcggccgcagcggaagcgctgatcgacggtacggtgaaggaattcggcgcgttgcatgtgctggtgaataacgccggcatcacgcaggatcaactcgccatgcgcatgaaggacgacgattgggacgcggtgatcgacaccaacctcaaatcggtgttccgcctgtcgcgcgcagtgctgcgtcccatgatgaaggcgaagggtggccgcatcatcaacatcacatccgtggtcggttcggccggcaacccggggcaagtcaattacgccgccgcgaaagcgggtgtggcgggcatgacccgcgcgcttgcacgcgagatcggcagtcgcggcatcacggtgaattgcgtcgcgccgggtttcatcgataccgacatgaccaggaccttgccggaagaacagcaaacggcgctgaagacgcagattccgctggggcgtctcggcagcccggaagacatcgcgcacgccgtggcctttctggcgtcgccgcaagccggctacatcacgggcacgacattgcatgtgaacggcggaatgtacatgtcg

SEQ ID NO: 12900 - DNA, 973 bp, Burkholderia fungorum
agtttaaggggtgcctcgatgacgcaacttggccttggtctggatctgtcaacgaaacgtacccgaaaacgggaatttctcgatgagatgaggtgcgttgtgccatggtcgaggttgattgcgttgatcgaatcgcactatccgaagaagactggacggccgccgttcccgattgcgacgatgctgcagatccacttcatgcagcagtggtttggtctgtcagacccggcgatggccggcgatggaagaggcgctttatgacgcatcactgtatcgtgagtttgcggggctagacggcgggatgacgcgtttgccggacgagggcacgattctccggtttcgccacctgctcgaaacgctcggcctggctgcgcagatgctcacgctggtcaatgagatcttgagcgagcaaggcttgatgcttaaaacacggtcggctgtcgacgctacctcgatctctgcacccagctctgcgaagaacggctctggtacacgagacccggaaatacaccagacgaagaagggaaatcagtggtacttcgggatgaaagcgcatgtcggcgtggatgcagactcggggctggtgcacgccgtcgtcggtactgcggccaacgttcacgacatcaacgcggccgaagcgttgttgcacggcaggaaatggatgtgtacgctgacgccggatatcagggtatcgaaacgcactgcaaggcaaaggcggttcgctggcatgtcgcgatgcggccaggcaggcgtagacaactggacctgaacgatcgcccggacgcgattcgttcagattgaacgtctgaaggtcggcgtccgcgccaaggtcgaacatccgttccgagtcctcaagcagcagtttggctacacgaagacccggtaccggggtttgatgaaaaacaccgcccagatcacgatactaattgcgctgggtaacctgtggatggcacgcaaggttttgcggaaacgt

SEQ ID NO: 12901 - DNA, 1560 bp, Burkholderia fungorum
atgtcaattaaacgtaggaaagccgtagtggtatgcctgtcactgctgataatggcacagggcgcaactactgtgaacgcgaaggatgcgcagactttgaccgtcgctttggctcaagaggccggtaagctcgatcttcttcagaacgagtccgcgttgagctcatacgggctcgtattcgatggtttggtgcattacgggcaagggggaaaactggagcccgaccttgccgaaagctggaatgtttcgccagacgggaagatcatcacattccagttgcgaaaggatgtccgcttcagcgatggcacgccgtttgatgccaacgtggctcaatggaacatggctcgctggattggaaagccggacttctcgtggattagtgtgtcagagaattttgagaggatggaggtgacgggcccgtacactctcaggctcttcctcaaagcacccgctccagttgcattggcggagctttcgatcgtgcgtccagtgcgctttttgtcgccgaaagccgtagacgccaaaggccagcagacttcgcctgtcggcaccggaccctggaagatattgcaaaacgacaggagcgagacggtactggtccccaacgactattactggggcaaaaagtcatcaatcaagaggattaacctctcagtagtacccgacgagctttcgcgtgccaatgcgctgcgttcgggcgatttggacatcatcggtggcgaatgggtcgccccccttttgcctgcccgagccaaggccctatccactgatactgaggtcggtgtgttcgctgcaccgggcgtctcgacggtcttgcttggatttaacgacacccgtgggccactgacagatgtcaacgttcgccgcgcaatcaaccttgggatcgaccgcacatcaatcgccaaaatcctttaccagggatatgccgatccagccagtaacctctttccacctacaattcccgacgcgggtaagagagagccggtaatcgttcgggacgtcgcaaccgcgaataagattttagatgctgcgggttgggttaaagcgggggcagtcagacgcaaagatgggaaagatctcgctttgaatttgctcgcatctgatcaggttctgccaggttctcgccgtctatcggaactgctcctcggccaattggcggaccttgggattacggtcactgtgtcatcgcttgacgatgccacctatcacgatcggcggcagaaattcgactatgaccttgccttcttcacaacctacgcggcaccctatgacccacaaggttctttgtccgcaatgtttgtctcaactgcggatagcggaccagacggcaaaatctttgtatcgaaggacctcgatgctgtcgttcaaacagcattgtcggcagccggggacgacagaaaggaaaaggtgcaaaaaatctacgactggatggacaagaacgctgcgatctgcccgctcgtctatccgcagcgattgtgggcatataacaagcgggtcgacgggttcgctttgccgcccaccgaatacgatatgccgatttccaatcttgttctgaagccg

SEQ ID NO: 12902 - DNA, 1533 bp, Burkholderia fungorum
atgcccctgacaacgatgattattgagtccggccatttgacattggcccaactacgtcgcattgcacacttctccgagacagtccaactttgtcccagcacctttgctgcgatcgatgcgtctgcacaggccgttgagaatatagtgagaaaaggaaagccggtgtacggcgttaatacggggttcggtcgtctcgcgagcacgcacattcccttggagcagctcgatctattgcagcgcaatctcgtgctctcgcatgctgtaggcgtgggcgaaccgatgtcgcgatctgttgtgcgtttgatgatcgtgctaaaggtgtcgagcctcgcccgtggacactcgggtattcggagggaagtaatcgccgctttggttacgcttctcaatgccgacgtcctaccggtaatccccgtcaagggatcggtcggagcatcgggcgatctcgcgcctctggcgcacatgtccgccgtgcttcttggcgtcggtgaggtgaccattggcgagcggcgtgccagcgcaaacgaaggcttgcatgctgcgggacttgagccatttaccctacgcgccaaagagggattggcgttactgaatggcacgcaagcatcgacggcactcgcgctgttcaacatgtttgccattgaggacctgttttgcaccgcactggtagccggtgcgctgtcagtggatgcggcggccgcctccgttgttccgttcgacgcccgtatccatgcgctacggggccatcaggggcaaatcgattcggcggcagcgtaccgtgccttgctggagggctccgagattaacctgtcgcactcagactgcgacaaggtgcaggatccctacagccttcgctgccagccacaagtcatgggtgcttgtttgcaccagatgcgccactcggcggaagtgcttctgtgcgaggcaaattcggtctccgacaatcctttgatcttcccggatacctgcgacgtgctttcgggtggaaatttccacgcagagcccgtcgcgttcgcggctgataacctggcgcttgctgttgccgagatcggcgcgctcgctgagcgccgcatcgcacttttgatcgacacaacgttgtccggacttcctccctttctagttcgcgatagcggcttgaactcgggattcatgatcgcccatgtgactgccgcggcgctagcatccgagaacaagacgctcgctcacccagcttccgtggactcgttgccgacctcggcaaatcaggaggaccatgtctcgatggccaccttcgccgcgcgaaagcttggcgatatggctagcaacacagcgcacattctcgcgatcgagctactcgcggccactcaaggaatagacctgcgtgagccacatcgcaccagcatgcgcttgcaatcggtcaccgaggcagttcgccgggatgtaggccactaccactcggaccgacacttttctcccgacattgctgcgatcgcagcgcaggtgctgaatggagaaatcgcgcgacacagtccgtttaggtttccatcgaacccc

SEQ ID NO: 12903 - DNA, 2490 bp, Burkholderia fungorum
gtggccaaacggccaagttaccgtcatttacagcctcacgcgggacactgcgtttacaataggccggatcgaagttcccggaagccgggatcgggcctgaagccccgctgggtgaggctcggccacggcccaggcgacaatccaggccgggaatcgggcacacacgcaacaggatcaatggcaaaagctccctattccgcgagcgcgcaggcattgccgcaccgcatgtcgcgcctcttcaccgaaatccgctggatcctgcaggtggcgctcggcgtattcctgctcatggcgctcgtcagctacagcaggcgcgatccgagctggacccacgccgcgcaggtcgaccatatcgccaactgggcgggccgcgtcggcgcgtggacgtccgacatcctgctgctgctgttcggcctgtccgcctactggtggatcgtgctgctcggccgtcatatctccgcgaactacaggcgcatcacccgtcaagaggaattgccggaagacgcaccgcgcgacgtgagctggctggccgatgcgttcgccttcatgctagtgctgctggcgtgcgacggcatcgaggccctgcgcatgtggtcgctgaaagtacagttgccgcgcgcgccgggcggcgtgatcggcgaggcggtcgcgcgcggcgtgtcgcatgcgttggggttcacgggcggcacattggcgctgctgatcgtgctcggcatcggcctgtcgctgtatttccgcttttcgtggctgtcggtgtcggagaaggttggcgaatccattatttccgccgtgaccttcgcgaagctgcgccgcgaggccggccgcgaccgcaagctcggcgaagcggccgccgtgaagcgcgaaggcaaggtcgagaagggccgcgtgcggatcgaggagcacgagccggtcatgatcgtgccgccggtcatcacgccggccaagtccgaacgcgtcgagaaggaacgccaggtgccgctcttcacggacctgccgggcgactccaccttgccgcccatttcgctgctcgatgccgcgcccgtcgcgcaggaaaccatctccgcggatactttggaattcacctcgcgcctgatcgagaaaaagctcaaggacttcggtgtcgatgtgagcgtggtcgcggcgtatcccggcccggtggtcacgcgctatgaaatcgagccggccacgggtgtgaagggcagccagatcgtcggtctcgccaaagacctcgcgcggtcgctctcgctcgtgtcgatccgtgtggtcgaaacgattccgggcaagaatttcatggcgctggagttgccgaaccagcgccgtcagaccgtgagcctctccgagattctcggctcggccgtgtatgcggacgctgcgtcgccgctgacaatgggtttgggtaaagacatcggcggcaaaccggtgtgcgccgacctcgcgaagatgccgcacttgctggtggcgggtacgaccggttcgggcaagtcggtgggcatcaacgcgatgatcctgtcgctgctctacaaggcgagcgccgatcaggtccgcatgatcctgatcgatccgaagatgctggaaatgagcgtgtacgaaggcattccgcatctgctgtgtccagtggtgacggacatgcgccaggccggccacgcgctgaactgggcggtggcggaaatggagcgccgctacaagctgatgagcaagctcggcgtgcgtaacctcgccggctacaacaacaagatcgacgaagccgccaagcgcgaagaaaagctgccgaatccgttcagcctcaggccggacgatccggagccgctcacgcgcctgccgaacatcgtggtggtgatcgacgaactggccgacctgatgatggtggtcggcaagaaggtcgaagaactgatcgcgcggatcgcgcagaaggcgcgcgcggccggcatccatctgattctggcaacgcagcgtccgtcggtggacgtgattaccggcctcatcaaggccaacgtgccgacgcgaatggcgttccaggtgtcctcgaagatcgactcgcgcacgattctcgaccagcagggcgcggaatcgctgctcggcatgggcgacatgctgtatctgccaccgggtagcggtttgccggtgcgcgtgcacggcgcgttcgtgtcggacgaggaagtgcatcgcgtggtcgacaagctcaaggaacagggcgagccgaactacatcgaaggcattctcgaaggcggcgtgacgggcgagggcgacgaaggctcggcaggcgcggggggaaccggatcgggcgacggcgagtcggacccgttatacgaccaggcggtcgacgtggtgctgaagaaccgccgcgcgtcaatctcgctggtgcagcggcatttgcgcatcggctataaccgcgcggcgcgcctgctcgagcagatggagaactcgggcgtggtgtcggccatgtcgtcgaacggcaatcgcgagattctggcgccggcgcgggaagcggag

SEQ ID NO: 12904 - DNA, 1077 bp, Burkholderia fungorum
ttgtgcgtcgtcaccctcgtctttgacggcggcgcggcgcacaatgccggcatgaacgacgacattctcgatccacaggacggcgcgaacagcgctgtgcctttcgcccggctcaagccggaaatcgtgctcgacgcgctcgacggcgtgctcagcacagtcggcgtgcgcaccgacggccgcatgctgccgctcaacagctacgagaaccgcgtgtaccaggtcggcgtggaagatggcccgcccgtggtcgcgaagttctatcggcccgagcgctggagcgacgccgcgattctcgaagaacatgctttcgttgccgatctcgcttcccgcgaaattccggcggtgcctgcgcgcgttttcgaaggccgcacactgcatagcttcgacggtttccgcttctcgatcttcgagcgtcgcggcggccgcgcgccggatctcgaccggcccgacacgctggaatggctcgggcgtttcatcggccgcatccatgcggtgggtcagacgcagaattacgtcgaacgtcccacgctggacattcacaccttcggctacgagccgcgcgacttcctgctcgcgcaccgtttcgtaccggacaacctgcgcaccgcatgggaaaccgtggtgaacctcgcgctcgaaggcgtggagcgcgcgttcgagcgggccggcgacatccgcatgctgcgaatgcatggcgactgtcatccgagcaacgtgttgtggaccgacgcagggccgcatttcgtcgacttcgacgacagccgcatgggaccggcggtgcaggatctgtggctgttgctgccgggcgagcgcgcagaagcgtcgcgcgcgctggcggatctgctcgcaggctatgaagacttttgcgacttcgagccgcgcgaactctatctggtcgaagcgttgcgcacgctgcggctgattcactatcaggcgtggctcgcgcgccgctgggacgacccggcgttccccgcagcgtttccgtggttcaacacgcagcgttactgggaagaccgcatcctcgaattgcgcgagcagatcggcgcgatgcaggaagggccgctttggcccgtt

SEQ ID NO: 12905 - DNA, 1118 bp, Burkholderia fungorum
aggtcaatcccggcgcccccgcgcccggcggcaacaccggcacggcgaccggcgtgccggtctatccgccgccgcccgaaggcggcaacgcgggcggactgccggccgcgaccgacggcagcggcgccgtcggccagacgcagaaagcggccgaaccggtgcgcacgcaggccgaagaagcggtggtgcagcgcgaacacgcgccgctcttcgaccacaagctgacgatggactggggcatcagcgacacctactacgatcgccgccagttgcagttgtcgggcttcctcgcgctcgacgcgattttcctcggcaacatcaacctgggcgagaccaagtcgcaccaggtgatggccgatctcgatacgcgctacggcctgaccgaccgcatgagtatcgacgtcgacgtgccgtacatctaccggcatagcaacttcatagtcggcggcgcgggcggcgcggcaagcacgttgtcggatgcgtcggtgaacggcagcaatatcggcgacgtcaacttcgggatctactaccagttcctgaaagagaccaacagtctgccggacgtggtcggcagtctgcgcatcaaggcgccgaccggcacctcgccgttcggccagaaactggtgcaggtggacgaaaacaacaccaatctggtcgcgccgagcaagctgcccaccggcacgggtttctggaacatcacggccggcgtctcgctgctgaagacctacgaccccgtggtgctgttcggcagcgtttcgtacacctacaacatcgctcgctcgtttgcggacatctcgtcggtgcagggacaaacccagccggcaacggtcaagctcggcgacatcgtgcagttcggcggcggcgtggcgctcgccttctccgacaaggactcggccagcatctcgtacacgatggcgctcgaacccgaatcgaagacgcgcgcgccagggggctcgtacgaaaaagtgccgggcagcgagaccacggccgcggcgctgaattttggcctgaaccacgtcgtgaacaaacacctcaccatcaacggctcggtctccgtgggcttgacgcccgacgcgccgaacttcgtggtcggcgtgcgctttccctacaccttctga

SEQ ID NO: 12906 - DNA, 654 bp, Burkholderia fungorum
atgacgaccgcgacgcctgaaaactcgggtaagcagacgcgtaatcaccccgacgaaatcgtgatcggcctcgtgtcgatcagcgaccgcgcctccaccggcgtgtacgaggacaaaggcattccggcgctgcaggagtggctcggcgcagcgctgagctcgccgtggcaagtggtcacgcggctgattcaggacgatgcgcccaccatttccgccacgctgaccgaactggtcgacgaagtcggctgcgatctggtgctgaccaccggcggcaccggcccgtcgcgccgcgacgtgacgccggaggcgacgctcgcggtcgccacgaaggaaatgccgggtttcggcgagcagatgcggcagatcagcctgaatttcgtgccgaccgcgatcctgtcgcgccaggtcgcggtgatccgcgaaacggcggagcacgcggcgctgatcatcaacctgccgggtcagcctaagtcgatcagggaaacgctggaaggcttgcgcgacgccgaagcaggcggcgcagtgaaggtgccgggcattttcgccgccgtgccgtactgcatcgacctgatcggcgggccctatgtggaaaccaacgccaacgtggtgaaggcgttccggccgaagaacgcacagcgcgcgccccggccggct

SEQ ID NO: 12907 - DNA, 498 bp, Burkholderia fungorum
atgacgacgctcaccctgatcgtcgctcgcgccaacaacggcgtgatcggccgcgacaaccagttgccctggcgacttcccgaagacctcgcgttcttcaagcgcaccactatgggcgcgcccatcatcatgggccgcaaaacgcatgagtcgatcggccggcccttgcctggacgccgcaacattgtcgtgacgcgcgatgccacacgccgcttccagggttgcgacacggccgcgacgctccaggaggcgctcaagctcgccgcgcaggatcaggcgcccgaagcgtttctgatcggcggcgcgcagttgtatgtggaaggcttgcggcaagcggacaagctcatcatcaccgaaatttccgccgacttcgaaggcgacgccacgttccccgaactcgacgaaaccgagtgggaagaagtcgcgcatgaaacgcaccgcgcggacgcgccgaacgatttcgactacgcgttcgtgacgtacaaacgcaagggtgcc

SEQ ID NO: 12908 - DNA, 3072 bp, Burkholderia fungorum
atgaatccatcccgcgcttttattctgcgtcccgtcggcaccgcgctgctgatggcggcgatcatgctggtcggtctcgtcgcgctgcgcttcctgccgctctccgcgctgcccgaggtcgactatccgaccatccaggtgcagaccttctatccgggcgcgagcccggacgtgatgacgtcgtcggtcaccgcgccgctcgaacgccagttcgggcagatgccgtcgctcaatcagatgtcctcgcaaagctcggccggctcgtcgatcatcacgctgcaattcagcctcgatctgccgctcgacatcgccgaacaggaagtgcaggccgccatcaacgcggccggcaacctgctgccctcggacctgcccgcgccgccgatctacgccaaggtcaatccggccgacgcgccgatcatcacgctcgcgatcacctcgaagacgctgccgctcacgcaggtgcaggatctggccgacacgcgtctcgcgcagaaaatctcgcaggtggcgggcgtgggcctggtgagcttgtcgggcggccagcgcccggccgtgcgcattcaggcgaacccgcgcgcgctcgccgcgtacggcctgaatctcgacgacctgcgcaccaccatctcgaacctgaacgtcaacacgccgaagggcaatttcgacggccccacgcgcaactacacgatcaacgcgaacgaccagttgaccgacgccgacgcctacaagagcgcggtggtcgcgtacaagaacggccgcgcggtgatgctgaccgacgtggccaccatcgtacagggcgccgagaacaccaagctcggcgcatgggtggacggcacgcccgcgatcattctgaacgtgcagcgccagccgggcgcgaacgtgatccaggtggtggacagcatcaagaagctgctgccgcaattgcagcaggcgctgcccgccgcgctggacgtggaaatcgtcaccgaccgtaccaccacgatccgcgcttccgtgcgcgacgtgcagttcgaactcgcgatgtcggtcgtgctggtggtgatggtgatgtacctgttcctcgccaacatctacgcgaccatcattccgagtctctcggtgccgctgtcgctgatcggcacgctcgccgtgatgtacctgtgcggcttctcgctggacaacctgtccctgatggcgctgaccatcgcgaccggtttcgtggtggacgacgcgatcgtgatgatcgagaacatcgcgcgttatgtcgaagacggcgagtcgccgctcgaagccgcgctgaagggttcgaaacagatcggcttcaccatcatttcgctgacggtttcgctgatcgccgtgctgattccgctgcttttcatgggcgacgtggtcggccgcctgttccacgaattcgccattacgctcgccgtgacgatcgtgatctcggcagtcgtgtcgctcacgctggtgccgatgatgtgcgcgaaactgctgcgccacacgccgccgcacgagaaccaccgtttcgaggccaaagcgcaccgcgcgatcgactgggtgatcgcacgctatgcggtcgcgctcacgtgggtgctgaaccggcaacgctccacgctggtcgtcgcactcctcacgctggtgctgaccggcctgctgtacgtgtacattccgaagggcttcttcccggtgcaggacaccggcgtgatccaggcgatcacgcaggcgccgcagtcggtatcgtatgcgtcgatggccgagcgccagcaggaactcgccgcgcagatcctgaagaatccggacgtggaaagcctgacttcgttcatcggcgtggacggcagcaatatcacgctgaacagcggccgcatgctgatcaacctgaagccgcgcgacgaccgcagcaacaccgcgagcgaagtgatccgccagttgcagcgggatgtggcgcatattccgggcgcgtcgctgtacatgcaaccggtgcaggacctgaccatcgactcgacggtgagccccacgcagtaccagttcatgctgaccgatccgaacatcggcgaattcaccacgtgggtgcccaagcttgtcgagcgcctgcggcagtcgcccgaactggcggacgtggcgacggatctgcaggacaacggccagtcggtctacatcgaaatcgaccgcgccaccgcgtcgcgttatggcatcacgccggccaccgtggatagcgcgctgtacgacgcgttcggccagcgcatcatctcgaccatcttcacgcagtcgaaccagtaccgcgtgattctggaagcgcagccggaaatgcagcactacaccgaatcgctgaagtcgatctatctgccctcttccacgtccacgggcggacaggtgccgctctcctcgatcgcgcgcttcatcgagaagcccgcgccgctgctggtcacgcacctgagccagttcccggccaccaccgtgtcgttcaaccttgcgccgggctcgtcgctcggtgcggcggtgaaggcgatcgaccaggcgcagaaagacatcggcttgcccgcgtcgttccagacgcgctaccagggcgcggcgctggcattccaggcgtcgctgtcgaacgagctgttcctgatcctcgcggcgatcgtcacgatgtatatcgtgctgggcgtgctgtacgagagcttcatccatccaatcacgattctctccacgctgccctcggccggtgtcggcgcgctgctcgcgctgctcgttaccgggcacgatctggacatcatcggcatcattggcatcgtgctgctgatcggtatcgtgaagaagaacgcgatcatgatgatcgacttcgcgctctacgccgagcgcgaagaaggcaagccgccgcgcgaggcgatctatcaggcgtgtctgctgcgtttccggccgatcctgatgaccacgctcgccgccctgctcggcgcgctgccgctgatgctcggcacgggtgccggctcggagctgcgccgtccgctcggtatcgcgattgcgggcgggttgatcgtcagccagttgctgacgctcttcaccacgccggtgggggatcctctagagtcacttacagcatgcagctgcttgccg

SEQ ID NO: 12909 - DNA, 1404 bp, Burkholderia fungorum
atggacgaacaacaaaagcattcggaaacctctcgccccacccctgcggctccccaaccgtcctccggcggcgggccggccggcacaccgaaccatccgccgggcatggtgaagcggcaccgcggccgcaacatcgcattgatcatcgcggcgctggtcatcctcgggttcgcgctgtggcgctggcatccgtggggtggtcccggcggcggcgcgagcggcgcggccgacgccggcggggcgagcagcggccgggcgggccgcgccggccgtggcggtgcgggcggcatggccaacatggcgcaacccgttcacgtggcggccgcggtgcagggcgaaatgccggtggtgctgaccgcgctcggtacggtcacgccgcttgccaatgtcacggtgttgccgcagttgagcggcacgctgcaagaggtgtacttcaaggaaggccagatggtgaagaagggcgacgtgctggcccagatcgacccgcgcccctatcagatctcgctcgataacgcgcaaggcacgctcgcccgcgacgaagcgctgctgcaaaccgcccgcctcgacctgaagcgctatcagacgctgctgtcgcaagactccatcgccagccagcaggtggatacgcaggcttcgctggtgcggcaatacgaaggcacggtgaagtccgacaaggccaatatcgacacctacaagctcgatctcgtctacgcgcgcatcaccgcgcccgtgtccgggcgcgtcggtctgcgccaggtcgacccgggcaactacgtgacgccgagcctgaccaacggcattgtcgtgatcactcagttgcagccgatcagcgtgatcttcaccacctccgaagacaatctgcagcagatcatccagcagacccaggcgggcgagaaactctcggtcaccgcgtacgaccgcagcaacaccacctcgctcgaaggcggcacgctcgaaacgctggacaaccagatcgacaccaccaccggcacgatcaagctgcgcgcgatcttccagaacagcaagaacctgctgttcccgaaccagttcgtgaatacccggctgctggtcgatacgatcaaggacgcggtgatcgtgccaacgccggccgtgctcaacggctcgatgggccagttcgtgtacgttgtgaagccggacaacaccgtgacggtgcggccggtcaaggtcggccccgtggacggcgagcgcaccagcatcaaatccggcctggcagtcggcgagcgcgtcgtgatcgacggttcggaccgcctcaaggaaggcgcgaagatcacgattccggccgacaagccccgtggtgcttccggtgcgcgcggcgcagccgcggcgtcgggcgcctccggcacgcgcgggcatcatcgcaaacacgcggcgcaagcctcgcaa

SEQ ID NO: 12910 - DNA, 2175 bp, Burkholderia fungorum
atgctgaacttcgtaacgcgacgcaccctgacggtcagcggcgcgacgctgccgaccttgcccgacggcgagccggcattgcagctacgcaccatcgcaggggaggaaaccctgtcgacgatctacgaatacgagttgagcctcgtcacacccgtcgatccgctgctgccggacagcacggccgccaacttcgacctgaaggagatgatcggcggggaactgacggtcaccatccagctcgacggcatggggacgttcgtgccgggtatggccggcgccagtggcgcggcgaatttcggcgccggcatgcgtgagatcagcggcattgtgaccgcggcgagtctggtgagccagttgaaccgccagtatctctaccggttgaagatgcagccgtggatcgtgcttgccgagcggcgcaccgactaccggatcttccagaacaaaacagtcgtcgagatcatcgacgaggtgctcaagagcaattatctctactcctacgtcaagcgtctgggcggcaggtattcgaacctggtctatcaggttcagtacggcgagtcggacttcgctttcatccagcgcctgatggccgaacacggcatctactggttctttgagcacagcaggagttttcaccgcatggtgctggtcgacaatctcggtgcgcacaaacccgtggagagtctcgcgtaccagacgctgtggtactacccgccgggacacaagatcgaccgcgagtacatcgaggaattccagacgaccgattgcatccagtcgggcgtctggacgaccgacgacttcgacttcacgcaaccgggcgcggatctggcggtaaagaacgcgctgccgcagaagacagcgcataaccggctgagcgtctacgaatggccgggcgactatacggatgcgaaagacggcgcgcagttcgcgcgcgtgcgcatggaggaaatccgcgcgctgggtgagcgtgccacgggcagggggcatctgcgcaacgtggtgtgcggcacgacctttacgctcgcgggctacccgcaggaggcggcaaaccgggagtacctcgtaatcggcgcgaagctgctggcggaagaaaccggcgagcaaacgggcgcgggtcaataccgcatcgacacgacgttcgaggtgcagccggccaccacgatgttccgcgcaccccgcacggtggcgaagccgcgcaccaccggaccgcaaaccgcgatcgtgacggggccgcccggccaggaaatctggaccgacagatacggcagggtgaagctgaagtttcactgggaccattcacccgtgaacgaccagaactcatcgtgctgggtgcgggtgtcgtatccgtgggcgggcagcaacttcggcggcgtgaacataccgcgcgtgggtcaggaggtgatcgtcgatttcgagaatggcgatcccgaccggcccatcgtgacggggcgcgtgttcaatgccgcctccatgccgccgtgggagttgccgggcaacgcgacgcaaagcggcatgctctcgcgctcgatgaaaggccactatggcacagccaacgcgatccgctttgaagataaggaaggcgcggaggaactatggctgcaggccgagcgcgacatgcgtaccgaggtcgagcacgatgagtcgcataccgtacgacacgaccgcacgagaacggtcggacatgacgaatccaccacgattgaccacgaccgcactgaaaaggtggggcgcggtgagcaggttgatatcggtgaggaccgccgccacagcataggcaacgatgcgcatctctctgtcgggcgcgatcacaaactgcgcataggcaaggatcgtattgaggatatcggcaacaaccgcaaggacacaatcggggccgacttccggatcaacacgggtggtcacgtcgcgcatacggtgaagggacatcaccagatcgaggcgggacaggccattaaacgccacacccccatctatcagctacaggccggcgaagctgctgaaatcatcggcccggccggaaagatcacgctcgacagtcatggcatcacgctggaagcggtcaggattctgctgaagggaccggttcacgccagcacgggctgggtcgagaactcgctggacatgcgctcagaggtccggcaatgcacgttcacacccgactttttcccgttttccggc

SEQ ID NO: 12911 - DNA, 1131 bp, Burkholderia fungorum
atggaaacacacagcatccgagacgcaagctctttgcgctacgtagccggcctcgatggactccgggccatttccatgatgctggtcgtcctgtttcattacacgagctatttttccagcagcctggcagaattggggggtgcctggaccggtgtagtgcgtattgcgtcaaccggctggataggcgtcgacgtatttttcgtgatttcaggttttctgatcacaacaacgctattgaagaggccggtcgattcgctcgcgtcatattcgacattcattcggcgccgtgcagtcaggctgctgccggcctacgtcgcaagcctgctgatattcacgcttgtcgcgctgctgagcgatccgcatgacaaagtgttgggaaacgagtatctgctgtggacattcacggccagcctgcagtcgctgctgggtgatcgggtcgcacttgccgatcagtatttctcgatggcgcatttctggacgctggcggtggaatggcatttctatctcgtcttcccgcttctcgtcgcccgttgccgctcatactttcgcccggccgtggcgctgctgctgatcgccgtcgccttcagggtgatatgccattttgccgggatttccgacaacggcatctatacattcacgctttgccggatcgactcgattgcggtaggttgcctgctggcactcgtgcctgcccgtcttggctcaaggcgctcggccgtggccggcatgctcggtgcggtgcttttcatatcgatctggattgccctcgcgctttcagatgtcccattcaagaccttggcctggcttcagacattgggttatacgcttctggccgtttcgatcgcgctgatgatctaccgcgtcattcattcctctgcgcactcggcaatcgtgcgcgcgctggaattcaggccgcttgcttcaatgggacgcgcgagttatagcctgtatatctggcacttgccgttttatccggccattgcgctggccgcgcaagatcgcttcacggatgtcaggcttgcctatctggtcgcaatgctgactggcgtcgtgatgacagcggcgctcggaggtctctcttatcggctcgtcgagtcccgcttcacccgggcgcgcccagcggtgcttgcc

SEQ ID NO: 12912 - DNA, 1512 bp, Burkholderia fungorum
atgttcggcgagaagtttcgggatcggcaaaagccgatggtgctcgtgctgggactgggtgaatccggtctcgctatggcgcgctggtgcgcgcggcacggctgtcggctgcgtgcggccgatacgcgcgaagtgccgccgaacctgtccgcgctcgaagcacacggcgtcgacgcacaattcgtcggcggcccgttttcgccggtgctgctcgaaggcgtggaactcgtcgccatcagtccgggtttgtcgccgcttgccgcggatctgttgccgctgatcgcggcggcgcgcgagcagggcatccccgtgtggggcgaactcgaatttttctcgcaagcgctgaagacgctcggcgaaagcggctatgcgccgaaagtgatcgcgatcaccggcacgaacggcaagaccacgactacgagcctgaccggcctgctgtgcgagcgcgccggcaggaaggtcgcggtggcgggcaatatcagcccggcgctgctcgacaagctctcggaagcgatcgacaacaccgcgttgccggacgtgtgggtgctggagctatcgagcttccagctcgaaaccgcgcacacgttttcgcctgacgcggcggtcgtgctgaacatcacccaggatcacctcgactggcacggcggactggacgcgtacgctgccgcgaagggccgcatctttggtacacaaacggtgcgcgtgctgaatcgcgacgactcgcgcgtgatgaagctcgcgccttccgaagacagcgaagccgggatggtcacgttcggcgtcaccgagccgaagaacgagggcgactacggcttgctgcgcgacaacggcatgatctggctggtcgaggcgcacgatcgcgacgcgagcgacgaacccgcgccgaagcgccgccgcaagaacgaagtggcgacgccgccgaacatcgcactgaagcgcctgatgccggcagacgccttgcgcattcggggtttgcacaacgccgccaatgcgctcgccgcctacgcgctcgcacgcgcgatcggcctgccgggcgcgtcgctgctgcacggtctgcgcgaatatcgcggcgagccgcatcgcgtggaattgatcgcgtcgatcgacggtatcgactatgtggacgacagcaagggcaccaatgtcggcgcgacggtcgccgcgctcgacggactcgcgcagcgtgtggtgctgatcgccggcggtgacggcaagggccaggatttcgaaccgctcgcggcgcccgtcatgcgctggtgccgcgctgtgatgctgatcggccgtgacgcgccgcagattcgcgccgcgctggaagacaccggtatcgcgatgacggaccacgccacgctcgaagaagcaacgcgcgccgcggccgcgctggcccagccgggcgacgccgtactgctgtcgccggcctgcgcgagcttcgacatgttcaagggttacgcgcaccgcgccgcggtgttccgcggcacggtggaagagatcgcagccgaacgggggacgatgata

SEQ ID NO: 12913 - DNA, 1278 bp, Burkholderia fungorum
atgagctggtcggaacgtttcggttcgcgtcaggctgcagccagcgacgcaggcggtttgggcggcgcgggccgggtcggcggccgcacgggcggcggcagcggtctcgcgagcgccgtcaacggcgtgcgtccgctgcgctcgcgcatgctggactacgatcactcgctgctgtgggtagtggtcgcgctgctcggactcggcgtggtgatggtgtattcggcgtcgatcgcgatgcccgattcgccgaaatacgcgtcgtatcgcgactacgccttcctcgtgcgccagatcattttcgtggtgatgggctcggtaatcggcgtcgtgtcgttccgcattccgatcgccacgtgggacaagtacgcgccaaagctgtttctgatttcgctggccgcgctggtgatcgtgctgatcccgcacgtcggcaagggcgtgaacggcgcgcgccgctggattccgctcggcatcacgaacatgcagccgtcggaaatcatgaagctcgcggtaacgatttacgccgcgaactacacggtgcgcaagcaggaatacatgcacagcttcgccaaaggctttttgccgatggcagtcgccgtggggctcgtcggcgcgttgctgctgctcgaaccggacatgggcgcgttcatggtgatcgcggcgatcgcaatgggcgtgctgtttctcggcggcgtgaacggcaagctgttcggcggcctcgtcgccaccgcggtcggcacgttcagtttgctggtgtgggcgtcgccgtggcgtcgcgagcggattttcgcgtacctcgatccgtgggacgaccgttacgcccagggcaaggcctatcaattgacgcactcgctgatcgcgttcggccgcggcgagtggttcggcgtgggactcggcggcagcgtcgagaagctcaactatctgccggaagcgcataccgacttcatcctcgcggtgatcggcgaggagctgggttttgtcggcgtgctggtcgtgatcctgatgttctactggatcgtgcgccgctcgttcgagatcggccgccaggcgctcgcactcgaccgcacgttcgcgggtctggtcgcgaagggcgtcggcatctggttcggcgcgcagaccttcatcaacatgggcgtgaacctcggtttgctgccgaccaaaggtcttacgttgccgctcgtcagttacggcggctcgggcattttgctgaactgcgtcgcggtggctgtgctgatgcgcgtcgactatgagaaccgggtgctcatgcgcggagggaaagta

SEQ ID NO: 12914 - DNA, 1116 bp, Burkholderia fungorum
atgaccgctctgccgcaacgcacgctgatggtgatggccggtggcaccgggggacacgtgttcccggggctcgcggtcgctcatctgatgcaggcgtggggctggaaggtcgtatggctcggcaatcccgcgggcatggaagcgacgctggtgccgaagcacggcatcccgatggaatacgtgcgctttggcggcctgcgcggcaagggcctgaaaaccaagctgatgctgccgctgaatctgctgcgtgcctgcacgcaaagcctcagcgtgctgcgccgcgtgaagccggatgtggtgctcggcatgggcggctacatcacgtttccggccggtttgatgaccgcgttgagcggccgtccgctggtgctgcatgaacagaattcgattgccggtctggcgaacaaggtgctcgcgaaagtcgctaaacgcgtgctggttgcattcccgaatgcactgccgcacggcgaatggacaggaaatccgattcgtgcggaacttgcgggcgcaattgcacccaaagcacgctacgcgcagcgcagcggtccgttgaatgtgctggtggtgggcggcagtctgggcgcggcggcattgaatgaagtcgtgccgcgcgcggtggctttgctggcgccgaacgaacggccgcgcatcgtgcatcaggcgggcgcgaagcacattgaagcgctgcgcgagaactacgcggcagcgggtttgcaagcgggcgccgacgtcgaactcgtgccgttcatcgacgacatgacgagcgcctacgcgaacgcggacctggtgatctgccggtccggcgcgatgacggtgtccgagatttcggcagtgggcgtggcggcgcttttcgtgccgttcccgtatgcagtagacgatcatcaaaccactaatgcagcgttcctcgccgacaacggcgcggcgctggtcgtgcagcaacgcgacctgtcggcggaaaccctcgctgactggttgcgcagccagacgcgggagaccctcgcggagatggcggagcgttcgcgctcgctcgcgaaacccgacgccacggaacaggtcgcgcagatttgcgcgaccgtggcgggttcgatttcgggcgcgagcccagaaggaaagcaa

SEQ ID NO: 12915 - DNA, 636 bp, Burkholderia fungorum
atgtttctggacgagttgattagcgagtttgatcggggtttacgctcaatgactggcgtgtcgcgaatgagccgtccgttgccggtgccgcaagaatcagcggtgacggaagcggcgcccgaactctcaccggcggagcgtgcgcattcggctggattgatgcgcgtgaaccatgtcggcgaggtgtgcgcccaggcgctctaccaggctcagaaactcgcgaccaggtcgccttcgttgcgcgccgtgttcaatcacgcggcaatcgaggaggaagatcacctcgcatggactgcgaagcgtctggaagcgctcgactcgcgtcccagtctgttgaacccgctctggtacaccggcgcgctggcaatcggcctggcagcggggcgcatgggcgaccgtgtcagcctgggcttcatggctgaaaccgagcgccaggtggagcagcatctggatagtcatctggagcagttgccggaagccgaccgcgagtcgcgcgcgatcgtcgagcagatgcgggtggacgaggtggaacatggcaaggccgcaatggaagccggcgggatcgaattgccgttccccgtgcgcggactgatgcgcgccgtgtcgaaagtcatgacccgtaccgcttattacatt

SEQ ID NO: 12916 - DNA, 426 bp, Burkholderia fungorum
gtgttccaaggggcgtcggcgctgacgctcgatgcgaaagggcggatgtctattccctctcggtatcgggatgcgctgcaaacacaggcagagggccgggtgacgatcaccaggcacccggacggctgcctgttgctctttccgcgcccggagtgggaaatctttcgcgacaaggtcgacaagctgcccatgaacgcgacctggtggaaacgcatttttctcggcaacgcaatggacgtggatatggacggcgcggggcgcgtgctcgtgtcgccggaattgcgcacggccggcgggctggcaaaagaagtgaccttgctcggcatgggccgtcacttcgagttgtgggatgcacagacatacaccgcgaaggaacaggcggcaatggcagagggcatgcccgatgccttgaaagatttcacgttc

SEQ ID NO: 12917 - DNA, 951 bp, Burkholderia fungorum
atggcacctgcgatgggaaatgaattgcagcatcgcacggtgctgctggaagaagcggttcaggcgctggtcacgcgcgcggacggcgtgtatgtggacggcacgttcgggcgcggtggtcatagccggctggtgttggagaagttgggtgagtcggggcgtctgatcgctttcgacaaagacccgctcgccatcgccacggctcagcaaatcacggatccgcgctttggcatcgtgcacgagagttttgcttcactgcgcaccgcaatggcggagcgcggcgtagggcgggtgtcgggcgttttattggatctgggcgtatcgtcgccgcaagtcgacgatccggagcggggcttcagctttcgcgccgacggcccgctcgacatgcggatggacccgacgcgcggcgaatcggcggctgactggctggcgcgggccacggtgcaggaattgacggaggtgatacgagattatggggaagaacggtttgcttttcagattgcaaaggcgcttgttgctcgccgggcagagtccgaccgtcttgggcctctcgtcagcacgggcgagcttgcccaaatcgtggctaacgtcgtcaagacccgtgagaagggcaaggatccggcaacccgcacctttcaagctatacggattcacatcaatcaagagcttgcggagctgcaagtcgttttagaagcggcgttgtcgctgttggagcaaggggggcggctggtggtcatcagctttcattcgctcgaagaccggatcgtcaagcgattcatgcaggcgcacgcgagtacgccggcggtggaccgccgtctgccgattcgcgcagtcgatctgccgagccctccgctcaagatcatcggccgcgtgttcgcgagcgacgctgaagtcgccgcgaacccgcgcgcccgttctgccgtgatgcgcgtggcggagcggatcgcacca

SEQ ID NO: 12918 - DNA, 1863 bp, Burkholderia fungorum
atgaaaaaatcgtcggctcgcaagagcgtggctttctcggccaacccgatcctgtcggtgcgcctgccaatgtggcgctccaagctcgtcgtgttcatgcttttcatggcgttcgtcgcgctcaccgcgcgcgccttctggattcagggcccgggcaacgcgttctatcagaagcagggtgaaatccgctatcagcgccgcctcgaactgccggctacgcgcggcaagattctcgaccgcaacggtctcgtgctggccacgagtctgccggtgcgcgcgatctgggcgattcccgaatcggtgccggacgacctcggcgccgacaagctgacttcgctcggcaagctgctcggcatgacgaacaaggaactgcgcaccaagttgtcggaagacaaaaacttcgtctacgtgaaacgccaggtgccggtggacattgcggaaaaagtcaccgcgctggagattcccggcatttactcgcgcgacgagtacaagcgcttctatccggaaggcgagatcacggcccacctgatcggctttaccaacgtggaagacgaaggccaggaaggcgtcgaactcggcgaccagaagctgctcgccggcgtgtcgggcagccgccgcgtgatcaaggaccgcatgggccacatcatcgaggacgtggacgagcaggtcgtgccgcacaacggccaggacgtggatctctcgatcgacagcaagattcagtacatcgcttatacgaacctgaaggcggccgtcgaaaaattcaaggcgaaggccggcgcggcaatggtgatcgacgtgcgcaccggcgaagtactggcgctcgtcaattaccccacgtacaacccgaacgaccgcactcacctgaccggcgaccagttgcgcaaccgcatcctgaccgacacgttcgaacccggctcgatcatgaagccgttcacggtctcgctcgcgctcgatctgcaccgtgtcacgccgactacactggttgatacaggcggcggccgtttcgtgctcgacggcgcgccgattaccgacgacagcgcgttcggcgtgctgaccgtgggcggcgtgatccagaagtcgagcaacatcggcgcgacgaagatcgccatgcagctcaagcccgaagagatgtggaacatgtacaccagcatcggtctcggccaggcgccgaaggtcggcttcccgggcgcggcggctggccgtctgcgtccgtggaagagctggcgccgcatcgagcaggccaccatgtcgtacggctatggtctgtcggtgtcgctgttccagttgggccgcgcttacaccgcgatcgcgcatgacggcgagatcatgccggtgtcgatcttccgcacgcctggcgatcagccggccaccggcccgcagatcttcgcgcccactaccgctcgcgaagtgcgcgccatgctcgaaaccgtcacggcgccgggcggcacctcgccggatgcggcggtgccgggctatcgcgtcggcggcaagagcggcacggcgtacaagcacggcgcgcacggctacgaccactccaaatatcgcgcgtcgttcgtcggcatggcgcccatgccgaatccgcgcatcgtcgtggccgtttcggtcgacgaaccgaccgcgggcagccacttcggtggtcaggtgtcgggcccggtgttctccagcatcgtcggcgatacgctgcgctcgctgaacgtgccgccggacatgccggtcaagcagatggtggtgtcagacgactcggccccgccggcgccgaccgcgcccgccacgcctgccacggtcaagaaactctccaccagcgccggcgcgaagaagatgacgattgccgcgaacgcgagaagccatccgggagtcgtgcga

SEQ ID NO: 12919 - DNA, 1554 bp, Burkholderia fungorum
atgagtgcgctgcgtcagaagcatcccgcgcagcggcagatcgccgacgccctcacctggctgcacgctcacgtgcagccaggtgcgcatctgcacgccgacacgcgctcgctcgcggcgggcgacgcgtttttcgcctacgcggtggacggcgcggacaaccgcccgttcatcgagggtgcgatcgagcgtggcgccgccgccgtgctggttcagcccgagggcttcagcggcgcgatcaatccgtcgaacatgctcgccgtgccggcgttgaacgaactcgcgggttcgatcgcgagcggctggtacaacgacccgagcgacagcatgctcacggtcggcattaccggcacgaacggcaagacttcgtgcagccagtggatctcggcggcgctgacggcgctcggcacgcgttgcgcgatcatcggcacgctcggcacgggtttgccgggtcacctggtgcacacgggtttcaccacccccgacgcgccgcaactgcaacgcagccttgcgcaattgcgcgacgcgggtgcgcaggcggtagcgatggaagtgtcgtcgcatgcgctgcaccagggccgcgtgaacggcacggcgttcgacatcgccgtattcacgaatctcacgcaggaccatctcgactatcaccagacattcgaagcctacgaagccgccaaagcgcgcctcttcgcctggccggaactgcgtgcggcggtgatcaatcgcgacgatgcggccggccgccgtttgctcgcgagcacgcaaggccacgcgcgcacgatcgcgtacgggctcgacagcgggcaaggcgcgctgcaggacgcaccgcaagccgacgcgttgctgctcgcctcgaatgtgcgcgccacggccaccggtaccgcgttccatctgagcacctcggactggggcgatgccgaagtcgaagtgcaaacgctcggcgcgttcaacgtgagcaatctgctcggcgtgctgggggcattgctcgccgccgacgtgccgttcgaagccgcgctggccgaactggcgcagctcgaaccggtgaacggccgcatgcagcgtctgggcggccgcttgcagaacgacgaaccgctcgtcgtgatcgattacgcgcacacgccggatgcgctggaaaaaacactcgaagcgctgcgcccgatggtaaccgcgcgcggcggcgaactgatctgcatgttcggctgcggcggcgaccgcgacgccaccaagcgtccgctgatgggcgcgattgccgagaagatcgccgacggcgtggtggtgaccagcgacaacccgcgcagcgaagatccgcaatcgatcatcgagcagatcgcggcgggtatgaaagacgcgtcgaaggcgcgccgtatcgaggaccgcgcaagtgcgatcctgcaggcgatccgcagcgccgcgcgcgaagacgtcatcgtgctggccggcaaggggcatgaagcaacacaggaaatcatgggtaagaaacgcgctttctccgatcaggatcacgcgcgcctcgcgctggccgcacgcgcgacgcacgcacgcggaggtggcgaa

SEQ ID NO: 12920 - DNA, 1410 bp, Burkholderia fungorum
atgagcatgttctcgctgcgtgaagccgcggcgctgatcccgggcgcaaccgtgctcggcgacgacagcgtcactattgaacgcatctcgaccgacagccgcagcgccggcccgggcgatctgtttgtcgcgatcaagggcgaccggttcgacgcgcacgactttctgccggacgtggccgtgcgcaacgtgagcgctgttctggttacgcgcacgccgcaagactggaacgtaccggcgctcaaagtcgccgacacgcgcgtcggcctgggtgcgctcgcacgcggctggcgccgccggttcagcatgccgctcgtcgccgtgacgggcagcaacggcaagaccacggtcaaggaaatgatcgcgtcgatcttcgcggctgcggtcggcgccgacgcacgtctcgccactgcgggcaacttcaacaacgacatcggcttgccgctcacgttgttccggctgcacgcggcgcaccaactggcggtggtcgaactcggcatgaaccatccgggcgaaacctccgagctcgcgaaaatcgccgagccgacggttgccgtcgtgaacaacgcacagcgtgagcaccaggaattcatggcgacggtcgaggctgtcgcgctggaacacgcgagcgtgattcatgcgctgtcgcccgaaggcgtcgcggtgttccccgccgacgacgcttacgcgagcatctggcgcgtggccgcaaccggcaaccgcatcatggacttcgcgctgaactccgcggagcgcaccactgaagctgcagtaaaaggcacgttcgctggcaacgtcctgagcatcgacacgccggcaggccggctcgaagtcacgctgcaggtgctcggcgaccacaacgcgcacaacgcactggccgcaacgtccgccgctttggccgcgggcgtttcgctcgacgcgatcaggcgcggtctcgaatcgttcggcgccgtaaagggccgcttgcaggtgaagcaaggcgtcctcggctcgctcgccggtgcaaccgtgatcgacgacacctacaacgccaatcccgattcgatgcgcgccgcaatcgacgtgctcgcctcgcgccccgcaccccgcgtgctggtgatgggcgacatgggcgaagtcggcgacaacggtccggcgttccaccgcgaaatcggcgcatacgccagggaccgcggtatcgacgcgctatacgcaatgggtgacgcctcgcgcgacgcctgcaccgcgtatggcgcgaacgcgcaccacgtcgccgacatcggcacgctggtcgcgcaattgcagcaggccggtttcggacctgccgcaacgcttctcgtgaaaggctcgcgcttcatgcagatggagcgcgtggtggacgccgttacgagtccacaacccaacgcagcgggcagcacgcccgccgcacat

SEQ ID NO: 12921 - DNA, 1167 bp, Burkholderia fungorum
atgctactggcgctggcgcaatggctgcagaatgacgcaagcttcttgcgcgtgttcagttatctgactttccgtgcggtgatggctaccatcaccgcgctgctgatcgggctcgtctgcggcccggcggtgattcgcaagctgaccgccatgaaagtcggtcaggccgtccgtaaagacggcccgcagacacacctcgtcaaatccggcacgccgactatgggcggcgtgctgattctgctcggcatcgccgtggctacgttgctgtgggccgatctgacgaatcgcttcatctggatcgtaatgctcgtcacctttggtttcggcgtgatcggctgggtcgatgattaccgcaaggtggtctacaaggatccgcgcggcatgtcgtcgcgcgaaaagtacttctggcagtcggtgatcggcctgttcgccgccgtgtacctcgcgttcagtgtgtccgaggcgagcaatgtgcgcgtgtatgacctgttcatggcgtgggtgcgcagcggcctctcgatgggcctgcctccccatgccgacctgatgctgccgttcgtcaaatcgatcagctatccgctcggcgtgtggggcttcatcgtgctgacgtatctggtgatcgtcggtgcgagcaacgcggtcaacctcaccgacggtctcgatggtctcgtgatcatgccggtggtgctggtcggcgcgtcgctcggtgtgttcgcctacgtgatgggtagctcggtctattcgaaatacctgctgtttccgcatatcgccggggcgggcgaactgctgattttctgctcggcaatgggcggggcagggctcgcgttcctctggttcaacacgcacccggcgcagatgttcatgggcgacgtcggcgcgctcgcgctcggcggcgcgctcggcacggtcgcggtgatcgtgcgccaggaaatcgtgctcttcatcatgggcggcattttcgtcgcggagacgctctccgtgatgttgcaggtcacctggttcaaattcaccaaacgccggttcggcgaagggcggcgtctcttcaagatggcgccgctgcatcaccacttcgagttgtccggttggaaggaaacgcaggtggtcgtgcgtttctggatcatcacgttgatgttgtgtctctttggtttgtccacgctcaaactgcgt

SEQ ID NO: 12922 - DNA, 3309 bp, Burkholderia fungorum
atgaacctgtcgcgtccgtttatctcccgtccggtcgccaccacgctgctcgcggtcggcattgcgctggccggcattttcgcgttcacgaagctgccggtggcgccgctgccgcaggtcgatttcccgaccatttcagtgcaggccacgttgccgggcgcgagtccggacaccgtggcgaccagcgtcgccagtccgctcgaacggcatctcggctcgatcgccgacgtcaccgaaatgacctcgatgagctcggtcggctcgacgcgcatcaccatgcagttcggcctgaaccgcgacatcgacggcgccgcgcgcgacgtgcaggccgccatcaacgcggcgcgcgccgatctgccggcgagcctgcgcagcaacccgacgtaccacaaggtcaatccggccgacgcgccgatcctgatcctcgcgctcacgtcgaaaacgctcaccgccggccagttgtacgactccgcggccaccgtgctgcaacagtcgctctcgcaggtggacggcgtcggcgaagtggacgtgagcggctcggccaatcccgccgtgcgcgtcgaactggaaccgaacgcgctctcgcactacggtattggcctcgaagacgtgcgcgcggcgctcgccgccgccaacgcgaacagcccgaaaggctcgatcgaattcggcccgaaccgcgtgcagatctacaccaacgaccaggccagcaaggcgtcgcaatacaaggacctggtcatcgcctatcgcaacggcgcggcggtgaagctctcggacgtggcggaggtggtcgattcggtcgaagatctgcgcaacctcgggctcttcaacggcaagcgttcggtgctggtgatcctgtatcgccagccgggcgcgaacatcatcgacaccatcgaccgggtgacggcaatgctgccgcaactgcacgcgtcgctgcccgcggacgtcgagatcgcgccggccgccgaccgctccaccacgatccgcgcgtcgctgaaagacaccgagcgcaccctcgtgatcgcggtggcgctggtggtgatggtggtgttcctgttcctgcgcaactggcgcgccacgctgattccgagcgtggccgtgccgatctcgatcatcggcacgttcggcgcgatgtacatgctcggcttctcgatcgacaacctctcgctgatggccttgaccatcgcgaccggcttcgtggtggacgacgcgatcgtggtgctggagaacatctcacggcatatcgagaacggcgtgccgcgcatgaaggcggcctttctcggcgcgcgcgaagtcggctttacggtgctgtcgatcagtatttcgctggtcgccgtgttcctgccgatcctgctgatgggcggcattgtcgggcgcctgttccgcgaattcgcgctgacgctttcgctcgcgatcggcgtgtcgctgatcgtctccctcacgctcacgccgatgatgtgctcgcgcctcctgcgcgagccgcacgagcagaaggaagaaggccggttcggccgctggctggaacgcggcttcgcgtcgatgcagcgcggctatgaacgcacgctcggctgggcgctgctgcatccgcgcctgatcgtgacgatcctgctgctgaccatcggcctgaacgtctggctgtacatcatcgtgccgaagggtttctttccgcagcaggacaccgggcggctgatcggcggcattcaggccgatcagagcacctcgttccaggccatgaaaggcaagttcgcgcagatgatggagattgtcggcaagaatccggcggtggatagcgtggccggcttcacgggcgggcggcagaccaactccggcttcatgttcgtgacgctgaaaccgaaatccgagcgcaagctttccgccgatcaggtgatccagcaactgcgcgcgccgctcggcgacgtggccggcgcgcggaccttcctgcaggcggtgcaggatattcgggtcggcggacggcaatcgaacgcgcagtaccagttcacgctgctcgccgattccacgcccgacctgtacctgtgggggccgaagctcaccgaggcgctgcaggcgcgccccgaactcgccgacgtgaactccgaccagcagcaaggcggcctcgaagcgatggtgacgatcgaccgcgccaccgccgcgcgcctcggcatcaagccggcgcagatcgacaacaccttgtacgacgcgttcggccagcgccaggtatcgacgatctacaacccgctgaaccagtatcacgtcgtgatggaagtcgcgccgaagtactggcagagcccggatatgctcaagcagatctatatcagcacctcgggcggcagcgcgagcggcgcgcagaccaccaatgcaccggcgggcacggtgacggcggcggcgaacaccacctcgaccagcgcgacgacgggcggcacggcgggcacgaccgcatcgagtgcggcgagcatcgccgccgactccgcgcgcaaccaggcgatcaactcgatcgcggcgagcggcaagtcaagcgcttcgtcgggcgcggcggtgtcgaccgcgaaggaaacgatggtgccgctgtcggcgatcgcgagcttcgggccgggcagcacgccgctctccgtgaaccaccagagccagttcgtggcctcgacgatttcgttcaacctgccgccgggcgtgtcgctttccaccgcaacccaggcaatctacgacacgatggcgcagatcggcatgccgggcaccatccacggcagcttccagggcacggcgcaggcgttccagcagtccatgtccgatcagccgatcctgattctggccgcgctggccgccgtgtatatcgtgctcggcatgctgtacgagagctacatccatccgctgacgattctgtccacgctgccttcagcgggcgtgggagcgctgctggcgctgctgctcttcaagactgagttcagcatcatcgcgctgatcggcgtgattctgctgatcggcatcgtgaagaagaacgcgatcatgatggtggacttcgcgatcgaagcctcgcggcacggactgtcttcgcgcgacgcgatttttcaggcgtgtctgctgcgtttccggccgatcatgatgaccacctgtgccgcgctgctcggcgcgttgccgctcgcgttcgggcgcggcgaaggcgccgagcttcgcgcgccgctcgggatcgcgattgtcggcggcctgatcgtcagccagatgctcacgctctatacgacgccggtggtatatctctacatggaccggatccgcgtgaggtgggaatcgcgcaggacacggcgcacggggattgctccttcc

SEQ ID NO: 12923 - DNA, 4748 bp, Burkholderia fungorum
acggacgacgaaatcgtcgaactggcgaagaacctgcgcgaaggcgtgccgttcgctacgccggtgttcgacggcgcgacggaagaggaaatgtcgcgcgcgctggatctcgcattcccggacgacatcgcgaagaacctcggcatgacgccgtcgaagaaccaggtgcgtctgtacgacggccgcacgggcgaaatgttcgaacgtacggtgacggtcggctacatgcactacctgaaactgcaccacctggtcgacgacaagatgcacgcgcgttccacgggcccgtactcgctcgtgacgcagcagccgttgggcggtaaggcgcaattcggtggccagcgtttcggtgaaatggaagtgtgggcgctcgaagcgtacggcgcatcgtacgtgctgcaggaaatgctgacggtgaagtcggacgacgtgacaggccggaccaaggtttatgaaaacctggtcaagggcgatcacgtgatcgacgccggcatgccggaatccttcaacgtgttggtgaaggaaatccgctcgctcggtatcgatatcgacctcgaccgcaactaatcggactacggagagaaagcaatgaaagctctgctcgatctattcaagcaagtccaacagcctgaagtttttgacgcgatcaagatcggtctggcttcgccggacaagatccgttcgtggtcgttcggtgaagtgaagaagccggaaaccatcaactaccggacgttcaagccggaacgcgatggtttgttctgcgcgaagatcttcgggccgatcaaagactacgaatgtctttgcggtaagtacaagcgcctgaagcatcgtggcgtgatctgcgagaagtgcggcgtcgaagtgacgctggcgaaagtgcgtcgcgaacgcatgggccacatcgaactggcctcgccggttgcgcacatctggtttttgaagtcgctgccgtcgcgtctgggcatggtgctcgacatgacgctgcgcgatatcgaacgcgtgctgtatttcgaagcatacgtggtgatcgatccgggcatgacgccgctgaaagcgcggcagatcatgacggaagaggattactacaacaaggtcgaagaatacggtgacgaattccgtgccgagatgggcgcggaaggcgtgcgcgagctgctgcgcgcgatcaacatcgacgaacaggtcgagatgctgcgcaccgaactcaagaacacgggttcggaagcgaagatcaagaagtacgcgaagcgcctgaaggtgctcgaggctttccagcgttcgggcatcaagcctgactggatggtgctcgaagtgctgccggtgctgccgccggaactgcgtccgctggtgccgctcgacggcggccgcttcgcgacgtcggacctgaacgacctgtatcgccgcgtgatcaaccgtaacaaccggttgaagcgtctgctcgaactgaaggcgcctgaaatcatcgtccgcaacgaaaagcggatgctgcaggaagccgtcgattcgctgctcgacaacggtcgccgcggtaaggccatgaccggcgcgaacaagcgtccgctgaagtcgctcgctgacatgatcaagggtaagggcggtcgtttccgtcagaacctgcttggtaagcgcgtcgactattcgggccgttcggtgatcgtggtcggcccgacgctcaagctgcatcagtgcggtctgccgaagctgatggcgctcgaactgttcaagccgttcatcttcaacaagctcgaagtgatgggtgtcgctaccaccatcaaggccgcgaagaaggaagtcgagaaccagacgccggtggtgtgggacattctcgaagaagtcattcgtgaacatccggtcatgctgaaccgtgcgcctacgcttcaccgtctcggcattcaggctttcgagccggtgctgatcgaaggtaaggctatccagttgcatccgctcgtttgcgcggcgttcaacgccgacttcgacggtgaccagatggctgttcacgtgccgctgtcgctggaagcgcagatggaagcgcgtacgttgatgctggcgtcgaacaacattctgttcccggccaacggcgatccgtcgatcgtgccgtcgcaggatatcgtgctcggtctgtactacgcgacccgtgaagcagtgaacgccaagggcgaaggtctgacgttcaccggcgtttcggaagcgttgcgtgcgtacgagaacaaggaagtcgagctggcctcgcgcgtcaacgtgcggatcacggaaatggtccataacgaagacaagtcggacggtgcgccggcgttcgtgccgaagatctcgctgtacgcgaccaccgtcggccgcgcaatcctgtcggaaatccttccgccgggcctgccgttttcggtgctcaacaagccgctgaagaagaaggaaatctcgcgcctcatcaacaccgcattccgcaagtgcggtctgcgtgaaacggtgattttcgccgaccagttgatgcagtcgggtttccgtctggcaacgcgcgctggtatctcgatctgcgtcgacgacatgctcgtgccgccgcagaaggaaaccatcgttggcgacgccgcgaagaaggtgaaggaatacgaccgtcagtacatgtcgggtctcgtcacgtcgcaagagcgctacaacaacgtggtcgacatctggtcggcaacgtcggaagcggtcggcaaggcgatgatggaacagttgtcgacggaaccggtcacggatcgcgacggcaacgaaacgcgtcaggaatcgttcaactcgatttacatgatggcggactcgggtgctcgtggttccgcggttcagattcgtcagctggccggtatgcgtggcctgatggcgaagccggacggctcgatcatcgagacgccgattacggcgaacttccgtgaaggcctgaacgtgttgcagtacttcatctcgacccacggcgcacgtaagggtctggctgatacggcactgaagacggcgaactcgggttacctgacgcgtcgtctcgtggacgtgacgcaggatctggtggtggtcgaggacgattgcggtacgtccaacggcgttgccatgaaggcgttggtcgaaggcggtgaagtcgtcgaagcgctgcgtgaccgtattctcggtcgcgtgacggtggctgacgtcgtcaatccggaatcgcaggaaaccctgtacgaaacgggcacgttgctcgacgaagatgcggtcgaagaaatcgaacgcctcggcatcgacgaagtgcgcgtgcgtacgccgctgacttgcgagacgcgttacggtctgtgcgcagcctgctacggccgcgacctgggccgcggctcgtcggtcaacgtcggtgaagcagtcggcgtgatcgctgctcagtcgatcggtgaaccgggcacgcagcttacgatgcgtacgttccacatcggtggtgcggcatcgcgtgcggcagtggcttcgtcggttgaagcgaagtcgaacggtacggtgcgtttcaccgcaaccatgcgttacgtcaccaacgcgaagggcgagcagatcgtcatctcgcgttcgggcgaagcgatgatcaccgacgaccacggtcgcgagcgcgaacgtcacaaggtgccgtacggcgcgacgctgttgcaactggacggcgcgcagatcaaggccggcacgcaactggccacgtgggacccgatgacgcgtccgatcatcaccgagtacggtggtacggtgaagttcgaaaacgtcgaagaaggcgtgacggttgccaagcagatcgacgacgtgacgggtctgtccacgctggtcgtgatcgacgtgaagcgtcgtggttcgcaagcgtcgaagacggtgcgtccgcaggtcaagctgctcgatgcgaacggcgaagaagtcaagatcccgaacaccgagcactcggtgcagatcggcttccaggtcggcgctctgatcaccgtgaaggatggtcagcaagtgcaggtcggtgaagtgctcgcacggatcccgactgaatcgcagaagacgcgtgacattaccggcggtctgccgcgtgtggcggaactgttcgaagcacgttcgccgaaggacgcaggtatcctggcggaagtcacgggtacgacgtcgttcggtaaggacacgaagggcaagcagcgtctcgttatcacggacctcgagggcaaccagcacgagttcctgatcgcgaaggaaaagcaggttctggtgcacgatggtcaggtcgtcaacaagggcgaaatgatcgtcgacgggccggcggatccgcacgacattctgcgtttgcagggcgtcgaagcgctgtcgcgttacatcgtggacgaagtgcaggacgtgtaccgtctgcaaggcgtgaagatcaacgacaagcacattgaagtgattgttcgtcagatgctgcgccgcgtgcagattacggacaacggcgatacgcgtttcatcccgggcgaacaggtcgagcggtcggatatgctcgacgagaacgaccgtatgatcgcggaagacaagcgtccggcaacgtacgaaaacgtgctgctcggtatcacgaaggcctcgttgtcgaccgattcgttcatctcggcggcgtcgttccaggaaacgacgcgcgtgctgaccgaagcggcgatcatgggcaagcgcgacgacctgcgtggtctgaaggaaaacgtgatcgtcggccgtctgattccggccggtacgggtctcgcgttccacaaggcacgcaagagcaaggaactgtccgaccgcgagcgtttcga

SEQ ID NO: 12924 - DNA, 1845 bp, Burkholderia fungorum
atgtcccgtccgctcgaaatcctcaacgaagtcttcggttaccccgcgttcagaggacagcagggcgaaattgtcgagcacgtcgccggcggcggcgattgtctcgtgctgatgccgacgggcggcggcaaatccttgtgttatcagattccgtcgctggtgcgccgcgagcgcggcttcggcacaggcatcgtcgtgtctccgctgatcgcgctgatgcaggatcaggtggccgcgcttacagaggtgggcgtgcgcgcggcgtacctgaattcgacgctgtcgagcgccgaggcgatggcgaccgagcgtgcattgcgcgaaggcgatatcgatctcctctacgtggcgccggaacggttgatgacgccccgtttccaggaattgctggaacgtacccgcatcggcttgttcgccatcgacgaggctcattgtgtgtcgcaatggggacatgatttccggccggaatacatccagttgtcggtgctgcacgagcggtttccgaacgtgcctcgaatcgcgctgacggccaccgccgatgcaatcacgcgggacgagatcatccaccggctcgcgctggacgacgcgcgcattttcgtgtcgagcttcgaccggccgaacatccgctatcgcatcgttgaaaaggacaacgcgcgtacgcagttgctggactttatccgcgcggaacattcgaagccggacggcacgaccgacgccggcgttgtctattgcctgtcgcgccgcaaggtcgaagagaccgcggagtggctgaaagaaaaagggatgcgtgcgctgccgtatcacgccggcatggacttcgagatccgtcagaagcatcaggagatgtttcagcgcgaggaaggcatcgtgatgtgcgcgacgattgcatttggcatgggcatcgacaagccggacgtgcgttttgtcgctcacctcgacttgccgaagagcgtcgaaggctattaccaggaaacggggcgcgcgggccgcgacggcatgccggcgaatgcgtggatggcctacggcctcggcgacgtcgtgcagcaacgcaagatgatcgacgagtccgacgccgacgacgcgcacaagcgcgtgcagaccggcaagctggacgcgctgctcggtctgtgcgaagcggcaacctgccggcgggtgcggttgctggcgtatttcggcgaatcgagcaagccatgtggcaactgcgacaactgtcttgaaccgccggacacgtgggatgctacgcgtgaggcgcagatggcgctgtcgtgcgtgttccgcgcgcagcgggcgagcggttttcatttcggcgcgggacatctgatcgacatcctgcgcggcaacagcaacgagaaaatcctgcagcgtggtcatgagaaactgaccacgttcggtatcggttcggcgctaggcgaacccgagtggcgcgcgatatttcgccaactcgtcgcgttcggctatctgacggtcgatcatgaggggttcggctcgctggtcctgaccgagacgagcaaacccgtgctaaagggcgagcagaacgtcacgatgcgccggtacgtgaagccgacgcgtacacgtcaatcgtccggccgcaccagtgaacgcgccgacccgacaatcggcatgggaccacgtgaacgcgcccgctgggaacgcctgcgtgcgtggcgcaccgaaacggcgaagagcgacggcgtgccggcgtatgtgatcttccacgacgcgacgctggcggaaatcgcccgtaacggtcccgattccatcgaagatttgcgtggcattccgggcatgggcgcacgcaagctcgaccgcttcggcgacgaattgctggaagtcgtcgccgccgac

SEQ ID NO: 12925 - DNA, 378 bp, Burkholderia fungorum
atgccaaccatcaatcaactggttcgcaaaggccgcgcgtcggaaacgacgaagagcaagagcccggctttgcaggactgcccccagcgtcgcggcgtgtgcacccgtgtgtacaccacgacgccgaagaagcctaactcggcactgcgtaaggttgccaaggttcgtctgacgaacggcttcgaagtgatttcttacatcggtggtgaaggccacaatctgcaggaacactcggtcgtgctgattcgcggcggtcgtgtcaaggacttgccgggtgtgcgttaccacatggttcgtggctcgctggatacccagggcgtcaaggatcgtaagcaggctcgctcgaagtacggtgcgaagcgtgcaaaagctggtaaa

SEQ ID NO: 12926 - DNA, 468 bp, Burkholderia fungorum
atgccgcgtcgtcgcgaagtccccaagcgggaagtgttgccggatccgaaattcggtaacgttgatgtagctaagttcatgaacgtgctgatgctctcgggcaagaagtcggttgccgagcgtatcgtgtacggcgctttcgaacagatccagaccaagggtggcaaggacccgctggaagtgtttacggtagcgctcaacaacgtcaagccggtggtcgaagtgaagagccgccgcgttggtggtgcgaactatcaggttccggtcgaagtgcgcccgtcgcgtcgtatggcattggcgatgcgttggctgcgtgaggccgcgaagaagcgcagcgagaagtcgatggccctgcgtctggcaggtgaactctccgaagcggccgaaggccgtggcggcgcaatgaagaagcgcgacgaagttcaccggatggcagaagccaacaaggcgttctcgcacttccgtttc

SEQ ID NO: 12927 - DNA, 2100 bp, Burkholderia fungorum
gtggctcgcaagacacctatcgagcgctaccgtaacatcggtattagcgctcacatcgacgccggcaaaacgacgacgaccgagcgcatcctgttctacaccggcgtgaaccacaagattggtgaagttcacgacggcgctgccaccatggactggatggagcaggagcaggaacgcggtatcacgatcacgtccgctgctaccacggcgttctggaaaggcatggccggcgaccgcgctgagcaccgcatcaacatcatcgacaccccgggtcacgtcgacttcacgattgaagttgagcgctcgatgcgcgtgctcgacggcgcgtgcatggtgtactgcgctgtgggcggcgttcagccccagtcggaaaccgtgtggcgtcaggctaacaagtacaaggttccccgtctcgcgttcatcaacaagatggaccgtaccggcgcgaacttcttcaaggtttacgaccagctcaagctgcgtctgaaggcgaacccggttccggtcgtggtgcctatcggcgcggaagaaaacttcacgggcgtcgtcgatctgctgaagatgaaggcgatcatttgggacgaagcgtcccaaggcacgaagttctcgtacgaagaaattccggctgaactggtcgactcgtgcaacgagtggcgcgaaaagatggtcgaagcggctgctgagtcgagcgaagacctgatgaacaagtacctcgaagagggcgaactgacggaagcggaaatcgtcaagggtctgcgcgaccgtacgattgcttgcgaaatccagcccatgctgtgcggtaccgcgttcaagaacaagggcgtgcaacgcatgctggacgccgtgctcgacttcctgccgtcgccgatcgacatcccgccggttaccggcgagctggaaaacggtgaaaagggcgagcgccgcgctgccgacgacgaaaagttctcggcactggcattcaagatcatgaccgacccgttcgtcggccagctgatcttcttccgcgtgtactcgggcgtcgtgaattcgggcgacaccgtgctgaacgcgaccaaagacaagaaggaacgtctgggtcgtattctgcagatgcacgcgaaccagcgcgaagaaatcaaggaagtccgcgcaggcgacatcgctgctgcagtcggcctgaaagacgcaacgaccggtgacacgctgtgcgatccgcaaagcccgatcgtgctcgaacgcatgattttcccggagccggtgatttcgcaggctgttgagccgaagacgaagcctgaccaggaaaagatgggtctggcgctgaaccgtctggcacaggaagatccctcgttccgcgttcaaacggacgaagaatcgggccaaaccattatttcgggcatgggcgagctccacctggaaattctggttgaccgtatgaagcgcgaattcggcgtggaagcgaccgtcggcaagccgcaggttgcttatcgcgaaacgattcgcggcaaggcggaagacgttgacggcaagttcgtcaagcagtcgggtggtcgcggccagtacggtcacgcggttattacgctcgagccgaacgaacaaggcaagggctacgagttcctcgacgagatcaagggcggtgtgattccgcgcgaatacatcccggcggtggacaagggtatccaggaaacgctgaaggcaggcgtgctggcgggcttcccggtcgtcgacgtcaaggttcacctgacgttcggttcgtaccacgacgttgactcgaacgaaaatgcgttccgcatggccggctcgatggcgttcaaggaagcaatgcgcaaggctcaaccggtcatcctcgaaccgatgatggcagtggaagtcgaaacgcctgaagattacatgggcaacgtgatgggcgacctgtcgggtcgtcgcggcatcgtgcagggcatggacgacatggttggcggcggcaagattgttcgtgccgaagtgccgctgtcggaaatgttcggctactcgacgtcgctgcgttcgctgacccaaggtcgtgcaacgtacacgatggagttcaagcactactccgaagcaccgcgtaacgtgtccgaagcgatcatcaacgcgaagtcgaag

SEQ ID NO: 12928 - DNA, 1188 bp, Burkholderia fungorum
atggccaagggtaagtttgagcggaccaagccgcacgtgaacgtcggcacgatcggtcacgttgaccacggcaagaccacgctgacggcagcgatcacgacggttctgacgcagaagtttggcggcgaagcgaaggcatacgaccagatcgacgcggcgccggaagagaaggcgcgtggtatcacgatcaacacggcacacgtcgagtacgaaacggctaaccgccactacgcacacgtcgactgcccgggccacgctgactatgtgaagaacatgatcacgggcgcagcgcagatggacggcgcgatcctggtgtgctcggccgctgacggcccgatgccgcaaacgcgcgagcacatcctgctggcgcgtcaggttggcgtgccgtacatcatcgtgttcctgaacaagtgcgacatggtggacgacgctgagctgctggagctggtcgagatggaagttcgcgaacttctgtcgaagtacgacttcccgggcgacgagacgccgatcatcaagggttcggcgaagctggcgctggaaggcgacaagggcgagctgggcgaagtggcgatcatgaatctggccgacgcgctggacacgtacatcccgacgccggagcgcgcagttgacggtgcgttcctgatgccggtggaagacgtgttctcgatctcgggtcgcggtacggtggtgacgggtcgcgttgagcgcggcgtcgtgaaggtcggcgaggaaatcgaaattgtcggtatcaagccgacggtgaagacgacctgcacgggcgtggaaatgttccgcaagctgctcgatcaaggtcaggcgggcgacaacgtgggtatcctgctgcgcggcacgaagcgtgaagacgtggagcgtggccaggtgctggccaagccgggttcgatcaacccgcacacgcacttcacggctgaagtgtacgtgctgagcaaggacgaaggtggccgtcacacgccgttcttcaacaactatcgtccgcagttctacttccgtacgacggacgtgacgggctcgatcgagttgccgaaggacaaggaaatggtcatgccgggcgacaacgtgtcgatcacggtgaagctgatcaacccgatcgcgatggaagaaggtctgcgtttcgcaatccgcgaaggcggccgtacggtcggtgcaggtgtggttgccaagattctcgag

SEQ ID NO: 12929 - DNA, 696 bp, Burkholderia fungorum
atggctaagctttcgaaacgtctgcaagcgtttgcagccaaggtcgatcgtcaaaagttgtacgcaatcgacgaagctctgtcgctcgttaaggaatgcgcaagcgcgaagttcgacgagtcgatcgacgtcgcagtgcaactcggcatcgacgcgaagaagtcggaccaagtggttcgaggctctgtcgttctgccagcaggtaccggtaagtcggtccgtgttgctgtgttcgcacaaggcgaaaaggctgagcaggctcgtgcagctggcgcagaagtcgttggcatggaagacctggccgaacaggtcaaggctggcaaactggacttcgacatcgtgattgcttcgccggacacgatgcgcgtcgtcggtacgctcggtcagattctcggtccgcgcggcctgatgccgaacccgaaggtcggtacggttacgccggacgtcgcgacggcggtgaagaacgcaaaggctggtcaggtgcaatttcgtgtcgacaaggccggtatcattcacgccacgatcggccgcgcttcgttcgagccgacggctctgcgtagcaacctgaacgctctggtcgacgcgctgcaaaaggcgaagccggcaacgagcaagggtgtctacctgcgcaaggttgcactgtcgagcacgatgggcgttggcgttcgcgtcgaccaggcatcgctggctgcacag

SEQ ID NO: 12930 - DNA, 3521 bp, Burkholderia fungorum
  misc_feature (3472)..(3521): n=g, a, t or c
atgcaatattccttcaccgagaagaagcgtattcgcaagagttttgcgaagcgccccatcgttcaccaagtacctttcctgctggctacccagcttgaatcattcagcacgtttctgcaagcagacacgtcgtccacgcaacgcaagccggaaggcctgcaagctgcgtttacctccgtttttcccattgtttcgcataacgggttcgctcgtctagagttcgtcagctacatgctgtcgccgccggcattcaacatcaaggaatgtcagcagcgcggtttgacctattgctcggccctgcgcgcgaaagtgcgtctggtgctgctcgacaaggaatccccgagcaagccggtcgtcaaggaagtgaaggaacaggaagtgtacatgggcgaaattccgctcatgacgccgacgggttcgttcgtcatcaacggcacggaacgtgtgatcgtttcgcagctgcaccgttcgcctggcgtgttcttcgaacacgacaagggcaagacgcacagctcgggcaagctgctgttctcggcacgtatcattccttaccgcggttcgtggctcgattttgagttcgacccgaaggatgtgctgtacttccgcgtcgaccgccgccgcaagatgccggtcacgatcctgctgaaggcaatcggcctcacgccggaacagatcctcgcaaacttcttcgtgttcgacaatttcacgctgatgccggaaggcgcgcagatggaattcgtgccggagcgtttgcgtggtgaagtcgcgcgtttcgacatcacggaccgtgacggcaacgtgatcgtccagaaggacaagcggatcaacgccaagcacattcgcgatctcgacaacgccaagaccaagttcatctcggtcccggaagactatttgctcggccgcgtgctggcgaagaacgtggtcgacggcgacacgggtgaagtcatcgctaacgcgaacgacgaaatcacggaaaccgtgctcgagaagctgcgcgagtcgaagatcaaagacatccagacgctctacacgaacgatctggatcaaggtccgtacatctcgtcgacactgcgtatcgacgaaaccgcggacaagatggccgcgcgcattgcaatttaccgcatgatgcgtccgggcgagccgccgaccgaagaagcggtcgaggcgctattcaaccgtctgttctacagcgaagacgcatacgacctgtccaaggtgggtcgtatgaagttcaatcgccgtgtcggccgcgacgaaatcgtcggtccgatgacgctgcaagacgacgatatcctcgccacgatcaagatcctggtcgagctgcgtaacggcaagggcgaagtggacgacatcgaccacttgggcaatcgtcgtgtgcgttgcgtcggcgaactggccgaaaaccagttccgcgccggtctcgtgcgtgtcgaacgtgctgtgaaggaacgcctcggccaggccgaaagcgaaaacctgatgccgcacgatctgatcaactcgaagccgatttcgtcggcgattcgcgagttcttcggttcgtcgcagctgtcgcagttcatggaccaaacgaacccgctgtcggaaatcacccacaagcgccgtgtttcggctcttggcccgggcggtttgacgcgtgagcgcgccggctttgaagtccgtgacgtgcatccgactcactacggtcgcgtgtgcccgattgaaacgccggaaggtccgaacatcggcctgatcaactcgctcgctctgtacgcgcacctgaacgaatacggcttcctcgaaacgccgtatcgcaaggtcgtggacagcaaggtgaccgatcagatcgactatctgtcggcgatcgaagaaggccgttacgtgatcgctcaggcgaacgcggcggtggcggaagacggctcgctgaccgacgaactggtgtcgtcgcgtgaagcaggcgaaacgctgatggtcacgccggaccgcatccagtacatggacgtggcgccgtcgcagatcgtgtcggtggcagcatcgctgattccgttcctcgagcacgatgacgcgaaccgcgcgttgatgggttcgaacatgcagcgtcaggctgtgccgtgtctgcgtcctgaaaaggccgtggtcggtaccggtatcgagcgcacggtggcagtcgactcgggtacgacggttcaggcattccgcggtggcgtggtggactacgtcgacgcaggccgtatggtgatccgcgtgaacgatgacgaagccgttgctggcgacgtcggcgtggacatctacaacctgatcaagtacacgcgttcgaaccagaacacgaacatcaaccagcgcccgatcgtgaaggtcggcgacatcgtgtcgcgtggcgacgtgctggctgacggcgcatccaccgacctcggcgaactggctctcggccagaacatgctggtcgcgttcatgccgtggaacggctacaacttcgaagactcgatcctgatctctgagaaggtggttgccgacgaccgttacacgtcgatccacattgaagaactgaacgtcgtggctcgcgatacgaagctcggaccggaagaaatcacgcgcgacatctcgaacctggctgaagtgcaactcggccgtctcgacgagtcgggcatcgtctacatcggcgctgaagtcgaagcaggcgacgtgctggtcggcaaggtcacgccgaagggcgaaacccagctgacaccggaagaaaagctgctgcgcgcgatcttcggtgagaaggcttcggacgtgaaggacacgtcgctgcgcgtgccgtcgggcatgagcggcaccgtgatcgacgttcaagtgttcacgcgtgaaggcattcagcgcgacaagcgcgcgcaacagatcatcgacgatgaactgaagcgttaccgcctcgacctgaacgaccagctgcgtatcgtggaaggcgacgcgttccagcgtctcgcacgtatgctgaccggcaaggtcgcgaacggcggtccgaagaaactggcgaagggcacgaagatcgaacaggcttacctggaagatctggatcactaccactggttcgacatccgcctcgcggacgaagaagcagcggcacagctcgaagcgatcaaggactcgatcgaacagaagcgtcaccagttcgatctggcgttcgaagaaaagcgcaagaaactcacgcaaggcgacgaactgccgccgggcgtgttgaagatggtcaaggtgtacctggcagtcaagcgccgcctgcagcctggcgacaagatggccggccgtcacggtaacaagggcgtggtatcgaagatcgttccgatcgaagacatgccgtacatggccgacggccgtccggctgacgtcgttctgaacccgctcggcgtgccgtcgcggatgaacgtgggtcaggttctcgaagtgcatctgggttgggccgcgaagggtctcggctggcgtatcggcgaaatgctgcagcgtcaggccaagatcnnnnnnnnnnnnnnnnnnnnnnnnnnnnnnnnnnnnnnnnnnnnnnnnnn

SEQ ID NO: 12931 - DNA, 2220 bp, Burkholderia fungorum
atgaaaaatcaattttcccgcgacgaggacgaaattgacatccgtgcacttatcgatgtcattttcaagaacaagaagttgatagccacggtcaccatcgtgtgcatggtttttggagtcatgtacgcattcctggctacgccgatttatcgtggtgatatcacggttcaggtggaagataactctgacctggcaggtgcagcggccggcaatctgatgagcggattgacctccctgttcgacatcaaatcgaccgacgacggcgaaatgcagatcctcgactcacggcttgtcaccgcaaacatggtggatgagctgcacctttacatcgacgcgaagcctaaatatttcccccttttcggggcatttatcgcgaagcacagaaactcgctgtcgcacccggggatatttggtctgggcggatatgcgtggggctcggaaaccataggggtcgatcaattcgacgtgcctcgcgaattcgaagaagacaagttctccgtcaccgcgctaggtaacaaccgatatcggctttcgggcagcgatctcgatgccgatgtcacgggtgaagtcggagttcccctggcagtgaacactccttctggacaagtcaagctactggtgtcgcagttgaacgccagcgagaacgcgaaatttgagctgaagcgctattcccggattcaggtcctggaacagctgcggaaagacctcgtgatttcggaaatgggcaaggatcagtccggcgtcattggcgtgacttatgacgatgaggatcccgtacgagcggccacagtcttgaacaggatcgcggaaaactacgtcgcgcaaaatgccgaccgcaaggcggcggcggcagagaagtctctcgtctttctgaagagtcaacttccggaaatagagcataccctgcggctggccgaagaccgcctcaatgtgtatcagaaccaccataaagtcgtcgatctcagcgagcaggcaaaggccgtgttgggacaggccgtcgaggcgcaatccagtctgttccagctcgagcagaagcgtaaggaactcgcaacgatctacagcgcccagtatcccgccgtgcttgcactggatcaacagatcgccgccgcgcgcgcgcatatcgacaacttcaacgaatcgatccagcggctaccggatgatcagcaaaatattgtccggctgaatcgtgacgtaactgttcaaacgagtctgtatgttggattgctcaacagcgttcaacaactgcaactcgccaccgcaagcaagatcggaaacgtacgcgtgatcgaccgcgcattggtcgccgacaaaccaacgaagccaaagaaagcgcttgttattgtcctggcaaccgttatcggcctgtttggcggagtcggatttgcactggcacgttcaacattgttcggcggcctgactgatcccgtggatatcgagcgtgatctgtctctcgacgtcattgccactattccgctaagcgacacccagcgccagttgacgcgagtcagggagcgaggcggccggcgcggtccgtcgatccttgcattggctcgaccgcaggaaccggcagtcgaagccattcgaagtctctgcaccgcgttgcagttcgcgctgctggagaacccgaagaacaacgtcattctgatgaccggcccttcggtcggcattggtaaatcgttcacctccgcgaatctggcaactctgctgggaatgtcaaagaagcgcgtgctgttgatggacgtcgatctgcgccgcggacatctggctgccgagttcggtgtgtccggcaaagtcggcctctccaacgttctcagggatgacatgccgctggacgcggcaatcatcaaagacgtgtctcggaacgtggatttgcttgctaccggtccgctgatggcgcagccggtcgaattgctgtcttccggcggcatcgccaatattctggcagaggtatcgagccgatacgacatcgttcttctcgacgcaccaccggtactgccggtcacggatgcgacggtcttcgcgcccttcgcggggatcgttcttctagcagcacgttcgggcatgaccagcggtggcgaacttctcgaatccgccaaacgaatcgagcgtgtcggggcgaagatcaccgggatcgtctttaacggtttcaggccaagcctgcgctccgcgcagtatggagactatggcggctatgcgtacctgagtaacgcgactgacaca

SEQ ID NO: 12932 - DNA, 726 bp, Burkholderia fungorum
atggacatcgccaccatgcaggaaaccgtcagggttatcggcgaccgtatcgaggctcaacaattcacgcagcatgttgtggttaatgtcgcaaagctggtcaacatgcagacggacagcgtgctttattcatcggttcgcgcgtgcgatatcgtaaacatcgatggcatgggcgtcgtttggggagcgcgactattgggccattccgtgccggagcgagtagcgggagttgatcttttcgaacgtctcttgcaactggcagcaatgcgaggtctgcccgtatttctcctgggggcgactgaggaagtggtgggacacactgccaccgttgcaacaatgcgacatcctggcttgctgatcgccggctatcatcacggatatttctgggatgacgaggagacggtagttgagaagatccggaaatccggtgcgaggcttctctttgtggcaatcacatcgccaaagaaggaaagttttatcaaccgctggcaggatcggctcggcgtcgatttcgtgatgggtgttggcggcacttttgatgtcgttgctggcaaggtacgtcgggctccgcaatggatgcaacgcaatggcctcgaatgggcctatcgggttgcgcaggagccgaggcgcatgtggaagcgctatttcgtcacaaacaaccggtttgcacttatgttgctgagagcacgcttcgaatcgacatttaaacggttggaagacgaacac

SEQ ID NO: 12933 - DNA, 1082 bp, Burkholderia fungorum
aagctgcacaaagtgctggccgaagccggcatgggttcgcgccgcgacatggaagagctgatcgttgccggccgggtgtcggtgaatggcgagccggctcatatcggccagcgcatcatgccgaccgaccaggttcgcatcaacggcaagccggtcaagcgcaaactggccagcaagccgccgcgtgtgctgctgtatcacaaaccgaccggcgaaatcgtcagccatgccgatccggaaggccgtccttcggtgttcgacaagctgccgccgatgaaaaccgccaagtggctcgcggtcggccgtctcgatttcaacacggaaggtctgctgatgctgaccacgtcgggcgatctggcgaaccgtttcatgcacccgcgttatagcgtcgagcgtgaatatgcggtgcgcgtggtcggcgaactggccgaaggcatgcgtcagaagcttctgcatggcgtcgagctggacgacggcccggcgaacttcctgcggattcgcgacggcggcggcgaaggcaccaatcactggtatcacgtcgcgctcgccgaagggcgtaaccgcgaagtgcgtcgtatgttcgaagcggccggcctgatggtcagccgcctgatccgtacccgtcacggcccgatctcgctgcccaaggggctcaagcgcggtcgttgggaagagttggaagacaaccaggtgcgtgcactgatggcgtcggtgggcctgaaggcgccgactgaagagcgcggcagccgcaatgcggcgccggaacgcaagcagccggatccgatgcaaacgtcgatgggtttcattaaccgtgagccggtgttgatgtcgcatggccgtttcgatcagcagccgccacgcggccaggggcggcgcggtggtgcggcaggcggcggttttgctggcggcgcgggcgcgggttttggcggcggctatggcaatcgcggtgccggccgcagcgccggtggcttcggcggcccgatgggcgcgggtgggggtgcgggcggcccgcgtggcggccgtgaagtcgacggcaaccgcgcgccgtcgggcaatggcaatcgtgcggcaggcggcggcaa

SEQ ID NO: 12934 - DNA, 1473 bp, Burkholderia fungorum
atgagtcgcgaagtgttgatgctggtggatgcgctggcacgcgagaagaatgtcgacaaagacgtggtatttgccgcgctcgaagcggctctcgcttcggcctccaagaaactcttcgaagaagatgcggatatccgcgtccatatcgaccgtgaaagcggcgagcacgaaacgtttcgccgctggaaggtggtgccggacgaagccggtttgcaggagccggatcaggaaatcctgctgttcgaagcacgcgagcagaagcccgagatccagctcgacgagtacatcgaagagccggtgccgtcgatcgagttcggccgtatcggcgcgcaggccgccaagcaggtgatcctgcagaaggtgcgcgacgccgaacgcgaacagatcctgaacgacttcctcgagcgcggcgagcacatcatgaccggctcggtgaagcgcctggataaaggcaacttcatcgtcgaaaccggccgtgtcgaggcgctgctgcgccgcgaccagctgattccgaaggaaaacctgcgcgtgggcgaccgcgtgcgcgcctacatcgcgaaggtcgatcgcaccgcgcgcggtccgcagatcgaactctcgcgtacggcgcccgaattcctgatgaagctgttcgaaatggaagtgccggaaatcgaacagggtttgctggaaatcaaggcggccgcgcgagatccgggcgtgcgcgccaagatcggcgtggtcgcatacgacaagcgcatcgatccgatcggcacctgcgtcggcattcgcggttcgcgcgtgcaggctgtacgtaacgagctcggtggcgaaaacgtcgacatcgtgctatggtcggaagatcccgcacagttcgtgatcggcgcgctcgcgccggcagccgtccagtcgatcgtcgtcgatgaagaaaagcattcgatggacgtcgtcgtagacgaaaacgaactggcggtcgcgatcggccgcagcggccagaacgtccgtcttgccagcgaactcaccggctggcagatcaacatcatgacgccggacgaatctgcgcagaagcagaatcaggaacgcggcgtactgcgtgacctgttcatggcgcgtctcgatgtcgacgaagaagtggccgacatcctgatcgacgaaggctttacgagcctcgaagagatcgcctatgtgccgctcaacgaaatgctcgaaatcgaagcattcgacgaagacaccgttcacgaactgcgtaatcgctcgcgcgacgcgctgttgacgctggcgatcgcgaatgaagaaaaggtcgaaaatgtagcgctcgacctgaagagcctggacggcatggacgccgacctgctcgcaaaactggccgaacatcagatccagacgcgcgacgaactcgccgagctggctgtggatgaactggtcgagatgaccggaatggaagaggatgccgctaaggcgttgatcatgaaagcacgtgaacactggttccag

SEQ ID NO: 12935 - DNA, 2967 bp, Burkholderia fungorum
atggcgagtaacaacgtagcccaatttgccgcggaactgaaaatgcctgcaggcgtgctgcttgagcagctgcaggcggcgggcgtcacaaaagcgagcgaagacgacagcttgtccgaaacggacaaggcgcgtctgctcgaccacttgcgcaagtctcacggctcgactgatgctgacaagcgcaagatcacgctgacgaaacggcatacgtcggaaatcaagcaatccgatgcgacgggcaaagctcgcaccattcaggtcgaggtgcggaagaagcgcactttcgtccgccgcgacgaaacctccgctgaaaacggagatgcatcgaatcatgtggccgaggccgaggtcgacgatctggagctccagcgtcgtgaagaggaagctcgtcacgaagccgaactgctcgaaaagcaggctcaggagctgaaggcgcgccaggaacaactcgaacgcgaagaagcggaacgtcaggcgcgtgaagcggctgccgaagtcgagcgtcgtcgtgccgaagaagaagcagcgaagaagcgcgcagcggctgcggccgaggcggcggctcgcgagcagcagacccaggcttcgaagccggcacaagccgcacaaccggccgccgcaaaggcggagccggtagcggccaaggcagcggagccggtggtcgcgaggcaaagcgagcaggacgacgagcgcgctgccgcggaacgtgcagcgcaacgcgaagccgcgaagaaggcagaagacgcagcgcgacaggctgccgagaaagcgcgtgccgagcaggaagaaatcgccaagcgccgtgccgcggctgaagccgaagcgcgcgcaattcgcgaaatgatgaacacgccgcgcaaggcgcaggtcaaggcgccggaaccggcaccgaagcccgccgagccggccaaggccgcggaagccaaaggcacgctgcacaagccggcgcgtccggcgggcgaggcaccggcacgtccggcagccaagaagccggcggctgcggctccggctgccacgaccacgccttccgccggcgacaagaagaagccgggcggcggcaagggcggctggcaggacgacgcagccaagcgccgcggcatcaagacccgtggcgatacgagcggcggggtcgatcgcggctggcgcggtggcccgaagggccgcggcaagcatcaggatcagaacaccacgttccaggcgccgaccgaaccgatcgtgcgcgaagtgcacgtgccggaaaccatcacggtcgccgatctggcgcacaagatggcggtgaaggcgtcggaagtcatcaagtcgatgatgaagctcggccagatggtcacgatcaaccagatgctggaccaggaaacggcgatgatcatcgtcgaggaactgggccaccacgcggttgcggccaagctggacgatccggaagccatgctggtcgaaggcgaagtgtcggatgcggaatcgctgccgcgtccgccggtcgtcacggtcatgggtcacgtcgaccacggcaagacctcgctgctcgactacattcgccgcgccaaggttgcagcgggtgaagcgggcgggattacgcagcatatcggcgcctatcacgtcgaaacgccgcgcggcgtcatcacgttcctcgacacgccgggtcacgaagcctttacggccatgcgtgcccgcggcgcgaaggcgaccgacatcgtgattctggtggtggcagccgacgacggcgtgatgccgcaaacgaaggaagccatcgcccacgcgaaggccggcggcgtgccgctcgtcgtggcaatcaacaagatcgacaagccggatgcgaatccggagcgcgtcaagcaggaactcgtcgccgaaggcgtcgtgccggaagaatatggtggcgattcgccgttcgtgtcggtgtcggccaagaccggcgcgggcatcgacgacctgctggaaaacgtgctgctgcaagccgaagtgctggaactgaaggcaccggtcgaggcgccggccaagggtctcgtcatcgaagcgaagctcgacaagggcaagggtccggttgcgacgatcctggtgcagtcgggtacgctgaaccgtggcgacgtggtgctggcaggtagcgcttacggtcgcgtgcgagccatgctcgacgaaaccggcaagccgaccaagtcggcgggtccgtcgattccggttgaaattcagggtctttccgaagtcccgcaggctggcgaagaagtcatcgtcatgccggacgaacgcaaggcgcgtgaagtcgcgttgttccgtcaaggcaagttccgcgacgtcaagctggccaagcagcaggccgcgaagctcgagaacatgctggaacagatgggcgaaggcgaagtgcagtacatgccgctcatcgtcaaggccgacgtgcagggttcgcaggaagcgctggtgcagtcgctgctcaagctttccaccgacgaagtgcgtgtgcagatcgtgcacggcgccgtgggcggcatcagcgagtccgacgtcaacctggcaacggcttcgaaggcggtgatcatcggcttcaacacccgtgcggacgcgcaggctcgcaagctggcggaagccaacggcgtggatattcgctactacaacatcatctacgacgcagtggatgacgtgaaggccgcgatgtcgggcatgctggcgccggagaagcgcgaagtcgtgacgggtacggtcgaagtgcgtcaggtcttcaaggtaccgaagatcggcgcggtggccggctgtatggtcacggacggtttcgtcaagcgctcgtcgtcggtgcgcgtgctgcgcaacaacgtcgtcatcttcacgggcgagctcgattcgctcaagcgtttcaaggacgacgtgaaggaagtccgtcagggcttcgagtgcggtatgtcgatcaagaacttcaacgacatcgtcgaaggcgatcagttcgaagtcttcgaggtcaccgaagtcgcgcgttcgctg

SEQ ID NO: 12936 - DNA, 1791 bp, Burkholderia fungorum
ttgagcgcgaagccaacgttaagcaaacccatcggttcaggtgaggcgtcgtcgcccgccgtcgtctttcgacgtttgtggccgtacatcaagccgctgatctgggtcctgattggcgcgatcgtcgcaatggccgtcagcgccgcgaccgacgccgcgatccccgcgctgctcaagcctttgctggacaagggtttcggcgcgcatgccaacgacagggccaagtggttcgtgccggccgcggtgattggcctcgcattgattcgcagcctgtcgcaatacgcgtccgggtatctgcttgcctacgtgacgaacaagatcctgctcgacctgcgcctgaagatgttcgaccgcatgattcacacgagcgtcgcgttcttccagcgcgaaaccgcgagtacggtgatcaacgcgatcgtgttcgaggtgaaccagattctcaacgtgctgctgagcgtgctggtcacgctggtgcgcgattcgctgaccgtggttttcctgctcggctatctgttctatctgaactggcgtttgacgctgatcgtcgcggtgctgctgccggcgatcggctggctggtcggcaagatcaaccgccggctgcgccgcctgaaccgcgagcatcaactgctgaccaatgagctgtcgtacatcgtcgaagagtcggtgggcggctacaaggtcgtcaaggtccacaacggcgaacagtacgagatggaccgcttcgagtcgatgagcaagcgtctgcgcggctatgccatgcgcatgacggtgtccggtggtctcgcgcagccgttgacgcagttcctcgcgtcgatcgcgctcgcggtggtgatcacgatcgcggtggtgcagtcgtcgtcggatcagaccacggtgggtgggttcgtcgcgttcgtcacgtcgatgctgctcatcatctcgccgctcaagcacctgatggacgtgaaccagccgctgcagcgcggcatgacggcgtgcgaaatgatcttcggcctgatcgacgaaccgtccgagccggaaggcggcggcaaaccgctcgaacgcgcgcacggcgcggtggaattccgcgacgtctcgttcgtgtatagcggcaacgccacgcacaaccgccacacgctcgaccagatctcgttcagggtggcgccgggcgaaatgatcgcgctcgcgggcccgtcgggtagcggcaagaccacgctggtgaatctgctgccgcgctttttcgatccgaccggcggccagattctggtcgacggcgtggcgatccccgaatacgatctgcacgcgctgcgcagccagatcgcgatggtgagccaggacgtggtgctgttcaacgacacggtcgccaataacgtcgcgtacgggcagaccgccgacgccggcaaggtcaaggcggccctgcgcgcggccaacctgtgggacaccgtcgaggccatgccgaagggcatcgagacgctggtcggcgacaacggcatgatgctctcgggcggccagcggcagcgtctcgcgatcgcgcgcgcgatctacaaggacgcgccgatcctgatcctcgacgaagcgacgtcggcgctggactcggaatccgaacgccacgtgcaggccgcgctggaaacgctgatgaagggccgcacgaccctggtcatcgcgcaccggctgtcgaccatcgagcgcgccgaccggatactggtgatggaagcggggcggatcgtcgagagcggcagtcatcgcgaactgctggcgcaagacgggctgtacgcgcatctgcaccgcatccagttccagcagagcgcggcg

SEQ ID NO: 12937 - DNA, 1284 bp, Burkholderia fungorum
ttgagcgtactggcgggctcgccattcctgctcgcggtcgtggcgcccgccgcctacgcacaagcgccggcaaaaatctcgaaccagcagttggactcgctgaccgcgccgatcgcgctctacccggacgccctcctcgcccaggtgctgatggcatccacctttccgcaagacgtgccgtcggcggcggcgtggtcgaaagccaatccgaacctcaagggtgacgacgccgtgaaggcggtcgcggcagagccgtgggatccgagcgtgcaatcgctggtggcgttcccgcaggtgctggccacgatggcgtcgaaacccgactgggtggcgcaactgggcaatgccttcctcgcgcagccgaacgacgtgatggactccgtgcaacgcttgcgcaaacaggcccagcaggcgggcaacctgcagactaaccagcagcagaaagtcgtcgtcgagcagagcaccattcagatcgtgccggtgaacccgcaggtcgtctacgtgccaacgtataaccccacggtcgtctacggcacgtggccatatccggcctacccacccgtatacgtgccgcccccgccgggctatgcggtggcgagcgggctcgccgcgggactcgcgttcggcgctggcgttgcgattaccagctcgctgtggagcaacgtcaactggaacaatcacagcgtcaatatcaacgtcaaccagtacaacaacatcaatgtgaatcaccggctcgacgtaaacagcagcacgacgaactggaaccgcaattcgactttcaatcgcaatacctcggccaacgtgggcagcgcgcagcgagacgcgtatcgcgggcgtgatacatcggcctcgcgtgcgcaggcgcagcagaccttgcagaaccgtaccggccagaacatgggcggcacggcaagtcagcgtctgcagggtatccagcaaggcggcaacaatgcggccaaccttcgcaacaacgcgcagaacgtgaaccgcgacaacgcgctgcgcggcgcgggagacggcggcgccgcgaaacaggatatgcaacgcgggcaagcaagccggcagtcgctcgcgaacaaccgcggcggcggtcccggcgcgaacggcggcggtcagcaacgtggcggcaatctgggagcggggggcagtggcgagcgcgccagcttcggcgcaggcggtggtggacaaccaggcggcggctttggcgcgggcggtggcggacaacagcgcggcggcgggctgggtgcgggcggtggcggccagcgtcacttcggccggcaacat

SEQ ID NO: 12938 - DNA, 1605 bp, Burkholderia fungorum
atgccgatcatcgaatcaaagctcaatccgcgctcggacgacttccgcgccaacgcggcggcgctcgaagcgctggtcgccgatcttcgcgcgaagatcgaaaagctcgcgctgggcggcggccaggcggcgcgcgacaaacacacgggccgcggcaaactgctgccgcgcgaccggatcgcgcaactgctcgatccgggcacgccgtttctcgagttctcgcaactcgcggcctacggcatgtatcacaacgacgcgcccggcgcgggcgtcatcaccgggattggccggatcgcggggcaggagtgcgtgatcgtctgcaacgatgcaaccgtcaagggcggcacctactacccggttaccgtgaaaaagcacgtgcgggcgcaggaaatcgccgctgaaaatcacttgccgtgcgtgtatctggtcgactcgggcggcgcgaatctgccgaaccaggacgacgtgtttcccgaccgcgatcacttcggccgcatcttctataaccaggcgaatctgtccgccgcgggcattccgcagatcgccgtcgtgatgggttcgtgtaccgcgggcggcgcgtatgtgccggccatgagcgacgaatcgatcatcgtcaggaatcaggggacgatttttctcggcgggccgcctttggtgaaagccgcgaccggtgaagtggtgagcgcggaagacctcggcggcggcgacgtgcatacgcgtttgtccggcgtggtcgatcatctcgcgcagaacgacgcgcatgcgctggggattgcacgcagcatcgtcggcaacctgaatcgccgcaagcaggtgccggtcgcgttgcaggaaccgaagccgccgcgctacgacgtgaagagcatgtacggcgtgattcccgtggatacccgcaagccgttcgatatccgcgaggtgatcgcgcggatcgtcgacgactccgcgttcgacgagttcaaggcgcgctacggcaccacgctcgtcaccggcttcgcgcatatctgggggcatccggttggcatcatcgccaacaacggcattctgttttcggagtccgcgctcaagggcgcgcactttatcgagctgtgctgccagcgcaagattccgttagtgttcctgcagaacatcaccggcttcatggtgggccgcaaatacgaaaacgaaggcatcgcgcgcaacggcgcgaagatggtgacggcggtggccacggccagggtgccgaagttcacggtgatcatcggcggctcgttcggcgcgggcaattacggcatgtgcggccgcgcgtattcgccgcgctttctgtggatgtggccgaacgcgcgcatctcggtgatgggcggcgagcaggcggcgtcggtgctggccacggtcaagcgcgacggcatcgaaggcaagggcggtacgtggagcgctgaagaagaagaggcgttcaagcagccgatccgcgaacaatacgaacatcagggccatccgtactatgcgagcgcgcggctgtgggacgacggcgtgatcgatccggcgcaaacgcgcgacgtgctcggtctcggtttgtcggccgcgatgaacgcgccgatcgaagacacgcgtttcggcgtgttcagaatg

SEQ ID NO: 12939 - DNA, 1428 bp, Burkholderia fungorum
gtgacttccaccgccgaaacctctgccgaccgcctcgttctcgaggcggtcggcttttcgttgtccaggcttcctgcaaacgcccgtattgcgattgcgtttagcggcggcgtggattcgagcgtgctgctcgatgccgcggtgcgtgtcgcgggcgcgtcgcgctgcgtcgcgctgcatgtgcatcacggcctgagcgcgcatgcggatgcgtggcttgcgcattgcgaggcgttcgcgcgggagcgtggcgtcgagttcgctgcggagcgcgtcgcggtgtcgcgtgacacgggtgtgggcgtcgaggcggccgcgcgcgatgcgcgttatcgcgcgctcgacgacatgtgcgcgtcgcgcggtgtcgccacgctctggctcgcgcaacatgcggacgatcaggcggaaaccgtgctgctgcaattgctgcggggcgccggcctcgcgggtctggccgcgatggcgccgaagtatttgccggcgaaggcgtcggcaacgcgcgtgcggcctttgctccatctgctgcgtgcgcaactcgagcaatacgcgagcgcgcgtgcgctgcgctggatcgacgacgagtcgaacgcggatacgcgctatgcgcgcaacgcgttgcgccacgacgtgatgccggcgctcgctgtccactttcccggctttcgcgacgcgctggctcgcacggcggcacacgcggcgtccgcgcagcgcttgctcgacgaattcgcgcgcatcgacatggaagccgcatcacgcgacgaaggacgcgcgctctcgcacgacgccttgctcgcgctcgacgacgagcgcgcgctcaacctcatgcgctactggatgcgcacgctgggcctcgccgccgcgtcgagcgcgcgtcttggcgatgcgctgcggcaactgcgcgaaatcggcgcggcgggcgaaggtcatgcgctgcgtgtcgatcacgcgggtcatgcattgcgcagctatcgcggcctcgtgtattgggaagccggagacagcagcgggcccgccgacgaaaccgcgctcgccgcgcgcgcggtcagcgagctggcatggcagggcgagtcggtctggcgcttgccgcaatggcgcggcactttcatattcgccgacgcaagcgcgggcgagcccgacgcgattcccgtcagcgttctgcggcgcgccgtgtcgagcgcacgctcgcgcagcggcggcgaacggatgcgcatgggcgacgcgcacaatgcgccgggccgcacgctgaaaaacctgttccaggaacgcggtattcccgcgtggaaacgcgacgtgccgctgctctacatcggcgaggaactgctgttcgtgccgctgctcggggtgaatcgcgcggcgttgccggaccagcccggcgaggctggatcacacgtcaggatcgtgtggcgtgaagatctgctgatcgcc

SEQ ID NO: 12940 - DNA, 969 bp, Burkholderia fungorum
atgaagaccacctttctggatttcgaacagccgatcgctgaactcgaagcgaagatcgaagaattgcgcttcgtgcaggacgattcggccgtcgatatttcggaagagatcgagcggctgtccaagaagagtcaacagctcaccaaagatctgtacgcgaacctcacgccgtggcaggtttcgcaaatcgcccgtcatccgcaacgcccgtacacgttcgactacgtgaacgagctgttcaccgatttccacgaactgcacggcgaccgcaactatgcggacgacctgtcgatcgtcggcggcctcgcgcgtttcaatggccaggcctgcatggtgatcggccatcagaagggccgcgacaccaaggagcgtgcgttgcgcaacttcggcatgccgcgtccggaaggctatcgcaaggccgaacgtctgatgcgtctcgccgaaaaattcggcttgccgattttcacgttcatcgacacgccgggcgcgtatccgggcatcggtgcggaagagcgcggccaatcggaggcgatcggccgcaatctgtatgtgatggcggaactgaagacgccgctgatcgcgacgatcatcggtgaaggcggttcgggtggcgcgctggccattgctgtcggcgacagcgtgctgatgctgcaattctcgacctattcggtgatctcgccggaaggctgcgcatcgattctgtggaagagcgccgcaaaagcgccggaagccgcggaagcgctcggcctgaccgcgcatcgcctgaaggcgctcggcctgatcgacaagatcgtcaacgagccgctcggcggcgcgcatcgcgatccgaagggcatggccgccatgctgcgccgtgcgcttgccgattcgctgcgccagttccagggcatgagcatcaacgacctgcgtcaacgccgtttcgaacggttgatgtcgtacggcaagttcaaggaaacgacgccgggtgcc

SEQ ID NO: 12941 - DNA, 1395 bp, Burkholderia fungorum
atggaatcactgcgcatctacaacacgctcgcgcgtgacaagcaaactttcgtgccgctgcaagacggtgtcgtgcggatgtacgtctgcgggatgaccgtgtacgactattgtcacgtcggtcatgcgcgggtgatggtcgtgttcgacatcgtgcagcgctggttgcgcacgctcggctataacgtgacctacgtgcgcaatatcaccgatattgatgacaagatcatccgccgcgcggtcgagaatggcgaaacgatcaagtcgctgaccgaccggttcatcaaggcactgcatgaagacgcggacgcgctcggcatccagcggcccgacatcgagccgcgcgcgactgatttcattccgcagatgctcggcatgatcgagcggctcgaagcgaacggctacgcctatcaggcgagcgacggcgacgtgaactacgcggtgcgcaagttcgcgaactacggcaagctctcgggcaaatcgctcgaagatctgcgcgcgggcgaacgcgtcgcggcgaacgacgcgaagcaggacccgctcgacttcgtgctgtggaagcaggccaagccgcaagaacccgccgacaccggctgggattcgaagtacgggcgcggccgtccgggctggcatatcgaatgctcggcaatgggttgcacgttgctcggcgaacattttgacattcatggcggcggccaggacctgcagtttccgcaccacgaaaacgagattgcgcaaagtgaagccgctaccggtcaaaccttcgtcaatttctggatgcacaacggctacgtacagatcgacaatgagaagatgtcgaagtcgttgaacaacttctttacgattcgcgaagtgttggcgcagtacgacgccgaggtcgtgcggtttttcatcgcgcgtgcgcattaccgctcgccgctgaactacagcgacgtgcatatcgacgacgcccgcaacgccctcacgcgtctgtacaccgcgctgaaggacgtcacgcccgacggcgcggaactcgactggaacgaagcgtatgcgcagcgtttccaggcagcaatgaacgacgacttcaacacgccggtcgcggtatcggtgttgttcgagttggcaagtgaagtgaaccgcacgcgcgaccccgcgctggcccgtcaattgcgtttgcttggcgcggtaatcggactgctcggccgtgagccgcgtgcctatctgcagcaggcagcgggcgcagcagcggtgggcgcgctcgaggccgccgcgatcgaagcgaagattgccgcgcgcgcggccgcgaagcaggcgaaggactttgcggcggcagaccggatccggtccgaattgctcgaggccggcgttgcacttgaagacaaacccggcgggttgaccgagtggcggcgcgtg

SEQ ID NO: 12942 - DNA, 843 bp, Burkholderia fungorum
atgttcacgagacttcgcgaagacatcgccacgatccgcgagcgcgaccccgccgcccgcagcgcctgggaagtcctcacgtgttatccgggtctgcacgcgctcgtgctgcaccggttcgcccatgcgtgctggcaggcgaggcgccgctggctcgcgcgcttcgtctcgcagttggcgcgtttcatgaccggcatcgaaatccatccgggcgcaaccctcgggcggcgcgtgttcatcgaccacggcatgggtgtggtgatcggcgagaccgcccaggtcggcgacgactgcacgatctaccagggcgtgacgctcggcggcacgtcgctcacgcgcggggcgaaacggcatccgacgctcgagcgcggcgtgatcgtcggcgcgggcgcgaaggtgctcggtggctttacgatcggcgccgaggcgaagatcggttcgaacgcggtggtgaccaagcccgtgccggcacggggcacggcggtgggcaatccggcgcggatcatcgtgccggcggcggctgccgtggcgtcggaaggcgcttccgtcgtggcgaattccgattccggcggcgccgcgcgcggtgcaaaacgctccgctggaagcagccgcttctgcgcgtacggcatcacgccgaatgcggacgatcccgtctcgctggcgattcacggcctgatcgatcacgctgccacgcaagcgaagcgcatcgacgaaatagtcgatgcgctggagcggctgggcacgagtctcgaagcattgcaaggtgcggacgcggcgctgctcgatctgcggcgtctgtcggccgcgatcgcaggcaaggtggatggggtggtcgcggagcgc

SEQ ID NO: 12943 - DNA, 1035 bp, Burkholderia fungorum
gtgacgcgttccaacgcttttcgaggtcacattttggactaccagatttccgtcgcggacagcgatatcgctttccattgcgaggcaggcgaaacggtgctcgacgccgccgagcgctcgggctacagcgtgccgtattcatgccgcaagggtgtgtgttcgacctgtgaaggcggcgtggtggccggcgcgggccgttcgtcggtgcagggcgatgtgcaggggcctgccgggcatgtgctgctgtgctgcctgcggccgtcttcggacatgacgatcgcgccgcgcaagatcgacaggcgcgagccggtggtgcgcaagacgctcgacatgtccgtctaccgcatcacgcagccggccgcggacgtgagcatcgtgcaattgcgtctgcctaccggcgtgcgtgcgaagtttcgcgccggccagtatttgcagatcgaactggaagacggcagccgccgtaactactcgatggcgaatccgcctcacgaaagcgacagcatccagcttcacgtgcgccatgtgccgggcggcagattctccgaaggcatgctgcggcgcctggacaaaggccacaagctgcgagtggagttgccgttcggcgaattctcgctgcaggacgactcgacgaaacccgtcattctgcttgctaccggcacgggcttcgcgcccgtcaagtcgatcgttgaggacgcaatcaaacgcaggctcgaccgtccgctgactttgtactggggcgcgcgtcgcgctgaagacctgtatctcgccgagctggcgcagaagtggcacgacagcggcaagctgaaattcgtacccgtgctctccgagccgaacgcggactggaacggccgccgcggcttcgttcacgagacggtactcgaagatttcggctcgctcgacggctatcaggtctacgcgtgcggcaacccggccatgacgacggcagcccacgagtcgttcctgaaagccggcttgcccgacgacgatttcttcagcgacgcctttgtgcacaccgacacagcgccggcaatgacg

SEQ ID NO: 12944 - DNA, 270 bp, Burkholderia fungorum
atgaacaagacggaattgatcgatcacattgcacagcaagccgacatttcgaaggcagcggcaggccgtgcactcgacgctgtgatcggtggtgtcaaaggcacgttgaagaagggcggttccgtgacgttggtcggtttcggcacgttcgcggtgggcaagcgtaccgcgcgcacggggcgcaatccgcgcactggcgccgcgatcaagatcaaggcggccaaggtccctaaatttaggcctggcaaagctctgaaggatgcgctaaac

SEQ ID NO: 12945 - DNA, 2421 bp, Burkholderia fungorum
atgtcaggaacccaactccttccgccggaacgcattacgctcccgctgctcccgctgcgtgacgtagtcgttttcccgcacatggtgattccgctcttcgtaggccgcccgaagtcgatcaaggctctcgaagcagcgatggaaggcggcaagcacatcatgctcgtcgcccagaaaacggctgcgaaagatgagccgaccgaaaaggacatgtacgaagtaggatgcgttgctaacatcctgcaaatgctcaagctgcccgatggcaccgtcaaggtgctcgtcgaaggcttgcagcgcgcgaaaacgctttccatcgaagaacaggaaacgcagttctcgtgcgaagtcatgccgctcgaacccgaccacgccgacagcgctgaaaccgaagcgctgcgccgcgcgatcgtgtcgcagttcgaccagtatgtgaagctgaacaagaagatcccgccggagatcctgacgtcgctgtcggggatcgacgaggccgggcgtctggccgacacgatcgcggcgcatctgccgctcaagctcgaccagaagcagcacatcctcgaaatgttcccggtcatcgagcggctcgagcatctgctcgcgcaactcgaagccgagatcgacatcctgcaggtcgaaaagcgcatccgcgggcgtgtcaaacgccagatggagaagagccagcgcgagtactacctgaacgaacaggtcaaggcgattcagaaggaactcggcgaaggcgaggaaggtgcggatctcgaagaactcgagaagcgcatcacggctgcccgcatgccgaaggaagccaagaagaaggccgacgccgagctgaaaaagctcaagctgatgtcgccgatgtcggctgaagccaccgtcgtgcgcaactatatcgacacgctgatcggcttgccgtggcgcaagaagagcaaggtcaacaacgacctctcgaatgcggaacgcgtactcgacgaagaccacttcggtctcgagaaagtgaaggaacgcattctcgagtatctcgcggtccagcaacgtgtcgacaaggtcaaggcgccgatcctgtgcctcgttgggcctccgggtgtcggtaagacgtcgctgggtcagtcgatcgctcgcgccacgaatcgcaagttcgtgcgtatggcgcttggtggcgtgcgcgacgaagccgagattcgcggtcaccgtcgtacgtacattggttcgatgcccggcaagattctgcaaagcctgaccaaggtcggcgtgcgcaatccgctcttcctgctcgacgaagtcgacaagatgggccaggatttccgcggcgatccgtcttcggctctgctggaagtgctcgatccggaacagaaccatacgttcgccgatcactacgtcgaagtcgacttcgatctctcggacgtgatgttcgtggcgacgtcgaactcgctgaacattccgccgccgttgctcgaccggatggaagtgatccgtctgtcgggttacacggaagacgagaaggtcagcatcgcgcaacgttatcttttgcccaaacagaagaagaacaacggcctcaaggatggcgaggtcgatgtgacggaaaccgcgatccgcgacatcattcgctactacacgcgtgaagcgggcgtgcgttcgctcgagcgtgaaatttcgaagatctgccgcaaggtcgtgaagatgcttctgctgaagaaggcggaaggcgcggtgaaggtggacggcagcaacctcgacacgttcctcggcgtgcgcaagtacgacttcggtctggctgcgaaggaaaatcaggttggccaggtcacgggtctcgcgtggacggaagtgggcggcgatctgctgaccattgaagccgcggtgatgccgggcaagggcaacgtgatccgcacgggttcgctcggcgacgtgatgaaggaatcggtcgaggcagcacgctcggtggtccgttcgcgctcgcgtcgtctcggcatcaaggacgaagcgttcgagaagcaggacattcacatccacgtgccggaaggcgcgacgccgaaagacggcccgtctgccggtatcgcgatgacgaccgcgctggtgtcggtgctgaccggcattccggtgcgtgccgacgtcgcgatgacgggcgaaatcacgttgcgtggcgaagttctgccgatcggcggcctgaaggaaaagctgctggcggcgcatcgcggcggcatcaagctggtgctgattccggaagaaaacgtcaaggacttgacggagattccggacaacgtgaagaacgccatcgaaatcgtgccggtccgctgggtcgacaaggtgctcgaactcgcgctcgaacgtgtgccgtcggcgttgccggatgaagagccgaagcctgctgcgccggttgcagcggagccgggcaaagacgccgcagcaacagaggtggtgaagcac

SEQ ID NO: 12946 - DNA, 1269 bp, Burkholderia fungorum
atggcggacaagaaaggttctaacagcgaaaagctgttgtattgctcgttttgcggtaagagccagcatgaagtcaaaaaactgattgccggcccgtcggtgttcatctgtgatgaatgtatcgacctgtgcaacgaaatcatccgtgatgaggctgcaggtgcgggcatcgaggcgggcttgtccaagtccgatctgccgagtccgcaggaaatccgtgaaatcctcgaccagtacgtgatcggtcaggaacgcgcgaagaaaattctcgcggtggcggtgtacaaccactacaagcgcctgaagcatctcgacaagaaggacgagatcgaactgtccaagagcaacatcctgctgatcggcccgaccggttccggcaagacgctgctcgcgcagacgctcgcgcgccttctgaacgttccgttcgtgattgccgacgcaaccacgctgacggaagccggctacgtcggcgaagacgtcgagaacatcattcagaagctgctgcaaaactgcaattacgaagtcgacaaggcccagcgcggcattgtctacatcgacgaaatcgacaagatcagccgcaagtccgacaacccgtccatcacccgcgatgtttcgggtgagggcgtgcaacaggctttgctcaagctggtcgagggtacgatggcgtcggtgccgccgcagggcggccgtaagcacccgaatcaggactttatccaggtcgataccaccaacattctgttcatttgcggtggcgcgttcgacgggctcgaaaaggtcatcgtcgatcgtaccgagaagaccggtattggcttcggcgcaagtgtgaagagcaagcaggaccgcgacgccggcgaagtgctgcgcgaagtggagccggaagatctgatcaagttcggcctgattcccgagctgatcggccgtctgccggtggtggccacgctcggcaagctcgacgaagtcgcgttgatgaaaatcctcgtcgaaccgaagaatgcgctggtgaagcagtaccacaagctgttcaatatggagcgcgtggagcttgaaattcgcccggccgcgctgcaggctgtggcgcgtaaggcaattcgtcgcaagacgggtgctcgtggtttgcgctccatcctggaacaggcgttgcttgatgtgatgtacgacctgccgcaaatgaaaggcattagcaaggtcatcatcgacgacaacgttattgacggcgacggcaaaccgctactgatctacgaagacgcgcccaaggtcgcgggttcgaac

SEQ ID NO: 12947 - DNA, 1000 bp, Burkholderia fungorum
aagctttatatttccgacgtcactttgcgcgatggaagccacgctatccgccatcaatactctgtgcctcaggtacgtcagatcgcccctggcgctggacgaggcccgcgttgactccatagaggtcgcgcacggggatggccttcagggttcgagcttcaactacggctttggcgctcacaccgacgtggaatggatcgaagctgtagccgatgttgtgaagcacgccaagatcgcgacactcctgctgccaggcataggcaccgtgcatgatctgcaggccgcgtacaacgccggcgcgcgcatcgtgcgtgtcgccacccactgcactgaagccgatgtgtcgcgccagcacatcgaactcgctcgcaagctggacatggacacggtgggcttcctaatgatgagtcacatgtcctcgccgcaagctctggctgagcaggccaagctcatggaaagctacggcgcgacctgctgctatgtcgtcgattccggcggcgcgatgaacatgaacgatgttcgagatcgtgttctcgcgctgcgtgaagtcttgcagccggaaactgccattgggattcatgcgcatcacaatctcagcctcggcgtggccaattccatcgtggccgtagaagcaggcgctatccgtgtcgacgcaagcctggctggcatgggcgcgggtgccgggaatgcgccgttggaggtattcatcgccgccgcggaacgcatgggctggcagcatggtacggacctgtacagattgatggatgccgccgatgacatcgttcgccctctgcaagatcgtccagtgcgtgttgatcgagagacgctcgcgctcggctatgccggtgtctacagctcattcctgcggcacgccgaggccgccggtcacaagtatggtctgaagacggtcgatattctggtggagcttggcaagcgtcgtatggttggtgggcaagaagacatgatcgtcgatgtggcgctcgatttggcacaacagacg

SEQ ID NO: 12948 - DNA, 444 bp, Burkholderia fungorum
gtgctgacgattacacgaaaactcgaattcgacgcgggtcaccgcattcccgatcaccgcagccagtgccgtaatctgcacggtcatcgctatgtgctcgaaatcacgctgcaaggcgatctggtcgacaccgaaggcgcgcccgaccgcggcatggtgatggacttcgccgacgtgaagtcgctcgccgtcgagcatctggtcgacaagtgggatcatgcgtttctggtctatgaaggcgacacgcaggtgcgcggtttccttgaaacgatggccgggcacaagacggtcgtgctcgatcgcattcccaccgtcgaaaatctggccgccgtcgcgttcggcattctcgcgaacgtctacgatgcccactacggcgtgaatctccgtttgcacaagctgcgtctgtacgagacgccgaattgctgggccgacgtgatccgcgac

SEQ ID NO: 12949 - DNA, 1488 bp, Burkholderia fungorum
atgtgtgctgattgcgtcgcgcgctccgcgcggcccgccttagccttcttcatgaccataaagccttcttcgcgcactgcttccgcaccggcgcgtccgcgcgaatcccgtttgtcgatgctgcatctcgcgcccgagtcgctcggcttcgcgctcgactgcgcgggccaggctgtcggcgcagtgcgtctcggcgcagcgttgccggccgcgctgcaatccgtcttcgtgtccgcgcccgagggtagcgtcgcggccgcgcgcggcgcggtgcaggacatcgcgtaccgcaccatgcggcgtctggcgaccgccgagtggctgatcgcgaagctggtgaaaaaggcgccgccgccgcacgtcggtcatgtgctcgcctgttcgctggccttgcttgtcgacgacgaagcgaacgcagcctacgcgccgttcacggtggtcgatcaggcggtgagcgcgatcgccgcgcgtcgtgaattcgcttttgccaaggggctcgtcaatgccgtgctgcgcactttcctgcgtgagcgcgagacgctgttgagcgccgcgcaagccgacgaagtggcgcgctggaactaccccgcctggtggatcgatgcggtgaagcgcgcatggcccgacgcatggcagtcggtgctcgccgccggcaacacgcaaggtccgctgacgctgcgcgtgaacgcgcgccgttcgactgtggacgcctacctgcaactgctgcagaaccagcacattgccgcaagcaaggcgggagactacgccgtcaagctcgccacgccgatgcccgttgaccgcattccgggcttcaccgacggtgtcgtttcggtgcaggacgccggcgcgcaactcgccgcgcaactgctcggcgtgcacgacggtatgcgcgtgctcgacgcctgcgccgcgcccggcggcaagaccggccatctgctcgaactggccaatcttcagctcgtcgcgctcgaaagcgacgcctcgcgtgcgcgccggatcggcgagaacctgcagcgcctcaagctcgaagcggaagtgcggatcggcgacgccggcacgcccgcgaaatggcacgacgacatcgaccagccattcgaccgcattctcgccgacgtgccgtgttcggcgtcgggcatcgtgcggcgccatccggacattcgctggctgcgccgcgcgtccgacattcccgcgctggtcgccgagcagcgccgcattctcgacgcgctgtggccgctcgtgaaaccaggcggcgagttgctctacgttacgtgttcgatctttcccgaagaaggcgagttgcaggcgcagtggtttggaaacaagtatcaggatgcggtacgattggacgcgccggggcagctgttgccttcagtcgctcgcgcgcccgccgacgcatcggccggttcccatgccggacaatccgctgaagacagcgccggcgcgaactcagaccacgacggattcttctacgcgcgcttccagaaacgg

SEQ ID NO: 12950 - DNA, 1656 bp, Burkholderia fungorum
atggatatcaaacgcaccgtcctatgggtcatctttttcatgtcagcggtcatgctgttcgacaactggcaacgcgaccacggacgcccgtcgatgttcttcccgagcgccacgccgaccaggaccgtcggtagcgccgcaccgggaaccacgacgccgggaacccagcccgccgatctgccggccacgaacgcagccgcaccgggcaacgcgccggcggccacgcaatcgcaactgatcaagttcaacaccgacgtctatagcggcgaaatcgacactcgcggcggcacgctgtcgaagctgtcgctcgtcaagcaaggcgacggcaagcagcccgacctcgtcatcacgctgttcgaccgcaccgcgaaccacacgtacctggcgcgcacgggcctgctcggcggcgacttcccgaatcacaacgacatctacacgccgttgccgaaccagccgcacgatctgacgggcgacgaaaagtcgttccagatcagcttcgagtcgccggtgaagggtggcgtgaaggtcatcaagacctacacgttcacgcgtggcagctatgtgatcggcgtcgacacgaagatccagaacgtcggcaccacgccggtgagcccgtcggtctatatggaactggtacgtgacgatcagccggtggaaacgccgcgcttctcgcacacgttcatcgggccggctgtctacactgaccagcatcacttccagaagatgacgttcggcgacatcgacaagaacaagcaggactacgcgacttcggccgacaacggctggattgcgatggtccagcattacttcgcgtcggcctggattccgcagcaaggtgcgaagcgcgatatttacgtcgagaagatcgatccggcgctgtatcgcgtcggcgtgaaggagccggtgccgaccatcgcgccgggccaaaccgtcgacgtatccgcgcgtctgttcgcgggtccggaagaagagcgcatgctcgaaggcatcgcgccgggtctggaactggtgaaggactacggctgggtgacgatcatcgcgaagccgctgttctggctgctcgagaagatccacagctatgtcggcaactggggctggtcgatcgtgctgctcacgctgctgatcaaggccgtgttcttcccgctgtccgctgcgagctacaagtcgatggcgcgcatgaaggcgatcacgccgcgcatgcaggcgctgcgcgaacgcttcaagggcgatccgcagaagatgaactcggcgctgatggagctgtacaagaccgaaaaggtcaatccgttcggcggctgtctgccggtcgtgatccagattccggtgttcatttcgctgtactgggtgctgctgtcgtcggtggaaatgcgcggcgcgccgtggatcctgtggattcacgatctgtcgcaacaggatccgttcttcatcctgccggtgctgatggccgtttccatgttcctgcagaccaaactgaacccgacgccgccggacccggttcaagccaagatgatgatgttcatgccgatcgcgttctcggtcatgttcttcttcttcccggccggcctggtgctgtactacgtcgtgaacaacgtgctctcgatcgcccagcagtactacatcacgcggatgatggggcaggcgaaaaccaaagcggcc

SEQ ID NO: 12951 - DNA, 1392 bp, Burkholderia fungorum
atgctcaccaccgattccgatcccatcgtcgccatcgccaccgcgcccggccggggaggtatcggcgtggtgcggatttcgttcggccgagcgggtgaggcggcggcccagccgctgatgcaagcgctcaccggtcagacactcgccgcccgccgcgccagctacgttccgttcctcgacgccagcggcgatgcgctcgaccgtggcatcgcgctgtacttcccggcgccacactcctatacgggcgaacacgtgctcgaactgcagggccacggcggtccggtcgtgctgcaactcgtgctgcagcgttgcatcgacgccggccgcgccttcggtctacgtctggccgaaccgggcgagttcacgcgccgcgccttcctcaacgacaagctggatctggcgcaagccgaagcggtcgccgatctgatcgaggccagcaccgaggccgccgcgcgctcggcgggccgctcgctcgacggcgcattttcgcgcgacattcacgcgttggtcgaagacgtgatcacgctgcgcatgctcgtcgaagcgacgctcgactttcccgaggaggagatcgacttcctcgaagccgccgacgcccgcggcaagctcgcgcggattcgcgagcgcctcgggcacgtgctgagcgaggcgcggcaaggcgcgttgttgcgcgagggcctctcggtggtgctggccgggcagcccaacgtcggcaaatcgtcgctgctgaatgcgctggcgggcgcggaactggcgatcgtcacgccgatcgccggcaccacgcgggacaaggtcgcgcagacgatccagatcgaaggcattccgctacacgtgatcgataccgccggcctgcgcgataccgaggacgaagtcgaaaaaatcggcattgcgcgcacctggaacgagatcgaacgcgcggatgtcgtactgcatctgctcgatgcgcgcaccggcatgacggtcgaagacgaggcgatcgccgggcgctttccggccggcgtgccggtggtgcgcgtgctgaacaagacggacctgaccggccttgcgccggcaacgcgagcactcgacgcagacctggatctgagcgaagtgcggctctcggcgaaacagggcgacggcgtagcgctgttgcgcgaagagttgctgcggatcgccggctggcaagcaggcgcggaaagcgtgtacctggcgcgcgaacggcatctgattgcactacgcgccgccgaagaacatctcgccaccgcagccgcgcacgccgatcagaactcccaggcgctggacctattcgctgaagagcttcggctcgcgcaggaccagctgaattccatcacgggcgaattcagttcggatgacctgctcggagtgattttcagcaggttctgtatcggcaag

SEQ ID NO: 12952 - DNA, 483 bp, Burkholderia fungorum
atgatctcagctgaaggcctgaaagaaatcgatcgtgcgatcgcgaagtatcccgccgatcagaaacagtccgccgtgatgtcggcgttggccactgctcaggaagagcatggctggctgtcgcccgaactcatgcagttcgtcgcggactatctcggcatgccggcagtcgccgtgcaggaggtggccaccttctacacgatgtacgagacctcgccggtcggcaagtacaagatcacgctctgcacgaacctgccgtgtcagcttggcccggacggcggctcggacagcgcggctgaatatctgaagcagaagctcggcatcgacttcggcgaaaccacgcccgacggcaagttcaccctgaaagaaggtgagtgcatgggctcgtgcggcgacgcgccggtgatgctggtgaacaaccatcgcatgtgcagcttcatgagccgcgcgaagatcgaccagctgctcgaggaactttcgaaa

SEQ ID NO: 12953 - DNA, 1326 bp, Burkholderia fungorum
atgacgtgtttacacgatcgtcacatcaaaccgctgattctcgccggcctgaacggcgataactggcatctcgaagactatgtggcgcgcggcggttacgcccagctgcgccgtattctggaagagaagattccgcccgagcaggtgattgccgacgtcaaggcgtcgggcctgcgtggccggggcggtgcaggcttcccgaccggcctgaagtggagcttcatgccgcgtcagttccccggccagaagtatctcgtctgcaattcggacgaaggcgaaccgggcacgttcaaagaccgcgatattctgcgtttcaatccgcattcgctgattgaaggcatggccattggcgcgtacgcaatgggcattacggtcggctacaactatattcacggcgaaatctgggaagtctacaaacgctttgaacaggcgttggacgaagctcgccgcgccgggttccttggcgaaaacatcatgggttcgggcttctcgttcgaactgcatgcgcatcatggttacggcgcctatatctgcggcgaagaaaccgcgctgctcgaatcgctggaaggcaagaaaggccagccgcgcttcaagccgccattcccggcgagcttcggcgtgtacggcaagccgaccaccatcaacaacaccgagacgtttgccgcggtgccgttcctgctcgcaatcggtccgcagaattaccttgaaatcggcaagccgaataacggcggcacgaagattttttcgatcgcaggcgacgtcgagcgtccgggcaattatgaaattccgctcggcacgccgttcgccacgctgatggaactcgccggcggcatgcgcggcggcaagaagatcaaggccgtgattcctggcggctcgtcggcgccggtcattccgggcgacatcatgatgcagaccgacatggactacgactcgatcgccaagcaaggctcgatgctcggttccggcgcggtcatcgtcatggacgagacgcgttgcatggtgcgctcgttgttgcgtctgtcgtatttctattacgaggaatcgtgtggtcaatgcacgccttgccgtgaaggcacgggctggctgtaccgcgtcgtgcatcgtatcgagcacggactcggccgtccggaagatctggatctgctgaactcggtcgctgaaaacatcatgggccgcacgatttgcgcgctcggcgatgcagcggccatgccggttcgcggcatgctcaagcactactgggacgaattcgaatatcacgtcgcccacaagcattgcctcgtcggcggtcatgccggcgctgcagcggcgtcggaaacagtggctgcc

SEQ ID NO: 12954 - DNA, 732 bp, Burkholderia fungorum
atgtcagaagttttggagagtggtttatctgccgaagggagggcaatgcaagatccagtcagggtcgtggtcgctgacgaccatccggttattctgttcggcgccgagcaggctttgctcaagtttcctggtctgcaagtggtcgcccgtgcacgacagtcaaccgaattgatcaaggtgctgcaaaccattgcctgcgacgtgctcgtcacggatctggcaatgccgggcggccaatatggcgacggcttgccgctgatcggctatctacgccgcaatttccccaaccttcccatcgtcgtattgacgatgctcgagaacgccgcgttgctcaagcggctgagcgaactcggcgtaacgtcggtcgtcaacaagtcggacgatctgagccatatcgggctcgcggtgcagcacgtcagccgcaacctcgaatacatgagcccgtcggtcaaggcgtcgctagatgcattgcgcatgaacgccggcggcaagaacgacgaagtcatgttgtccaaacgtgagctggaagtggtgcgcctgttcgtgtccggcatgacgatcaaggaaatctcggagcaactcaaccgcagcatcaaaacgatcagcacgcagaagaacacggccatgcgcaaactcggcatcgagcgggattccgagttgttccagtacgcgcagagcaacggcttgctgaacctgtcgtcgcattcaacggacgcaaccggcggcgtgtct

SEQ ID NO: 12955 - DNA, 684 bp, Burkholderia fungorum
atgacaggcttcgatcgccagacgatctccgacacgaccgccaagatgctgctggaagtacaggcagtgcacttcaacgcggagaaaccgtacattttcacgtccggctgggcgagcccggtttatatcgactgccgcaagctgatctcgtatccgcgcgtgcgccgcggtctgatggaaatggccgagaccacgatcctgcgcgacgtcggttatgaacagatcgacgcggtcgccggtggtgaaaccgccggtatcccgttcgcggcctggctctccgatcgcctgatggtgccgatgcaatacgtgcgcaagaagccgaagggtttcggccgtaacgcgcagatcgaaggcctgctgaccgaaggtcagcgcgtgctgctggtcgaagacctgaccacggacagccgcagcaagatcaacttcatcaacgcgctgcgcaccgccggcgccacggtgaaccactgcttcgtgctgttccactacaacatcttcaaggaaagcgtctcggtgctgaaagacatcgacgtggatctgcacgcgctcgccacgtggtgggacgtgttgcgcgtcgcgaaggaaaacaagtacttcgacaccaggacgctcgacgaagtggaaaaattcctgcacgcaccggctgaatggtcggcggcgcatggcggcgcaacctcgacgccgcaa

SEQ ID NO: 12956 - DNA, 1530 bp, Burkholderia fungorum
gtgcttgaggagcggattcgcctgtcgcagcttcgcgacaggatcgtgacggcggagcaggccgcatcgctgattcacgacggcatgaccgtcggcatgagcggctttggcgccgccggcgactgcaaggcggtccctctcgcgctcgctgcgcgtgcccgcgagcagtcgttacggatcacactgatgacaggagcatcggtgggatacgaggtcgacggagtgctcgccgaggcgggtgcaatttcccggcgcatgccttttcagtcggacaaatccctgcgcaaccagatcaacgccggcgaggcgatgttcatggacctccacctgtcggaaatggcggagcaactgcgagacggattcctcggacccgtcgatgtcgccgtgatcgaagccgtggcggttggcgaggccggtatcgtgccgaccatgtcggtcggcaattcggcggtgttcgccgcgctcgcaaagcaggttatcgtcgagatcaacctggatatgccgctcgaactcgaagggctgcacgacgtctatctgccgctatcacgtcccgaccgggagcctatcccgctcacgaacgcggcgcaaagaatcggccttccgtatattcctctggaccccacaaagatcgctgcgatcgtcgtcacgcgcaagggcgacagccccaacaaggttctgccgccggatgccgacaccacgcagatcgccggacacctgagcggctttttctcgcacgaggttcgcgcgggtcggctgggttcctcgttgcagccgcttcaggccggcgttggctcgatcgcgaatgcggtgttgcatgggctcgtcgattcaggttttagcggcctgcgcatgtattcggaggtgcttcaggacggcgccatcgaactgctcgacgccgggtgtgtcgacttcgcgtgtgcgtcggcgatcatgctgtcgagcgaatatcagacacgctttttcgagggactggaccgctaccggtcgcgcgtcctgctgcggccgcaggaaatcagcaatcatccggaagtcattcgccggctgggcgtcattgcggtgaacaccgcgctcgaatgcgacatctacggcaacgtgaattcgacgcatgtcggcggcacgcacatgatgaacggcattgggggctctggcgactttgcgcgcaatgcgtacctctccgtgttcgtgacgaagtcgctggcgaaggatggcgatatttcgagcatcgtgccgatggtgtcgcacgtcgaccatatcggacaggatatcgacgtgatcgtcaccgagcacggcttggccgacttgcgcggactggcgccgcgcgaacgcgcgcagcagatcatcacgcattgcgcggacccgctgtaccgcgacgcgctgcgcgactacgtggcaaaggcgggcgcgcgcggcggacagacacctcatctgatcgaagaagcactcgcgtggcacgcgcattatcgcgagcgccacagcatgcggcttattcagacctcgccgcccgcttcgcagccgatccccgaacctgcc

SEQ ID NO: 12957 - DNA, 1275 bp, Burkholderia fungorum
ttggctgagacgctgaaaactgaatacgcgatcattgccattccgtccgctacagtggatgtacagcggcgtgtagcgacgctatgtgtgcgcgccggcgtacgggcactcgtgctgcctgcgctaaccgacgtcacgcaaggccaggcgtttctgtcgcgcgtgcgacagattgacctcgaagatttgctgggccgtgatcctatcaatatcgatacgccccatgtagaagccctgttgcatgacagagtggtgatggtcaccggcgcaggcgggtctataggctccgaattgtgccgccaaatcttgcgattccagccggctcaactgattgcttatgacttgtccgaattcgcgatctatcggcttactgaagagttgagcgagcgttttccaggcgtgtcagtaattccggttatcggagatgcgaaggattcgctgctgctcgatgaggtgatgtcgcgtcatacgccgcacatcgtatttcatgcggccgcgtataaacacgtcccgctaatggaagagcagaacgcatggcaggccgtgcgtaacaacgtgctcggcacgtaccgggtaggtcgcgctgcgattcgtcacgatgtaaagcatttcgtgctgatctccaccgacaaagcagtcaatccgaccaacgttatgggtgcgagtaaacgtcttgcggaaatggcgtgtcaggccttgcagcagaccagcccgcgcacccagttcgagacagttcggttcgggaacgtactcgggagcgccgggagtgtcataccgaagttccagcagcagattgcaaagggcggtcccgtcacggtgacgcacccggagatcacgcgcttcttcatgaccatcccggaagcgtcgcaactggtgctacaagcgtccagcatggggcacggcggcgagattttcatcctcgacatgggcgaaccggtaaagatcgtcgacctggctcgcgatttgattcgtttgtacggatttaacgaggagcagatccggatcgtgtttactggtctacggcctggtgaaaagctctacgaagaactgctggcttgcgacgagacgacaacacgtacacctcatcctaagttgcggactgcgcgtgcgcgtgaagtatcagacgatctgttggataagttgttgccgtggcttatgcagcatcgcgtgttaggcgacgacgaagtacgccgcgacttgcgtcgctgggtgccggaatatcaaccggcaagctcgccgacgcttcacagcgtcgccgcgtttccccgtgcttcg

SEQ ID NO: 12958 - DNA, 1020 bp, Burkholderia fungorum
atgctgatgcacctttcgaccttcccaacgtgggttgccgtaaccttgatcgcgcttggcgctgcctgcgcatgcgccgccattctgtggacgctactccgaaccggcatcgcatggcggcttgccacggatatccccaacgaccgctcactacacgtcttgccgacgccgcgcgtcggcggctggggcattgtgccggtggccgtagtggcgaccttgctgctggcgccaagcctttggtatgccgctcttggtaccgctttcctagctgcggtttcgcaaatcgacgaccggcgcggattatctgcgagagtcaggttcgccgcgcatctgattgctgtggtcggcatagtagtactttttcccgctgatgcccgttggtgggtcttggtaatccttgtttttttgatgatctggctggtcaatctttacaatttcatggatggcgcggacggtttggcgggcggcatggcgctgttcggcttcgccggttacgcggccggtgcactgcttagcaagcatcctttgccagaattggcgtggtcagcgacggcgatttcgggtgccgcgctaggcttcctgttgtttaatttccacccggcacgcatttttcttggcgatgctggatcaatcgcgctgggctttcttgctggagcgcttggttattgggggtggcgcggaggagtgtggcctgtttggttcccgatcttggtgttcgcgccgtttatcgccgatgcgtcgatcacgctggcccgtaggttgctacatggcgaaagattttggcaagcgcaccgcgagcactactatcagcgtatggtgcgttccgggaccggacacgccaggacagcttttacgtggtatgtagtaatggtggctggcataatgtttgctatttatgcgcttggccgctcagtaatttttcagtcatgtgtgctggccgtttggatcgccgttctctgtgtagcaggcgctttggtcgatttgcgctggcgtcgtttccaatcaacactgtccgataac

SEQ ID NO: 12959 - DNA, 1011 bp, Burkholderia fungorum
atgcaacgcagcctcgcggacagccgcgtcaaattccgtcatctgcagtgctttctggccgtcgcgcagttcggcagcgttcagcgggccgccggcagcctgtcgatcacccagcccgccgtttccaagacggtcgcggagctcgaagcgattctcggggtgaagctgttcgagcgcggccgtcacggcgcggtgccgacccgcgaggggcaactcttcatgccgcacgcgagcgcctgcgtcagcgcgctgcggcagggcgtcgatctgctcgcgcacgcggaaggcgcggctgcggccacgctggaaatcggtattctgccgacggtcgccgcggtgttgataccgccggtgctgaagcggttcgccgcgctgtggccgcgcgtgatcgtgcgcctcgcaaccggcgccaacccggaattgctcgagagcctgaaagcgggcacgatcgaattcgcgatcgggcgtttggccgatcccgagcggatggtcgggctcagtttcgagcaactgttcagcgagccgttgatcgcggtggtgcgcgccgggcatccgctggcgctgggagcgggtttgccggccacctcgctcgaagattttcccgtggtgttgccgccgttcggcacgttgatccggcaatcggcggaaagtctgctgagtgcgtggggcgtgccgccgttgtcggcgttcgtcgaggtcttgtcggtgtccacgggccgtgcgctgacgctggagaacagtgcggtgtggttcgtgccgctgagcgcggtcgaatatgaactggcgcacggcatgctggtacgtttgccgctgccttttgccggcaccggtgagccggtcggactgatccggcgctcggacacgcagccttcgccggccgggcgggcgtttatcgacgcggtgcgcgaggttgcgcagcagcgcatggcggccagtgcagccagtgcggcgggcgcggataagacggcgggtgcggcaaccggaaaaggcgtgcggaaacggagccgcaaa

SEQ ID NO: 12960 - DNA, 1599 bp, Burkholderia fungorum
atgtccacggacgcagacacaatcaccgatgaacagatcgctgcaatcgccgatcgcatggtcgaagaaggcagaagagtttcgccagtgacaatctggaaagaggttcgcggcggttcgctggtggcgatagtcgcggccctgcaacgctggcgcgaagcgcggcaaggcgaaacgcctgcattgcaggtccagcccggcttgccggagggtctggccgaaaccgtgatgagcgcggcggacaggatctggtccgcatcccaacacgatgcggagcgggcattcagtcagcgtctggccgcagtgaaccaggatctcgaagcggccgtcgcggaacgggacgaagcgcttgccgagtatcagaagatgatcgatgaagtcgaaacgggacgccagcgggtcatcgcgctgacggacacgctgagcgcctcggaaagtattgccctgcgcctcgaagcggaactcgcgaccgtcacgggccgggccgaggcggccgagacgcacgtcgaggaactcgcgcagcgtgcgtcggcacaagacgcggatctggaagccatgaaggcttcgctcgacaaggaacgtctggcgcgcgaagagtcggccacggctctcgcgagcaagaatgatgaagtcgctcaactcactcaggaacgcgatcaggcgcggcacgagatcgtaacgttgagcgatgtctgccacgccagaacagaggaagtcacgcaatggtcgcaagaagcacgcgcggcctcgtcgcgtgccgagctggcggaggcgcgcatcgaggagctcgtgcagcgtgcggcggtggaccatgccaatctggaagcgatgaacgcatcgctcgaagcagaacgcaaggcccgtgaagagttggcggcggttgtttcgagcaagaccgacgaactgacgcgcgtcgttcaggaacgcgaacaggcgctgcagcaagtcacgacattggacgccgcctgtcgggcgaacgcgcaggaagtgacgcgatggtcgcaggaagcgaacgctgcaacgtcacgcgcgcaagcagccgaggcgcgcatagaagaactcgtgcaacgtgtgtcgtcgcaagatgccggcctcgaagcggcgaaggcgtcgcttgaagaggaacgcaagggtcatgaagagttggcggcggttgtttcgggcaagaccgacgaactgacgcgtgttactcaggagcgcgatcaggcgctgcagcaagtcacgacattggacgccgcctgtcaggcgaacgcgcaggaagtgacgcgatggtcgcaggaagcgaatgcggccacgtcacgcgcgcaagcagccgaggtgcgtatagaagaactcctgcagcatgcgacgtcgcaagctgccgagcagcaagccaccgtcgcattgctggacgaagagcgcaaggcacgagcggagttggccacagctatatcaggcaagagcgatgaattagcgcaagccgctcaggaacgcgatcaggcgcagcagcagattgttaccctgagcgacgctcatcaagcgaaatcggaagaagcgataaggttgtcgacggagctaggtgcagccttgttcgcacgcgaaagccgccgaggtccaggc

SEQ ID NO: 12961 - DNA, 1677 bp, Burkholderia fungorum
atgacgaccattcaggcacctacccaggcacctaccggccggccgctactggaaatcgaccgtttctccgtgcgtttcggcgacaaagtggccgtgcatgaactcagcctttccattgctcgcggcgagcgcgttgcgctggtcggcgaatcgggttcgggcaagagcgtcaccgcgttgtcgattttgcggctcgtggagcacgccgaattgagcggccgcatgctgctcgacggtgaagacctgctgcagaaaaccgagcagcagatgcgtggcctgcgcggcgcggacgtggcgatggtgtttcaggaacccatgaccgcgctcaatccgctcttcacgatcggcaagcagattgccgagagtttgcgtctgcatgaaggtttgcggccaaacgcggcgcgcgagcgcggcatcgagttgctcaggcgcaccggtattcccgaaccggagcggcgtatcgacagctttccgcaccaactgtccggcggccagcggcagcgcgcgatgatcgcaatggcgctcgcttgccgtccgcgtttgctgcttgccgacgaacccaccacggcgctcgacgtcaccgttcgccagcagatcgtcgatctgttgatctcattgcaggagcaggaagcggccgaacgcggcatggccgtgctgctgatcacgcacgatctgaatctggtaaagcgctttgcgcagcgcgtcgcggtgatggaaaagggcgtactggtcgaaaccaatacgaccggggcgctgttcgcgaacccgcagcatccatacacgcggcgcctgctggacagcgaaccgcaacgcgcggtggcgcccatcgagcagggcgcgcgccggctgctggaagtgcagggattggccgtcgactaccgcacctcggcgaaaggctggcgttcgctgttcggccgctcgacattccgcgcggtgcatgacgtcgatctgagcgtgcggcgcggcgaaacgctcggcattgtgggcgaatccggttcgggcaaatcgacgctggcggcaaccgtgcttggtctgcaacagccggccgccggccatatccatatcgacggcttgccgctttccacgctcaaaacagcgagttcgcgccgggcgctgtattcgcgcatgcaagtcgtgtttcaggatccgttcggctcgctgtcgccacgcatgacggtcgagcagatcgtcggcgaaggccttgccgtgcatcggccggaagtggatgcgaaagcgcggcgcgcgcgcgtcggcagcctgctcgaagaggtcggcatgcccgccgacgcgatgctgcgctatccgcatgagttctccggcgggcagcgtcaacgcattgcgattgcgcgcgcgttggcggtccagccggaattgctcgtactcgatgagccgaccagtgcgctcgacgtttcgatccagaaacaggtcctgaatctgctgacaaatctgcagaaaaagtacaagctaagctatttgttcattacgcacgatctggcggtgatgcgagctatggcgcatcgcgtgatcgtgatgaagtcgggacgcatagtggaagccggcgacacactcgacgtgttgcatgcgccgtcgcatccttacacccagtcgctgctggcgtcgtcgctcaatgtgccggagccgggcgccgccgcgactcagacgggaaaagccaatgat

SEQ ID NO: 12962 - DNA, 888 bp, Burkholderia fungorum
atgcaggacacgaccattcaacccgcgctgactcccgcgcagaacaacgcgaagcccgcccgcacggcggccggggcggcattgctgtgcgtgctgtcgatgtcgagcgtgcaattcggcgccgcgctctccgcaccgaccatggccgcatacggttcgctcagcaccacgtggctgcggctgtgctgggcggccgtggtgctcgccgtgctggtgcgcccgcgctggcggacctactcgcgctcgcactggcttgcggccggcgtgctcggcgcggcgatggccggcatgacgttgtgctttttcgcggcgctccagcgtattccgttagggcttgccgtcgcgatcgactttctcgggccgctcgccgtggcgacattcgcggtgcgccgcgcgcgagcgttgctctggcccgcgctggcgattgccggcgtcacactgctttcgcgcgatcgtgccggctggatcggcgaaccgctcggcgtgttgctcgcgtgcggcgcggcgctcggctggggcagctatatcgtgttgatgaaaaagaccggcaccctgttcgcggggctcgaaggactgtcggtgtcgctgatcgcggcggcgctcgcggccacgccgttcggcctggcgcaaagcgggctgcacgtggcgggcgcccagatcgcggcaaccgcggggctcgcgctgctggtcccgctgctgccgtacgcgctggaaatggtggcgttgcgccacatgccggccgcttcgttcgggatcctgatgagtgtcgaaccggcaatcggcgcgctggcgggcttcgtcgtgctgcatcagccaatgggggttttgcaggtcgccggcacgctgctggtggtgaccgcgagcgtcggtgccgtggtcgcgacgcgc

SEQ ID NO: 12963 - DNA, 9219 bp, Burkholderia fungorum
atgagctgcgcgcctatgggcggcggcgatactagcggcgacggcatgtcgttctcgctgaataacgcggcttctaccgacggtgcgtggggtttcaacagtggccagatcactgcccgcgtaacaggctatcaggatggccacctcgagctcgcggccgagaaaggcatctatatggtcaacgatgtcaacatgagcggcaataagatcagctcactggcgccgggcgacgtatcgtcgaagagcacggacgcggtgaacggctctcaggtgtatcagtacacgcgctatttcaaggccaattcgccgtcgagcgacccgtcgaccgacgcccgcgcgatcggaacgagctcggttgcttccgggccgtcgtcgctcgccattggcaagaattccagcgcgtacggcgcaaacacttccgctatcggtaccaattcggtcgcactgggcgccggctcggttgccagccgcaatgacgctgtttcggtcggctacctgtcggcggacggtacttcgcagtacacgagacagatcgtcaacgtgaccgcgggcgccgcgggtacggacgcggtcaacgtcaaccagttgaatgcggcgatcgcgagcgtcagcggcggcggcagcggcgatctcgcgcccaacgccgtgacgtacgacacctctgcgtcgaccctgatcacgctcaagggcgcgagcggcaccaaaatcacgaacctgacggccggcgatatctcgtcgatctggagtacggatgcagtgaacggttcgcagctgtaccagacgaaccagaatgtgacgaacgtcgccaataacgttgcgaacgtatcgggcaatcttgccaatgtgacgaacatcgtcaacaacatcgtgaacaacggcattgcgggctcaccgctcgtggtgacctacgacacctcggctcgcgacacggtcacgctcggcggcacggaccacacggcggcggtcaagctcacgaacgtggcgcctggcgacatttcgtcggcctcgagcaccgacgcggtgaacggcgcgcagctgtacgcgacgaaccagaacgtcagcgcgctggcaagcaatgtcggtgacattgtggtgaatctctacaaccgcggcgccaagtacttccacacgaattcctcgctggccgattcgtcggcaatcggcacgaatgcggtggcgatcggcggagcggcgatcgcgtcggcggacaactcggtggcgctgggtgccaactcggtggcgaaccgtgcgaacgcggtgtcggtcggtgcggccggtacggaacgccagatcatcaatgtggcaaacggtacgggtgcgaccgacgccgtcaacctgcagcagttgcaggcagtggctgcaagcatcagcagcggcgcggtgacgggcagcttcgttgcctatgacgactcgaccaagggctcggtcacgctgaagggggcgagcggatcgacgatcacgaatctgaaggcaggtgcactgacggcgtcgagcgtggatgcggtgaacggcagccagctgtatcagaccaacgcgaacgtggcgaacgtcgccggcaatctcgccaatgtcgcgggtaacgtgacgtatgtgaccaacaccgtcaacaatattgaaaacggtggcggcatcaaatatttccacgcgaattcgtcgttggccgattcgtcggcagcgggtgcggatgcggtggcgatcggcggtgcagccaatgcttcggcagtcaactcggtagcgctgggtgcgaattccgtggcgaaccgtgcgaacgcggtctcggtgggcgcgctcaatgctgaacgccagatcatcaatgtcgcggcgggcacgcaaaacaccgacgcggtgaacgtggcgcagatgaatacggcaatcgccaatgcgtcgatgagcggcggtggttcgcctgacgcggttgtttatgattcgtcctcgcacaatatcctgacgctgggcggcgtcgcggcttcggccccggttgcgctgacgaatgtggcggctggccagatcgtgtcgggcagctccgacgcggtgaacggcggtcagttgtacaacgtggcgaacagcgtggccgctgcgctgggcgccggctccacggtcaacaaggacggcacggtttcggcgccgggttacaccatcagcggctcgacttacggcaatgtgggtgacgcgctgaacgcgctcaacacggccgccggcgatctggtcagcgcggcgaaatacgtcaaggtggtctcatcggcggctgcagcatcggcaagcggtagcgaatccgttgctatcggcggcaacgcaatggcgaccggctccaactcgctggcgatcggcgcaggcgcgaccgcgaagtacaacaattcgacggcgatcggcgtgaacgccatcacggacgcagcgaatacggtgtcggtcggtgctcgcggcgcggaaatgcgcatcacgcacgtcgctaacggtatcaacgacaccgacgcggccacggtggcccaactcagtgcgctccagtccaaacttctgcagaccacgcagcagagcagcggcgtgaagtccttgctgctgggcgctgcggtaccggtgacgagctatatcgcagtgagctcgaacgtgaccggcggcggcagcacatccgcttcgagcgacctgaacgcaatggctatcggtccggtagcggccgcaaccggtatcggcgcgctggccgtaggctcgggctccgctgccggcagcaacgcttccacggcagtcggcacgggcgcgggcgtggcctcggtgaactcgaccgcaatcggctacagcgcaacaatcggcgccaattcggccaattcgctggcgatcggttacaactcgcgtgcgcaagcaaccaactcaatggcactcggctcatttgccagcgccacgagcgccggctcggtcgtgattgggtacaacgcctttgtcaaccaggccgccacgaacggcatggcactgggtctgaatgcgtcggtgagcgccgcgaatggcgtcgcgatcggctacaactcgatcgcggatcgggccaacgctgtgtcggtgggcagctcgagccagcagaatcagattatctacgtggcagccggcacgaacggcactgacgcggtgaacgtcaaccagttgtcgggcgtgacttcgatcatcggtggcggcgccgccgtgaaccctgacggcacgatcaagaagccgagtttcgcgattggcggccagacctacaccgacgtcggctcggctatcaacgcggcggtatcgggtggcacggccaacggcgtgcaatacgatacgtcggcgcggaccaaggtgacgctcggcggcacgggtgcgacgaccgcggtgacgctctcgaacgtggctaacggcgtggcgaacaacgacgcagtcaacgtgacgcagctccaggctatgggcgcgacgatcggcaccagcggtgtggtgacgaacagtttcgtggcctatgacgacacgacgcaaggcaagatttcgctgaagggcacgggcggcacgacgatcacgaacgtgaaggcaggggcgttgtcgtccgcgagcctggacgcggtgaacggcagccagctgtaccagaccaacgcgaacgtggcgaacgtcgcgggcaatgtggcgaacgtgaccaacgtggtgaacaacatcaccaacggcggcggcatcaagtacttccacgccaattccacgctggccgattcatcggcaaccggtacgaactcggtggcgatcggcggcgcggcgagcgcgacggcggccaactcggtggcgctgggtgcgaactcggtggctggccgtgcgaacgcggtgtcggtgggcgcggttggttcggaacgccagatcatcaacgtggcgaacgcgacgaacggtaccgacgcggtgaacctgcagcagttgcaggcaatgggcgcgaacgtcaacagcagcggcgtggtgacgaacagcttcgtggcgtacgacgacacgagcaagggcaaggtcacccttggcggctcgggcttcacgaaggcagtgacgctgacgaacgtggcgaacggcgttgcgaacgcagacgcagtgaacatggcccagctcaaggcaatgggcggcacgatcgacagtagcggcaatgtgaccaatgcattcgtggcctatgacgacacgagcaaaggcaaggtcacccttggcggcgcgggttcgacgaaggcagtggcgctgacgaacgtggcgaacggcgttgcgaacgcagacgcagtgaacatggcccagctcaaagcaatgggcggcacgatcgacagtagcggcaatgtgaccaatgcattcgtggcctatgacgacacgagcaagggcaaggtcacccttggcggcgcgggttcgacgaaggcagtggcgctgacgaacgtggcgaacggcgttgcgaacgcagacgcagtgaacatggcccagctcaaggcaatgggcggcacgatcgacagcagcggcaatgtgaccaacgcattcgtggcctatgacgacacgagcaaaggcaaggtcacccttggcggcgcgggttcgacgaaggcagtggcgctgacgaacgtggcgaacggcgttgcgaacgcagacgcagtgaacatggcccagctcaaggcaatgggcggcacgatcgacagcagcggcaacgtgaccaacgcattcgtggcgtatgacgacacgacgcttggcaagatctcgctgaagggcacgggcggcacgacgatcacgaacgtgaaggcaggcgcgttgtcgtccacgagcctcgacgcggtgaacggcagccagctgtaccagaccaacgcgaacgtggcgaacgtcgcgggcaatgtggcgaatgtcgcgggcaatgtggcgaacgtgaccaacgtggtgaacaacatcaccaacggcggcggcatcaagtacttccacgccaattccacgctggccgactcgtcggcaacgggtgcgaactcggtggcgatcggcggcgcggcgagcgcgacggcggccaactcggtggcgctgggtgcgaactcggtggctggccgtgcgaacgcagtgtcggtgggcgcggccggttcggagcgccagatcatcaacgtggcgaacgcaacgaacagtaccgacgcggtgaacctgcagcaattgcaggcaatgggtgcgaacgtcaacagcagcggtgtggtgacgaacgcattcgtatcgtacgacgacaccagcaagggtaaggtgacccttggcggctcgggctcgacgaaggccgtctcgctgaccaatgtggccgccggcgtggcgagcgcagatgcagtgaatatgggccagctcaagcagatgggcgcgactgtcgacaccagcggcaatgtgacgaacagcttcgtggcctatgacgacacgacgctcggcaagatctcgctgaagggtacgggcggcacgacgattaccaacgtgaaggcgggggcgctgacgtccgcgagcctcgacgcggtgaacggcggtcagttgtaccagaccaatgcgaacgtggcgaacgtggccggcaacttgacgaacctgaccaacgtggtgaacaacatcaccagcggcggcggtatcaagtacttcaacgcgaaatcgacgctggccgactcgtcggcaaccggtacgaactcggtggcgatcggcggtgcggctaacgcgtcggcaaccaattcggtggcgctgggtgcgaattcggtggcgggccgtgcgaacgcggtgtcggtgggtgcggccggctcggagcgccagatcatcaacgtggcgaatgcgacgaacagtaccgacgcggtgaacctgtcgcagctgcaggcaatgggcgcgaacgtcaacagcagcggcgtggtgacgaacagcttcgtggcgtatgacgacaccagcaagggcaaggtgacgtttggtggtgccggctcgacagcgccggtgttgctgacgaacctcgccgccggcgcggttacctcgacgagcagcgacgccatcaatggctcgcagctgtaccagacggccgccagcatggctggcgcactgggcggcggcgccgcgctcgccaaggacggcacgatctcggcaccggcctatgagatcaccggctccacgtacaacaacgttggcgatgcactggctgccgtcgatacccagcttggcgatatcaacacgaacttctcgactaacctgaagtacgtgaagattatttcgcagagcaatgcagcacaggcgagcggtagcgaagccattgcaattggcggcaacgcaatggcgaccggctccagctcgctggcgatcggcgcaggcgcgacctcgaagtacgacaattcgacagctatcggcgtgaacgcttccacggatgcgcctaacacggtgtcggtcggtgcccgtggtgcggaaatgcgtatcacgcacgttgctaacggtatcaacgacaccgacgcggccacggtagcccagctcagcgcgctccagtccaagcttctgcagaccacacagcaaagcggtgtgaagtcgctgctgttgggtgcggtaccggtgacgaactacattgccgttagccagaacgtgactggcggagggtccacgtccgcttcgaacgacctgaacgcaatggcgattggcccgctggcagcggcaagtggcgtcggcgcgctggctgtaggcgccggctccatcgccggcagcgatgcttccacggcagtcggcacgggagcggccgtaggctcggtgaattcgacggcaatcggttatagcgcgtcggtcggtgtcaattcggccaactcgctggcaatcggctacaactcgcgagcccaggcactcaactcgctggcaatcggcacggaagcgagcgccacgagcgcaggctccatcgcgatcggctacggcgcgttcctcaacccgtccgccacgaacagcatggcgctgggtctgaactcgtcggtgagcgcagcgaatgccgtcgcaatcggctacaacgcggttgctgaccgcgcgaacgcggtctcggtgggtagcagcaagcagcagagccagatcatcaacgtcgcggccggtacggcgaataccgacgcggtgaacctgggtcagatgaatgctgcaatcaatgctgttgccggcggcggctcgcctaacgctgtcgtctatgacacgtcggcgcacatgtcggtgacgctgggcagcgcaggcacgccggtgaaggtgtcgaacgtggccaacggcgtggcgaacaacgacgcggtgaacgtggcgcagcttacggctatgggcggcaccatcaacagcagcggcgtggtgacgaacagcttcgtggcgtacgacgacacgaccaagggttcgatcacgctgaagggtgcgagcggcacgacgatcacgaacgtgaaggcgggcagcttgacggccaacagcacggacgcgatcaacggtggccagttgtatcagaccaacgcaaacgtcgcgaacctggctgctaacgttgccaacatcaccggcaacgtgaccaacacggtcaacaacatcgtcaacggcggcggcatcaagtatttccacgccaattcgacgctggccgattcgtcggcaaccggtacggactcggtggcgatcggcggcgcggccaacgcgacggcggccaactcggtggcgctgggtgcgaactcggtggctggccgtgcgaacgcggtgtcggtgggtgcggtgggtgcggaacgccagatcatcaacgtggcgaacgcaaccaacagtaccgacgcggtgaacctgtcgcagttgcaggcaatgggcgcgaacgtcaacagcagcggtgtggtgacgaacgcattcgtcgcgtacgacgattcgaccaagggtaaggtcacgttgggtggcgtcgggtcttccatgccggtcacgctcgcgaacgttgcagaaggccaggttacgtcgaccagcaagcaggccattaacggttcgcaactgtacggtacggcaaacagcgtggcgtcggcgctgggtggtacttcgtctgttggatcgaacggtaacgtcactgctgccttctcgctggatggcaagacgtacaacagtgtcgctacgacaatggacgcgttgaacgccaagatcgcaacgggatcgacggacggcgttgtgtacgacacgtcggcacataacaagttgacgctcggcggagtcaatgccaccacgccggtgacggttgcaaacgtcgccgccgcgacgagcgacgatcaggcagtgaaccttgcgcaattgaaggccgctggtttgaacgtcgatacgtcgggtaacgtgaccaactcgttcgtcgcctacgacaacacaaccaggggaacggtgaccttcaatgcgggcggcgcgccgacccagttgaagaacgtggcagccggcacggatttgaccgacgcggtcaacttcggccagatgcaatcgtatgtcgcgcagaacggcggcggtggcacgacgaacggcgtttcgtacgacgactcgttgcggggcaaggtgacgctgggcggcgtgggttccacgacgccggtgacgctgaccaacgtggcggccggttcggccgcgacggatgcggtcaactactcgcagttctcgagcctcgaaagtcaggtgaacaacctggcgaacggcggcgcgggcagcacgacgtacgtcaacatcaacaccccggcttcgggcggcacggcagcagtggcctccggttcggactcgatcgcgatcggtaacggtgcttcggcatccggtagcgagtcgattgcaatcggcaagaacacggtgacgacgggcgacaactcggtcgcgatgggtgcgggcgcttcggctccgaacgccaacgcggtcgcgctgggtacgaactcgacgacggatcgcgacaactcggtgtcggtgggctccgccggtgcagagcgtcagattaccaacgtcgcagccggtacgcagggcacggacgcggtcaacctgaatcagttgaacagtgccatgggcaatatgagcaactcgatcaacaacgttgaccgtaacgccgccaagggtatcgcttcggcatcggcgctgaatatcgttacgccgtatctaccgggtcgtaccacgttgaacgcgggtgtcgccaactatcgcggctaccagtccgttggtctgggcgtgtcacgctggaatgagaaaggcacgatcaactacaacctgggcgtgtccacctcgggcggtaatagcaccatcgttcgcgctggtatcggtatcgtcctcggcaac

SEQ ID NO: 12964 - DNA, 1986 bp, Burkholderia fungorum
atgagaatcgacaaactcaccactaaattccaggaagcactggccgatgcccaaagtctggctgtcggccacgacaatcaatacatcgaaccggttcacgtcctgtcggcgctcgtcgcccaacaggatggctcggcgcgttcgctgctctcgcgtgccggcgtgcatgtgcaggcgctgcaaacggcgctcggcgacgccatcacgcgtctgccgcaagtgcaaggcaccgacggcaacgtgcagatcggccgcgatctgaccggcctcctgaaccaggccgacaaggaagcgcaaaaactcaacgacacgttcatcgcgagcgagatgttcctgctcgccgtcgcggacgacaaaggcgaagccggccgtctggcgcgtcagcatggcttgtcgcgcaagtcgctggaaagcgcgatcgccgcggtgcgcggcggttcgcaggtgcatagccaggacgcggaaagccagcgtgaggcgctgaagaaatacaccgtggatctgaccgagcgcgcgcgggccggcaagctcgatccggtgatcggccgcgacgacgaaatccgtcgctcgatccagatcctgcaacgccgcaccaagaacaaccctgtgctgatcggcgaaccgggcgtgggtaagaccgcgatcgtcgaaggtctggcgcagcgtatcgtcaacggcgaagtgccggagacgctcaagggcaagcgcgtgctgtcgctcgatatggcggcgttgctggccggcgccaagtatcgcggcgaattcgaagaacgcctgaaggccgtgctgaacgacatcgcgaaagacgaaggccagaccatcgtcttcatcgacgaaattcacactatggtcggtgcgggcaaggccgaaggcgcgatggacgcgggcaacatgctcaagccggcgctctcgcgcggcgagctgcattgcgtcggcgcgaccacgctcgatgaatatcgcaagtacatcgaaaaggacgccgcgctcgaacgccgcttccagaaggtgctggtcgacgaaccgacggtcgaagccaccatcgcgatcctgcgcggtctgcaggaaaagtacgagctgcaccacggcgtggatatcaccgacccggcgatcgtggcggcggctgaactgtcgcatcgctacatcacggatcggttcctgccggacaaggccatcgacctgatcgacgaagccgcttcgaagatcaagatggaaatcgattcgaagccggaagagatggatcggctcgaccgtcgtttgatccagttgaagattgagcgcgaagccgtcaagaaggaaaaagacgaagcgtcgcagaagcgtctgcaactgatcgaggaagaaatcgagcggctgaaccgcgaatattcggacctcgacgaaatctggaccgcggaaaaagccgcggtgcaaggcagcgcgcaactgaaggaagagatcgaaaaaacgcgtgcggaaatcacgcgcctgcaacgtgaaggcaagctcgagaaggtcgccgagttgcagtacggcaagctgccgggactcgaagcgcagttgaaggaagtgaccaaggccgaggcgagcgagcagaacaatccgacgcgcccgcgcctcttgcgcacgcaggtcggtgcggaagaaatcgctgaagtcgtgtcgcgcgccaccggcattcccgtgtcgcgcatgatgcagggcgagcgcgaaaagctgctgcagatcgaagagaagctgcacgcgcgcgtggtcggccaggacgaggcgatcagcgcggtggccgatgcgatccgccgctcgcgtgcgggtctgtcggatccgaaccggccgtatggttcgttcctgttcctcggcccgaccggcgtgggcaagaccgagttgtgcaaggcgctcgcgtcgttcctgttcgattcggaagatcatctgatccgtatcgacatgagcgaattcatggagaagcatagcgtcgcgcgtctgatcggtgccgccgggatacgtgctcgaagg

SEQ ID NO: 12965 - DNA, 1074 bp, Burkholderia fungorum
atgaaaaaagtcctgattctgggtgtgaacggctttatcggccatcacctgtccaaacgcattctcgaaacgaccgattgggaagtgttcggaatggacatgcagaccgaacgtctgggcgacctgatcaatcatgaacggatgcacttcttcgaaggcgacatcacgatcaacaaggagtgggtcgaatatcacgtcaagaagtgcgatgtgatcctgccgctggtcgcgatcgccacgcccgccacgtacgtgaagcagccgctgcgcgtgttcgaactcgacttcgaggcgaacctgccgatcgtgcgttcggccgtcaagtatggcaagcacctcgtgtttccgtccacgtccgaggtctacggcatgtgcacggacgagcagttcgatccggaagagtcgcaactgtcgtacggcccgatcaacaagccgcgctggatctacgcatgctccaagcagttgatggaccgcgtgatctggggttacggcatggaaggcctgaacttcacgctgttccgtccgttcaactggatcggcccgggcctcgactcgatctacacgccgaaggaaggcagctcgcgcgtggtcacgcagttcctcggccatatcgtgcgcggcgagaacatcagcctcgtggacggcggcgcgcaaaagcgcgcgttcacggatatcgacgacggcatcggcgcgctgatgaagatcatcgagaacaaggacggcgtggcgacgggcaagatctacaacatcggcaacccgaccaacaatttctcggtgcgcgagctcgcgcacaagatgctgacgctcgccgccgaattcccggaatacgcggatacggccaaacaggtgcaactggtcgaaacctcgtgcgggcgcttactacggcgccggttatcaggacgtgcagaaccgcgtgccgaagatcgacaacaccatgcaggaactcggctgggcgcccaggtcgactttcgacgaagcgctgcgcaagattttcgaagcgtatcgcggccacgtcggcgaagcgcgcgctctcgtcgaacagcagtaagggcagatccttggcccgtatcgtcc

SEQ ID NO: 12966 - DNA, 1254 bp, Burkholderia fungorum
atgtccacacccacgccccgcgcgccgatgctcgccaccgccgaagcgctggcgaccctgctcagcgccgcgagcccgattgccggcacagagtcgattcccacgctggatgcgctgaaccgtgttctcgcggccaacgtcacttcaccgctcgatgtcccgccaatgaacaccagttcaatggacggctatgcgatccgcacggcggacctgacggttcgggactacagccgcttgccggtttcgcagcgcattccggccggccacgcgccagagccgctcaagcccggcacggcggcgcgcatcttcaccggcgccacggtgccgcccggcgccgacgcgatcgtgatgcaggagcaaaccgaagccgccgacgcagacgtcgtgatcctgcacagtccggaaccgggcgaatggattacagcgcagggcgcggatatccgcagcggttcggtcatcctgccggcgggcacgcggcttacgccgcaggcattggggctcgccgcgtcggttggttgcgccgagctcgtggtgcggcggcgcgtcaaggttgccgtattcttcaccggcgacgagctgaccatgccgggcgagccgctgaagcctggcgcgatctacaactcgaaccgtttcacgctgcgtggcctgctggaaaaactcggctgcgaagtgaccgactacggcatcgtcgccgacaggctcgatgcgacccgcgcgaccttgcgcgaagccgccggggcacacgacctcatcctgacgtgcggcggcgtgtcggtgggcgaggaggatcatgtgaagccggctgtggaagcagaagggcggctcgccatgtggcagatcgcgatgaagcccggcaagccgctcgccttcggcgcggtgcgccgtgcagcgcggcatggcgagacctcgtcggcggagaccttctttatcggtctgccgggcaatccggtgtccagcttcgcaaccttcctgctgttcgtgcgtccgttcatcctgagtctggccggcgtgcaggcggtcgcgccgcgcgcgctgtcgctgcgcgcggacttcacgcagagcaaggccgaccgccgcaacgaattcctgcgcgcgcgtatcaatccggctggcgggctcgatctgtttccgaaccagagctcggcagtgctgacctcgaccgtctggggcgacggcctgatcgacaatccgccgaaccacgcgatcagcgctggcgagaccgtgcgcttcattcctttttccgaactgttgaac

SEQ ID NO: 12967 - DNA, 1449 bp, Burkholderia fungorum
atgaactacctctccacgcgcggcgccggagccggcgagcaccataccttttccgacatcctgctgggcggtctcgcgaaagacggcggcctgtacctgcccgccgaatatccgcgcatcaccggcgacgaactgacgcgctggcgcacgctgccgtacgcggacctggccttcgagatcctgtcccgattcagcgacgacattcccgccgaagacctgcgcgcgctcacacgcaaaacgtacaccgcggccacctactgcaacgtgcgcgacgacgaaagcgccgcgcagatcacgccgctgaagacgctcggcgtcgagaacggcgcgccgctgtcgctgctggaactctcgaacggaccgacgctcgcattcaaggacatggcgatgcagttgatcggcaacctgttcgaatacacgctggcaaagcacggtcaaacgctgaacattctcggcgcgacctcgggcgacaccggcagcgccgcggaatacgcgatgcgcggcaagaaaggcatcagcgtgttcatgctctcgccgcacaggaagatgagcgcgttccagaccgcgcagatgtacagcctgcaggatccgaacatcttcaacatcgcggtggaaggcgtgttcgacgacgcgcaggacatcgtcaaggccgtctcgaacgatcacgcattcaaggcgaagtacaggatcggcacggtcaactcgatcaactgggcgcgcgtcgtcgcgcaggtcgtgtattacttcaagggctactttgcggccacgaagtcgaacgacgagcgcgtgtcgttcacggtgccgtcgggcaacttcggcaacgtgtgcgcgggtcacatcgcgcgcatgatgggtttgccgatcgaaaagctggtcgtggcgacgaacgaaaacgacgtgctcgacgagtttttccgcaccggtatttaccgcgtgcgcaaggcggccgagacgtatcacaccagcagcccgagcatggacatttcgaaggcttcgaacttcgagcgtttcgtgttcgatctgctcggccgcgatccggcgcgcgtgctgcaactgttccgcgacgtcgaagagaagggcggtttcgacctcgccgcgagcggggactttgcgcgcgtgcagcaattcggtttcgtgtcgggccgcagcagccacgaatcgcgcgtggagaccatccgcgacgtgttcgagcgttacgacacgatgatcgacacgcacacggccgacggactgaaggtcgcgcgcgaatatctgcagccgggcattccgatgatcgtgctggagaccgcgcaaccgatcaaattcggcgagacgatccgcgaagcgctgctgcgcgaaccggagcggccggcggctttctcgggcctcgaatccctgccgcagcgcttcgaagtgctgcccgcggacgttcagcgcgtgaaggactttatcgcggcgaacgtggacgcg

SEQ ID NO: 12968 - DNA, 1464 bp, Burkholderia fungorum
gtggccgcgcgccgttccgccatcaaaaggattgtcatgtccaaagaatttgacgtcgtcgtgatcggcgcaggccctggtggttatatcgccgccatccgcgcagcgcagctcggcaagaccgtcgcatgtatcgaaaaatggaagaacccggccggcgcgctgaagctcggcggcacgtgtctgaacgtgggttgcattccgtcgaaggcgctgctcgcgtcgtcggaagaatttgagaacgcgtcgcatcacctcgctgaccacggcatctccgtggaaaacgtgaaggtcgatatcgcgaagatgatggcccgcaaagaaggcatcgtcgagaagatgacgaagggcatcgaattcctgttccgcaagaacaagatcacgtggctcaagggccacggcaagttcaccggcaagacggacgccggcgtgcagatcgaagtgagcggcgagggtgaaacggaaacggtcacggcaaagaacgtgatcatcgccacgggttcgaaggcacgccatctgccgaacattccggtcgacaacaggatcgtcgccgacaacgaaggcgcgctgagcttcgaatccacgccgaaaaagctggctgtgatcggcgctggcgtgatcggtctggaactgggttcggtgtggcgccgtctgggcgcggaagtgaccgtgctcgaagcgctgccggaattcctcggcgcggccgaccaggcgctcgcgaaagaagcggccaagcagttcaagaagcagggtctggacatccacgtcggcgtgaaggtcggcgaagtgaagacgaccgacagcggcgtgacgatcgcctacacggacaaggacggcaacgcgcagacgctcgaagccgatcgcctgatcgtgtcgatcggccgcgtgccgaacaccgacaatctcggcctcgaagcgatcggcctgaaggcgaacgagcgcggcttcatcgacgtggacgagcattgcgcgacggcggtgccgaacgtgtacgcgatcggcgacgtggtgcgtggcccgatgctcgcgcacaaggcggaagacgaaggcgtactggtcgctgaaatcatcgacggtcagaagccgcatatcgactacaactgcattccgtgggtgatctacaccgaaccggaaatcgcgtgggtcggcaagacggaacagcagctgaaggctgaaggccgcgagatcaagacgggccagttcccgttcatggcgaacggccgcgcactcggcatcaacaaggcagatggtttcgtcaagatgatcgccgacgcgaagaccgacgaactgctcggcgtgcacatcatctcggcgaacgcatcggacctgatcgcggaagccgtggtggcgatggaattcaaggcggcttcggaagacatcggccgcatttgccatccgcacccgtcgctgtcggaagtcatgcgcgaggcggcactcgctgtcgacaagcgcgcgctgaacatg

SEQ ID NO: 12969 - DNA, 933 bp, Burkholderia fungorum
atgaccgcatctcaacgcccccgcgtgccgcgtcgcgcgctcgacggcgtgctgctgctcgacaagccgctcggcctgtcgagtaacgacgcgctgattcgcgcgaagcgtctctatctggcaaaaaaagcgggccacaccggtacgctcgatccgttggccaccggtttgctgccgctttgcttcggcgaagccaccaagttttcgcaggacctgctcgaagccgacaagacgtatgaagccaccatgcgcctcgggattcgcacgaccaccggcgacgccgaaggcgaagcaatcgacacgcgtgaagtgacgtgcgacgaggcggcgattcacgcggtgctgccggcattcatcggcgaaatcacccaggttccgccgatgtattcggcgctcaagcgtgacggcaagccgctgtacgagtacgcgcgcgcgggccagaccgtggagcgggaagggcgccaggtgacgatcctgaagctcgagatactcgcttgcgcgttgccggacgtgacgtttcgcgtgacatgcagcaaggggacgtatgtgcgcacgctggccgaagatatcggcgaggcgttgggttgcggcgcgcatctggtggcgctgcggcgcacgggcgtcggcgcgctgacgcttgaaaattcggtgacactcgacgcgttgtccgacgccgccgaaagcgagcgcgacgcctggctgcagccggtggatgcattgctgtccacctttccgctcgtgcaactgaacgaagacgcgacgcgccgctttctgcacggtcagcggttgaaactgtccgagttgaccatcacgggcgacgcggtgaatgcgccgcgtgttcgggtgtacgccgcgcaagggcgcctgcttggcgtcgcgaaacagggcgagggcgtgctggcgcccgagcggctggtcgtcaccacagcgggc

SEQ ID NO: 12970 - DNA, 2103 bp, Burkholderia fungorum
gtggccggttcgttgacgcggcaagtgttattacagcttagacaagggtcttttcctgctcaagcgacaatccgcgcggtttcgcgtagggtttcgcccgcctgcttacgctccatttccgatgcgccgctcagtggaaaccggtcggcctatcagggaataccagaaagcttcatttgcgcgtgctataatgttgggttcccaaaagtgcgctttgggctttgttggcttcgtacacaatgctgctttgctggcgcactcaactgtctccaggttcctatgactcgcgccctacgcaacatcgccatcattgcccacgtcgaccacggcaagaccacgctcgtcgaccagcttctccgccagaccgccacgttccgcgacaaccagcagatcgccgagcgcgtgatggactcgaacgacatcgaaaaagaacgcggtatcacgattctgtcgaagaactgcgcggtcgaatatgaaggcacgcacatcaacatcgtcgacaccccgggccacgctgacttcggcggcgaagtggagcgcgtgctgtcgatggtcgactccgtgctgctgctggtcgacgccgtcgaaggcccgatgccgcaaacgcgcttcgtgaccaagaaggcactggcgctcggcctgaagccgatcgtcgtgatcaacaaggtggaccgtccgggcgcgcggatcgactgggtgatcaaccagacgttcgacctgttcgacaagctgggcgcaaccgacgaacaactcgattttccgatcgtctacgcatcgggtctgaacggctacgcaggcttgaccccggacgtgcgcgaaggcgacatgcgcccgctgttcgaagccgtgctgcaacacgtgccggttcgtccggccgatccggacgcaccgctgcaactgcagatcacgtctctggactattcgtcgtatgtcggccgtatcggcgtgggccgtatcacgcgcggccgcatcaagccgggcatggcggtcgccgtgcgttcgggccccgacggcgcgatcctgaaccgcaagatcaaccaggtgctgtcgttcaagggcctcgagcgcgtgcaggtcgactcggctgaagccggcgacatcgtgctgatcaacggcatcgaagaaatcggcattggcgtgaccatctgcgcgccggagcaaccggaagcgctgcccatgatcaccgtggacgaacccacgctgaccatgaacttcctcgtcaattcgtcgccgctggccggtcgcgaaggcaagttcgtcacgagccgtcagatccgtgaccgcctgatgaaggaactgaaccacaacgtcgcgctgcgcgtgaaagaaaccggcgacgaaaccacgttcgaagtggcgggccgcggtgaactgcacctgaccattctggtggaaaacatgcgccgcgaaggctacgagctggccgtgtcgcgtccgcgcgtggtgatgacggaagtggacggggtgaagcacgagccgtacgaaaacctgacggtcgacatggaagacgcccatcaaggcggcgtgatggaagagctgggccgccgcaagggtgaaatgctcgacatggcgtcggacggccgtggccgtacgcgtctggagtaccgtatttcggcgcgtggcctgatcggcttccagtcggaattcctcacgctcacgcgcggtacgggtctgatgagccacacgttcgactcgtatcagccggtcaaggaaggcgcggtcggcgagcgtcgcaacggcgtgctgatttcgcaggacgacggcgcggcagtcgcgtacgcattgtggaagctgcaggatcgcggccgcatgttcgtgtcgccgggcgagccgctgtatgagggcatgatcatcggcattcacagccgtgacaacgacctggtggtcaacccgatcaagggcaagcagttgaccaacgtgcgttcgtcgggtacggacgaagcggtgcgcctcgtgccgccgatccagatgtcgctggaatacgcggtcgaattcatcgacgacgacgaactggtcgaagtcacgccgcagtccatccgtctgcgcaagcgttatctgaaggaacatgagcgccgcagcgcgagccgtaagggcgcggtggac

SEQ ID NO: 12971 - DNA, 2871 bp, Burkholderia fungorum
gtgagcgtaaaaatgatgaagcaattccagtcgaactcttacctgttcggcggcaatgctccgtacgtagaagaaatgtacgaagcgtatctcgataatccggcgtcagtgcccgagaactggcgcagctatttcgacgcattgcagaacgtcccggcatcggatggcagcaatgccaacgacgtggcccacggcccgatcgtcgaatcgtttgctcaacgggccaaggctaatgccttcatcccgcgcggagcaggtggcggcgaagatctcgctaccgctcgcaagcaggtttatgtgcagtccctcatcggcgcatatcgcttcctcggctcgcaatgggccaatctcgatcccctgaagcgccgcgaacgtcccgccattcccgaactcgaacccgcgttctacgacttcaccgaagccgacatggaccaggagttcagcgccacgaatctgtatttcggattcgagcgcgcttcgctgcgcgagatcgtcaaggcattgcgcgacacgtactgcggcacgatcggcgccgagtacatgtacatcagcgatccggaacagaagcgctggtggaaagagaagctcgaatcgatccgttccacgccgaacttctcgaacgaaaagaaaaagcacatcctcaatcgcctgacggccgctgaaggcctcgagcgcttcctgcacaccaagtacgtcggccagaaacgcttctcgctcgaaggcggcgaaagcttcatcgcgtcgatggacgaagtcgtgcgtcacggcggcgccaacggcgttcaggaaatcgtcatcggcatggctcaccgtggccgtctgaacgtgctggtcaatacgctcggcaagatgccggccgacctgttcgccgaattcgaaggcaagcacgtcgacgacctgccggccggcgacgtgaagtaccacaagggtttctcgtcggacgtctcgaccgaaggcggcccggttcacctgtcgctcgcgttcaacccgtcgcacctcgaaatcgtcaacccggtggtcgaaggttcggccaaggcacgtatggaccgccgcggcgacgacagcggcctgcaagtgctgccggtgcagatccacggcgacgcggccttcgcgggccagggcgtggtgatggaaacgctgaacctcgcgcaaacgcgcggttacggcacgcacggcacgctgcatatcgtcatcaacaaccagatcggcttcacgacgtcggatccgcgcgactcgcgctccacgttgtattgctcggacgtcgtcaagatgatcgaagcgccggtgctgcacgtgaacggcgacgatcctgaagcggtggtgctggctacgcagctggcaatcgacttccgcatgcagttccacaaagacgtcgtcgtcgacatcgtctgcttccgcaagctgggtcacaacgagcaggacacgccggctgtcacgcagccgctgatgtacaagaccattgcgaagcacccgggcacgcgcgcgctgtacgctgaaaagctggtgcagcaaggcgtgatcacggcggccgacgcagacgaatacgtcaaggcctaccgcaaggcgatggacgaaggccatcacacggtcgacccggtgctctcgaactacaagagcaagtacgcggtggattgggtgccgttcctgaaccgcaagtggaccgacgctgccgataccgcagtgccgctcgcggaactgaagcgccttgctgaacgcatcaccacgattccggaaaacttcaaggttcaccccctggtcgagcgcgtcatcaacgaccgtcgcgcgatgggccgtggtgaagcgaagctcgactggggcatgggcgaacacctggcattcgcgtcgctggtcgcctcgggctatgcagttcgcctgaccggccaggactcgggccgcggcacgttcacgcaccgtcacgcggtgctgcacgatcagaaccgcgaacgctggaacgacggcacgtacgtgccgctgcaaaacatcgccgaaggtcaggcgaagttcacggtgatcgactcggtgctgtcggaagaagcggtgctgggcttcgaatacggttattcgaccgctgagccgaatacgttcgttgcatgggaagcgcagttcggcgacttcgtgaacggcgcgcaagtcgtgatcgaccagttcatctcgtcgggcgaagtgaagtggggccgtgtttcgggtctcaccatgctgctgccgcacggctacgaaggccagggtccggaacactcgtccgcacgtatcgagcgtttcctgcaactgtgcgcggatcacaacatgcaggtcgttcaaccgaccacgccggcgcagattttccacctgctgcgccgtcagatgatccgcctgttccgcaagccgctgatcgtcgccacgccgaagtcgctgctgcgccacaaggaagccgtgtcggatctgtcggaactggcgaagggcgcgttccagccgatcctcggcgaaatcgacgaagccatcgacgcgaagaaggtcaagcgcgtggtcgtgtgctcgggccgcgtgtactacgacctgctcgcacatcgccgtgaatcgaagtcgaacgacgtcgcgatcatccgtatcgaacagctctatccgttcgcgcacaagcagttcgaagcggaaatgaagaagtacgacaacgcgaccgaagtggtctgggtgcaggacgagccgcagaatcagggcccgtggttctacatcgagcaccacctgaaggacggcatgaaggaagggcagaagctggcatacagcggacgtccggcttcggcctcgccggcagtcggctattacgcgaagcactacgagcagcagaaggcgctggtcgaaggcgctttcggccgcctcaagagcgcgtcgatcgctaaa

SEQ ID NO: 12972 - DNA, 1152 bp, Burkholderia fungorum
atgacgttatccattacgagccacttcgacgcaggcgcgatcgaggtgctgtcctgtgaagaagcgggcaagatccgtttgcgcgtgcggccggacagccatgccgagtttgcgcagtggttctacttccggttatccggcgcggcgggcgagcgctgtgtgatgaccttcgaaaatgccgccgcgtgcgcttttgccgaaggctggcgcgactatcaggccgtggcgagctatgaccgggtgaactggttccgtgtgcctacgtcgtacgacggccgcgtgttgacaatcgatcacacgccggatttcgaccgtatttactacgcgtatttcgagccgtacagcgaggagcgtcattcggagtttctgggcgcggtgcagcagatgccgcaggcgacgctcacggaattgggcacgaccgtcgaaggccggcccatgtcgttgctcacgctcggcacgccgcaaaccggcgacacgcccaaaaagaagatctggctgatcgcgcgccagcaccccggcgagacaatggccgaatggtttatcgaaggtctcgtgaagcggctcgcaggttggggcgattgggcgggagacccggtggcgcgcaagctctacgatcacgctgtcttctatatcgtgccgaatatgaatccggacggcagcgtgcacggcaatctgcgcacgaatgcggctggcgcgaatctgaatcgcgaatggatggagccggatgccgcgcgcagccccgaggtgctggtggtgcgcgacgcgattcacgccaccggctgcgacctgttcttcgatattcacggcgacgaagcgctgccttacgtgttcgtggccggctccgaaatgctgccgggtttcaccgagcggcagcgggaagagcagcaggcgtttatcgaagcgttcaagcatgcgagccccgatttccaggacaagcacggctacgccgcgagcaaatatcgcgaggacgcactgaagctggcgtcgaagtacatcggcaacgaattcggctgcctgtcgctgaccctggagatgccgttcaaggacaacgccaatctgcccgacgaacgggtgggctggaacggcgagcgtagcgcgtcgcttggcgccgcgatgcttcaggcgatcttgcggcacgtggagacgtttgct

SEQ ID NO: 12973 - DNA, 1374 bp, Burkholderia fungorum
gtgcatttaacaacaacactcgcgccgtggtcatcccacgacacccaactgatcctctcgtgcgcgctcgggctcgtactgatcatcgttttcatcagcgcgctgaagctcgcgccgttcctgtcgattctggtcggcacgttcgcagcggggttttcggcgggcctgccgctcgaagctgttgccagtgcattcagtaaaggagcaggcgcgctgctcggcgacgtcggcatcatcattgcccttggcgccatgctcggcgcgctcatggccgaatccggcgccgccgaccggctggtctcgaccattctcaagcactccacgccgcgcacgctgccgtggatgatggcgctggtcgcgctgatcatcggcttgccgctcttcttcgaagtcggcctcgtgatgatggtgccgatcatcttcgtgatggcgcgccgttcgcagcaacccatcctgcgtatcgcgattcccgcgctggccggtatgaccacgctgcacgcgctcctgccgccgcatccgggtccgctgatcgcggtgagcgcgctgcatgccgatctcggcctcacgctcgggcttggtctgatcgtcgcgattcctgcggtgattctcgcgggaccgctctacggcatctggttatccaggcggatgcacgtggtcgagccggaagaaatgggcaaactcttcagcgccaaacaggacaccggcgagccgccgggtttcgcgatctcccttatcacgatcctgttgcccgtcgtgttgatgttgggccgcacggtcgccaagctgctgcttcagcccgagacgttcctgttcaacacgctggatttcctcggtgagccgttggtcgctctcggcctcaccgtgctgttcgccgtggtggcgctgggttggtcacgaggtatggcgcgcgagcgcgtgggcggcattctgcgcaagagcctgccgccgatcgccgcgctgctgctgaccatcggtgccggcggcggcctcaagcaggcgctggtggttgccggcatcagcacgacgatcggcaagatcgcggtcggcgcgcacatgccgctgattctgctggcctggctgatcgcggtcgcgctgcgtcaggcgaccggttcggcgacggttgccaccaccaccacggccggcattgtcgcgccggtcgtcgcggggctcagcacgacgcacaattcgctgatggcgctcgccatcggcgcgggctcggtgttcttctgccacgtgaacgacgccggcttctggatggtccgcgagtatttcggcctgcaattgaaacagacggtgatggtctggtcggttttgcagacgatcgtgtccgtcgtcggccttgcgctcacgctcgtgttgtggaccgtgctgacg

SEQ ID NO: 12974 - DNA, 1197 bp, Burkholderia fungorum
atgcgtgacctatacctcgcccatttgcgcgataccctcgagcagattcgcgctgacggcttttacaagaacgagcgcgtgatcgccagcccgcaatcggctgacattcgtctcgccgacggcgcggccgtgctgaacttctgcgcgaacaactatctgggcctcgccgacgacgcacgcctgatcgacgcggcaaagcagggtctggatagcgacggcttcggcatggcgtcggtgcgcttcatttgcggcacgcaaaccgtgcacaaggagctggaacaagcgctcgcggcgtttctgcaaaccgacgattgcattctctactccagctgtttcgacgcaaacggcggcctgttcgaaaccctgctcgacgagaacgacgcgatcatcagcgacgaactgaaccacgcgagcatcatcgacggggtgcggctttccaaggcgaagcgctctcgctacaagaacaacgatctcgccgatctcgaagccagactgatcgaagcgcaggccgccggcgcgcgcttcaaactgatcgccaccgacggcgtgttctccatggacggcatcatcgccgacctcgccggcatttgcgacctggccgaccgttacggcgcgctcgtgatggtcgacgactcgcacgcggtaggttttgtcggcgaacacggacgcggcacgccggaacattgcggtgtgctgtcgcgcgtcgacatcatcaccggcacgctgggaaaagcactcggtggcgcgtcaggcggctatgtggccgcacgcaaggagatcgtggagttgctccggcagcgctcacgtccctatctgttttcgaacacgctgacgccgagcattgccgccgcctcgctgaaggtgctcgaactgctggccagcgaagaaggcgcgcaactgcgcgcacgcgtgcgcgaaaacggcgctcacttccgcagcaagatgagcgcgctcggctttaccctcgtgcccggcgaacatccgatcattccggtcatgcttggcgacgcgcaactcgcatcgaaaatggccgatgcgctcctgaaggaaggcgtctacgtgatcggcttctcgttcccggtggtgccgaaaggtcgcgcgcgcattcgcacgcagatgagcgccgcgcatacgcccgggcagatcgaccgcgcggtggatgccttcgcgcgcgtcggccgtgaactcggcgttatc

SEQ ID NO: 12975 - DNA, 1083 bp, Burkholderia fungorum
atgccttcgcgcgcgtcggccgtgaactcggcgttatctgatacggaggcgcacatgaaagcattggcaaaactcgaacgcgctccgggcctcacgcttacggacgtcaagaaacccgaagtcggccataacgacgtgatgatccgcatcacgcgcaccgcgatttgcggcacggacattcacatctggaagtgggacgactgggcgcagaaaacgattcctgtgccgatgcatgtcggccacgaatacgtgggtgaaatcgtcgaaatgggccaggaagtgcgcggctttgcgatcggcgaccgtgtgtccggcgaaggacatatcacgtgcggcttctgtcgcaattgtcgcgcgggccgcaggcatttgtgccgcaatacggtgggcgtcggcgtgaatcgtgagggggcgttcgccgagtatctggtgattccggccttcaacgcattcaagattccgcccgagatttccgacgacctcgccgctattttcgatccgttcggcaacgccacgcatactgcgctgtcgttcaatctggtcggcgaagacgtgttgattaccggcgccggccccatcggcatcatggcggtggcgatcgcgaagcacgtcggcgcgcgcaacgtggtgattaccgacgtcaacgactatcgcctcgaactcgcgcgcaagatgggcgccacgcgtgcagtcaacgtctcgcgcgaatcgttgcgcgacgtgatggcggatctgcacatggccgaaggtttcgacgtcggcctggaaatgtccggtgtgccgagcgcgttcaccggcatgctcgaagcaatgaaccacggcggcaagatcgcgctgctcggcattccgcccgcgcagaccgcgatcgactggactcaggtgatctttaaaggcctcgaaatcaagggcatttatgggcgcgagatgttcgagacctggtacaagatggtggcgatgctgcaaagcgggctggatctgtcgccgatcctcacacaccatttcaaggtcgacgactatcgggaagcgttcgccacgatgctctcaggcgagagcggcaaagtgattctcgactggaccgccgcg

SEQ ID NO: 12976 - DNA, 1353 bp, Burkholderia fungorum
atgcaaaaccgtcttttccctcatatgttcagcgacctcgcgcgcgacttcggtcagccggtgatgctgtggcaagtcggcgtcctgctcgggacgctcgcgatcgcgtggctgctcgcgcgcctgttgcgccgggcactggatctgcgtcgccagacgcgttaccagactctgcgcttcggcgcggaaagcctgaaccgcgcgttctttccgctgatcggcgcgaccctcgtgtggctcgcgcggtcggtcaccggccagttcatgcacaccgcgctgctcgatctggcgctggtgccgttattcggcatcggcttgatttacattgtgtttttctttgcgcggcgggttttcagccacgacggcgcgacgcatccgtggctgttcctcgtcgaaaagatcgtctcgctggtcgtctgggtcggcatggtgctcacggtcatgggcattcaggacgacgtgatcacgtggatggcgagcgtccagttccgtgtcgccaacgcgcacatgacgctgctctcgctcatctcggggctgctgtgggtgtgcgtgacgatgatcgtcgcgatgtggctcggctccacgttcgaagaccgtctgatgcgttcgaaaacgctcgatgccaacctgaaggtggtggtggcgcgggtcggccgggcggcgttcgtgctggcggcggtgctgatcagcctgtcgctggtcggcatcgacatcaccgtgctggatgtgttcggcggcgcgctgggcgtgggcctggggttcggtctgcagaagatcgccagcaactacgtgtcgggattcatcatcctgatcgaccggtcgctgcgcattggcgacacgatcaacgtgagcggcctgcagggcatggtcacgcagatccgcacgcgctataccgtggtgcgtggactggacggcatcgagacgctgattccgaacgaaaagctgatcacggacgtggtccagaaccagtcgtcgtacctgacgcgcggccatgcgaaagtggccgtgcaggtcgcgtacacgtccaacgtcgagcaggcaatggcgctgctggtgcaggccgccgcagacgtgccgcgcgtgctgcaggaaccggcgccgacatcttatctggccagtttcggtgcggacggcatcaacctcgaactcggcttctggatcgaggacgcggccgccggcaccgcgggcgtgcgctcggccgtcaaccgcaatatctggcgtctgttctcggagcacgacatctcgattccgttcgcgcaacgcgaagtgcgaatcgtcggcaacgttggcgtcggtgtaccgcaaccggtaataatgaccggatcctcggccgatcaggcggacagcgcgcat

SEQ ID NO: 12977 - DNA, 1017 bp, Burkholderia fungorum
atgacgcgactatccgtactcgatcaaacgccggtgattgccgggcactcggtggcggacgcgattgccgccacggttgaactcgcgcaactcgccgacgacctcggctacacgcgttactggtgcgccgagcatcatggcctgcgtggcgtgtcgaatccctgccccgaggtgatgctggcgcgcctcggcagcgtgacggaccacatccggctgggctccggcggcgtgatgctgccgtactacagcccgttcaaggtcgccgagcaattcatgatgctcgaggcgctgtttcccaatcgtatcgatctgggcgtgggacgcgcgccgggcggcgacatgcgcaccgcgcaagcggtcgccgccggcgactataatcgcggcgacattttcccgcagcaggtggccgatctgctcggcctgatgcacggcacgttgcccgccgatcacattgcgggcggcgtgctgctgcagccgcaaatcgatacgcgcccgcaagtatggatgctggggtcgagtgaattcggcggattgctggccgcgcaactcggcattccgtttgcatttgcgcacttcatcaacgcgcatttcgggcatcaggtcgcgcatgcgtatcgtgagcgcttcaaggccggccaggacatacagcaagcgtatctggccgccgccgtgttcgtgatctgcgcggacaccgaacaggacgccgctgatctggaaaaagccgtcgacctgcgccgcgtgcagatggcctatggtttgaacgaaccgattccgtccatcgaacagggcattgcgcaggagtacggcgagcgcgagcaactcgtgatctcgcgcgaaaagccgcgcagtatcatcggcacgcccgcaaccgtcactgaacggcttcatgtgttgcaggagcagttcgaggcggacgagctgatcgtgctcacggttgcgggcagctatcgcgcccggttgcgctcctatgaacttcttgccgaggcgttccagctcgaacgcccggcgtccactcct

SEQ ID NO: 12978 - DNA, 165 bp, Burkholderia fungorum
atggcgaaaggcgcacgcgacaagatcaagctggaatcgaccgcaggcacgggtcacttctacacgacgacgaagaacaaacgcaacatgccggaaaagatgctgatcaagaaatttgatccggtcgtccgcaagcacgttgagtacaaggaaaccaagatcaag

SEQ ID NO: 12979 - DNA, 2835 bp, Burkholderia fungorum
atgagcaacaagaaagccgattcgaaaccgcagtcacgctacccggtcaacctgctcgacacgccgttcccgatgcgcggcgatttgcccaaacgcgagccgcaatgggtcaaggaatggcaggaacgcaaggtctacgagacgatccgcgccgccagcaagggccgcaagaagttcatcctgcacgacggcccgccgtatgcgaacggcgacatccacctcggccacgcggtgaacaagatcctgaaggacatgatcgtcaaggcgcgcaatctggcgggcttcgacgcggtctacgtgccgggctgggattgccacggcatgccgatcgaaatccagatcgaaaagcagttcggcaaatcgctgccggccgccgaagtcatgcagaaggcgcgcgcctacgcgaccgagcagatcgaaaagcagaaggtcggcttccggcgtctgggcgtgctcggcgactgggacaatccgtacaagaccatgaacttcaccaacgaggccggcgaaatccgcgcgctcgcgaagatcatggaaaaaggctacgtgttccgcggcctcaagccggtgaactggtgtttcgactgcggctcggcgctcgccgaagcggaagtcgagtacaaggacaagaccgatccgaccatcgacgtgctgttcagcttcgccgagccggaaaagaccgcgcaggcgttcggcttgaatgcactgccgcgcaacgaaggcggcatcgtgatctggaccaccacgccgtggaccatccccgccaaccaggcgctgaacctgcacccggaaatcgtctacgcgctggtcgatacgtcgcgcggcctgctgatcctcgcgcaagagcgcgttgaagcatgcctgaaacaatacggtctggaaggcacgatcgtcgccaccacgccgggcgcgaagctcgtcaatctgcgtttcaaccacccgcttgcgtccgcgcatccgagctacaagcgcacctcgccggtctatctcggcgactacgtgactaccgaatcgggcacgggcgtcgtgcactcgtcgccggcgtatggcgtggaagacttcgtgtcgtgcaaggcgcacggcatgtccgactcggacatcatcaatccggtgatgggcgacggccgctatatcgaatcgctcgcgctgttcggcggcctgtcgatctgggcggccaatccgcagatcgtcgaggcgctgcaaggcgccggcacgctgatgcgcaccgagaactacacgcacagctacatgcactgctggcgccacaagacgccgatcatctaccgtgccacgtcgcaatggttcgccggcatggacgtgaagccgaacgacaccgacaggacgctgcgcgaaaccgcgctcgaaggcatcgagaacaccgcgttctatccggcgtggggcaagcagcgcctcttcagcatgatcgcgaaccgcccggactggacgctgtcgcgccaacgccaatggggcgtgccgatggcgttcttcgtgcacaaggaaaccggcgagctgcatccgcgtaccctggaattgctcgaagaagtcgcgcaacgcgtcgagaaggccggcatcgaagcctggcagtcgctcgacccgcgcgaactgctcggcgacgaggccaacatgtacgagaagaaccgcgacacgctggacgtgtggttcgattcgggcaccacgcactggcacgtgctgcgcggctcgcacaaagacgaactgcaattccccgccgacctgtatctggaaggctcggaccagcaccgcggctggttccactcgtcgctcctgaccgcttcgatgctcgacggccgcccgccgtataacgcgctgctcacgcacggtttcaccgtggacggcgaaggccgcaagatgagcaagtcgctcggcaacggtatcgatccgcatgaagtggcgaaccgcctcggcgcggaaatcatccgcctgtggatcgcctcgaccgattactcgggcgaactggcgatctcggaagaaatcctgaagcgcgtcacggaaggttatcgccgtatccgcaacacgctgcgcttcctgctcgcgaacctgtcggacttcgacttcgcgcaacacgcgcgtccggtcgaagactggctcgagatcgaccgctatgcggtggcgctgtcggcgaatctgcaaaacgacatcctctcgcattacgagaagtacgagttccacccggtggtcgccaagctgcagacgttctgctcggaagacctcggcggcttctatctggacgtgctgaaagaccgtctgtacacgaccgccgcggactccgtcgcgcgccgtgcggcgcaaaccgcgctgtatcacatcgcgcacggcctgctgcgtctgatggcgccgttcctgtcgttcaccgcggaagaagcgtggaagatcttcgagccgaacagcgagacgatcttcaccgagacgtatcacgcgttcccggccgtgccggaagccggcgcgctgctcgacaaatggacgctcctgcgcgccgcgcgcagcgacgtgaccaaggcgctggaggaagcacgcgtcgcaaacctgatcggctcgtcgttgcaggcggaagtggaaatccgcgcaagcggcgcacgctacgacgcgctcacgagtctcggcgacgacctgaagttcgtgctgatcacgtcggcggcgagcgtggtgaaggtggacagcgaagcggaagaaggcgtcgaagtgatcgcctcgaagtatctgaaatgcgaacgctgctggcactatcgcgcggacgtcggcgcgaacgccgaacaccccacgctgtgcggccgctgcttcagcaatctgttcggcaacggtgaaaccaggagcgcggca

SEQ ID NO: 12980 - DNA, 231 bp, Burkholderia fungorum
atggcacgcgtatgccaagtaactgggaaagcgccgatgagcggcaacaacgtttcccacgcgaacaacaaaaccaagcgccggttcctgccgaacctgcaaaaccgccgcatttgggtggaaagcgaaaaccgttgggtgcgtctgcgcgtttcgaacgccggcctgcgcctgatcgacaagaacggtatcgacgctgtgctcgcagatctgcgcgcacgcggtgaagcc

SEQ ID NO: 12981 - DNA, 993 bp, Burkholderia fungorum
gtgagagtcttccgcggtcttcccaatgctgaaagccgtgcgccctgcgcactgaccatcggcaacttcgacggtgtccaccgcggccaccaggctctgctcgcccacgtgcgggccgcggccgatgcacgcggcctgcccgtctgcgtgatgaccttcgagccgcacccccgcgaattcttcaacccggcgggcgcgccgccgcgcatcgccatgctgcgcgacaagctcgaggcgctgcgcaccaacggcgtcgaccgggtggtcgtcgagcacttcaatcagacgttcgcgagccagtcgccggacgcgttcgtcgaacggatcatcgtcaacgggctgcatgcgcgctgggtcatgatcggcgacgacttccgctacggtgcaaaacgcgcgggcgacttcgcgtcgctcaaggccgcggggcagcaacacggtttcgaagtcgaacagatggccacggtggccgatccgtcgggcgcgcgcatttccagctcgggcgtgcgcgcggcgctggtggcgggcgacctcgactcggcacgcgccgcgctgggccgcgactacgtgatcagcggccacgtcgtgcacggcatgaagctcggccgcgacctcggcttccccacgctgaacctgccgatcgcccacaagcgcccggcgctcgcgggcattttcgtggtgcgcgtgcacggcgtggcggatgaaccgctgcccggcgtcgcgagcctcggcctgcgccccacggtagacgattccggccgcgtgctgctcgaagtccatctgctcgactggcatggcgacgcatatggcaaactcgtgcgcgtcgaattcctgaagaagctgcgcgacgaggaaaagtacgtcgatctcgaaacgctgaccgccgccattgcgcgcgacgtcgccaacgcgcgcgcatggttcgcggccgtcggcgccggcacgccgggcagccgctccaccggcttcgccacctcggccaccgaccgaattaga

SEQ ID NO: 12982 - DNA, 759 bp, Burkholderia fungorum
atggcagatcacgccaccctgattgacgaagcaaaccttgaaaccgccgcccccggtcccgcggcactggagacagcgtccgcgccgctggtgcgcggcaaatggctcaaaaacgacatgccgcgcgagcggctgatcgaacagggcgccagcgtgctgtcggataccgaactgatcgtgctgattcttggctcgggtctgccgggccatgacgtcttcgatgtggcgcgcacgttgctcgaccgcttcggctcgctgcgcgcgatgctcgacgcgacctacacggatttcgccgacctacgcggcattggccccgcgaaaaagacgcaactgctcgccattatggaaatggcgcggcgctcgctagtcgataaaatgcgcatgcgctcgctgatcaattcgcccgaggccgtggaaaattaccttcgcctgcggatcggcgggcgtccgcaggaaattttcgtgtcgcttttcctcgacgcccggcatcggctgatacgttgcgaagaaagtgcacagggcacgctcacgcgcatggcggtatatccgcgcgagatcgtgcggcgcgcgctgagtctgaacgcggccagtctgatcgtcgcgcacaatcacccgtccggcgccgtccagccgagcgcgagcgattgccgcttgactcatacgctgcgcgacgccctcacgctgatcgacgtgcaactggtcgatcacctggtgatcggcaccgatagcgtctactccttcgcccgcgccggctggccg

SEQ ID NO: 12983 - DNA, 411 bp, Burkholderia fungorum
atgaaaacccaacgccgcgaactggaaaagtccgatttcgagcagttgtccgagttccgctatcagatgcggcgattcgaacgcttctctgaacaggccgcccaaaccgaaggcatcacgcctttgcaatatctgctgcttctgcacatcaaaggctatccgcagcgggactgggcgactatcggcgagctggccgaacggctgcaggcccagcatcacggcatcgtggcactggtgtcgcgttgcgaagcgcttggcctcgtcaaacgcaaagtcagcgagaccgatcgccgccaggtggaagtgcacctgcaaaaactcggcgaaaagacgctggccaaactggccgcgctgcaccgcgccgaactgaagtcgctcgaaggcgcgttcaacgtgccgcagatcgatctc

SEQ ID NO: 12984 - DNA, 1287 bp, Burkholderia fungorum
atgttggtccaagtttcaaccgacgacaatggcgggcagagcgctctggcagcgatgagatgccagacaggcgcctcgggagctcaggcttttcaaccacaggtcgggggctcaaccttttcggttcgtgccaatcgggctctcgggtcggagaaaacgatgacgggtaaggcagatgctggaccgcggggtaacacaatgcgcgaagctcccattcacaccgaggagagcttccgcctgctagtcgaagcaatcgacgactacgcaatcttcatgctggacgcatcaggcaacgtcgtgaactggaacaccggcgcacggaagatgaaagggtatgaggtcgatgaaatcatcggccgccacttctcggtcttttacacgcccgaggacgttgcagcaggccagcccggtcttctgctcgcggcagcggtcgcgcaaggcagagtggtgagcgagggctggcgcgttcgcaaggacggttcgaaattctgggcgaacgttgtcatcacaaccgtccgcacccctaccggcgagctccgcggttttgcaaaggtgacgcaggacctgaccgaacgaaaacggctggaagaattcgaacaactcagagcgttagccgcgcacattcaggccgctcgcgaggaagagcagatccgcatcgcccgcgaacttcacgatgacataggccagcaactcaccgcgctcaagatggcgcttgcgggtctcgacagcatcgttcgcgaccaggaggcaggcgccgcacgcaccgcgcctcacattgcggacatgcatcaactgatcgacgcgacggtcgcctcgctacggcgaatcgcagccggattgcgtcccgtcatgctggagacgctggggctcatcccgacactcgaatggctcatcgacgatttcatgcagcggtacgacattgccgtcgaggcacggatcgaggccgatgacatgaagctgagcgaagcggctgacgaaggcctgttccatatcgtgcaggaagcactgaccaacgtggcccggcatgcgcacgccgaccgggtgacgatcgatctggcgcgcgacggccgcacctgtgtattgcgcgttacggacgacgggcagggaatgacgccggcggcgccttcgcgcccgacctctttcggcctgctgggcatgcgtgagcgagttcatcacctgaatggcacgatgtcgatcgacagcgcgcccggccgcggttttcgtcttaccctcatctttccactggacgccgtcgagcgaaagccctcgagcccggaaggagccgcg

SEQ ID NO: 12985 - DNA, 1176 bp, Burkholderia fungorum
atgcgtccattagacggaatcaaagttgtcacattcgagcatgccattgcggcgcccttctgcacgcggcagcttgccgatctcggcgcgcgcgtcatcaagatcgaaaggccaggcactggcgacttcgcgcgccagtacgacgagcgtgtccacggcctgtcgtcccacttcgtttgggtcaatcgttcgaaagagagtctgacgctcgatctcaaacaggccgaggccatgcagattgtccatgcgctgctcgcgggagccgacgtgttcgtgcagaacctcgcgcccggagccagccggcgcctgggcctcgattacgcgtcgctcagccagcgctatgaacgccttgtagtctgcgacatctcaggctacgggctcgacggcccctatcgcaacaagaaagcctacgatctgctgatccagagcgaatcgggttttctcaacgccaccggcacggcccacgagccggccaaagccggctgctcgatcgccgacatctcggccggcatgcatgcctactccagtatccttgcggccctgctgcaacgcgcccgcacgggtaaaggcacacacatcgatatctcgatgttcgaaagcatggtcgagtggatgagccatccgctctattacacctatggcggccaggccgcaccgcagcggcacggtgcgtcgcacgccaccatttatccctatggcccgttcgccgccggcgacggcaaatcgctgatgctggggctgcagaacgagcgcgaatgggaggtgttttgccggatggtaatccagcgcccggagctctttcaggacccgcgattcagcagcaacagccggcgccatgaaaaccgcaggctgcttgaacagatcattctcgaatcgttttcggtactgaaggtcgaacagatcgtagagcggctcgatgcggccggcatcgcgaacgcacacatgcgcgacgtaagcgagctatggaatcacccccagctgggcgcgcgcgaacgctggacccaagtgtcgacgccggtcgggccgattcctgctctgctgccggcgggcatgaccgccgcgagccagccgcgcatggaccccgtgcccgggctgggcgagcacacgcaggccattctgcgggagctgggttatggcgacgcccaaatcgaagccctgcagcggcggagaacgata

SEQ ID NO: 12986 - DNA, 1557 bp, Burkholderia fungorum
ttgacagcgccgccgaccggccagaccacccgccgcgccgcgggacttattgcggcgcaactgaaccatcaggagttcgacatgaacgaggccaccgcacgcaagccgcatcctctcgacaagctgaaagatccttccctgcttcgcacgcaggcctatgtcgatggacgatcgcagggcggcgcacaggagttcgccgtgttcgacccggcaaccggcgcagagatcgcgcgggtgcccaatctcgccgccgccgaggcacgccaggcgatcgatgcggcgaacgccgcgctacctgcctggcgggccttgacgggcaagcagcgcgccgcgatgctgcggcgctggtatgagctgatcgtcgcgcacgccgccgatctcgccgccatcatgacggccgagcagggcaagccgctggccgaggcacgcgccgaggcgctgtacggagcgtcgttcgtcgaatggttcgctgaggaggcgaagcgcgtctcgggcgacgtgctggccagtccggccgacgaccggaaaatcgtcgtcatccggcagccgattggcgtgtgcgtatcgatcacgccgtggaattttccgcttgcgatgattacccgcaaggtcgccccggcgctggccgccggttgcactatcgtcgtcaagcccgctgagcagacgccgctttccgcgctggcgctggcggagctggcgcatcgcgccggcctgccggcaggcgtactgaacgtgctgacgggcgatgccgcgaacgctatcgagatcggcaaggtcttctgcgagagcgagatcgtccggcatctgtcctttacgggctcgacgcccgtggggcgactgttgatgcagcaatgcgcgccgaccgtgaaaaaggtcgcgctggagctgggcggtcacgcgcccttcatcgtgttcgacgacgcggacgttgacgcagcggtacagggcgcgatggtctcgaagtatcgcaatgcgggccagacctgcgtatgcgccaatcgtttctacgtgcatgacgccgtctacgagcgtttcgtgcggcagttcgccgaggccagccggggcgtgaaggtcggcaatggctttctcgaaggcgtcgaccaggggccgttgatcgacgacgatgccgtcgcgaaagtgcggcagcacgtcgacgatgcactcgccaaaggcgcgcgacaggtcatgggcggcaggatcgaagggcgcttcgtcgagcctgtgctgctggccgaggtgacccacgacatgctgatcgcgcgcgaggagacctttgggccggtcgcggctgtgttccgctttcgcgacgaagcggaagtgacccgcctcgccaacgatacgcagttcggcctcgcctcctacttctacagccgcgatatcggccgcgtatggcgggtggccgaggcgctcgaatacggcatggtcggcatcaacaccggcttgatttcgaacgaggtggcgccgttcggcggcgtcaagcaatcgggtctcggccgcgaagggtcgaaatacggcatcgaagaatacctgcagatcaagtacctgtgcatgggtgtt

SEQ ID NO: 12987 - DNA, 1026 bp, Burkholderia fungorum
atgaaaaccattcccggaccggtgatgctcgacgtggtcggcaaaacgctgaacgacgacgacaagcgccgccttgcccatcccatgaccggcggtgtgatcctgtttgcgcgccactacgagagccgcgcgcaactgatcgcattgaccgattcgatccgcgcgatccgcgaggacctgctgattgcggtcgatcacgaaggcggccgcgtgcagcgctttcgtaccgacggcttcaccgtgctgccggcaatgggcaagctcggcacgttgtgggacagcgatgtgctgcacgccaccaaagtgacgacggctgtcggctacattctcgcggcggagttgcgcgcgtgcggtatcgacatgagctttacgccggtgctcgacctgaactacgggcagtcgcaggtgatcggcgaccgttcgttccaccgtgatccgcgcgtggtgaccttgctcgcgaagagcctcaatcacggactcgcgctggccggcatgagcaattgcggcaagcactttccggggcacggtttcgcgcaggcggattcgcacgtcgccatgccgatcgacgaccgttcgctcgacgaaatcctgcgcgacgatgctgcgccttatgactggctcggtttgtcgttgggatcggtcattcccgcgcacgtggtttatccgaaagtcgattcgaagccggcgggtttttcgcgcatctggttgcaggacattctgcgcaacaagctgcgcttcgaaggcgcgattttcagcgacgatctttccatggaagccgcgcgccagggcggcacgctgaccgagggcgccaccgccgcgctgcaagccggctgcgacatggtgctgatctgcaaccagccggacgaagcggagaaggtgctggatgcgctgcgcttcacgccttcgaaggaatcgcagcggcggctcaagcgcatgcggccgcgcggcaaagccttgaagtggagcaagctggtcgccgagccgcaatacctgcaggcgcaggcgttgttacggagcgcgtttgcc

SEQ ID NO: 12988 - DNA, 891 bp, Burkholderia fungorum
atgaattttgcgctgattctttttgtgctcgtcattttgacgggcgtcgcatgggtcgcagacaaactggttttcatgccgcaacggcgccgcgcggcgcaagccgcggtcgacgagttcgaccgccagcaggcacgaatcggcgagcgtttcgccgacgagaacgcggcacagacgcgtgcgcgtctgcgtgacgacaagctgcgtcaaccgtggtggctcgaatattcggcgagctttttcccggtgattctggtggtgttcgtggtgcgctcgttcgttgtcgagccgttcaagattccttcgggctcgatggtgccgacgctgctggtgggcgacttcatcctcgtcaataaattcgactatggcatccgtctgccgatcagcaacacgaagatcaccgagggccgtccgcttcagcgcggcgacgtggtggtgttccgctacccgaaagacgaatcggtcgactacatcaagcgtgtgatcggcctgccgggcgacaccgtcgcatatcaggacaagcagctcacgatcaacggcaagccggtacctgaaacgccgctgcccgattatctcgacgacgagcgcatgggctacgcgaagcagttcgaagaagatctcgacggccgcaagaacgcaattctgaacaatcccgccgtgccgccgttcatcgtcggcgcggaagattatccgtatcgcgacaactgcacgtacaacgcacgcggcgtgatctgcaaggtgccgccgggcaattacttcatgatgggcgacaaccgcgataacagcgcggatagccgttactggggttttgctccggatgccaatgtcgtcggccgcgcgttttttatctggatgaacttcagcaatctgaaacgcatcggctcattcaac

SEQ ID NO: 12989 - DNA, 897 bp, Burkholderia fungorum
atgaacgctcccactcccactggttttcgctgcggcatggtcgcgatcgtcggccgccccaacgtcggcaaatccacgctgatgaacgcgctggtcggccagaaagtcagtatcacgtcgcgcaaggcgcagaccacgcgccatcgcatcacgggcattcatacgctcgaagacgcgcaatacattttcgtcgacacgcccggctttcagacgaagcacagcggcgcgctgaaccgttcgctcaatcgcgcggtcacgtccacgctgacttccgtggatgcgatcctgttcgtgatcgaagccggccgtttcggcccggacgaccagaaagtgctcgacctgattccgccgtcggtgcccacgctgctgatcgcgaacaagctcgatcgcgtgtccgataaggactcgctgttcccgttcatgcagcaggtcagcgcgctgcacaagttcgccgagatcgtgccgctgtcggcgaaacatcccgacgacatcaagcgcctgatggcgaccgtcaagccgttcctgccggaaggcgcgccgatctacggcgaagacgacctgaccgatcgcagcgagcggttcctggctgcggaaatcctgcgcgagaaagtgttccgctggaccggcgacgaactgccgtacacgagcaccgtgctgatcgacaagttcgaaaccgaagggcgcctgcgccgtatcttcgcgaccatcatggtggaccgcgacacgcacaaggcgatgatcatcggccagaagggtgcgaagctgaagcagatcagcaccgaagcgcgcctcgacatggaaaagctgttcgacggtccggtgtatctggaaaccttcatcaaggtgaagagcggctgggccgacaacgaagccgggctccgtgcgtatgggtacgaa

SEQ ID NO: 12990 - DNA, 1014 bp, Burkholderia fungorum
atggacaggaaactctatatctccgacgtgacgctgcgcgacggcagtcacgcgatccgtcatcagtattcgatcgacaacgtgcagcagattgcccgcgcgctcgacagcgcaaaagtggacagcatcgaagtcgcgcatggcgacggtctgcaagggtcgagtttcaactacggctttggcgcgcatagcgacctcgagtggatcgaagcggtcgccgacgtggtcgggcacgcgcagatcgccacgctgctgttgcccggcatcggcacgattcacgatctgaaggcggcgtaccaggcgggcgcgcgtatcgtgcgggtcgccacgcattgcaccgaagcggacatctcgaagcagcacatcgaatacgcgcgcgaactcggcatggacacggtcggcttcctgatgatgagccacatgaccacgccggaaaacctcgccgtggaagcgaaaaagatggagagctacggagcgacgtgtatttacgtggtcgactccggcggcgcgatgaacatgaacgacgtgcgcgcgcgctttcgcgcattgaaggccgtgctgaagccggagacgaagaccggcatgcacgcgcaccacaacctgagcctcggcgtcgcgaactcgctcgtcgcggtggaagaaggttgcgaccgcatcgatgcgagcctcgcgggcatgggcgcgggtgcgggcaatgcgccgctggaggtgttcattgccgcggccgagcgcgccggctggcaccacggcaccgatctctacacgctgatggacgccgccgacgatatcgtgcggcccttgcaggaccgtccggtacgcgtggaccgtgagacgctggcgctcggttacgcgggcgtgtattcgagcttcctgcggcattccgaagtagccgcgaagaagtacggcctgaaagcggtcgacattctggtcgagctgggcaagcggcgcatggtcggcggccaggaggacatgatcgtcgacgtggcgctggacctgaaacgcgcggccggcgtc

SEQ ID NO: 12991 - DNA, 1620 bp, Burkholderia fungorum
atgacgcagaactcgctcccctcctggtcctcgctgcaaacgcattacgaaaagattcgcgatgcgcacatgcgcgactggttcgcccccgagaacgatcccgcccctacccgtgccgaacgctttgcgttcgcgggcggcggtctcgcggccgatttctcgaagaaccgcatcaccgacgaaaccctgaaactgctcgtgcaactcgcgcgcgaagccggcgtcgagaaacgccgcgacgcgatgttcgcgggtgcagtcgtcaacccgaccgaaggccgcgccgcgctgcacacggccctgcgcgccaccgacccgaaagcgccgttctacgaccaggtgcaggccgagcgcgccaggatggccgcgttcgccgaccaggtgcgcagcggcgagtggaaaggctataccggcaagcggatccgctacgtggtgaacatcggcatcggcggctcggacctcgggccgaagatggtcgtgcacgcgctgcatcatctggccacgccggagatcaccacgcatttcgtgtcgaacgtcgacggcgccgatctttacaacgtgatgcagcagatcgatcccgaagaaacgctcgcaatcatcgtctccaagactttcaccacgctcgaaaccatgaccaacgcgcgctcgctgcgtgactggttcgtcgagaaaggctgcccggaaagcgcgctggcgaaacacttcgtcggcgtgtcggccaatcccgcggaagtggtcaagttcggcatcgcgaaagaaaacgtgttcgagatgtgggactgggttggcgggcgttactcgttgtggtcggcggtgggtctgtcgatcatgatcgcggtcggaccgcagcagttcggcgaactgctcgccggcgccaatgagatggaccagcatttccgcgacgcgccgctcgagaagaatctgccggtgctgctcggcatgatcggcatctggtatcgcaacttcttcggctcgcaaagctacctggtcgcgccgtattcggaagcgctgcatttcctgccgtcgtatctgcaacagctcgaaatggagagcaacggcaagtcggcgcgtctcgacggcgtaatggtcgactatccgaccgccgccgtgacgtggggcgaaccgggcacgaacggccagcatgcgttcttccagatgctgcatcagggcccgacgatcgtgccgatcgacttcatcgccgtgttgacgccggagcatccgctcgtcagtcatcatccgaagctgctcgccaactgcttcgcgcagagtgaagcgctgatgctcggccgcacgctcgaggaagcgaagaaagtggccggcgcggacaagccggagctggcgccgcacctggtgtttccggggaatcgtcccaccagcacgctgctcgtcgacgcactgaccgcgcgttcgctcggcgctttgatcgcgctgtacgagcacaaggtgctggtgcaggcgtcggtgtgggacatcaatccgttcgatcaatggggcgtggaattgggcaagattctcggcaaagtggtcgaggccgatctgacagcgccgagcgtcgatgagaagaagcatgactcgtcgacgtcagcgttgattgcccgggcacgcgccgcgttgaagaag

SEQ ID NO: 12992 - DNA, 528 bp, Burkholderia fungorum
atgaaattcctgttcgatctgttcccgatcatcctgtttttcgtcgccttcaagatctggggcattttcacggcgacggcagtggcgatcgtcgccacgctggtgcagatcgcatgggtggcgttccgccaccgcaaggtcgacccgatgctgtgggtgagcctcggcgtcgtcaccgtgttcggcggcgccacgctcgtgctgcacaacgataccttcatcaaatggaagccgaccgtgctgtactgggcgttctcggtcgcgctgatcgtctcgcaactggccttcaacaagaacctgatcgaagcgatgatgggcaagcagatcacgctgccgcacgcgatctggggcaagctgaatgtggtgtggggggtgtttttcgtgctgctcgggctcgtcaatctgttcgtcgcgtacaactacacgaccgaccagtgggtcaatttcaagctgttcggcgcgaccggctgtctcgtggtgtttatcgtcgggcagagcttgtggctgtcgaagtatatgaaggaagaa

SEQ ID NO: 12993 - DNA, 672 bp, Burkholderia fungorum
atgacgtctcacgccacggcgctgacaacggcatgcggctgtgccgtgatggccgccaccctgttttcagcgagcttcgcggcccgggccgccaatgcacccgaaccggccaggccggtgatcgtcgtgctcggcgacagcatctccgccgaatacggcttgccccgtgacactggctgggttgcgttgatgcgccagcgcctcaccgacgagcgaatcgattatagcgtcgccaatgcaagcatcagcggcgacaccacgagcggcggacgagcccgcttgcccgcgctcatgcaacggttgaagccgagcatcgtgatcgtcgaactcggcgccaacgacgccttgcgcggcgtaccgctctccactaccgaagacaacctgcgcacgatcatcgagcaggctcagcaaggtcacgcgaaggtggtactggtgggcatgtatgtgccgcctaattacggccccgactatacgcaaaagttccacggcctgtatggcgagttgtcaaagcagctgcgcgtgccgctcgtgccgtttctgctcgccggcattgccgacaagcctgacatgttccaggccgatcagattcatcccacccagcaggcacagccagtgctactcaacaacgtgtggcccgcagtcaagccactccttcgcacaagttcgccgcac

SEQ ID NO: 12994 - DNA, 2256 bp, Burkholderia fungorum
gtgatcggcacggccaccgccgagcgtcaactcaagctgatcgactccgaactgaacgacgacaacgcgcaccagccggtcgacatgccaatggaagtgctgctcggcaaggcgccgcgcatgcatcgcgacgtcaaacgcgtcgagcggaagctcgaaccggtggatgtcaccggcctcgtgctggcggatgtcgcgaccagcgtgctgcgtcatcccacggtggcgagcaagtcgttcctgatcacgatcggcgaccgctcggtgggcggcacgaccgcgcgcgaccagatggtcggcccgtggcaggtgccggtggccgacgtcgcgatcacgacgatggactacgcgggctttcgcggcgaagccatgactatggccgagcgcacgccgctcgccgtgatcgacgcgccggcgtcgggccgcatggcggtcggcgaggcggtgaccaacatcgcggcggcgccgatcgcgtcgctcgacaagctcaagctgtcggccaactggatggccgcgtgcggcgcagcgggcgaagacgccgcgctgtacgacacggtcaaggcgatcggcatggaattgtgcccggcgctcggcatcagcattccggtcggcaaggattcgctgtccatgcgcaccaagtgggaagaccgcggcgtcgcgaaagaagtggtcgcaccggtctcgctgatcatctcggcattcgcgccggtcgaagacgtgcgccgccacctcacgccgcaactgcgccgcgcgagcgacgtgggcgagtcggtgctgatcgcgatcgaccttggccgcggcaagcatcgtctgggcggcagcattctcgcgcaggtcacccagcaggtcggtgacacggtgccggacgtggacgacccggaagacctgaagcgtttcttcgccgcgatccaggcgctgaaccaggacggcaagctgctcgcctatcacgaccgttcggatggcggcctgtgggcgaccgtgtgcgaaatggcgttcgcggggcacgtgggcgtgtcgctgaacgtggacatgctggtgctcgatccgaaccacgaatccgactacggcgacgccaaagactgggcgaagcagaccagcggccgccgcgaagaccgcacgatccgcgcgctcttcaccgaggaactcggcgccgtcgtgcaggttcgcgcgtccgagcgcgacgcggtgctggtcgcgttgcgcgaacatggcctgtcggcgtgctcgcatgtgatcggcaagatcaacgagcgcgacaccatcgaaatctatcgcgacgcgaagaagatttacgaagcaccgcgcaccgaactgcatcgcacgtggagcgaagtgagctggcggatttcgcgtctgcgcgacaacccggcttgcgccgacgccgaatacgacgcgctctccgacgcggccgatccgggcattgcgccggtgctgaacttcgatccgacggaagacgtggccgcgccgttcgtcggcaggagcgcgcgtccgcgtgtggcgatcctgcgcgagcagggcgtcaactcgcacctcgaaacggcctatgcattcgaccgcgccggcttcgacgcgcacgacgtacacatgagcgacctgctggcgggccgcgccaatctggcggatttcgccggcgcggtggcatgcggcggcttctcgtacggtgacacgctgggcgctggtgaaggctgggcgaaggcgatccgcttcaacgcgcaactggccgacatgttcgccgcgttcttcggccgcgcagacacgttcgcgctcggcatctgcaacggctgccagatgatgagcagcctggcctccatgattccgggcgccgaagcctggccgaagttcacgcgcaacaaatcggagaagttcgaagcgcgcttctcgctggtcgaagtgcaggcttcgccgtcgatcttcttcaacggcatggaaggctcgcgcattccggtggcgatcgcgcatggcgaaggttacgcggacttctcgcagcagggcgatgcgtcgaaggtcgcggtggcgatgcggtatgtcgatcaccggggtcaggccacggagcagtatccgttcaacccgaacggctcgccgaacggcatcacgtcggtgaccacgccggacgggcgcttcaccgtgctgatgccgcacaccgagcgcgtgcatcgcgcggtgcagatgagctggcatccggaaggctggggcgaaggcggcacggacgcgagcccgtggatgcgcgtattccagaacgcgcgccgctggctgggc

SEQ ID NO: 12995 - DNA, 1059 bp, Burkholderia fungorum
atgagttccgccgccaacctgccatcgccatcgccatcgccgccgatccgcaccgacgtcctgatcgtgggcgcgggccccgtgggactttttgccgccttcgaggcgggcgtaatcggcctgtcctgccagatcgtcgacgggctcgacaaggtcggcggccaatgcatcgagctgtatccggacaagccgatctacgatattcccgccattccatcctgcacggcgcgggagctggtcgagcgcctgctcgcgcaatgcaggccgttcgacccgcccattcatctcgaacagcgggtcgagtcggtcgagcagggtggcgacgggcgctggaccgtgcgtaccgatcgcggcctcgtgttcgatgtcgcggcgatcctgctggccgccggcaacggcgcgttcgtgccgcaaaagctggcgctggctgaagccgtgccgctggagtcgcgtcacgtgcattacagcgtgccgcgtcttgccgacttcgccggcaagaccgtggtcgtggccggcggcggtgactccgcgctcgactgggcattggcgctgcgcaaggtcgcgcgccgggtgacgctggtgcatcggcgcagcggtttcagtgcggcggattcgagtgtcgagtcgatgcggcgcgcggtcgaggcgggcgagatggacttcgtggtcggcgcgattgcgggcctcgacgtcgaggacgatgcgttgaagtcgattaccttgcggcatatcgagggcgagacgcaactcgccgccgagcatctcgtcgcgctgtacggactcgtcgccgatctcgggccgatcgcgcaatggggactgtcgattcacggcggccgtgtcgatgtggatacgtcgaactacgagagctcgcggcccggcattttcgcggtcggcgacattgcccactatccgaacaagcagaagctgatcctgtcgggctttcacgaggcgtcgctggcgctgcgcaaggcgtactcgtacgcttatccggagaagaagcgcgtgcacgtccattcgagttacgacgcgaagctggcggaaaaggtcagtgctgccggc

SEQ ID NO: 12996 - DNA, 936 bp, Burkholderia fungorum
atggatacgcttcaaaacatgcgcgtatttgtccgtgtcgtcgaagcgggcagctttacgggtgccgcgcagcatctgaacacgaccacggcctatgcgtcgcgcgcggtgtccgatctggaagcgcatctgcgcacccgactgctgaaccgcaccacgcgccgcattgcgctgaccgaggccggcgagcgctatctgcagcgctgcgagcagattctcgcgtacgtggaccaggcggaagccgaggcgggcgacgcccatgcccgtccgtccggcaagctcaaggtccacgccatgacgagcttcggccagcactatgtggtgcccgctgctggccgctatcagcagcgctacccggacgtccatatcgaactgacgctcgcgcagcgcatgcccgatctgctcgacgaaggcttcgacgtgtcgctcacgctcgcaaccggtttgccggattcggggctggtgtcgcagcgcctcggcagcgcgttcagcattgcatgcgcgtcgccggcctatctggagctgcacggcgtgccgcaaacgcccgcggaccttgcgcgtcacacctgtctgcaaatggtcacgccggttttcccgaccgacaaatggaccttcgacggcccgaacggcgaggaaacgatcgccctcggaccgaccactttccaggtgaacgtggccgaagcgatggcggtggccgtatcgagcggcatgggcgtcgggctgattccgatctactcggcgatcagcggcttgcgcagcggagaactggtgtggctgctgccggaatacacgtcgcaggagatgaatctgtacgcgttgtacccgtcgcggcagtatctggacgcgaagattcgcacgtggatcgagttcctgcgcgacgtattgcccgccacgctggccgcggatcaggcggagttgcgcgagttcgcgcgcgcc

SEQ ID NO: 12997 - DNA, 753 bp, Burkholderia fungorum
ttgatcctttacgagtatcccttcaacgagcgaatccggacgctattgcgcctcgaagacctgttcgagcgcttcacgttctttctgacccaggaagacgccagggaacatcacgtcgcactgaccacgctgttcgaaatctcagaggttgcgggtcgcgcggatctgaagtcggatctgatgaaagagctcgaacgccagcggcaaacactggcgccgtttcgcggcaatccgggaatcgagcagaacgcgcttgaggccgtactcggcgagatcgagcagaccctgtcggggctttcgcagatgcagggcaagaccggccagcatcttgcggacaacgagtggctcgccagcatccgcagccgcgcaatcattccgggcggcacctgcaagttcgatttgccgtcctactacgcgtggcagcagcttcatcccgatcagcgccgccaggacattgccaagtgggtgaccccgctgctgccgttgcgcgacgcggccaccatcgtgctgcggctcgcgcgcgaatccggccaggcgtccaaggtcatggccatgcagggcagctatcagcaaatgctgtccggccgttcgtatcaattgatgcaggtaagggtggcaccggaattgcgcgtgatccccgaggccagcgccaacaagtacatgctgtgggtgcgcttcacggtccaggacggcgatctgcgtccgcgcgcggtggatgtcgacgtacctttccagcttacgctctgcagcctg

SEQ ID NO: 12998 - DNA, 1140 bp, Burkholderia fungorum
atggttcttaagaatctgatcaaggcaaggaaaacgcacgagccgacactctcggacgacgcccaactcgtcagctccggtttgctgccgggcttcgaggcgttgccgacagtcgtgctggtgctcgaaaagcgcacgctgcgcgtcgcgtttgcgaacccgtcggcggagtcgatgctggagctctcgcgccggcaactgacgcaaatggcgtggccgcacatcttctcgaatgccgacgaactggtcgcgaccatttccgcgatcgccgctcaccgctttcatgccacgcatctggacgccgtgctcgaacgtccgggccacgaaccgctgcatgtgcacgcgatcgtgggttttctggaaagcgcgcaagactatgtgctgctcgaactgttcgagaacgaacggcatttacgcaccgaccgcgaggagcgcatcaacgacctcacggcggtcaacaagcaactgatccgcaatctcgcgcacgagatcaagaacccgctcggcgggattcgcggcgcggcgcaactgctcgagttcgaactcggcgagcgtcagcgtgacgaactgcgcgagtacacgcaggtgatcatcaaggaatcggaccggctgcaaacgctggttgaccgtttgctcgaaccgcaccgtcatccgcatatcgtcggcgacgtgaatattcacgaagtgtgcgaacgcgtgcgccaggtgattctcgcggagtttccgcgcggcctcaccatcgagcgcgattacgacgtgagcgtgccggacctgcgcggcgacaaggagcaactgatccaggcgctcctgaacatcgtgcgcaacgcggccgaagcgttgcgcgaacgtatttcgcaaggcgatgcgcggatcgaattgcgcacccgcgttgcccgcaagattacggtgtcgaaacgcttatgtaagctggcattggacttgcatatcacagacaacggcccgggcattcccgaagaaatccgtgaccgcattttctatccgctcgtgtcggggcgcgaggacggtagcggtctcggactgacgcttgcgcagactttcgtgcaacaacacgacggtctgatcgaagtggatagccgcccgggtcacaccgagtttcagattctgctgccgctcgactgc

SEQ ID NO: 12999 - DNA, 1668 bp, Burkholderia fungorum
gtgctgcgaaaatcagcacgcggtatcgcctggtggtgcgaaacaatcggatcggctcgaacgtttctctctcgcagcatcgtgtccgccggggcgtttgactgccagccggacacctgctcgtcacttccctgccacttccttgccatcaaccgcggcggaccgacgcagcccgtgctgcgcacgcacgtcgcgtcttataaacattaccgggaggaaatcatcgtgaaacgatccggagcacaccgcgcgcgtgtgtggtttgtctgcgccgctcttgcgggaacgccaatcttcaccgggctggccacgccgggcgtcgttcatgcgcaaggcgtctcgaaaatgtcgaaccagcaactcgattcgctggccgcgcccattgcactttatccggacgccctgctcgcgcaggtactgatggccgcgacttttccgcaagacgtgcgggccgccgccgcatggtccagatcgaactccagactgcaaggcgacgacgcggtcagagcggtcgcgtccgaaccgtgggacccgagcgtgcagtcgctcgtcgccttcccgcaggtgctcgccacgatggcttcgaaatccgactgggtcgcgcaactcggctccgcgttcctcgcccaaccgggcgacgtgatggactccgtgcagcgtctgcgccggcaggcccaagccgccggcaatctgaaaacgagtgcgcagcaaacggtcgtggtcgagcagagcacgatccagatcgtgccggccaatccgcaggtggtgtacgtgccgacctacaaccccacggtggtctacggcgtgtggccctatcccgcgtatccgccggtgtatgtgccgccgccgcccggttacaccatcgccaccagtttcatggccggcctcgcgttcggcaccggcatcgccgtggcgaacgcgttgtggggcggcttcaactggaactcgcacgacgtcaatatcaacgtgaaccggtacaacacgatcaatgtgaacaaccgcctcaacgtaaatggcagcacgacgaactggaaccgcaacactgacgtcaatcgaaatttcaaccatgcaaatttcgatcgcaacctgaacaacgtcggcggcgtacagcgcgatgcgtatcgcggccgcgacaacgcccgcgctcaggcgcagcaaaccctgcagaaccgcacgggccagaatcttggcggcaccgcgagccagcgcgtgcaagggatccaccagggcggcacggcaaaccccgatttgcagcaccgcgcgcagaacgtcaatcgcgacaatgcgctgcgcggcgccggcgacggcaacaccgcgcgtcgggacacgcagcgcggtcaggcaagccgcgacgcattcgcgaaccgccggacccagcaacacacgggaagagattacggaacgaatgccggtggccagccacgcacacatggcggccttggtgcagacggcggcggccagcagcgggcgatgggcggtatcggcgcaaacggcggcggtcagcagcgagtgcccggcggtatcggcgcagacggcggcgcccagcagcgtgcgcccggcggtatcggcgcaaacggcggcggtcagcatggcggcggtgccggcaattggggcggcggcgcgttgggcggtggcggcgccggtgagcgccacttcggccgcaatcgt

SEQ ID NO: 13000 - DNA, 1344 bp, Burkholderia fungorum
ttgaccgacacgcgcgccaaggagcaacacgtttcggtgccggtgtcggcattcgatgaagacaagttcgaaagcggccatgcgtttgacggttcgtcgattgccggctggaaaggcatcgaagcatcggacatgttgctggtcccggacgcgaacacggccttcatcgacccgttctacgaagaatcgaccctcgtgctgacctgcgacgtcgttgaaccggcggacggcaagggctacgagcgcgacccgcgctcgctggcaaagcgcgccgaagcgtacctgaagagcacgggcctcggcgacacggcattcttcggtccggaacccgaattcttcattttcgactcggtcaagtggggcacggatcagtcgggcacgttcgtcaagatcggttcggaagaagcaccgtggtcgtcggcactcgacttcgaaggcggcaacaccggccaccgtccgggcacgaagggcggctatttcccggtcgcgccggtcgacacgttccaggacatccgttcggaaatgtgtctgctgctcgaacagatcggcattccggtcgaagtgcatcaccacgaagtcgcgggccagggccagaatgaaatcggcacgaagttctcgacgctggtgcaacgcgccgactggctgcagcagatgaagtacatcatccacaacgtcgcgcacacgtacggcaagacggcaacgttcatgccgaagccggtggtcggcgataacggttcgggcatgcacgttcaccagtcgatctggaaagacggcacgaacctgttcgcaggcaacggttacgcgggtctgtcggaattcgcgctgttctacatcggcggcatcatcaagcatgctcgcgcgctgaacgcgatcacgaacccgtcgaccaactcgtacaagcgcctcgtgccgcacttcgaagcaccggtcaagctggcttactcggctcgcaaccgctcggcctcgatccgtattccgcacgtgtcgaacccgaagggccgccgtatcgaaacgcgcttcccggatccgatggcgaatccatacctgtgcttctccgcgctgatgatggcgggtctggacggcgtgcagaacaagattcacccgggcgaagccgccgacaagaacctgtacgacctgccgccggaagaggatgcaaagatcccgaccgtgtgcgccggcctcgaccaggctctggactcgctcgacgcggaccgcgaattcctgacgcgcggtggcgtgttcacggattcgatgctcgacgcgtacatcgaactgaagacgggcgagctgcaacgctatcgtcagtcggtgcacccgatcgaattcgaaatgtactactcgctg

SEQ ID NO: 13001 - DNA, 1023 bp, Burkholderia fungorum
atgacattgccatcggatacctcagcgctcgggcgggaaggacgctacgccggccttcgggcccgcgtcttctcgccgaccgctttgcagaagctgctcgccttcgcgagcctgctactgatgctgatctttttcagcttcgcttcgccatctttcatgcagatggacaacatgctcggcattctgcaggcgacggcggtcaacggcgtgctggcgattgcctgcacgtttgtcatcattaccggcggcatcgatttgtccgtcggcacgctgatgaccttcacggcggtcatctgcggcgtatttctcagctcctggcatttgccgatgtggaccggcgtcgtggcggcgatcggcactggcgcaatctgcgggaccgtttcaggaacgctcacggcgaaaatgaaaataccgccgttcattgccaccctgggcatgatgatgctgctcaaagggctctcgctcgtcgtctcggccgacaagccgatctatttcaccgacaccgaaaacttctaccggatctcgcaggattcattgatcggctatatcgtgccgagcctgcccattccgaacgcggtcctgatcctgtttttccttgcggtggtgagttcgatcacgctcaatcgcacggcgctcggccgttacacgtttgcactcggcagcaacgaggaagccgtgcgcctttccggcgtgaatgtggaccggtggaaaatcgccatttatggcctgagcggggcgatttgcggcatcgccgggctgctcatcgcgtcgcgcctgaattcggcccagcccgcgttgggccagggctatgagctcgaagcgatcgccgccgtggtgatcggcggcacgtcgttaagcggcggttccggcacgatgctgggcacgatcatcggcgccttcatcatgagcgtgctgaccaacggcctgcgcatcatgtccgtcgcgcaggaatggcagatcgtcgtgacaggcctcatcatcattctcgcggtctacgccgatattctgcgacgcaggaagagc

SEQ ID NO: 13002 - DNA, 1836 bp, Burkholderia fungorum
atgggcgctttgcgtcgcgcggccggcgactcgtccgcgcaccgcgcgatgcattgccgcagcctcgattaccgcgtgccccacgccctgacattttgcttttttcgcccgtccatgacgcacgcttttctgacctctctcgcacgtcgcgtattccatgccgcgcgccgtccgggtttcccgtctgcttccgacacgcccaacgtttccacgcctcgcctgcctcacttgcctcacttgcctcacttgcctcacttgccgcgcctgcctcgccggttcgcgccgcgcgcgagcggctggctgctcgcctgcgtcgcgctgggctgcggcgcatcgctgccgctcgccgcgcaggctcgcgtcaaggccacgcatccgagcgtcaacgtcacgacggtcttgccgccgtcggtgatggccggcttgcagcgcgcacacgtgccgttgacgtcgatcagcgtggtcgtggagaaagtcggcgaccgcacgccgatcgtcgccctgaacgccggcaagccgatgatgcccgcctcgaccatgaagctcgtcaccacgtactcaggcctgtcgatactcggccccgagtaccgctggcgcaccagcgcctatgcggacggcacgctcgacgccaacggcgtgctgcacggcaatctctacattcagggcacgggagaccccaagctcgtgcccgaagaactgatcgacctcgtgcagaagatccacaagacgggcatcaacggcatcgacggcgcgctggtgctcgacaagcgctacttcgatccgtccacacgcgacctgccgccgttcgacgacgacgccaccgcgccgtacaacgtcggccccgatccgctgctctatgcgttcaaatcgctgtccttcacgctgacgccgtcgcccgacggcagcgtggcgatcgacgtgctgcccgcgctcgcgcagctgcagatcgacaaccagatgcacgctgtcaacggcccatgccgcggcgacgcggcctccgtgtcgcccaccgtcacgccgcagccgaacggcactgtcgtagcctcgttcgacggcgactattcggtgcgctgcggcccgcgcacgatcaacgtcgcggtgctcgatcattcggcgtttttcgcgggcggttttctcgcgctgtggcagcagaccggcggcacgttcagcggcgcgacgcgcgaaggcgccgtaccggtgggcgccaaactggtggcgacacaccaggggccgatgctgtccgacatcgttcgcgacatcaacaagttcagcaacaacacaatggcgcgcaacctgttcctgacgatcggcgccaccgaggaaaagggacccgccacgcctgccaaatcggcgcgcgcgatcgaagcgtttctgcgccgcgacagcatcaacatggaatatctgacgctcgacaacggctcgggcctttcgcgcgacgagcacatcaccgcgctcgcgctcgccgatctgctgcagcgggccaacgcgagtccggtcgcgcaggtgttcgtggagtcgctgccgatcgcgggggtcgacggcaccatgcgcaaccggctgaccaaccagggcgcgggcggcaacgcgcacatcaagacaggcaccttgcgcgacgtgcgggcaatcgcgggctatgtggcctcggcggacggcaatagttacgtggtcgtcagcctgatcaacgatccgcattcagaagccgcacgcgccgcgcacgatgcgctgctcgaatgggtgtaccagggtccgtcgcaaggctttaccaaagtctccgatccggtcgtcgaaccgcgtagcagcaagcccaggaaaaacccgcatcagcgcggcgctcac

SEQ ID NO: 13003 - DNA, 999 bp, Burkholderia fungorum
atgttcaacgtacacaaccgcagctacctcacgctgatcgaatatacgcctcgccagattcgctacctgctcgacctgtcccgcgatctgaagcgcgccaagtatgccggaaccgaaacgccccgcctgaacggcaagaatatcgcgctgatctttgagaagacctcgacgcgcacgcgttgtgcattcgaagtggcggcgcacgaccagggcgcccatgtcacctatatcgacccgaacggctcgcagatcggccacaaggaatcgatgaaggacaccgcccgggtgctgggccgcatgtatgacgcgatcgaatatcgtggattcggtcaggagatcgtcgaagagcttgcgaagtatgccggcgtgcctgtctacaacggcttgactgacgagttccacccgacgcagatgctggccgacgtgctaacgatgcacgagttcagcgacaggccgatccacgacatcgcctattgctacataggcgacgcgcacaacaatactggcaattcgctgatgattgtgggcgccaagctcggcatggatgtccgcctgtgtgctccgcgctgcctgtggccgcacgatgaactgatcgaacagtgccgggcaatcgcggccacgacgggcgcgcgcctgacgttgaccgaaaagccggaggaggccgtgaaaggcgtcgacttcatctataccgacgtatgggtatcgatgggcgagccgttcgagaagtggggcgcgcggatcgaggagcttttgccgtaccgggtgaatgccgcactgctggctgcaagtggtaatccgcgggtgaagttcatgcattgcctgccggcgtttcatgactcgaacacccacgtcggcaagcagattgctgaccaatatgggctcccgaacggcgtcgaggtgaccgacgacgtgttcgaatccgacgcttcgatcgtcttcgagcaggcggagaaccgccttcatacgatcaaggcgattctggtcgctacgctcaccggc

SEQ ID NO: 13004 - DNA, 1152 bp, Burkholderia fungorum
atgaaggacgaggtagacccagcgcggagcggtatcgtatccagccgaccgcattttccgagcgacgagagcttccggttactcgtggaagccgtcgatgattacgcgatctacatgctggacatgtcgggcaaggtcgtgaactggaatgcaggcgcgcaaaggatgaaggggtactatgctgacgaaatcatcggccagcacttccgcgtgtttcacacacccgaggacattgcggcgggccagcccgactcgctgctcgctgcggctgcggcggacggccgggtcgccagccaaggctggcgggtccgcaaggacggctcgaaattccgggccaacgtggtcgtctccgccatccgtacggcctcgggtgagttgtgtggttttgccaaggtgacgcaggacctgactgaacaaaatcgcctggcggagttcgagcaactcagacggttggcgacccatatccaggctacacgggaagaagagcagattcgcatcgcgcgcgaacttcatgacgacctcggtcagcagctcgcggcgctcaagatggcgctcgccgaccttgaaaccatcctccgtgacaacggagcgatcgctgcgctgactttgacgcacacgaaggacatgcatcatctgatagacgtgaccgtcgcctcgctgcggcggattgcggctggcctgcgcccgatcgtgctcgagacgctgggactcgtcccagcgctcgaatggcttatcggagattttacgcagcgctatcacattgacgtcaatgcgcggattcagaccgatgacatgaacgtcagcgaggcagccagcgaggctctgttccatatcatccaggaagcgctgaccaacgtcgcccgacatgcgcatgcagacgaggtgacggtggaactggcccgcggtggcaggacatgtgtcttgcgtgtcgaggacaacggacagggaatggcgtcggcgacgctgccgcgggaaacctcgttcggcctgcttggcatgcgcgagcgcgttcaccgcctgaatggctcgctatcaatcgacagcacacctggctgcggtttccgtatcgccatcacgttccccctggagacgcttgagcgtgtgcctcccggccgtcccggaacttccgcgccttcggtctcgccgtcatac

SEQ ID NO: 13005 - DNA, 474 bp, Burkholderia fungorum
gtgaacgagaacgacgccattatcgttacgctgggttcgatgaccgaggcgtccagcacgggcgacatggatcgtgcccccgtccgtaacggcaagaccaacggcggcgcctggacgctgtgggaaaggatcgccagcagcaggccggaattcggtcgcccgtcgacgttcgccgaccatatcgcggattcaaaatgggcgtccttcaccaataccctgagcgacacggcgttctttcgtctcgtgcgcgacttcacgggcaacgtgccaagggaaggcagcctcgtgacgttcgccgaatcgggctggctggcctccatcgtgctaccgcatcagccccaatccattgatcagccggatgacgtggcaagtcttctggggctacggcctgtccgtcgagcagcctggggactttgtgaaaaagccgatggtaggttcaatggatcgttgcaacaccttcctattaatatcgaa

SEQ ID NO: 13006 - DNA, 594 bp, Burkholderia fungorum
atgaaacaaccttccgccttgtcggcgctcgtcgaagcgctgcgcgcgctgcctggcgtcgggccgaagtccgcgcaacgcatggcgtaccacctgatgcagcacgaccgcgacggcgccgaaaaactcggccgctcgctgctgttcgccaccgagcatctgcagcactgcgagaagtgcaacaccttcaccgaagcgcagatctgcgaggtctgcctcgacgaggagcgcgatcccaccttgctgtgcgtcgtcgaaacgcctgccgaccagatcatgctcgagcagaccatgacctatcgcggtctttatttcgtgctgatggggcgcctgagtccgctcgacggtatcggtccgaaggagattcatttcgaccggctcgtccggcgcgcgtcggacggcgtggtcaaggaagtggtgctcgcaaccaatttcaccaacgaaggcgaagcgaccgcgcattacctcgggcagacgctcaaggcgcgcggcctcgccgtcacgcgtcttgcgcgcggcgtgccggtgggtggcgaactggagtacgtggacgccggcacgatcgcccgcgccatgctcgatcgccgctcgatg

SEQ ID NO: 13007 - DNA, 1185 bp, Burkholderia fungorum
atggaaatgactgatgttgtgatcgtatcggccgcccgtacggcagtgggcaaattcggtgggtcgctggcgaaaatcgccgcgcccgatctcggcgccgcggtgattcgcgccgttctcgagcgtgccggtctgaagcccgagcaggtgagcgaagtgatcctgggccaggtgctgacggcaggctcgggccagaatccggcgcgtcaatcgctgatcaaggcgggtctgccttcggcggtgccgggcatgacgatcaacaaggtctgcggctccggcctgaaggccgtgatgctcgcggccaatgccattatcgcgggcgacgcggacatcgtgatcgccggcgggcaggaaaacatgagcgccgcgccgcacgtgctgccgggctcgcgcgacggcttccgcatgggcgacgcgaagctggtcgactcgatgatcgtcgatggcctgtgggacgtctacaaccagtatcacatgggcgtgacggcggaaaacgtcgcgaaggaatacggcatcacgcgcgaacagcaggacgcgttcgcggcgttgtcgcagaacaaggcggaagccgcgcagaagtcgggccggttcgacgacgaaatcgtgccgatcgagattccgcaacgcaagggcgagccgctgcgtttcgcgaccgacgaattcgtgcgtcacggcgtgacggccgagtcgctcgcgggcctgaagccggccttctcgaaggaaggcacggtgacggcggccaatgcctccggtcttaacgacggtgctgcggccgtgctggtgatgtcggcgaagaaggccgaagcgctcggcctcacgccgctcgcgcgcatcaaggcgtatgcgaacgccggcgtggatccgaaggtgatgggcatgggcccggtgccggcttcgcgccgttgcctcgaacgcgcgggctggacgccggccgacctcgacctgatggaaatcaacgaagcgtttgccgcgcaggcgctcgccgtgcatcagcagatgggctgggacacgtcgaaggtcaacgtgaacggcggcgcgattgcgatcggccatccgatcggcgcgtccggctgccggattctcgtcacgctgctgcacgaaatgcagaagcgcgatgcgaagaagggtttggcctcgctgtgtatcggcggtggcatgggtgtggcgctggcggtcgagcgcgcc

SEQ ID NO: 13008 - DNA, 618 bp, Burkholderia fungorum
atggcgcggggcaaattcatcacgtttgagggcatcgacggggcgggcaagacaacccacctcagctggtttcgggagcgcctcgaacagaaagtcgcgagcaccgggcgctcggtcgtcatgacgcgcgaaccgggcggcacgccgctcggcgagcagattcgcgaaatcgtgctgcatcagaaaatggacctcgaaaccgaggcgctgctgatgttcgcgctgcgccgccagcatctggccgaagtgatcgagccggcgctcgcgcgcggcgactgggtgctgtcggaccgtttcaccgacgcgaccttcgcctatcagggcggcggccgcggactgccgcgcgacaagctggaaaccctggagcgctgggtgcagggcggctttcaaccggacctgacggtgctgttcgacctcgatcccgaggtcgccagcgagcggcgcagcgcggcgcgcgacccggatcgtttcgagagcgaatcggaggcgttcttcagccgtacccgcgccgaatatctgcgccgtgccgaagaagcgccgtaccggttcgctatcattgactccgcgcagagcatcgcgcagattcagaggcgacttgaagaattgattgcaattctt

SEQ ID NO: 13009 - DNA, 1083 bp, Burkholderia fungorum
atgaacacaccgctcgctaccgcttcaggcactcctaccggctctccgtcaggcacggctcccgcggcgattgccgccgcgccggctggtctgcccactctgccgcgccccggcgccgatgaattcgacgcggtcgttgcgcacggcgcgtacatgccgctcacgcagttcggcgtgatcgacgccaccggcgacgacgccgcaagcttcctgcatggccagttgaccaacgacacccagcacctcgacgcggccagcgcgcgtctggccggctactgctcggccaaggggcgcctgctggcatcgttcctgacctggcgcagcggcgacacgatccgcctgctggtgtcgaaagacgtgcaggccgccgtgcagaagcggctgtccatgttcgtgctgcgcgccaaggccaaactcacggacgcaagcggcgagctggcggtgatcggtctggccggcgacgtgcgcaaggcgctctcgggcgtattcgacgcactgccggacggcgtgcatgtgaaggtggacggcgcggcgggctcgctgattcgcgtgccggatgcgctcgggcgcctgcgctatctgtgggtcggcccgaaggcgcagatcgagtcgcagcttgccttgctggacgagacgctcaaacgcgtgtcgccggcggtgtgggactggctcgacattcgcgcgggcgaaccgcgcatcacccagccggtggtcgagcagttcgtgccgcaaatggtcaatttcgacgtgctcggcgcggtgaatttccgcaagggctgctatcccggccaggaggtggtggcacgcagccagtatcgcggcacgatcaagcggcgcacctcgctcgccaccgtggcgggcgagcccgacacggtgcgcgccggcgcggaactgttccattcggacgatccgggccagccatgcggcatggtggtgaacgcggcatcggcgccggaaggcggcgtcgatgtgctggtcgagatcaagctcgcggcgctggagaacggctcggtgcatctgggtgcggcaaccggcccggcgctgcggtttctcgcgctgccctacgggctgcccaccgaagtc

SEQ ID NO: 13010 - DNA, 1011 bp, Burkholderia fungorum
atggagacgatcgccatgagccagatcaaccgccaactcgtgttggcgtctcgcccgcaaggcgccgtgacgcccgataatttccgcctcgtcgaagcgccgctcgcgccgctggccgatggcgaattgcgcgtgcgcaatcactatctgtcgctcgatccgtacatgcgcggccgcatgaacgacagcaagtcgtatgcgccgccgcagccgctgaacgaagtgatgatcggcggcacggtgggtgaagtggtggagtcgaagaatccgaagttcgcggtcggcgacaaggtcgttgcgatgttcggctggcaggaatacggcacctcgaacggaacgggcctgcagaaagtcgacgatacgcatgtgccgctctcggcctatctcggtccggtcggcatgccgggcgtcaccgcgtggtacggactgaaccgcatcatcgcgccgaaagcgggcgagaccgtggtggtcagcgcggcgagcggcgcggtgggcagcgtggtcggccaactggcgaagctggccggcgcacgcgcggtgggcattgccggcggcgcggacaagtgccgctatgtcaccgggacgctcggcttcgacgcctgcgtcgactacaaggccggcaatctctatcaggatctcaaggccgcgacgccgaatggcgtggacggctacttcgagaacgtcggcggcgaagtgctcgacgcgacgctcgcgcgcatgaacccgttcggccggatcgcgctgtgcggatttatcgcgggctatgacggccagccggtgccgctcaggcatccttcgctgatgctcacgcagcgtctgctcgtgcaaggcttcattgtcagcgaacatatggacgtgtggcccgaagcgctcaagcgactcggcacgctggtcgcgcagaagaagctgcactatcgcgagaccatcgcgcaagggctcgatgccgcgcccgaggctttcatgggcctgctcaaaggcaagaacttcggcaagcagctcgtcaagctgatc

SEQ ID NO: 13011 - DNA, 789 bp, Burkholderia fungorum
atgtttgtcgattcgcattgccatatcaacttcgaaggactcgccgagcgcttgccgcaggtgctcgaaaacatgcgcagccattcggtcacgcatgcgctgtgcgtgtccgtcgatctggagacgctgcctgccgtgctggatatcgccagccggtacgagaacgtgtacgcgtcggtcggcgtgcatccggatcacgagcacatgcgcgagccgagcgtcgccgaactggtcgaactggccgcgcatcccaaggtggtcgcgatcggcgagaccggtctcgactactaccggctggaaggccgcacgatcgccgacatggaatggcagcgcgagcgctttcgcaaccatatccgggcggcgcatgccacgcacaagccgctgatcatccatacgcgttcgtcgtcggcagacacgctgcgcatcatggccgaggagcgcgcgagcgagccgggcggcgtgatgcattgcttcaccgaaccgtggccggtcgccgaacaggcgctggcgcagaatttttacatctcgctgtcgggcatcgtcacattcaaaagcgcgaccgacgtgcaggacgtcgcgcgccgcgtgccgctcgagcgtttgctgatcgaaaccgactcgccgtacctcgcgcccgtgccgtatcgcggcaagcctaatgaacctgcctacgtaagttatgtcggacggttcatcgcgcagcaacgcgagatgcccgaagcggcgctggccgccgcgaccacgcagaacttcttccgccttttcaagatcccggcgcccactggcgcg

SEQ ID NO: 13012 - DNA, 546 bp, Burkholderia fungorum
atgagctacgagattattgatgccacgctgctggatccagttgcgcggcccctcctggatgcactgcaggtcgagtacgcgacacgctaccgcgagtttcggccggacagcgctgcatcagcgagtgaggaactggtgcgttatccggccgaattgttcgcgccacccgagggagctttcatcgtgatcgtgcttgacggggaaacggtcggcggcggggcattcaagcgctatgacgcgacgaccgcagagctcaagcgtatctggacgcgcgccgaccagcggcgtcagggagtggctcgccgcatcgtgacggaactcgagacgcgtgctcggcgccagggataccgccgcatctatctgaccacgggcttcaggcagccggaagcgtccggactctacctcaacacgggctacgaaccgttgttcgatcgttcgatcgcgccggagatccactttcgtcttccgttcggcaaggatctgctggagccggggcgcaccgattcgctagacgatctgcgccagtccgagccgctcggccaaccg

SEQ ID NO: 13013 - DNA, 384 bp, Burkholderia fungorum
gtgttcggcaagatcgtcgcgcactggctgacaggcggcctcgcccaggtgctgcttgcaccggtcgtggcgctgcaatacgagctcggctggcgcgctacgctgccgctgatgggctcgctgctgctcggcacaccgctgctgagcctgatcggctcgatgggcgcggcgctgacactcggcgtgcgcggcggcggtgtgacgctcgcgttggtgatcctgccgctctacgtccctgtgctgatcttcggcgtcagtgcgtccgatccagggacaagcgcagcctggtccaaagcgaacttctcgctgcttggcgcagcgctgtgcgccgccggcttgctgtgtccctgggcgagcgctgtggcattgcgaatcgctttggag

SEQ ID NO: 13014 - DNA, 1140 bp, Burkholderia fungorum
atgcacatcggagtgccagccgagacgcgcgcgcacgaaacccgcgtcgccgcgacgcccgagacggtcaagaagtacgtgacccagggccaccgggtcacgatccagagcggcgccggcaccggcgcaagctttcctgacgacgcctttacggccgccggcgcggagatcgtcgacgccgcggccgctttcggcgccgatctcgttctcaaggtgcagtcgccgaccgacgccgaactgccgcttctgaagcgcggcgcggtgctggtcggcatgctcgatccttttaataccgaaaactcatcaaagctggcggcagccggcgtcaccgcgttcgcgctcgaagccgcgccgcgcaccacgcgtgcgcagagcctcgacgtgctgagctcgcaggccaacattgccgggtataaggcggtgctgctcgcggccacgctgtacccgcgcttcatgccgatgctgatgaccgccgccggcaccgtgaaggccgcgcgcgtgctgatcctgggcgcgggcgtggcgggcttgcaggcgattgcgactgcgaagcgtctgggcgccgtgatcgaagcatctgacgtgcgtcccgcggtcaaggagcagatcgaatcgctcggtgcgaaatttctcgacgtgccctacgaaaccgacgaggagcgtgaagccgcccaaggcgtcggcggttatgcgcggcctatgccgccatcgtggctcacgcgtcagtcggcgctagttcatgagcgcgccagacaggctgacgtggtgatttccaccgcgctgattccggggcgcgccgcgccgaccttgatctcggtggaaaccgtgcaggcgatgaaacccggctccgtgctggtcgatctcgcggcgggacgcggagccgagtacgaaggccggcgcggcggcaactgtccgttgaccgaagcggatcaggtggtgatcaggcacggcgtgtccatcgtcggctatacgaatctggcctcgatggtgcccgccgacgcgtcgtccctctacgcgcgcaacctgctcgatttcctcaagctgatcatcacgaaggaaggcgccctgaacatcgatctcgcggacgacatcgtcgcggccacgctgctggcccgcgacggcgaagtcgcgcgcaaagcc

SEQ ID NO: 13015 - DNA, 756 bp, Burkholderia fungorum
atgcgcttcatccgttctttgcttctgctgatctacttcgttctgttcacggtgccgtacgcgactgcatgcttcatcgcatttccgttcatgcgcgccgacaagcgctactggatggccgccggctggtgtcgcgccacgctgcatacggtgcgctggctgaacggtatccgctaccggatcgagggcatggagaacctccccgacggtcccgccgtgctgctctccaagcatcaatcggcatgggaaacgctggcgtttccggcgttgatgccgcggccgctgtgctacgtgttcaagcgtgaattgctgtacgtgccgtttttcggctgggcgctcggcctgctgaagatggttcacatcgatcgcaaggaaggcaagtacgcgttcgaatccgtcattaaacaaggcaaggcgcgcatggcggaaggcgcgtgggtcatcatgtttccggaaggcacacgcacccgcaccggcacgcaaggcaagtacaaaaccggtggcgcgcgtttcgcgatagcgaccggcgcaccggtcgtgccgatcgcacacaacgcaggacgtgtgtggcctcgcaactcgtttctcaaatatgcgggtatagtcacagtgtcgatcggcaagccgatcgagacgacggggctcacgcccgatgaagtgaacacgcgcgtcgaacggtggatcgaagctgaaatgcgtcgcatcgatcctaccgcgtaccgcgcggcggaaagcagttccgccgccgcaccaatc

SEQ ID NO: 13016 - DNA, 2097 bp, Burkholderia fungorum
atgactcaaccccatcaagctaccctgctcgtcgagctgctgaccgaagaattgccgccgaaagcgctcgcgcgtctcggcgacgccttcgctgaaggcattgcgcagcgcctcgcggcgcgcgacctggtcgaaggcgaattgtcgttcgaacgttatgccacgccgcgccgcctcgccgtcacgatcaagaacgtgcgcgcggtcgcgccggaaaaacacgtgcgtgaaaaagtgctgccggtttccgtcgcgttggataaagacggccagcccaccgcgccgctcgccaagaaactcgccgcgctcggcttccccgatttttcggtgaacgacctggagcgcgcacaggacggcaaggctgaagcgttcttcctgcgctatgccgcgcccggcgccacgctcgccgaaggcctgcaaagcgcgctcgacgaaacgctcgccaggctgcccattccgaaggtcatgacgtatcagcgtccggacggcaccaacgtgcaattcgtgcgtccggcgcatcgcctcatcgcgctgcatggcgaacagatcgtgccggtgagcgcgctcggcatcgacgccgacgacaccacgctcggccaccgtttcctctccgaaggtttcgtgcagatccagcacgcggattcgtacgccgagacgctgctgcacaaaggccgcgtagtggcgaatttctccgatcgaaaggagaccatccgcacgcatctgctcgcgcaagcaaacggcgaccaggtggtgatgccggaatcgctgctggacgaagtgacgtcgctggtcgaatggccggtggtttatgcgtgccgtttcgaggacgaattcctgcaagtgccgcaggaatgcctgatcctcaccatgcagaccaaccagaaatacttcgcgctgaccgatgcgaacggcaagctgcgctcgcgcttcctgatcgtgtcgaatatcgaaacgtccacgccgggcgatatcgtggaaggcaacgagcgcgtggtgcgtccgcgtctggccgacgcgaagttcttcttcgagcaggacaagaagaagacgctcgccgatcgcgtgccgctgctcgcgaacgtcgtgtatcacaacaagctgggctcggcactgcaacgcgtggagcgcgtcgaagcgctggccggcgcgattgccggactgatcggcgcggacgtggcgctcgcgaagcgcgccgcgcgcctcgccaaggccgatctgatcaccgacatggtcggcgaattccccgagctgcaaggcacgatgggcacctactacgcgcgccacgacggcgagccggaagaagtcgcgctcgcgtgctcggaacactatcagccgcgtttctccggcgacgcattgcccgctaccgcaaccggcaccgtcgtcgcgctggccgacaagctcgaaacgctggtcggcatctggggcatcggcctgcaacccaccggcgagaaagacccgttcgcgttgcgccgtcacgcgctcggcgtgctgcgcattctggtcgagaagcaactgccggtcgacttcgtcgaactgctgcgcaacgcttacgcgcaattcgccgcggtgccgaacgtcgtcgattcgacgcaagccatttacgagttcagcatggaccggctgcgcggtctgctgcgcgagcgcggctatgcgccgggcgaaatcgacgcggtgctggcgctgaaccccacgcgcctggacgacatcgtcgcgcgtctggatgcagtgcgcgaattcgcgtcgctggctgaagcggcttcgctcgcggcggccaacaagcgcatctcgaacatcctgaagaagtcggaaggcgcggcgaccggcggtgtgcaggtcacgctgctcgtcgaagcggcggaaaaagccctgcatgcgcaactcgaacaggtcgcgccgcgcgtgcagtcgcaactggccgcgcgcgactatacgggtgcgctgaccgcgctcgccgcgttgcgcgaaccggtcgacacgttcttcaacgacgtgatggtcaacgccgaagatcccgcgttgcgcgccaaccgtctggccttgctcggcgcactgcatcagcagatgaactgcgtcgccgacatttcccgactcgccgcc

SEQ ID NO: 13017 - DNA, 1584 bp, Burkholderia fungorum
atgtggtgcgcagccgcgctgttcgcggtctgtgcggcgttcgccgccacgcatcacatttcgtggttctggatcatcgtgccgctcgcgctcgtcgcgctcgggctgttcgacctgacacagcagcgtcacgcgatcctgcgcaactatccgctgtggggccacttccggttcctgttcgaattcatccggccggaaatccgccagtatttcgttgaaggcgataccgacgaaaagccgttctcgcgcgcccagcgcagcatcgtctatcagcgcgcgaagaacgacgtcgacagccgcccgtacggcacggagctcgacgtcaaggccgttgcgcacgaatggatcagccactcgctcgcgccgaccaggctcgatagccacgacttccgcatcgtcgtcggaccggatcgcgcgcagccttattcgatgtcgatcttcaacgtctcggcaatgagcttcggctcgctgtcggcgaacgcgatcatggcgctgaacctcggcgcgaaaaaaggcaacttcgcgcacgacaccggcgaaggctcgatgtcgaagtatcaccgcgagcacggcggcgacatcatctgggaaatcgcctcgggctacttcggctgccgcaacgaagacggcaccttcagcgcggagaagttcgcgaagcaggccgccgagccgcaagtgaagatgatcgaggtgaagctctcgcaaggcgcgaagccgggtcacggcggcgtgctgccggccgccaagatcacgccggaaatcgccgaaacacgaggcgtgccgatgggccgcgactgcatctcgccggccacgcactcggagttctccacgccgcgcggcctgctggaattcgtcgaccgtctgcgcacgctgtcgggcgacaagccgaccgggttcaagctgtgtatcgggcacccgtgggaatttttcggcattgcaaaggcgatgctggaaacgggcatcctgcctgactttatcgtggtggacggcgcggaaggcggcacgggcgcggcgccgctggaattcacggatcacgtcggcgtgccgttgcaggaaggcctgctgctggtgcacaacacgctggtgggcatcggcttgcggcaacgtattcgcattggcgcgagcggcaagatgatcaccgcgttcgacattaccaaaacgctcgctattggcgcggactgggtcaacgcggcgcgcggcttcatgttcgcggtgggctgcattcaggcgcagacctgccacaccgggcgctgcccgaccggcgtcgcgacgcaggacccggtgcgccagcgcgccctggtggttcccgacaaggcagaccgcgtcttcaatttccatcacaacacgctgcatgcgctgaaggaaatcattcaggccgcggggttgaagcatccggctgagctgcgcgcgcatcacatcgtgcggcgcgtgtcgtcgcacgaggtgcagttgatgtcggagctgctgaagtatctcgatccgaacgatctgctcaacggcaattatcgctactcgctgttcgagaagtactggccggtggcgcaaagcgattcgttctcgccgaaggtggagttggcggcgacg

SEQ ID NO: 13018 - DNA, 1143 bp, Burkholderia fungorum
atgagcaagcagaaagtcgtagtaggcatgtcgggcggcgtcgattcgtcggtcaccgcgtggctgctgaaggaacagggctacgacgtggtcggcctgttcatgaaaaactgggaagacgacgacgacagcgagtactgctcgacgcggcaggactggatcgacgtggtctcggtggcggacctgatcggcatcgacgtcgaagcggtcaacttcgccgccgaatacaaggaccgcgtgttcgccgaattcctgcgcgaatattcggccggccgcacgccgaatccggacgtgctctgcaacgccgagatcaagttcaaggcgttcctcgatcacgccatgtcgcttggcgcgcaaaccatcgcgaccggccactacgcgcgcgtgcgcgagaacaacggccgcttcgagctgctgaaggcgctcgaccatacgaaagatcagtcgtacttcctgcatcggctgaatcaggcgcagttgtcgaaaacgctgtttccgctcggcgaaattccgaaaaccagagtgcgcgaaatcgccgaacagatcgcgctgcccaatgcgaagaagaaagattcgaccggcatctgctttatcggcgaacggccgttccgcgacttcctgaaccgctatctgcccaccaagcccggcccgatgaaaaccaccgagggcaaagtggtcggcgaacatatcggcctcgcgttctacacgtttgggcagcgcaagggcatcggactcggcggcagcaaggacggcagcggcgagccgtggttcgtggccggcaaggacatcccgtcgaacacgctgtacgtcgcgcaaggccacgatcatccgtggctgctcagccatacgctgtcagcgggcaacacgagctgggtggcgggcgagccgccggcggacggctttgcgtgcggcgcgaaaacccgttaccggcaagcggacgcgccgtgcacgttcagctcggcgggagccggcgaaggcctgttcgaactgaatttcgacgtggcgcaatgggctgtcacaccagggcaatccgccgtgctctacgatggcgacgtgtgcctgggcggcggcatcatcgaacatgcggtgaccggccagccggccacacgacagcctcagaaagcggcgctgctgaccgcccgt

SEQ ID NO: 13019 - DNA, 1017 bp, Burkholderia fungorum
atggcaagcatcgactccaccacgcccgcctcgaccaccgcgctgccgccgcgctcgctcgccgcgcgcctcggcatcaccagcgtgacgcgcgacgaattgcggcagcgttatacgcaaagcggctccaggttcgtgaagatcatgggcgccgacgtgcactatgtcgacgaaggcagcggcgacatcatcgtgatgatccacggtttcgcctcttcgctgcatacgtggaatcgcgtcgccgatgagctcaagcgcgagcaccgcgtgatccgcctcgatctgccgccgttcggcgtgacaggaccgctgcgctccagcagcggcgcaatcgaaacgatggacctgcccacctatcggcgcttcatcgacacgttcatgcaggcactcggcatctcgcgcgcaaccttgatcggcaactcgctcggcgggctgatttcgtgggactatgcggcgcgccatcgcgacgccgttgagcggctcgtgttgatcgactcggccggctttccgatgaagctgccgatttacatcggcctgttcaatagcgcgctggtgcgggtgagttcgccctggtggctgcctgaggccatcgtcaaaagcgcggtgcgcaacgtctatggcgatccgcgcaagatcgacgcggtgacgctgcgccgctacgtcgagttctttcacggcgaagggacgcgcgccgcgatcggcaagatggtgccgacgctcgatttcaggcaagtcgacacgaacgtgctgaaaacattcgatgtgccggcgctggtgctatggggtgcgaaggatcgctggattccgacggcgcacgccgccgaattcgcaagccgcattccgggtgcgaaatcggtcatgtatgccggattaggccacattccaatggaagaagcgcccgaacgcgtcatggtcgatctgcgcgcgtttctcggcatcaggccggcgcactcagccgccgccgagcaggcgcaacagcccccacagaaatttgcagagcatcacgatcagctccca

SEQ ID NO: 13020 - DNA, 1590 bp, Burkholderia fungorum
gtgctgtctaccgccaatatcaccatgcaattcgggccgaagcccctcttcgagaatatctcggtcaaattcgggggcggcaaccgctatggcctgatcggcgcgaacggctgtggtaaatccaccttcatgaagattctgggcggcgacctggagccgagttcgggcaacgtcatgctcgaaccgaacatccgcctcggtaaattgcgccaggatcagttcgcgtacgaagacgtgcgcgtgctcgacgtcgtgatgatgggccacgccgaaatgtgggccgccatgaccgagcgcgacgcgatctacgcgaaccccgacgcgacggacgacgactacatgcatgccgccgaactcgaagcgaagttcgccgagtacgacggctacacggccgaagcgcgcgcgggcgagctgctgctcggcatcggcatcgcgatcgagaaccacaacggcccgatgagcaacgtggcgccgggctggaagctgcgcgtgctgctcgcacaggcgctgttctcgaagccggacgtgctgctgctcgacgagccgaccaacaacctggacatcaactcgatccgttggctggaagacgtgctcaaccagtacaactcgacgatgatcatcatctcgcacgatcgccacttcctgaaccaggtctgcacgcacatggccgacatggacttcggcacgctgaaggtctatccgggcaactacgacgactacatgctggcgagcacgcaggcgcgcgagcgtcagcagaacgccaacgcgaaggcgaaggaacgcgtcgccgacttgcaggacttcgtgcgccgcttctcggcgaacaagtcgaaggcgcgtcaggccaccagccgtctgaagatgatcgacaagatcaagatcgaggaattcaagccgtcgtcgcggcagaacccgttcatccgcttcgagtacgaaaagaagctgcacaacatcgcggtggtggccgagaagatctcgaagaaatacgagcgcaccatcttcaacgacttcagcatcagcgtgcagccgggcgagcgtattgcgatcatcggcgagaacggcgcgggcaagaccacgctgttgcgctcgctgctcggcaagctggagctcgatcacggcacggtgaagtgggccgagaacgcgaacatcggttacatgccgcaggacacgtacgaagagtttccggacgacgtcacgctgatggagtggatcgacgtctatcgcaaggaaggcgacgacgagcagatggtgcgcggcacgctcggccggctgctgttcaatgccgacgacatccgcaagtcggtcaaggtgctctccggtggcgagaagggccgcatgatctggggcaagctgatgctgggccgccataacgtgctgctgatggacgagccgaccaaccacatggacatggaatcgatcgagtcgctgcagatcgcgctcgacaagttcgaaggcacgctgattttcgtctcgcacgaccgtgagttcgtgagcggcctcgcgaaccggatcatcgaagtgaagacggacggcacgttgaacgacttcggcggcaattacgaagacttcctgctgagccagggcgtgcag

SEQ ID NO: 13021 - DNA, 732 bp, Burkholderia fungorum
atggcttccgatacgcaacctgctgctcagcccgttcagcccgctgttcagccgcctgctcaggccgcgcgcccagcgtcgcgcgcgcagccgcccgcgtcatcggcggcggcgaggcggcccgcagccggcgcgcgctggatcgtgccggtcaagatcgcggtgtttatcgcggcgtggtatccgctcgcgcgcatcgtgctatttggcttgaccgaccggctcggcgcgaatcccatcgagttcattacgcgctcgacaggtctgtggacactcgtctttctctgcatcacgctggcggtgacaccgttgcgccggctcaccggcgtcgccgcgttcgtgcgctttcgccgcatgctcggtctctatgcgttcttttacgctacgctgcatttcaccacgtacctgtggttcgacaagtggttcgacgtcgccgagatcgtcaaggacatcggcaagcggccgttcatcacggtgggcttcgcggcgttcgtgttgctgatcgcattggccgcgacgtcgccgcgtgcgatggtgcgcaagctcgggcgccgctggcagatgctgcatcggtccatctatgcgatcggcgcgctcgcgatcctgcacttctggtggatgaaggcgggcaagcatgatctgatcttgccgaagatttacggcgcgatcatggtggcgttgcttggctggcgattggtcgtgtggttgcgtgaccggatgtcgaaggcgcat

SEQ ID NO: 13022 - DNA, 402 bp, Burkholderia fungorum
atggctaaggcttcgaacaactccgcggcgcaacgcgttcgcaagaaggtcaagaagaacgtcgccgagggcgtggttcacgttcacgcgtcgttcaataacaccatcatcacgatcactgatcgtcaaggcaatgcacttgcttgggcaacgtcgggtggtcagggcttcaagggttcgcgtaaatcgaccccgtttgcagctcaggtggcagccgaatcggcaggccgcgtggcgatggaatacggcgtgaagaacctcgaagtgcggatcaagggccccggtccaggccgtgagtcggcggtgcgcgcgttgcatggtcttggtatcaagatcaccgcgatctccgacgtgactccggttccgcacaacggctgccgtccgccgaagcgtcgtcgtatc

SEQ ID NO: 13023 - DNA, 621 bp, Burkholderia fungorum
gtggcacgttatatcggccctaaggccaagctgtcccgccgtgaaggcactgacctcttcctgaagagcgcccgtcgttcgctggctgacaagtgcaagcttgacagcaagcctggccagcatggccgcacctcgggtgcacgcacgtccgactacggcacgcagttgcgcgaaaagcaaaaagtgaagcgtatctacggtgttctcgagcgccaattccgtcgttacttcgctgaagccgaccgcctgaagggcaacacgggtgaaaacctgctgcaattgctcgaatcgcgtctggataacgtcgtgtatcgcatgggtttcggttcgacgcgcgctgaggcacgtcagctggtgagccacaaggcgatcatggtgaacggcgtcgtgtcgaacatcccgtcgatgcaagtgaaggccggtgacgtcgtcgcagtccgcgaacagaagaagaagcaagcgcgtattctcgaagcgctgtcgctggctgagcaaggtggtctgccgagctgggttgctgtcgattcgaagaagttcgaaggtacgttcaagcagaagccggaacgcagcgacatcgctggcgatatcaacgaaagcctgatcgtcgaattgtattcgcgg

SEQ ID NO: 13024 - DNA, 975 bp, Burkholderia fungorum
atgcaaaccagtttgttgaagcccaagatcatcgcagttgaatcgcttggtgagagccacgcgaaagtggtcatggaaccgtttgaacgcggttacggccacaccttgggtaacgcgctccggcgcgtactgctgtcgtcgatgatcggctacgcgccgaccgaagtgacgatcgcaggcgtcgtgcatgagtattcgacgctcgacggtgtgcaagaggatgtggtcaacctgttgttgaacctgaagggcgtggtgttcaagctgcataaccgtgacgaagtgacggttacgctgcgcaaggaaggcgaaggcgttgtcaccgctggcgacatcgaactcgcacacgattgcgaagtgatcaacccggatcacgtgatcgcgcatctgtcgaagggcggcaagctcgacgtgcagatcaaggtggagaagggccgcggctatgtgccgggcaatgtgcgtcgttatggcgaagagtcggccaagatcatcggccgtatcgtgctggatgcgtcgttctcgccggttcgccgcgtgagctacgccgttgaaagcgctcgcgtcgaacagcgtaccgacctcgacaagctcgtgatgaacatcgaaaccaacggtgtgatttcgccggaagaagcgatccgtcagtcggcgcgcattctggtcgatcaactgtcggtcttcgctgctctggaaggcaccgaagcaacggctgaagcgccgtcgcgtgcgccgcagatcgatccgatcctgctgcgtccggttgatgatctcgaactgacggttcgttccgcgaactgcctgaaggccgagaacatttactacatcggcgacctgatccagcgcacggaaaacgagctgctcaagacgccgaatctgggccgcaagtcactgaacgaaatcaaggaagtactggcgtcgcgtggtttgacgctcggcatgaaactcgagaactggccgccggctgggttggacaag

SEQ ID NO: 13025 - DNA, 390 bp, Burkholderia fungorum
atgcgtcaccgtcatggtttgcggaaactgaaccgcacgagcagccaccgtctggcaatgctccgtaatatgtccaactcgctgatcgagcacgaagtcatcaagaccacgctgccgaaagcaaaagaactccgtaaagttgtcgagccgctgatcacgctcggcaagaagccgtcgctggcaaatcgtcgtctggcgttcaaccgcctgcgcgatcgtgactcggtcacgaagctgttcgaagttctgggcccgcgttacgctacccgtccgggcggctacctgcgcgtcctgaagttcggcttccgcgtcggcgacaacgctccgatggcactggttgaactgctcgaccgtccggaagttgaagaagtcgaagtgcaagaagctgag

SEQ ID NO: 13026 - DNA, 996 bp, Burkholderia fungorum
atgagcttctatccgcactaccgtccgcgccgcatgcgccgcgacgacttctcgcgccgcctgatgcgggaaaacatcctcaccaccaacgatctgatttatcccgtctttatcgtcgaaggcaccaacgtgcgacaagccgttccgtcgatgccgggtgtcgaacgtgtgtcggtggatctgctgatgggcgtggccgagcagtgcgtcgaactgggcgtgcccgtgctgtcgctgttcccggccatcgagccttcactgaaaacgcccgacggccgcgaagcgaccaacccggccggcctgattccgcgcgcggttcgcgaactgaaaaagaacttccccgagttgggcgtgctcaccgatgtcgcgctggacccgtacacgagccacggccaggacggcgtgctcgacgaagccggttacgtcatcaacgacgagacagtcgagatcctggtcgaacaggctcgtgctcaggctgaagcgggcgtcgatatcgtcgcgccttcggacatgatggacggccgcatcggcgcaatccgcgagatgctcgagagcgaggatcatgtgcacacccgcatcatggcttatgccgccaaattcgcgtcggcgttttacggcccgttccgcgacgccgtaggctccgccacgaacctcggcaagagcaacaagatgacctaccagatggacccggccaattcgaatgaagcgctgcgcgaagtgcaggcggacatcaacgaaggcgcggacatggtgatggtcaagccgggcatgccgtatctggatatcgtgcgccgcgtgaaggatgagtttcagttcccgacgtacgtgtaccaggtgagcggcgagtacgccatgttgaaggcggccgcacagaacggctggctcgatcacgataaagcgatgatggagtcgctgctggcgttcaagcgggccggcgcggacggtgtgctgacctatttcgcattggatgccgcgcggattttgcgctcgcagaag

SEQ ID NO: 13027 - DNA, 1551 bp, Burkholderia fungorum
atgcggcgcttgtccgttcaccgccaggcccaggattccgtgaccaccacttcgacctcgcatgacgccgtacccgtgccgcgcggcacgctgatgatccagggcaccacctccgacgcgggcaagagtacgctggtcgccggcttgtgccggctcgcgcgccgcgccggcgtgcgggtcgcgccgttcaagccgcagaacatggcgctcaacagcgcggtgaccgtggacggcggcgagatcggccgcgcgcaggctttgcaggcggtggccgcgggcattgccgcgcacaccgatctgaaccccgtgctgctcaagccgaccagcgaccgcggcgcgcaggtgatcatccacggcaaggcgcgcatgaatctcgacgcgcgtgcgtaccacgactacaagcccgtcgccctcgaagccgtgctgcaatcgtatgcgcgtctgcaagcggcgtacgacacgattttcgtcgaaggcgcgggcagccccgccgaaatcaatctgcgcgaccgcgatatcgccaacatgggttttgctgaggccgtggattgcccggtcgtgctggtggccgacatcgaccgcggtggcgtgttcgcgcatctcacgggcacgctcgcgtgcctgtcgccgagcgagcaggcgcgggtgcgcggtttcatcatcaaccgctttcgcggcgacctcagtttgctgcagcccggtttggactggctcgaagcgaaaaccggcaagccggtgctcggcgtcgttccctatctgcacggcctgacgctcgacgccgaagacatgctgccgcccgaattgcgcgcggcgcacagcggcggggcggcgcgcatgctgcgggtggtcgtgccggtgctgccgcacatcagcaatcacacggacttcgacgcgttgcgcgcgcatccgcaggtggatttccactacgtgcgcagcggcacaccgccgccgccggccgatctgatcattctgccgggctcgaagaacgtgcccggcgacctggcgtttttgcgcgcacagggctgggatgcggtgctgcaaaagcatttgcgctatggcggccgggtgatcggcatttgcggcggcatgcagatgcttgggcgcgaagtggccgatccgcatggcgtggagggcgcgccgggtgcgtccgcgggactcggctggctcgattactcgacggtgctcacgcgcgacaagacgctgaagaacgtgaccggccacctcgcgttgcccggtgcgccggaagtggccggctacgagatccatatgggcgagacgcgcgggccggcgttggacacgcccgcgctgcaattgggcgacgcacaagatgcccgccccgacggcgcgatttccgccgatggccagattctcgccacctacgtgcacggcctgttcgacacgccggccgcctgtgcggcgttgctggcgtgggcgggcctgagcgatgcagaggcaatcgactacccggcgttgcgcgaggcgtcgctggaacgccttgcggacacgctcgccgagcacctcgatctggcgaaactctttgctgcgattggt

SEQ ID NO: 13028 - DNA, 4305 bp, Burkholderia fungorum
atgaccacggacgtttccgcccaacctcccgcacagccgcccggcgctcatccgccggggcagcagccgccacccgaagggcctccgcccaggcgtcggctcggccggttgctgctgaaaacgctcgcgtggacggtggccgtggtcgtgttgttgctcgcgttggcggcaggcttgctgtatggcgcgctgaccacggagcgcggcaccgcctacgcgtggcaggcggcggtgaagctgctgggcggcaagctgagcggcacgcttgaaagcggcgcgctcgccaacggcctgcaattgcggcaggtgcgctggcgcagcctcgacggtagcggcaccgatattcagatcgaccgcgtggcgggccgctgggcgctcgcgcgccaaccgtggcgcttcacggtcgactatctgcatgtcggcacagtggatgcgcgcatcggcgcttcgtcgtcgggcagcgggccgatgaagctgccgcaagatctgcgcttgcccatccagctcgacattcgcgacgttcaggtcgacaaactgttgctgcaccagggcgcgtcgacgaccgaattctcgcgcttcgtttttcatggacgcagcgacgggcggcatcacgaggccgccatcgagcggctcgacacgccgttcggcgcggtgacggcggccgccaggctcgacggcgtgcggccgtttccgctgagcggggacatcggctattcgggcaaggtcaacaacgaggcggtgcaggtgggtgggcatctgagcggctcgctggagaatctgatcgccgagctcgatgcgagcggcatgaagctcgcgggccacgccagggtcgaggccgagccgttcggcgacgtgcctctgcggcgcgccacgctgactttcgatcacatcaacccgcaggcattttcgccgggcgcgccgcaggccgatctcgccgtgcgggcggagttgcagccggtcgggcaaggtgtggcgggtgcggacgcggcgggagcgagcgccgcggatacggccagcgcagcacagcatgccattgccgcaagcggcggacacagcgctcagccccacgcgtcaggcaaaagcactgccggttttgcggtcgccggccacgtttcgatcgtcaacgccaggcccggcgcgatcgaccagaacctgctgccgctgatcgatgccaaagccgacgtgcggctcgacgccgaaacgcagcgcatctcgaacctgaacgtgcgcctcgtgaagagcgccacgctcaccggcggcggcgcgctgagcggcaagcatgggcagttcgatctgcaggtcgccgggctcgatctgaatgcgctgcaggcaacggtgcggcccacgcagctttccggtcccatcggtgttcgtctgaacgacgacgtgcagagcgtcacgctcgacctcgtcgacccgaaagcggcgctgcgcgcccagggcaagattaccttcgaccccgcgcggatgagtttcaacgacgtgcgcatcacgtcgggcaaaggccgcatcgatctgtccggcgcactcaagcacgacgcgaactccacctacaacctgaaagcgcaactgaccgatttcgatccgttgacgctcgcttcgcagatgccgtcgcgcacgccggtagccggcccggcaccggcggcgagcacggcgagaaagagcggaacggcacaggccgcggcgcaagccggcagtaccgccggcgcaaagagcgcggcgcccgccgacaaagccgccgccgccgtgaaaaacaccgcgaaggcagcggtcagagccgaagtggtccagcgcaaaacgccggcgccgaagcgcggcgcgccgcccgcccgcaagatcgaggcgcgcgtgaacggcacgctcaccgcggccggcatgctcggcccggttttcacgaccagggccgacttcaaactcggtccgagcgtgtacgacggcctgccgctgaccggtagcggcacggtccaactggcgggctcgcgaatcctgccgagccgtgcgaacctctcggtggcgggcaatcaggtggatctgcaaggcagcttcggcgcgcgcggcgaccggctgaagtttcgcgtcgacgcgccggaactggaacgcctcggcttcggtctggcgggactcgtcgctgccgacggcgatatcaccggctcgttcgcgcatccgaatgtggtgctgaactacaaggcggacagcgtggtgttcagcagcaaccgcatcggccatgcggaaggccacgcggaactgcgcgacggcgcgaacggcgcgctcgtcttcaccaccgacgcacgcaatgtcagcacgggcggcgtcgatctgagcacgctcacggcgcggttgtccggcacgcgcgccaatcacacgctggaggcggcggccaccggcaagctgcaggaccgtccgctcgatctcacgctcgccgccaacggcaagctgaccgaagcgcgcgaaggcacgcgctgggacggcacggtcacgcgcttgcagaatcgcggcacgccgtcgttcaatctggagtcgccgctcgccgtcagcgccgggccgcagcgcctgacgctcggcgcgacgaagctcacgctcgaaggcgcggtgctgagcctgaaaacgttcgccttcgaccacggcaagattcagtcggcgggcagcctgactgacatttcggccgtgcgtcttcaggatctgcggcgccagatcaccggcgagccgccgatcgtcaaaaccgacctggtgttcgacggcgactgggacttcacgctcggcagcacggcgagcggccacatccagctgaagcgccgtagcggcgacgtcacggtcgagatcggccggggcctcgcttccctgggcatttcggatatcacggcgcgcgccgagttcagcggcggcaaccgcctcaacgccacggtgcacgcgcaggcaagccgtatcggcgtgatcgacgccgacgcgcacaccacgctggtcatgcgcgacggcttcctgaccgtgagcgaagagggcgcgctcaccggcaatgtgaacgccaatgtgccgtcgctgaaaacgaccggcggcctgttcggtccgagctatctgctcgacggccacctcgcgctcaagctcgcgctcggcggcaccgtcgccaaaccgaatctgaccggctcgctgctcggcgacggaatttccgcgacgatggtcgaccagggcgtgcaattgaaggacggcgtggtgcgcatcgcgctctcgcagaatctggtggacttccagcaggtcgaattccacggcgcgagcggcacgctgcgcgccaccgggcgcgtgcgtctggacggcgcgcagccggacctgaccgcgagcatcgtcgcggacaagctcgaattgttcgcggcgccggatcgcaatctgtcgctgtcgggcagcgcgaccgtggcgaacggcgggacgctgggcggcatggagatcaacggtaaattcgtggtcgatcacgcgttgttcgacatgccggagcagtccgcgccgaagctcggcgacgacgtggtggtggtgcgccccgacggttcggtggcgggcgagcggccgcggcccgtggcgggcaccaaccggccgatcggcccgttcgcgccgcgcgccaatatcgacatcaacctgggcaacagcttccgcttccgcgggcagggcgccgacctgggactgagcggcacgatcaccgccatgagcgcgccgaatctgccgctgcgcgcagtggggaacgtgcttgtcacgccgggttcgacctataccgcgttcggccgcaagctcaatatcgagaacggcttcttcacgttcaacggtccggtggccaatcccggcatcaacatcctggccatgcgccgcaaccagcaggtcgaggcgggcgtgcaggtcacgggcacggttcaattcccgaccgcgaagctggtgtccgaaccgaacgtgccggataacgaaaagctctcgtggctgctgttcggtcatggcacggatcagggcaacaacctcggtcagcagagcaccatgacgacggcgctcgcgttgctcggcagcgcgagcggcaagcggatcgcgcagactttcgggctcgacgagttttcgatcggacgaagcgaagtcgggctgaccgatccgcaggtggtgatggtgtcgaaggcgatcaacgagtggctcgtgatcggctacgaacaggggctgcagtcggcgagcaatgcgatcaaggcgacagtcaacctgacgcggtactggtcggttgcggcttatggcggcacgttcgacggcctcgatctgctgtacacgcggcgcttcgaccggatccgctgg

SEQ ID NO: 13029 - DNA, 1377 bp, Burkholderia fungorum
atgctcggaatacaggggttattggcgcgactcgtcgacgtgattctcatcgtggccggcgcacttctggcgtcgcacatccgctttgaggatctcacccagactcgggtggatggcgcgttcattacgttttcagtcgcacttgctctggtgtcgttcccggtgttcggcctctatgaatcgtggcgcggccgctcgctgttgcgactgagcggacaggtttcgctggcctggctgctggttcaggcgggcggactcgtgctgatgttctccgtacaccgcacggatatgatctcgcggctctggtttatctattggaccgcgacgagcgcagccggcttgatcggctcgcgtctggtgctgcattcggtgctgcgtagcgtgcgccacgccggtatgaatttgcgcaacgtcgccgtggtgggcggcggggttcattgcagggaagtcgtgagcaaggtgcaggcgtctccggcgagcggatttcgcatgtccgctctattcgaggttggcgcgggcgaagttttcgcacccaaaggcattcctgtattcgagaacttcggcaagttctccgaatacgttagaaatagcgcgattagagaaatctggctggcattgccgttgtcggaagcgccaaccatgctccgtttcgtgaatgaattccgcgaggacctcgtgaacattcgcttcattccggatgtgcgcagcatggcgttgttcgatgcgggtgtggtggatctgatcggtgcgccggcaatcagtctggtggcatcgccgttgcccgcacgggcaatggtgcagaaagagatcttcgatcgtctgttcgcggcgctggcgctgctcgcgttgacaccattgctgctgatcatcgcgatcgcggtgaagtgttcgtcgcgcggtccggtcttctttacgcaatttcggaagggtgccgacggtcaggtgttccgtatctataagttccggtccatgcgcgctcatgccgagaaagcaggcgtcgtcactcaggccaccaaaggcgacccgcgcatcacgcgagtaggtgcgcttctacgccgcacgagtctcgatgaactgccgcagttctttaatgtactgcgcggcgaaatgtcggtggtcgggccacggccgcatgcgatcgagcatgacgagatgtatcagaaggttgtggacggctacatccatcgctatcggataaaacccggtattaccggttgggcgcaggtaaacggattcaggggagagaccgatcgactcgagaaaatgcagaagcgggtcgagcatgatctctactacctgcagaactggtcgttcggtctggacatgcgaatcgtgattgcgacgatggtcaaagggttggcgagcagcaacgcctat

SEQ ID NO: 13030 - DNA, 879 bp, Burkholderia fungorum
atgctaaaagttacaaaggcagtctttccggtagcaggccttggcacgcgatttctccctgccacgaaggcgagcccaaaggagatgctgccgatcgtggataagccgctcatccaatatgcggtcgaagaggctatggccgccggcatcactgaaatgattttcgtgacgggccgcagcaagcgcgcgatcgaagaccatttcgacaagtcgtatgaggtcgaggcggaactggaagcgcgcggcaaggacaagctgctgcaattggtacgcagcatcaagccgagccatgtcgactgtttttacgtgcgccaaccggaggcgctcggcctcgggcacgcggtgctatgcgcggagaagctggtaggcgacagtccgttcgccgtgattctcgcggacgacctgctatacggcagccctcctgtcatgacgcaaatgatcgaggtgttcgatcactaccatagctcggtgatcggcgttgaggaaattccggcgcaggataccaaatcgtacggcatcgtcgacggcaaggaatgggagcagtccatcatcaagatgtcgggcatcgtggaaaagcccgagccgagcgcggctccttcaaacctcggtgttgtgggtcgatatgtgctgaagccgcgcattttcaaacatctgcgcaccatcaagcccggtgccggtggcgaactccagttgacggatgcgatcgagtcgctgcttgccgatgagcaggtactggcctacaagtaccgcggcacgcgctttgattgcggcagcaaaatcggctacctgaaggccacggtggaattcgcggtgcggcatcccgaggtaggcgtcgagtttcgtgagtaccttgaggagtatctgtctctgctgccgatg

SEQ ID NO: 13031 - DNA, 774 bp, Burkholderia fungorum
atgagcgcatctgaacgcaacggcgacgcccgcaaatcccgcattgtccttgcggatcatcagccgcaaatcgagcggctgcaacggcgcctgttcctgcgctcgtcgctctccattggcgcactggccatgctatccggctgcaacatgcaggacggtgattcggtcgacaaggtgctgtgggccatgtcgcgctggaacgaccgcgtgcagggctggctattcgatcgcaacaagctcgcgccgacctattcggcgcgcgaaatcaccgacccgttcccgttcaacgcgttttatccggagttcgatgcgccggatatcgacggctcgacgtatcaactggaagtctcgggactcgtgtccgacaagcgcagctggaacctcgaccagttgcgcgcattgccgcaggtttcgcagatcacgcgccacatctgcattgaaggatggagcgcgataggacaatggcgcggcgtaccgtttcgcacgtttctggaacgcgtcggcgccgatctgagcgcacgctatgtcggcttcaaatgcgcggaccgctattactccagtctcgacatggcaacggccctgcatccgcagacgcaactcacgctcgatttccgcaatgagccgctgccggccaaatacggctatccgctgaaattgcgcgtgccgaccaagctcggcttcaagaatcccaagcacatcgcggcgatcttcgtgacgaacacgaatcccggcggctattgggaagatcagggctataactggttcagcgggctg

SEQ ID NO: 13032 - DNA, 834 bp, Burkholderia fungorum
atgagcgccgcgctgccgcgctcctacctgttcgtgccgggcaatcgtccagagcgcttcgaaaaagcgcacgcgtcgggcgctgacgcggtgattctcgatctcgaagacgccgtgccgcccgacgaaaaaccggcggcgcgcgcggtggtgctggccgctgtatcgggcgatgcaacggggcctgcagcgcggcctgaagcgcggcccgcgtgggtgcgcatcaacggcgcggacacctcgtggttcaacgaggacatcgccgcactggccggccaggccggcgtcgccggcatcgtgctgcccaaagcggagacgcgcgagcagatcgaagccgtgctggcgctcgcacattccgcgtcgagcgtgttgccgatcgtcgaaaccgcgcgcggatttgcgaatctcgcggtgttgtgcgccgcgccgcgcgtgcaacgcatcgtgttcgggacactggattttcagatcgatctcggtatcgatggcgacggcgaggaactgcatctgttccgctcgcagatcgtgctggcgtcgcggcttgccgggatcggcgcgccggtggacggcgtgtcgaccaccatcaccgataccgatggcatcgaggccgaggcgcgccgcggccggcgcttcggcttcggcgccaagctgtgcattcatccacggcagatcgatgcggtgcatcgcgcttacgcatggagcgaagcggacaaggcgtgggcgcaacgcgtgctggccgcggtggaaacgagccagggcgcagccgtggcggtggacggcaagatggtcgatatgccggtgattctgaaggcgcgacggatcgcggcgggcgcg

SEQ ID NO: 13033 - DNA, 1035 bp, Burkholderia fungorum
gtgtatcaggaacagcatctgccgcctgtcgatccgcaggccgaactctggttccagcaagcactcgcatcggaacttgatcccaacatctattgggaggacaaggactggagaaagatctaccagctttaccagcaggctgcggaacgtaaccactggaaagcgatgctcaacctcgcagcattgatattgagcggctacccggttccggtgagggaccccgagatggcgatccgctgggtggagaaagcgatgcagcttgaggtgcccgatgcatgggacacgatgggtgtctatcacatgaagggcatcgtcaagggtggagacgcaacgagcgcgtacgcgtttttccagaaagcggcggacatgggcagcccgtccgcccagacgtttctgggcgcagcgcttaacgccggctgggacaatccgggtagcggcttctgggctaacatttctgtcgcgacgaagatgcttgaatgttcgttagcacaaggctacggcgatgctgcagatgagttggagttcatttatgccgctcctcgaacgccggaagccaggcttcgtgcggtgacagttttgcaggaaggggcaaagctaggtagcgccaagtgcgcaagtcttcttggtagtcagtttcgcggcatgggccttagcgacggcaagagtctcgtcggttatgtcgataaagcgcgggctgagcgctacagcaaaatcagcgacatcctcgagtggtacgaaggcaccctgaagctccccaatttggacaaagtgttgcctcttcctccggccgccttaccgaaatgggacggcgacgtgcaaacactgatcgacgccgccaaggcccgttactccgccaccaacatctccagcgcacccttcacagtccgaacctcacgcggctctgacgaaagccgggttgctgagacaactcgcggaccgacccgaaccattgcgctgcaatggtgggctcaaatgtccgcagtccggcatatgggaggctcgcgtggccgcagcgcatccgcttgccgcacttta

SEQ ID NO: 13034 - DNA, 1062 bp, Burkholderia fungorum
gtgtatcaggaacagcatctgccgcctgtcgatccgcaggccgaattatggtttcagcaggcactcgcgtcggaacttgatcccaacatctattggaaggacaaggactggagaaagatctaccaactttaccagcaggctgcggaacgcaaccactggaaagcgatgctcaatcttgccagtctgatcctgagtgactacccgattcccgtcagagatccggacatggcaatttcctgggtagagaaagcgatgcagcttggggtgcccgatgcatgggacacgatgggtgtctatcacatgaatggcatcgtcaagggtggagacgccacgagcgcgtatgcattcttccagaaagccgccgacatgggcagcccgttagcccaggcgttcctgggggcagcgctggatgccggctgggacaatccgggcaacggattctgggctaatctccctgttggggtgaagatgctggaatgtgccgtggcccaaggttacggcgacgcggcggatgagcttggacttgtatatgctcgcccccacacaccggaagcaaatcttcgcgcgttaaaagttttacatgagggcgtaaagcttggtagcgcaaagtgtgcgaagtccctcggcgttgagtttagtggtttctctttgtcttctggcgacaatattgcaggctacgtcgacatggaaaggtccaaacgctacaggaagatcggtgacgtcttgaagtggtacgaaggcaccctgaagctccccaacctggacaaggtgttgcctcttcctccggcagccttaccgaaatgggacggcgatgcgcaaacactgatcgacgccgccaaggccgttactccgccaccaacatctccagcgcacccttcacagtccgaacctcacgcggctctaacgaaaaccggactaccgccacaacccgcggcccgcccccaaccaatgcgctgcgacagcgggcgcaaatgcccagagtccggcatacgggaggcgcgtgtggccaccaggcatccgcatgccccacttcacaaccgcttggaccggcacgcattcgct

SEQ ID NO: 13035 - DNA, 1176 bp, Burkholderia fungorum
atgagaccactcgacggtatcaaggtcgtcacgctcgaacacgcgatcgccgcgccgttctgcacgcgtcaactcgcggatctcggcgcgcgggtaatcaagatcgaacgccctggcgtcggcgacttcgcgcgcggctacgacgagcgcgtgcatggactgtcgtcgcatttcgtctggaccaaccgttcgaaggaaagcctctcgctcgatctgaagcagcctgccgcggcggagattctcgacgccctggtcgtcgacgcggacgtgctggtgcagaacctcgcccccggcgccgcggatcggcttggtctcggttacgacgccttgagcaagaagtatccgaagctgatcgtttgcgatatttccggctatggtgccgacggcccgtaccgcgacaagaaagcctacgacctgctgattcagagcgaatccggttttctgtcgatcaccggttcgccgggacagccggccaaggccggatgttcgattgcggatattgcggccggcatgtacgcgtattccaacattctgagcgcgctgctgttgcgcgggcgcacggggcatggttgccgcatcgacgtgtcgatgctggaaagcatggtggagtggatgggttatccgctctattacgcgatcgacggccaggcgccgcccgcgctctccggcgcggcgcacgccacgatctatccgtacggaccgttccccgccggcgacggcaagacggtgatgctcggtttgcaaaacgaacgcgaatggaagctcttttgcgagcgcgtgctggagcagccggaactcgccacggacgagcgcttcgcgtcgaattcgaaacgcacgttggcgcgtgaagcattgcgcgaggtgatcgtcgcggctttcgcgaagctgagcgcggcgcaggtgatcgaacggctcgatgacgccggcattgccaacgcgcagatgaatacgctcgccgacgtgtgggcgcatccgcaattgaaggcgcgcgagcgctggcatgaagtgggtacggcagcgggcgtggtgcaggcattgctgccgccaggcatgccggcggatttcgagccgcgcatggatcccgtccccgcgctcggcgagcacaccgacgcgatcctgcgcgagctcggctacgacagcgcgcgtatcgacgcgctgcgtgctgccggcgcgatc

SEQ ID NO: 13036 - DNA, 561 bp, Burkholderia fungorum
atggctgcaactcaactggacctcaaaactgcgctgatcgtcatcgacctgcagaagatcgttgcatcgattcccactgcccatcccttcacgaacgtactggaaaacgccagtaatctggcggcaactttccgccagcacggtcttcccgtcgtgctggtaaacgtcgtcggaatggcgccgggccggactgagcagcatcacgcgggcggcgcgctcccgccggactggtccgagctgctgccggagctggataggcaaccgcaggatcatctcgtatccaagagaacctggggggcgttcaccagcaccggccttgagacgcacctcaaatccgccggggtcacccaggtagtggtctgcggcgttgcgacaagcgtgggtgtggagtcaaccgcgcggcaagcacatgaactcggcttcaacgtcactctcgcagtggacgccgtgacggatattagtgcggaagcgcacgccaatagccttgagtggatttttccgcaactcggcgagacgggcacatgcagggagattgccaatctcctttcgaaaaggagtacc

SEQ ID NO: 13037 - DNA, 1581 bp, Burkholderia fungorum
atgcacgacaagattctgatcctcgacttcggttcgcaagtcacccaactgattgcacgtcgcgttcgcgaagccaacgtgtattcggaaattcatccgtacgacgtcgatgcgtcgttcattcgcgacttcgcgccgaagggcgtgatcctttccggcggcccgagctcggtcactgaaacggacacgccgcgcgtgccgcaggccgtgttcgaactcggcgtgccggtgctcggcatctgctacggcatgcaggcgatggccgagcagctgggcggcaaggtcgatatcggccacctgcgcgagttcggttatgccgaggtgcgcgcgcgcaaccacacgagcctgctcgaaggcatcagcgacttcaccacgccggaaggccacggcatgttgaaggtgtggatgagccacggcgacaaggtgctggaaatgccgccgggcttcgcgctgatggcgtcgacggaatcgtgcccgatcgccgcgatggccgacgaaacgcgccatttctacggcctgcaatggcacccggaagtcacgcacaccgtgcagggccgcgccatgctcgaacgcttcgtgctgaagatctgcggcgcgcagccggattgggaaatgggccactatatcgacgaagccgtcgcgaagatccgcgagcaggtcggtcaggaacatgtgatcctgggactctcgggcggcgtggattcgtcggtggcggcggcgctgctgcatcgcgcgattggcgatcagctgacctgcgtgttcgtcgatcatggcctgttgcgcctgaacgaagccgagcaggtaatggcgaccttcgcggatcacctgggcgtgaaggtgattcacgtcgacgcgagcgaggtgttcctgcgcaagctggccggtgtgaccgatccggaagcgaagcgcaagatcatcggcgcggaattcgtcgaggtgttccagaccgaagccggcaagctgaccgatgcgaagtggctggcgcaaggcacgatctatccggacgtgatcgaatcggccggcaagggcaagaaagccacgcagacgatcaagagccatcacaacgtgggcggcctgccagagacgctgaacctgaagctgctcgagccgctgcgcgaactgttcaaggacgaagtgcgcgaactcggcgtcaagctcggtttgccgccggccatggtgtaccgccatccgttcccgggcccgggtctgggcgtgcggattctcggcgaagtgaagcgcgatttcgcggacctgctgcgccgcgcggacgcgattttcatcgagacgttgcggactttcatcgacaaggaaaccggcaagtcctggtacgatctgacgagccaggcgttcgcggtgtttctgccggtgaagagcgtgggcgtgatgggtgacgggcggacttatgagtatgttgtcgcgctgcgcgccgtgcagacgctggacttcatgaccgcgcattgggcgcatctgccgcatgagttgctggggcatgtgtcgaaccggattattaatgaagtgcgcgggattaaccgggtggtgtatgacatttcggggaagccgccggcgacaatcgagtgggaa

SEQ ID NO: 13038 - DNA, 651 bp, Burkholderia fungorum
atggcgaataccacgctcaccatcagcagcaagaattattcgtcgtggtcattgcgcggctggctgctgaccaaattcagcggcttgcctttcgaagagatcgtcatgccgatcgacgatccggcggcgcgcgctgaactgttgctgttgtcgccgtcgatactggtgccgtgtctgtttcacgacggcatcaagatctgggacacgctggcgatcgcggaatatctgaacgaactgaagccggacgcgaagctgctgcccagagatattcgcgcacgcgcgcattgccgctcgatttgcggcgagatgcattccggtttcggttcgctgcgctcggccttgccgatgaacctcaaggcgcattttccaggcttcaaggtgtgggcgcgtgctcaatcggatatcgaccggatcgtcgcgatctggagcgattgcctgaagcagtacggcggcccgtttctgtttggcgagcggaccacggcagacgcgatgtacgcgccggtagtgacgcgtttcgtcacttacgacgtcaagctcgatccggaaattgtcgaatacggacagcggatcatggcgctgcccgagatgcgggagtggatcgcagacgcgcaacaggaagcggaagagatcgacgaactggacgtcgagttc

SEQ ID NO: 13039 - DNA, 2361 bp, Burkholderia fungorum
atgaccgaacttgccaccgccccgcgccccgcgaacaccgccgatgccgcggacatttccgcccacaccgccgaactcgacatcggcggcatgacttgcgcctcgtgtgcgatgcgcgtcgaaaaggcgctcgccaaagtgccgggtgtcgtgagtgcttcggtgaatctcgcgaccgaaacggcgaccgtcgacctgaacggcgcggccgccggcccggatgcgctgatcgccgccgtcaggaaagcgggctatgaagcggccctggtcgcaccaccggacacgcccgcctctgccaacgagtcggcccccgccgaccgcaagcgcgaccagacccgccgcgaactggcggccgtgctcgcctccgccgtgctgacgctgccgctcatcggcccaatggtcggcgaatggttcggtttccacgcgatgctgtcgccgtggctgcaattcgcgctcgcttcggtcgtgcagttcgtattcggcgcgcgcttctatcgcgcggcctttcgtgccgtgcgggcgggcgccggcaacatggacttgctggtggcgctcggcacgtcggcggcgtatggcatcagcgtctatgaactggcgacccatcccggcgacatgatgcatctgtacttcgaagcgtcggcggtcgtgattacgctggtgcgcttcggcaagtggctcgaagcgcgcgccaagcgccagaccacggacgccatccgcgccctcaacgcgctgcgccccgaccgtgcgcgcattcgtgtcggcgccggcgagcgggacgtgccgctcgcgcaagtacgggtcggcacgatcgtgatcgtgcgccccggcgaacgcgtgccggtcgacggtacggtgctcgaagggcgcacgcatatcgacgaatccctgatcaccggcgaaagtctgccggtgccgaagcaggtagccgacgcagtcaccgccggctcgatcaacggcgaaggcgcgattgccgtgacgaccacggcgatcggcgcggagacgacacttgcgcgcatcatccgcctcgtggaaagcgcgcaggccgagaaggcgccgatccagcgcctggtggaccgggtcagcgaaatcttcgtgccggcgatcctcgccattgccgcgctcacgctggccggctggctgatcgccggcgcggccggtgaaacggcgattctcaacgcggtcgccgtgctggtgatcgcctgcccatgcgcgctcggactggccacgccggcggccatcatggccggcaccggtgtcgccgcgcggcgcggcgtgctgatcaaggacgccgaggcattggaaaccgcgcatcgggtaacgattgtcgcgttcgacaagaccggcacgctgacgctcggccagccgtcggtgacggcgttcgagccgatcggcggcatcagccgcgacgaagcgctagcacttgccgcggcggtgcagcgcaacagcgatcatccgctggcacgcgcagtggtcaaggcgtatgaagcggaagcggcagcgacagcggcggcggccgaggctgccgacatgcctgcggcaatcggtgaagccgtggcctcgcccactcgaacgcgcgcgctgcacgccagcgccgcgcgcgccgtggcgggccggggcgtcgaagcggacgtcgacggccgcaccctcgcgttgggcagcggacgctggctcggcgaactcgggattgaattgccgcccgaattcgccgcgcgcgcccgcgagctcgaagccgccggcaacacggtttcctggctcatgcagcgcgctccgctagcgccggtcgcactggcattgatcgctttcggcgataccgtcaaacccacggcgcgcgcggccgtcgaacggctggcgcagatgggcattacgagcgtgctggtcaccggcgacaaccggggcagcgcggcgagcgtcgcccgggcgctcggcatcgacgaattccatgcggacgtgctgcccgaagacaaagcccgtgtcatccgtgacctgaaaattcgcagcgccggcatcgtggcgatggcgggcgacggcatcaacgacgctcccgccctcgctgccgccgacatcggcatcgcgatggcgaccggcaccgacgtcgccatgcacgcggccggcatcacgctgatgcgcggcgatccggcgctggtggccgacgccatcgacatctcgcgcagaacgtggcgcaagatccggcagaacctgttctgggccttcgtctacaacctgatcggcattccgctggccgccttcggcttgctgaacccgatgctcgccggcgcggcgatggccttttcgagcgtcagcgtggtgaccaacgcgctgctgctgcgcacctggcgcggtgcgcagaatggttcggggcgc

SEQ ID NO: 13040 - DNA, 2088 bp, Burkholderia fungorum
atgtccgcaggcctgaaccccgctcaaaatgaagcggtccgttatctcgacggtccgtgtctcgtgctcgccggcgcaggcagcggcaagacgcgcgtgatcacgcagaaaatcgcgcacctgatcgaggccaagggcttcgagccgcgccacatcgccgccgtcacgttcacgaacaaggccgcgctggaaatgcgcgagcgcgtgggcaagctgctggaaggcaagacgctcaccacgccaggcaaggaaggccgcaaagtgcccgtcaaccagttgacggtgtgcaccttccactcgctcggcgtgcagattctgcggcaggaggcggaacacgtcggcctgaagccgcagttctcgatcatggattcggacgactgcttcggcatgatccaggagcaggtcggctcgacggacaagggtttcatccgcaagatccagtcgatcatctcgctgtggaagaatggcatgatcatgcccgagcaggcgattgcgattgcggcgaacgaggacgagcatcaggccgcgatcgtctaccgcaattacgtggccacgctgcacgcgtaccaggcggtggatttcgacgatctgatccgcctgcccgccgagctcttcgcgaagaacgagcaggtgcgcgaccgctggcagaacaagctgcgctatctgctgatcgacgagtatcaggacaccaacgcctgccagtacgaactggtgaaactgctggccggcaagcgcgctgcgttcacggcggtgggcgacgacgatcaggccatttacggctggcgcggcgcgacgctcgaaaatctcgggcagctcagcaaggactttccgaagctgcatctgatcaagctggagcagaactaccgctcgacggtgcgcattctgaccgccgcgaacaatgtgatcgcgaacaatccgaagctgttcgaaaagaagctgtggtccgaacacggcatgggcgacacgatcaccgtcacgccctgcaacgacgaagaacacgaggcggagtccgtggtgtttcgtctgtcggcgcacaagttcgagcggcgcgcgaatttccgcgactacgcgatcctctatcgcggcaatttccaggcgcgcatcttcgaacaggtgctgcggcgtgagcggattccgtatgtgctgtccggcggccagtcgttcttcgacaaggccgaaatcaaggacatctgcgcctatctgcgcctgatcgccaacgcgaacgacgaccccgcgttcatccgcgcgatcaccacgccgcgccgcggcgtcggcaatacgacgctcgaggcgctcggctcgttcgcgggtcaggccaaggtgtcgctgttcgaagccgtgtatatgggcggcatcgaggcgcgcctgtcgccgcggcagatcgaacccatgcgcgtgttctgcgacttcatgcagcgcctcaccgatcgcgccgagaaagacgccgccggcacgctgctcgacgaactgatggacgccatccactacgaagcctacctgtacgacgcgttcgacgaacgtcaggcgcagtccaagtggcagaacgtgctggagttcatggagtggttgaaacgcaaaggcaccaaggctgagccgacgggcgccgcggcgaacgaagccaccggctacgacaccgccgatggtctcggcgacaccggcaaaagtctgctgggtctgatccagaccgtcgcgctgatgtcgatgctcgaaggccgcgaggaagatcccgacgcggtgcggctctcgacggtgcacgcgtcgaaggggctcgagtatccgcacgtgtttctggtcggagtggaagaaggcatcatgccgcatcgcggcggtcccgacgacgagccgatcgacgacgcgcgcatcgaagaagagcgccggctcatgtatgtggcgatcacgcgtgcccagcgcagtttgcatctgaactggtgcaagaagcgcaaacgcgcgcgcgaaacggtggtgtgcgagccgtcgcgcttcattcccgaaatgctgctcgacgacgctccgccgccgacgcctgaagaagcgccgatgtcgccgaaagaccggctcgcgagtttgaaggcgctgttgcagaagcct

SEQ ID NO: 13041 - DNA, 1116 bp, Burkholderia fungorum
atgaccgaactcaaacacaccccgctcaacgccacccaccgtgcgctcaatgcccgcatggtcgatttcggcggctgggacatgcccgtcaactacggctcgcagatcgacgaacatcgcgccgtgcgcaccgacgccggcatgttcgacgtctcgcacatgtgcgtggtcgatttcaccggcgagcgcgtacgcgccttcttcgaatatgcgctggccaataacgtcgccaagctgcaaacgcccggccgcgcgctgtactcctgcctgctgaacccgaacggcggcgtgatcgacgacctgatcgtttattacttcggcgaagatcacttccgcgtggtcgtcaacgccggcaccgccgacaaggacatcgcctggttcggccagctcaacgccgaaggcggcttcggcctgaccatcacgccgcgccgagactacgcgatcgtcgccgtgcaaggcccgaacgctcgcgaaaaagtctggcaaaccgtgccggctacgcgcgccgccaccgaggcgttgaagccgttcaacgccgcccgtatcgcagacacgccgttcggcgaattgaccgttgcccgcaccggctacaccggcgaagacggcttcgaaatcatcgtgccggcggatcacgtggaagcgctgtggaacgcgctgcgcgcgcaaggtgtgcgcccggccggcctcggcgcgcgcgacacgttgcgcctcgaagccggcatgaacctgtacggccaggacatggacgacaatgtctcgccgctcgacgccggcctcgcctggacagtcgacctcacctcgccgcgcgacttcgtcggcaagagcaagctggaggcgggcggttcccaagccgcgttcgtcggcctgatcctgctgaaggaaaacggcaaggcggcaggcgtgctgcgtgctcatcagaaagtcgtcacaccgcaaggcgaaggcgaaatcaccagcggcactttttccccgaccatgcaggaatcgatcgcctttgcgcgcgtgccgaaaggcgtgcagccgggcgacaccgttcacgttcagattcgtgacaaaaacgttcccgcaagcgtggtaaaactgccgttcgtgcgcaatggcaaagtgctcgcggtt

SEQ ID NO: 13042 - DNA, 1386 bp, Burkholderia fungorum
atggcagtcagcgtgttcgacctcttcaaaatcggcattggtccgtccagttcgcatacggtcgggccgatgcgcgcggcgctgatgttcgctcaagggctcgaacgcgatgggctgctcactgcgaccgcatcggtgaaggtggagctgtatggctcgctcggcgcgacgggcaaggggcacggtaccgatcgcggtgtgatgcttggcctgatgggcgacgcacccgacaccgtgaatccggacacgatcgccgagcggctggaaggcgtgcgcgtgtcccgcaagctggcgctgctcggcgcgcatgacgtgccattcgtgcagaaagatcagattgcgttctatcgtcaggcgctgcccgagcatccgaacggtctcaagctgcgcgcttacgacgcgcagggtgagacattgcgcgagtcgacctatctgtcggtgggcggcggtttcgtggtgacggcgggcgcgccgaacacgaaggtgctgagcgccgtcgatcaattgccgcactcgtttcgcagcggcaacgagttgcttgcgctgtgcgaatcgaccgacaagagcatcgcccagttgatgtgggaaaacgagcgcgtctggcacacggaagaagaaacgcgctccggcctgctgaaaatctgggacgtgatgcaatcgtgtgtcgcacgcggttgcggcatcaacaatccggacgccgacggcaacctgcccggcccgttccaggtgaagcgccgtgcgccgcagttgtatcgcgcgctgtcgggcaatcctgaactggcgctgcgcgatccgctttcaatggtcgactggatcaatctctacgcgatcgccgtcaacgaagaaaacgccgccggcggccgcgtggtcacggcgccgaccaacggcgcggccggcatcatcccggcagtgctgcattactacacgcgcttcatgccgggctcgaatcagcagggcgtgatcgacttcctgatgaccgctgcggccatcggcattctgtacaagctgaacgcgtcgatctccggtgccgaagtgggctgccagggtgaagtgggcgttgcctgttcgatggcggcgggcgcgctcgccgctgtcatgggcggcacgccgcggcaggtcgagaacgctgcggaaatcggcatggaacacaacctcggtctgacgtgcgacccggtcggcggcatggtgcagattccgtgcatcgagcgcaatgcgatggcgtcggtgaaggcggtcaatgcggcgcgcatggccttgcgcggcgatggcagccactacgtgtcgctcgattcggtgatcaagaccatgcgcgaaaccggcgcggatatgaagaccaagtacaaggaaacgtcgcgcggcgggttggcggtgaatatcgtggagtgt

SEQ ID NO: 13043 - DNA, 969 bp, Burkholderia fungorum
atgaaacaatacctcgacctcgtccgcacgattctcgacaccggcacgtggcaggagaaccgcaccggcatccgcaccatcagcatgccgggcgccatgttgcgcttcgaccttcagcaaggctttcccgcggtcaccacgaaaaagctggcgttcagatcggcggtgggcgaactgatcgggtttctgcgcgcctcgcgcagcgccgcggatttccgcgacctcggctgcaaggtgtgggacgccaacgccaaccagaatccgcagtggctcgccaatccctatcgcgaggggccggacgatctcggcgacgtctacggcgtgcaatggcgccagtggcccgcctacaaggtgttgaacgcagacgcgagcgcgcagcttggcgacgcgactgcacgcggcttccgggtggtgacgggattcgaagaagacggcagccgcaaagtgctgctgtacaaggcgatcgaccagttgcgccagtgtctggacaccatcatgcagaacccggcggaccgccgcattctgtttcacgcgtggaaccccgccgtgctggatcagatcgcgctgcccgcttgccacctgctttatcagttcgtgccgaacgcggtgcgcaaggaaatttcgctgtgcctgtacatccgcagcaacgacgtcgggctcggcacgccgttcaatctgaccgagggcgcggcgttgctgcacctggtcggtcgtctgacgggttatacgccgcgctggttcacgtatttcatcggcgacgcgcacatctacgagaaccagctcgacatgctgcagcagcaactcaagcgcgagccctatgaaagtccggctttcgcgatttccgaccgcgtgccggagtatgcgaaaaccggcgtgtacgagccggaatggctcgaaaagatcgagccggcggatttctcgctggtcggctaccggcatcacgagccgctcacggcgccgatggccgtt

SEQ ID NO: 13044 - DNA, 711 bp, Burkholderia fungorum
atgaccgccaccctcgcagacgagcagaaccatttccccggcctgagccgcatcggcgcgctgctcgccgatcccggccgcaccgcgatgctatgggcgctgatggacggcagcgcccgcccggccggcgagctgacgatgatcgccgggctttcgccgtcggcggccagcgcccatctcgcgcgcctgaccgacggcggcctgctcgcgctcgaagtgcgcggccggcatcgctatttccggattgcgtcgcccgacatcgccgcctcgatcgaagcgctcgccaacgtcgcgcaggtcagcgcgccgcagcgttccgttccgcgccccgtgcgcaccgtgccgctggacatgcgctacgcgcgcacctgctacgaccatatggcgggcgagttgtcggtgcgcgtgttcgagcggctgatcggaggcgggctgctgacgctgcacggcacgtcactcgaagccaccgccgagggcgccgcccgcttcgccggctggggcatcgacatgtcggcgcagaaaagccggcggcgccgctttgcgtgcacctgccccgactggagcgaacggcgtccgcacctgggcggcgcactcggcgcggcgctgctcgactcatggtcggcgcacggttgggtcgagcgcacggagcggccgcgaatcctgcgcgttacgccagccgggcatcgtcatttcgatgcgtttctggccgcc

SEQ ID NO: 13045 - DNA, 708 bp, Burkholderia fungorum
gtgaatctgccgaccaacgcgcaaggcgccgaagcggtgcacgagagcggggacttcgcgtccgaccgcatcctcgcccgcattggacaactgacgcgcacgctgcgcgactcgatgcgcgagctcgggctcgacaagcatgtcgagcgtgcggcggaagccgtgcccgatgctcgcgaccgtctgaaatatatcgcggatatgaccgaacaggccgccgagcgcgtgctgtccgcgatcgacgtcgccaagccgctccaggagcagttgaaggacgacgcgggcaaactcgatgcgcgttgggagcagtggtatgcggcgccgatcgagcgcgaggaagtgcgtgcgttgatgaacgacacgcgaacctttctgcgcggcgtgccggaggcggcaggcgcgaccaatgcgcagctcatggagatcatgctcgcgcaggacttccaggatctgacgggccaggtcatcaagaagatcacggacgtcgtgtacctgatcgagcagcagctgctcggcgtgctggtcgagaacatcgcgctcgaacggcgcgaacagttcgcggcgaacgcggcggcgctggcggccgaagtctcgccgaccggcagccccgaacatctgctgaacggtccgcagatcaatccggaaggcaagacggatgtggtgcaggaccagtcgcaagtcgacgatctgctggcaagcctcggtttc

SEQ ID NO: 13046 - DNA, 2223 bp, Burkholderia fungorum
gtgcatcggcgccggcatgggcgtggcaaccatcatcgagcgcatctgacgcgcgctacccaacacaggaaccctctgaccatggtcaccacccataccgaaggcccgatcggccatctcgtgatcgacgttcccggacgctcgatgaacgtcctcgaccccgaactggcacacgcgctcgacgaagcattgacgaggctggttgacgacgaagccgtgcggggcatcgtgatcagctccggcaagtccagcttcgtcgccggcgccgacctcgcgcgcatgagcgacttcgtcaagcccggcgtgagtcaggcggacgcgttggggctgatcggcctctacaaccggctgctgcgccgcatcgagacgtgcggcaaaccggtggtcgccgcggccagcggcacagcgctgggcggaggcctggagctgatgctgtgtgcccactaccgcatcgccacggacgatcccaaggcccgcttcggcctgccagaggtgggcttgggcctgctgcccggcgctggcggcacccagcgcctgcctcgcctgataggtattgccgccagcctgccgctcttgacgcaaggcacctcactggatgcccgcgcagccctcaagctcggcatcctgaacgaggtcgtgccggccggcgagcttatccaggcagccagccgcgcgctgctcgaaggccgcgtcaaggccatcgcgccgtgggacgaaaaaggtttcaggctgcccggtggcgatgcgtacagccgcgtgaacagcgacgcgctaatggccgccaatgcgtcgctgcatgccgccacgaaaggtaactatccggctccccaggctattctgcgggccgtctacgagggcaccagattgccgatcgacaagggcctgaaactggaacagcaactgttcgtgaagctcgtccagggcgcggtggcgcagaacatgatccgcaccctgttcttcgcgaggcaggccgccgacaagctgtcccggcgtcctgcaggcatcgcgaagcagtccgtgcgccgccttggcatcgtgggtgccggcttcatgggcgcgggcatcgcccaggtttcggctgcggccggcatcgacgtcgtgctgcttgaccgcgacctcgcaaccgccgggcgcggccgcgacagcattgccaaagccttgcaggccgaggtggacaagggccggcttcgcgaagcagtacgcgatcagatccttagccgcatcgaggtagcggcggaccattccgctttcgggaactgtgatctggtcatcgaagcggtgctcgaggacttcgaggtcaaggcatcggtcacccgtgccaccgaagcggcattgcctgcgcacgccatcttcgcgagcaacacgtccgcgctgcctatcaacgaactggcgtccgccagcgcgcgtccacagaactttatcggcctgcatttcttctcgccggttagccgcatggcgctggtggaggtcattgtcggctcggccacatccgacgagacacttgcccgctcgctggattacatccagcagattcacaagacgcccatcgtcgtgcgcgacggctacggcttctatacgacccgctgcgtcgaagcgtacatccgcgaaggggtacgtctgctcgccgacggggtgaacccggtcctgatcgagaacgctggcactgccctaggcatgccggtgggtccgctgacgctggccgacgaagtcggcatcgacgtactgcaccacattgtcagtctgtttcgcgaccgcgagcatggtcgctgggccgacgacaagcacggcgctggcaacgcgatcctcggccggctcgaactggcagggcgcttcggtcgcaaggccggacggggcttcttcgcctacccgcccggcgagcccaggcatcttgagctgggcgatctggatttatcagtggcagcggatcagccagaagtcggacaggtcaaggagcggctgctctacgctcaggtgctcgaagctgcgcgctgctggactgacggcgtgatcgacgatgcccgggaagccgacctcggcgcccatctgggctgggcctttccttcatggcttggcggcccgctggcgtttatcgacaccgtcggcattaccaacttcgtgcagcgcagcgacgaactggtggcccgctacggcccgcgcttcgaggtgccgggtcgcctgcgcgaggcggcggccgggggccaacgcttccacgcagtggccgcc

SEQ ID NO: 13047 - DNA, 948 bp, Burkholderia fungorum
atggatattttcatccagcaggttctcaacgggctggtgcttggcagcgtttacgccatcatcgcactgggctatacgatggtttacggcattctgggcatcatcaacttcgctcacggcgatgtgttgatggtgggcgcgatggttgcgctctcagccataggcgtgctgcagaaccacttccccggcctcggcaatgtgccgacgctcgtcatcgcactgatcatcgcggccgttgtgtgcgcggtcgtcggttatacgatcgagcgcgtagcctaccggccgttgcgtaaagcaccgcgtctcgccccgctgatcaccgcgatcggcgtgtcgatcctgctgcagacgctggccatgatgatctggtcgcgcaacccgctgccgttcccgcagctgttgcccaccgacccgctcaatgtgatcaaggccacggacacgacgccgggcgccgtgatctcgatgaccgaaatcgtgatcatcgtggtggcgttcctcgtgatgggcggcctgctgctgctcgtgcacaaaaccaaactcggccgcgcgatgcgcgccatcgccgagaatccgggtaacgccagcctgatgggcgtgaacccgaacttcgtgatctcggccaccttcatgatcggctcggcgctcgccgcactggccggcgtgatgatcgcgtcggaatacggcaacgcgcacttctatatgggcttcatccccggcctgaaggcctttaccgcggccgtgctcggcggtatcggcaacctcggcggcgcgatggtgggcggcgtgctgctcggcctgatcgaacagttgggcgccggctatatcggcaacctcaccggcggtgtgttcggtagcaactatcaggacgtgttcgcctttatcgtgctgatcatcgtgctggtgttccgtccgtcgggtctgctcggcgaacgcgtggcggatcgcgcc

SEQ ID NO: 13048 - DNA, 1167 bp, Burkholderia fungorum
atgacctcaattcaaccgatcgaaccgtccacgacgctcatccctgaaaagaacctgaccaggacgctgatggtcggcatcatcaccgcgatcttcgtgatcgcggcgccgatgatcatcggcgcggcaggcggcaactactgggtccgcgtgctcgacttcgcgatgctctacgtgatgctcgcgctcggcctgaacgtggtggtcggcttcgccggcctgctcgacctgggctacatcgcgttttacgcggtcggcgcctacgttgcggcgctgctgagttcgccgcacctgtccacgcagttcgagtggatcgcgcatctcgcgccgaacgggctgcacgtgccgttcctgatcatcgtgccgtgcgcgatggctctcgccgcgctgttcggcgtgctgctcggcgcaccgacgctgcgtctgcgtggcgattacctcgccatcgtgacgttgggcttcggggaaatcgtgcggatcttcatgaacaacctcgaccgtccggtgaacatcaccaacggcccgaaggggatcacggcgatcgacccggtgcatttcggcgacttcagcctcgcgcagacgcactcgctgttcgggttgcagttcccgtcggtctactcgtactactacctgttcgtgatcgccgccctggtcgtgatctgggtgtgtacgcgtttgcagcactcgcgtatcggccgtgcatgggccgcgatccgcgaggacgaaatcgccgccaaggcaatgggcatcaacacccgcaacgtgaaattgctggcgttcgcgatgggcgcttcgttcggcggtctgtcgggcgcgatgttcggctcgttccagggcttcgtgtcgccggaatcgttcacgctgccggaatcgatcgtggtgctggcgtgcgtggtgctgggcggcatgggccatattccgggcgtgattctcggcgcggtgctgctcgccgtgctgccggaattcctgcgctcgacgatgggcccgctgcagaacatgatcttcggccatgaaatcgtcgatacggaagtgatccgtcagctggtctatgcactcgcgatggtgctgatcatgctgtaccgctcggaaggcttgtggccgtcgcccaagcatgaagacaagattgcgaaactgtcgaagcgcaacggcaagaagccggtgcgggtc

SEQ ID NO: 13049 - DNA, 1029 bp, Burkholderia fungorum
atggcatttaacgtcacgctccggcaaagcggccggcagtttcaggtggaacaggacgaaccggtgctgagcgccgccttgcgccagggcatcggtctgccgtacggctgcaagaacggcgcctgcggctcatgcaagggcacggtgatcagcggcgaaatcgagcagcgcgcacattcgtcgtcggctttgtcgaacgaggaaaaaacgcgcggcatggcgctcttctgctgtgcgaccgcctgcaccgatctcgaagtggacattcgcgaagtggccggggtcggcgacgtgcaggtcaagaaactgccgtgccgggtgaacgcgatcgagcgcaaggccgacgacgtcatcgtgctgaagctgcaattgcccgccaacgagcgtctgcaatatctcgccggccagtacctcgaattcattctgaaagatggcaagcgccgcagctattccatggcgaatgcgccgcacacggaaggcccgatcgaattgcatatccgtcacatgcccggtggtgcctttaccgatcatgtgttcaacaccatgaaagagcgcgacatcctgcgcttcgaagcgccgctcggcacgttcttcctgcgcgaagattcggacaagccgatcgtgctgctcgcgtcgggtacgggcttcgcgccgttgaaggcgatcatcgagcacgccgtgttcaagaacctgaaccggccgatgacgctgtactggggcgcacgccgcaagaaagatctgtatctgctcgaactggccgagcaatgggcgcgcgagattccaaacttcaagttcgtgccggtgctgtccgaaccggatgcgggcgacgcatggacaggtcgcgtcggcttcgtgcatcgcgcggtgatcgaggacctgccggatctgtcggcgtaccaggtgtacgcatgcggcgcgccggtgatggtggagtcggcgcagcgcgatttcacgcagcatcatggactgccggaagacgagttctacgcggattcgttcacgagcgcagcggatctggcgaacgcggtt

SEQ ID NO: 13050 - DNA, 381 bp, Burkholderia fungorum
atgaagattctggttgttgacgactttccgacgatgcgccggatcgttcgcaacctgctcaaagaactcggctactcgaatgtcgacgaagccgaagacggtcaggccggtctcgcgcgtctgcgcgggggcacgtacgatttcgtgatttccgactggaacatgccgaacctggacggtctggccatgctcaaggaaattcgcgccgacgccaatctgacgcacctgccggtgttgatggtgaccgccgagtcgaagaaggaaaacatcatcgcggcggcccaggccggtgcgagcggttatgtcgtcaagccgttcacggctgcgacgctcgacgagaagctcaacaagattctcgagaagatggccaaagccgggagc

SEQ ID NO: 13051 - DNA, 1245 bp, Burkholderia fungorum
ttgatcgcccagaagcatctgcttggcccgaacaagccgttgcgggtcgcgttcgaatccggcgaagcccattcgatgatcctctggggcccgcccggtgtcggtaaaaccacgctcgccaggctcatggccgatgcgtttcacgccgaattcatcgcactgtccgcggtgctctcgggcgtgaaggatatccgcgaggccgtcgagaccgcgcagattcatcgcgcgaacgggcatcagacgctcgtgttcgtcgacgaagtgcatcgtttcaacaagagccagcaagacgcgttcttgccgcacgtggagtcggggctgttcgtgttcgtcggcgcgacgaccgagaatccgtcgttcgaagtgaatagcgcattgctctcgcgtgccgccgtctacgtgctgaaaagcctgaccgacgaagagcagcgcgagctgctcgagcgcgcgcaaaaggaactcggcggcctcacgttcaccgacgaagcgcgtgacgcgctgatcggttccgccgacggcgacggccgcaagctgctgaacaacctggaaatcgtcgcgcgggcggcgtcacagcaaaagaccaccgagatcgacggcgccttactcggcagcgcgctcgccgaaaacctgcggcgcttcgacaaaggcggcgacgcattctacgaccagatcagcgcgctgcataaatcggtgcgcggcagcagcccggacggcgcgctgtactggttctgccgcatgctcgacggcggcgcggacccgcgctatctggcgcgccgcatcgtgcgcatggcgtgggaagatatcggcctcgccgatccgcgcgccgcgcgcatcgcgctcgacgccgccgaaacgtacgagcgcctcggcacgcctgagggcgaactggcgctcgcgcaggccatcatctatctggcggtcgcgccgaagtccaatgccgggtacaacgcgtataacgaggcgcgccgcttcgtcagcaaagaccagtcgcgcggcgtgccggtgcatctgcgcaacgcgcccaccaggctgatgaaggagctcggctacggtcacgaataccgctacgcgcacgacgaacccgacgcgtacgcggccggcgagacctatctgcccgagaacatgcgcgatccgcattggtacgaaccgacgccgcgtggcctggaggggaagatcggcgacaagatggcgcgtctggccgaactggacgcgcagtggcgcagcgaaaacaagccgaagaagggg

SEQ ID NO: 13052 - DNA, 1293 bp, Burkholderia fungorum
atgctcgacattcagttgctgcgcaaagacctcgacggcgtcgccaaacgcctcgccgaccgcggctataccctcgacgtggcggccttcaccgcgctcgaagcggaacgccgcgatacccagacccgtaccgaagagatgcaggcgcgccgcaacagtctgtcgaaacagatcggcgcgctgaaaggcaagggcgaggacacctcggcggtgatggctgaagtgagtggtatcggcgacgagatgaaggcgtcggcggccaggctcgacgagatccagaagcgtttgtcggacctgctgctcggcgtgccgaacctgccgcacgaaagcgtgccgttgggcaaggacgaaaccgaaaacgtggaagtgcgccgctggggcacgccgcgccagttcgaattcgaggtgaaggatcatgtggatgtcggcgcgccgctcgggctcgacttcgagaccggcgcgaagctctcgggcgcgcgcttcaccatgctgcgcggccagattgcgcggttgcatcgcgcgctggcgcagttcatgatcgacacgcacacgcagcaccacggctatacggagatctacacgccgtacatcgtgaatccggagattctgtacggcaccggccaactgccgaagttcgccgacgatatgttccgcgtcgagaagggcggtgacgaaaatacggtcacgcaatatctgatttccacgtcggaaatttcactgacgaacacggtgcgcgacagcattctcgaagcggacgcgctgccgatcaagctgaccgcgcattcgccgtgctttcgctcggaagcgggctcgtatggccgcgacacgcgtggcctcatccggcagcatcagttcgacaaggtcgagatggtgcagatcgtcgcgccggagacttcgtacgacgcgctggaacagatggtcggccacgcggagacgattctgcagaagctggaactgccgtaccgcgtgattacgctgtgcacgggcgacatgggcttttccgcagccaagacgtacgacctggaagtgtgggtgccggcgcagaatacgtatcgcgaaatttcgagctgttcgaataccgagtcgttccaggctcgccgcatgcaggcgcgttatcgcaatgcgcagggcaagccggagctggtgcatacgctgaatgggtcgggtctggccgtcggtcgcacgctcgtggcggtactggaaaatttccagaacgccgatggttcggtcactgtgccggtggcgttgcgtccgtaccttggcggtttggaacggctggaattaccggctgcc

SEQ ID NO: 13053 - DNA, 1404 bp, Burkholderia fungorum
atgacgtcccaactgcacaaaaaaggcgaagcctggtcggctcgcttctcggagccgatgtcggagctcgtcaaacgctacacgtcgtcggttttcttcgacaagcgattggcgctcgtcgatatcgaagggtcgctcgcgcacgcctccatgctggccgcgcagaagatcatcgccgccgacgacctcaccgcgatccaacgcggcatggcgcagatcaagggtgaaatcgagcgcggcgaattcgagtggcaactcgatctggaagacgtccacctgaatatcgaagcgcgcctgaccgcgctgatcggcgacgccggcaagcgcctgcacaccggccgctcgcgcaacgaccaggtcgcaacagacattcgcctgtggctgcgcggcgagatcgaccgcatcggcggcctgctcacggaactgcgcacggccctgctcgacatggcggagaagaacgccgcgactatcatgccgggcttcacgcacttgcaggtggcgcagccggtcacgttcggccatcacctgctcgcttacgtcgagatgttttcgcgcgacgccgagcgcatgatcgattgccgcaagcgcgtgaaccgcctgccgctcggcgcggccgcgctcgccggcaccagctatccgatcgaccgctacgcagtggcgaagacgctgggcttcgacggcatctgcgcgaactcgctggacgcggtgtccgaccgcgacttcgcgatcgaattcacggcggcgtcggcactcgtcatgacgcacatctcgcgcttctccgaagaactggtgctgtggatgagcccgcgcgtcggcttcatcgatctggccgaccgcttctgcaccggttcgtcgatcatgccgcagaagaagaacccggacgtgcccgaactcgcgcgcggcaagaccggccgcgtgaacggccatctgatcgcgctgctcacgctgatgaaaggccagccgctcgcgtacaacaaagacaatcaggaagacaaggaaccgctgttcgatactgtcgatacggtcgcggatacgctgcgcatcttcgctgaaatggtcgccggtatttcggtgaagccgcaagccatgcgcgacgctgcgttgcaaggcttctcgacggcaacggatctggccgactacctcgtcaagcgcggcctgccgttccgcgacgcgcacgaagcagtggcgctcgccgtgcgcgtatgcgcggatcgcggctgcgatctggcggatctgacgctcgaagaaatgcgcaaggaactgtcgaacgtcgcgcatctgattggcgaggacgtgttttcgtatctgacgctggaagggtcggtggcgagccgcaatcatccgggcggcacggcgccggagcaggtgctcgcagcggtgaaggcggcgcgcgaagcgttgaag

SEQ ID NO: 13054 - DNA, 2868 bp, Burkholderia fungorum
cactcaccggacacgcagcgcagcctctatccggtgaaagacgtgcgcctgctgccaggccgcgaattccccttcgacgaagccgcgcgcaccgcattccgcagccgctggcgcgagactttcgagggcgacccgagccgcgcttcgatctacaaggacatcggcaatagcgtgccgtccgcgggcatcgaatattatctgccgctcttcttcgacgacacggccacgctgttccattacctgcccgaaggcgcgcaactggcattcgtgggcgatctcgacgcggcgatccggcgattcaccaacgacacgaagcagcgctacaacttcctctcgcacgaccgcgaccggccgattctcgagccgcagcgtctgttcctgtcggacgaagatttcttcacgctcgccaagccgttcgcgcggctcgctctgccggccaacgcgggcggcggctggtcgactccattgccgaacctggcaatcgaccgtcacgcggaagatccggtcgcggccttgcgcgcctatctcgacaccacgccgaaccgcgtgctgttcgccaccgaatccgcgggccggcgcgaaacgctgttgcaactgctcgccgacaatcatctgagaccggcatcgagcgacagtttccaggactggctccttggcgactcgcgtttttcgctgggcgtcgcgccgctcgccaacggttttgccgtgcccgtggacggcatcgcgatcatcaccgaaaccgagctgtatggtccgctcgcgcggcgcgcggggcgccgccgccaggaacaggcgagcaacgtcgattcgatggtgcgcgatctgtccgagctgaaactcggcgatccggtcgtgcattcgcagcatggcatcggccgctatatgggcctcgtcacgatggatctcggcgaaggcgagaccgagttcctgcatctcgaatatgccggcgacagcaagctctatgtgccggtcgcgcagttgcacgtgatctcgcgctatagcggcgccgatccggaaagcgcaccgctgcactcgctcggctcgggccagtgggaaaaagccaaacgcaaagccgcgcaacagattcgcgatacggcggccgagctgctgaatttatacgcgcgccgcgccgcgcgttcaggccacgcgttcgcactcgaaccgaaagactacgtgaagttcgcggagagcttcggcttcgaggaaacgccggaccaggccgccgcgatcgcggccgtgatcggcgacatgacgagcggcaagccaatggatcgcctggtatgcggcgacgtcggcttcggcaagaccgaagtcgcgttgcgtgcggcgttcatcgcggtgatgggcggcaagcaggtcgcgctcctctcgcccaccacgctgctcgccgaacagcacacgcaaaccttcaccgaccgcttctccgactggccggtgcggattgccgagctgtcgcgcttcaagtccaccaaggaagtcaacgccgcgatccaccagatcaacgaaggcactgtcgatatcgtgatcggcacgcataagctgctctcgtcggacgtgcagttcaagcggctcggactcgtgatcatcgacgaggaacaccgtttcggcgtgcggcagaaagaagcgctgaaggccttgcgcgccgaagtggacgtgctcacgctcaccgccacgccgattccgcgtacgctcggcatggcgctcgaaggcctgcgcgatttctccgtgatcgccaccgcgccgcaaaagcgcctcgcgatcaaaaccttcgtgcggcgcgaggaagacagcgtgattcgcgaagccatgctgcgcgagttgaaacgcggcggccaggtctacttcctgcacaacgaagtcgaaacgatcgagaatcgccggcaaatgctcgaagcgctggtgcccgaagcgcgtatcgcagtcgcgcatgggcagatgcatgagcgcgaactcgaacgcgtgatgcgcgacttcgtggcccagcgcgccaacgtattgctgtgcacgaccattatcgaaaccggtatcgacgtgccgagcgccaacaccatcctgatccaccgcgccgacaagttcggtctcgcgcagttgcatcagttgcgcggacgtgtgggccgttcgcatcaccaggcctattcgtatctgctggtccacgatccgcaagggctgaccaagcaggcacaacgccgcctcgaagcgatccagcagatggaggaactcggctcgggcttctatctggccatgcacgacctcgaaattcgcggcacgggcgaagtgctcggcgacaagcagtcaggcgaaattcacgagatcggcttccagctctataccgacatgctgaacgacgccgtgaaggcgctcaaggaaggcaaggagccggacctcaccgcgccgctcgccgcaaccaccgagatcaatctgcacgcgccggcgattctgcccgcggactactgcggcgacgtgcaggagcgtctgtcgctctacaagcggctggctaattgcgaacacaacgattcgatcgacagcattcaggaagagttgatcgaccgcttcggcaagctgccgccgcaggcgcatgcactggtggagacgcatcgtctgcggctcgcggcgaaaccattgggcattctgaagatcgatgccggcgaaaccgtgatcggcctgcaattcatccccaacccgccgatcgacgcgatgcggatcatcgagatggtgcagaaacacaggcacatccggctcgcgggccaggacaagctgcgtatcgaaacgcgcagccccgatctcgcggtgcgtgtcgccacggtgaaggaaaccttgcgcgcgctcggcacgccgagccgcggtacggcggccggcgtggccgcgcga

SEQ ID NO: 13055 - DNA, 1986 bp, Burkholderia fungorum
atgttcggaaaacttacgctcgatgcgattccgtatcacgagccaatcatcgtgggcgcgggcattttcatggcgctcgtcgggctggccgtgctcggcacggtcacctatctcggcaaatggcgctatctgtggacggagtggctgacttccgtcgaccacaagcggctcggcatcatgtacatcatcgtggcgctgatcatgctgctgcgcggcttctccgatgcgatcatgatgcgcctgcaactggcgctggcctacatcaacccgggctatctgccgccgcatcactacgatcaggtgtttacggcacatggcgtcatcatgattttcttcatggcgatgaccttcatgatcggcctgatgaacatcatcgtgccgctgcagatcggcgcacgtgacgtggcgttcccgttcatcaactcgttgagcttctggatgaccgcggtcagcgcgatcctgatcaacgtctcactggtgatcggtgaattcgcgcaaaccggctggctggcttatccgccgctctccgagttgcagttcagtccgggcgtcggggtcgactattacctgtggagtctgcaactctccggtatcggcaccttgctgacgggcgtgaacttcttcgtgacgatcgtgaagatgcgcgcgccgggcatgacgttcatgaagatgccggtgttcacgtggaccacgctgtgcaccaacgtgctgatcatggcgtcgttcccgatcctgaccgtcacgctcgcgctgctgggcctggaccgctatctgggcatgcacttcttcaccaacgacgccggcggcaacgccatgctgtacctgaacctgatctgggcatggggtcaccccgaggtgtacatcctgatcctgccggcgttcggtatcttctcggaagtcgtggcgaccttcgccaaaaagccgctgttcggctacaagacgatggtgtgggcgacctgcgcgatcatggtgctgtcgttcctcgtctggctgcatcacttcttcacgatggggtcgggcgcggatgtgaatgcgttcttcggcattgcgacgatggtgattgcgattccgaccggcgtgaaggtgttcaactggctgtttacgatctacaagggccgtctggaattcaccacgccgatcctgtggacgatcggtttcatgatcaccttcacgatcggcggcatgaccggcgtgatgatggcgattccgggcgcggacttcgtgctgcacaacagcctgttcctgatcgcccacttccacaatgtgatcattggtggcgtgctgttcggctatctggcgggcttcaactactggttcccgaaggtgttcggtttcaagctgaacgaaaagctcggcaaggccgcgttctggttctggcagatcggcttctacgtcgcgttcgtgccgctgtacgtgctcggcttcatgggcatgacgcgccgtctgaatcactacgacaatccggcatggcatccgtggctggtcttcgccgcggtcggcgcggtcctgatcgctatcggtattgcgtgccagctggcgcagttgtacgtgagtatccgcgaccgcaatctgccgcagaatcgcgacctcacgggcgacccgtggaatgctaatacgctggaatgggcaacgagttcgccgccgccggtgtacaacttcgcgatcatcccgacggtgcgcaagctggacgcgttcggcgatatgaagtcgcgcaaggataagccggcacaaccggtgtatcgcgacattcacatgccgtcgaacacgtcggcgggtctgctggtgggtctgttctcgctggtgctcggctttgccggtgtctggcacatctggtggctggccatcgtcggtctcgtcggtgcgatcggcacggtgatcgtttatagcttcatgaaaaacgagggctattacatcccggccgacacggttgcgctgattgaagagaagcacagcggcacgggtgcccaggtcgcgttggaggtggac

SEQ ID NO: 13056 - DNA, 837 bp, Burkholderia fungorum
ttgctgctctcgggttgcggcaacctcgatattctgaatccgaaggggagtgtgggtctggcggaacgtgagctgattgccacgtccacctgggccatgctgatcgtggtcgttccggtgatcgcactcacgctgctgttcgcatggcgttaccgtgcgtcgaacaaaagcgcggagtaccgtccgggctgggtgcattcgaccggtatcgaaatcgccatctggacgattccgacgctgatcattctgttccttgccgtgctgacgtggaaaaccacgcacgagctcgatccgtacaagccgctcgagtcgcaggtgaagccgatcaacgtcgaagttgtcgcgctcgactggaagtggctcttcatctatccggacctcggcattgcatccgtgaaccagctggcgttcccggtcggcacgccggtgaacttcgtgatcacgtcggacacggtgatgaactcgttcttcatcccgcaactcggcggccagatctacgcgatggcaggcatgcagacgcgtctgcatctgatcgcggacgaagccggcgactacgcgggcaccgcggcgaatttcagcggcaagggtttctcggacatgaagttccgcgcgctcgccacttcgccggcggagttcaacgcgtgggttgcgaaagtgcgcgcttcgtcggacaacctcagcatggaccgttaccacacggtatccgcgccgaccgagaaggagccggtgcgctacttctcgacggtcgatccgaagctctttcacaacatcattgcccgatataacaacggtaacgtcctcgacaacatgaaggacgccaactgtgggcctaagggg

SEQ ID NO: 13057 - DNA, 750 bp, Burkholderia fungorum
atggcagttaccatgcgtcaaatgctggaagccggtgtccacttcggtcaccaaacgcgcttctggaacccgaagatggccccgttcattttcggtcatcgcaacaagatccacatcatcaacctcgaaaagacgctgccgatgtacaacgacgcgctgaagtacgcgcgtcaactggcagcgaatcgcggcaccatcctgttcgtgggcacgaagcgtcaatcgcgcgacacgatcgctgaagaagcgcaacgcgccggcatgccgtacgtcaacgcacgctggctcggcggcatgctgaccaacttcaagacgctgaaggtttcgatcaagcgcctgaaggacatggaagccgcgctggaagcaggcgaaaccgagcgtatgagcaagaaggaagcgctcctgttcgaacgcgaaatggccaagctgcaaaagtcgatcggcggcgtgaaggacatgggcggcattccggacgcgatcttcgtggtcgacgtcggctaccacaagattgccgtgaccgaagcgaacaagctcggcattccggtcatcgccgtggtcgatacgaaccactcgccggaaggcatcgactacgtgatcccgggtaacgacgacgcctccaaggctgtcgctctgtacacggctggcgtggctgacgcgatcgtcgaaggccgtgcgaacgcggtcaacgaagtggtgcaggctgcacgtggcggcgacggcgacgagttcgtcgaggtcaacgcggaagcg

SEQ ID NO: 13058 - DNA, 1821 bp, Burkholderia fungorum
gtgatcgccgggcgccgtcaggacatcatggtgttcgacctgcaaacgccggtggccgagagcttcggctacaagccgaccgccaccaaacgcgcgagcgagcagctcatgcggcgctattactggtccgccaaggctgtcacgcagctcgccacgatcctgatccagaacatcgaggcgcagctctttccgagcacgagcggcatcacgcgtgtgctgtcggaccgcttcgtcgagaagcagggcatgctggaaatcgccagcgacgacgtgttccagcgcgagccgaacgcgatcctcgaggccttcctgctgtatgaacagacgcccggcgtgaaaggtctgtcggcgcgcacgctgcgcgcgatctacaacgcgcgcgacatcatggatcaacattggcggcgggacccggaaaaccggcgccttttcatggacatcctgaagcagccggccggcatcactcacgcgctgcgcctgatgaaccagaccagcgtgctggggcgctatctgctgaacttccggcgcattgtcggacagatgcagcacgatctgtatcacgtctacacggtcgaccagcacattctgatggtgctgcgcaatctgcggcgcttcgccgtggccgagcacgcgcacgaatatccgttctgcagccagttgatcgcgaacttcgaccggccgtgggtgctgtacgtggcggcgctgtttcacgacatcgccaagggccgcggcggcgaccactccacgctcggcatggccgacgcgcggcgcttctgccgcaatcacggtatcctgggtgaagacggagaactggtggtgtggctggtccagcagcatctgacgatgagccaggtcgcgcagaagcaggatacgagcgacccggaagtcatcaagcggttcgccgaactggtcggcaccgagcgccgcctcacggcgctctacctgctgaccgtggccgacattcgcggcaccagcccgaaagtctggaacacatggaaaggcaagctgctcgaagacctgtaccgcgccacgctcgccgtactcggcggcgcgcggccggacgcgcattctgagctgaagtcccgccaggaagaagcgctggcgctcctgcgtctcgaaaccgtgccggaaggcgcgcaaaaggcgctgtgggacaagctcgacatcggctatttcctgcgtcacgacgcggcggatatcgcgtggcaaacgcgcgtgctgtaccgccacgtcgaaacgcccacgccgatcgtgcgggcccgcccttcgccgatcggcgaggcgctccaggtgctggtctatgtgaaggatcagcccgatctgttcgccggcatttgcgcttatttcgaccgcaatggcctgtcggtgctcgatgcgcgggtcagcacaacccgtcacgggtacgcgctagacaatttcctcgtcgcgcataccgaagaagacgtgcattatcgcgatattgccaatctggtcgaacaggagctgaccgcccgcctcaccggtgacggcaccctgcttccgggaccgtcaaaaggccgtctgtcgcggctgtcgcggaccttccctgttacgccgcgcgtcgatctccgggccgacgagcgcggccaatactacatcctgtccgtgtcggcgaacgaccggccgggccttctttattcgatcgcgcgtgtgctggccgagcatcgggtcggcgtcgcttcggcgcggatcaatacgcttggcgaacgcgtcgaagacgtgtttctgctggatggacacggtctgtcggacagccgtctgcaaattcaggtcgagaccgaactgctgcgcgcgattgcagtg

SEQ ID NO: 13059 - DNA, 2064 bp, Burkholderia fungorum
atggcccgaacccccgtctcacctcccgcaaccagcgccccggcagagcgtgccgcgtggctgcgcgcggaactcgaacgcgccaattacgcgtactacgtgctcgaccagccggacctgcccgacgcggaatacgaccggctgttcaaggaactcgagagcatcgagacggaacatcccgacctgatcgtgccggattcgcccacccagcgcgtgggcggcgaggcggcgagcggtttcgagccggttgtgcacgagcagcccatgctgtcgctgaacaacggtttcgcggacgaggacatcgtcgcgttcgacaagcgcgttggcgacgcgctcggcaagaatgcgagcgagccgccggtgccggtcgaatacgcggccgagctgaagttcgacggcctcgccatttcgctgcgttatgtcgacggcgtattcgtccaggcgtccacgcgcggcgacggcacgaccggcgagaacgtcaccgaaaacgtccgcaccatccgctccattccgctcaggctcaagggcaaacgcgtgccgcacgtgctcgacgtgcgtggcgaagtgctgatgttcaagcgcgatttcgaacgtctgaacgaacgccagcgggccgcggaacaaaaggagttcgccaatccgcgcaatgcggcggcgggcagcttgcggcagctcgattcgaagatcaccgcgcagcggccgctgtcgtttttctcttatggaatcggcgtgctcgaaggcatggacatgccggccacgcacagtgaactgctcgactggtacaaggagctcggcttgccggtgaacggcgaacgggcggtggtgcacggcgcggagggtttgctgggctttttccacgccgttggtgaaaagcgcgagaagctgccgtacgacatcgacggggtggtctacaaggtcaaccggcgcgatgagcaggaggcgctcggcttcgtgtcgcgcgcgccgcgttttgcgctggcgcacaaattccccgcgcaggaagcgctcacccggctggtcgcgatcgacgtgcaggtcggccgcaccggtgcggtcacgccggtggcgcggctggaaccggtgttcgtgggcggcgcgacggtcacgaatgccacgctgcacaacgaagacgaggtgcgccgcaaggatatccgcatcggcgacacggtgatcgtgcggcgtgccggcgacgtgattcccgaagtggtgagcgcgctgctcgaccggcgccccgacgacgcccgcgaattcgtgatgcccacgcattgcccggtatgcggctcgaacatcgagcggctgccggacgaggcgattgcgcgctgtaccggcggcctgttctgtcccgcgcagcgcaagcaggcgttgtggcatttcgcgcagcggcgcgcgctggatatcgacggccttggcgaaaagatcatcgatcaactggtcgagcagaatctggtgcgcacaccggccgatctgttcaacctcggcttcgcgacgctcgccgaactcgaccgctttgccgagaagtccgcgcagaacctgctcgattcgctcgaaaaggccaagcacaccacgttggcgcgttttatctacgcgctcgggattcgccatgtgggcgagtcgacggcgaaagacctggccaaacatttcggctcgctggatccgatcatggacgcgtcggtcgaagccttgctggaagtcaacgacgtcgggccggtagtggccgagtcgattcatcagttcttcgccgaagagcacaaccgcacggtgatcgaacaactgcgcgcgccgggccgggtcacgtggccggaggggccgcccgcgcccaaagcgccgcaaggcgtcttggccggcaagacggtggtgttgaccggcaccttgccgagcctcgcccgcgaagaagcgaaggaaatgctggaagcagcgggcgcgaaagtggctggatccgtgtcgaagaaaacggattatgtggtggcgggggccgaagcgggcagcaagttggccaaggccgaggaactcggcattcccgtactcgacgaagatggtatgcgtaagctcctggaggggcagtta

SEQ ID NO: 13060 - DNA, 963 bp, Burkholderia fungorum
atgcggatcttcatcactggcgcgacgggcgtcctcggtttcgcggtcgttcgcgaacttatcgcggcgggccacgcggtgacaggcctcgtgcgttcggcgcatgccgtcgccccgctcgaggcagtgggggcgagggcatgtcgcggaacgatcgaggataccgacatcttgcgccaggaggctgcgctcgccgacggtgtgatccataccgccttcttccacgcgctctcgcatgccagcctgggcattcgcgcacggatacttttcggcggcccgccggtccgtatcgtcgaacgcttcgcggccgcggcggtcgctgtggatcagcgcgccatcgagacgttcggcgaggcactcggggcacgaaaggtctcgctggtcatcgcctttccgaccatggcgatggcagcagggcggcacgcgctggagaccgacgatgccgatcgcgcagccgtcggcggtgcaagggcgcgctccgagcaggccgcagttgaccttgtgcgggccggcgtgaacgcctccatcgttcgtctgccgcccacggtacatgatgaaacgaagctcgggctcgtcacgcggttgatcgagattgcacggaaaaagcggatgtccgcctgtcccggtgatgggttcaaccgatgggccgccgttcacaggctggacgcatcgcggctgtttcggcttgcgctcgaaaacggcgagcccggggaccgctatcacggcgcggccgaggagggcatgccgttccgcgatatcgccaacgcgattggacgctatctcgacgtccctgtggtgcctttgcccgctaaagactgtgcgaggcatttcggctggcttgcgccatttgtcgctgcggacaatccggtttccagtcagatgacacgggaacgcctgggttggacgccacagcatccgtcattgatgaacgaccttgcggccgccttgcgcgatcggggccgc

SEQ ID NO: 13061 - DNA, 1224 bp, Burkholderia fungorum
gtggatgcgtttcgctgcggctcgcagtcggatagacaggtcggcaacagggtgttccccaaggagtctcccgtgttgccgtcattttctcccgctctgctcgcgctcgccgacggcacggtctttcgtggttactcgatcggcgcccccgggcataccatcggcgaagtcgtgttcaacaccgctatcaccggctatcaggaaatcctgactgacccgagctacgcgcgccagatcgtgaccctcacgtatccgcatatcggcaacgtcggcgtgaatgccgaagacgtcgaagcggcgaaagtccatgccgccggcctgatcattcgtgatctgccggttctcgcgtcgaacttccgcatggagcgcacgctccagcaatacctgcaggacgaaggcgtggtcgccatcgccggcctcgatacccgcatgctgacccgcgttctgcgcgacaagggcgcgcagaacggcgcgatcctcgccggttcggacgatgaagctcgcgccatcgaactcgctcgctcgttcccgggcctttcgggcatggacctcgcgaaggtcgtgtcgacgaaggagtcctatgaatggacccagaccgaatggcggctgggcagcggctacggcacgcagaatgcgccgaagtaccgcgtggtggcgttcgactacggcgtcaagtacaacatcctgcgcatgctcgccgaacgcggctgtcacgtcaccgtgctgccggcggaagcttccgccgccgacgcgctggcactcaatccggacggcgtcttcctgtcgaacggcccgggcgatccggaaccgtgcgactacgcgatccgcgccacgaaggaactgatcgaccgcggcattccgaccttcggcatctgcctcggccatcagatcatgggcctcgcggtcggcgccaaaaccatgaagatgaagaccggccaccacggcgcgaaccatccggtgaaagatctggacgacggccgcgtggtgatcacgtcgcagaaccacggcttcgcggtcgatgccgacacgctgcccgccaatgcccgcgtcacgcatgtttcgctgttcgacggcacgctgcagggcttcacgctgaccgacaagccggcgttctgcttccagggtcacccggaagcgtcgcccggtccgcatgacatcgcctatctgttcgaccgcttcacggcgttgatggacacgaagaaggccggcaagaccgcagcggca

SEQ ID NO: 13062 - DNA, 366 bp, Burkholderia fungorum
gtgcatataatcaaagcccgcgagatctatcgtgactgcaaagaggccttcagcatgtacattgccatgaaccgtttcaaagtgacgcccggatccgaagccgctttcgagcatctctggacaacgcgtgatacgcatctgaaagaggtgccgggcttcgtggaatttcatctgctgaaggggccgcagaaggaagatcacgttctgtattccagccatacggtatggaaggactacacgtccttcgagggctggacgaaatccgaggcctttcgcgcggcgcatcgcaacgccggtggcgacaacagggtgctgtatctcgggcatccggaattcgaaggcttcgaggtcattcagaccgtcaaa

SEQ ID NO: 13063 - DNA, 1167 bp, Burkholderia fungorum
atgagcgaagcagacaacagcacgccgaacacgggcgcgttcaaaccgaaaaaatccgtcgccctgtcgggcgtgacggcgggcaacacggccctctgtacggtcggcaagaccggcaacgacctgcactatcgcggctacgacattctcgatatcgccagcgcctgcgaattcgaagaaatcgcgtacctgctggtccacgaaaagctgccgacgcaagccgaactcaccgcgtacaaaacgaagctcaaggcgctgcgcggcctgcccgcgaacgtcaaggccgcgctcgaatggatcccggccgccgcgcatccgatggacgtgatgcgcaccggcgtatcggtgctcggcaccgtgctgccggagaaagacgaccataacctgccgggcgcgcgcgacatcgccgacaggctgatggcttcgctcggttcgatgctgctgtactggtaccactactcgcacaacggcaagcgcatcgaggtggaaaccgacgacgattcgatcggcggccacttcctgcatctgctgcacggcgtggagccgtccaacgcatgggtcgacgcgatgcacgtgtcgctgaacctgtacgccgagcatgaattcaacgcgtcgaccttcacgggccgcgtgatcgcgggcacgggctcggacatctactcggcccttaccggcgcgatcggcgcgctgcgcggaccgaagcacggcggcgcgaatgaagtcgcgttcgagatccagtcgcgctaccagacgccggacgaagccgaagcggatatccgccgccgcgtcgagaacaaggaagtggtgatcggtttcggtcaccccgtgtacacgatttcggacccgcgcaacaaggtcatcaaggaagtcgcgaagaagctctcgaaggaagcgggcaacaccaggctgttcagcattgccgagcggctggagtcggtgatgtgggacgcgaagaagatgttcccgaatctggactggttcagcgcggtctcgtatcacatgatgggtgtgcccacggccatgttcacgccgctcttcgtgatcgcgcgtacggcaggctggagcgcgcacatcatcgagcagcgcatcgacaacaagatcatccgtccgagcgcgaattacaccgggcccgacgatctgccgttcgtgccgctcgcgaagcgtgtt

SEQ ID NO: 13064 - DNA, 615 bp, Burkholderia fungorum
atgagagtcagtcgtgcacaggcggaagagaatcggcgcacagtcatcgaggcggcgggccgactgttccgcgaacgcggcttcgaaggggtcggcctcaatgacctgatgggtgcggcgggcctgacgcaaggcggattctacaaacagttcaggtcgaaagacgacctcgccgctcaggcctgtgaccgcgtgctggctgacagtaccgagagattgacgcagttggtgaagagcagcggcgaaaatgcgcttgccacaatcattagcaggtatctatccttcgagcaccgcgaccagatcgccgacggttgcatctttcccgcgcttggccccgatgctgcccggcacagtccagaattgatccgaagtttcgaaacgggtatcaggtcgtatctggatgtcattgagcgggccgcgcaggcttcatctgatcaacgggcagaaagcgaccccgctgtcgtgctttcgacgatggtcggcgcgctcgtgttatcgcgcgttgccgaggaccagacgctttccgcgcggatactcgactcggctatcaacagtcttctcaatcgcaatcgcagcgacaggcctgaagtagacacggtcgatcaaggtcgttca

SEQ ID NO: 13065 - DNA, 1260 bp, Burkholderia fungorum
atgtctgacgtctctaaagcatggaacatcgacgaccttcgccgcatggcaagtcacaatgtaccgaagcatttccttgactacctgcagggtggcgccaacagcgagacgacaatgcagtcgaaccgcttggactttgcccagtgggctctgatacagaaggtgctcgccggcatccaggagaactccacggatctcggcacgacctatctcggcgaacgccatgagcttcctgtgttgctcggccccgtaggtttcgccggcatgtatcaccgcaacggcgaaatcgccgcaggtcgcgcagccgggaaagccggcatcgcacaggtgctgtcgaccttttcgattgcgtcgctcgaggaagtcgcgcagtcgcatcgctgttcgctgtatttccagctctatgtattccgcaagcgcgaactgacggaacacatgctcgagcgctgccgcaaggcgaagatcggcacgatctttcttacagtggatacacccttcgcaccggtacgcgaacgcgacgcacgtaacggcttccgtgcccgcaccacgctttcgcccggcatgctgctctcgatgctgcggcatccactgtggtgcatgggtgcaatcgccaacggcatacccagcgtaggcaactgcaagccgtacccggaactcggcagctcgctcatggaacagtccgtgaacctcgggcgcatgatcgatccgacactcgcgtggagcgacatcaagtggctgcgcgatcgttgggaaggcaagatcgttatcaagggtatcctcgatgccgacgatgcacgtcgtgcggtcgacgcgggcgccaacgggatcgtggtttcgaatcacggcgggcgccagctcgacccggcgccgtcgacgatcagcgtactgcccgaaatcgccaaggcagtgggaaagcgaaccgaagtcctgatggatggcggcatccgccgcggagcggatgtcctcaaggcactggcgctcggtgcaactgcggtactcctcggtcgggcatacatctacgggctcggcgcaggcggtgaaaaaggcgtgacccgttgcctcgatctgctcagggaagagatgcgccccgcactgaacatgatgggctttcgcaccatcgatcagcttaaggcagcaggcagcgacgcgctgcgcctgagcgcttcgttcccctcgacatcccacttagcggaaaacgacgccgccgtccgcgaaaagccgaatgcgcacgttgtagaaatacgcggttcaagcgttgca

SEQ ID NO: 13066 - DNA, 2367 bp, Burkholderia fungorum
atgcacgaatctggaatcatgcagcgcgaggcctatgacgactgggccagtcaatgggttgcgtcgactgaggactactcggttttccttatcacgtccgaaggggacgttgccagctggaaccccggcggcacccggatcgagggttaccagctggaagaaatcatcggacgcaatttttccacgctttacaccgatgaagaccgcggaaacggggtgccggatgcggtactggaaagcgtcctgcaacgggggcgtcatgagtcggagggatggcgccggcaaaaagacggcactcatttctgggcgagcgtggttacgacggggctgcgcgatccccgcggcgagttccgtggggcggttcagatagtgcgagatgtgggtgagaagcgcagggcacatgaagccgcgatcgaaagcgagcggcgcttccggctgctggtacagggggtgacggactacgccatcttcatgctctcacccgagggctatgtgacgaactggaacagtggtgcccgcaggataaagggttacagcgagcaggagatcatcggctctcatttttcccgtttctataagcccgaagacgtcgctgccggtaaaccgcagcgtggcctggagacggcggcccgtgaggggcgttttgaggcggaaggctggcgggtgcgccgtgacgggacgaccttctgggcccatgtggtgatccatgcgattcgcgacgacgaaggaaccctcatcggttttgcgaaggtgacgcgggacgttaccgaacggcgccaggcgagcgaaatgctcgaacagacgcgagcggcgctgtttcaggcgcagaagatggaagcaattggcaagctgacaggtggcgttgcccacgatttcaacaacgtgctgcaggtcttacggggcaacctcgaactgctggagaaccggcatcgccgcgacaactggagcgtggaacgcctcgcccacgcaatcgatgccgtcgagcgtggcgccaaactcgcatcccagcttctcgcgttcggtcggcggcaggcgctgcggcccgttgttgtgaaccttgcggccatggtgcgcgcgatggatagtatgctggcgcgaacgcttggagaaacagtcagcgtggaaacagttgtcgctgccggtctgtggaacacgctggtcgatcctcaccagcttgaaaatgtgctgctgaacctggctatcaatgcgcgcgacgcgatgcccaccggcggacgccttacgcttgagcttgctaacgcgatgctggacgatcgttatgtaggcgccctgtcggatgtgccggcgggtcagtacgtgatgctggctgtgacggacacaggagtgggcatgccaccggatgttgtcgagcgggcctttgacccgtttttcaccaccaagcctgaggggctgggaaccgggttgggcctgagcatggcttatggtctcgtcaagcagagcggtggacatatccggatctacagcgaactcggacacggcacgacggtaagaatatatttgccgcgttcaatggcgaatgctgttgagctgccgtcgagacaaagcaagggagggataacggggggcggggagaccgtgctggtggtggaggacgacgcgaaggttcagtcgacggtcgtcgagatgctggctggtctgggttattcggtgctcaaggcagacgacgcggagcaggcgctcgcggtgattcgcagcggggttcatatcgatctgctattcacggatgtcgtgatgcctggagcactgcgtagccccgagatggcccgacaggccgtgcagcttttgcctcacctcaaggtgctgttcacttcgggctacacgcagaatgcaatcgtgcacggaggccgcctggacgcgggcgtcgagcttctcagcaagccgtatagccaggaagaactggcgcgcaagctgcgccacgtccttgggacgcctggcgacgagatttcgggcacagcagacgggccgtccgcagcgcagaccggcgatggccccgtgtcgcaagtggtcttgcacgtgcttgtggttgaggacgatgtcgcgtctctggatgcagtttgtgaacttctcgaaatgctgggtcaccatacggcgaaggccgcaaatgcgaagcaggcgatggagcagataggcactgaaagctttgatgtactgttgaccgatctgaacctgcccgatgtcttcggaatcgacctggcgcaacaggccgtcgccgctcatcctgacctgcacgtgatatttgcgtcgggagataatttaccgactgacgtgcagcttggttttacatggaagggactgcgcaaaccctacacagtggaccagcttgacgtggcactccgaacaatcgggcag

SEQ ID NO: 13067 - DNA, 1044 bp, Burkholderia fungorum
atgacgattagaaaccacagcccttcccgcatcgcctactacgagcagattgccaagctcggtatggcgccgctctgggaatcgctgcacacgctcgtgccgaaggagccgcgtccgcaggccgtcccggcgatctggaagtatgcacaactgcgcaagttcgtgctggagtccggcaaggtcatcagcgcggccgaggccatccgccgcgtgctaatcctcgaaaacccgggcctgcccggcaaggcgagcatcacgtcgaacctctacgccggcctgcagctaatcctgccgggcgagatcgcgccgagccaccgtcacacgcagtcggcgctgcgtttcatcgtcgagggcacgagcgcgtggacagccgtcgacggcgagcgcacgacgatgcatccgggggactttatcatcacgccgtcgtggacgtggcacgaccacggcaacccaagcatccaggccagcggcgagcccgtcgtgtggctcgacggcctcgacattccgctcctgctccagctggacgccggctttgccgagacctatccggaagacacgcaaccggtcaaacggcccgagggggacagcttcgcgcgctacggccagaacatgctgccggtgcgccacgacgtgaagaacggcaactcgccaatcttcaactacccgtatgtgcgcagccgcgaggcactctacacgctctctcgcacgaacgaggctgacgcctgggacggcttcaagttgcgctacgtgaacccggccacaggcggctacccgatgccgacgatggcgaccttcatgcagctactgccgaggggcttccgcggcaaggcttaccggacgaccgattccacggtattcagcgtggtcgagggacaggggaacgtccggatcggagaacagttgttcgagttcgcgccgcacgacgtgttcgtcgcgccgtcgtggcagccggtcaggttcgacaccgacgaggacgccgtcctgttcagctactcgaatcgccccgtgctcgccgcgctcagcctgctgcgcgaagagcgccag

SEQ ID NO: 13068 - DNA, 903 bp, Burkholderia fungorum
atggagacatccccaggcagcatcatgcagcccgtcgcgggcaagcggaacgccggcgagccgctgcgctcgtcggtcacggccggcgacggcgtgcaattgccgctataccgctggccggccgccgcgccgacgcgcgccaccgtggcgctgatccacgggctggccgaacacgccggccgatacgcggcgctggccgggcggctgaacgcggccggcatcgaactggtggcgatcgatctgcgcggccacggccacgcgcccggcaagcgggcctacgtgaggcgcttcgacgactatctgctggacgcgcaagccttgctcgatgccgcggcgcaaagttgcgcgccgctcttcctgatgggccacagcatgggcggcgccgtggccgcgctgtatgcgatcgagcgcctcgaagcgagcggccggcgcctgaacggcctgatcctgtcgagcccggcgctggcgcccggccgcgacgtgccgcgctggatgctcaagctaagccaggtgatcagccgcctctacccgagcttcccggcgatgaaaatcgacgccgcgctgctctcgcgccttcaacccgtggtgaacgccaatcgcgccgatccgctcgtgcatcacggcgcgattcccgcgcgcaccggcgcggaactgctgctggcgatggcgcgcatcgaacgcggccgggcgggcttgcgtgtgccgctgctggtctatcacggcaccgccgacaagctcaccgaacccgaaggcagtcgcgacttcggtcagcacgcgggctcgccggacaagacgctcaccctgcacgagggcagctatcacgagacgatgaacgacatggaccgcgatcgggtgatcggggcgttgatcgagtggatcgaaaaacggctggtggttagaacc

SEQ ID NO: 13069 - DNA, 777 bp, Burkholderia fungorum
atggagagagcgatgcagttcgatgtcgtcacgctctttcctgacatgtttcgtgcgctgaccgactggggtatcaccagccgtgcggcgaagcaggagcgctacagtttgcgtacgtggaatccgcgcgatttcacgaccgacaactaccgcacaatcgacgatcgcccgtacggcggcggccccggcatggtgatgctggcgaggccgctggaagacgcgatcggcgcggcgaaagcggcgcaggcggagcagggcattggcgccccgcgcgtcgtgatgatgtcgccgcaaggtgtcacgctgaatcacgaccgtgtcatgcggtttgctgccgagcctggcctgatcctgttgtgcgggcgctatgaagcgatcgaccagcgtttgctcgaccgtgtcgtcgacgaagaagtcagccttggcgacttcgtgctgtcaggcggcgaattgccggctatggcgttgatggatgccgtggtgcgtcagttgcccggtgtgctcaacgactcgcagtctgcggtgcaggacagttttgtcgacgtgctgctggattgtccgcattacacgcgccccgaggaatacaacggcgtgcgtgttccagatgtgctgctcggcggccatcatgcggagatcgaaacgtggcgtcggcgtgaagccttgcgcaacacgttgaacaaacggcccgatctgatcgtgaaggccagaaagaacaagatgttgagccgtgccgacgaggcatggctcgcgagtctcgcgaaggaagagtcgaaggcg

SEQ ID NO: 13070 - DNA, 684 bp, Burkholderia fungorum
gtgaacagggtgtggtggtggaggagctctcgtatgttgagtgaaatgctggatatgttcgtccagtcgttctgggaaacgctcgtgatggtgggcatttccggactggtcggcgcgttggtgggtttgccgctcggtgtgctgctgtatctgacggatcgccagggcgtgctgcagaacatcgcggtgaatcgcgtgatgggtgtggtcgtcaatgcggttcgttcgacgccgttcatcatcctgctggtggccgtgattccgttcacgcgcctcgtggtgggttcgtcgatcggtacggcggccgccgtcgtgccgctgacgatcgccgccgcgccgttcatcgcgcgtctggtcgagaccgcgctgcgcgaagtggatcgagggttgatcgaagccgcgcaggcaatgggcgcgaccaccagccagatcgtcttcaaggtgttgttgccggaatcgctgccgggcgtggtcgccggcctgaccatcaccttcgtctcgctggtcggctattcggcaatggccggtgcgatcggcggcggcggtctgggcgatctcggcattcgctatgggtatcagcgtttcctgccggaagtgatgttgacggtcgtggtgattctgatcgtcttcgtgcaactggtgcagtcgtttggggattggctcgtgcgtcgcttgagccataag

SEQ ID NO: 13071 - DNA, 387 bp, Burkholderia fungorum
gtgatgaatctgattgcaaaactcgagcaggaagaaatcgcgcgcgccctcggcgagaagaccatccccgaattcgcccccggcgatacggtgatcgtcagcgtgaacgtggttgaaggtacgcgtaagcgtgttcaggcttacgaaggcgtcgtgatcgccaagcgtaaccgtggtctgaattcgtcgttcatcgtccgcaagatttcgtcgggcgaaggcgtcgagcgtacgttccagacttactcgccgctgctggcaagcatcgtcgtcaagcgtcgtggtgacgtgcgtcgtgcgaagctgtattacctgcgcgaccgttcgggcaagtcggcccggatcaaggaaaagctggtctcgaaaggccgcgctgcttcccaggcg

SEQ ID NO: 13072 - DNA, 804 bp, Burkholderia fungorum
atgtccaacatgcaacgtcgtctcattctgaaactggccgccgcactcggcgccgcgtcactgttcgccaccggcatggctcacgctgaagacacgatcaaggtcggcgtcaccggcggtccgcatgcgcagatcatggaagtcgtgaaaacggtcgcggcgaaaaacggcctgaacatcaaagtcgtcgaattctccgactacgtgcagccgaacgccgcgctcgccggcggcgatctggacgccaacagctatcagcacgacccgtatctgcaggcgcaggtgaaggaccgcggctacaagctgatccgcgtcgcggatacggtgacgtacccgatgggcatctactcgaagaaagtgaagtcgctcgccgagttgcagtcgggcgcgaagatcgcggtgccgaacgatccgaccaacggcggccgcgcacttctgttgctgcaaaagcagggcctgctgaaactgcgcgccgatgcggggctgaaggcgacgccgctcgacatcgtcgacaacccgaagaagctgaagatcgtcgaactcgacgccgcgcagattccgcgctcgctgaacgacgtggacgctgccgcgatcaataccaacttcgcgatggaagcgggtctgaagcccaagcaggatgccatcgcgattgaagatccgaagggcccttatgtgaacgtcatcgcgatccgcgaggcggacaggaataagccgtgggtcgccaaactggtcgcggcgtatcattcgccggaagtgaagcagttcgttgaaagcaaattcggcgggtcggtgatcaccgcgtgg

SEQ ID NO: 13073 - DNA, 714 bp, Burkholderia fungorum
ttgatccgccccgtctttgagcctgaaactctgcctgtcgaagcgacgggcgccgatctgccgccagtggccggcgaccgtctcacgcctgacggtctgcgcgcacgcttcgagcaacctcttgcctggacccccgagcctttcgtcgaagcgccctggcgcgacacccacgccgatccgcgagtcgcggcagtgctggtgccgctggtgattcgcgagcgcggtctgaccgtgctgctgacccagcgcgccgaccatctgaacgatcacgcagggcaggtgagcttcccgggcggccgtcacgaacccttcgatgccgacgccaccgcgactgcgttgcgcgaagcacaggaggaggtcggtctcgcgccatcgcgtgtggaaattctcggcgcattgcccgactatctgaccggcaccggctttcgcgtgacgccggttatcggcttagtgcatccgccgttcaccgtgaaagcggacgcgctcgaagtggccgaagtcttcgaagtgccgctcgcctttctgatgaaccccgcccatcacgaggaacgcgtgttccgctacgagggcggcgagcggcgttttttcgccatgccgtatccgcgcggcacgtcggcagaagccgggcagagcgggagcgaactcggcgggcactacttcatctggggcgcgacggctgcgatgttgcgcaacttctatcgttttcttgcggcg

SEQ ID NO: 13074 - DNA, 2469 bp, Burkholderia fungorum
atgactgaaacgaacaattcgcaacccgacaacagctacggcgcatcctcgattcagatcctcgaaggtctggaggcggtgcgcaagcggcccgggatgtacatcggggatacatcggacgggaccggtctgcatcacctcgtatttgaagtgctggacaactccatcgacgaagcgttggcggggcattgcaacgacatccaggtgatcattcacgcggacaactccatttccatcaccgacaacggccgcggcgtgccgaccggcctgaagatggacgacaagcacgatccgaagcgcagcgccgctgaaatcgtgatgaccgagttgcacgccggcggcaagttcgaccagaacagctacaaggtgtccggcggcctgcacggcgtgggcgtgtcgtgcgtgaacgcattgtccgcgtggctgcgtttgaccattcgccgcgacggcaagaagcacttcatggaattccaccgtggcgtgccgcagaaccgcattatcgaagagatcgacggcgtggctgtttcgccgattcaagtcaccggcgagaccgaaaaccgcggcaccgaagtgcactttctcgccgacgagacgattttcggcaacatcgaatatcactacgacattctggccaagcggattcgcgaactgtcgttcctgaataacggcgtgcgaatcaagctgaccgatcagcgcaccggcaaggaagaagatttcgcgttcgtaggcggcgtgaagggctttgtcgagtacatcaacaagaacaagtccgtgctgcacccgaacattttccacatcagcggcgagaaagacggcgtgggcgtggaagtggcgatgcagtggaacgacagctacaacgaaaacgtgctgtgcttcacgaacaacattccgcagcgcgatggtgggacgcacctgaccggattgcgtgcggcgatgacgcgcgtgttgaacaagtacatcaacgatcacgaagttgcgaagaaggcgaaggtcgagacttctggcgacgatatgcgtgaagggttgtcgtgcgtgttgtcggtgaaggtgccggagccgaagttcagcgcgcagacgaaggacaagctggtgtcgtcggaagtgcgcgcgccggtggaggatgtggtcgcgaaggcgctcgaagagtttctgctcgagacgccgaatgacgcgaagattatttgcagcaagattgtcgatgccgcgcgcgcgcgggatgcggcccggaaggcgcgtgaaatgacgcgtcgcaagggtgtgctcgacggcgtgggtctgcctgggaagctggcggattgccaggagaaggacccggcgaagtccgagatttatatcgtcgaaggtgactcggcaggcgggtcggccaagcagggccgggatcggaagtttcaggcgattttgccgctgcgcggcaaggtgctgaatgtggagaaggcgaggtatgacaagctgctttcttcggagcagattgttacgctgattactgctctcggttgcgggattggtaaggaagactacaacctcgataagctgcgttatcaccgcatcatcatcatgaccgatgctgacgttgacggtgcgcacatccggacgttgttgctgacgttcttctatcggcagatgccggagatgatcgagcgtgggtatatctatatcgcgcagccgccgctgttcaagatcaaggcgggcaaggacgaacggtatttgaaggatgaggctgaggtcaatgctcacattctgaagctggcgttgcaggggtcggagttgctcgcttcggaaggcgctacgccgattactggagatgcgttgggtgagttggctcgggcttatctgttggctcaggctgtggttaatcgtttgagccggttgtatgacgctggggcgctcgaggctgtgatggatggggtcgttgtcgatctgtccagcgaggaagcggctgaagtgtcggcggcggcgcttgaggccaagttgcgggatgatgcgttgaagcctgaagttaaggtcacgacgatgtatgacccggttcgtgaactgcgctcgctgcgggttgcgcggacgcatcacgggaatcagaagatttctgtgctggatcaggattttcagctcactgctgattaccagcagctgatcaacaccgctaatacgtttaaggggttgattgggacgggtgccgtcatcaaacgtggcgaacggagtatggctgttactgacttcaagtccgctatgaagtggttgttggctgatgccgagcgaaatatctcgaagcagcgctataagggcctcggtgaaatgaatcctgggcagctttgggagactacgatggatccgacggtgcgtcgtcttcttcgggtgcagatcgaggatgctattgcggctgatggcattttcaccacgctcatgggggatgatgtggagccgcgtagggcgtttattgagtcgaatgcgttgcgggcggggaatatcgacgtt

SEQ ID NO: 13075 - DNA, 726 bp, Burkholderia fungorum
atcacgtacatccaccgatatcgacgacgtgcgactttttcgatgaaaccgacccgtccctttcaccagacgcccgtcatcacgatcgacggcccgagtgcctccggcaaaggcaccgtggccgcgctggttgccgcgagcctcggcttccatttgctggacagcggcgcgctgtaccgtctcgccgcgcttgccagcctgcgctacaccattgaggcgcacgacgtcgacgcccttgtaaagctgatcgacgatctgcatatcacttttcgcgaagggctggcgcaactcgacggcgtcgacgtgtcggccgaaattcgcgccgaggaagtgggcagccgcgcctcggcgatcgccgtgcacgcgcccgtgcgcgccgcgctggtggcgcgccagcgggcgttccgtaaggaaccggggctggttgccgacggccgcgacatgggcacggtcatcttccaggatgccgtgctgaaggtgttcatgactgccagcgtcgaggcccgcgcggcgcggcggcataagcaattgatccaaaaaggattttctgctaatatagatgacttgctccgggatttgcgtgagcgcgacgagcgtgacagtcagcgcgtagccgcgccgctcaagcctgcagcggatgcaaagctgctcgatacctccgcattgtcggtcgaccaggcggtcgagcaggtggtgcaatggtatgaagctttagtcccgcatgcc

SEQ ID NO: 13076 - DNA, 1731 bp, Burkholderia fungorum
atgcaaattttgatttttatgtccgacctgcaaacctctaccccgaataccgaatcttttgcggctctgttcgaagagtcgctgaccaagcaagacatgcgcgccggcgaagtgatctccgccgaagtcgtgcgtgttgaccacaacttcgtggtcgtcaacgctggtctcaagtccgaagcctacatcccgctcgaagagttcctgaacgacgcgggcgaggtagaagtgcaggcgggcgacttcgtttccgtcgcgatcgacgcgctggaaaacggctatggcgacacgatcctgtcgcgcgacaaggcgaagcgcctcgcttcgtggctgtcgctggaaaaggctctcgacaacaacgaactcgtgaccggcacgatcacgggcaaggtcaagggcggcatgaccgtcatggtcaacggcatccgcgcgttcctgccgggttcgctggtcgacacgcgtccggtcaaggacacgaccccgtacgaaggcaagacgctggaattccgcgtcatcaagctcgaccgcaaacgtaacaacgtcgtgctgtcgcgccgtgccgtgatcgaagcgacccaaggcgaagagcgcgcaaagctgctcgaaacgctgaaggaaggcgcgatcgtggaaggcgtggtgaagaacatcaccgattacggcgcgttcgtggacctcggcggtatcgacggcctgctgcacatcaccgatatcgcatggcgtcgtgtgcgtcacccgagcgaagtgctgtcggttggccaggaagtcaccgctaagatcctcaagttcgatcaagaaaagaaccgcgtttcgctgggcatcaagcaactgggcgacgatccgtgggaaggtatctcgcgccgttacccgtcgggcacgcgcctgttcggtaaggtcaccaacatcaccgactacggcgcattcgtcgaagtcgaatcgggcatcgaaggcctggttcacgtgtcggaaatggactggacgaacaagaacgttgcaccgtcgaaggttgtgcaactgggcgacgaagtcgaagtcatggttctcgaaatcgacgaagaccgccgccgtatcagcctcggcatgaagcaatgcaagccgaacccctgggacgacttcagccgcaacttcaagaagggcgacaagctgcaaggcgcaatcaagtcgatcaccgacttcggcgtcttcattggtctgccgggcggtatcgacggtctggttcacctgtcggacctgtcgtggtcggaaacgggcgaagaagcggttcgcaagtacaagaagggcgacgaagtggaagcgatcgttctcggcatcgacgtcgagaaggaacgcatttcgctgggcatcaagcagctcgaaggcgacccgttcagcaacttcgttgccatgaacgacaagggttcgatcgtcgacggcgtggtcaagacggtggacgcgaagggcgccgtggttcagctgtcggctgaagtcgaaggctacctgcgcgcttcggaaatcgcacaagaccgcgtggaagacgctcgcaacgtgctgaaggacggcgacaaggtcaatgcgatgatcatcaacatcgatcgcaagtcgcgcggtatcaacctgtcgatcaaggccaaggattcggctgagcaacaggaagcgatccgcggcctggcttcgtcggactcgagctcggctgccaccggcacgacgaacctcggcgcgctgctgaaggccaagctcgacggccagaaccag

SEQ ID NO: 13077 - DNA, 1401 bp, Burkholderia fungorum
atgaaaatcaccattatcggcacgggctacgtgggtctcgtcactggcgcgtgtctcgccgagatcggccacgacgtcttctgtctggacgtcgatccgcgcaagatcgaaatcctcaataacggcggcgtgccgattcacgagccgggcttgcaggagatgatcgcccgcacacgcgcggcgcgccgcatcacgttttccaccgatgtcgaagccggcgtcgcgcacggcgacgtgcagttcatcgccgtcggcacgccgccggacgaagacggttcggccgatctgcaatatgtgctcgaagcggcccgcaacatcggccgcaccatgaacggcttcaaggtgatcgtcgacaaatcgacggtgccggtcggcaccgcgcagcgcgtgcgcgcggtggtcgaagaagagctggccaaacgcggacttgccggcagcgcgcaacacggcttctcggtggtgtccaatcccgaattcctgaaggaaggcgcggcggtcgacgacttcatgcgccccgaccgcatcgtgatcggcctcgacgaagacgaagccggctcgcgcgcgcgcgaactgatgaagcgtctgtacgcgccgttcaaccgcaatcacgaacgcacgctgtacatggacgtgcgctcggccgaattcacgaaatacgcggcgaatgcgatgctcgccacccgcatctcgttcatgaacgaaatgtcgaatctggcggaccgcgtcggcgcggatatcgaggcggtgcgccgcggcatcggttccgatccacggatcggctatcacttcctgtatgccggttgcggctatggcggctcgtgcttccccaaagacgtccaggcgctgatccgcacggccagcgaaagcggccacaatctgcgcattctcgaagcggtcgaagaagtgaacgacaggcagaaagacgtgctggtgcacaagatcacgagcaagctcggcaacgatctgagcggccgcacgttcgcggtgtggggtctcgcgttcaagcccaataccgacgacatgcgcgaggcgccgagccgccgcctgatcgcggaactgctggcgcgcggcgcgcatgtgcgcgcgtacgatccggtcgcggtgaccgaagcgcgccgcgtattcgccatcgacctgcatgacgcaccggagcagttcgcgcgtctcaccttcgcgaccacgcaggacgaaacgctcacgggcgccgacgccctcgtgatcgtgaccgaatggaaagaattcaagagcccggacttcgtccatctgaaatcggtgctgaaatcgccgctgattttcgacggacgcaacctgtatgaaccggacgcgatgaccgagctcggcatcgactatcactcgattggacgcccttatgcccaaccctctgaacttccggccgatgtc

SEQ ID NO: 13078 - DNA, 1227 bp, Burkholderia fungorum
atgaccgtcaagcttgctctgtctgcacgaaaccggctacgcaccagaagcctggccgccgcactgtccgtcgcatcgtgcatgttcatggcaaccagtcccgcgatcgcgcaaagcgtcggcaaaaagccacctgtgctgctcgcgcaaagccagccgcaacccgctgtgccgcaagggcaaacgtttgaagaagagatcatccctcagcgctacgcgaacaatcccaatgtggacgcgttcatcaacgacatgaccgcgcgttacgacttcgacgaggccgcactgcatgcgctctttgccggcgtgagttattcggcaaccgcggtcaagctcgtaacgccgtcaccctcgccgtcggtgaagaactggcgcgtgtatcagtcgcgctttctcgaccaggtccgcatcaatgccggcgtgcgtttctggcgcgcgaaccaggccacgctgcagcgtgcctatgaggaattcggcgtgccgccggaagtgatcgtcggcattatcggcgtggagacgatctatgggcgcttcatgggcaacttccgtgtgctcgacgcgctcaccacgctcagcttcgattatccgaacaccgccaatcgcgcggatcgccaggcaaccttccgcaagaatctcgaagactacctggtgtggacgcgcgactcgcagatcgacccgacctcggtgctgggctcgtacaccggcgcgatcggcattccgcagttcctgccgagcagcatcgtgcaatacgcggtgagctacgacggcaaccggcagatcgacctgcgcacgagccaggcggacgcgattggcagcgtggcgaattatctgcgtcagaacggctgggaaagcggccggccggtggtgtggaagatcggctcggacgccggcagcctgggcgtcgcgcaagcagccgccgacggtcagccggagccgcactggccgctcgatcaattgctgcgcgccggcttgctgctgaacgagcccggcgtggatatcgcgtcggaagcgggcacgccggtgacggtagtggatctgccctcgccgggacgcggcaccgagttcgtgctcggcctgaagaatttctatgtgctgacgcgctataaccgcagtttcttctatgcgctcgcggtctaccaactgggccagcgcgtcaaggcgcagatggaagcaagcgacgccgcaaacgccggcaacggcgcggcagcgccggctggcgcatcgcaa

SEQ ID NO: 13079 - DNA, 924 bp, Burkholderia fungorum
atgatcatccgcccgcatctccattggttccgcatgctgctcgcctggcgaggctcagtccttccgcaattgctgccgcggctcttcctgatcttctgcatttcgatcgtggccgtagcggcccacgaccaccttctgccgatctcgctgaatctcaacaccaccgcgcccttctccctgataggcattgcgctcgcggtgtttctcggcttcaggaacaacgccagttacgaccgctggtgggaagcccgcaagctctggggccagttgctcaacgagtcgcgctcgctcactcgccaggtgctcacgttgccggtccggccgttgccggaagaagacgtcaaggagtttttcacggtgctcggcgcccttcctcacgcgctgcgtcatcagcttcgcaggagcgatccgcgcgaagacctcgccgcacggctaccgcaagccctcttcgagcgcgtcatggcgtcgcggtacaagccggccgccttgatgctctatctcggcgaatgggtgcaacgccacgcccgggcaggcgagatcgatccgatggcggtcatcgccttcgaccggaatctgaatggtatttcggatgtgatcggcggctgcgagcgcattgcttctacgccgctgccgttcgcatattcggtgatgattcaccgcacggtgtacttcttctgcgcgtcgttgccgttcggactggtggacagcatcggcatctttacgcccgttttcgcggtgttcgtggcgtacacgttcatggcgcacgaagccatcgcgtcgcagatcgaagagcctttcggcaccgacgacaacgacctcgcgcttcacatgatgtcggtggtgatcgaggacgccatgcgcgacctgctcggcgaaccggctctgccgctgccgagcccggaagcggaaggctacatactcaat

SEQ ID NO: 13080 - DNA, 1779 bp, Burkholderia fungorum
atgagcgcggcgacgcattcaggcggatacggtggacctcctctggtcgtgggcgtctggcgtggccgctatctgcggttcaccggccagcagttcgtgctgctcgcggcaccggcgcgctcgggcaagggcgtgggcatcgtggtgcccaatctgctcagctacccggattcggtggttgtgctcgacatcaagcaggagaacttcaacctgaccgcaggattccgtcgtgcgcacgggcatgacgtgtacctgttcaacccgtttgccgaggacggccgtacgcaccggtataacccgctgtcggcgatttcggatggcgtattccgcgttggcgacatcctggcgatcggctacgcgctgtatccggttggcggtcacgacgacttctggaaggaccaggcacgcaatctctttctcgggatcgtgctgctgctgtgcgagtggcgcgatgcgtgccgcaccggcaacaccgatgtgcccgactacccggtgacgatgggcgaggtactgcggcagtcatcgggcaacggcatgcccgtcaaggcatacctgcagcaggcgctgctgcagaaccggcgactgctcagtggcgcgtgcgtcgatgcgctcaaccgctttctcgcgaacgacgacaaggtgctcgcgagcattctcgcaaccttcaatgcgccgctcacgatctgggccaatccgattgtcgacgccgcgacgagtgccaatgacttcgacctgcgcgatgtgcgcaaacggcgcatgtcggtctatgtcgggatcacgccggaccacctgagcgaggcagcgctgctcgtcaaccttgtgttctcacaactcgtcaaccttaatacgcgacaactgccccaggacagtccggagctgaaggtccagtgtctgctgctgatggacgaattcacgtcggttggcaagattcacatcattgcccgcgcagtcgcctatatggcgggatacaacctgcggctgctctcgatcgtgcagtcggtgtcgcagctcgagtcggtctatggccgggcggacgccaggacgttcgtcaccaatcacgcgatgcagatcatctatgcgccgcgtgagcagaaggacgcgaacgaatactcggagatgctcggtaccttcacggaccgctcgcgcagcgtgagccggtcgaacgcggtatttggcgggcgcggcgggtcgagcgagagtttctctgagcagcgccgtccgctgctgctgccgcaggagctgaaggaactcggacgtgagaaggaaattatcctgctcgaaaatacgaagccgatcctggcggagcggatctgctactggcgcgaccctgttttcacgtcacgtctggtggctgcgccagcgattccagcgatggatctcgtgcgcttcatcgcccaggttgagcggcgggtgagggatgtgcaaccggacgacgtggacgaagccggcgtgatgcacattcccccggagtatctggaagtgctgcaggcctgggatccacgcgacctgccacggcatctcaacgacgtgaccgacgaagaggcggccgcctacgtcgagcgacatttcatgctgctgggcgtgcccgctgcgcgcgtggccgtggcagcgcgccgcctgtcgccgtccgatcttgatgtggcggaactgcgccccgcggatcgagcgccgaaacgcaagtccgcgcgcagcacaggtgcctcgcggaaacaacacgggcccgcgacatcgcgcccaactgacggctcgaacgtggtgccgcttcacggagaacgccga

SEQ ID NO: 13081 - DNA, 1392 bp, Burkholderia fungorum
gtggggcgtgggctacatgctggccgcggacgtcgactgatgacgcgctcgctgctgcaaagagcgctgccgagaacactgctggcgcgcaatatcgcgctgctgatcgtgctcgtgatgctgagccaggtgtgcgtgctcggcgtgctgctgcactatgtgcagcggcctcgcgtggagcgcgccgcggccgtcttcgccacctatgtgagcacgctcgacaacctgctcgcggctacgccgctcaatgcacgcagccaattgacggcgcgcctcgacgcgcgcgcgcaggtcccggccgaagccttcgagacgccgccgcggaccttcatgcgcggctatcgcctctatcaacgcagcatgtttctcgacagcctgcgcgcgcacctgcccgccgacatgcccgcgctatggcaagccgtggacggccagcgcctgtggatccggatgcacgcgccggccgatgcaccgaacgcgccgtactggatcgcgctgccggttcccgaggacgcgcagggcagcggactcgacgccgccatcctgctctcgctcggactgggcgcgttggcggcgttgactggctatctgatccagcgccacctgaaccagccgcttcaggagttgacgcgcgcggcgcgccgcgtgagcgccggagaaatgcccgcgccgctgccaaccgacggtcccaccgaaatcgccgccgtgagcggcgctttcaatcagatgacacaggcgttacagcaggccgaggcgtcgcgtgcattgatgctggccggcatctcgcacgacatccgcacgccgctcaccaagctgcggctttctatggcaatggcaatgccggacggcagcgacagcagcttcgtggtcgccgccgagtcgtatctggatcagatcgaaacgatcctgcagcagttcatggattacgccggcagcggcgagcgcgagcaacgggaaccgggcgatctgaatgcgctgatcgaacggctcgcgggcgatttcgcgggactcgggcacgagttcgagctctctctcgcgagcctgccggccgtgccgtaccggcctatcagcatgatgcggctgctgatgaacctgatgcagaacgcgatcgtgtacggcggcacggggctggccgtgcgaagctgggcgacgcccgattcggtgatcgtcgccgtcggcgatcgtggtaaaggcctttcggcgcaggagctggagcaactgaaggcgccgttccagcgcggccgcaatgcgcgctcgcatagcggcggcaccggcttggggctggcgatcgtcgagcggatcgcgcggctgcatggcggcggcctgcagtttcatgcgcgcgagggaggcgggctggaggtgtgggtggtgttgccgctcaatggctcgatgcgc

SEQ ID NO: 13082 - DNA, 576 bp, Burkholderia fungorum
ttgaagaaaaacattctgctcgccgcgggcgcgctggccgctgtattgtcgttcaacgcctcggcagccgacacgtaccagctcgacccgacgcacacctacccgagcttcgaaaccgaccacttcggcggcatttcgatctggcgcggcaagttcaagaagagcagcggcaccgtggtgctggatcgcgcggcgaagaccggcacggtcgacgtgacgatcgacatgagctcggtggatatcggcaacgacaagctcgacgcggaactggtcacggacaagttcttcgacgccgccaagtacccgagcgcgacctacaagggcacgcagatccgcttcgacggcgacaagccggtggaagtgatcggcacgctgacgatgcacggcatcaccaagccggtcaatctgaagatcgagtcgttcaagtgctttgtgaacccgatgctcaagcgtgaagtgtgcggcacggaatccaccgcgacgttcaatcgcgacgacttcggcatcgacttcggcaagacttacggtttcaagatgcagaccacgttgcatattcaggcggaaggcatcaagcag

SEQ ID NO: 13083 - DNA, 1668 bp, Burkholderia fungorum
ttgagcttcgtcacgcgggcgcatgacatcgcgcccggcgtgcctccggcgcgttcgcagcgccgcccgcaagaggcccaccatgcgcggcgcatcgtgatgccgcgcatgccagcatcgctccagacaaaccctgattgctgcgttgaatccgccgctgctatcgttcgctggtcgtgtggaagcgcttccacttcagccttcagtctggctgtgcaggactttcgccgtacccggttcaaccacccaggagaatccgtggcaaacgacgcacccgctgtatccgacgctccatctccccattctcaatcgctcgctgatcctttcgcgccgcccgcggactcgtcgttgtggcgcaagaactttctgctcggcgcggccacggcttcgtatcagatcgaaggcgcggtgaacgaagacggccgcctgccgtccatctgggacaccttctcggcaatacccggcaaggtgctggccggcgacaccggtgccgtggcctgcgatcactatcatcgctgggaagcggacgtggacatgctggccgggcttggcttcgaaggctaccggctctctattgcctggccgcgcgtgatggatacggccggcgtgccgaaccgcaaagggctcgagttctacaagcgcctgctggcacggctcaaggagaagggcatcgcgaccttcgtcacgctgtatcactgggacttgccgcagcatctggaagatcgcggcggctggctgaaccgcgataccgcataccgtttcgccgactacgccgacctcatgagccgcgaactggccggcagcgtggacggttggatgacgctgaacgaaccctggtgctcggcgtatctcggctacggcaacggccatcacgcgcctgggcttgccgacgcgcgctatgccacgcaggccatgcatcatttgctgctggcgcacggtctcgccatgccggtgctgcgcgccaacgatccggcttcgcagaagggcgttgtcgccaacattggacgcggcacggccaacagcgggagcgccgccgatcagcgcgcggcgcatctgttcgaggtgcagcacaacgcgtggattctcgatccgctgctggaaggccgctacccgcgggatctattcgaactgtggccgggtaccgagccgctggtgctggacggcgatatgcaaaccgttgccgcgccgctggacttcctcggcatcaactactatttccgcaccaatgttgcgagcgacggtgcgcatggtttcagggaagtgccgctccaaggcgtggagcgcacgcagatgggttgggaagtgtatccggacggcttgcgcgatctgctgatcggcttcaaggccacctaccggaatctgccgccgatctacatcaccgaaaacggcatggcatcggacgacaaggtgatcgacggccgggtggatgacatgcaacgcatttcgtttctgaagcgccatcttgccgcggtggatgaagcgatcaaggcaggcgtggagattcgcggctattttctgtggtcgctgatggataacttcgagtgggcgttcgggtacgagcggcgctttggtgtcgtgcacgtggattacgctacgcagaaacgcacggttaaacgcagtgccgaactggtgtcgaaattcctgaaggagcgcaaggcgcgaagggag

SEQ ID NO: 13084 - DNA, 1332 bp, Burkholderia fungorum
gtgtggccaattcacaatcagccgcgcgaatgccagtcctccacggtcttattgcggttccgcgagtaccagcgggaagcggatctcgaacgtagtccccacaccttcgcgcgacgcaaaatcgatctgcccgcccaacacgcggcacagttccttgacgatcgcgagaccgagacccgtgccgggaatatcctcgcccgcggcgcgctcgaattcgtcgaacacgcggtccgcgtccgaaggcgcaatacccacgccggtatcggagacgcgaatcgaccagtgcgactcgtcggccatcgcgaagttgagttcgatgccgccggacctggtgtacttggtcgcgttggaaagcagattgacagcaatctgtttgagtttgagacgattggacgtgaccgccgtcaatgcaggatcaaaagctgcatgcaacgtgagccctttcgcctcgatcgacggacgcgaagaggcgaccagttcgtcgtagagttcccgcagttcgacctgttcgagtgtgagcggagcgccgtcgccgagtacgacggagtattcgacgatctgatcgacgagctgtttcatatccgcggcctggcggttcgccagcgtcaacgcggtatcggctttgccgggcgcgcgcgcgatcaattgcagcgcgatggaaaatgcattcagaaagttgcgcagatcatgcaccacgctgcgcgtgatctgcatgcgcgactcgtacaggtcgctcaccaggcgctgtttcagcgtgagttcgtgattggcgcgttcgagccggccggtgtattcgtcgatcttgcggtcgcgttcgctcaccacttccttgaccgacgtgagagtgaccatactgagcgtttcggcaatcaggcgccgtgcccgactctcgtggcggcgcgtgaacgattgatcgagactggcgaattcttcaagcacgtcggcgagcgtctgatgaaagagatcgagctcacgcaccagttcctcgatacgatagccctggcgccagcgcaccttgccatgttttctcgcatcgagctcgatgcccggctcgacccgttcgagatcttcgacatccaatgccagacacaggccttcaagaatttccggcagatgatcggcgagttgctgataggtaagtttgtccgcttcgatcagatcgacgtcgccgaatacggcattcatccactgccgggtgagtcgggtgcgttccgcgcgaatgaaatcggcaaaattgcgcagggggctagtacgtatatcggtcatggtgtcgcattaggatcggttcgcgacattatcaccgcaatcgcgcgctatggaacacctcttgca

SEQ ID NO: 13085 - DNA, 948 bp, Burkholderia fungorum
gtgagcgaactattcatcccgaccgaccatcagcatgtccagatcaagcccggccagcgcaccgggctgcccgtcatgatcggcgtgcactcaacgttgcttggccccgccattggcggcctgcggatcaagccctatgcgcgcggcgccgacgccgtcgcggacgtattgcgtctttcgcaggcgatgactgtcaaggccgccgctatcgacaatggaacggggggcggcaaggccgttgtgccgttgccggtcgggtcgaatcttagcgcatcgctgaaagacgcgatcctgctcgacgtcgccgatcaggtacatgcgctgggcggcatctatcacgtcggtcccgatgtcgggtccggcgagtccgacatggacgccattcgccgccgtacgccctatgtcggcggtttctcgaaacgggcgggcggcgcgggcggcacgacgtacggtacgtatatcggtctcgatgcggcgatccgcacggccgtccggcaggttctgaatgcagactcgttgcaaggcctgcatgtcagcgtggttggcctcggcggaatcggcacgctgatcgcgagggcctatgccgccgagggcgcgcgcctgacggtgtccgacatcgatgaaacacgccggcccctcgcagacgaaatcggcgcagcatgggtatcgcccgaagaagccatgacggtacgctgcgacgtcctcgcaccttgcgcgctcggcggcgtgctgactcgcgagatcgtgccccggctcacagcacgcgtgatctgcggcgccgcgaacaaccagctcgcgacggaagacatcgccgatgcgctgcgatcccgggaaaccgtctacgtcccggacttcatcgccaacgcgggcggtctcatgtatgcgtcgggtatagaactgcatcacgcacgcccgacgcatccgacgcccatacccgtgcaaccgtgg

SEQ ID NO: 13086 - DNA, 909 bp, Burkholderia fungorum
atgatcaagcctaacaagacgctttccaatagcgtgctgacgttcggattcctgtttctctacattccgatcatcagcctcgtggtgtactcgttcaacgaatcgaagctcgtcacggtatggtccggcttttccctcaaatggtacggcgcgctgttgcacgacggcgaactgctgaacgcggcatggctttcgttgaagatcggtctgctgaccgcgtgcgcctccgttgtgatcggcacgtgggccggtttcgtgctcgcgcgcttcggacgctttcgcggcttcacgctgttcgccggcatgatcaacgcgccgctcgtgattcctgaagtgattcagggtatctcgctgctgctgctgttcgtcgcactcgaacagatgctcggctggccgaaggggcgcggtctcttcacgatctggatcggccacgtgatgctgtgcgtgtcgtatgtggcgatcgtcgtgcaatcgcgtgtgaaagagctgaacaagtcgctcgaagaagccgcgctcgatctcggcgccacgccattcaaggtgttcttcctgatcaccctgccgctgatctcgcaggcgctgatgtccggctggctgctgtcgttcacgctttctttcgacgacctcgtactctccgcattcctgtccgggccgggctcgaccacgctgccgctcgtcgtgttctcgcgtgtgcgcctcggcctgaatccggaaatgaatgcactcgccacgatcttcatcaccacggtgacgatcggcgtgattgccgtgaaccgctggatgcagttgcgcgagcgcaaacgcaaccgcgacatgcagatggcttttgcgcttgccgaagccgcagatcccttgccctccgctccacaacaagccgccgtacggaagtcgctcgatacggcacgtgca

SEQ ID NO: 13087 - DNA, 966 bp, Burkholderia fungorum
atgactgaactcgtctatggcgacggcgcgatccgccgcgcgtcactctatggctcgtcgatcgaaaacacctacgcgggcgtgctgtcgttcatgcgccgcaagtacacgcgtgaactcgacggcgtcgacgtcgtggtctcgggcgtgccgctcgatctggccaccacgtttcgctccggagcgcgcctcggacccgcggcggtgcgtgcggccagcgtgcagctgtcggaactgcatccgtatccgtggggtttcaatccgttcgacgacctcgccgtgaccgattatggcgactgctggttcgacgcgcacaatccgctcacgatcaaggcgtccatcgtcgagcatgcgcgcacgattctgcgctcgggcgcaaagatgctgacactcggcggcgatcactacatgacctatccgctgttgatcgcgcatgcggagaagtacggcagaccggtctcgctgattcatttcgacgcccattgcgatacctgggccgacgacagtcccgacagcctgaatcacggttcgatgttctacaaggcggtgaaggacggcctgatcgatccggagacctcggtgcagatcggcattcgcacgtggaatgacgatttcatgggcatcaatattctcgacgccgcctgggtgcacgagcatggcacgcgagcgacggtggagcggattgcgtcgatcgtgggggaacgtcccgcctatttgacgttcgatatcgactgtctcgatccggcgttcgcgccgggcacgggcacgccggtggcgggtggcttgtcgtcggcgcagggactggcgatcgtgcgcgcgctcggtgccttgaatctggtgggcgcggacgtcgtggaagtcgcacccgcttatgaccagagcgagatcacggcgattgccgctgcgcatatcgcgtgcgatctgttgtgcctgtggcgtcaacgcaaggttgcgcaacgcggcgct

SEQ ID NO: 13088 - DNA, 894 bp, Burkholderia fungorum
atgaggccgtgcttgaaagcgagcagcgtttccggtttccggctgctggtgcaaggggtgaccgattacgccatcttcatgctctcgcccgacgggtatgtgacgaactggaacagcggcgcccggcggatcaagggctacagcgccgaagagattgtcggttcgcatttctcacggttctatacgccggaagacgccgctgcgggctcaccccagcgcggccttgagacggctgcccgcgaaggccggttcgaagcggaaggccggcgcgtgcgtcgggacgggacgactttctgggcacacgtggtactcgatgcaatccgtgatgacgagggaaagccctcggggtttgcgaagatcacgcgggacatcaccgagcggcgcgaggtcaatgaacttctgggaaaaacgcgggccgcgctgttccaggcgcagaaaatggaggcgatcggcaagctgacgggtggcgtcgcgcatgacttcaacaacgtcctgcaggtgctgaggggcaacctcgaactgctcgagaaccggcatcgccgggacgcctggagcggtgagcggctcgcccatgcgatcgatgccgtcgagcggggtgccaaactcgcgtcgcaactcctcgcgtttggccggcggcaggtgttgcgcccggttgtcgtcaatctttcagcggcggtgcacggaatagataacatgcttgctcgcgcgctgggtgacacgatcaatgtggagacggtggtggcggcgggcctatggaatgcgctcgtcgatatccatcagctcgagaatgtgctgctgaacctggctatcaatgcgcgcgacgcgatgccctcaggggggcgtctcaccatcgaccatccgggtttatctgccaaggtcaacggaaacggctgt

SEQ ID NO: 13089 - DNA, 885 bp, Burkholderia fungorum
atgacccggcccgcgaacgtcgtgccattgcccgtgacccgcgctcaatccgctggcgccagccttgcgacggaccgtgtgaatacgacgtgcgacagggtcactggagccgacgcgtcgatcttcgagttgcgcgacgtgagcttcgcgctgccggagcgcaccctgctgcgctcgctcacgctgaccttgccggcccgccgcgtgatcggactgatcggtcacaacggctctggcaagtcgacgctcatcaagattctggcgcgccagcagtcggcgagcggcggccagatcctgttcgaaggcaagcctcttgagcagtggccgacgcgtgcgttcgcgcagaagctcgcgtatctgccgcagcacacgccgtcggcggcggggattctggtgcgcgaactggtggcgttcggccgttatccgtggcgtggcgcgctcggccgtttcaccgacgcggaccgcgccaaggtcgacgaagcgatggtgctcaccgacgtgaccggcttcgctgaccggttggtcgacacgctttcgggtggcgagcgccagcgggtctggctcgccatgctgatcgcgcaggacgccgactatctgctcctcgacgaaccgatctcggcgctcgacgtcgcgcatcaggtcgaggtgctgtcgctggtgcatcggctatccacggagcgtggtatcggcatcatcgtggtgttgcacgacgtcaacatggccgcgcgctattgcgacgaaatcgtcgcgctgcacagtggcaaactgatcgcgcaaggcacgccggatgaaatcctgacccccgcgcaattgcaggcgatctacggcatttcgatgggcgtgatgcgacatcccgacaccggcgagccggtcagttatgtccgg

SEQ ID NO: 13090 - DNA, 642 bp, Burkholderia fungorum
atgcaaaacctgatcgttgctgtcgttgcctacctgatcggttcggtgtcgttcgccgtgatcgtgagcgccgcgatgggcctcgacgacccgcgctcgtacggctcgggcaatccgggcgccaccaacgtgctgcgcagcggcagcaagaaggccgcgattctcacgctgatcggcgacgcgttcaagggctggctgccggtgtggttcgtcgtgcacttcggcgcgcgctatgggctcgacgacacgtcggtggcgatcgcggcggttgccgtgtttctcggccacctgtatccggctttctttcgcttcaagggcggcaagggcgtggcgaccgcagcgggcgtgctgcttgcgatcaatccgatcctcggcgtggctaccttgctgacctggctgatcgtggcattcttcacgcgctattcgtcgctggcggcgttggccgcggcggtgttcgcgccgatcttcgacggctttctgttcgggccgcatatcatcgcgctggcgattgtcgtgatgagctcgctgctggtgtggcgccatcgcggcaatattgccaagctgatgcgcgggcaggaaagccggattggcgacaggaagaaggcggatgcggcggcaaagccgacggcggggagcgacgtc

SEQ ID NO: 13091 - DNA, 1566 bp, Burkholderia fungorum
atgttgatcaaaccgttccgctcgatcgaatcggcggccaccgcaacgcataactggcggcgccggcagattctgcgcgcgggtgcgtccacgctcgtgctcggtctcgtcgcgccgcgcctcgcctgggcgagttcggtgctcggcgtgcgggtctggccggcgcgcgactacacacgcgtgacgatcgaatccgatcagcctctgcagaacgcacagcagttgctgcagggaccggaccggctggtggtcgacctgagcggcctcgatctggaccaggcgttgaaagacctcgtgtcgaagatcacgccgaacgatccgcagatccaatcggtgcgcgtcgggcaatatcagccgcatgtggtgcgcatggtgttcgacctgaagggctcggtgaagccgcaggtgttcacgctgccgccggtcggcgcgtacaaataccggctggtgttcgacctgtacccggcggtcgcgcctgacccgttgatggatctgctcgcgcagacggaacgcaagcagcagacgctgaacgaagagaacagcgcgccgccgcctgtcacgctgagcggccccggtactacgccgcccaccgccgacaacagtgaggcgttcttcgagcgttacgcgcagaacagcggcagcgggtccgcgccgggcgtgccgcgtccgcccgcgcgcgtcgcgccgacacccgttccgccgattcccggcaagcccgccgcgccggtggcgccacccacggccatcgcacgcaacaagggcaacggcggcaacggcgccagcacgctgggcgcggacgatgccggcagcgacgacacctacgcgttcaccaaccccaagtccggcaagagcaacacggtgcgtctgctgaccgtcgcgatcgaccccggtcatggcggcgaggacccgggcgcgatcggcggctcgggcacgtatgagaaacacgtcgcgctcgacatcgcgaagaagctgcgcgcgaagatcgacgcgcaacccaacatgcgcgccatgatgacgcgcgacgccgactttttcgtgccgctgaacgtacgtgtgcagaaggcgcggcgcgtcggcgcggacctgttcgtgtcgatccatgccgacgcgttcaccacgcccgacgcgaagggctcgtcggtgttcgcgctgtccgagcatggcgcgtcgagcgccgcggcgcgctggatggcgaacaaggagaactcgtcggatcagatcggcggcatcaacatcaagtccgccgacgctaccgtgaaccgcgcgctgttcgatatgtcgaccaccgcgcagattcgcgactccatgcgctacggcaacttcgtgctgaaggagatcggcggcatcaacaagctgcacaagggctcggtcgaacaggcggggttcgcggtgctgaaggcgccggacattccgtcgatcctcgtggagaccgcgttcatcagcaacccggacgaagagcgccgcctgaacgacgacgcgtatcgcgagaagatggccgatgcgatcatgaccggcatcaagcgctatttcgcggcaaatccgccgctcgcgaaaagccgcatgacg

SEQ ID NO: 13092 - DNA, 933 bp, Burkholderia fungorum
atgagcgataccttgatcgacgacgcgcccgccgcgtcacctctctttgttgccagctcggcgtcgatcgacgcattctgcgacgcgctgtggctcgaacatggcctgtcgcgcaacacgctcgacgcgtaccgccgcgatctgcgtctcttttgcgaatggctcgcgcagagccgcaatgcttcgctcgacaccgcaagcgaagccgatctgaacgcgtatagcgctgcacggcagaaggacaaatcgacctcggcgaacaggcggctctcggtgtttcgccgctactacggctgggcggtgcgcgagcatcgcgcgaaggtcgatccgacggtgcgcatccgttcggcgaaacagccgccgcgttttccgtccacgctcaccgaagcgcaagtcgaagcgctgctcggcgcgcccgacgtcgatacgccgttgggtctgcgcgaccgtacgatgctggagctgatgtacgcgagcggtctgcgcgtgaccgaactcgtcacgctgaaaaccgtggaagtgggcctgaacgagggcgtggtgcgcgtcatgggcaaaggctcgaaggagcgcctgattccgttcggcgaagaggcgcacggctggatcgaacgctatctgcgcgaggcgcggcccgcattgctcggcgcgcgcgcgacagacgcgctgttcgtgacgggccgcgcggagggtatgacgcgccagcagttctggaacatcatcaagcgtcacgcggcggcggccggtgtgaatgcgccgttgtcgccgcacacgttgcggcacgcgttcgccacgcatctgctcaatcacggcgccgacctgcgtgtcgtgcaactgctgctcggccacacggatatttcgaccacgcagatctacacgcacgtggcccgtgaacggttgaagtcgctgcatgcgcagcatcatccgcggggt

SEQ ID NO: 13093 - DNA, 1107 bp, Burkholderia fungorum
atggcaagcgtaactctgcgcaacatcaggaaggcgtacgacgacaacgaagtgatgcgcgacatcaacctcgatatcgccgacggcgagttcgtcgtgttcgtgggcccgagcggttgcggtaaatcgacgctgatgcggatgatcgccggcctcgaagatatcagcggcggcgatctcaccatcgacggcacgcgcatgaacgacgtgccgcccgccaagcgcggcatcgcaatggtgttccagtcgtacgcgctctatccgcacatgacgctatacgacaacatggcattcggcctgaaactcgccggcaccaaaaagccggaaatcgacgccgccgtgcgcaatgcggcgaagatcctgcacatcgaccatctgctcgatcgcaagccgaagcagttgtccggcggccagcgtcagcgcgtggcgatcggccgcgcgattacgcgcaagccgaaggtgttcctgttcgacgaaccgctgtcgaatctcgacgccgcgctgcgcgtgaaaatgcgcctcgaattcgcgcgtctgcatgacgaactgaagaccacgatgatctatgtgacgcacgatcaggtcgaagccatgacgctggcggacaagatcgtggtgctgtcggcgggcaatctggagcaggtcggcagcccgaccatgctgtatcacgcgccggccaatcgcttcgtggcgggattcatcggttcgccgaaaatgaacttcatggaaggggtggtgcagtcggtcacgcacgacggcgtcacggtacgctacgaaaccggcgagacgcagcgcgtggcggtggagccggcctcggtcaagcagggtgacaaggtgacggtcggcatccgccccgagcatctgcatgtgggcatggccgacgacggcgtctcggcccgcacgatggcggtcgaatcgctcggcgactcggcgtatctgtatgcagaatcgagcgtcgcgccggatggactgatcgcgcggattccaccgcttgagcggcataccaagggcgagatgcagaaactcggcgccgcgcccgagcattgccatctgttcgacagcgcaggcaaagcattccagcgcaagatcgtcgaagtgctagctgcg

SEQ ID NO: 13094 - DNA, 1017 bp, Burkholderia fungorum
ttggcgcgcgaggctcagtcaaagcgcgcgaaccggctgctatcatcggcgcacttcaagcgaaccgtcaccgtgcccaagtccacagaaaaattagatcttgctacccgcgccgcgtggctctactacgtcgccggcaatacccagaacgagatcgccgaaaagctccaggtgtcgcgcccggtcgcgcagcggctggtcgccttcgcggtggaaaagaatctgattcgcgtgcgcgtcgatcatcaactggccgattgcctcgcgctcgccgatcaactgtccaagcgctacggcctgagcatgtgcgaagtggtgccggtcgacagcgacacgccagaggaagtcgaccgcaagctggcggtagccggcgcgcaggtgatggagcgctatctcggcgaggaaaaaccgatggtggtcgcggtgagcagcggccgcacgctgaaggccgccgtcgatcagatcgcgcagctggaccgtccgcagcaccggctggtatcgatggtcggggcgatcgcccaggacggctcctcgaaccgctatgacgtcgcgctgcacatttcggagaagacgggcggcaagcattttctgctgccggcgccgctgctcgccgacagcgaagcggagcgcgcgcagtggtgcaatcaccggctgtaccggatcgtcgagtcgctgtcggcgcaggccgacgtggcgttcgtcggcatcggcaatatcgggccaaattgtccgctgcacgaagacggcttcattacgtcggcggaagtgaaggaattgatgcagaacggcgcggtggccgaaatgctcggactgccgatcgattcggccggcgcccacgtggaattgccgattggccggcgcgtgacgagcatcgcgctggattcgccgccgcggcgccccaccatcggtttcgccggcggcgagcgcaagcgcgaggcgctgattgcggtgctcaagggcggctggctctcgggactggtcaccgacgaatcgtgtgcgcgggccgcgctcgaagcc

SEQ ID NO: 13095 - DNA, 1410 bp, Burkholderia fungorum
atgaacagcgggcaaggcagcggcgcggccgcacacgtgatcctgcacatcggcgcgggatcgtttcatcgcgcccatcaagcgtggtatctgcatcggttgaacgaggccaaagtgcccggcgagccgcactggtcgctgacggtcggcaatatccgcagcgatatgaatgcggtgctcgaagcacttgccgcgcaaaacggcgtgtacacgctcgagaccgtcacgccccaaggtgagcgcgcatacgaaacgattcgctcgatcgagcgcgtcgtgccgtggaccgggagcctcgacgcgctgatcgaggcgggcgcggatccggcctgcaggatcatcgcgttcaccgtgaccgaaggcggctattacctcgacgaagaggacgaactcgacaccgccaacgccgatctcgccgccgacctcaacggcggccacaccaccatttacggcgcactcgccgcgattctcgacgcgcgcatgaagcgcggcgcgggcccggtcacgctgcagacctgcgacaacctgcgcagcaacggcgagcgcttccatgcgggcatgagcgagtttctcgaacggcgcggcgcggacgaactggcgcaatggttcgacgacaacactgcctgcccgagctcgatggtcgaccgcatcacgccgcgtcccacgccggatgtgcgtgagcgcgtcaaggccgccaccggcgtcgacgacgcctgcccggtgatgggcgaagcgttcatccaatgggtgatcgaagaccggttcatcgcgggccgcccggcctgggaaaaggtcggcgcggaactggtcgactcggtgatgccgtacgaggaagcgaagatccgcattctcaacgcgccgcacagttgcatcgcgtgggcggggacgctgatcgggctgaactatattcacgaaggcacgctcgacgcggacatccgcaagttcgctttcgactacgtcacggaagacgtgattccatgtctcacgccgagtccgctcgatctcgaacgctatcgcgacgtggtgctcgaacgcttcagcaatccgtatatccaggacacgaaccagcgcgttgcggcggacggtttttccaagctgcccggcttcattgcgccgacgctggcggagtgtttcgagcgcggcgtcacgccggcggcgacggcgatgctgcccgcgctgttcttccgctttctggagcgctggaacgccggcaagctgccgtacacgtatcaggatggcgtgatggatgagcgcgtcgcgcggggctttttcgcggcgcccgatccattgaaggcgttcgccgccgaccgtctgctatggggcagcatggcgcagacaccggaactggagtcggcgctggagggtgcactggcgcgcgtcgatgtctggctggccagacgcggcgtggtt

SEQ ID NO: 13096 - DNA, 948 bp, Burkholderia fungorum
gtgagcgaccagttgcaaaaattcatgttcagcgcggcgccggtgcgcggcgagatcgtttcgctgcgcaatacgtggcaggaagtcctgacgcgtcgcgattatccggcgccggtgcgcacggtgctgggcgaaatgatggccgcctgcgcgctgctgtcggcgaacctcaagttcgacggcacgctcatcatgcagattttcggcgacggcccggtcaagatgctggtggtgcagtgcggctccgatctgtcgatgcgcgccacggccaagctgtcgggcgaagcagccagcgtgatcggcgaatcggccagcatggtcgacctgttgaacgcgagcggtcacggccgttgcgtgatcacgctcgacccggcctccaagcagcccggtcaacagccgtatcaaagtatcgtgccgctctcgggcgtggacggcccgctcaactcgatggccgaagtgctcgaacattacatgcaccactccgagcagctcgacacgcgcctgtggctcgcggcgaacaccgagcgtgcggtcggcatgctgctgcaaaaattgccgggcgacggcggcatcgtcccgcatccgggcgacctcgacgcggacacgtgggagcgtgtatgcacgctgggcggcacgatgtcgcaagacgagttgctgaaggaagaaccggaaacgattttccggcgcctgttctggcaggagaacgtccagcatttcgaaccggcgaaggcgcgtttcgagtgcacgtgttcgcgtgaaaaagtcggcggcatgctgaagatgctgggccgcgaagaagtggatggcgtactcgaagagcgcggtcatgtcgagattcattgcgagttctgcaaccagcgctacgagttcgatccggtcgatgtggcgcaactttttgtcgccgaagcgctctcacaaggcgtgacgcccgcggctgaccagcggcac

SEQ ID NO: 13097 - DNA, 2343 bp, Burkholderia fungorum
atgacggaaaccgtagcactcaagatcgtacagcgcatcgccgccgaactgtccgtccagccgcgccaggtcgcggccgcggtgcaacttctcgacgaaggagcgactgttccgttcatcgcccgctaccgtaaggaagtgaccgacaatctcgacgacacgcagttgcgcaacctcgaggaacgcctgctgtatctgcgcgagctggaagaccggcgcgcggcgatcatcgccagcatcgacgaacagggcaagctcaccgacgagctgcgcgccgcgatcgaaggcgccgacagcaagcaggtgctggaagacctgtatctcccgtacaagccgaagcgccgcacgcgcgcgcagatcgcccgcgaagcgggccttcagccgctcgccgacgcgctgctggccaatccgcggctcgacccgcaaaccgaagccgccgcctacgtggacgccgagaaaggcgtcgccgacgtcaaggccgcgctcgacggcgcgcgcgacatcctttcggagcagttcggcgaaacggccgagttgctcggcaagctgcgcgactacctgttcaaccagggcgtggtgtcgtcgaaagtggtggaaggcaaggaaaacgccgaagaagagaagttccgcgattattacgactactcggaaaccatccgcaccgtgccgtcgcatcgcgcgctggcgctgttccgcggccgcaatgccggcgtgctgatggtcaagctcggcctcggcgaagaactcgacgcgcaggtgccgcatccgggcgaagcgctgatcgcgcgccacttcggcattgccaatcagaaccgtccggccgacaagtggctctccgatgtgtgccgctggtgctggcgcgtgaaggtgcagccgcatatcgaaaacgaattgctgaccaatctgcgcgacgaagccgagcacgaagcgatccgcgtgttcgcgcgcaatctgaaggacttgttgctcgccgcgcccgctggcccgaaagccgtgattggcctcgatccgggcatgcgcaccggcgtgaaggtggccgtggttgatcgcaccggcaaggtgctcgccaccgacgtgatctatccgcacgagccgcgccgcgactgggacggctcgatcgcgaaactcgcgcgcatctgcgcgcagacgcaggctgaactgatcagcatcggcaacggcacggcgtcgcgtgaaacggacaagctcgcgagcgaactgatcgcgcgtcatccggaattcaagctgcagaagatcgtcgtgtccgaagccggcgcgtcggtgtactcggcctctgaactcgcggcgaaggaattccccgacatggacgtgtcgctgcgcggcgcggtgtcgattgcacgccgtctgcaggatccgcttgcggaactggtgaagatcgagccgaaggcgatcggcgtcggccagtatcagcacgacgtgaaccagcgcgaactggcccgttcgctcgatgccgtggtcgaagactgcgtgaacgccgtcggcgtggatgcgaataccgcgtccgtcgcgctgctcgcccgcgtgtcgggtctgaatgccacgctggcgcgcaatatcgtcgactatcgcgatgcgaacggcccgttcccgtcgcgcgaacatctgcgcaaggtgccgcgtctgggcgacaagaccttcgagcaggccgccgggttcctgcgcatcaacaacggtgagaatccgctcgaccgttcgtcggttcacccggaagcgtatccggtcgtcgaacgcatgctcgcgaaaatcagcaagcatgtgggtgaagtgctgggcaatcgggacgcactgcgcgggttgtcgcccgcggaattcgtcgacgatcgcttcggtctgccgaccgtgcgcgacattctgctcgaactcgaaaagccgggccgcgatccacgccccgaattcaagaccgcgacgttccgcgaaggcgtcgagaaggtcagcgatttgacaccgggcatggtgctcgaaggcgtcgtaacgaacgtggcggcattcggcgcgttcatcgacatcggtgtgcatcaggacggtctggtgcacgtgtcggccatgtcgacgaagttcatcaaggacccgcatgaagtcgtcaaggccggccagatcgtcaaggtgaaggtgctggaagtggacgtgaagcgccagcgtatcgcgctgaccatgcggatggacgacgaagtcggcgcagcgtcggcgcgcagcggcggcgcccagcaggaccgcggcggcgcgggccgctcaggtggcggcggacgcggcgcgccgcaacagcgctcgcgtgagccggaaccgggcggcgcaatggcggcggcattcgccaagctcaagcagaag

SEQ ID NO: 13098 - DNA, 1281 bp, Burkholderia fungorum
atgagtgctatcgtagatatcatcggtcgagagattctcgattcgcgaggcaaccccaccgtcgaatgcgacgtgctgctcgaatcgggcacgatgggccgcgccgcggtgccgtcgggtgcgtcgacgggttcgcgcgaagcgatcgaactgcgcgacggcgaagccggccgctacggcggcaagggcgtgctgaaggctgtcgagcacatcaacaccgaaatctccgaagcgatcatgggcctcgacgcttccgagcaggcgttcctcgacaagacgctgctggaactcgacggcacggacaacaagtcgcgcctcggcgcgaacgcgatgctggctgtttcgatggccgtcgcgaaagccgccgctgaagaagccggcctgccgctgtaccgctacttcggcggctcgggcgcgatgcaactgccggtgccgatgatgaacatcgtcaacggcggcgcgcacgccaacaacagcctggacatccaggaattcatgatcgtgccggtcagccagccgaccttccgcgaagcgctgcgctgcggcgccgaagtgttccacgcgctgaagaagatcctgtcggatcgcggcatgagcacggcagtgggcgacgaaggcggcttcgcgccgaacttcggcagcaacgacgaatgcctgtcgaccatcctgcaagccatcgagaaagcaggctaccgcgccggggaagacgtgctgctcgcgctcgactgcgcagcgagcgagttctaccacgacggcaagtaccagctggccggcgaaggcctgcaactgtcgtcaacggaattcacggactacctggcgaatctggccgacaagttcccgatcgtgtcgatcgaagacggcatgcacgaaagcgactgggccggctggaagacgctgaccgacaagctcggcaagaaggtccagctggtgggcgacgacctgttcgtcaccaacacgcgcatcctgaaggaaggtatcgagaagggcatcgccaactcgatcctcatcaagatcaaccagatcggtacgctgacggaaaccttcgcggccatcgaaatggccaagcgcgccggttacacggcggtgatttcgcaccgttcgggcgaaaccgaagattcgacgattgcggatatcgcggtcggcctgaacgccggtcagatcaagacgggttcgctgtcgcgctcggaccgcatctcgaagtacaaccagttgctgcgcatcgaagaagatctgggtgatatcgccagctatccgggcaagtcggcgttctacaatctgcgc

SEQ ID NO: 13099 - DNA, 1884 bp, Burkholderia fungorum
atgacagataacaatcacgagcacaaacagcctctgccttccctcgccattgccgcgatcggagtggtattcggcgatatcggcacgagtccgttgtactcgttgaaagaagccttcagcccatcgcacggcattccgctgaccgatcaatccattctgggtgtgatctcgctgctgttctgggcgatcgtgatcgtggtcggcgtgaaatatgtgttgttcgtgatgcgtgcggacaataacggcgagggtggcgttctcgcgctgatggcgctggcgctgcgctcgctcgacgagaagtcgaagatggccggcttgctgatgatgctcggcattttcggtgcctgcatgttctatggtgacgccgtgattacaccggccatttcggtgatctcggcggtcgaaggtctggagattgccgcgccgcatctgtcgcatctggtgctgccgctcacgatcgtgatcctcatcctgctgttctggattcaacggcacggcacggccatggtcggccgcctgttcggtccgatcatggtgctatggttcgtggtgctcgcagcgctcggcctgtggcacatcctgcagtcgccgagcgtgatccgcgcgctcaacccctgctacgcctacaccttcatggccgcgcacgtgctgcaggcttacgtggtgctcggctcggtcgtgctggtgctgaccggcgccgaagcgctgtacgccgacatgggccacttcggcgcgaagccgatccgcatggcgtggtacgtgctggtcatgccgtcactggtgctgaattacttcggccagggcgcgctgctgatgcacgatccgaaggccatcgaaaatccgttcttcctgctcgcgccggactgggccttgctgccgctcgtcgtgctgtccaccatcgcgacggtgatcgcctcgcaggcggtgatttccggcgcctattcgctgacgagccaggcaatccagctcggctacgtgccgcgcatgaagattctgcacacatcggagctggcgatcggccagatctatgtaccggtggtgaactggatgctgctgttcatcattctgtgcatcgtgattgctttcaagagttcggacaatctcgcggccgcatacggtattgcggtgacggccacgatggtgatcaccacgattctcgcctgcgtggtgatggtgaaggtgtggaactggaacaagctgctggtggcgctgatcatcggcgtattcatgacggtggatctcggctttttcggcgctaatctgctgaaggtcgaagagggcggctggctgccgctcggcatcggcgcgttgctgttcttcctgctgatgacctggtacaaggggcgcatgatcgtcaaggagcgcacggcggccgacggtattccgctcatgccgttcctgcaagggctgctcgcgcatccgccgcaccgcgtgtcgggcacggcgatctatctgaccggcagcgattcgctcgtgccggtgagcctgctgcacaacctgaagcacaacaaggtgctgcatgagcgcaccatcttcctgaccttcgtgacgcgcgatattccgtacgtgaacgatgcggaccgtgtgacggtgaaggatatcgacggtgggctgtatctcgtcaaggcggcctacgggttcaacgaaacgcctgacgtgaaggcggtcctgctggaagtcggccgcacgcatgacatgaccttcgagctgatggacacgtcgttcttcctcgcgcgcgaaacggtggtgccgacgcaattgccgggcatgtccgtgtggcgcgaacgtgtgttcgcgtggatgcaccagaacgccgccaagccgacggacttcttcagtattccggccaaccgggtggtggagttggggacgaagatcgagatt

SEQ ID NO: 13100 - DNA, 852 bp, Burkholderia fungorum
atgaaactgggcgatttcgaaatcgggctcgacaggccgtttttcctgatcgcgggcacctgtgtcgtcgaatccgaacagatgacgatcgacacagctggccggctaaaggaaatctgcgcgaagctgaatattccgttcatctacaagtcgtcgtacgacaaggccaaccgcagcagcggcaagtcgttccgcggtctgggcatggacgaaggtttgcgcatcctgtcggaagtgaagcgccaactcggtctgccggtgctgaccgacgttcatgccgagcacgagatcgagcaggtcgcctcggtggtcgacgtgctgcaaacgccggctttcctgtgccgtcaaacggacttcatccacgcttgcgcacgttcgggcaaaccggtcaacatcaagaaaggccagtttctcgcaccgcacgacatgaagaacgtgatcgacaaggcgcgtgacgcggcgcgtgaagcgggtctgtcggaagaccggttcatggcgtgcgagcgcggtgtgtcgttcggctataacaacctcgtgtcggacatgcgctcgctcgcgatcatgcgcgaaaccaacgcgccggtcgtgttcgacgccactcactcggtgcagttgccgggcgggcagggcacgagctcgggcggccagcgcgaattcgtgccggtgctggcgcgtgccgcggtggcggtgggcgtggccggtctcttcatggaaacgcacccgaatccggcgcaggccaaatcggacggtccgaacgccgtgccgctgcatcgcatggccgatctgctcgagacgctggtcacgctcgatcgggccgtcaagcgcgcgccgttcctcgaaagcgatttcaac

SEQ ID NO: 13101 - DNA, 1344 bp, Burkholderia fungorum
atgtctgccagcgcagtgaatgtgaaccccgggcgtaacgtcgtcgtcgtggggacccaatggggtgatgaaggcaagggcaagatcgtcgactggctgacggaccacgctcaaggcgtcgttcgcttccagggcggtcacaatgccggtcacacgcttatcatcggcggcaagaaaaccatcttgcgtctgattccgtcgggcatcatgcatcccggcgtcgcgtgctacatcggcaatggcgtcgtgttgtcgccggaagcgctgttcaaggaaatcggcgagctcgaagccgccggggtcgatgtccagaatcgcctcttcatttccgaagccaccacgctgatcctgccgtatcacatcgccatcgaccagggccgcgaagcgcgccgtggcgcaggcaagatcggcaccaccggccgcggcatcggcccggcttacgaagacaaggtggcacgccgcggtttgcgcgtgcaggacctgttcgagccggagatcttcgccgaacgtctgcgtgaaaacctcgactatcacaacttcgtgttgacgcaatacctgggcgtcgccgctgtcgacttccagcaaacgctcgacacgatgctcagctatgccgaccgtctgaggccgatggtgaccgacgtgtcgcgccgtctgtacgacgtcaacgccgccggcagcaacctgctgttcgaaggcgcgcaaggcacgctgctcgacatcgatcacggcacgtatccgttcgtcacgtcgagcaactgcgtggccggtgcggccacggccggcgcgggtgtcggtccgcaaaagctgaactacattctcggcatcaccaaggcgtactgcacgcgcgtcggctcgggcccgttcccgagcgaactgtacgacgcggataacgctgcacgccaggaagcgatcggcctcgaactggctaccgtcggcaaggaattcggctcggtcacgggtcgtccgcgccgcaccggctggctcgacgcggccgcgctgcgccgctcgatccagatcaacggcgtatcgggtctgtgcatgaccaagctggacgtgctcgacggtcttgacgaagtgaaactgtgcgttggttacaaggtggacggcaagaatgtcgacctgctgccgcgcggcgcgtcggaagttgcacgctgtgagccggtgtacgaaaccttcgcgggctggaaggaaagcacggttggcatcaaggaatgggacaaactgccggcgaatgcgcgcgcgtatctgtcgcgtgtgcaggaggttgcgggcattccgatcgacatggtgtcgaccggtccggatcgcgatgaaaccatcctgcttcgtcatccgttcaaggtt

SEQ ID NO: 13102 - DNA, 1671 bp, Burkholderia fungorum
atgaccaaatatgttttcgtcaccggcggcgtagtatcttccctcggcaagggtattgccgccgcttccctcgccgcgatcctcgaatcgcgcggtcttaaagtcaccctcctcaagctcgatccctacatcaatgtcgaccccggcacgatgagcccgtttcaacacggcgaagtgttcgtgacggaagacggagcggagaccgacctcgacctcggccactatgagcgcttcatcagcacgaagatgcgcaaggccaataacttcaccacgggccagatttacgaatcggtgatccgcaaggaacgccgcggcgattatctcggcaagacggtgcaggtcattccgcacatcacgaacgaaatccaggcgttcatcgaacgcggcgcggcttccgcaacgtgcggtgagccggacgtcgccatcgtcgaagtgggcggcaccgtgggcgacatcgaatcgctgccgttcctcgaagccgcgcgtcagatgagcctgcgcatgggccgcaacagcgcgtgcttcgtgcacctcacgctggtgccgtgggttgccacggccggcgaactgaagaccaagcccacgcagcacagcgtgcagaagctgcgcgaaatcggtatctcgccgcacgtgctgctgtgccgcgccgaccgccgcattccggacgacgagcgcgcgaagatctccatgttctcgaacgtgccggaagacgcggtgatctcggtgtgggacgcggacagcatctacaagattccgcagatgctgcacgatcagggtttggacgcgatcatctgcgaagaactcaagctcgagccgaaggccgccgatctgtccatgtggtccgatctggtcgagaagctggagcatccgaggcatgaagtcacgatcggcatggtcggcaaatacgtcgatctgaccgagtcgtacaagtcgctgatcgaagcgctgcgccatgcgtcgatgcatacgtcgaccaaggtcaacatcgaatacatcgactccgaagaaatcgagacgcacggcgtcgaaagcctcaagcatctggacgcggtgctcgtgccgggcggctttggccggcgcggcaccgaaggcaagatcgccgcgatccgttatgcccgtgaagcgaaggtgccgtatctcggcatctgcctcggcatgcaactggcggtgatcgaatttgcccgcgacgtggtgggtctgaaagacgcgaacagcacggagttcgatcaggaaacgccgaaccgcgtggtcgcgctgatcaccgaatggtacgaccgcgaaggccgcgtcgagaagcgcacggaagagtcggatctcggcggcacgatgcgcctcggttcgcaacgttgcccgatcaagcccggcacgatggccgaagagatctatggcaaggacgtgaacgaacgccatcgccaccgttatgaagtcaataaccgcttcgtgccccagctcgaagccggcggccttatcatcagcgcccgtaccccgagtgaagatctgccggaaatgatggaactgccgcgcagcatgcacccgtggttcgtcggcgtgcagttccatccggaattcacgtccacgccgcgtgacggtcatccgctgttcaagtcgttcgtcgaagcggcgctcgcgcaccagcagtcgcgcacggcggccgaagtcggggagaaagca

SEQ ID NO: 13103 - DNA, 828 bp, Burkholderia fungorum
atgaacgccgacctccactgtcactccaccgtttccgacggccagttcgcgccggccgatgtcgcgcgccgcgcgcacgcgggtggcgtgacgctgtgggcgctcaccgatcacgatgaactcggcggtcagcgcgaagcgaaaagcaccgccgaagcgctcggcatggcctatctgagcggcgtcgaaatctcggtgacgtgggcttcgcgcacggtgcatatcgtcggattgggcatcgatccgaccagcgcggtcctgatcgatgggctcgcgcgcacgcgcaacggccgcgccgcgcgggcagaggcgattggcgagcagctggccacgctcggcatccccgacgcctatcagggcgcgctcagatacgtgtcgaatccggacatgatttcgcgcacgcatttcgcccgtttcatggtggaaagcggctacgccagttccacgcaggacgtgttcacccgctatctcggcgacggcaaaccgggttacgtgtcgcaccgctgggccaaactggccgatgcggtcggctggatccaggcggccggcggcgaagccgtcattgcgcatccgggtcggtatgcttactcgccggtcgaattcgacgcgtttttcgccgaattcatcgatctcggcggcaaggcgatcgaagtggtgaccggcagccatacgcccgaccagtatcgcgaatacgcggatgtcgcgcgccgtttcggtttcgaggcatcgcgcgggtccgacttccacgcagccggcgaaggccgcgtcgatctcggcacgctgccgccgctgcccgccgatctgaagcctgtctgggaacgctggctg

SEQ ID NO: 13104 - DNA, 975 bp, Burkholderia fungorum
gtgctcgccagcctctcgcttgccgcgccgctcgcgcatgcaagcaaggatcatccggaaattggcttctgtatcgacgatctgcgcgtggagcgctggtcgcgcgatcgtgactatttcgtcgccgcggcagagaagctcggcgcgaaagtatcggtgcaatccgccgacgcgagcgaagagcggcagatctcgcagatcgaaaacctgatctcgcgcggcgtggatgtcatcgtgatcgtgccgttcaattcgaagacactcggcaatgtggtggccgaagcgaagaaagcgggcatcaaggtcgtctcgtatgaccgcctgattctagacgccgacgtagatgcctatatctcgttcgataacgagaaagtgggcgaattgcaggcgcaaggcgtctacaacgcgcaacccaagggcaactacttcctgctcggcggcgcgccaaccgacaacaacgccaagatgctgcgtgaaggccagctaaaaatcctgaagcccgctatggacaagggcgacattaaagtggtcggtcagcagtgggtgccggaatggagcgcatccacggcgctgcgtattgtcgaagatgcgctgacggcgaacaacaacaagatcgacgcgatcgtcgcctcgaacgacggcacagcgggcggcgcgatccaggcgctcgccgcgcagcacctggcgggcaaggtgccggtttcgggccaggacgccgaccttgcggcggtcaagcgtgtgattgccggtacgcagaccatgaccgtctacaagccgttgaaactgattgcgagcgaagcggccaagctctccgtggcacttgcgaagggccagaagcccggctataacgcgcaatacgacaacggcaagaagaaggtcgacacggtgctcctgcaacccacgctgcttaccaagaccaatgtcgacgtagtcgtcaaggacggcttctacacccaggcccagctcgcgagccaa

SEQ ID NO: 13105 - DNA, 1320 bp, Burkholderia fungorum
atgtcctatttcgaacacattcccgagatccgctacgaaggcccacaatcggacaacccgcttgcctatcgccactacgataaaagtaaaaaggtactcggtaaaaccctcgaagaacatctgcgcattgcggtgtgctattggcacacattcgtttggccgggcgtggatattttcgggcagggaacgtttcggcgtccctggcagcaagccggcgatgcaatggagcgggcacggcagaaggcggactccgcattcgagttcttctcgaagctcggtacgccgtactacacgtttcacgataccgacgtctcgcccgaaggttcgagcctgaaggaatacagcgaaaacttcctgcgcattacggattatctggcacgcaagcaggaggacaccggcatcaagctgctgtggggcacggccaatctgttttcgcatccccgttacgcggccggcgcggccaccagccccgatccggaggtgttcgcgtttgcggcgacgcaggtgcgccacgcgctcgatgcgacccagcggttaggcggcgacaactacgtcctgtggggcggccgcgagggttacgacacgttgctcaataccgacctcatgcgtgagcgcgatcaacttgcccgttttctgcatatggtcgtggaccatgcgcacaagatcggctttaaaggctcgctgctgatcgaacccaagccgcaggaaccgaccaagcatcaatacgattacgatgtcgcaaccgtacacggtttcctgctgcaacacgggttggagaaagagatccgggtaaacatcgaggccaatcacgcaacgctcgcgggtcactcgtttcatcacgagatcgccacggcctatgcgctgggtattttcggcagcgtcgacgcgaatcgcggcgacccgcaaaacggctgggataccgaccagttcccaaatagtgtggaagagttgacgcttgccttctacgaaattctcaaacacggcggcttcaccacgggcggcatgaacttcgactcgaaagtgcggcgccagagtgtcgatccggaagatctgttctacggccacatcggtgcaatcgataacctcgcgctcgccgtcgagcgcgcggcggtgctgatcgaaaacgaccgcctcgatcaattcaagcgtcaacgctatgcgggttgggacgcagactttggacgcaagatcctgtccggcgactattcgctctccacgctggcaacggatgcgctcgcgcgcggtctgaacccgcagcatgcaagcggccaccaggagctcatggaaaacatcgtgaatcaggctatttacagcggacgc

SEQ ID NO: 13106 - DNA, 648 bp, Burkholderia fungorum
ttgcccgcgctgaccgatacccgttcgctccgcatcctggccgcgaacaatcaccgctgcgcggtggtggatgcaccttgttccgttgtttctatcccaggagggcttgccctcccagggtgtgcgccctccgatctcaccctccggaggttcgccatgtctttcgtcgtcaatgactcctgcatggagtcgctttccgccgtcgcagcccatcatgaggactggatcatccagcaggctatcgcgttgctggagagacggatcttcaaagtcggaccgtgcctcagcggaccggcggccgtgcgggattatctgcgtttaaaactggtcgctgagcccaatgaagtgttcgcagccgtgttcctggacagcatgcatcaagtgttggcctacgagccgctgttcaggggcacgatcaattcgactgcggtctatccgcgtgtcgtcgtacagcgtgtattagagctgaaagccgccgcagtggtcttcgcgcaccagcacccttcgggttccaccgaaccgtcgaacgccgatcgcgcgctgacccagcgattgcaggctgcgctggcgctcatcgatgttcggctactggaccacatcgtcgtcggtctgggaaacccctattccttcgctgagcacggcctgctg

SEQ ID NO: 13107 - DNA, 921 bp, Burkholderia fungorum
atggcgatggcggatcgcctcccgtactggaacgaggtcgtttcgagtacgttcatcccgtcgagcgtgcagcctccccgtgcaggcgagttccgagcaagcctgcacaacgagcgactgggcgaggcggagcttacggttgttcgcgcttcgccacagcgcgtggcgagaaccagcgcactgatccgcctgtcgagcgatgaatgcctgatgttcggctttgcgcccaaagcccgatggaaagtcagccagcacggccgaactgtccaggttgcaccgatgcagttcgtgctctacgactcgaactatcccttcgagcttgagttcgacgaggacttcgacctgcatgtgctgcagttgccgcacgcaagtcttgcgtttgctgggagcaggctttcggatgttgcgggcaggccgttcgacgcagtgtcaggcgcgggtaagttgctggcgtccttgatcgaggaggtccgcagcggccatacgtcttccggagtgattgccaggacatcgcttggcagcgtcgcagtccatctggcaacctcgatggtttccgagttgctcgagcttcgaaccgatgaggccaacgagcgcgaactccggctgctcagggtgaaatcgtacattgagttgaacctggccaacccgaggctcgacccgcatgcgattgcatcggccaacggaatgtcggtacgcacgctgcatgggctcttcagcgccgaggaactgggagtgtcgacctacgtcacccatcggcgtcttctgcggtgcaaagaggacctcggcaatgcgatgcactcgtcgctgtccgtggccgggatcgcgatgcgatggggtttctggaataacgcctacttcagccgcgcattcaagcggatgttcggcatttcgccgcgctcataccggattggtcggagaccg

SEQ ID NO: 13108 - DNA, 357 bp, Burkholderia fungorum
atgcctcgagtaaaacgtggggttaccgcacgggcccgtcacaagaagatcatcaagctggccaagggttaccgcggccgtcgcaataacgtctatcgcatcgccaagcaggcggtcatgcgcgctggccaatacgcctaccgcgatcgccgcaacaagaagcgtgtgttccgtgcattgtggatcacgcgtatcaacgcggcggtgcgtcagcacgacatgacgtacagcgtgttcatcaacggcctgaagaaggcttcgatcgaactcgaccgcaaggtgctggccgacatggctgtgtttgacaaggctgcttttgctgcgatcgttcagcaggtgaaagccgccgttgcagcc

SEQ ID NO: 13109 - DNA, 186 bp, Burkholderia fungorum
atgaagaccaagaagagtgctgcaaagcgcttcgtggtgcgtccgggtggtaccgtcaagcgcggtcaagccttcaagcgccacattcttaccaagaaaaccaccaagaacaaacgccatctgcgcggttcgacggcagttcatgattccgatctgaactccgtacgcgcaatgctgccgttcgct

SEQ ID NO: 13110 - DNA, 699 bp, Burkholderia fungorum
atgctgctcgccgtcgacatccgcaagaccttccagagcgccgagcgccgcttcacgctcgacgtcgcgttccaggccacctcgcagcgcgtcgtgctgttcggaccatcgggcgcgggcaagagtctgacgttgcaggctatcgcgggcctgctgcgccccgacgaaggcacgatcacgctgcacggcaacgcgctgttcgacagcgcgcgcggcatcgatctgaagccgcaagcgcgcagggtcgcctatctgtttcaggacttcgcgctatttccgcatctgaacgtgcggcagaacatcggcttcggcttgcagcacggttggctcaacccgcgtgcgcggatctcgcatccgcagatcgattactggctggatgcgctggaattgaagagcgtggccggcaatcatccggcgcagctttccggtgggcaaaagcagcgcgtggcactggcgcgagcgctcgtcgcgcaacctcggttgctgttactggacgagccgttttcggcgctcgacagcgccttgcgtgagcgcatgcgccgcgaactgtccgagctgcaaacgcggctcgatattccaatggtcctgatcacgcacgatcccgacgatgtcgccgccttcggcgatcaggtcgtgcaggtcagtaatggccaggtgcgcgagaatcagccgttcgccggctacgcgcgcagcgagccc

SEQ ID NO: 13111 - DNA, 909 bp, Burkholderia fungorum
atggcgctcaccttcaacctcaacaacgtcatcacgtttcttgccgtggcggaaacgctcagtttccgccgggcggcggaacacacgcacacgtctcagtcggctgtcagcgcccgggtcagccagcttgaagaccggcttggtgtgcgcctgttccatcggacgacacggcaggtcacgctgacggctgaaggtctgcaactcttcgttgtcgccaggaccgccgtcgaggatatggagcgggtggccgaatccctgcggaagaaagcggctcttcagagcggtgaactgacgatcgccgctgtcccatcgattggccagacggtgctgcccaccatcatgggcgagtttcatcgccgctatccgggcgtgacgctgaagttgctcgatgtggattcccaacggtgcatcgagatgatggaagcaggcagtgtcgatctcgccatcgtgtccgatctcgaagaccgtcacgacatcgtattcgagccgctcttccgggacgaatgcttcctcgtcgtaccgcgaacgcatgcgcttggcgagcggcgcagcatttcgctacgcgaagcagcgagctttcctctgatggccagtcccagggggaccaccctatggcagatcatcgagcgcgcgtttgcggcctgcggtgcgacgccggtcgctcatcaggagacctggaatatgtcgacgctcgtacgactggtcgaggagggcttcggcatgggaatcgtgcctgagatttgcctcggcaagctcgatgtgtcgcgctgcacggtgctttcgctggaggaacacgtgggacgcatgatcggggtggcacgcatgacaaaccgctcggaatcgcccggtagtaaggcgttccggcagctgctcggcgagcggacgccgcctttgcgcgcggtgcggcag

SEQ ID NO: 13112 - DNA, 801 bp, Burkholderia fungorum
atgccaaccttcgctgccaatctgtcgatgctcttcactgacgtgccgtttctcgaacgcattgcagcggcgcgcagcgcagggttcaaagctgtcgaatgccagtttccctatgcgctggacaagcacgagctggcctccacgctgaacgaaaacgggcttgcactggcattgttcaatttgcccgcgggcgactgggaggccggcgaacgtgggatcgcctgccatcccgaccgggtcggcgagtttcgtgacggggtatggcttgcgctcgagtatgcgcaggtgctcggctgttcgcgcctaaactgtctcgctggcaaattgcccgccggcgttgtcgatgacgaagccagaagcacattgctggcgaacctgaaatgggctgcgtctaaacttgaaaaggtgggaattgcgttgctgatcgagccggtcaacacgtttgatgttcctggtttcgtgctgacgaacaccgacgatgcggtatcgctgattcatgacgcaggcgttttcaatctttttgttcaatacgacatttatcatgcgcagaggatgaagggcgaactcgctaacacgatccagcggcatcttccgctgatcggtcatatgcagttggccgacaacccggggcgtcacgagcccggtacaggcgagatcaattttcggtggctgttgccctatatcgacacacttggctatgacggatacatcggttgcgaatatatccccgccagtacgacgatcaacagccttgattggctgaaggactcgattcaagcggagtatgaccatggcaagcaa

SEQ ID NO: 13113 - DNA, 1338 bp, Burkholderia fungorum
atgggagacaaatcgatgagtttgaagccgctaatccgttcgctttccgttgccgccgtgttgtgcgccggcctcagtcaggcggcccacgccgcaacagaaatccagttctggcacggcatggaagccgcgctgggcgaacggctgaacgacattgccaacgcattcaacgcgtcgcaaagcgactacaagatcgtgccggtcttcaaaggcacttacgaccagaccctcgctgccggcatcgccgcgtatcgcagcggcaatgcgccagccatcctgcaggtctatgaagtcggcaccgccacgatgatgcaggcgaagaaagccgtgatccccgtctcggaagtattcagacaagctggcgtgccgctcgatgaaaaggcctttgtgccgaccatcgccagctattacagcgacgcgaaaaccggcgagctgatctcgatgccgttcaatagctcgacgccggtgctctactacaacaaggacgccttcaagaaagccggtctcgacccgaaccagccgccgaaaacctgggccgaactgcaggccgacgcacagaagctgaaagcgtcgggcatggcgtgcggctattcgtccggctggcagagctggattcaactcgagaactacagcgcctggcatggcgcgccgttcgcgtcgaagaacaatggcttcgacggcccggacgcgcaactggaattcaacaagccgctgcaggtcgcgcatatccagttcctgcagaacatgcagaaggatggcacgttcacctacgtcggccgcaaggacgaaccggtgtcgaagttctatagcggcgactgcgggatcatcaccaactcgtcggggtcgctcgccacgatcaagaagtatgcgaagttcaacttcggcaccggcatgatgccgtacgacgccagcgtgaagggcgcgccgcagaacgcgatcatcggcggagcgagcctgtgggtgttgtcgggcaaggatccggctgtgtacaagggcgtggcgaaattcctcgcgtatctgtcgtcggcaccggttgccgcgaagtggcatcaggacaccggctatctgccggtcaccaccgccgcttatcaactgacacagcagcaaggcttctacgagaagaacccgggcagcgacaccgccatcaagcagatgctcaacaagccgccgctgccgtacacgaagggcttgcgtctgggcaacatgccgcagatccgcaccgtcatcgacgaagagctcgaacaggtgtgggcacagaagaagacgccgcaacaggcgctcgatgcctccgtgtcgcgtggcgatgaactgctgcgccgcttcgagaaagccggtaat

SEQ ID NO: 13114 - DNA, 1047 bp, Burkholderia fungorum
atgaagagagacgacatcatgtcgattacgccccaggaagcgctgcaacggaccatcgagcaccgcgagattttccacgacgaaatgctgcacctgatgcggctcatcatgcgcggcgaactctcgcccgtgatggcggccgcgatcattaccggcttgcgcgtcaaaaaagagaccatcggcgaaatcaccgccgccgccacggtgatgcgtgaatttgcccggcacgtcgaggtgcaggacaactcgaacttcgtcgatatcgtcggcaccggcggcgacggctcgcacaccttcaacatttccacggcgaccatgttcgtctccgccgcggcgggcgccaaggtcgcgaagcacggcggccgcagtgtatcgagcaagtcgggcagcgcggacgtgctcgaagcgctcggcgtgaatatcgacttgcagccggaacaggtggcggcttccatcgcggaaaccggcatgggtttcatgttcgcgccgaaccatcatccggccatgaagaacatcgcgccggtgcgccgcgaactcggcgtgcggaccatcttcaacattctcgggccgctcaccaatccggccggcgcgcccaatcagctgatgggcgtgttccacgccgacctcgtcggcattcaggtgcgcgtgatgcagcgcctcggcgcaaagcacgtgctggtggtgtacggtatggacggcatggacgaagtctcgctcggcgcggcgacgcaagtcggcgagttgcgcgacggccagattcacgagtacgagattcatccggaagacttcggcatgcagatggtgtcgaaccgcacgctgaaagtggccgacgccaacgaatccaaagcgatgttgctcgaagcgctcgacaacaagccgggcgtcgcgcgcgaaatcgtcacgctgaacgcgggcaccgcgctgtattcggcgaacgtggcttcgtcgattgcggacggcatccagttggcgcgcgaagcgatcgcgagcggcaaggcgcgcgcgaaagtcgacgagctggcccgtttcacccagcaattcaagcag

SEQ ID NO: 13115 - DNA, 783 bp, Burkholderia fungorum
atgagcgacattctcgaccgcatcatcgcggtcaaacgcgaagaagtccgggcggccgaacagagcgcgccgctcgaagagctgcgcctcgaagcgtcgtcgcgcgacctgcgcgatttcgtcggcgcgttgcgtgcgaagcacgcggcgggtctcgccgcggtgatcgccgaagtcaagaaggcgagcccgtccaaaggcgtgctgcgcgaacacttcgtgccggccgagatcgcgcgttcgtatgaaaaacacggcgcagcctgcctgtccgtgctcaccgacgtgcagttcttcaagggtagcgtcgcgtatctggagcaggcgcgcgcggcctgcaatttgccggtgctgcgcaaagacttcatcgtcgatccgtaccagatcgtcgaagcccgcgcgatgggtgccgacgccatcctgctgattgccgccgcgctcgaaacctcgcagatgcaggatctcgaagcgctcgcgcattcgctgggcctcgcggtgctggtagaggtgcacgaccgcgacgagctcatggaagcgctcacgctgaaaacgccgctgatcggcatcaacaaccgcaatctgcgcaccttcgagacgtcgatcgaaacgacgatcggcatgctcgaagcgattcccgacgaccgcatcgtcgtcacggagtcgggcattctgtcgcgcgtcgacgtggagcgcctgcgcgcaatggatgtgcacacgttcctcgtcggcgaggcgttcatgcgcgcggacgagccgggtgtggaacttgcgcggatgtttttc

SEQ ID NO: 13116 - DNA, 1782 bp, Burkholderia fungorum
gtgcaaccgttaaactacgcgccgcgcgtcggttgcacctgtttagaatggaccgtcgcgcaagcacgtgcgtcacccgtctccagcgccacgagcgatgtcacgcggtgccgacatggttttgctgcaaacttgcatggggccgggctgggtgctgaaacaccggctccggccgacacaggagaagacgtgaaaagttctatacaacggaacatcgggccattcgcgctgatgctcaccggcttgggctcgatcatcggatcgggctggctgttcggcgcctggaaggctgcaaaaattgccgggcccgctgccatttgtgcgtgggtgatcggcgcggtcgtgattctcgcgatcgcattgacctacgcagaactcggcgcgatgttcccggaatccggcggcatggtgcgttacgcgcgctattcgcacggtgcgctggttggattcatcagcgcatgggctaactggattgcgattgtttcagttattcccatcgaggctgaagcatccattcaatatatgagtacatggccctatccctgggcgcatgcgttattcgtggacggatcattaaccacccacgggttattactgtccgcggcactcgtgatcatttacttcctgctgaactattggggcgtgaaactgttcgcgcgcgccaattcggcaatcacgatcttcaagtttctgattccgggcgcgaccatcctcggcctgatgctgacgggcttccacaaggaaaatttcggcgaagtgagtaccttcgcgccgtacggctggtcggcggtgctgaccgccgtggcgacgagcggcattgtgttcgcgttcaacggtttccagagcccgatcaaccttgccggtgaagcgcgcaatccggccagaagcgtgccgttcgcggtgatcggctcgatcctgctggcgctggtgatctatgttctgttgcagatcgcgtatatcggcgcggtgaacccgagcgacgtgatgaagggctggagccacttcaactttgcttcgccgtttgcggaactggcgatcgcgctaaacctgaactggctggcgatcctgctctatgtcgacgcgttcgtcagcccgagcggcacgggtacgacctacatggcgaccaccagccgcatgatctacgcgatggagcgcaacaacaccatgccgaagatgttcggcaacgtgcacccgttctacggcgtgccgcgcccggcaatgtggttcaacctgctggtgtcgttcattttcctgttcttcttccgcggctggagttcgctcgcggcggtgatttccgtcgccaccgtgatctcatacctgaccggcccgatcagcctgatgtcgctgcgccgtgcggcaacggacctcgagcgtcccttgcatattccgggcatgaagatcattgccccgttcgcgttcgtctgcgcgtcgctgatcctgtactgggcgaagtggccgctgaccggcgagatcattctgctgatggtcgtcgcgttgccggtgtacttctactttcaggcgaagtcgggttttgccggctggggccgtgatctgaaggcggcatggtggctggtcgcctatctgccggtgatggcgattctgtcgctgatcggcagcaagcagttcggcggtcacgacctcatcccttacggctgggacatgctggtggtcatcgcgttttcgctggtgttctactactggggcgtgaatagcggctatcggtcggaatatctggacgagcgccaggagcacgatgaagtgctcgaaggcattggtgcgcac

SEQ ID NO: 13117 - DNA, 723 bp, Burkholderia fungorum
atgaaaaagactttccgcatcgcggccgccgcgcttgccatcgccgccgtcacgatcggctgttcggcacaggccgaccagaccaccgacaagctcaaggccacgctgcaaacgcgtctcgcggacgtgacgatcaagagcgtgacgaagtcgcccattgccggcctgtacgaagtgaacctcggcacgcagatcgtgtatagcgacgcgaacggcgattatctgctgctcggcgacatggtcgacgcaaagacccgcaagaatctgaccgaagcgcgcctcgcggaaaccaaccgtatcgatttcgcgagcctgccgttcggcaatgccgtgaaggtcgtgaagggcaacggcgcgcgcaagatcgccgtgttctccgacccgaactgcccgtactgcaagcagctcgaaacgtcgctcaagtcgatcgacaacgtgacgatctataccttcctgtacccggttctgtcgccggactcgaccatgaaatcgaagtcgatctggtgctcggcggaccgcgcgaaggcctgggagtcgtggatgcaggaccatcaggcgcccaccgccgccggcacttgcgacaccgccgcgatcgacaaaaacctcgcgctcggccatgccatgaacgtcgacggcacgcccacggtgttcctcgcggacggccgccgtctgcccggcgccgtgccggccgaccggctggacaaggaaatgtccgcggtacgc

SEQ ID NO: 13118 - DNA, 1170 bp, Burkholderia fungorum
atgaacgcacaccaccagacctttgacgcggccgtgatcggcggcgggctcgtcggcaagaccgcggcgctcgcgctcacgcaaggcggactgcgcgtggcgctgctcgcgcaaccttgcgcgccgctgcctcccggcgccagcttcgactcgcgcgtctacgcgctgtcgtcgagctcacaggctctgctggagcgtttgcgggtctggcaggcgctcgatctgacgcggctcgggcccgtctacgacatgcgcgtctatggcgatgcgcacgccgagctgcatttctccgcgttccaggcttccgtgccgcaactggcgtggatcgtcgagtcgtcggtgatcgagcgcgcgctggatgcggcgctgcgcttccagccgaatctcacctggatcgacacgcgcgctcaggcgctggacttcaccgctgacagcgccagcgtcggcctcgccaacggcaatgtgatcgaggccgatctggtggtcggcgcggacggcgcgcactcgtgggtgcgcgcgcagatcggctcgaaaatggaccggcgcgactacaggcagaccggcgtggtcgccaatttcaaggccgggaagccgcacggggagactgcttatcagtggttcaaggacggcgagatcatcgcgctgctgcccatgccggacggtcacgtttcgctggtgtggtcggcgcgcaccgagcacgccgcacaactggtcgcgctcgatccggcgcagctcgccgctgaggtggagcgcgtcacgggcggccagttcggcgcgctcgactgcgtgacgcccgcgcaaggtttcccgctcgcgctgcaaacggtggaccggctggtggcgccgcgcgtcgcgctggtcggcgacgccgcgcatctgatccatccgctcgccgggcagggcatgaacctgggtttgcgcgacgtcgcggcgctcgccgacaccgtcgccggcaaggagtcgttccgcgatctcggcgacatggtgctgctgcgccgctacgaacgggcgcgccgcgaagacatccgcgcgctgatgatcgccaccgacggtttgcaaaaactgttttccgttcccggtccgttcgccaaggcgctgcgcaataccggcatggctttcgtcggggcgcagccgttcatcaaacgctggctggtgtcggccgcgctgggt

SEQ ID NO: 13119 - DNA, 789 bp, Burkholderia fungorum
atgtcatatgaagcgatccgtctcgacatcgacgcatcgagccacgtcgccaccattacgctgaatcggccggacaagctcaacagctttactcgcgcgatgcatcaggaattgagcgccgcgctggaccaggtcgaagcgtccggtgcccgtgcgctcgtgctcaccggcgcgggccgcggcttttgcgccggccaggatctggccgacctcgacttcacgccaggcgccatgaccgatctgggtgaactgatcgaacaacatttcaatccgttgattcgccgcctgcaggcattgccgttgccggtcatcgccgcggtgaacggcacggctgccggcgccggcgccaatctcgcgctcgcgtgcgacctcgtgctcgcagctcgctccgcgagcttcattcaggcgttcgtgaagatcggcctggtgccggactccggcggcacatggttcctgccgcagcgtgtgggcatggctcgcgcattgggactcgccattaccggcgacaaactcagcgcggaaaaagccgaaagctggggtttgatctggcaggcagtcgaagacgccgagctcgccggcaccgcgacaaaactcgcgtcccaactcgcgcagcaacccacgcgcgccatcgcagcaatcaagcaggccatgcgcgcgggcgcgacgcaaacgctcgatcagcaactcgatctggaacgggatctgcaacgcgaactgggcgcttcccacgattacgcggaaggcgtgcaggccttcgtggaaaagcgcgcgccgcgcttcgagggccgc

SEQ ID NO: 13120 - DNA, 1302 bp, Burkholderia fungorum
atgaccaccgcccttccgctcgatccaatcgagaccgccagccgcgacgaacttgccgcccttcaacttgaacggctcaaatggtcgctgaaccacgcctatgaaaactcgccggtttatcggcgcaaattcgatgaagccggcgttcacccgagcgacgtgaacagcctcgcggacctggcgcgctttcccttcaccaccaaaaaagatctgcgcgacagctatccgttcgggatgttcgccgtaccgcaggaccaggtttcacggattcacgcgtcgtccggtactacgggcaagccgaccgtggtgggctacaccgcgcgcgacatcgacacgtgggcgaatctcgtcgcgcgctcggtccgcgccgccggcgcacggcgcggcgacaaggttcacgtgagctacggctatggcctgttcacgggcggtctcggcgcgcattatggcgccgagcgcgcggggctcaccgtgatcccgttcggcggcggccagaccgaaaagcaggtgcaactgatccaggacttccggccggacatcatcatggtgacgccgagctacatgctctcgattgccgacgaactcgagcgtcaaggcgtggacccggccaattgttcgctgcgcatcggcattttcggcgcggaaccgtggaccaacgacatgcgtcaggcaatcgaaaaacgcatgggcatcgatgccgtcgacatctacggtctgtccgaagtgatgggacccggcgtcgcgtcggaatgcgtggaaacgaaagacggtccgaccatctgggaagatcatttctatcccgagatcatcgatcccgaaaccggcgaagtgctgccggacggcgaactcggcgagctggtgtttacgtcgctgaccaaagaggcgctgccgatcatccgttaccgaacgcgcgatctcacgcgcctcctgccgggcagcgcccgcaccatgcgccgaatggaaaaaatcaccggccgctcggacgacatgatgatcgtgcgcggcgtgaacgtgttccccacgcagatcgaagaactgctgctcaagcagcccatgctcgccccgcactatcagatcgtgctgaccagggaaggcccgctcgacgtgttgacgttgaatgtcgagccgtgcccggaaacggcacctgacaccgccgcgttgaacacggccaggcaggcgttggcctatgacatcaaggcactgattggcgtgagcgcggtggtgaacgtgctgggcgtgaacgggatcgagcgttcggtgggcaaggcgcggcgtgtggtcgacaagcgcaagtcggggctg

SEQ ID NO: 13121 - DNA, 1818 bp, Burkholderia fungorum
atggccggcgcgcgcgccttgtggcgcgctaccggcatgaaggacggtgatttcggcaagcccattattgcggtggtgaactcgttcacgcagttcgtgccgggccatgtgcatctgcgcgacctgggcgcgctggtcgcgaaggaaatcgaagcggccggcggtgtcgccaaggaattcaacaccattgccgtggacgacggcatcgctatgggccacggcggcatgctgtattcgctgccgtcgcgcgagttgattgccgattccgtggaatacatggtcaacgcgcactgcgccgacgcgatggtctgcatttccaattgcgacaagatcacgccgggcatgctgatggccgccatgcgcctgaacatcccggtcgtgttcgtctccggcggtccaatggaagcgggcaaggtcaagtccccgaaagacggccaggtgatcgccaagatcgacctgatcgacgcgatgatcaaggcggccgactcgaaggtcagcgacgcggaagtcgcggaaatcgagcgcagcgcctgcccgacgtgcggttcctgttcgggcatgtttaccgcgaactcgatgaactgcctgaccgaagcgatcggcctggcgttgccgggcaacggcacgatcgtcgccacgcacgcatggcgcaaggacctgttcgagcaggccggccgcctggtggtggacctgtgccgccgctactatcaggaagaagacacgtcggttctgccgcgcagcatcgccagcaagcaggcattcgagaacgcaatggcgctcgacgtggctatgggcggttcgaccaataccgtgcttcacctgctggcagcggcgcaggaagccggtgtcgatttcaccatgtccgacatcgaccgcatctcgcgcaaagtgccgtgcctgtgcaaggccgcgcccgccaccgacaaataccatatcgaagacgtccaccgtgccggcggcattctcggcattctgggcgaactggcgcgcgcggatctgctcgacctgtcttgcggcaacgtgcatagcggcacgctgggcgatgcgatcgccagatgggacattgccggcggcgcgggcgaagaagcgcagaagttcttccgcgcggcaccgggcggtattccgaccaccgtcgcgttcagccaggaggccacgttcccctcgctggataccgaccgcaaaaccggctgtatccgcagcaagcaggatgcgtattcgaaagacggcggcctcgccgtgctgtacggcaatctcgcggagaagggttgtatcgtcaagaccgcgggtgtcgacgaatcgcaatgggttttctccgggcgtgcgcgcgtgttcgagagccaggacgacgccgtggaagccattctgggcgacaaggtggtggctggcgacgtggtcgtgatccgctatgaaggtcccaagggcggccccggcatgcaggaaatgctttaccccacgtcgtatctgaaatcgaagggcctgggcaagacctgtgcgctcttcaccgacggccgtttctccggcggttcgtccgggctcgtgatcgggcacgcgtcgccggaagcggcagaaggcggcacgatcggtctggtggaagagggcgatgtgatcgagatcgacattccgaagcgcaagatgcacctggtggtgtcggacggcgaattggcgcgccgccgggaagcgatggaggcacgcggtgacaaggcgtggatgccggcggcgcgtgagcgcgtggtgtcgcaggcattgcaggcttatgcggcgctggccacctctgctgatcgcggtgcggtacgggatatctcgcaactgaagcgcaag

SEQ ID NO: 13122 - DNA, 2676 bp, Burkholderia fungorum
atgatatttctcggcggcaaatatgacatgcgcaccatgatcccggtcctgaagacctggctgcgacgttcgccgtcgccgacgggcgtgcacgtgtcggccacctgcagcgaaacgctcaccgagttcgcgcgggtttcacctgacgaagcgctccagcggctgcacagcgcggcgagcggcctctccgccgacgaggtcgccgagcgcttacgtagtaccggctccaaccaggtggctcacgaagtgcgccatacgatcctcggtgaacttgccaacagatcggtcaatccgctgaacctgctgctgttgtcgctggcgggcgcgtcgtacttcctcggcgattcacgtgccacgatcatgatcgcggtgatggtcgtgctcagcgtttcactcggttttcttcaggagcaccgctcgaacaaagccgccgatgcactgcgccggatggtgcgcaccaccgccacggtgcgccggcgtgcaacgggagccgaagcggatcatgtcgacattcccatcgagcagctcgtgcccggcgacgttgtgctgttgtcggccggcgacatgattcccgccgacctgcggctgatctcggcgagagatctattcgtcaatcaatcgacactgaccggcgaggcaatgccgctcgagaaagtggcgcatgcctgcggcggcgctgcggagacgcatttcgacctgcctaatatctgtttcatgggcagtgccgttgtcagcggtgtcggctgcggcgtcgttgtgctcacggggggcaggacggctttcggccgcgtcgccgacctgatagccgcgcaacgcgtagaaacgagcttcgacaaaggcattgcgcgattcacctggctgatgatggctttcattctggtgatggttccgctcgtgttcgtcatcaatggcctgaccaaaggtaactggttcgaagcgttgctcttcgcggttgcggtggcggtggggctcacgcccgagatgctgccgatgatcgtgaccgtcaatctcgccaagggcgcgattgcgatgtcgcggaagaaggtcatagtgaaacgcatcaatgcgatccagaattttggcgcgatggatgttctttgcacggacaagaccggcacgctaacgcaggaccgcatcattctcaaacgccacctggacctccacggagacgaatcggatcaggtgctcgaatatgcttatctgaacagcgcgcatcagtcgggcctcaagaatctgctcgatgtcgccgtgctgaagcatgtggagctccatgagcaactcaaggtgcacgagcagtacaccaaaatcgacgagatgccgttcgatttcgaacggcgccggatgtctgtcgtgctcgcgcggggagacggtgcccacatcctgatctgcaaaggggcggtggaggagattttctcggtgtgcacccgttacgtgatcaacggcgatatgggcacgctcgacgaacgcaatttcaccgcggcaaaagaagccaccgccgcgctcaatgcagatgggtttcgagtcgtcgcggtcgcctacaaggaaatgccgccgcagcaggccacctatacggtcggcgacgaggccgatctgatattgctcggctacattgcatttctcgatccaccgaaggagacggccgcggcggcaatcgcaacgttgaaagagcgcggcgtgcaggtgaagattctcaccggagacaacgatatcgtgacccgcaagatctgccatgaggttggactcacggtgggccgcgtcgtgctcggcaaggaactcgaaacactatcgcccgctcagttggccgatcttgcggagaccgcttccgtctttgccaaagtatcgccgtcgcaaaaggcctcgattatcgacgcgttgcatcggaagggacatgtcgtcggtttcctcggggacggcgtcaacgacggccccgcgctgaaggtcgcggacgtcggcatttccgttgatagcgcggtcgatatcgcgaaagagtccgccgacatcattctgctggagaagagccttgccgttcttggcgaaggcgtgctcgaaggccgcaaggtgtttgggaacatcaccaagtacatcaagatgggcgccagttcgaacttcgggaacatgttcagcgtgctcggcgccagcatcatcctgccgttcctgccgatggcgccaatccaggtgctcacgaacaacctgctatacgacttttcgcagaccgccattccgaccgacaacgtggatgaagaatacctgcgtgtgccgcggcgatgggatatcggcaacatcgtcaagttcatgctgctgatcgggccgatcagttccatctttgattatgtgacgtatttcatgatgctttatgtcttcggcgcgtgggacaaaccttcgctgttccagacgggctggttcgtggagtcgctgctcacccagacgctgattatccacatcatccggacttcgaaggtgccattcttgcagagtcgcgcaagcgcggcgctgatcgcgacaagtctcatcatcgccgctgtgggcattgccattccctatacgtggcttggcacgttcctgggctttattccattgccgtcggcttactggccggcgcttgtgctgattctcctgagttacgctgtgctgacgcatctgatgaaaacctggttcgtgcggcgattcgggctggat

SEQ ID NO: 13123 - DNA, 417 bp, Burkholderia fungorum
atgagttcaggcgtgcaatccggaaacgacttaccggataaacaggagctggaggccatgtcggtattccgttacgagttgcgcaagtttttgcgcgtctcggaagagatcgccaatgcggcaggaatcaccacgctccagtatcagttgctgttgcatgtgcgcgggttcgcggggcggcggtgggccactgtcggcgaattggcggaacgtctgcaggctgcgccgaatggcacggccgcgctggtgtcgcgctgcgaatcggccggtctggtcacgcgaaaggctgacgcgagcgaccggcgtcaggtgcaggtgcacctgacgcccaaaggggaacgttgcctgctcgaactcgcggcggagcacaaggcgcactacggctcgttcggctgggtgttcggcgattccgcgaaa

SEQ ID NO: 13124 - DNA, 4593 bp, Burkholderia fungorum
  misc_feature (1833)..(1851): n=g, a, t or c
atgggagaggcgttctgggccgcccgcgagggcgacgcgctgctgcatacgtcgctgatggccgatatcgcgggcggcgtgctcgacgtggcaatcaatgcggccatcatgcttgcggtggatctcgccgtgggagccgccattgccgctgctccattcacgttcggtgccagcgcatgtctcgcggtgggactggtcgtcggtgtgggcgtcggtatcggcatgtcggcgtcgggcctgagcgaaggcatatcttcgttctgttccgatgtcggtaacgcgatatttcccccgaccgttcagggacatatttcgagcggatcggctgacacgtacgtcaacggcaaacgtgcggcgcgcgcggccggcattctgctgacccaggaggagatcgatgcgcaggtgaaggccgccgcggaagcaccgcccaggcagcagtcgatcatcgatatcgcgggcgaggcattgcagtggggacaagctttcatttcgcagatgtggcgcccggcagtggccgcgccggagcccgcgaatccctgtccggacgacaaggtgcattgcgagaaacaccccagttccatcacggcgatggccgaggacgttgccaatgcgtctgccggcacggtgtttttcaatgccgtatccggcatgggtgcgctggatgccgggctgaaagcggtcagcgcgatcaacggcgcatcggaatacatcgccgagggcgtgaagcacgtcaccatcaacggccagcccgccgcccgcagcggcgcccgtaccacctgcgaagcaaaggtggtggacgagcccgccagcggcgccgatgtttcacccgatgtcaggatcggcggaccgcttgccgtcgtgcgtgaaattcgcagcggcaaatcgcccattgcgctaatgattgcggtggttcttgctttcatgggcaagggcagcgcgacctcgaagtttggctgtttcctgtttggcaccggtgtaagcgtcctcacgcagaaagccggcgacgcactgcgcggtctgtaccaccgcgccagcaatgccgtattgcaaccggtgaatgccgcaacgggcgccaaatatctcgccggcgaggaggacctcgacttcagtctgccgggaccctttgcgctggactggcaacgtatttacaacagccgcgacgagcgtcacggcggtatgttcggcaccggctggagcgtgccgttcgaagtggcgatggaggcgacaccgggcgcggaagataccgactgctggaccttcatcgacgaaaccgggcggcgggtgaatctgcaggcggtgcggccgggccagggattccgcagcccgggtgaaggcctgagcgttcgccgcagtgctgcgggccactggctggtggaaagcgacgaaggtctttaccgcgtgttcgagcccgatccgcacaatgccgaacgtcagcgcctgttgcagttgagcgatcgcaatcgcaatgcattgcggctgcactacaacgatgccggccggctcgaggcgatcgccgacagcacgggtcatcagtgtgtgcggcttcactatgaggagccggtacatccataccgcgtgagccggttggagcggctctacggcgaagatctgcaacagcgcgacgtgctcgtgcgctatcgctatgacgctgacggcaatctggccgaggtgcgcaaccgtgacgatacgattctgcgtcagtttgcgtacgatgccggccatcgcatggtgatgcaccggctgccggcgggcatggaatgccactatggctgggggcgcttcgacggccctgatggcgaagagtggcgcgtcgtcgaacactggaccgatacnnnnnnnnnnnnnnnnnnngactatcagatcgaggcgcgcaccctgcgggtacgcgacagcctggggcgcagcacgttccggcaatgggacgagctgtatcagatcacctgcttcgaagacgaactcgggcacgtgtcgcgcttcgagtggagtcgcgagcggcaattgctggccgtgacggatgcgaagggcggcgtatggcgttgggattacgacgaagccggccgcgtgagcgcggtcaccgatccgctcggccgggtggagcagacgcaatggcatccggtgtgggcgcttcccacgctcgaagcggacacgggcggcaatacgtggcggcatttctacgacgagcgcggcaaccgcatcgtcacgatagacccgttgatgcaacgtacgctctatcaccgcgacgcacacggacaggtcatgatgatcaccgacgcgcgcggcggcgagcgccatctgcgttggaatgaagatggccagttgagcagtcataccgattgttcaggttcggtgacggcgttctattacgacgcgcgcggcgcactcgaatgcgtgaccaatgccgaaggcgactgcacccgctatcggcgcgatgcgttggggcgactcgtcacgatggtgcatcccgatggcagggaagagcgtttcaccgtggacgcggccggacggctgctgacacataccgatgccagcggacgcactacccgttatcagcgtgatcggcgcggcctggtgcaggcgcgcatcgacggtgcggggcatcgcgtgggcttcgagtacgacagctacggacggctgttggcgctagtcaacgagaacggcgaacgctacggctttgcctacgacgcgaaaaaccgcctgacgcggcagacggatctggatggccggcgtcaggagacggattacgacgcgctggatcaggtggcggcggtgcgatacgccgccggcggcgacgcacagatcgagcatacgttcggtcgtgacgcgctcggccgcctgattggccggtacacgcccgatgcgatcactttccacgactacgatgccagcggcaacctgctgacgatctcacgcaagcggcacgacgcgccgcgtaagcgggacgtggaggtgatcgcattccgttacgaccgtctggggcgactgctggaggaagcgacgtcgcaggggaaactgcgtcacgaatacgatgtgctgggcaaccggatcgcaacgactctgcccgatggacgcacgatcaatcatctgtattacggcagcggccacctgcatcagatcaatgtggacggcgaaacggtcagcgacttccagcgcgaccgtttgcatcgtgaagtgctacgcagtcagggcaagctggacacgcgcagcctgtacgacgtgaacgggcggctggcgcgccggcagagttatcgcggcatgaatggcgtggtgccggacagggtgatcgaccgcggctaccactacgatgcgctggaccgcctggtgagcaagcgccacagcttgcagcagcaaaccgtgtatcgctatgacgatagcgggcgcatcagcggatgccataacgaggcgtactgggacacgctgcagtacgacgcggccgcgaatctcgtggaagtgcgggagcgtgcacgcgtgaaaggcgaaccggctccggttgagcgggaaggcaacgtggtgcgtttcaaccgggtgctgcggtttcgggatcgacgctacgaatacgatgcccacggacgcacggcgagccggctgacagcggcggggctgcaacgctatcgatatgacgcggaacaccggttggtggaagtgagtatcgagcagaccggtggcccggttcggcgctacggttacgcgtacgacgcggtggggcggcgtgttgcgaagtttgcgatggacggggatggacagcctttcgggcggacccgttttctgtgggacggtatgcggatggtgcaggaggtgcgggcggacggcgccgatagcttgtacctgtacaacggcgaaggcagttacgagccggtggcccggattgatggccgcaacgggctcgggcatagcatttattactatcacacggatatcaatggcgcaccggaggaactgaccagcgcggacgggcggatcgtgtggcaggcgatgtatcagctgtggggcaacaccgtgcgcgagagcgagccggagagctatgcggtgcgccagaatttgcggtaccaggggcagtatctggaccgggaaacggggctgcattacaacacgctgcggtattatgatccggatattgggaggtttactacgcctgatccgattgggttggcgggtggggtgaatctgtatcggtatgcgccgaaccccatgtcgtggattgatccgatgggattgagttgcaccagcaacttaaaagatattgaaaaccaactttcgcgtggaaaaggtgcaacggtaacagttagctctaaagcagaggcggaagagttgctcagggcttatacaagtgggccagctggaaggcgaggagcgtttagaaatacaacggggcaggaatttccgagggatctatttgatccagaaaaagtggtggggccgggctcaattccacataatgcgtcggattggcttccggctggacgtggtgctttccagagagagggaacataccattgggatgccgccaatgcgggagccaatccaggagatcatgccttgcttggagatcacctgcaaattcacaattttgatgggtcaatcattcggatattctac

SEQ ID NO: 13125 - DNA, 447 bp, Burkholderia fungorum
atgcaacaagcccgttattacaccaatgaggcggcgttcacgctgcccgacgacagctatgtcgatagcagtttcaatgtgatccggctgccgcaattgaacgcgaacctcgttatcagccgcggtgcgttgaaagacggcgaaacgctcgaaagcagtctcgacgagcagatgcgccggctggccgatcaggtggccgaactgcattacagcgcgaagcagcctgtcacgatcggcccgcagcaggacgtggccggcttcgagatgcagaaccgcttcatgcgcggcaaggagccggtatatcagtatcagctggcgtggctgctgcccggcacgcgcacgatgatggcgctgagctacacacgcgccaccgcgctgaccgacaccgacgcggcacactggagcgccatcaaggcgagtatcgattttcgcagtgccacgcgcggc

SEQ ID NO: 13126 - DNA, 2028 bp, Burkholderia fungorum
atgctgaacttcgtaacgcgacgcaccctgacggtcagcggcgcgatgctgccgaccttgcccgacggcgagccggcattgcagctacgcgccatcgcaggggaggaaaccctgtcgacgatctacgaatacgagctgagcctcgtcacgcccgtcgattcgctgctgccggacagcacggccgccaacttcgacctgaaggagatgatcggcggggaactgacggtcaccatccagctcgacggcatggggacgttcgtgccgggtatggccggcgccagtggcgcggcgaatttcggcgccggcatgcgtgagatcagcggcattgtgaccgcggcgagtctggtgagccagttgaaccgccagtatctctaccggttgaagatgcagccgtggatcgtgcttgccgagcggcgcaccgactaccggatcttccagaacaaaacagtcgtcgagatcatcgacgaggtgctcaagagcaattatctctactcctacgtcaagcgtctgggcggcaggtattcgaacctggtctatcaggttcagtacggcgagtcggacttcgctttcatccagcgcctgatggccgaacacggcatctactggttctttgagcacagcaggagttttcaccgcatggtgctggtcgacaatctcggtgcgcacaaacccgtggagagtctcgcgtaccagacgctgtggtactacccgccgggacacaagatcgaccgcgagtacatcgaggaattccagacgaccgattgcatccagtcgggcgtctggacgaccgacgacttcgacttcacgcaaccgggcgcggatctggcggtaaagaacgcgctgccgcagaagacagcgcataaccggctgagcgtctacgaatggccgggcgactatacggacgcgaaagacggcgcgcagttcgcgcgcgtgcgcatggaggaaatccgcgcgcggggcgagcgtgccacgggcagggggcatctgcgcaacgtggtgtgcggcacgacctttacgctcgcgggctatccgcaggaggcggcaaaccgggaatacctcgtgatcggcgcgaagctgctggcggaagaaaccggcgagcaaacgggcgcgggccaataccgcatcgacacgacgttcgagttgcagccggccaccacgatgttccgcgcaccccgcacggtggcgaagccgcgcaccaccggaccgcaaaccgcgatcgtgacggggccgcccggccaggaaatctggaccgacagatacggcagggtgaagctgaagtttcactgggaccattcacccgtgaacgaccagaactcatcgtgctgggtgcgggtgtcgtatccgtgggcgggcagcaacttcggcggcgtgaacataccgcgcgtgggtcaggaggtgatcgtcgatttcgagaatggcgatcccgaccggcccatcgtgacggggcgcgtgttcaatgccgcctccatgccgccgtgggagttgccgggcaacgcgacgcaaagcggcatgctgtcccgttcgatgaaaggccactatggcacagccaacgcgatccgctttgaagataaggaaggcgcggaggaactatggctgcaggccgagcgcgacatgcgtaccgaggtcgagaatgatgcgttgcatacggtcggtaacgaccgcgtcagaacggttgcgcgaaacgagctcgtgacgatcggcgacacgcgccagcggtgtgtcaaggccgatgacgggacactcgtcggcaaagaccgggtggtcgaggttctgaacaatctgctatgcgcagcgggcgacagcatcacgctttcctgcggcgacagcatcatcgagctcaagagcaacggggagatcaatgtcacctgcaacaacttcaacattaccgcgaagcagagcggaaagatcaatgcgcaggcaggaaacctcgacctgaatatgggtggcaaacaggaaggcgtggcgcctcacggttccggtgagaaagcatccatccagtcgcacgtcgacgccgtctttccgaaaaag

SEQ ID NO: 13127 - DNA, 1215 bp, Burkholderia fungorum
atggaatccttcgatatcgcagtgatcggcgcgggcgcggccggcatgatgtgcgcggccgtggccgggcagctcggccgccgcgtggtgctgatcgaccattcgcagcgtctcgcggagaaaatccgcatctccggcggcggccgctgcaacttcacgaatctgtatgccgggccggccaactacctgtcggccaacccgcatttttgccgctcggcacttgcgcgctacacgccgcgcgacttcatggcgctgctcaagcgccatcatgtgacgtggcatgagaagcacaaaggccagctattctgcgaccagtcgagcgacgcggtcatcaacgtgctgaagagcgagtgcgacgcgggccgcgtggcatggcgcacacctttgtccgttgaacaggtgcggcaggacgcggccggccggttcgcgctggatacccggtcggggccgatcactgcacgcgcgctcgtgatcgcgaccggcggcctttccattcccaagatcggcgccacggattttgcttaccgacttgccaggcaattcggtcacaagctgatcgatacgcgccccgcgctggttccgctgaccttcgccgcggccgactgggagccgttctcggcgctgtctggtgtctcgctcgaagtgcaactcgcgaccggcaacaagaagactggcgccgaattcaacgaagatctgctgctgacccaccgcggcctttccggtccgggtgtattgcagatttcgagctactggcagcccggcgagccgattcacatcaacctgttgcccgagcaggacgccacgaccgcgctgctggaagccaaaaccggcacgaagcgccagatcggcaatctgttgtcggagtgggtgccgcagcggctcgcccatgtctggctggaagctcatcaggttccggccgaagcccgcgtggctgacttgccggataaaaccctgcgccgggtcggcgaggctctgtcgcgctggacgctcacccccaacggcacggagggctatcgcaaggccgaagtgacgcgcggtggtgtcgatacgcgcgagctgtcgtcatcgacgatgatgagcgcgcgcgccccgggcttgtacttcatcggcgaggcggtggacgtgaccggctggctcggcggctataacttccagtgggcgtgggcatccggcgtggcggctggtcaggccgccgcggagtatgtccagggggct

SEQ ID NO: 13128 - DNA, 1065 bp, Burkholderia fungorum
gtgtcgttgcccgtgcgtccgcccaagcccacccatcacatgctcgttctcggcatcgaaagctcctgcgacgaaaccggtctcgcgctctacgacacagagcgcggcctgctcgcgcacgcgctgcattcgcagattgcgatgcaccgggaatacggcggcgtggtgccggaactggcgtcgcgcgatcacatccggcgcgcgttgccgctgctggaagaggtgatggaacgcgccggcacggctgccggcgacatcgacgcaatcgcctatacgcagggcccgggccttgcgggcgcgctgctggtcggcgcgagcgtcgccaatgcgctggctatggcgtgggacaagccgaccatcggtatccatcatctggaagggcatttgctctcgccgctgctggtggacgaaccgccgccatttccgtttgtcgcgctgctggtgtccggcggccacacgcagttgatgcgcgtgacggacgtgggcgtctacgagacgctcggcgaaacactggacgacgccgccggcgaagccttcgacaaaaccgccaagctgctcggcctcggttatccgggcggcccggaagtctcgcgtatggcggaattcggcacgcccggcgcagtggtgctgccgcgcccgatgctgcattccggcgatctcgatttcagcttcagcggtttgaagaccgctgtgcttacgcacgcgaagaagctcggcggcgcgaatatctgtgagcaggcaaaagccgatctggcacgcggtttcgtcgacgcggcggttgaagtcctggcggccaagtcgctggccgcgctcaagaaaaccggcctcaaccggctggtcgtcgcaggcggcgtcggcgcgaaccggcagctgcgcgaggcgctttccgcagccgcgaagaagcgcaatttctacgtgcactaccctgacttgtcgctgtgcacggataacggcgcgatgatcgcgctggccggcgctttgcggctgcaacgctggccggaccagtcgggcaaggactacgcgttcacggtgaagccgcgctgggatctgacgtcactcgcacgc

SEQ ID NO: 13129 - DNA, 795 bp, Burkholderia fungorum
atgaatcccgcctttgtgatgcccgatgtgcaaagcacgcccgacacccgccagatcccgattcagcgggtcggcgtgaaggcggtgcgccatccgctgacggtgcgcacgcaaggcggcgaggtgcagccgacggtcggcacgtggaatctggacgtgcatttgcctgctgatcagaaaggcacgcacatgtcgcgtttcgtcgcgttgctcgaagagaacaaggcgccgctggaacccgccacgttccgcaccatgctcgccgctatgctcgaaaagctcgaagccgaggcaggccgcatcgaagtatcgttcccgtacttcgtgaacaagaccgcgccggtgtcgggtgtgcaaagcctgctcgactacgaagtgacgctgacgggcgagacccgcaatggcgcgacgcgcctgttcctgcgggtgcgggtgccggttaccagcctgtgcccgtgttcgaagaagatttcgcagtacggcgcgcataaccagcgctcgcacgtcacgatcaacgccgaactggctggcgacgtcgccgtggaagaactgatccgtatcgccgaagaagaagcctcatgcgaactgtggggcttgctcaagcgcccggacgagaagttcgtcaccgagcgcgcctacgaaaatccgaagtttgtcgaagacctggtgcgcgacgtcgcgcagcgtctgaatgcggacgagcgaatcgtcgcctatgtgctcgaagccgagaacttcgagtcgattcacaatcacagcgcgtacgctgtgatcgaacgggataagcgcgcgggc

SEQ ID NO: 13130 - DNA, 879 bp, Burkholderia fungorum
atgacattcgaacaatggatgcgctcggtgctggagcgcgtcgaaacggcactagaccattatctgccgggcgaggccaccgagcccgccacgctgcatgaagccatgcgctacgcggtgctgggcggcggcaagcgggttcgcccgctgctgtgccacgcggctggcgaactgaccggcgcgcgtgccgaatgcctcgatgcggcagccgctgcgctggaaatgatccacgtgtactcgcttgtccacgacgacatgccatgcatggacgacgacgcgctgcgtcgcggcaagcccacggtacacgtcaagtatgacgaagccacggcattgctggtcggcgacgcgctgcaatcgcaggcgttcgtcgcgctgacctcggacgtgctcgctccggcgcaacaggccgcgctcgtgcgcgaactggcgctggcgagcggctcggtcggcatgtgcggcggccaggccatcgacctggcgagcgtcggccacacgctgacgcgcacgcagctcgaaaccatgcaccgcatgaaaaccggtgccttgctgcgcgccgcggtgcgcatgggcgcgctggctggcgaaacgccggacgcagcggccatgcgctcgctcgacgcatattcggctgctgtcggcctcgcgtttcaggttgtcgacgacattctcgacgtcacgaccgattccgccacgctcggcaaaaccgcaggtaaagacgcgaaggacggcaagccgacctacgtgtcgatcattggactcgacgcgtcgcgtgcgctcgcagcgcaactgcgcagtgacgctcacgccgcgctggcgccgttcggcgcacgcgcgcagcgtcttgccgaattggccgatctggtggtgaaccgggtcagc

SEQ ID NO: 13131 - DNA, 2040 bp, Burkholderia fungorum
atgacgaaaaagctgaacgaagtacccgtcgatgacgacgcaacccaaagcgaagaaaaccctgcggctgttccagccaaggtggaaaaggccaaggctcgcgaccgtcgggcaaaggaaaaagcgctgctgaaagacgctttcgcgtcgtcacagcctggcacggtcgaggaactcgaggagcgccgctccaaactgcgcgcgctaatcaagctcggcaaggagcgcggcttcctcacgtacgcagaaatcaacgaccaccttccggacaacttcaccgagaccgaggcgatcgaaggcatcatcagcacgttcaacgacatgggcgtggctgtgtacgagcaggccccggacgctgaaacactgctgctgaacgacaacgcgccggcggcttcttcggacgacgaagtggaagaggaagcggaagtcgcgctgtccaccgtcgactcggaattcggccgcaccacagacccggtccgcatgtacatgcgggaaatgggcacggtcgaactgctcacgcgcgaaggcgaaatcgaaatcgccaagcggatcgaagatggcctgaagcacatggtgatggccatctccgcgtgcccgaccacgatcgccgacattctggcaatggccgagcgcgtcgcgaatgaggaaattcgcatcgacgaactggtcgacggcctgatcgacgccaacgcggaagacgcggacggcttctccgcgcaagaagcggaagcgatcgaaagcgaagacgaagaggtcgaagaggactcggaagaggacgaggaagaagacgacggcacggcgcaagccacggccaacgccgcgcagatggaagcgctcaagcgtgcgtcgctcgaaaaattcgcgatgatcagcgaatggttcgacaagatgcgtcgcgcgttcgagaaagaaggctacaagtccaagtcgtatctgaaggcgcaggaaacgatccagaacgagctcatgacgatccgctttaccgcgcgcaccgtcgagcgtctgtgcgacacgctgcgcgcgcaggtggacgaagtgcgtcaggtcgagcgtcagattctgcacacggtagtcgacaagtgcggcatgccgcgtgcggaattcattgcgcgtttcccgggcagcgagacggatctcgagtgggccgacaagatcgtcggtgaaggtcacgcgtatagcgcgatcctcacgcggaacattccggctattcgcgaacagcagcagcgtctgctggatctgcaggcgcgcgtcgtgctgccgctgaaggacctgaaggaaaccaaccgtcagatggcggcgggcgaactgaaggcgcgtcaggcaaagcgcgagatgaccgaggcgaacttgcgtctcgtgatctcgatcgcgaagaagtacacgaaccgtggtctgcagttcctcgacctgattcaggaaggcaacatcggcctgatgaaggcagtggacaagttcgaatatcgtcgcggctacaagttctccacgtatgcaacgtggtggatccgtcaggccattacgcgttcgatcgcggaccaggcgcgcacgatccggattccggttcacatgatcgaaacgatcaacaagatgaaccgcatctcgcgtcagatcttgcaggaaaccggtctcgagccggatccggcaacgttggccgagaagatggaaatgccggaagacaagatccgcaagatcatgaagatcgcgaaggaaccgatctcgatggaaacgccgatcggtgacgacgacgattcacatctgggcgatttcatcgaagataacaacacggttgcgccggccgacgccgccttgcacgccagcatgcgcgacgtcgtgaaagacgtgctcgactcgctgacgccgcgtgaagcgaaggtgctgcgcatgcgtttcggtattgagatgagcaccgatcacacgctcgaagaagtcggcaagcagttcgacgtgacgcgtgaacggatccgtcagatcgaggcaaaggcgctgcgcaagctgcgccacccgagccgttcggacaagctgaagtcgttcctcgaagggaat

SEQ ID NO: 13132 - DNA, 1866 bp, Burkholderia fungorum
gtgattcctccgtcattcctgcaggacctgctcaaccgcgtcgatatcgtcgacgtggtcggccggtatgtgcagttgaagaagggcggcgcgaacttcatggggctgtgcccgttccacaacgagaaaagcccttcgtttacggttagtccgactaagcagttctatcactgcttcggctgcggcgcgcatggcacggccatcggtttcctgatggaacacgtcggctcctcgtttccggaggcggtcaacgaactggcgcagtcggtcgggttgaccgtgccgaacgagccttcgccgggatatggcggcggcggttccggcggctatgcgccggcagcttccaaggccgtcaccacggcgctttccgaggtcatgcagaccgcctgcgacttctaccgcaagcaactgcgcagcgcaccggtcgcaatccagtatttgaagaagcgcggcctcaccggcgagatcgcggcccgtttcggcctcggctatgccccggacggctggcagaacctcgaagcggcatttccgaactaccgcgacgattcgctggtcgaatcgggtttggtgattgtcagcgaaaagtccgacgcacagggtcagaaccgccggtacgaccgctttcgcgagcggatcatgttcccgatacgcaatgtgaaggggcaggtgatcggctttggcggccgtgtgctggacggcggcgagccgaagtatttgaattcgcccgaaacgcctttatttaacaagggcagcgagctgtatgggctgttcgaggcacgtctggcgattcgcgagcagcactacgtactcgtcgtggaaggctacatggacgtggtcgcgctggcccaattggggttccagaacgcagtcgccacgctcggtacggcctgcacgccgattcatgtgcagaagctgatgcgtcagaccgacacggtcattttcagtttcgacggcgattcggcgggccggcgcgccgctcgtcgcgcgctggatgcctgtttgccgcatgcggcggataaccggaccatccggttcctttttttgccggccgagcacgatccggacagctacgtgcgtgaatacggcaccgaggcgttcgccgagcaggtcgagcgggccatgccgctgtcgcagttcatgctgaacgaggtgctgaccggcaaggagctggatcagccggaaggaaaggctcgcgcgctgttcgacgccaagcctttgttgcaggcgttgccggccaacgcgctgcgcgcgcagatcatgcatatgtttgccgaccggctcgacgtgccgttcgacgaggtcgccgcgctgtgcgaggtcgattcgcgtatcgcggcggcggcccgcgccgcgccggcccgcaaagaccggcgcagcgtgaccggaatcgaggaaaaaacgctgcgcaatctggtgatgcatccgcgcacggtggcggtgctggacgaggaggccgagcaggcgctcctcacggtgacgcggcacggtgaactgttcgaagaagtgacgacgcacgcgcgtgccctgggcgattcggcggagtttcagttgttgtccgacctattgcgaaacggcgcgaacgccccaactttcgaggaaatctttcgcaaaattctagactatgatgaaaacgtccgggatttgctgctgaaagacccggaggatgcgaccgtcatcgaggaacggcgcgagcaggaacggatcgttggagaggagctgaaggcggcgatcctgaagatgcggtacgacgcttactgcgatcgtctcgagcagctttcgcggcaatcccggcacacgccggaggagttcgcggagctgtcggagctgaaccggaagcgggccgacatgaagcgccggctcgggctg

SEQ ID NO: 13133 - DNA, 444 bp, Burkholderia fungorum
atgagtctcaaggaccggatcaacgacgatatgaaggccgccatgcgggcacgtgaaaccgagcgtctcggcacggtccgcctgttgctcgccgcgatcaagcagcgcgaagtcgacgagcgcatcacgctcgacgacaccgcgatcaccgctgtgatcgacaagatgatcaagcagcgcaaagactcgatcagccagttcgaagcggctggccgcacggatctggccgacaaggaaaaggccgaactggcgatcctgtctgcctatatgccggagcagatgtccgaggccgagatcgttgccgaagttcaggcggcggtcgcgcaaaccggcgcggccggcccgcaggacatgggcaaggtgatgggcgtgctcaagccgaagctggccggccgcgccgacatgaccgccgtctcggcgcaggtcaaagccgcgctcgcgaag

SEQ ID NO: 13134 - DNA, 210 bp, Burkholderia fungorum
atgacgaccatccgcgtaaaagacaacgagccgtttgaagttgccatgcgccgtttcaagcgcactatggagaaaaccggtttgttgacggaacttcgcgctcgcgagttttacgaaaagcctacggctgagcgcaagcgcaagaaggcggctgcggtgaagcgtcatttcaagcgtctgcgtggccagatgctgccaaagaagttctac

SEQ ID NO: 13135 - DNA, 831 bp, Burkholderia fungorum
atgcccaaaagtagcctgtttcccaaccagtcctttctgttcgttcctggtaatcgccccgaacgatttgaaaaggcgctggcgagtggtgccgacgctgtcatcatcgatcttgaagacgcggtcccacccgacgcaaaagacgatgcacgcaacgctgttgcgtcgtgggtttcgcctgatcgccccgttctggtacgcgtgaatgccagcgacacgccatggtttgcccaagacgcaaggctggggcacctgcgcggcatcgccggtatggttctgcccaaaaccgggtccgctgatgacgtgatcacgctgatcgctggatcgcgagccagaatccccgtttaccctatgatagaaaccgggaaagcgctgtggaacgcactggagatagccaaggcgccgtttgtcaagcaattactgttcggcacccttgacttcatcgcggacattggcatgagcggtcatggagaagaactggctgccttccgttcgcagttggcgctcgtctcgcgggttgcagggctcgaaccgcctatagacggtgtttcgcccgatattggcgatgccggacagctgataaaggaaacactagccggaaagcgcctgggttttggaggaaagatgtgcatccatccgaagcaggtatcgatcgtcaaccagtgctatcgtccgagcgacgccgaactggaatgggcccacacggtactggaggctgtgggtaacgcaagcggcacagtgatcacagtcgacgggaagatggtggatcgccccgttgtgcttcgtgccgagcgtatggtcgcccttgcgaggacccgacgtcatgctggt

SEQ ID NO: 13136 - DNA, 1527 bp, Burkholderia fungorum
gtgcacgaaatggataacaccgtagccaccgccgccgcgttgccggccgcgaatgccgctaaacgcggcaagtacctgagcgtcacgtcgatcggtctgatgacggccgccgccgtggtcaccagcctgcgcggacttccgttgctggcgaaggaggagatgacgatgttcgtttatctcgcctttaccgtggttttctatctgatccccgcgtcgctgatttcggccgaactgggcggcgcgtttgccgaccggcgcggcggcatctacacgtgggtcgccgaagcgttcggcacccgctggggctttctcgcgatctggctgcaatggatccagaacgtcgtctggtatcccgtggcgctgaccttcggtgcggcggcgcttgcgtacacgatcggccggccggatctggcgaagaacggcgtctacgtcgggatcttctgcatcgtcgcatactggctttcgacatggttggtgttgcaaggtgtcgaagtattcgcgcggatcgccaactggacgtttgtgatcggcaccatcgtgccgggtgtcgtgctgctcgcgctgctcggctactggatcagcagtggccatccgctcggctggcagcatctgaacgatgccgcgctgtcgcaagggggtcacgcgcgattctggcccgcgattcacggcttcggcacgatctcgtttctcgccggtatcgtgctgttgtttgccggcgtggaggtgcaggccgttcatgtgatcgacatgcgcagcccgagtcgcggttatccggcggccatcggcctcggtgcgctgatttcggtgctgatcttcgcgctgggcgcgttgccgatcgcagcgatcctgccatacgagaagatctcgttgcaatccggcgtattcgatgcgttcagcgccgtgctcgtggacctctggcacatgggctgggctgtgtcggccctgtcgctgctggttggcgtcggcgcgatcagcggcgtgctggcctggttgggcagtccgtcgcgcggtctgctcgaaaccgcgcatgagggcgagctgccgccgatccttcaggcgaagaaccgcaagggtatgcccacgcatatcctgctggtgcaagggctgatcgtgacggtgatctcatgcttctactttgtgatccgggatgtatcggtcgcgttctttctgatctccgcgatgaccatcgcgctctacctgatcgcgtacatgctgatgtacgcggcggcaatcaggctgcgctatagcgcaccggcgttgacccggcctttcaccgtgcccggtggcctggccggcatgtggctgaccgccggcattggttttgtcggcgtgctgttcagtttcgtggtgtcgttctttccgccggaccagttgccggtcggctcgccgtggctttatacgggactggtcgtgctgggcatcgtcgtgttcgcgggcattccgttgatcatccaccacgtgcgccgcagtggctgggcgacggctcatgacgcgccgcttaccggtcccgcggcaacaccgctgaaa

SEQ ID NO: 13137 - DNA, 1188 bp, Burkholderia fungorum
atgaaatacgtcgacgaattccgcgatccggacagagcccgtgcgctgacgcacgagattcgccggctagtcgagcggatcgcacgcacacgcggtggcctggagcgaccgttgcagatcatggaggtttgcggcggtcatacgcattcgatctttcggtacgggattcaccagatgctgccgccggaggtcgagttcgttcatggtcccggctgccccgtctgcgtgctgccgatgggacgcgtcgacgactgtgtggcgctcgccaggcggcccgaagtgatcttcacgacgttcggcgacgcaatgcgagtaccgggctccagcacgagcttgctgaaggccaaggccgatggcgctgacgtgcggatggtctattctcccgtcgacgcgctggcgattgcacgtgcgaatccgcatcgcgaagtgatcttcttcgggctcggctttgaaaccacgatgccgggcacggcaatgacggtgctgcaggcgcacgccgggcgcgtcgaaaacttttcgcttttctgcaaccacatcactatcgttccgacgatcaaggcgattctcgactcaccggacctgcgcctcgacggatttctcggcccggggcacgtcagcatggtgatcggaacccgtccgtatcgcttcattgcggaacagtaccggaggccgattaccgtcgccggattcgagccgctcgatgtgctgcattcggtcttcatggtcttgcgccagatcgcagaaggccgcagcgaggtggaaaaccagtatgcccgtatcgtgcccgagaatggcaatgcacaggcgctgtcggcgatcgggcaggtgttcgagccgcgcgagttttttgaatggcgcgggcttggatcgattgagcattcgggtgtgcggattcgcgatgcgtttgccgcgttcgatgcggagcgcaagtttcctgtagccaacctgcagttggccgatccgcaggcgtgtcagtgcggcgaggtccttaaaggcgtcatcaagccgcctcaatgcaaggtgtttggcactgcgtgcacgccggacaggccgcttggcgccttgatggtatcgagcgaaggtgcgtgcgcggcgcactatcgctacgcacgcatcgatacatcggcgctgaccgcggcagctgctgtttgtcctggacccgctccggcggcgctgcgagtgcaagca

SEQ ID NO: 13138 - DNA, 1683 bp, Burkholderia fungorum
atggaactcgcgatgaatatcagtcctcttgccggcaagcgcttgcctgatgcaatgctggtgaatgtgccgcggcttgtcaccgcgtactacaccgacaaaccagatgccgcgatcccggcgcatcgggtcgcgttcggcacctccgggcatcgcggctcggcgttcgcgcgcagcttcaacgagtggcacgtactcgccatcacgcaggccatttgctactaccggaagcagcaggctatcgacgggccgctctttatcggcatcgatacccatgcactgtccgagcccgcttacgcgagtgcgctggaggtactggctgcaaacggcgtggaggtcatgatcgcgcagaacggcgaatacacacccacaccggcggtgtcgcacgccatccttgcgtacaatcgcggccggtccgcggggctggcggacggtatcgtcatgacgccatcgcacaatccaccggaaagcggcggtttcaagtacaacccgccgaacggcggcccggccgatgagacggtgaccggctggatcgaaagagcggcgaacggattactcgaaagcaggcttgatggcgtgctgcgcatctgtttgtcaaaagcgctgcgcgccacgacgacgcaccggcacgacttcctcaacgcctacgtcggcgatctcgtcaacgtcctcgatatggatgtggtgcgtggtgcgccaatccgcctcggagtcgacccgctcggcggtgcgggggtgcactactgggggccgattgccgagcgctataacctgaatctcagcgtggtcaacgacgaggtcgatccgaccttccgtttcgtgagcgtcgattgggacggacggattcgcatggatccgtcgtcgccgtatgcgatgcaaacgttgatcgaccagaaggatcgcttcgacgtggcctttgcgtgcgataccgatcacgatcgccatggcatcgtcacgcggcacgcggggctgctgccgccgaatcactatcttgcggtcctcgtccattatctgtacgcgaatcgaccgcaatggcgcgctcatgtggcggttggcaagaccatcgtcagcagccagatgatcgatcgtgtgacggaaaaactcggccgcacgctttacgaagtgccagtcggcttcaaatggtttgtcgatgggctgctcgacggttccctgggtttcgcaggtgaagagagtgcgggcgccagttgtctgcggctcgacggcacggcgtggagtaccgacaaggacggtatcgtgcccgctttgctggcggccgaaatgacgacccgcactggccgggatcctgccgaaatttaccgtgatctgacccagcgactgggcgagccggtcgaacgccgcgtccaggcggcggcgacggcgccgcaacgcgcgctgcttgcacggctgtcgccggcacagtttcctcacactgaacttgccggcgaaaaaatcgagcaggtgctcgaccgggcgccgggcaatggcgcagccataggcggcatcaaggtggtcacgaagagcggctggttcgctgcgcgcccgtcaggcaccgaagatgtctataagatctatgcggaaagcttccgcggcgaggctcacctgacacgcatcgttggcgaagcccaggcgatggtcgacagcgtgttcgaggcacaggttgccacggatgatggcgcccggccg

SEQ ID NO: 13139 - DNA, 648 bp, Burkholderia fungorum
atgcaggccatgccgcgggtgcggcaagtggccacgcgtcatacgggcgcagcagctttctacgctaaactgtcgggcgttcgctatgccgggtttgctatccgcagaccgtcacttgccgatcggttcgtatcactcttcaaaggagtcatcatggccaaaaaagaagcttcagcagcggtacagcacgtcaatatcgggatcagcgacaaggatcgcaagaagattgcggaaggtctgtcgcgcctgctcgccgacacctatacgctgtacctgaagacccataacttccactggaacgtgacgggtccgatgttcaatacgctgcacctgatgttcgaaacgcaatacaacgagctggcgctcgcggtcgattcgatcgctgaacggattcgcgcgctgggcgtgcatgcgccgggcagctacaaggaattcgccaggctgtcgtcgattccggaagcggacggcgtgccggcggcggaagaaatgatccgccagctggtggaaggtcaggaagccgtggtgcgtaccgcacgcgcgattttcccgtcgacggaagccgccaacgacgagccgaccgccgacctgctgacgcaacgcatgcaaacgcacgaaaagaccgcgtggatgctgcgctcgatgctggct

SEQ ID NO: 13140 - DNA, 417 bp, Burkholderia fungorum
ttgaacaggctcatgaattacgggatctcaaccgaagcgggcgcgaaactgcgcatcgacaaatggctttgggccgcgcgctttttcaagacgcgttcgctcgcggcggcggccgtcgagaaagggcatgtgcgcattgagggcgccagcgtcaagccggccaaagacgtgcgcgtcggcgacctggtcgagatcgagatcgagcggattgtgtggcaggtggcggtgctgggcgtgtgcgacgtgcgcggcccggcgagcgtcgcacagacgctttatgcggaaaccgaagagagcagggtgaagcggcaggtcgaacaggagcggcgcaagacgtatcgcgaaccggcggccgcattgcacggccggccgaccaagcgcgaccggcgcactatcgacaaactttcaggtgggggt

SEQ ID NO: 13141 - DNA, 696 bp, Burkholderia fungorum
atgcccgatctgattcacaacctcgaagcggtgcggcagcgcatcgccacggccgcgcacgtggccggacgcgatacacgttcgatccatctgctcgcggtctcgaagactttccccgccgaagacgtgcgcgccgcctacgctgccggccagcgcgcgttcggcgagaactacgtgcaggaagccatcaccaagatcgaggcgctcgccgatctgcgcgccacgatcgaatggcatttcatcggccctttgcaatcgaacaagacgcgccccgtcgccgagcatttcgactgggtgcactcggtcgaccggctgaagatcgcgcagcggctttcggagcagcggccggacaatctgccgccgctgaacgtgtgtctacaggtcaacatcagcggcgaggcgtcgaagagcggcgtcggcattgccgaggcggcgcaggtcgcgcaggcgatcgccgcactgccgaagcttaagctgcgcggcctgatggcgattcccgaaccggccgggagcatcgacgagcaacgcgtgccgcatcggcagttgcgcgagttgttcgagcgtctgcgcgacggcggactcgcactcgatacgctgtcgatgggcatgtcgagcgacctcgaggccgccgtactggaaggcgcgaccatcgtgcgcgtaggcaccgcgatcttcggcgcgcgagattactctaac

SEQ ID NO: 13142 - DNA, 1959 bp, Burkholderia fungorum
atgggcaaaatcatcggcatcgacctcggcacgaccaactcgtgcgtggcgatcatggaaggcaattcggtcaaggtgatcgagaactcggaaggcgcgcgcaccacgccgtcgatcatcgcttacatggaagacggcgagattctcgtcggcgcgcctgcgaagcgccagtcggtcacgaacccgaagaacacgctgtacgcagtcaagcgcctgatcggccgccgtttcgaagaaaaagaagtgcagaaagacatcggcctgatgccgtacaagatcatcaaggccgataacggcgacgcatgggtcgaagtgcgcgaccagaagctcgctccgccgcaaatctccgcggaagtgctgcgcaagatgaagaagaccgctgaagactatctcggcgagccggtcaccgaggcggtgatcacggttcccgcgtacttcaacgacagccagcgtcaggcaaccaaagatgcaggccgcattgccggtctggaagtgaagcggatcatcaacgaaccgaccgccgctgctctggctttcggcctcgacaagaacgaaaagggcgaccgcaagatcgcggtgtatgacctgggtggcggtacgttcgacgtgtcgatcatcgaaatcgcggatgtcgacggtgaaaagcagttcgaagtgctgtccacgaacggcgatacgttcctcggcggtgaagacttcgaccagcgcatcatcgattacatcatcggcgagttcaagaaagagcagggcgtcgatctgtcgaaagacgtgctcgcgctgcaacgcctgaaggaatcggctgagaaggccaagatcgagctgtcgtcgagccagcaaaccgaaatcaacctgccgtacatcacggccgacgcatcgggtccgaagcatttgaacctgaaaattacgcgtgcgaagctggaagcgctggttgaagagctgatcgagcgcacgatcgaaccgtgccgcgtggcgatcaaggacgcaggcgtgaaggtcggcgaaatcgacgacgtgattctggtcggcggtatgacccgcatgccgaaggtgcaggaaaaggtcaaggagttcttcggcaaggatccgcgccgtgacgtgaacccggacgaagccgtggccgttggcgccgcgatccagggccaggtgttgtcgggcgaccgcaaggacgttctgctgctcgacgtgaccccgctgtcgctcggcatcgaaacgctcggcggcgtgatgaccaagatgatcaacaagaacaccacgatcccgaccaagcactcacaggtctactccacggccgacgacaatcagggcgccgtgacgatcaaggtgttccagggcgaacgcgaaatggcagccggcaacaagctgctgggcgagttcaacctggaaggcattccgccggcaccgcgcggcacgccgcagatcgaggtgagcttcgacatcgacgcgaatggcattctgcacgtcggcgcgaaagacaaggcgaccggcaaggaaaaccgcatcacgatcaaggcgaactcgggtctgtccgaagccgaaatcgagaagatggtgaaggacgccgaagccaacgccgaagaagatcacaagctgcgtgagctggccgatgcccgcaatcagggcgacgcgctggtccacagcacgaagaaggcgctcaccgaatacggcgacaagctggaagccggcgagaaggaaaagatcgaatccgcgctgaaggatctcgaagaaacgctgaagagcggttcgagcgacaaggccgcgatcgaagccaagatcgaagtggtggccaccgcctcgcagaagatgggcgagaagatgtacgcggacatgcaggctgcgcaaggtgctgaagccgcggcagcgggcgcggcgggtgcgggcggcgcgggtgcatcggcgggtggcgcgagccagcagcaggacgacgtggtcgacgccgagttcaaggaagtcaagaaagac

SEQ ID NO: 13143 - DNA, 813 bp, Burkholderia fungorum
atgacctatttgcaggaagcgagccggaacgccgtcaccgtgccgaaactgcaggcaatgcgcgacgccggcgaaaaaatcgccatgctcacctgttacgacgcgagcttcgccgcgctgctggatcgcgcgggtgtcgacgtgctgttgatcggcgactcgctcggcaacgtgctgcaaggccagaccactaccctgcccgtgtcgcttgccgacatcgcttatcacacggctagtgtagcgcgcgcgcggcccgcggcgctgatcgtggccgacttgccgttcggcacttacggcacgccggaagatgctttcagaagctcggtcgagttgatgcgggccggcgcgcagatggtgaagctcgaaggcggcgaatggctcgcggacacggtgcgcttcctggtggagcgctcgattcccgtgtgcgcgcacgtcggcctgacgccgcaatccgtgcacgcattcggcggcttcaaggtgcaaggcaagaccgaggcgggcgcgacgcagttgctgcgcgactcgctcgccgtgcaggcggccggcgcgcaactgatcgtgatggaagcgattccgacgctgctcgccagcgacgccacgaagcaattgcgcattccgacgatcggcattggcgcgggtctggattgctcgggtcaggtgctggtgctgcacgacatgctaggcattttccccggcaaacggccgcgcttcgtcaaggatttcatgcaggggcagccgagtattctggcggccgtggaagcgtatgtcgccgcagtgaaggacggttcgtttcctggaccggagcacacgttc

SEQ ID NO: 13144 - DNA, 546 bp, Burkholderia fungorum
atgacggttgcttatctcggcctcggcgcgaatctcggggacgcgcgccagaccctgaaagacgcggtggtgtgcctcgcacaacagcacaccatcaccgtgctcgccaagtcgagcctgtatcgcactgccccgatcgacgcgggcggtgacgattatttcaactgcgtcgtgaaggtcgatacgacgctccccgtgcggcatctgcttgcgctatgccacaagatcgaacatcagttcggccgcgaacggccgtttcgcaacgcgccgcgcacgctcgacctggacatcctgctattcggcgatcaatcgatcgacgaagccgatctgatcgtgccgcatcctcgcctgatcgaacgcgcttttgcgctcgtgccgctcgtcgagatcgactccgccttgatcattccgcaacacggccgcgccgaggcgctgctcagcaaggtgagcgatcaacgcatcgagaaggtgaaaggaccttgccagtgtcctatgctcaacgcgttgaccgtcggtgaagacaaaaccggcaagggccgctgcgaa

SEQ ID NO: 13145 - DNA, 1587 bp, Burkholderia fungorum
gtgatcaaaaaatttatccgcaagctattcggccaggacacggcacccgctgacgacaccctgcccgccgaagccgaagcagacgaaaccggcaacgcaccggcgcgcacgccgtcaggcgcgagcaaagcgcgtcgcaagccggcccgctccagcgcgcccgcgaaaaccgtgcgcgatccggacgtgccggtcatcattccgcacgacgtgcacggcatcgaccaggcgctgatctcgaggaacgcgattcgcgtgaccgagggtctgcaacaggcggggcaccgcgcgttcatcgtcggcggggcggtgcgcgatctgctgctcggtatcaagccgaaagacttcgacgtcgccacggacgccacgcccgaacaggtgcagaagctgttccgccgcgcgcgcatcatcggccggcggtttcagatcgtgcatgtgcagttcggccaggagatcatcgagacctccacgttccgcgcgctggtcgatccgcccgcggccgacgcgcctccggcgcgccgcctgaagcgcgacgagctcgaccgccgcacgcatgcggtggacgcgagcggccgcgtgctgcgcgacaacgtgtggggcgagcagcacgaagacgccacgcgccgcgacttcacgatcaacgcgatgtattacgatccggcgacgcaaaccgtgctggattatcacaacggcatggccgacatgcgcgcgcgcctgctgcgcatgatcggcgacccggctacgcgctatcgcgaagatccggtgcgcatgctgcgcgtggtgcgtttcgcggcgaagctcgacttcgagatcgaggacagcacccgcgagccgatcgccggcatggccgatctgatcaacaacgtacccgccgcgcgtctcttcgacgagatgttgaagctgatgctctcgggccatgcgctcgcgtgtctgaagcgtctgcgccaggaaggtctgcatcatggcctgctgcccctgctcgacgtggtgctcgaacagcccatcggcgagaaattcatcacgctcgcgctgaacaatacggacgcccgcgtgcgcgccggcaagccggtgtcgccgggcttcctgttcgccacgctgttgtggcacgacgtgcagcagcgctggcaaaaatttgaagcgaacggcgaatatccggttcccgccctgcatcgtgcgatggacgaagtcctcgacatgcaaacggagaaactcgcgatccacaagcgcttctcgtcggacatgcgcgagatctggggtttgcagttgcgcctcgagaaacgctccggaagaagtgcggtgaagctgctggaacaccaaagatttagagcggggtatgatttcctcctgttgcgctgcgaatcaggcgaactcgatgagtcggtcggtgcgtggtggacggagttcatagaaggagacgtcgccgcacgtgagacattgctcacgcaaggcgggaaggaccgaagccccagaaaacgacggcggcgcagcagtggcgccagaaaccgcaaaccgggcgacggattggagggcggcacgccagccgaacgcacagccgacgaagcaggccatgacggcccgcgcgaagac

SEQ ID NO: 13146 - DNA, 4248 bp, Burkholderia fungorum
gtgttacatttcgtcgtcaatttgcaaaactaccatacgcccacccgccgcagcatgtccgagcgaaacgaatccgccgaccctcacgaaaccgggcaggtccggcctgtgagcggaagcgaccacatcgtgctgcgccggacctttcacgtggtcctcgcgatcgcgctcgtgctgtactttgtagcgaccgggctgtttctcgcgttgcgttacgtggtgctgccgcgcgccgactcgttccgcccgcgcatcgaagccatcgtctcggagaaactgcacgcgcagttcagcatcggcaagctcgcgccgtactggagcggcttccagcccggcctcgacgtcaccaatctcgtgatccgcgaccgcgacggcaagaccgcgctgacgattccgcacgccaccgccacgctctcgtggaagtcgctctggcagtttcatccggcgctgtccagcctgatcgtcgatcagccggacgtgctggtggcacgtagcagcgacggcgtgctctcggtagctggcgtgccggtgcccacgcgccacagcggcaacgacgtgctgaccacctggctgttgcgccaacaggcgatcgtggtgcgcggcggcgtgctgcgctggcgcgatgcggagcacgccgcgccggaattggccctgcgcgatatccggatcgcgattctcaacgacggctacgatcaccggctggcgctgcaggcgcccgccgaagggcatgttctgaacggcccgctcgatttccgcacgcatttcagacacgcgccgctctccgcaatcggcaagccgatcaactggactggccaggtgtacgtgtcgaccggcccggtcgatctgccgaccctcgcgcgctacgtcaatttcccgatcgagacgtttgccggccgcatcgacaatgcaatctggatcgacttcgccgatggccgcatgaagtcggcaagcgggcaactcaccggcgccgacgtcgccatgcgggtgcgtccgacccagccgaagctgctcgtgccggtcgccagtttcatgtggcgcctcgaagccgaggcaggcgactacaaactgcaactgagccagtttcacgccgaactcggccagccgccgctcgacgacggcacgccgctcacgcgcacgctcgcgctcaccacgctgaacggacgctaccggaccgcctcgcagcaacacgggcaactggtcagcgtaagcggcgaccgggtcgacctgggcatcctcgcggaattcagccgcgcgttgccgctgtcgcggcgtctgttgaacaatctcgtgcgctacaacccgcgcggcctggtggccaattatctgatcgaagtcgagcgcgccaaaccggagtcgggcgaagcgggcagcgaccatcagccgagcggcgccgagccgatcgagcgctatcgcttcaagggcgatctgcaaggcatcagtgtcgccgcccaggaaccgccgccggggctcacgccgctgaatcacccgcgcgcgggcattcccggcatcgagaatctgtggggcagcgtggacgccgacgaaacccacggcaccgccctgctcgacacctccaacgtcgccattacgctgccgggcgtgttcgacgacccgcgtctgaagctcgaccgtctgcatggccgcgccgactggaccatcacgccgaaggcgccgggcgagaaccacccggccttcaccgtgaagctggccgatttcggcgtttcgaacgccgacgtcgcggccaccgccaccgccgactacagcaacccgggccacgggcgcggttcgctcgatctgaaagccgacttccagcgcgctcaggtgacgcgcatcgcccgctatctgccgaccagcatcggcgaaaagctgcgcatctatctgggccacggcttgcaggccggcatgtcgcacggcgcgaccatcgaggtgcacggcgacctgaccaaattcccctattcgcgcgacccgagcgccggactgttccatatcgtcgcgccgttcaagggcggcaagttcgatccgacgccgtacccgccgcgcaagatgaggaacggcacgccgaacgtatggccggcgctcgacggcatcgacggcgtattcgaactcaggcagaacgtgatgcgcttcgacatcgaccgggcgcattacaagcaggtcgcgctcaccggcgtcaacggcaggatcgacgacctcggcacccgggcgtcgagcctcgtcatcaagggcgacggccacgggccgctcgccgacatgctcgactacgtgaacgccagctcgctcggcatcatggcgaagcacgagaccgacaaggtgcgcgccgaagggcccgcctcgctcgcgctcaagctgaccgtgccgcgcacgccgaagccgcatatcggcgtggagggcgcggtcggcttccagaacaaccgcctgagcgtcgagaacgtgccaccgctgtcgcagttgaaaggcaaggtgcggtttaccgagcacacggcgcaggtggaccggctctcgggacaattcctcggcggcgacgtgcatgcgaacggcggcctgaagcaggacggcacctatgcgctcgacctgggcggccatatcgccgtcgacgcggcgcgcggactcgatctgcacggcccgggcgcacaggtgctgacgcgcatgagcggcagcgcgccctacgcgctcaacgtgcgcggcgcgaagggacggctgcccgaagtgacggcgaattccgatctgaccggccttgcgctcgacttccccgcgccgttcaacaagccggtcggcgcgccgatgccgctgcgcttcgccgtcagcccgtccgccgcgccgggcgaagcgggactggagcgcgccgacctcaccttcggcccgctcgccgccgcctatctgctgcgctaccagccgaaaacgccgccgaccgtggtgcgcggcgcggtcggcgtgaaccggcccgccgacctgccgtccgaaggcgtgatcgccgccgtcgatctggacacattcgacgcggacgcctggcgtgcgctggtcacgcaaatacgcaccaaagacgcgcccgctccggcctccgtcacgccggcgccggccacgccgaatccaaccgtcgcgcaattcctgccgagccgcttcgcgctgcacgtcggcacgctgacgctgctcaagcgtcactgggacagcgtgatcgtcggcgcctcgcacgcggatcgcacgtggcaggcgaacatcgcgtcgaatcaggtgtccggccacgtgtcctggctgccgggcccgaccagggagtcgcccggcacgctgcaggcgcgctttgcccgcgtggtgattccgtcggccaccgacaaggacctgctcggcgaggtcatgtcggcgccggcgcagaacatgccgtccatcgatctggtggtcaacgaattgatcgtgcgcgaccacaacgtcggccgtctcgaagtcgacgcgcacaacttcgacgaagacggcgtgccggtctggcaactcgacaagctcgacatcaccaacccggcggctacgctcagcgcgaccgcgaactggcgcacctcgaccgacctcggcagcagcgccgacgaagccacagcgcggcgcaccgtgttcgatttcaagctcgacatcaaggacgccggcgcgctgctcgaacggttcggccagccgcgcacgctcaaggcgggcgctggctcgctgtcgggcaagatggtgtggcaaggcggcccgacccggatcgactacccgacgctcaacggcaatctggccgtcgatctgcgccacggccagatcctcaaggtcgatccgggcgtcgccaagctgctgggcgtgctcagcctgcaaagcctcgcgcgcttcgccacgctgaacttccgcgacgtgatcggcgaaggcctgccgttcgagcacgttaccggcaccgcgcagattcacaacggcattggccgcaccgagaacttcgagatggtcaccgcgccggcgcgggccgagatgaaaggctcggtggatctcgcccaggagacccaggatctgcacgtccagatcgtgccgaccgtcagcgccggcgctgcggtgatcgccgccacggtcatcaatccgctgctcgggctgggcgcgctggtggccgatctggcgttcagccagtcggtctcgcacgcgttcgcgcgggagtatgcgatcaccggctcgtggtcgaaaccgcacgtcgagcgggtgaagggcgatcgcggtaagatggacgctccggcttcgaccgtggaagcgcac

SEQ ID NO: 13147 - DNA, 900 bp, Burkholderia fungorum
atgcaagtgaccagccagttcaagaccgtcgcgctcgtcgggcgcaacaatacgccgggtatcgccgagccgctgaccgcgctcgccttgtgcatcgcgaagcgcggcttcgaggtcgtgttcgaagcggacaccgccgccgagatcggcgtcaccgactacccggcgctgcgccccgccgagatcggcgcgcgcgcagatgtggccgtggtgctgggcggcgacggcaccatgctcggcatcggccgccagctcgcgccgtatcgcacgcctttgatcggcatcaaccacgggcggcttggtttcatcaccgacattccgatctccgacatgcgcgagatcgtgccgcaaatgctggccggcaatttcgaacgcgaagaacgcgtgctgctcgaagcgcgcatcatgcgcgacggcaatccgatctatcacgcgttggccttcaacgacgtggtggtcaaccgcagcggcttctcgggcatggcggagctgcatgtctcggtggacggccgcttcatgtacaaccagcgctcggacggtctgatcgtggccacgcccaccggctcgaccgcttatgcgctgtcgtcgcaagggccgattctgcatccgcaattgcagggcatcgtgctggtgccgattgctccgcacgcgctgtcgaaccgtccgatcgtgctgccggacgattccaaggtgagcatccagatcgtctcggggcgcgaagtgaacgtcaatttcgacatgcagtcgttcacctcgctcgaactgagcgacacgatcgaagtgcgccgctcgcgtcatacggtgccgatgctgcaccccgtcggctacagctatttcgccacgctgcgcaagaagctgcactggaacgaatacccgtcgcacgaagaagaccccaagccc

SEQ ID NO: 13148 - DNA, 1188 bp, Burkholderia fungorum
atgaccgacggtcatctgtcgcaagatgcgacccacgagcgtcccgaaaacggcctcaaattcgaactgctcggcgtcgacggccaggcccgccgcggccgcgtcgccctgaatcacggcgtggtggaaacgccgatcttcatgccggtcggcacctacggcaccgtgaaagcggtgcagccgcgcgagctggaggaaatgcacgcgcagatcatcctcggcaacactttccatctgtggcttcgtccggggctggaaacgatcgaagcgtacggcggcctgcatggcttcatgggctggaagaagccgatcctgaccgactcgggcggcttccaggtgttctcgctcggcgatctgcgcaagatcaccgaagatggcgtcacgttcgcgtcgccgatcaacggcgacaagctgttcctgtcgcccgaagtgtcgatgcagatccagaaagtgctgaactcggacatcgtcatgcaattcgacgaatgcacgccgtacgcgacccataacgtgccgacctcgcaccaggaggcggccgattccatgcgcatgtcgatgcgctgggcacagcgctcgatcgacgaattcaaccggctgggcaatccgaacgcgttgttcggcatcgttcagggcggcatgttcgaagacctgcgcgacgagtcgctggccggactcgcggagaaggatttccacggtctggcgatcggcgggctgtcggtcggcgaaccgaaagaagacatgatgcgcgtgctgaaccacatcggtccgaagctgccggccaacaagccgcactacctgatgggcgtcggcacgccggaagatctggtggcgggcgtcgccgccggcgtcgacatgttcgactgcgtgatgccgacccgcaacgcgcgcaacggctggctcttcacgcgtttcggcgacatcaagatccgcaacgccgcgcacaggaattcgctgcgcccgctcgacgagcaatgcggctgctacacgtgccgaaatttcactcgcggctatctgcatcatctgcatcgtgttggggaaatcctcggtgcgcagttgaacacgatccacaacctgcactactacctcgaactgatgcaggaaatccgcgacgcgatcgacgcgaaaatgttcgagccgttccgcaaacgctttcacgagaaccgcgcgcgcggcaccgccgaggcgccg

SEQ ID NO: 13149 - DNA, 1056 bp, Burkholderia fungorum
atgttgacgctttccgatttcgatttcgatctgcctcccgagctgatcgcgcaagtcgcgctgcccgagcgcagcgccagccgtctgctcgaggtggacaacccggccggcgccaccggcccggcgcgcctgatcgaccgccgctttgccgagttgcccgactgcatcgcagccggcgacctgctggtcttcaacgataccaaagtcctgaaggcgcgcttcctcggccagaaggccagtggcggcaaaatcgaagtgctggtggagcgcctcaccggcgaacgcacggcgctcgcgcagattcgcgcgagcaagagcccgcagcccggcaccaccatccgcctggcggatgctttcgacgtcacggtcggcgagcgcgtcgagccgttctacacgctgcatttccccgccgactgcctgacgctgatcgagcaattcggccgcctgccgctgccgccctacatcgagcacgatcccgacgcgaccgacgaaacccgctatcagacggtgttcgcgcaaaatcccggcgccgtcgcagcgccgaccgccggcctgcatttcgacgaggcgctgctcgcgcgcctcgacgccgccggcgtggagcgcgcaacgctgacgctgcacgtcggcgcgggcacattccagccggtgcgggtcgaaaacctcgccgagcacaagatgcacagcgagtggtatcacctgccgcaatcgctcgccgacaaaatcgcggcgacccgcgcgcgcggcaaccgcgtgatcgcggtgggcacgacctcgatgcgcgcgctcgaagccgcagcgcgcgacgccgaagccgcgggccggccgcttgccgccgccagtacggaaaccgacattttcatcacgccgggctatcgattccgcgtggtcgaccggctggtgaccaatttccatttgcccaagtcgacgttactgatgctggtgtcggcgttcgccggcgtcgagacgattcgcgaggcgtaccgccacgcgatcgaagcgcgttaccgctttttcagttacggcgacgcaatgctgctcacgcggcgcgacgcg

SEQ ID NO: 13150 - DNA, 804 bp, Burkholderia fungorum
atgaatactccgcttattcgcccagagctcgtcacgtcgcccgaggggccttttctggccgcggcagaactcacgcagcgcgaatcccgcgcgaccgcgtcgcatagtcacgcgcgtgggcagttgatgggcgcgttgagcgggctcgtctcggtcggggtgaaccggcagcattgggtcgtacccgcgattcacgcaatctggattccgccgcactgcgagcattcggtccgctcgcacggtccgttctccgggtggagcgtgttcatcgccgagcaaaggtgcgccgaattaccaggcgagcctcgcgcgatccgcacgacatcgctgttgcgcgcggcggttcgccgcgcggcgagctgggacggcacgcagctcgacacgcagcgcagccgcatcgcggaagtcatcctcgacgagctggcggcatcgcaggccgaatcactggggttgcccgcgcctgaagatgcgcggctcctgcgcattacggacgcattggtccgtgatctgtccgattcccgccgtctcgaacaatgggccgagtgggccggactttcgccgcgcacgctgagccgcaagttttccgcggagacggggttgagttttgcgcaatggcgcgcgcaagcgcgactgcttcgcgcgctggaactggttgccgatggcgttagcgtgacgactatcgcgttggaattgggctatgacaacgtcagcgcgtttatcgacatgttcaggcgggcaacgggaaccacgccggggcgctacggcacggcagagccagggttgacgggtgatggacgcgacgag

SEQ ID NO: 13151 - DNA, 1614 bp, Burkholderia fungorum
gtgatcaacatgcccgttagcgaagtcgtagaactgtcgcgcctccagttcgccatcacggcgctttatcacttcctgttcgtcccgctcacgctcggcctgtcctggctgctcgtcatcatggaatcggtctacgtgatgaccggcaagcagatctacaaggacatgacccagttctggggcaagctcttcggcatcaactttgcaatgggcgtgaccaccggtctcacgctcgaattccagttcggcaccaactggtcgtactactcgcactacgtgggcgacattttcggcgtgccgctcgccgtcgaaggcctgatggcgttcttcctcgaatccaccttcgtcggcctgttcttcttcggctggaagcggctctccagggtgcagcacgtgatcgtgacgttcctcgtcgcgctcggctcgaacctctcggcgctgtggattctggtggccaacggctggatgaacaatccggtcggcgcgaccttcaactaccagaccatgcgcatggaactcgacagcatcttctccgtgctgttcaatccggtcgcgcaggtcaagttcgtgcacactgtctccgccggctacgtgacggcctcgatgttcgtgctcggcgtgtcgtcgtggtatctgctcaagcgccgcgacaccgaattcgcactgcgctcgttcgcgatcgccgccggtttcggccttgcgtccacgctgtgcgtgatcgtgctcggcgacgaatccggctaccgcaccggcgaagtccagcaggtcaagctcgccgcgatcgaatccgaatgggaaaccgcgcccgcgccggccccgttcacgatcatcgggattccgaaccagaaagaagagcgcaccgactacgcgatccgggttccctacgcgctcggcctgatcgccacccgttcgctcgacgaacccgtggtcggcctgaaagacctgatggtgcgcaacgaagcgcgcatcaggaacggcatgctggcctacgccgcgctgcagaagctcaaacagggcgacgtcaccgacgaagccaaagccgccttcgacgcgcacaagcaggatctcggctacggcctgatgctcaagcagttcaccgcgaacgtcaccgacgccacgccggaccagatcacccaggccgcgaagaaaacgatcccgccggtagcgcccgtgttcttctcgttccggctgatggtgggcctcggcatcctgttcctcgccaccttcgtgctcgccttctggttctgcgcgcaacgttcgctgctgctggaaaagcgccgctggttcctgcgctgggcgctgtgggcgattccgctgccctggctcgcggccgaattcggctggatcgtcgccgaggtgggtcgtcagccgtggaccatcgcgggcattctgccgactaacctgtcggcctcgagtctgaccgcgggcgacctgtatctgagtatcggcggcttcgtggtgttctacacggtgctgttcatcatcgaaatcatgctgatgttcaagtacgcgcggctcggtccttcttcgctgcacacgggccgctatcaccacgaacaaccgtcaccggatcagccgctggacaaccggccgctgccgaccagcacggtcgcc

SEQ ID NO: 13152 - DNA, 1017 bp, Burkholderia fungorum
gtgtcgcgagcagtgccggctatgaaggttgccgtcctcggcgccggcgcatggggcaccgcgctcgccggccatctggccgtacggcacgacacagtgttgtgggcgcgccagcccgcgctcattgccgatctccgcgcttcacacgaaaacgcccgctatctggcgggcgttgcgttgccgccggcgcttcgctatgaaacggatctgaacgcagcgctcgaccacgcgctcgccgacaacgcgttatgcgtcgtggcaacccccgtggccggactgcgcggtctgttccgggccatgcgcgatgcaggcaaagtgccggcgcatgtggtgtggctgtgcaaaggttttgaagccgactcgcagttgatgccacatcaggtggtcgcggccgaactgccggagcacggcagcaacggcgtgctgtcgggtccgagttttgcgcgtgaagtcgggcagggcttgccggtcgcgttgaccatcgccagcgcttcggcggcgtgccgcgagcgcacggtggccgcgttccatcacggcgccatgcgcatctataccggcgacgacgtcgtcggcgtggaagtgggcggcgcggtgaaaaacgtgcttgccattgccacgggcattgccgatggactcgggctcggtctgaacgcgcgtgcggcattgatcacgcgcggcctcgctgaaatgtcgcgcctcggcgtgacgctcggcggccgtgcggaaaccttcaccggtttgaccggcctgggcgatctgatcctgaccgccaccggcgatctgtcgcgcaatcgcacggtcggcctgcaactcgctgcgggccgcacgctcgacgatattctcggcggcctcggtcacgtggccgaaggcgtgcgttgcgcgcaagcggttcttgcgatcgcccgcgcacatgcaatcgagatgcctatcacgcaggcggtgtgtgccgttctgttcgacggcgtggctccgcgcgacgccgtcagcgccctgctgcggcgcgactccaaagccgaa

SEQ ID NO: 13153 - DNA, 1785 bp, Burkholderia fungorum
atggatgggaatccgtttctgaaaattcagcggctgggacgcgcgctgatgctgccgatcgcggtgctgccggttgccggcctgctgctgcgactcggccaacccgatgtgttcaacatcaagatgatcgccgacgccggcggcgcgatcttcgacaacctgccgctgctgttcgcgatcggcgtggcagtcggcttcgcgaaagacaacaacggcgtggcgggtctggccggcgcgatcggttatctggtcgaagtcgcggtgatgaaggacatcaacgacaagctcaacatgggcgtgttgtcaggtatcgtggcgggtatcgtggcgggcttgctgtacaaccgatacaaggacatcaagctgcccgactacctcgcgttcttcggagggaaacgcttcgtgccgattgtcacgggggtggtctgcctcgcgctcggtatcgtgttcggctatgtgtggcaaccggtgcaggccgtgatcgatacggccggccactggctgaccaccgccggtgcgctcggcgcgttcgtgttcggcgtgctgaaccgtttgctgctcgtcacgggtttgcatcacatcctcaattcgctgacgtggttcgtgttcggcacgttcacgccgccgggcggcgccccggtgacgggcgacctgcatcgcttcttcgcgggcgacccgactgcgggcaccttcatgacgggcttcttcccggtcatgatgttcggcctgccggctgcctgtctcgcgatgttccacgaagcgccgaaggagcgccgcgcggtggtcggcggcctgctgttctcgatggcgcttacgtcgttcctgacgggcgtgaccgagccgatcgaattcagcttcatgttcctcgcaccggtgctgtacgtgatccacgcgttgttgacgggcctttcgctcgcgatctgttcggcgctcggcattcacctcggcttcacgttctccgcaggcgcaatcgactacgtgctgaactacggtttgtcgacgcgaggctggtgggcgattccgatcggcctcgtctatatggtggtgtactacgggctgttccgcttcttcatccgcaaattcaacatggcgacgccgggccgcgaacccgccgcagccgacgaacaggtcgattcgttcagcgcgggcggctttgtctcgccggtcgccggcgcagccgtgccgcgtgcgcagcgttatatcgcggcgcttggcggtgcggcgaatctgtcggtggtggatgcgtgcacgacgcgtctgcgtctgtcggtggtcgattcgaacaaggtctccgaaaacgaactgaagacgattggcgcgcgcggcgtgctcaagcgcggctcgactaacgtgcaggtgatcatcggaccggaagcggacatcatcgccgacgaaatccgcacggtgatcgcgcaaggtggcggccatgcggtgacgccggccgctgctgccacggctactgccgctgcggcggttgcgccggtcgcggccgcgggcgatcaggcccggggcggcccgctcgatcccgatccgctgcgctggctcgccgtgttcggcggcgcgggcaacgtggtgtcgctggacgcggtggcggcaacgcgtctgcgtgtggtcgtgcgcgatccgtcggcggtcgatcgtcaacgcctggcgacgctcgataccgcatgggtttcggcggacacgttccatatcgtcgtcggcgaggccgcgcagcgctacgctgaaaagctcgcgacgcgtctgtcgccgggtacgggtgccggcgcggcgccgcagcccgcg

SEQ ID NO: 13154 - DNA, 900 bp, Burkholderia fungorum
gtgatcgtgctcggcgacgaatccggctaccgcaccggcgaagtccagcaggtcaagctcgccgcgatcgaatccgaatgggaaaccgcgcccgcgccggctccgttcacgatcatcgggattccgaaccagaaagaagagcgcaccgactacgcaatccgggttccctacgcgctcggcctgatcgccacccgttcgctcgacgaacccgtggtcggcctgaaagacctgatggtgcgcaacgaagcgcgcatcaggaacggcatgctggcctacgccgcgctgcagaagctcaaacagggcgacgtcaccgacgaagccaaagccgccttcgacgcgcacaagcaggatctcggctacggcctgatgctcaagcagttcaccgcgaacgtcaccgacgccacgccggaccagatcacccaggccgcgaagaaaacgatcccgccggtggcgcccgtgttcttctcgttccggctgatggtgggcctcggcatcctgttcctcgccaccttcgtgctcgccttctggttctgcgcgcaacgctcgctgctgctggaaaagcgccgctggttcctgcgctgggcgctgtgggcgattccgctgccctggctcgcggccgaattcggctggatcgtcgccgaggtgggtcgccagccgtggaccatcgcgggcattctgccgactaacctgtcggcctcgagtctgaccgcgggcgacctgtatctgagtatcggcggcttcgtggtgttctacacggtgctgttcatcatcgaaatcatgctgatgttcaagtacgcgcggctcggcccttcttcgctgcatacgggccgctatcaccacgaacaaccgtcaccggatcagccgctggacaaccggccgctgccgaccagcacggtcgcc

SEQ ID NO: 13155 - DNA, 810 bp, Burkholderia fungorum
atgcagcgcagaaatatcctcaaagccctctcagcagtcatcgccggcgcggcgatcgtcaccagcttcggcgcgcacgccgacgacaaagtgatcaaggtcggcaccatcggcggcccggacgcgcaaatctgggaagtcgtcacgaaagtggcgaagcgcgaaggcctgaacgtgaaggtggtcgaattcaacgactacgtgcagccgaacgccgcgctcgacgccggcgatctcgacgcgaacagcttccagcaccagccgtacctcgacagccagatcaagcagcgcggctacaggatcgtcaacgtcggcctcacgtacatctcgccgctcggcatctattcgaagaagctgaagtcgttgaaggatctgccgcaaggcgcgaaggtcgcggtgccgaacgatccgtcgaacgaaaatcgcgcgctgctgttgctgcaaacgcaaggcgtgatcaagctgaaggccggcgccggcacgaacggcaataacgcgacgccgctcgacgtcgcggaaaatccgaagaagatcaagctgatcgaactggacgccgcgcaactgccgcgctcgctgtcggatgtcgacgccgccgcgatcaacacgaacttcgcgttggccgccggcctgcagccgaccagagatgcgatcgcgctcgaagacgtgcatagcccgtacgcgaacctgattgccgtgcgcacgcaggataaagacaagccgtgggtcaggaagctggttgccgcgtatcagtcggaagacgtgcgccagttcatcaagacgcagttcaagggctcggtggtgccgtcgttt

SEQ ID NO: 13156 - DNA, 732 bp, Burkholderia fungorum
atggaaactcgctggtccgcactgatgcctgacgcccgcaacgtcacgccgctctatttgcagctcgcgcgcaatcttgcgacagcgattcattgcggcgtgtggtcggcgggcgaggcgctgccctcggagcgtacgctttcggacgcgatcggcgtgtcgcgcatcacggcacgcaaggcgatcgagttgctggtcgagcaaggcctgatccggcgcgcgcgtggcgcgggcagtttcatcacgccgcgcgtcgaagacccgctctcgcggctcaccggtttcacgaagaagatgcagcagcgtggtttccggccggattcggtatggctcgagcgcgatatccgcgccgccaaccgtgacgaactggttcatctcgggctgtcgcccggcgcggcggtggcgagtctgcggcgcttgcggcgcgcggacggcatcgtcatggcggtcgagcattcggcgctgccggccgcgatcgtgcccgacccgcaagccatcggcgattcgctttacagctatctcgaacatcgtggcgcggcggtcgtgcgcgcgctgcagcactttcgcgcggtcaacgcttcgagcgagatcgccgcgttgatggatatcgaaccgcgctcggcgctgctggtcattacccgtattggctatagcgccgaccagcgcgcaatcgagctcaccgacacgtattgccgcgacgattactacgactttgtcgctgaattgcgcacc

SEQ ID NO: 13157 - DNA, 1101 bp, Burkholderia fungorum
atgctgaccggaaacatactcaccaccgatgggtggattcacggcacgctcgaatacgaaaacggccgcatcacggcgctcgccggcgaccgcgtcgatccgtcgaccaacgacgcgccgtacatcctgcccggcttcatcgatctgcacgtgcatggcggcggcggcgccgacgtgatggaaggcgaccgcgcgatcgaaaccatcacccgcacgcatgcgcgctacggcacgacaagcctgctcgccaccaccatgaccgcgccgcgcgacgaattgatgagcgtcgttgcggggctcggccacaacgcgcggatccgcacgccgggcggcgcgcgcgtgctcggcgtgcatctggaagggccgtacatcaatcccggcaagctcggcgcgcaaccggacgcggcggtctcggcggtaatggacgaagtgctgaagtatctgtccatcgcgccgattcgcgtggtcacgctggcgccggagattgccggccatatggagatcatctccgagatggcggcgcgcggcgtgcgcgtgcaactgggccattcgctcggcacctacgacgacgccgtcgccgcgctcaagcacggcgcctgcggcttcacgcatctgttcaacgcgatgtcgccgctgcaccatcgcaatcccggactcgtcggcgcggcgctcgcgcacgccgagttcgccgaaatcattcccgatctgctgcacgtgcatccgggtgcgatccgcgcggcgttgcgcgcgattccgcgtctctacgtggtcacggacagcacctcggccaccggcatgcccgacggcgaataccgcctcggcagccagcatgtgacgaagtgcctcggcggcgtgcgtctcgccgacggcacgctcgccggcagcaccctgacgatggatcaggcgctgcgcaatctcgtgtcgatcggcttgccgatcgccgatgtatcgaaccgtttgtcgcgctacgccgccgactacctgggcatcgaagaccgcggccgcatcgcgcgcggtgcatgggccgacgtggtcgtgttcgatcgtgaactggcgttgagcgcgacttacgtcgaaggagaagcaattgtcgaatatgct

SEQ ID NO: 13158 - DNA, 528 bp, Burkholderia fungorum
atggcaggcattctgatcattgcgcacgctccgttcgccaccgcgttgcgcgattgcatttcgcacatctatggtggcttgccggctcgcatcggcgtaatcgacgtatcgccggattgcgaccccgcacagcaggtcgcgttcgcgcatgccgaggtcgagcgtctcaaggaagaaaacggcgcacttgtgctcaccgatatgttcggcgccacgccggcgaatatcgccggccggcttgcttcggtgccgaatgtgcgcgtgctgtgtggcgtcaacctgccgatgctggtgcgcgcggtctgttatcgcgccacaccgctcgacacactggtcgacaaggcgcttgcgggcgccaccaagggcgtgcacgcaatcggaccggccacgccggcgcccgtcgcgcccactgcggagtccggcgactgtctgcccgcactgccgcccgacgcggcatccggcggcgactgtttaccggccttgccggccgacgccgatctgacgcagaaagccggtccagccggtctg

SEQ ID NO: 13159 - DNA, 267 bp, Burkholderia fungorum
atgctgcaacaggaaacgactatcgtgaacaagctggggctgcacgcgcgcgcgtcggccaagttgacgcaactcgcgggcaactatcaggcggaaatctggatgagccgtaacggccgccgtatcaatgcgaagagcatcatgggtgtgatgatgctggccgcgggtattggcagcacggtgctcatcgaaacggaaggcgcggacgaaaaagaagcaatggacgcattgctgaaactgattgcggataaatttggcgagggtcag

SEQ ID NO: 13160 - DNA, 1803 bp, Burkholderia fungorum
gtgtctgagagcattgcagcggtttgccgcggcattacacaactagaggaggtgcgcgtgtccttcacgctgcatggaattcccgtgtcacgcggtatcgccatcgggcgggcctatctgatcgccccggctgcacttgacgtagaccactatctgattgaaccggcccagatcgacggcgaggtcgagcgctttcgcgcggcccagcaacacgtgcatcgcgagctcgacgcgttgcgcgccgatctcgccgcagacgcaccgagcgagatgggcgcgttcatcaacgtccactcaatgatcctgaacgacgcgatgctcgtgcaggaaaccatcgacctgatccgcacgcgccgctacaacgtcgagtgggcgctgaccgaacagctcgagcgcctgtcgcgccatttcgacgatatcgaagacgaatacctgcgcgagcgcaaagccgatatcgagcaggtggtggagcgcgtgctgaaggcgctcgccggcgcgtcggtcgcgctggtggacggcgtgcacggcgcctgcgacgagatgatcgtggtcgcgcacgacatcgcgccggccgacatgatgcaattcaaaacgcaaacgttccagggtttcgtcacggacctcggcggccgcacctcgcatacagcgatcgtcgcgcgcagcctgggcattccggccgcggtcggcgtgcagcatgcgagcgcgttgattcgccaggacgacctgatcattgtcgacggcgatcatggcatcgtgatcgtcgatcccgcgccgatcgtgctggaggagtactcgtaccggcagagcgagaaagcgctcgaacagcgcaagctgcagcggttgaagttttcgcccacccaaacgctgtgcggcacgcgtatcgagttgtgcgcgaacatcgagttgccggaagacgcgcgcgcggcgctcgaggcgggggcgatgggtgtcggcctgttccgctccgagttcctgttcatgaatcacaaggaccgcttgccggaagaggaagagcaattcgccgcctaccgtcgcgcggtcgaattgatgaacggcctgccggtcacgatccgcacgatcgacgtgggcgccgacaagccgctcgattcgatgggcgggggcgacggctatgaaaccgccgcgaacccggccctgggtctgagagcgattcgctggagtctctccgagccgcagatgttcctcacgcagttgcgcgcaatactgcgcgcgtcggcgttcggtaccgtgaagattctgattccgatgctcgcgcatgcgcaggagatcgaccagacactcgatctgatccgcgaagccaagcgtcagctcgacgacgcgggcatcgcctacgatccgaacgtgcaggtgggcgcgatgatcgagattccggctgccgccatcgcattgccgctgttcctgaagcggctcgattttctgtcgatcggcaccaacgatctgatccagtacacgctggcgatcgatcgcgcggacaacgcggtcgcgcatctatatgacccgctgcatcccgcggtgctgcatctgatcgcgttcacgctgcgcgaggcgaagcgggcgggtgtgccggtgtcggtgtgcggcgaaatggccggggacccggcgttgacgcgtctgttgctcggcatgggtctcaccgagttctcgatgcatccgagccagctgctggtggtcaagcaggaagtgctgcgcgcgcatctgaagacgctggaaaagccggtggccgatgtgctggcttcgttcgaaccggaagaagtgcaggccgcactgaagcgggtgacgctggcg

SEQ ID NO: 13161 - DNA, 756 bp, Burkholderia fungorum
atgaacgacgatcaactccttcgctattcccgccatatcctcgtcgacgaaatcggcatcgaggcgcagcagcgttttatcgacgcgcacgcgatcatcgtcggtgcgggcggtctgggttcacccgctgcgatgtacctcgccgcagcgggcgtcggccgcctgacgctggtcgatgccgatacggtcgatctgaccaatctgcaacggcagatcctgcatgtgaccgcatctgtcgggcgcaagaaggtggagtccgggcgggacgcgatcgcgcggatcaatcccgaggtcgtggtgaacgcagtggccgagcgcgtcgacgacgcgtggctcgacgcgcaagtcccgcatgccacggtcgtgctcgactgcaccgataacttcgcgacgcgccacgcgatcaaccgcgcgtgcgtgaagcacggcgtgccgctcgtatcgggtgcggcgttgcgctttgacggccagatcagcaccttcgatttccgcgacgaagcgtcgccctgctatgcatgcgtgtttcccgaagaccagcccttcgaggaagtcgcgtgttcgactatgggcgtgttcgcgccgacagtcggcatcgtgggttcgatgcaggccgccgaagcgctcaaggtgatcggcggaatcggcacgcctttgcttggccgcctgatgatgctcgattcgttgcgcatggaatggaacaccatgcgcatcgcgcgtcagccggattgcccggtgtgcgggcagacacacgcggtc

SEQ ID NO: 13162 - DNA, 423 bp, Burkholderia fungorum
gtgaagtttttcactgattacacaaaccttgtactgatcgctatcgtcctcatctccggtgggttgctgctgtggccgacgatcagccggcgcggccgcggcggcctgtcggccgctgaagccactcaactgatcaaccggcgcaatgcggcggtcatcgacctgcgtccatccgccgacttcgccaaagggcatttgcccgcggcacggcaccttgaatttgcggagctgcaggcgaaggtcgcgcaactcgtgaagaacaagaccaacccggtactgctggtatgccagaccggccagcagtcgaacaaggcagcgcgtatcgtgcaggatgcagggtatgcggaagtccatgttctcgaaggcggtgtcgacgcctggcagaaagccggcatgccggttgtgaaacaaggagtagccaag

SEQ ID NO: 13163 - DNA, 261 bp, Burkholderia fungorum
gtgaacaaagtgatcatgtacagcacccaggtgtgcccatattgccagatggccgaacgtcttttaaagtcgcgcggcgtcgagcacgttgaaaaggtactgatcgacaaagacccggcccgtcgtgaagaaatgatgacccggaccggtcgtcgcacggtgccgcaagtgttcatcggcgagacgcatgtcggcgggtacgatgacctttccgcgctcgatcgcgcgggcggtttgatgccgctgctcgaagcaaccgcc

SEQ ID NO: 13164 - DNA, 1002 bp, Burkholderia fungorum
atggccaccatgctctcagagttttcgctgatcgaccgcttcttcgccagccgcgccgctgcccggccatccggcgccgcgagcggcacgctcggcatcggcgacgactgcgcgctgctcgcgccgcccgcaggcgaaatgctggcgatatcgacggacatgctggtggaaggccgccacttcttccccgacatcgatcccgaggcgctgggtcacaaagcgctcgcggtgaatctgtcggacctcgccgcgatgggcgcgaaaccactggcgttcacgctggcgttcgcgttaccgaaggcggacgaagcctggctcgccgcgttcagcgaagggctgttcgcactggccgaacgccacggttgcgagttgatcggcggcgacacgaccggcggcccgctgaatctgtgcatcacggtattcggcagcgtgccgccgcacgcagcgctgcgccgcgacgccgcgcaaccaggcgacgatatctggatttccggcacgctcggcgacgcgcgcgccggcctcggcatacagcgcggcgaatggtccgccgatgccagcgacgctgcggcgtttcgtcgcgctctggagcgccctgagccgcgcgtcgcgctcggtctcgcgctgcgcggcatcgcccatgcagcgctcgacctctcggacggccttgccggcgatctcttgcacatcctcgaacgttcgaacctgcaggccaccgtcgacgtcgatgccgtgccgcgttccgccgcgctgcgccgtctgccgcccgagatccagcgccgctgcacgctcgccggcggcgacgactacgaactgtgcttcaccgcgccggccacggcgcgcgcctcggtggaagctgccggccacgaggcggatgtacccgtcacccgcatcggtacaataagcgctctccaggcggcccggcgcccggcgatcggctggcgcgacgccgccggcgcgccgctcacactgacgttgcaaggcttcgaccactttcatgcagac

SEQ ID NO: 13165 - DNA, 738 bp, Burkholderia fungorum
atgccacgcttcttcgtcggtacgcccctccagtccgacgacatcatgcagcttcccgatgacgtcgttcggcatgtgctcgtgctgcggttgcagcccggcgactcgatcgtgcttttcaacggcgaaggcggcgaatacagcgccgaactcgtcgaggtcgaacgccgctcggccaaggtaagaattcgcgaattccgcaacatcgaagtggaagcgccgtatcggctcacgcttgcgcagggcatcgccggcggcgacaagatggactggctgatcgaaaaggccgtcgaactcggcgcgtcggccttcgtgccgctcaccaccacgcgcagcgtcgtgcgtctgactggcgagcgcgcgcagcggcggcatgcgcactggcaaggcatcgtgcgggcgtcgtgcgagcagtgcgggcgcaaccggctgccggaagtcatgccggtgcgagaaatcgccacctggctgggcgccatgccgcgcacgcctgaagaaggcgacttgcgcattctgctgtcgccgcgcgcgagcatcagcttttccgcgttgcccgccgagccgccgcaaggacgcgtgacggtgctggtcggcccggaaggcggattttccgccgctgaagaagcggccgcgaccgatcatggcttcaccgccgtcggtcttggcccgcgcgtcatgcgcactgaaacagccggcatcgcggtactctcggcgctcgccgcgggctggggcggctgg

SEQ ID NO: 13166 - DNA, 1518 bp, Burkholderia fungorum
atgaatcacgcagagatgcaatttctgaccaccgaattcccgtacaaaaaacagtatgcgaactttatcggcggcgagtgggtgaagcccgtgggcggcgagtacttcgacaacgtgtcgccgatcaccggcgaggcgttcacctcgatcccccgttcgcgtgaagccgacgtcgaactcgcactggacgccgcgcatcgggcgaaaacggcgtggggcaaaacctcggctgcggatcgcgcgaatatcctgaaccgcattgccgaccgcatggaagcgaacctgcaacgtctcgccgtggccgagacgatcgacaacggcaagccgttgcgcgaaacgacggccgccgacattccgctcgccatcgatcacttccgctatttcgccggcgccgtgcgggcgcaggaaggctcgctctccgagatcgaccacgacacggtggcgtatcactttcatgaaccgctcggcgtagtcggccagatcattccgtggaatttcccgatcctgatggccgtgtggaagctcgcgcccgcactcgccgccggcaactgcgtggtgctcaagcctgccgagcaaacacccgcgtcgatcctcgtgctggtggaactgattcaggatttgctgccgccgggcgtgctgaatgtggtcaatggtttcggtctcgaagccggcaagccgctggcgtcgagcaagcgtatcgccaagattgcgtttaccggcgaaaccaccaccgggcgcctgatcatgcagtacgcgagccagaacatcattcccgtcacgctcgaactcggcggcaagagcccgaatattttcttcgccgacgtgatgaatgaggacgacagttttttcgacaaggcgctcgaaggcttcgcgatgttcgcgctgaatcagggcgaggtgtgtacctgtccgtcgcgcgtattgatcgatgaaaagatttacgaccgcttcatggaacgcgcgttaaagcgcgtcgcggcgattacgcaggggcatccgctcgacacgaagacgatgatcggcgcacaggcctcgcaggagcagctcgaaaaaatcctctcgtatgtggatctcggcaaacaggaaggcgccgaatgtctgattggcggcgaacgcaatgcgctgggcggtgagttgagcaaaggctattacgtgaagccgaccgtatttcgcggcaacaacaagatgcgcattttccaggaagagatcttcggaccggtggtgtcggtcacgactttcaggaacgaagaagaagcgctcgagatcgccaacgacacgctctacggcctgggcgccggcgtatggacgcgcgacggcacacgtgcgtatcgcttcggccggcagattcaggcaggccgcgtgtggaccaactgctatcacgcctatccggcgcatgcggcgttcggcggctacaagcagtccggcattggccgcgagaatcacaagatgatgctcgaccattatcagcagaccaagaacctgctcgtcagttatagcgacaagccgctcggtttcttc

SEQ ID NO: 13167 - DNA, 1737 bp, Burkholderia fungorum
gtgacaacgtcgcggatgtgcgccagaagatgggcctcgcggccaactaagcggtttggttgggacgcgggacatgcagtgaactgccggcgcgtgtttctctttcgcggagagagtgcgcgcgccggcagcagtattaaaagatcagcagtagagacagacggttcacacgaagcaacaggaggcgaagtgtcagcgacgctacgttttgacaatatcggcaaggtctttccaggcgtgcgcgcgctcgacggtgtgtccttcgacgtcaacgtcggccaggtgcacggcctgatgggcgaaaacggcgcagggaaatcgaccctgctgaagattctcggcggtgaatatcagcccgactcgggccgcgtgatgatcgacggcaacgaggtgcgcttcacgagcgcggcgtcgtcgatcgcggcgggcatcgcggtgattcaccaggaactgcaatacgtgcccgatctgacggtcgcggaaaacctgctgctcgggcaactgccgaactcgctcggctgggtcaacaaacgcgaagccaaacgcttcgtgcgcgaacgcctcgaagcgatgggcgtggcgctcgatccgaacgcgaagctgcgcaagctctcgatcgcgcaacggcagatggtggaaatctgcaaggcgctgctgcgcaacgcgcgcgtgatcgcgctggacgagccgaccagttcgctgtcccaccgtgagaccgaagtgctgttcaagctggtgcgcgacttgcgcgccgacaaccgcgcgatgatctacatctcgcaccgcatggatgagatctacgagctgtgcgacgcctgcacgatcttccgggatggccgcaagatcgcctcgcatccgacgctcgaaggtgtgtcgcgcgacaccatcgtcagcgagatggtggggcgggaaatttcggacatctataactattcggcgcggccgctcggcgaagtacgcttcgcggcgaaagcgatcgaaggccacgcgctcgcgcagccggccagcttcgaagtgcggcgcggcgagatcgtcggcttcttcggtctggtgggcgcgggccgcagcgaactgatgcatctggtgtacggcgccgatcgcaagaagggcggcgaactgacgctcgacggcaagccgatcaaggtgcgcagcgcgggcgaagcgatccggcacggcatcgtgctgtgtcccgaagaccgcaaggaagagggcatcgtcgcgatggcgagcgtgtcggagaacatcaatatcagttgccgccgccactatctgcgcgcgggcatgttcctcgatcgcaagaaggaggcggaaacggcggaccgtttcatcaagctgctgaagatcaagacgccgagccgccgccagaagatccgctttctctcgggcggcaatcagcagaaggcgatcctgtcgcgctggctggccgagccggatctgaaagtggtgattctcgatgagccgacgcgcggcatcgacgtcggcgcgaagcatgaaatctacaacgtgatctatcagcttgccgaacgcggctgcgcgatcgtgatgatttcgtcggagttgccggaagtgctgggcgtgtccgaccgcattgtcgtgatgcgtcagggccggatttccggcgagctggcgcgccaggatgcaacggaacagtcggtgttgagtctcgcgctaccgcaaagctcgaccgccttacctggcaccgacgccggaacggaaaccgccgcccaacaggcggcc

SEQ ID NO: 13168 - DNA, 2649 bp, Burkholderia fungorum
atggaatccaggcagtcgatgcgctattcggtcgaaataaaaaaattcctctacagccagtacttttatggcggcctgcgcatcgcagtcggcgtgtcgttaccggcggtactgtgtctgatcgtgtttcacgatcgcgatctcggcttcacgatcgccaccggcgcgctcggcgcgtgtgtggtcgacatgccgggcccgctcaagtacaagcacaacgaaatgctggcgtgcacggtgatcggcttcctgtccgcgctcgccaccggcctcgccaccgtgaacgcggtggcgctgtggtgcaccgtggtgccgctcacctttttgctgtccctgatcgtcgtgtatggcaaccgctggccgcagatcagctttgccacgctgttcatgatggtcatgacgctggaagatcatttcacgccggtgcaggcgctcgtcaacgcctcgtggattctggtgggcggcctctggtacacctactggtcgaccttcgtgagccgctggatgatgcaccgcatcgaacagcaggcattggccgaaagcgtgttcgcatgcgccgactatctgctggcccgcgcccagttctacgacctcgataacgatctggacgagtgctatcgcaacctggtcgacaagcagatcgccgcggttgaacgccaggatgccgcgcgcgacatcgtgctgcgcaacctgcccaagctcaagagcggcaagctcgaaccgcgccgcgccatgctgttcaatctgttcatcaacacggtcgatctgcacgagttgttcgtcggcgcgcacaccgattacccgctggtgcgcaacacgttcggcggctccgatctgctggtgttctaccgcgatctgatccgcaaagcggccgccgacctcgaggagatcgggctcgcagtgctgcaaaaccaggcgccgcgcacgcgcgtgaacgtcaaggcggaattgcgcgccatcgaattcgaaatcgagttgatgcgcaagcagaacctgccggcaaaaaaccatgaggcctattcggcgatctcgtcgactttccggcgcatctggagcgccacgcgcctgatcgacaagatgcgcaagagtctctccagcgaaccgagcacgaccgaaaccgaattgcggctcgaccaggcgctcacgcgtttcgtgtcgagccgccgcgtgccgttcggccagatcttctcgaacctgacaatggcctcgccgagcttccgccatgcgctgcgcgtgaccatcgcggtcgccgtgggcttctggctcggccgtctgctgccgctcaccaacgcctactggatcgtgatgaccaccgtcatcattctgaagcccggctattcgctcaccaagcagcgcaacgggcagcggatcgtcggcacgctgatcggctgcgcggcgagcatcgcgctgatcgtgttcgtcaaggaacctcacatcctgctgatcgtgatgttcgcgtcgatggtcatgagctacagtctgctgctgttcaattacacggcgagcgtggtgttcacctcgtcgtacgtgctgctcatgttccatctgctcgcgccgggcagcatgcgcatcatcggcgagcgcgcaatcgataccgtggtgggctgcgcgatcgcaattgcggcaagccacctgttcccgtactgggaataccggttgatgggcaagctcgtcaacaacatgatcagcgcgacgcgtcaatatctggaagcaagctggtggtggagcggcaagccggccgccgcggtggtcgccaccgtgaccgaggccggcgcacgtgcgcccgcggcggcgatggccgatccagcgatcgacttcggcaaaccggcgctcgccacggcaggcggtggcgcaggcgctgcggcgggcagcggcgtaggtgttggtccgaacggcggagcaggcggtgcggtaagtcagggcgtaagcgctgcctcaagcggtggcgcaagcggtgctgcaagccaaggcgtaagcgctgcctcaagcggccgcgcaagcgcctctgaaggcaacagcgcaaacgctcaagcggccgtggatgccagcgcagcaataccgcctgccgacgtcggcgcaggcacgaccacggtcagcaatcccaccgcgaagccggcctccggcgcctccgctgccgccgcagccgcggcaaccgcgctcgatcgcgattaccgctaccggctcgcccgcaagaacgtccacgtagcgttcgccaatctgggccaggcgtttcaacgcatgatgctcgaaccgaagtccgcgcaaaagttcgtgccggaactgaacggcctgctggtacgcagccacgtactcgcttcgcagatcaccgcggccgcgccgctgctgcgcaccacggcgcaacaacaggccgaaggcatctcgctacagccgcttcaacgcgcgctgagcgtggtgcgcgacaatctcaccgaagccgaaaccggcacggcgccgcccgccgatcaggccgagcagatcaagcagttgaaccgtgagctcgatgcgatggtggtcgaaacggaaaagtcgccggactattcggcggacgccgtgcacgatatgaaattgcttgcgcatcaatgcaagcagatgctggcggcggcggcattgatccgcaaggatgcaagcgtgattcgcctgccggatgag

SEQ ID NO: 13169 - DNA, 2112 bp, Burkholderia fungorum
atgagcacgttcgaacagagcgcatccgcgccgcccgagctcgacgatatcggcgtgaatttgccagcgccggccgatttcagcaccgcgctcgcggaaggtttcgcgcgtcgcatcggcacgctggcgcggcgcggcggtgcatcggcggaggcggtcaagtgggcggcgcggggcgcgttcgccgcgagccgcgcaacggccgagggccatgtgtgcgtgccgctcgcgttgctggcgcggcgcttcgaggcatcgggcgccgaagtgcgcgcggcgctgttcgcaagcggcatggcgagcgacggctcgcaaagcgcggcagcgttgcggccgctggtggtggatgggcaagggcggttgtatctggctcgctattacgactacgagcggcggcttgcgcgcgcgctggtcgcgcatgctggagcgggggtcggtactcgcgccgctcccggtgctgaagcaggcggcaacgcgcagactttgcacgagcgcctgctgcgctacttcggcacgccgaaagacaatgaagtggactggcaacgtgtcgcggcggtcatggcgctgtcgggacaacttactatcgtcagcggcggacccggtaccggcaagaccaccaccgtggtcggcgtgcttgcctgcctgctcgatgcgcgcgcggatctgcgaatcgcactgggggcgcccacgggcaaagcggcacaacgcatgcaggaggccttgctcgcgcgtgccggcgatctgccgcccgaactcgccgcgcgtttgccgcagacgtcgtacacgttgcatcgtctgctcggttccggaccgggcgggcgcttccggcatcatcgggacaatccgctgccttacgatgtcgtggtgatcgacgaggcgtcgatgatcgacgtcgcgatggccgcgcatctgctcgacgcccttgcaccgcagacgcgtctcgtgatgctgggcgacaaggaccagctggccgcggtcgaagccggcgcggtgttcgccgaactcagcgcgcgtccggcgttcacgcaagagggtgtgcggcggctcgcggaggcgctcggtatcgacgaaacacggctgacgcaggcgttgccgcacgcgtcgcgcagcctgggcgaagagcaggccggttctttcccgcagtccaatgcgccgcacggtttcgaagcgcggcccgacgatctgttcgcctatgccgactcgccggaggtttttaatgaaccgctcgcgggtgagctttctgaaggcgccgcgtcatcgcccggtccggcaccgcacgcgctgaacccgctcgccgactgcgtcgtctggctcgaacgtaactatcggttcggtctcgaatcgccgatcggccggctgtcactcgcgatccgcaacggctcgtcgagcgcggcgctcgacgtcctgcgcatcgatcccgcggaatcttgcgcagcggcgctttacgaagacacccatgcaacgcttgccgagcgcaccgtcgcgcgtcttgccgcaggcttcgcgccctacgccgacgcgctggccgcggcgctcgcagccgacacgcccgacccgttgccgcttttcgacgcgttgaaccgtttccgcattctgtgcgcgacccgttcggggccgcgcggcgtcgatcaggtgaatgcggcgatggcggcgcaggtgcggcgctcggccggtgtgacgctggcagtgggcgcgcagtggttcgccgggcgtcccgtgatggtgacgcgcaacgactatgcactgggtctcttcaacggcgacatcggcattgcgctgccgggcgcgagcggcgcgttgcgcgtgcatttccgtaccggcgacggcggcttgcgggcggtatcgccggcggcgcttccgccgcacgacaccgcatttgcgctcacggttcacaagtcgcagggctcggagttcgagcacgcggtgctaatgctgccgtcggcgttcagccgggtgttgtcgcgcgagctggtgtacacggcgatcactcgcgcgcgcgagcgggtggaagtggtcggcgctcgcgccgtgctggcgcaggccattgccacgccgacccagcgcgattcgggattggccgcgcgaatagcggaggcgtggcacggcgctgaa

SEQ ID NO: 13170 - DNA, 1980 bp, Burkholderia fungorum
atgtctgcgattgaatcggttcttcaggaacgccgtgttttcccgccctccgctgaaacagtagcggccgcgacgatctccggcatggacgcgtaccgggcgctcgccgccgaagcggaacgcgattacgaaggtttctgggggcgcctcgctcgcgagacgctaagctggaatacgcccttcaccaaggtactcgacgaatcgaaggcgccgttctacacgtggttcgaagacggccggctgaacgcgtcgtataacagcatcgaccgtcacgtcgaagccggcaacggcgcgcgcgtcgcgatcattttcgaagccgacgacggcaccgtcaccaacgtcacctaccaggatctgctgcaacgcgtgtcgcgctttgcgaacgcgttgaagaagcgcggcgtgaaaaagggcgaccgcgtggtgatctatatgccaatgtcgatcgaaggcattgtcgcgatgcaggcttgcgcgcggatcggcgccacgcactcggtcgtgttcggcggcttctcgtcgaagtcgctcaacgagcggctggtggacgtgggcgcggtcgcgctcatcacgtcggacgaacagatgcgcggcggcaaggcgctgccgctgaagaacatcgccgacgaagcgctcgcgatgggcggctgcgaagcggtcaggagcgtgattgtgttccagcgcaccggcggcaagatcgcctggaacgcagaccgcgatctgtggatgcacgaactcacgcaggccgaaccggatcaatgcgcgccggagtgggtcggcgccgagcatcctctgttcattctgtacacgtccgggtcgaccggcaagccgaagggcgtgcagcacagtaccggcggctatctgctgtgggccgcgcagaccatgaagtggaccttcgactggaagcccaccgacgtgttctggtgtaccgccgacatcggctggatcaccggccatagctacatcacgtatggtccgctgacgctcggcggcacccaggtcgtgttcgaaggcgtgccgacctatccgaacgccggccgcttctgggacatgatcgcgcggcacaaggtgtcgctgttctataccgcgcccactgcgatccgctcgctgatcaaggccgccgacgcggacgcgaaggtgcatccgaagagctacgacctgtccacgctgcgcatcatcggcacggtcggcgagccgatcaatccggaagcgtgggtctggtattacgagaacgtcggcggcagccattgcccgatcgtcgatacgtggtggcagaccgaaaccggcggtcacatgatcacgccgctgccgggcgccacgccgctcgtgccgggttcgtgcacgttgccgctgccgggcatcatggcggcggtggtcgatgaaaccggccaggacgtgccgaacgggcagggcggcattctggtggtgaagcgcccgtggccgtccatgctgcgcaacgtgtggggcgatccggaccgctacaggaagagctactttcccgaagaactcggcggcaagctgtatctcgccggcgacggcgcggtgcgcgacaaggagaccggctacttcacgatcatgggccgtatcgacgacgtgctcaacgtgtcgggccaccgcctcggcacgatggagatcgagtcggcgctggtgtcgaacccgctggttgccgaagcggccgtggtggggcgccccgatgcgaccaccggcgaagccgtgtgcgcgttcgtggtgctcaagcgttcgcgtccggaaggcgaggaagcggtgaagctcgccaacgaactgcgcaactgggtcggcaaggagatcggtccgattgccaagccgaaggacatccgtttcggcgaaaatctgcccaagacgcgttcgggcaagatcatgcgccgcctgctgcgctcgctggcgaaaggcgaggaaatcacccaggacgtgtccacgctggagaaccccgcgattctcgaccagctcggcgagtcgctc

SEQ ID NO: 13171 - DNA, 1407 bp, Burkholderia fungorum
atgaacatgcccatgagccgcgatcaacgcggtactctcgccgccgcaggactgggctttgtcgtcgttttgcttgatgtcagcgttgtcaacgttgcgctcgatgccttgcgagcccgtttcgccaccgacgtgaccggcctgcaatgggttgtcaatgcatatacgctagcgtttgcgtcgctactcctcacgacaggcgctttaggcgaccgcttcggcgcaaagcgaatcttcaccgcaggattcgcagtctttacgctggcatcgatcgggtgtggaattgccgactcattgccacttcttgtagcggcacgcgtcgtacagggcattggcgccgcgctgctggtgcccaattcactggccatgctgcgccaggcgttcccggatatgcagcaaagaagccgcgctgtgggctggtggggcgctgcgggaggaatcgcgcttgccgctggaccggttttgggcggcctcctggtaacgcacgtgggttggcgcagcattttcctgattaacctgcctatcggcgtcgcgggcgtggcacttactctccgtcacgctgcagcggccgtatctacgcataatcgaagcattgatcttccgggccaactggcggctattgtcgcgttggtagcattgaccgtgtgccttacagaagcggcccggctcggctggcgtcaccctttggtctatggtgcgctgctgctttcagtggttgccaccctggcttttctttggctggagtcacgaagcacggagccgatgctcccattgtcgctgtttcgaacggctacgttctctgtggcgtcagtcgccggcgtgatcgtgaactttgcttactacggtttgatctttgttttcagtctcttctttcaaatagagcagaacctgtcagctcaatggaccggcctcgcgtttttgcccatgacagctgttctaatgggagtgaatattctggcaggccggctgctcaaccgaatcggtgcaaagaaactcatgattgccggcatggtgattgccgcgtcgggttatctgcttctgttgccggtcagcacaaacggttcgtactggatgctggtcctgccaatgctcgttgccgcaagcggcattgccctgatggtgccaaccatgacaaacgtcacactgtcatctgtagatgcctcccgctccggtgtcgcgtcgggaatactcaactcagcgaggcaggtcggcggcatgttaggggtagcggtgttcggttttttcgtacgcgataccagtcatgatggatttatgcaaggcatgcatctttccatcatgaccgccgcggtgctcctgttgtgcggcagcgtgatatgcctgtacggaattagaacgccgcggcccgcgcacgttgagaccaatcccaaggttctggcctctgacagt

SEQ ID NO: 13172 - DNA, 744 bp, Burkholderia fungorum
atgatcaaggtcgacgcgattcacaagcgctttcacgatcagcacgtgctgaaaggcgtcagtctgaatgtcgaacgcggccaggtcgtgtgtctgatcggtccgtccggatcgggcaagtcgacgctgcttcgttgcatcaacggactggagcagcatgacgccggcacgatcacggtcgaaggccatgccgtcgacgcgaagtcgaagcagatccacgatctgcgcgcgcaggtcggcatggtgttccagcgtttcaatctgtttccgcatcgaaccgcgctggaaaacgtcttcgagggtcccgtgttcgtcaggaaggaagcgcggacacaagcccgcgagcgggctcgccatctgctcgacaaggtcggcctcgcgcaccgcatgaacgcctacccggccgaaatgtcgggcggacagcagcagcgcgtggcgattgcgcgcgcactggccatgcagccgaaggcgattctcttcgacgagcccacctcggcgctcgacccggaactggtcggcgaagtgctcggggtcatgcgccggcttgccgacgacggcatgaccatgatcgtcgtcacgcatgaaatgggctttgcgcgtgaagtggccgatcgtgtgtgttttcttcatgacggcacgatccatgaggaagggtccgccgccgatctgttcgaacgtccgcgcaatcctcgcacacgcgaatttctcggcaggatgcccgcgcttaccgaagccccccggatt

SEQ ID NO: 13173 - DNA, 1152 bp, Burkholderia fungorum
atgaaaatcattcacctcgccaatcacgcgaaatgcatcggcaacggcatcgtcaacgtgatgatcgacctggcctgcctgcaggcgcgcgccggccacgacgtgacggtggcgtcggccggcggcggcttcgaggcgttgctggcgcggcacggcgtgcgccatgtgctgctgccgcagtcgcccagaccgtcccgcgtggtgggcatggtggcggccttcagacgcctcgtcgcgcagtacgatcccgacgtcgtgcacgcgcacatgatgaccggcgcgttgatcgcgcgcatgagcgcgctgcggcgccgctacgtgctgatcacgacggtgcacaacgagtttcagcgcagcgcgacgctgatgggcgtgggcgaccacgtagtggcggtcagcgatgcggtggccgtggcaatggcgcggcgcggcattgcgcgggagcgtctgagcgtggtgcgtaacggcacgatcggcacgccgcgcctcgccgacacgccgatgcccgcacagccgcaactcgcgcatccatgcgtcgtcacggtgtcgggcatgtatgaacgcaagggcatcggcgatctgctgcacgccttcgtgctgctgcacgagcgcgtgccggacgcggtgctgtatctcgtgggcgacgggccggaccgtgttgcaatggaggcgttggcgcggcagctgggtgtcgccgcgcaggtgcgtttcgaaggttttgtcgcggacccgcgtgcgtatctcgcccaggccgatgtgttcgtgctcgcttcgcactatgaagccgccgggctcgtgctgtgcgaagcgcgtgagctggggcgcgcgatcgtggcgacgcgcgtgggcggcattcccgagatgctcgacggcggcgaagccggcgtactggtgccggtgcaggatcccgctgcattggcggaagcgatcgggcatctcatgaccgcgcgcgacgcgcatgcggcgctgaccgcgcgcgcgccgtacaagctcgaaaaattcagcgtgcagcaggtgagcgacggctatctgtcgatctacgaacgcacgttggcaagttgccagccgcgccgttttgcgagcatcgccacgcgtgggatgactgcaccgggcagggtggtgcgcgacagcgtcacgcaatcgaccacgatc

SEQ ID NO: 13174 - DNA, 990 bp, Burkholderia fungorum
atgagtgatcgtaccggcgacccgcaaggaggcggcgcgtctgaactggatgcgcggctgatctccatctgcattcccacctgcaaccggcccgcattgctcgaacaggccatcgcgagttgccacgcgcagacgtatggcgagttcgaaatcgtgatcggcgacgattcgaccgaggacagcgcgcagcaggtggtggagcgctgccgctcgcgcagcgaccggcccattcgttacgaacgcaatgtgccgcggctcggccaggcgtccaatgtcaaccggttgttcgcgcgcgcacacggtgcccggctcgtactgctgcacgacgacgatctgctcgaaccggacgcgttgagccgtctcgacgcatgctggcaagcctgtccggagttgacagcggcattcggcaagcagcgcgtgatcgccgacgacggcacgccgcggcccgacgccagcgaacgcctgaaccgtgactatcgccgtgtgcccggccgtgccggaaggctgcccgtgccggcgctggccggcatcgaccagatgttcccgaacaacggctatctggtgaataccgtggacgcgcgccgcatcgcgtaccggccggcggccgaagtcggcgaagcgtgcgacttcgatttcggcctgcggctgagcgtcgccgcaacggcgatctgcttcgtggacgagttcgtgtccgtatcgcgcgaaacggcgttgtcgatttcaacgcatgcgctgcccgccatgcacgcgtttgcgcagctacgcgagagccatgtgcccgccgcggcgcaggccgcgcgcgaagatgcgttgcgccgcgtggcgccgcgcgcggcctcggcctatgcgcgtgcgggcgagccggccgcggcctggcgcgtgctgctgtcgaagcattacccgatgcgcgacagattgcgcgcacgttttctctatcacgtgctgctcgccgcgcgctcgacgttcgcgctgcgcgcgccgcacggcaac

SEQ ID NO: 13175 - DNA, 951 bp, Burkholderia fungorum
atgatggactggaccgatcgtcattgccgttccctgcatcgcgtgatctcccgccatacgtggctctacacggaaatggtgaccaccggcgcgctgttgcatggcgacgtgccgcgccatctcgcgttcacgcccgtagaagcgccggtcgccctgcaactcggcggcagcgaacccgacgacctcgcgcgctcggcaaagctcggcgagcaatggggttacgacgaaatcaatctgaactgcggttgcccatccgagcgcgtgcaacgcggcgcattcggcgcgtgcctgatgaacgagccgcaactcgtcgccgattgcgtgaaggccatgcgcgatgcggtatccgtgccggtgacggtgaagcaccgcatcggcgtcgatgcggtcgaggaatacggtttcgtgcgcgatttcgtcggcacgattgcggatgccggctgcaatgtgttcatcgtgcatgcgcgcaacgcgattctcaagggtttgagcccgaaggaaaatcgcgagattccgccgctcaaatacgactacgcgtatcagttgaagcgcgacttcccgcatctggagatcatcatcaacggcggcatcaagacgctcgatgaagtggagacccatcttcaacatgtcgacggtgtcatgctcggacgcgaggcgtatcacaacccgtatctgctggccggtgtcgatgcccgcttctatggttcggcagacacgccgctgactcgcgagcaggtcgaagcgaagctgatcgactattgcgccgctgaaatggcacgcggtacttatctcggcgccattacgcgccatgcgctcggcctctatcgtggcgaagcgggtgcacgtggatggcgccgtgtgctgtcggatagcaaacgcctcgccgcgcgcgatctgagcatcttcgacgaagcaaggcagcatctgcgcgagcccgtcgaaatttttgaa

SEQ ID NO: 13176 - DNA, 1044 bp, Burkholderia fungorum
atgcgcgacaatagcgcctgttctgaactgcatggactcgaaggaacgatgacaatcgcaacacaggaagtccccgcggacggcacgatccgctggggcatcgtcgggacgggccgcattgcccgtcgttttgctcagggtctcgctcacgtgccgcagacgcgactgaccgcgctgtggtcacgccgcgcggaacccgccggcgctttcgccgaagagttcggcggcgaggtttgcgcaagtttcgacgcgctgctcgcgagcggtatccacgcgctctatatcgccaccgttcaggacagtcacgcgggctatgcgatcgccgcgttgcaggccgggctgcacgtactgtgcgaaaaacccgccaccatcaatcagccgcaactccagcgcgtgctcgacgccgcgcgtgccgcgcagcggctcttcatggaagccatgaagccgccgttctatccgctctacagaaagttgcgcgcgcatctggacgccgatccgattggcgcggtggggctggtgcgggccggttgttcggtgccgggcgtgccggacgatcatccttcgctgtcgttcgggcatgcgggcggtgcgctgctcgacatcggcatctatgaaatgtttctcgccgtcgactggctgggtgcgccgcgcgaagtgcagacgctcgggcggctcggcgcgaccggcgtcgatacgttcgccagcctgaacagccagcatgagggcggcatcgcccaactgttctgcggactcgatctgcacggcaaaggtgatgcgctgctgatggcgacaggcggccacgtcacgattcacgagccgtggtggaacccgtcgcgcgcaacgatccggtatgccggcggacgtgtgatcgaactcgatgaaccgttcgaaggcgggggcctgaactacgagaccgcgcacttctgcgagttgatccgggcggggcaggtggagagtccggtgatgccgcacagcaagtcgttgcagatgatcgcaatggccgacgcggcgcgtgcggcgcttgggttgaagttcgcgggcgaa

SEQ ID NO: 13177 - DNA, 1383 bp, Burkholderia fungorum
atgttcaggaatactgcgcgattcctcgacgcactcttcgtgattgcgggaggcctgctcgctcactggatgcggttctcgacgccgattgcgctggcggacaccgagcgtcttctgatcgccttcaactgcgtactggtcctgctgctgtttcccggcttcggggtctatgaaacctggcgcggcaagcacctgtcgtccatgctggcgagagtggccgccgcgtggatggtggtggtcgccaccgcgctctttctcgcgttcacgctgcatcgcatggatgccgtgtcgcgtttgtggttcggctactccacgctcatttccggcgcgctgatcatcgtcaccaagtgcctcgtgcacgtggcgctgcgcatcgtgcggcgccgtgggatgaattaccgcaccgtggcgattgtcggcgcgcccggcttcgcacgcacgctgctcgctcatctcgaacatgcgccgcaagccggcttcaagccggtgtgcgtattcgacaccagcatcgaagcggccgaatcgtacggcgcgcgtctgaaccgcctgccggtactgaccgatctggacgccttcgccgccagggtgcgggaagaacacgtgaacgaagtgtggctcgcgttgccgctttccgaagagcgtacgatctaccggttcacgcgcatgttccggcatgacttcgtgaatctgcgcttcattcccgatgtgcgcagcctgtcgcttttcaatcacgcgctggtcgatgtcgtcggtttacccacgctcaatctcagcgcgacgccgttctcgtcgccgcagatgtggccgaagctgatcttcgaccgcctgttcgcggcggccgcgctgctcgcgctcgcgccggtgttcgtggtgctcgccatcggcatcaagcttagttcgccgggaccggtgttctttcgccagattcgcaagggcgtggacggccagccgttcgcgatctacaagttccgttctatgaccgtgcatcacgaagcgcagggccagctcacccaggcctcgcgcaacgacgcccgcgtcaccaggctcggcggcttcatgcgccgcacgagcctcgacgaactgccgcaattcctcaacgtgctgctcgggcagatgtccgtagtcggcccgcgtccgcatgcgctcgagcacgacgatctctacaaggatcaggtgtacggctacatgtaccgctaccggatcaagccgggcattaccggctgggcgcaggtcaacggctatcgcggcgccaccagcaaggtggaaaagatggaagcgcgcgtcaagttcgatctcttctacatctataactggtcgttctggttcgacatgaagatcgtgttcatcacgatcttcaagggctttgtcggccgcaacgcattc

SEQ ID NO: 13178 - DNA, 2145 bp, Burkholderia fungorum
gtgcctgcagtagatagcaaaattcctgcgcttgcatttgccgatccgcaaagcacctatgacctgaatagctacacgcagacggccatgttcccgctgcagttcgctacgagcggcaccaatctgctgaacgcagaggcgtccggcgtgacctatgacaaggataccgattcgctgtttgtcgttggagacggcgcgacctcagtcgtgcaggttgcaaagagcgatggtcacgttatcgattccatgacgctcaatgccggcgacttcgaggacacggaaggcatcacctatgtcggcggcggcaagttcgtgctggtggaagagaggcttcgtcaagtcgatctgttcacttacgttccaggcggaacactgcgcagagcagacgtacagtccgtcaaattaggcacaacggttgccaacgtcggtattgagggcattactttcgatacgaaaacgggtggctacattgccgtgcgccagtcgcagcccaccagcatctttcaggccgcaatcaattttgcggccggctcggcgacagcatcgaacggcacgccgatcctgccgacgacagacaatccgccggtgctgttcgatgcggccacgacaggtctttccgctttcaatgacgttttctcgttgtcgaatatcgtaccgggcaacgcgccggattacggcaacgtgatcatcatcggcgcgccggacggcaagatcgtcaagatggatcgtaccggcaaactgctgggcagtttgtatatgagcgccaccgcccagaacgagggcgtgacgatgggtccggacggcaccatttatgtggtcggtgaacaggctgcgggaccgagcctgccaggcctgaccctcttcaagccgaccaccagcgcgagcaatgtcggcatgggcagcaacctctacctgacgttcgatcaaccggtgaaggcgggcgcgggtaatatcgttctcagcaacggcgccgacgacacgcggtcaattcctgtgaccgatgcatcgcaagtgacgttcagcggcaatgtgatgaagattcatccgaagttctacatggttgccggcaccacttaccacatcacgtatccggtgggggcgatcaagacgacagcggggaatgatatttctgccgtgtccgacttatcgacattctcgttcaaggcggtcggcaccgtcgaccacaccgccccgacattgaccagcaccgcgccggtggatggcgcgacaggtatcgtcggcaaccacatgacgctgtcgttcagcgaagtcgtgcaggcgggcacgggcaacatcgttatcagtaacggctccgatacgcgcaatgtttccgtagacgacacgacccaggtcaaattcaacggcgctcgggtgagcgtcacgttggcgacaccgttgcaggatagttctcgctacaccgtgaaattggccagtggcgttatcaccgacctgtatggcaacgcatatgcgggcacgacacagagcttcacgactgcggcagcaggtgcgccggcgccgaccgtgctgatctccgaggtgaactcgaacgcagacgggggccaggatttctttgaaatctacaactacggcggcacggcaattgatctgaccggctggaagtggggcgacaatcatgctgacgtcaacgatgccaacaatagcgcggcattcgtggccggtacgatgcttgcgccgggtgaacatctggtggttgtcccgggcgtgcccggaacggacgaaaatacgttccgcacaacgtggggtcttgccggcacggttccggtcgtcgcgatgttgaacgtcaataacgatgccgcgaatccgatcggtctgggtaaaggcgatgcggtgatcgtctacgatgcgaacggtaatgttgcggccgcaatgaactatggaacaccgatcgccgcagcgcagggagacggcacgacgaaagcgattccaacggcattgggtgcggatgcgagtctggttgccgccggaaatcatgctggtgctgtgttcgttggcggcagtgcgaaggtttccgcggtgtgggatacggtttcgacaacaacgccaaactatgtcgaggcagtggttggcgtgcacggcggtatagccgaaccgctcaaacccgcttcgattggctcgcctgggcag

SEQ ID NO: 13179 - DNA, 846 bp, Burkholderia fungorum
gtggccgcagtgaggaaaccgaggattatgcaaatgacttccccccagagcgccgacgcgctcacgctctacggacaaaccttcgcgagccgtgtgctgctcggcacctcgcgctatccgtcgctgcaatcgctgtccgattccatcgacgcggcgcgtcccggcatggtgaccgtcgcgctgcgccggcagatgaacgaaggcggcgcgcaagccggcttcttcgacctgctcaagcgtcacggcgtgccgctcctgccgaacacggccggctgcctgaccgtcggcgaggcggtgacgaccgcgcatatggcgcgcgaaatcttcgacaccgagtggatcaagctcgaactgatcggcgacgactacacgctgcagcccgacccggtcggcctgatcgaagcggccacgcaactggtcaaggacggcttcaaggtgctgccgtattgcacggaagacctggtgatcggccgccgtctgctagacgccggctgtgaagcgctgatgccgtggggcgcgccgatcggcaccggcaagggcgtgatcaatccgtacggtctgcgcgtattgcgcgaacggttgccggacgtgccgctgatcgtcgacgccgggctcggcgtgccgtcgcatgcggcgcaggtcatggaatggggtttcgacggcgtgctgctgaacaccgccgtctcgcaggcaacgcaccccgaagcgatggcgcgcgccttcgcgctgggcgtcgaagcgggtcgccaggcttttctggcggggccgatggccgagcgcgaaagcgcgcacgcgagcacgccggtggtcggcatgccgttctggcatcaagacgggagcgccgca

SEQ ID NO: 13180 - DNA, 1101 bp, Burkholderia fungorum
atgacgcagactttgacattgaaagatcgcgacctcttctggccgcccgccgacgaactcacagaggccgccgagcgcatccgcgcccggctgggcgactggccgccgacgcacgcgccgtggcgcatctgcctgaccgcgccggacgaactgaacggcagcgacctgatcgtgattgccgacgcgcagcagcacggcgagcagatggcgcactggctggtgcgcggcgccggcgtgatcgaagccgccgaggagaaggccacgctgcatctgggcggcgaaaaataccgcctggaaggccatctggcggaagactggattgccgcgctggcggccttcctggattgtggcttcgatccgcatgacgcgttggtgctggcgctggcctggcgcgacggcgacgaaaccagtgccgacgacgcctttcccaccgatctcagccgctttccgcgtcttgccggtttgcccgacgcgcctgcgcaggcgttcgcgcgctgcccggagcggctcggcctgtatcccgtgctgccgaccgcggaatgggtcgagcgggtagtcggtttcggcgtgaagacggtgcagttgcgccgcaaatccgccgaacccgccgacgaactgaagcgcgaaattgcccgctgcgtggcggtcggccgtcagtacgatgcgcaggtgttcatcaacgaccattggcaggccgcgctcgaagccggcgcttacggcgtccacctcggccaggaagacgtgcatacggcggacctcgccgcgctcgcgtcggcaggcgtgcggctcggtctgtcgacccacggtttctacgagattctgaaagcgctgcatttccggccgagctacattgcactgggcgcggtgtttccgaccaccaccaagatcatgccgaccgagccgcaaggcctgcggcgtttggcccgctacgtgcggttgctcgatggcgtcgtgccgctggtggcgatcggcggcatcgacctgcaagtgctgcccgacgtgctggccacgggcgtgggcagcgcggccgtggtgcgcgcggtgaccgaagcggcggacccggcctctgccgtttctgcactgcaacacgcgtttacgcaa

SEQ ID NO: 13181 - DNA, 1221 bp, Burkholderia fungorum
atgcttagacgcttttggctgttttttgcccaagcggtgaccgtgctgttggcgctcatgttcatcattgcgactctcaagccgcagtggctgcagcgtcaggggcaattcggcaagcaactcgccgagccgatcgtcgccctccgggaagtggcgccaggcatcggcagcggcccagcccaggcgtcgtatgcggacgccgcgcaaaaggccatgcccgcggtcgtcaacgtgttctccagcaaggatggctcactgccgcccgacccgcgcgcgaaagatccgctgttccgctactttttcggcgacaagaacaaccgcaagcagcaggagcagcccgcatccaatctgggctccggcgtgatagtgagttcggaaggttacattctaacgaaccagcacgtcgtggacggcgccgaccagatcgaaatcgcgctggccgacggccgcaccacgaatgcgaaggtcatcggcatcgacccggaaacggatctggccgtgctcaaggtcaacatgaccaatctgcccaccatcacgctcggccgcatggaccagacgcgcgtcggcgacgtggtgctggcgatcggcaacccgttcggcgtcggccagaccgtgacaatgggtatcgtcagcgcgcttgggcgcaatcacctcggcatcaacacgttcgaaaactttattcagaccgacgcggctatcaacccgggcaactcgggtggcgcactggtcgacgtgaacggcaacctgctcggcatcaacactgccatctattcgcgctcgggcggctcgctcggcatcggcttcgcgattcccgtgtcgaccgcgcgcagcgtgctggagagcatcatcaccacgggttcggtcacgcgcggctggatcggcgtcgaaccgcaggacgtcacgccggagatcgccgaatcgttcgggctggatcagaagtcgggggcgattgttgcgggcgtattgaagaacggtcccgcggaccgtgcgggcatcaagccgggcgacattctcgtgaacgtgaacgggcaggagatcaccgacactacgcgcctgctgaacgtgatcgcgcaaatcaagccgggcacggctgcgaaggtgcatctggtgcgcaagagccgcgagatggatctggacgtcaccatcggcaagcgcccgccgccgccgaagcaaccggtcgaggataatggcggcggtgatcagcaggatgacgacgggggt

SEQ ID NO: 13182 - DNA, 1041 bp, Burkholderia fungorum
atgcagaccacacgcatccgggccgcgcatgccttcccgatcgctaaactggcagtcgtcacagcgctgctcgccggctgtaccaccgtgcagacaccgaccaagggcgacccgctcgaaggtctgaaccgcacgatgttcaccgtcaacgacaagctcgaccagtacgcgctcaagccggtcgcgaagggctatgtctgggcgaccccgcagccggtgcgcgacagcgtgacgaacttcttttcgaatatcggcgacgtctacattgcggccaacaacctgctgcagttgaagatcaccgacggtgtcgaagacatcatgcggatcgtgatcaatacggtgttcggcgtgggcggcctgttcgacgtggcgacgcttgcccggctgcccaagcacgacaacgacctcggcctgacgctcggccactacggcgtgccggcgggcccgtacctcgtgctgccgctgttcgggccgagcaccgtgcgcgacgcggtcggctcgatcggcaattactatatcaacccgctcagctacgtcgatccggcgggtctgagctgggcgctgtacggcctgaatgtggtcaacacgcgcgccaatctgctgggcgcgagcgacgtgctggaaggcgccgcgctcgacaaatactcgttcgtgcgcaatgcgtatctgcaacgtcgtcagtacctgttgtcggacggcaggcagtcgcaggcgctgccgaactacggcgacgaagcgccgctgccgaaatacgacgatgtggacggcagcgcggccggtgcgccggcaggcgctgtaaccggaacggcgggtgcggcaggcacgcagggtgctgctgcagccagggcggcgcctgcttccggcgcgacagcggcaacgccaccgcaagcggcctcgggcactgcggcagcgccggaagccgcgtccggcagcgccgaaacgccgccgctcgacctgaacggcggccctgaaacgacgcagattccggccggtcagctggttccgcctacgcgtttcaattttccgtcgttcaaattgcgt

SEQ ID NO: 13183 - DNA, 1359 bp, Burkholderia fungorum
gtgcgaattactcaagaagggcgcgacgccggtagcggcgcgtcgaacacagtcaaagcagccccggccgaagtccgggtcaatcaggaattgacaggcatggataaactcgtcattgaaggtggctacccgctgtcgggtgaagtcgtcgtctcgggtgcgaagaatgcggcgttgccgattctgtgcgcgggtctgctgagcgcgcagccggtgcatctggagaacgtgcccgacctgcaggacgtgcgcacgatgctcaagctgctcggccagatgggcgtgcagatcgagagcggcgacggccgcgtgtcgctgaacgcgtcgaaggtggacaacctcgtcgcgccgtacgaaatggtcaagaccatgcgtgcttcgatcctcgtgctcggcccgctggtggcgcgcttcggccacgcgcgcgtctcgctgccgggcggctgcgcgatcggcgcgcgccccgtggatcagcacatcaaaggcctgcaggcgatgggcgccgagatcaccatcgagcacggcttcatcgaagcacgcgcaaagcggttgaagggcacgcgcatcgtcaccgacatgatcactgtgaccggcaccgaaaacctgctgatggccgccgtgctggccgaaggcgagaccgtgatcgagaacgcggcgcgtgagccggaagtcggcgatctcgcgcatctgctggtcgagatgggcgcgaagatcgaaggcatcggtacggatcgcctcgtgatccagggcgtcgacaagctgcatggcgcgaagcacacggtgattccggaccggatcgaggccggcacgttcctgtgcgcggtggcggctgccggtggcgacgtcacgctgcgcaaggtccgtccgttgattctcgaagcggtgaccgaaaagctgcgcgaagccggcgtcacggtcgaagaaggcgacgactggatgcgcgtgcgcatgaacaaacgtcccaacgcggtcacgttccgcacctccgaatacccggcgttcccgaccgacatgcaggcgcagttcatggcgctgaacacgatcgcgacgggcacctcgcaggtcgtcgagacgatcttcgaaaatcgcttcatgcacgtgcaggaattgaaccggctgggcgcgaacatcacgatcgacggcaacaccgctctcgtgaccggcgtcgagcagctttccggcgcgaaagtcatggcaaccgacctgcgcgcgtcggcgagtctcgtgatcgccgcattgcgcgctgacggtgaaacgctgatcgaccggatttatcacctcgaccgcggttacgaccgcatggaaaccaagctcaccgctctcggcgcgaaggtgcgccgtgtctcggggagccaggca

SEQ ID NO: 13184 - DNA, 696 bp, Burkholderia fungorum
atgagcgcaatgccgcaaacttcgtcgtcgccggcggtgagcgcgccgctcacgctggcgttgtcgaaagggcgtatctttgaagagacgttgccgctgctcgccgcagccggcatcgaagtggccgaagatccggagacctcgcgcaagctgatcctgccgaccacggacgcgaacctgcgcgtgatcatcgtgcgcgccaccgacgtgcccacttacgtcgaatacggcgcggccgacttcggcgtggcgggtaaagacgtgctgctcgaacacggcggcagcggcctgtatcagccggtcgacctggatattgcgcgttgccgcatgtcggtcgcggtcgcggccggtttcgattatgcgaatgcggtgcgccagggcgcccgcctgcgcgtggcgaccaagtacgtcgaaaccgcgcgcgagcatttcgccgccaagggcgtgcacgtcgatctgatcaagctgtacggttcgatggaactggcgccgctggtcggtctcgccgacgcgatcgtcgacctggtgagctcgggcaataccttgcgcgccaacaatctcgtcgaggtggaggagatcatgcagatttcgtcgcgcctcgtggtgaaccaggcggcgctcaagctcaagcgcgccgcattgcggccgattctcgacgcgttcgaacgtgcgtcgaaagccggctccacgacggcc

SEQ ID NO: 13185 - DNA, 1425 bp, Burkholderia fungorum
gtgcagtttaaccacgctctgtatattttgggttacacggtagtagttggtaaggaatggctgccatttttgaccacaactggccccactacgccacgccccgtagaatacgaacaccccacattcgagcccacggcaggccgacacgtcctggcgaccacaacaaaaatgccctctctccaatggtttaccgaactgacccagcgcgaacgccgcacgctgtacgctggctttggcggctacgcggtcgacgccttcgacttcatgatctactccttcctcattccgacgctgatcgcgacatggggcatgacgaggagcgaagccggcatgatcgccaccagttcgctgatctcgtcggcggtgggcggctggctcgccggcattctcgccgaccgctatggccgcatccgggtgctgcagtggaccatcgccacctttgcgctcttcacctttctgtcgggcttcacccactcgttctggcaactgctcgccacccgcacgctgcagggcattggcttcggcggtgaatggtcggtcgtgacgatcatgatggccgaaaccattcgctcgcctcagcaccgcgcgaaagccgtgggcaccgtgcagagcagctggtcgttcggctgggcggctgcggcgatcatctactgggcctttttcgcgctgctgccggagcaatatgcgtggcgcgcctgcttctggatcgggctgctgcccgcggcgtggatcatctacattcgccgcaacgtgagcgatccggaaatctttctcgaaacgcgccgggcccgcgagaacggcttcgacacctcgcacttcctgcagatcttctccgccgctcacctcaaaaccaccctgctcggcagcgcgctgtgcaccggcatgctcggcggctattacgcgatcaccacctggttgccgacttatctcaagaccgtgcgccatctgtcggtgttcaacaccagcggctatctgatcgtgctgatcgtcggttcgttcacgggctacattgtcggcgcgattctgtgcgacaggatcggccggcgcgcgtcgttcgtgctgttcgccatcggctcgttcgtgctcggcatgttctacaccatgctgccgatcaccgacggcatgatgctcgcgctcggttttccgctcggcatcgtggtccaggggattttcgcgggcgtgggcgcctacctgtccgaactgtatccgaatgcgatacgcggctcgggacaaggcttctgctacaacctcgggcgcgggctcggctcgttctttccgattctggtcggtacactgtcgcaaaccatgacgctggtgaaggcgatgggcgtcgtggcgggctcgggctatctgctcgtgatcatcgcggcgatgtgtctgcctgagaccaagggcaaggtgctcgggaccacccgccccgctgcc

SEQ ID NO: 13186 - DNA, 1866 bp, Burkholderia fungorum
gtgcgttcgtcgagcacgacgcccgggcacgtaacgcaaacccgccgcagggcagcccgcagacgggcctgctccacgggtcagccccaaatgggccagcactacttcaggatgctcatgacaccgaatacctctgccagccacgcgctgccgcccgacgagaaagtctccgcctggagcctgatcaagccctactgggtctccgaagaacgaaacacggcatggggcctgctcatcgcgatcatcgtgatgaatctgctcgtggtgtggatcaacgtgcgcctgaaccgctggagcgccgacttctacaacgcgctgcaaaccaagaacgtgcacgacttcccgcacctgctgatggtgttctcggcactcgcgttcggcttcatcattctcgccgtgtacgggcgctatctccgccagatgctcggcttccgctggcgccagtggctgaccacgcgctacctgaacgagtggctgaaagacagcgcgttctaccggatcgagcgcgaccgcctcgccgacaaccccgaccagcggatcagcgacgatctgcaatcgttcgccaccagtaccctttcgctgacgctcgacctgctgtccacggtcgtcaccctggtgtcgttcatcacgatcctgtggtcgctcgccggcgcgctgaccatttcgctcggcggcatgccgatcgagatccccggctacatggtgtgggccgcggcgctttatgccgtggtcggctcgctgatcatccagaaggtcggccatccgcttgtgccgatcaactaccaggcgcagaaagtcgaggcggatttccgtttcggtttgatccgtctgcgtgaaaacgccgagcagatcgcgttctacaacggcatggagaccgagaagaagaacgcgcactcgctgttcgcgcgtatccgcgacaactggtggcaggtgatgaagtacaccaagcgcctcacgttcgtgctgagcttctacggccagatcgcgatcatctttccgctggtggtcgccgcgccccgctacttcgccggcgccttcacgttcggcgtgctgatgcagatttccagcgcattcggcaccgtcagcgactcgttctcctggttcatcaacagttacggcacgctggtcgaatggcgcgccaccgtgaaccggttgcgtgaattcaagcgtgtcgtgcacgcgccgcggctgaaggaatcggtctcgccggctaccgcgcatggcggcatcaatctgcatttcgtcgacgaagacaagctctccaccaacgccctcaaactcgccctgcccaacggcaatccgctgtcgcgcattcgcgatgtcgcgatccggccgggctcgcgctggctggtgcgcggcccgtcgggttcgggcaagagcacgctgatgcgcgccctcgccggcttgtggccgttcggcgacggctcgatcgacgccccggtcaacgcgcgcatgatgttcatcccgcaggtcagctacatgccgatcggcacgctcaaggcggcgctcgcctacccctcctccgccgacacctacaccgacgacgaatgccgcgaagcactcgtcgtctgccatctgtcggagtacgcggaccgcctgcaggaatcggggcactggacccgcattctttcgccgggcgagcaacagcgccttgccgccgcgcgcgtgctgctgcacaagccggactatctgttcctcgacgaagcgaccagcgcgctcgacgcggaaaacgaggcacgcctgtatcgcctgttcaccgaacggctgccgaaggcggcgattgtcagtgtcgcgcatcgcgagtcgctggccgcgttccacgacgaaacgctcgacgtcgagcgctcggacgaagcggtcgcggca

SEQ ID NO: 13187 - DNA, 1080 bp, Burkholderia fungorum
atggatagagcggccgcggatagtctggcatgcgaaggcactcgcgaggcgtcgatcccgcagcgctttcgtacacgcattactgactgcttcggcattcgccatccgatcctgctcggcggcatgcatcacctcggcgagtcgggcattgtcgcggccgtggtgaacgcgggtgcgatgggtttcatcaccgcgcgttcgttcagcagcacggatgctttgcgcggcgatctgcgccgctgcagagcgctgaccggtggccggcccttcggcgtgaatctgaccttgtcgcgccgcgcggaacagaatcgtgaggtcgccgactggatccggactgcgctcgaagaaggcgtgcgtcacttcgaaagcgcgggcgcctcgcccgagcaactggtcgaaccgatacaacggggcggcggtttgctgatccacaaatgcccgagcgtgcgccatgcagtgagcgcgcagcgcctcggtgtggatgcgctcgcgctggtcggccttgaagaaggcggccatcccggtgccaatcagctgtccgcatttgtgaacggtgcttatgcgctcgaggaaattcatattccgctcgtgatcggcggtggtatcggcaatggtcgccagatcgccgccgcgctggcactcggcgcagatggcgtggtgatgggcagccgcttcatggtcgccacggaaatcgtcgcgcacgatgcgttgaagcagcgcatcgtcgccgccggcgcgcattgctcgaccgcgatcctcgcatcgctcggcgacacctggcgcgtcatggacaacgaggccgcgcgcgaggtgcagcggctcgaagccgcgggtgctcgccggcacagcgagttcggcgatctgattctgtcgtcgcggacgcggcaacgtgtctatcgggacggcgaggtggaggccggcatcgtttcgctcggaccagcgggcggcttcgcggacgcgattgttccggccgcgcagatcgtcgggcaattgatcggtgaagcggcgcaggccgcgcatgcattcgcgcggcgcgtggtcgacgctgacgcttcctgtccggcgaccggagccgtgtcc

SEQ ID NO: 13188 - DNA, 1473 bp, Burkholderia fungorum
atgaaacgctatcagttgttcatcgacaacgaatgggtggatccgcattcgggcgcctggttcgaaaccgacgatccgttcacgggagagccgtgggcggagattccgcgggccgacccgacggacgcggatcgcgcggttcgcgcggccgaaaaagcgctggagggaccgtggtcgacactctcggcgagtgaacgcgggatgctgatgtacaagctcggcgcgctgatcgagcgtgatgcggaacatctcgcgacgatcgaaagccgcgataacggcaagctctttcgcgatgtactcggccagatgaagtacatggcaaagtactactactatttcggcggtcttgccgacaagattcaaggcgcggtcgtgccgatcgacaagccggggattttcaacttcattcgctatgaaccgatgggtgtcgtactgagcatcacgccctggaactcatcgttgcccttgaccacgtggaagatggcgccggctttatgtgccggcaatacgatagtgtgcaagccatccgaattcacgtcggcgtcgctattcgaacttgcgaaactgttcgtggaggccggatttccacgaggcgtattcaatgtcgtgacgggcttcgggccggagatcggagcgtcgctcgtcagtcatccgggtgtcgcgcggattgcgttcaccggtggcgatgaagcggggcgcaagatttacgcggcggcggcacagcacctgaagcgcgtctctctcgaactgggcggcaagtcgccgaatatcgtgttcgacgatgcggacctcgaccaggcggtcaacggtgtgatctccggcattttttcggcgaccggccagacctgcgtcgcgggttcccgtgtgcttttgcaggaatcgatacacgacgcgttcgtcgaacgggttgcaaagctgaccagggcggcgaaggtcggcaatccgctggatccggcgagcgagatcggaccgatcaccaccaagccgcagttcgagaagattctcggctacatagacatcgcgaccagggaaggcgcgcgctgcgtggccggcggccgcgcgctttccggtcccgggtatggcgcgggccgattcgtcgagccgaccgttttcgtcgatgtgacgaacgacatgcgcatcgcccaggaggaagtgttcggaccggtgctgtcgatcatcagattcaaggacgaagaagacgcgatccggatcggtaacgacatcaaattcggactcgcagccggggtgtggacgaacagcctgcatcgcgcaatgttgatgtcgcaacgcctgaaggcgggcacggtatggatcaataactaccgctccagcagtttcaccacgccttttggcggcttcaagcaaagcggcattggccgcgaaggcggtatcgaatccgtcaaggaattcatggaggccaagagcgtctggatgtcgagcgatctgaagatgccagcgctgttcgccggcaaa

SEQ ID NO: 13189 - DNA, 855 bp, Burkholderia fungorum
ttgaacatcctgaagctgaccggcacgctgctgcttgtcctctgcgccttcctgccgcccggcgcgggcgcggaagtgccgattccggcgctgagcgcgcatgtcaccgacgagaccggcaccctcgcggacgaccagcgcgcttcgctcgaacagaccttgcaagcgttcgagacgaaaaagggaagccagatttccgtgctcatggtgcctaccaccgcgccggagaccatcgagcaatattcgcttcgcgtcgtcgagcaatggaagctgggccgcaaaaacgtcgatgacggcgtgctgctgatcattgcgaagaacgaccggacgcttcgcatcgaagtgggctacggcctcgaaggcgcgctcaccgacgcaacgagcagtcgcatcatcaacgagacgatcgttccgcggttcagacagggtgattactacggcggcgtcgcggccggtgtcgacagcatcatgcgtgtggtcgacggcgagcctttacccgcgccggatcagcgtgccagcggctcaacgcggttcgggcgctatctgccggttcttttcgtgctgaccctggtggcgggcggtgtcttgcgcgtgttgctggggcggctgcccggcgccgtcgtgaccgggggcgccgtcgcggtggttgcgtggatgctgtcgggcgcgctgctgatcgcgatcgccgccggtgtgatcgcgctcgcgtttacgctgctcggcagcggtctcggcgccagcgccggcgcgcgcgtgatcggcgggcagtccggaaggctcggcggcggttccggccgcgatatcttccggggcggcggtggcggattcggcggcggcggcgcgtcgggcaggtgg

SEQ ID NO: 13190 - DNA, 2883 bp, Burkholderia fungorum
atggcggaacatctttgcgaactttgcggtgtcagaccggcgaccatccgggtcgcggtcattcagggcggccgcagaaggcaactcgatgtttgcgactatcactacgcgcagctcacgcggcatcaacggcaggtgtcgccgctcgaatcgctgtttcggggcggcctgttcgagggattgctggactcgggtatggacggctccggccccgaacccgccgccacgcgccacgacggcccggtcagcaaaggcgtcgacctgcaacagcatttcagcgaccaggcgaaggaaatactgcaacgcgccgccgaacgcgccgtgcaattcggccgtcacgaagtggacaccgaacacgtgctctatgaactcgtcgaaagcgaagcagtacagcgcattctgtcggcgctgaagatctccgccagcgaccttcagaagcatatcgaagcaaacgcgcccaaaggacacgccacgtcgaaagcgccgcaaggcgagatttccgtttcgccgcgcctgaagagtgcgcttgaacgcgcggttatcgcgtcgcgcgaattcggacagaactacgtcgggcccgaacatattctcaccggcctcgccgaagtcaccgacagttttgccggcgatctgttgatgaagtatggcctgtcgtctcaccagttgcgtcagcagacgttgaaacaggccggccaggaagaagccgcacaggcgcccagcaacacgccgcagctcgacaaatacagccgcgacgtcacgcggctcgcccgtgaaggcaagctcgatccggtgattggacgatcgaaggaaaccgagacgctcgtcgaggtgctggcccgccgcaagaagaacaaccccgtgctgatcggcgagcccggcgtcggcaagaccgcgattgtcgagggcctcgcgcagcgcatgatcagcggcgacgtgccggaaacgctgcgcgaaaaacgcctgatcgaactcaatgtcaactcgctggtcgcgggctcgaaataccgcggcgaattcgaggaacgcgtcaggcaggtgatggacgaaatcgccgcgcacaaggatcagctggtcctcttcgtcgatgaagtgcacaccatcgtcggcgcgggccagggcggcggcgaaggcggcctggatattgccaacgtgttcaagccgccgatggcgcgcggcgagctcaacctgatcggcgcgaccacgctcgccgagtaccagaagtacatcgagaaagacgccgcgctggaacggcgcttccagcccgtgctggtcggcgagccgagcgtggagcagaccatcggcattctgcgcgggctgcgcgaccgtctggaagcgcaccacaaggtcacgatcctggatgaagcgtgcgtcgccgccgccgaactgtccgaccgctacgtcacgggccgcttcctgccggacaaggccgtcgacctgatcgaccaggcggccgcgcgcgagcatctgtcgtccacatcgcgcccggcggaggtgctggaactcgaatcggaaatcgcccagatccggcgcgaacaggaatacgcggcgtcgcacaaacagttcgaacgggccacggcgctcggagagcaactgtccggcaagcaaacccggctcgacgacgcgacccaggcatggaagcggcgcgtgagtacgagcaccgcggaggtgacccgtacgctggtcgccgaaatcgtcgcgaagatgacgggcattccggttgccgacctgacgcaggaagagaaaaccagactgctgcaaatggaggaccgcctgcaccggcgcgtgatcggccaggaagaagcgatcagcgcggtaagcgatgcggtgcggcgaagccgcgcgggtttgcaggcccgccatcagccgctcgccgtgtttctgttcctcggcccgaccggcgtcggcaagaccgaactggccaaggcgctcgccgaagtcgtattcggcgacgaggacgccattgtgcgtatcgacatgagcgagtacatggagcggcacgcggtggcgcgactgatcggcgcgccgcccggctatgtcggctacgacgaaggcggccagctgaccgagcgcgtgcggcggcgtccgcatagcgtgattctgctcgacgaaatcgaaaaggcgcatccggacgtctacaacgtgctgctccaggtattcgacgacggccgcctgaccgacggcaagggccgcgtcatcgacttcgccaatacgctgatcattgcgaccagcaatctcgcctccgacgtcatcatgggcacgccgcgcaagcgtcccggcttcatcgccgcggacaacgacctcgccgccgacaagggcgcccgcaaggaccgccagccggacggcgtgcgcgaaggtgtgatgacggtgctgcggtcccatttccggcccgagttcctgaaccgtatcgacgagatcatcattttcgaatcgctgaacgccgaccagatccgttcgatcgtgcgcctgcaactcgacaaggtcgcgcacatcgcgaagagtcaggatatcgacatcgtgttcgacgacagtatcgtcgatcaactggcgaaggaggcttaccggcccgaatatggcgcgcgtgagttgcggcggcgcatccgccaggtcatcgagaatccgctggcaaagcagatgctcgacggcgcggtccgcgagggcaaccgcgtggtgtgccggttcgatccgctcgcggacgatacggtgttcgaactgggcgaagcaccgcagcaggagctcgccggcacaacgcagcagcaagaccagaaagacccggaagccggcaatggtgcggctgacgccggaccggccgcgaaacccgcgcgcaagcgtgccagcccggcgcgcaagcgcggcaacacggacggcggcgaccacgccgcggga

SEQ ID NO: 13191 - DNA, 345 bp, Burkholderia fungorum
ttgctggatgatctcggcctcgccgcggcgctggagtggctgacggacgacttcacgcagcgctttaacgtggccgccagactgcgcatcgataccgacgacgcgggcttcacgcctttggcgtcctccgcgctcttccgcatcgtgcaggaagcgctgacgaacgtggcccggcatgcgcaggcaaggcaagtgaagcggtcgtccggatttcttgcaatgcgaagacctgctcgatccatatcgacaacaacggccgcggaaccgtactcgaagacaccggcagacgcggctcgttcggcctgctcggcatgcgcgaacgcgtgcgtcagttgcgcggcaccc

SEQ ID NO: 13192 - DNA, 1011 bp, Burkholderia fungorum
atgaaagctgctgtcgttcacgaattcggcgctccgctgcgtatcgaagaggttcccgtcccgcaggtggggcgcggccagattctggtgaacatcaaggcgtccggcgtctgtcacacggacctgcacgcggccgacggcgactggccggtcaagcccaccctgcccttcattcccggtcacgaaggcgtgggctatgtcgctgccgtcggcgaaggtgtcaagcatgtcaaggaaggcgatcgcgtcggcgtgccgtggctttataccgcctgcggtcactgcgagcattgcctgggcggttgggaaacgctgtgccaggaacagcagaatacgggctactcggtcaacggcgcttacgccgaatacgtggtggccgacccgaacttcgtcggtcatctgcccgcggccgtctcgttcgaagatatcgccccgattctgtgcgcgggcgtgacggtgtacaaaggcatccgcatgacggacgcgcggccgggtcaatggatcacgatttcggggatcggcggcctcggccatgtcgcggttcaatatgccattgcgatgggcctgcgcgtggtggccgtcgatatctcggaggacaagctggctcttgcccgcgaactcggcgcaacgcttgcgttcaacgcttcggagtgcgaccccgcggcggcgatccagaaggaaatcggcggaacgcacggcgtgctcgtcaccgccgtatcgcgcagcgccttcgctcaggcgctgggcatggtgcgccgcggcggcaccgttgcgctgaacggtctgccgccgggcgactttccgctgccgatcttctcgaccgtgctcaacggcattaccgtgcgcggctccattgtcggcacgcgccaggacttgcaggaatcactcgaattcgccgcacagggccgtgtgcgtgcccgaatccatctcgaccggctggacaatatcaaccatgttctcgccgaattgaagagcgggaaagtggatggacgcatcgttctgaatctcgat

SEQ ID NO: 13193 - DNA, 1350 bp, Burkholderia fungorum
atgcacatgcccgtcagcggtaagacgcccacatcgcgcagtgccgttttgcgtgagcgagccggctcactcgtggcccagcccgcaactgcggccgctgccgcgttcgtcgtgacgctcaccgccatgctggccgcccggcactggttcgacccggcgttcttcatttgcgtcgccgccgccctgcttctggccacgagcgtgtttctgctcgtgcgcgcgcggcgcgacggcctgtccgcacgcagcgaggaacacgcccgccacagccagtctgccgtgaatgaagcgcgcatgatggcgatcatccgttcgtcaatggaggcgatcatcaccatcgacgagcagcagcggatcgtcatcttcaatccgatggcggaacaggttttcggctgctccgcgatggacgcgatcggcgcgccgctggcccgcttcatcccggatcgctttcgggcggcgcacgcacagcatgttgcgcagttcggcgtaacgggcgtgtcggaccggcagatgggcaagcagcgcgtgctggcgggcttgcgcgccaacggcgaggaatttccgctggaggcttcgatttcgcagatccgcgacggcaacatccgcctctatacggtcatgctgcgcgacatcacggagcgcgtcaaagcggaacgtgcgcaacgccaggcgcgtgaggaactgcgcgagctgtcggccaatttgcagaacatccgcgaagacgaaaaaacgcgtattgcgcgcgaactgcacgacgatctcggccagcagctcaccgcgctgaaaatggacatttcgtcggtcgaacaggcgctggacggcgcggcaagcgggccggtgcgcgagcagttgcaaggcatgcgccgcttgatcgacgtgaccgtggcctcggtgcgccgcatcgcggccgatctgcggccggtcatgctcgacgacctcggcctgattcccgcaatcgagtggctcgccaccgacttcaccaaccgctacggcatcgacgtggagcgcgatatcgaaaccggcgacgcgcgcttcagcccggcaggcgccaccgcgctgttccggatcgtgcaggaggcgctcacaaacgtggcgcgccatgccgatgccacgctggtcacgctgagcctgcgcgcgggcgatcagaccttcgtgctgcgcatcgccgataatggccagggcgtgcatcgcgcggccgagccgggcaccaagtccttcggcctgctcggcgttcgcgaacgcgcccacatgctcggcggcgcggtcgacattcataccgcgcatggccagggctttgcgctcaccgtcaccattccggcagaaaccgtgcagatgcaggagatgcaaaca

SEQ ID NO: 13194 - DNA, 1761 bp, Burkholderia fungorum
gtgcgcgtcgcgcccttgcgccgcgccggcgagccccgtcgcgcggcgttgatccaactcaacgagcctgttccgccgcgcgagtatggttcagcaatacgtccacggccattaccccacggggagcatcacatgaagaattccgactacccggccacgcaggcggccgcggatcctgcccgcaacgaagccatcgcctccggacatttctacctcgtcggcggcggcattgcatcgctggcggccgccgcctttctgattcgcgacgccgacatgcccggcgcgcgcatcacgatcctggaagcactcgacaaaccgggcggcagcctggacggcgccggatcgccgcaggaaggctatgtcgtgcgcggcggacggatgctcgaaagcaagtatctgtgcacctacgatctgttcgactcgatccccacgctggacggccgcagcagcgtcacgaaggaaatcttcgactggaacgaaaccatccgcacctcgtcgaaagcgcgattcgtgcgcgacggccaccgcgaggacacgccgtcgtacgggcttgccgaaacccatctgctgacgctcgggcgtctgtcgatcgaaccggaagccatgcttggcgacagccggattgccgaccacttcgagccggattttttcgaaaccaacttctggtacatgtggtgcaccacgttcgccttccagccgtggcatagcgccgccgaattcaggcgctatctgctgcgtttcgcgcacatgacgtcgggcttcaaccagttgcacggcatcatgcgcacggtctacaaccagtacgattcgatggtgcggccgctgcgcaaatggctcgacgaacgcggggtgagatttcgcaccaacacgcgcgtcgtcgatctgcattacgacgaaagcggtgaactgaaccgggtcgccggcattgtgtgcgaacaggaaaaccgtcgtgtcgagatcgcggtgggcgcgcaggacaaggtcatcgtcacgctcggttcaatgacggcgggatcgagcctgggcggcacggatcaccccgccgtgcccaatcacgacgacagcagcggcgcgtgggcgctgtggaaaaccatcgccgaggggcattccgggtttggccacccttcggtctttgccgatcatgtcgacgaatccaggtggctctcgtttaccgcgacgctgcatgaccggacgctgttccgtctggtccgcgatctgaccggcaacgtgcccggcgaaggcggtctgatcaccttcccgcaatcgaactggctcgcctcgatcgtgctgcctcaccagcctcatttcatgggccagccgaaagacgtcgaggtgttctggggctacgggctgcatatcgaccggccgggcaacttcgtcagcaagccgatggcggagtgcacgggccgcgaaatcatgacggagcttctcggccatctgcagattcaggccgaagccccgcgtattctcgacgacgccatctgcattccgtgcctgatgccgttcattaccagccagttcctgcggcgcaagcgcggcgaccggccgcaagtggtgcccgaaggctgggcgaacctcgcgttcgtcggacagttttgcgagttgccgaacgacgtggtgttcaccgtcgaatattcggtgcgttccgcgcagaccgctgtgtatacgctgctcggcctgaacaggtccgctccggccgtgtacaaagggcagcacgatccgcgcgtgctgtatggcgcggtttccgcgttgcatcaccgc

SEQ ID NO: 13195 - DNA, 693 bp, Burkholderia fungorum
atgacatcgacccatttgctgaccatcgacgcccaacccggaccgttcagcttcgaccccgcaaaaaccgcgctggtcgtgatcgacatgcagcgcgacttcatcgaaccgggcggcttcggcgagtcgctcggcaacgacgtctcgctgctcgccgagatcgtgccgaccgtggccgcgctgcttgcgttcgcgcgccaacaccaatggctcgtcgtgcatacgcgtgaatcgcatgcggcggatctgtccgactgcccgccggccaaacgtctgcgcggcgcgccgaacgcgcggatcggcgacgcggggccgatgggccgcattctcgttcgcggcgaacccggcaatgcgatcatcgagccgcttgcgccgctggccggcgaactggtaatcgacaaacccggcaagggcgcgttctacgcgacccggctcggcgaggaactggcgatgcgcggcatcacgcatctggtgtttgccggcgtgaccaccgaggtgtgcgtgcaaacgtcgatgcgcgaggccaacgaccgtggttatgacagcctgctgatcgaagacgccacggcgagctatttccccgcgttcaaacaggcaacgctcgacatggtgcgctcgcaaggcggcattgtcggctggaccgcacctttgtcttcactattgaaaatcgacgggacgatcccagcatggaag

SEQ ID NO: 13196 - DNA, 1008 bp, Burkholderia fungorum
atgccagaagccccattgcagtcttcatcggtcgtcgcgctgcgcggcacaccgctcgttcatccggtgcgcaatcccggcatgccgttcgaggcctcgtggctcgatggcttgcgcgtcaatcagtcggcggtggagcggcgcaccgccacgctcggcacgcgccgcagcgtcaagaaagatgcgcaggccgcctggctgctgaaagccattacctgcatcgacctcaccacgctcaatggcgacgacacggaaggccgcgtgcgccgcctttgcgcaaaggcgcgtcaacccgtgcgcaccgatctgctcgaagcgctcggcatcgcgccgcaaggcatcacgacgggagcggtgtgcgtctatcaccgcttcgtcgcggcggcggtcgatgcactgcacggcagcggcataccggtcgcggcggtatccacgggttttcccgcagggctgattccccatccgctgaagctgaaagagatcgaagcgtcggtcgcggacggcgcgcaggaaatcgacattgtcgttacgcgtgaatatgtgctgaccggcaactggcaggcgctctacgacgaagtgcgcgacttccgcgcggcctgcggtccggcgcatctgaagaccattctcgccaccggcgatattcgcacgctctcgaacgtggcgcgcgcctcgatggtctgcatgatggccggcgccgacttcatcaagacatccaccggcaaggaaggcgtcaacgcgacgctggacgtgtcgctcgtgatggtgcgcatgatccgcgaataccaggagcgcaccggcgtgcttatcggcttcaagccggcgggcggcgtgtcgagtgcgaagtcggtgctgtcgtaccagatcctgatgaaggaagaactcggccgtgcgtggctggaacccgagctcttccggatcggcgcgtcgagcctgctggccgatatcgaacgccagctcgaacactacgtgagcggccgttactccgctttcaaccgtcaccccgtagcc

SEQ ID NO: 13197 - DNA, 1458 bp, Burkholderia fungorum
atgcgcggccgctcgctcgccgcgacgctggcgctggcgttcggcgctacgacgctggcggttttcgtgctggtcggcagttttctgtatctcgcgctcgaaaagcagatcaaggcgcaggacaatctcgacatcgtgctcgccgcgcgccatgcgcggcggctcgccgaggaactggacacggcgcagggcattcgcgaccacagcgagcgcttgaccagtatcgtgctgggcaacgaagccatgtcgatggaagtgttcgatcccgacggcacgcgggcgatcgaacacaacatcgccggcgtgctcgcggcgccggatgcggcgagcggcgccgcaacgctggcggcgttgccgccgctcacgcgagtggccgcgaccgagcgcattgcggaggccgatatcggcgactggaccggccgcaacggcgcgccgatccgcggcattctcaccgacgcgcggctgcgcgacggcgacacggcgagcgtgctggtggcgcgcaacatgagcgaccgctggctgttgctggaccgttaccgcgacaagctcaacctggcgggcgtggccggcgtgctgctggccgtgctgctcggctacctgctgattcgtgccgcgctgcggccgttgcgcgatatcgcggcgagcgcgagcctcgtcacggtgaatcgcctgcatacgcgaatcgcggtggcgcgcgtgccgagcgaactcgacacgctggtggcggcgttgaacgcgatgctcgagcgcgtcgagcacggttttcagcgtctgtcgcgtttcaccgccgacctcgcacacgacatgcgcacgccgctcagcaacatgcgcggcgccgctgaagtcgcgctggcgcggccgcgttccgtcgacgaatacgaatcggtgctcgcgtcgaatctggaagagtgcgaccggctctcgaagatgatcgagaacgtgctgtttctggcgcgtgccgagcatccgcagttcgtcaaacatatgcgtgcgttcgacgcgggcgaggagttggcgcatatcgccgactacttcgaagggattgccgaagaagcgaatgtgcgtgtgcgcgtcagcggcgcggccagtctgacggcggatctcgaactgttccgccgcgccgtgagcaatctgctcgccaatgccattcgctatacgccgccggggggcgagatcgcgctggacgctagcgagtcggccgacgcagtgcgcgtgagcgtggagaaccaggggcagccgattcccgccgagcacatcgaacggattttcgaccgcttttaccgggtcgatccgtcgcgcagcgcgctgccgtcggcggggttgtcgcaagggtcttccgggtccacggggctcgggctcgctatcgtgcgcacgatcatggaactgcacggcgggtccgtgcacgccgagagcgatgcacggagcacacggttcgtgttgacgttcccgcgcagcgcg

SEQ ID NO: 13198 - DNA, 1131 bp, Burkholderia fungorum
atgttgatcaggaacgctcgcatcgtgacgcgagacgaagtatttaccggcgtgatacgcgtcgaagacggcgtgatccgcgaggtcgagcgcggcacgaccacggcgcgcgaagccgaagattgggacggcgactatctgttgcccggcctgatcgaactgcacacggacaacctcgagaagcatctcgcaccgcgtccgggcgtgcaatggaacaccgacgccgccttcgtgattcacgacgcccaggtggccgcggccggcatcaccaccgtgttcgacgcgctcgcgatcggttcgcgcaccaacgtgggattgcggggccgcgatctgcagacgcaatgcgccgaatcgctcacgcgcttctccgagcgcaagctgctgcgcgccgaacactttctgcatctgcgctgcgaaatcgccaccgccgacgtggtggacgtgttcgattcgttgtgcgcgcatccgttactgcggctcgcctcggtgatggatcacacgccgggccagcgccaatggcacgaccgcgagcaatggcgccgcttccaggaacgcaacggcaagctgagcgacgaacacgtggcgaccgcgctgaccgagctgtcggtcgaacaggctcgttacgccgacgcgcatcgccgcgagatcgtgacgcgctgcaagcggctcggcattccggtggcgagccacgacgacacgttgatcgagcacgtcgagcaggccaaggcggaaggcatcgtgctcgccgagtttcccaccacgcgcatcgcggccgaggccgcgcgcgagcacggcatttcgaccatcatgggcgcgccgaacatcgtgcgcggcggctcgcattcgggcaacgtgtcggcgctcgaactggcgcaagctgacctgctggatattctctcgtcggattacgtgccgtcgagcctgatgaccgccgtgttcgaactggtcgacaaggcgggctggagcttgccgcgcgccatctcgacggtttccgccgaaccggcgcgcacggccggtctgcacgaccgcggcgcgatcgaaaccggcttgcgcgcggacttcgtgcgcgtgacgatgctcgacaggctgccggtgccgcgcgccacgtatcgcggcggggcacggatcgtt

SEQ ID NO: 13199 - DNA, 1788 bp, Burkholderia fungorum
atgctgcctgcacataaacataccctcgaaacactgctcgccgacacggtgaagcaggtcgcgcttgcctcgcaaggcgcgtccgaagccgcgttcgtctcgcccaccatcacgctggagcgcccgaaggtcgccgcgcacggcgacgtcgcatgcaacgtggcgatgcaactcgccaagccgctgcgcgccaatccgcgccagcttgcgcaacagatcgtcgacgcgctgctcgcgcaaccgggagcccgcgatctcgtcgaagccgccgaagtggccggccccggcttcatcaacctgcgcctcaccgccgctgccaagcaggcggtgatcgccgctgtgttcgctgaaaaagaacgcttcggccgctcgcaacgcgacgccggcaagcatgtgctgatcgagttcgtctcggccaacccgaccggcccgctgcacgtcggccacggccgccaggccgcgctcggcgacgcgctctcgaatgtgctggccagccagggctgggacgtgcaccgcgagttctactacaacgacgccggcgtgcagatccagacgctcgccctgtccacccaggcgcgcgcccgcggcctcgcccccggcgacgaaggctggccggcttccgcatacaacggcgagtacatcgccgacatcgcgaaagactatctgaacggcgccaccgtggccgcgagcgacggcgagccggtcaccggcgcgcgcgacgtcgaagacctcgaagcgatccgccggttcgccgtggcatatctgcgccgcgagcaggacatggacttgcaggcgttcggcgtgaagttcgaccagtactacctggagtcttcgctgtacaaggaaggccgcgtcgaaaagaccgtcgcggcgctgatcgccgccggcaagacctacgagcaggaaggcgcgctgtggctgcgcaccaccgacgacggcgacgacaaggaccgcgtgatgcgcaagaccgacggcacctatacgtacttcgtgccggacgtcgcgtatcacgtcgccaaatgggagcgcggcttcaccaaggtcatcaacattcagggttcggaccaccacggcacgatcgcgcgggtgcgcgccggcctgcagggtctcggcatcggcattccgaagggctatcccgactacattcttcacaaaatggtcacggtcatgcgcaacggcgaagaggtgaaaatctccaagcgcgccggcagctacgtgacggtgcgcgacctgatcgaatggtcgggcggcgcgacgccgggctcggaagtcgatgtcgatctgatcgacgaggaaacgattcgccgcggccgcgacgccgtgcgctttttcctgatctcgcgcaaggcggacacggagttcgtgttcgacatcgacctcgcgctgaaacagaacgacgagaatccggtgcattacgtgcagtacgcgcacgcacggatctgctcggtgatcgccgagtgcaaggcgcgctacaacatggacgaaagcacgctggcggacgtggacgtcacgccgctcaccagcgaacgcgcgatggccctgctgaacaagctcgccgaattcccggacatgctgcaacatgccgccgacgaactcgcgccgcacgcggtcgcgttctatctgcgcgacctcgccggggaattccactcgttctacaatgacaaagctgagcgcgtgctggtcgacgatgcggccgagcgcaatgcacgcgtggcgctgctcgcggccacgcgtcaggtgctggccaacggcctcgcgacgattggcgtctccgctcccgtcaagatg

SEQ ID NO: 13200 - DNA, 1443 bp, Burkholderia fungorum
atgaacgtcagagccaccggcgccgaagtcgcggcacaccgtgcggacgatgaagccgaacgcatcgttgcgccgctcgtagcgagggcgcgtgcggcgcagcgcgatttcgaaaacgcgggacaacaggcgctcgacacggccgccgcagcagcagcgtgggccatcatggaaccgcagcgcaaccggcaactggcggagcgcgccgtacacgatacgggcctcggcaacgccgacgacaagttccgcaagaactatcgcaagacgctcggcctgctgcgcgatctgcatggacagaagaccaccggcgtgatcgcggaggacaaggcgagcggtatcgtcgagatcgcgcgcgccgtcggcgtggtggcggcggttacaccgtccaccaatccggctgccacgccggccaacaagatcgtcaacgcgctcaaatgcggcaatgcggtaatcgtcgcgccatcgcccaaaggccactcgtcctgcgcgttgctgatcgaattcattcacgcgcaattcgccagagccggtatcgacgccgacctcgtgcagatgctgcccgcgccgatcagcaaggcggccacggccgcgctgatgcggcagtgcgatctggtcgtggcgacgggttcgcaggcgaacgtacgcatggcgtatgcaagcgggacgcccgcattcggcgtgggcgccggcaatgtcgcctcgatcgtcacggcgtctgccgatctgcatgatgcggcgcgcaagatcttgcgctcgaaaaccttcgacaacgcgacgagctgttcgtctgaaaacagcgtcgtgatcgaagaggcggtctatgcgccgatgctcgccgagctggccgcgtgcggcggcgtgctcctcgatgccgcgcagaaggcccgcttgcaggcggcgatgtgggccaacggcaagctctccgaacaatgcacggcgaagtccgccgaggtgatcgcccgtgtggcgggtctggacgacatcgcggcgcgtcatcccgccttcctgatggtagaagaagccggcgcgggcagcgactatccgttttccggcgagaaactcgcaccggttcttgccgtgtatcgtgccgccgatttcgctgccgcggccgacgtggtgcgcgacatttacgcgtacatgggcgcaggtcattcggtcggattgcattcggccgatcccgcgcaagcggtccggctcggcgtaacgttgccggttgcgcgcgtgatcgtgaatcaggcgcactgtctcgccaccggcggcaacttcgataacggcttgccgttctcgctgtcgatgggctgcggcacgtggggccgcaacaacttctcggggaatctgggctttcgccattatctgaacaccacgcgggtcgcctatccgatcgaggagcgcgtgccggagacggacgaattgctcggcgatttcttcgcgaggtacggccga

SEQ ID NO: 13201 - DNA, 2211 bp, Burkholderia fungorum
atgttctttgcgtggggcgtcgtgagcatcgtggtcatgcggggcggcgtgcatatcgtcacgcgcggaacgaacattgatagtgttgagatggcggcaaaaagacagtccgaattcacgcggggattgagcaggcaagcgcggcggcgcacccatgcgctgatgttcggtgcgctcggcgcctgtgtcccggcggcggcgcacgcgcaggccgtggcggacgccggtgcgcagttcaacggtcagcgtgacgatggcgcgaatgccgtggagtcggagcaggcaaccgtcgcgagcgaacatctggtgaacccgggtgcggacggtccgtcggcggcgctcggctacgctttcaatacgttccgtacgtcagggcaaggggcggcggatacgcagaattatctcggcttcactgccggcgccaatatcggcaattggcaagtgcgcgagcggggcgcgctccagtccatgacggggcgaggcacgtcgtatcagaatatcgcggcttacctgcagcgcgacattccgtcgttgaaaagccaactggttctcggcgaccagtttacggacggcgcggtgttcgacagcatcggcttgcgtggcgtaagggtggagagcatcgatagcgcagggtccgcggcggtggccggttatgcaccggtggtgcgcggcgtggcgatgtcgaatgcgctggtcacggtcacgcagaacggcaacctcctctacgaagcgacggttgcgcccggaccgtttgagatcaacgacgtcgcggcaacgggttacggcggcaatctgcttgtcaccgtgaccgaggcagatggcagtcggcacagtttcaccgtgccgtacacctccgtcgtgccgcttttgcggcaggcttcaacgcggttcagcgtggccggcggcgtgatccgcgacccgcggatcaagcgccaccgcgcgctcgtgcaaggcacgctccagcacggtttcaacggcatggtgacgggctacggcggggcggttgccgcggacggctatctgtccggcctgctcggtgtggcggtcggtacgccgatcggcgcgctgtcggccgatatctcggcggcgcaggcggacgtgccgcaggcgcgaagcacgcgaggtacgagtctgcgtatcggctatagcaagttcatcgagcagacggatacgaacgtttcgatcgccgcgtatggctattcgtccggcggcttcctttcgttacgcgacgccatgctggggcgcgacgcggcgccggcagactctggcgcgaacggcgcaggacgccgccgcaaccagctgcagatctcgctgaaccagcgcctcggcgctgctggcggaacgctgtatgttgtcggctcgacatcggactattggaaccgttcgggctccgacatgcagtttcagatcggctacagcggtgcattgcgggtggccgacgccaatctgaactacacggtatcggtatcccggcagcgcaccgggttgaccgggccaatgagcaaccaggtgtttgccaccgtttccgtgccgcttggcaaggcagagcatgcgccggttctgtctgcgggcttgatgcatgacagtcgtgccggctggtcggagcaggcaacgcttgctggttccgcgggcgctgcggacgagctgggttacggcctgtatggaacgcactcggaccggtcggccacaggtggcggcaatgtccagtaccacggtccatacgcgaattttggtggaagcgcgagcggtggttccggttactcgcaggtttcggcgaacattcgaggctcggtgttcgcccgcagggaaggcatcacgctagccggaacaccggaagacggaacggacactgtccagccgaagcacagcgcaggcgcttctgaatacccgggagcgggcgcgagcagtcccggctatacggccgtgccgcatctgttgcccggcaacgtcgatccgatcgaggtcggtccgcaacgcgctctgcccgacagcaaggtccagccgtccagtctggagatggcgccgcaggtaaatgcggcagtcgtcacgcatcactccgcggacgacagcatcgcttcgaatgtcgcaaccgcgaaccagacggaaggggccgaacgcctgatgctgttcatgaatgccgtgcccatgaaggtgtacgcgcgcaattcggttgtctcatggtcggatgtggagcgcgggaacgggcatcac

SEQ ID NO: 13202 - DNA, 2661 bp, Burkholderia fungorum
ttggcctttcaatcgacttttcccttcgaaacgtccgcggcgcgcgcggacgcttcgtccctgctgcgcctgctgccggcccacgagggacattgggacgagttacgcgacgcctcgggcgcattgcgcgagccgtggcggcaattcttcgaacggctcggcgaagtcggcatcgcgcggctcgacgatcatctcgcctcggtcgcgcagcagatccgcgacaacgacatcagctacaacgtctatgcggacaacggcgagccgcggccgtgggcgctcgacttgctgccgttcctgatcagcgaggacgagtgggcgcatatcgagcgcggcgtcacgcagcgcgcgcatctgctcaacgcgatcgtcgccgatatttatgggccgcaaaccttgctggagcgcgggcaactgccgcccgcgctggtgttcggccatcccggctatctgcgctcggtgaggggcttcacgccgccgggcggccagtatctgcaagtggtcgcggtggatctggcgcgcacgccgaacggcgactggaccgtcatggcgcatcgcaccgaggcgccgtccgggctcggttacgcgctggaaaaccgcctgatcgtgtcgacgctgttcgccgatccgttccgcgccctgcgcgtgagccggctcgcgccgacctactcgcaactgatcgcgaccctcgtgcaggcggcgcaggccacgatgcgggacgacagcgacgatgtcgaccgttcgccgcatatcgcctttctcacgccggggccgtttagcgaaacctatttcgagcacgtatttctggcgcgctatctcggcgtgacgctggtcgagggcaaggacctgaccgtgcgcgacgacaaactctatctgaagacgctcgccggtctcgaacgcgtgcacgtggtgctgcggcgtctggacgacgcgttctgcgatccggtcgaactgcgcgccgattcgagcatcggcgtgcccggcttgctacaggtgatgcgcgcgggcaatgtgatcgtctcgaatgtgccgggctccggctttgtcgaatcgccggccttgcatggcttcctgccgggcatcgccgaagtgctgctcgacgaggacctcgtattgcctagcgtgccgacatggtggtgcggcgaaaaggcggcgcgcaaccatgtcttcgcgcgtctcgacgaagcgctcatcgtgcccacgtggccggtcgccgcgcgcgatgcgccgcccggcatcgagcacggccggcagcggctgtcgacgtggcgcgagcgtatcgaagccatgcccgacacctacacgatccagcaggcgcagcgcttttcctgcacgccgcgttacgaagacggcaccattggccgccgtccgtcggtgctgcgcgtctacgcgatcgcggacgtcaacggcggctggcatgtaatgcccggcggcttcacccgcatggccgccgaacgccagaccacggtctccatgcagtacggcggcagcagcgtcgatacgtgggtgctgtcgagccagccgacttcgaccttcacgctgctgccttcgcccatgcagcctgccgacctcgcgcgcaaacaccgcacggtgtcgagccgcgcggcggaaaacctgttctgggccgggcgttacggcgagcgggccgaaaacaacgtgcggctgctgcgtctgattctaggctcgctggaaggcaacgacgccgacgcgatgtttccgaccctcgtcgaactcgccatgcattgcgggctcgtgcagtccggcgacatgttctcgccgcattcgccgcaagccttcgagcgtgcgctggtcgccaatctgagcgagagcacgggcgccgcgagcatcggccagaacctgaactgtcaggcgcgctcgaacggggaggtgcgcgggcgtctgtcgaacgatcactggcgcacgattctcgcggcgcgcaacgacttccgcgacgcgttgcagacgctgatgccggcgccggggtacagcggcggggcatcgcagggcaatggcggcggtaatggcaatggcaacggcggcaacggcaacggccgcggcgagcgctacgagcgttacgatcgcgtcacgttgatgaacgcgctcgaacgcctgtcggtgcagttgtcggcaatcagcggcgcgcagggcgaccgcatgacccgcgacgaagcatggcgcctgctgttcgtgggccgtcacatcgagcgcgtctcggcgatgagctcgttcctgcgcgtagtcgccgataaaggccaactctccacgcccgccggtttcgatctgctgctgcaattgttcgacagcacgctcacgtaccgctcgctctatccgggccgcttcgaagtgccggcgttgctcgatctgctggtcatcgagccgaccaatccgcgcggtatttacggcgtgtacgagcgtctgcgcaaaaagctcgacgagatcgccgtggcggcgggcggctcgcggcatcgtccgttcgccgaattgatggtgccggccgcttcgttgccgtcgctcgaatcgctgtgcgccgtcgacgaagacggcgcctacggcaatctgattgcggtgtgcgatcagatcggcggttttgccggtgcggccgcgcatgaaatcagcgcgcgctatttcagtcacgccagcacggtcgcctcgcaggtgtggtca

SEQ ID NO: 13203 - DNA, 801 bp, Burkholderia fungorum
atgtctctaccgcaaaaccatttcaaacgcgcgctggccgaaggcaaaccgcaattcggcctgtgggccgcgctcgccgacgcctacgtgaccgagttgctggctaccgccggtttcgactggctgctgatcgacaacgaacatgcgccgaacgacgtgcgcagcacgctggcccaattgcaggccgtggccgcgtatgcatcgcatccggtggtgcggccggtgcgcagcgacgccgcgttgatcaagcaattgctcgacatcggcgcccaaaccctcttgctgccgatgatcgacacgcccgaacaggcggccgatgcggttgccgccacccgctatccgccccaaggcattcgcggcgtgggcagtgcgttggcgcgcgcatcgcgctggaaccgcatagcggattatctgggcacggcggcagatgagttgtgcgtgctggtgcaggtggaatccgtgcagggcatgcagaacttgccggcgattgcggcagtggatggcgtcgacggcgtgttcttcggtccggcggatctgagcgcctcgatgggcctgctgggcaaacccggcgatgccagcgtgcgcgaagcgattcgcaacggcatccggatcgcgcgaagcgcgggcaaagccgcaggcgtgctcgcgcccgattcggcgattgccgccgattatctcgcagcgggcgccacctttgtcgcggtcggcacggacacgggtctgctgagccgtgcggcggcagatctggcggcgtcgtataaacagagcgcggcgatggcgacctcgcccacaggcggctat

SEQ ID NO: 13204 - DNA, 2190 bp, Burkholderia fungorum
atgtatctgctcggctatagcatcgacaacctctcgctgatggcgctgacgatcggcaccggcttcgtggtcgacgacgccgtggtggtgctggagaacatcgtgcggcatctcgaagccggtctcgatccgaaggaagccgcgctgcgcggcagcgccgaggtcggcttcacggtgatctcgatgagtctctcgctgatcgccgtgttcctgccgatcctgctgatgccgggtattgtcgggctgctgttccatgagttcgccgtcacgctctcgattgcgatcctgctgtcgctgctcatttcgctgaccatcacgccggtcatgtgcgcctatctgctcagccgcgagcgcacgatgcatctgcagtcgcgctgggcgcactgggtcgaggcccagttcgagcgcttcaagcaggcttatgcgcgctcgctcgcggcggcgctcgatcacgcgctcgcggtcgtcctgctgctgatcggcctgctcgtgctcaacgtgttcctggtgccgctgctgtccggcacgttctttccggagcaggacaccggcatcctgatcggccagatcatcgccgaccagagcgtctcgttcaacgcaatggaaaagaagctcgcgcaattgcaggcgatcgtgaagcaggacccggcggtggcatcggtggcgggcttcaccggcgggcgcgcactgaacacggccaatgtgttcatcgaactgaaaccgctcgcgcaacgccatctgtcggcgaccgaggtggtcaaccggctgcgtcccaaactcaatgccgtatcgggcgcccggctgttcctgcaggcgcagcaggatctgcagatcggcgggcgccaggccgcggccgaataccagtacaccctctccagcgacgatgcgaacgcgctcttcacctgggtgccgaaactcgtcaccgaactcggcaaataccgtggaaaactggaagacgtgaattcggatctgcagcagaacggcttgcagacctacgtgaacttcaaccgcgcgaccgccacgcgctacggtttccagccgaaccagatcgacaacgtgctgtacgacgcgttcgggcagcgcaccgtgtcgaccatctacaacccgctcaatcagtactttgtcgtgatggaagtcgcgcccgcctactggcaatatccgcaagcgctcaaccagattttcctgagcacctctgccggcaacccgagcggcacgcagcagacgcagatgtcgcgcgccaccgtcaaagccgtgcagcaggcaatggctgtcggcagcgcgtcgagcagcagcgcgaatacgaacaccctgaacgccgacgccgaagcgaaccagcagaccaacagcatctcgaacagcaagggcggcaattccagcggcagcgcggacagcacggcggcggaaacgatggtcccgctttcggcgatgatgaccttctcgaacagccacaccgcgacccaggtgaaccatcagagcgggctcgtggctggcaccatctcgttcaatctgccggccggcggatcgctgagcgaggccggccagctcattgcgcaggccgagcgcgacatcggcatgcccgcgtcggtgcacggcgcgttcgcgggcgccgcgcaagcctatgcgcagtcgatgggcgccgtgccgctgctgattctcgccgcgctggtggtggtctatatcgtgctcggcatactgtacgagaatacggtgcacccgctcacgatcctgtccacgctgccgtcggcgggcatcggcgcgacactcgccttgctgatcttcggcacgcccttttcggtgatcgcgatgatcggcatcattctgctgatcggtatcgtcaagaaaaacggcatcatgatggtcgacgtcgcgatccagttgcaacgcgaggaaggcatgaatgcgcgcgatgcgattcaccaggccgcggtggtgcggctgcgcccgatcatgatgacgaccgcggccgccgtgctgggcgcggtgccgcttgcgatcggcatcggccagggtgcgtcgctgcgccagccgctcggcgtgacggtcatgggcggcctgctcgtgagtcaggttttcacgttatacacgacgccggtgatctacctgtacctcgaccggctgcgcgcgcggctggcgagatggtcagcgcgcctgccgtggaatcgccgcgacgacgcaccggacacgagcgca

SEQ ID NO: 13205 - DNA, 861 bp, Burkholderia fungorum
atgggcaaactcgcgttggcagcaaaagtgactcacgtcccgtcgttatatctgtccgaactcgacggtccgcacaagggctgccgtcaacccgcgatagacggtcatcatgaaatcggccggcgttgccgcgaactgggcgtggatacgatcgtcgtgttcgacgtgcattggctggtgaacagcgaataccatatcaattgcgcgccgaagttcgaaggcatctatacgagcaacgagttgccgcatttcatcaggaacatgccgtacgcgtatccgggcaatgtggaactcggcaatctgatcgcggaagtcgccagcgaaatgggcgtgaagagccgcgcgcacagcgagaccacgctcgaactcgaatacggcacgctggtaccgatgcgctacatgaatgcggatcagcacttcaaggccgtctcggtagcaggctggtgcgtgtggcatgacctcgacacgagcgtgcgcttcggcctcgcggtgcgcaaggcgatcgaggaacgttacgagggcactgtcgcgattctggcgagcgggtcgctgagccaccacttcgccaacaacggcacggccgagcagttcatgcataaggtgtggaatccgtttctcgaacagatggaccgcaaggtggtcgagttgtgggaagccggcgactggaagaccttctgcgagatgctgccgctctacaacgagaaatgctggggcgaaggcggcatgcacgacaccgccatgctgctcggcgcgctcggctgggatcgttacgaaggcaaggtggaagtcgtcacgccatatttcggcagttcgggcaccggccagatcaacgcgatctttccggttacgcctctgcccgtt

SEQ ID NO: 13206 - DNA, 753 bp, Burkholderia fungorum
atgcgcggccgtattgcgtatgcaggcgcgattcacgaagcctgtcccgacgccaatggcgtgcgtctcgccgacggccgcgtgcgtggcgaacatgaagtggtctggcttgccccgatcgaagtcggcacgatcttcgcgctcggcctgaactacgccgagcatgcgaaggagttgcagttcggcaaacaggaagagccgctcgtgtttctcaagggaccgggcacggtgctgggtcatcgcggcgtgacgcgccgccccgccgacgtcaccttcatgcactacgagtgcgaactcgcggtcgtgatcgggcaaaccgcgcgcaacgtcacccgcgaaaacgccatgcagcatgtagccggctatatgatcgccaacgactacgcgattcgcgactacctcgaaaactactaccgccccaacctgcgcgtgaagaatcgcgacggcggcacggtgctcggcccctggttcgtcgacgcagcggatatcgaagacgtcacgcaactggagttgcgcacgttcgtgaacggcacgcgtcagcaacacggcaatacgcgcgacctcgtcaccgatatcccggcgctgatcgaatacctgagcagcttcatgaccctcgcgcccggcgacgtaatcctgaccggtacgcccgagggcatcgtcaatgtcaatgcgggcgacgaagtggtctgcgaaatcgacggtcttggccgtctcgtcaatacgattggatcggacgcggacttcggccgcgcc

SEQ ID NO: 13207 - DNA, 4758 bp, Burkholderia fungorum
ttgagcgccctcgcgttgtcattgcgcctcgcgctgagtctcacggcggtctgttgcgtggcgacggtgtcgcccgatgcgttggcacaggcctcgaaagatccgctgaacgtgctgatcgatcagggcaagtactggcaatcgcatcagcgcggcgacctcgccgaacaggcgtggcagaaagtgctgcggatcgatcccaaacaaccggatgcgctcttcggcatgggcatggtgctcgccgaccgtaaagacggcgccggcgcgcagcaatatctggcacgcctgaaggcggtcgcgccgaactatccgaatctggatgaactcggccggcgcctcggcgaatcgagcctgcgcgaccagagcgtgaacgacgcgcggcggctcgcgcaaagcggccagagcgcgagcgcggtgcaggaatatcagcgcgcgctgaccggcaaaccggccacgcccgaattgcagctcgagtactaccaggcgctctcggccacgccgcaaggctgggatcaggcgcgccgcggactggagcaactcgcgcgcgacaaccccgacgacccgcgctatgccctcgcttacgcacagcatctgacctatcgcgacgtgacgcgccgcgacggcatcgcgcggctgcaaaaactcgcgggtgacagcacggtgggcgcgtcggcgaaaaagagctggcgtcaggcgctcctgtggctggacgcgcggccctccgacgccgcgctctatcaggcctatctgcaaaccgcgacggacgacgccgcggtcaaggcgcgcttcgattcgatggtccagcaggacagcacggcccgcgcgcgcgcgcaggaaaacgccgccgtcgatgcgcgcggccgcgccatcgccgacggcttcgccgcgctcgatcgcaacgacgtggcaacggcgcgcgcgaagttttcctccgtgctggccaccagcccgaacgacaccgacgcgctcggcggcatgggcatcgccgcattgaagcaggagcgtttcgccgaagcccgcaacgatctggagcgcgcgtcgcgcaacggcaatccggcgcgctggaaaaccgcgctcgacagcgcgacctactggacctatacgagcgacgcgatcggcgcgcgcagcaacggcgagttcgcgaaggcgaagtcgctgttcgagcgcgcgatcgcgctgaatccgtccgacgtcaccgcccaggtcctgctcggcgaaatgctgctcgccaatggcgacccggtcggcgccgagcaggcgtaccggatggcgctgcgccgtcaggccgacaatcccgacgcggtgcgcggcctggtcggcgcgctcgccgcgcaaggccgcggcgacgaggcgctgcagttcgccaatcagctgaatgccgaacagcagtcgaaggccggcggcatcaaccgtctgcgtggcgaagcacaggcggcgcaggcgcgcgcggccgaagcgcgcggcgatctcggcagtgcgcgcagcctcttcgaagacgcgctgctgaacacgcccgacgacccgtggctgcgtctggacctcgcgcgcatctacgtgcgccagggcgcggtggccaacgcgcgcagcatgatggacggcctgctcgccgcgcatcccgacatgaccgacgcgctgtacgcgagcgcgttgctgtcggcggaaacgcaggactggtcgacgggtctcgcgcaactggaccgcattccgctcgcgcagcgcaccgacgcgatgacgaccctgcaacaccgcttgtgggtccaccagcaagccgacctcgccacgcggatggcgcgcagcggccagacccaacaggcgctcgccacgctgcacgcggcggagccggttgcgggcaacagtcccgaactgatcggcgtgatcgccgccgcctaccagcaggccggcgacccgaaccgcgcgctcggactcgtgcgcgccgccatgaacgcggcgcccggcaacaccgatctgctgctgcaatacgcgggcattctgtccgccactcagcaggaagccgaactcggcatggtgatgcgccggctcgcgtcgatgcaattgacgccgcagcagcgcaccgacttcggcaatctgaatctcggcatcgtcatcaagcagtgcgacgcggtgcgtcagcgcggcgacctcgccggcgcctacgacgtgatcgcgccgtggctcgcggccatgcccgacaatcccgatctgcaagcggcgctcggccgcctctattcgaccgccggcgacgatcgcaacgcggtggccagctatcgcgtcgcgctgcaacgcaagcccgacgacctgagcctgctgcaggcgacgatttccgccgcggccggcgcgaagcagttcagctacgccgagtcgctcgccacgcaggccttgaacgcggctccaggcgatccgggcgtgctcgccacggttggccgcatgtatcgcgcggaaggcaagctgtcgctcgcgtcgacttttctgcaacgctcgctcgtggccgccaacacgccgctgatggccaacgccccgcgcaacccggcgagcaacgtgccgcgcggctgggaagtggcgatgcgccggatcggcgcgacaccgctgccgggcaccaatcctttcgagggcaagaccgcgacggtcacgccgaccgacgccgacaacgccgcgcttgcgggcggcagctacaatgccgcgcgcgcctcgcttccgtattcgcagtcttccttgccgacacagaccgtgccgaactatccgccgcctacgcaacccgcgccttacgtcgcgccttatacggcgcccgcgcagccttacgcgccgaaccgggcgcccgccgctcttccatacaacgcgccgcgtcagggcgccgattcgggcggctatggtcaggaagcctacggatcgagccagtcgggcgcgccgttgcagccttatcccggccagggccagccgccgatgcaaccgcaggcgcagatgccaccgatgcagcaggctccgcaatacaacccggcttatccgcagcaggcgccttatccgcaagcgcaagcgccctatccgcagcaggcgcaatacggcgcgccggatggctatgccgccacgccctggccgatgtcgccggccgcgcgcgaagcgcagaccaacgccggctcgatgcaacagcagccgtacggcgcaccgggcgcgagcaccaaacgtccggccggcagaaagcaaagcgcgtcgaagaacagccgcaacgcgcccgcctatgcgcaggcgccgtatgggcagcagcaaggctatccgcagcaacagcaggcttactacggccagccggcgtatgcgcagcagcaacagcagggctacccgcagcaaccttatcaaccctatcaaccgtatccgccgcagcagcaaggctacgagaatcaaggctcgtatcagggctattacgcacaacagcagccgtacattccgcagccgcccaccggttatgcgcaaccgtactatccggcgcaacccggcgcgaacggcggcggcaacacgtatgcgccgtcgaacgtggcaagcgcgcaaacgctcggcgtcgccgaagaactggcgcaggtcaaccgcgagcagtcgagctcgatctccggcggcatcgtattccgcaaccgcagcggcgaggacggcctgtccaacctcaccgatatcgaagcgccgatccaggggcgcatcagggcgggcaacggccacgtcgtcgtcacggcaacgcctgtcacgctcgatgccggcagtgccgccggcaacgtctccacgctcgcgcgcttcggctcgggtctgtcgaacagcacgtcggaaaccgcggctatcgcgggcaacaacacctatggcagccagacggcgagcggcgtgggcctctcagtcggctatgaaggccgccagctcagcggcgatatcggcgtgacgccgatcggtttccgcgagaccaatatcgtgggcggcgcgcagtacaacggtggcatcaccgacaaggtgtcgtattcgctcgccattgcacggcgcgcggtgaccgacagtctgctgtcctacgccggcgcgcgcgacgccggctccggcctcgaatggggcggcgtcacctcgaacggcggcctcggcagcctcgcatgggacgacggcacgagcggcctgtatgtgaacgcggcgttccagtatttcgacggcaccaacgtgccgggcaataccgccgtcaagggcggcggcggagtctatacgcgcctgctgaaagacgccgaccagacgctcaccgtcggcgtgaataccacgctgatgcgctacgacaagaacctgtcgtacttcacgtatggccagggcggctatttcagcccgcaacaatacgtgatcctgaacctgccggtcgaatggaccggccgcaacggggcgttcacgtacgacgtgaagggctcgatcggcgtgcagcactaccgccaggattcgtcgaactacttcccgctcaacgacggttccaaccgccagagttcggcggcggcgaatgcgggtttcgtcggcaccggcgtggatagcggcgcggtatatccggggcagagcaaaacgggcgtgtcgtattcgctcagcgcggtgggcgaatatcaactggcgccgcaactcgcgttcggcgcgaccgcttcgctcggcaatgcttatgaatatcgggagtggctcgcggcggtttatgtgaggtatagcttcagcaagcagacaggcttgcagccgttcccgcccgcgccgctcacttcgccttacctgtcgttgtcgaac

SEQ ID NO: 13208 - DNA, 1149 bp, Burkholderia fungorum
gtggcgctgacgctcgggctggcggcgtcggcaagtttcggcaatctcgtcaaagtggcgcagagcaccgccgcgcccggcgcctgcggcgactggagcggctaccgcgcattcgtcgaacgcttcgtgcaggccgacggccgcgtgatcgactactccacgccgacgcagcaaaccacctccgaaggccaatcgtacgggctcttcttcgcactggtcgcgaacgaccgcgccaccttcgaccggctgctcggctggacccgcaccaatctcgcgggcaatcagttcgacgcgcggaacatgcggctgccgtcgtggcaatggggcaaaaaagcggacggctcatacggtgtgctcgatccgaattccgcgtccgactccgacctgtggatcgcctacgatctgctgcaagcgggccgcctgtggcacgaagcgggttatacccagatgggcgaagcgctggccgcgcagatcgcacggcaggaaatgaccacgctgccgggcatcggaccgatgctgctgcccggaccgcaaggcttcaaaaacggcggcgtgacgcgcctgaatccgagctatctgccgctgccggtgctgcgcgcgctcgcacacgagatgccggacggtccgtggggcaagctcgccgacagcgcctacaagctgatcaggaccaccgcgccgcaaggcttcgcgcccgactgggcagcctggcaaaacggccagttcgtggtcgatccgaaaaacggcgacaccggcagctacgacgcgatccgcgtctatctgtgggccggtctcgcctcgcccgccgatccgctcgccaaaccgtggctcgcggcgctcggcggcatgcgcgcgcgcgtcgcgcaaaccggcattccgccggagaaggtctcgtcgaccaccggcgcggccagcggcgaagggccgctcagctattggggcgcgctcgcgccgtatttcaaggcgctcggcgacgagcacggcctcggcctcgcgcgcacgcatctggccgcgctcgacgccgccgtgccgggccgcgaaccggtttactacgatcgtgtgctgggcttgttcggcacgggtttcatcgacggccgctatcgtttcgacgaagccggacgtctcgtgccgagctggagaaatgcatgcgat

SEQ ID NO: 13209 - DNA, 1557 bp, Burkholderia fungorum
atgcttgacgacatcaaaaagaccctctgggcaaccgccgacaagcagcgcgccaatatggacgctgccgagtacaaacacatcgtgctcggcctcattttcctcaagtacatctccgacactttcgccggccgccgcgccgaactaacccggcgcttcgccgacgagaacgacgagtacttcctgcgcgaatgcgacgacgagttgctggccgaagagttggaggaccgtgactactaccgcgaggtcaacgtgttctgggtgcccgaaacggcgcgttgggagagcctgcgcagcgcggccaagcagaccgacatcggcaagcgtatcgacgaggcgctggcggaaatcgaagccgagaatcccaagctcaagggcatcctggacaagcgctatgcccgctcgcagttgcccgacggcaaactgggcgagctggtcgacctgatttcgactatcggctttggcgaggacgccagccacgcgcgcgatgtgctcggccaggtgtacgaatacttcctcggccagttcgccagtgccgaaggcaagaagggcgggcagttctacacaccagcctctatcgtgaagacactggttgcggtgctggcgccccatcacggcaaagtctatgacccttgctgcggctccggtggcatgttcgtgcagtccgagaaattcatcgaagcacacggaggcaagctgggtgatgtatccatctacgggcaggaatccaaccccaccacctggcggctggcggcaatgaacctcgccatccggggtatcgactacaacctcgggcgcgaaccggccgacacttttgtgcgcaaccagcatccggacctgcgcgccgacttcgtgctggccaacccacccttcaacgtcagcgactggtggcacggcagcctggaaggcgacccgcgttgggtttatggcacgccaccgcagggcaacgccaactacgcgtggctgcagcacatgctgtatcacctcaaacccaatggccgcgccggtatcgtgctggccaacggctcgatgagttccagccagaactcagagggcgacatccgccgtgccatggtcgacgccgatgtggtcgaggtcatggtggccctgccaggccagctcttctttaacactcagattccggcctgtctttggttcctcgcgaagcaaaaaaccacgcggaagggcgaagtgttgttcatcgacgcacgcaagctcggcagcatgattagccgtgtgcagacggaactgaccgacgaaattatcgagcgcattgccaatacggtcgccgcttggcgcggcgaggcgattgatggtgtcggcgaatacgcggacgttcccggctactgccgcagcgtgaagctagccgagattgccgagcacggccatgttctgacgccggggcgctatgtcggcgccgagaaagtcgaggacgacgacgaagcctttgtcgagaaaatgcagaagctcacggaaatgctgggcgagcaaatggcgaagggggcggaactggaccagttgattcggcagaagctgggggggatggggtatgagttc

SEQ ID NO: 13210 - DNA, 3084 bp, Burkholderia fungorum
atgaccgaagaccaactcgaacaggaaacgctggactggttggccgacgttggctaccgctgcctcttcggccccgacctcgcgccggatggtgccaaccccgagcgggccgactaccgccacgtgctattggtcgaacggctgcgcggcgcggttgcacggcttaaccccggcatcccgcctgcgacgcgggaggatgcgttgcagcaggtgcgggacctgggcattccggcgctcctgtcggccaaccggcactttcaccagttgctggtcggcggggtgccggtcgagtaccagaaggacggcgagttgcgcggtgacttcgtgcgcctcgtcgactgggccgacccggcggccaacgagtggctggcggtcaaccagttcgccatcaagggcccgcagcatgcacggcgtcccgacgtgatgctgttcgtcaatggcgtgccgctggtactgctggagctgaagaaccccgccgaccagaacgccgacatctggaaggcttatgaccaaatacagacctacaaggcgcagattccggacgtcttccagtacaacgaagtcctggtgatttcggatgggtcgcaggcgcgcatgggttcgctgtcagccgatgcggagcgcttcatgcagtggcgcaccatcgacggcgccacgcttgacccgcttggtcagtttaacgaactggaaacattgattcgcggcgtgcttgcgccgacttacctgctcgactacctacgcttcttcgtgctgttcgaggatgacggcacattggtcaagaagattgccggctaccatcagttccacgcggtgtgcgcggctatccaacaggtggtgacggcatcgcgcccgggtgccagccacaagggtggagtggtctggcacacacagggcagcggcaagagcatcaccatgacctgcttcgcagcccgcgttatgcaggaagcggcgatggaaaacccgaccatagtcgtcatcaccgaccgaaacgaccttgacggacaactgttcggcgttttttcgctggcacaggacctgttgcgcgagcagcctgtgcaggccggcacccgccaggatttgcgcgcgaagctcgctaaccggccctccggcggcatagtgtttgccaccatccagaagttcatgcccggcgaggacgaagacacgtacccggtgctttcggaccgaaacaacatcgtggtcatcgccgatgaggcgcaccgcacccagtatggcttcgaggcacaactgaggggcaaaccgggccaggaaaagtatcaggtcggctatgcgcagcacctgcgcgacgcactccccaatgccaccttcgtagcctttaccggcacgccggtatcgagcgaggaccgtgacacgcgcgccgtattcggggagtacatccacgtctacgacatgcagcaggccaaagaggacggcgccacggtcgccatttatttcgagtcgcgcctggccaagctgtcgctcaaggccgaggacctgccgcatatcgacgccgaagtggacgaactggccgaggacgaagaggaaagccagcaggccaaactcaagagccgctgggccgcgctagaaaaggtagtcggcgcggaaccacgcgtggcagccgtggcagccgacctcgtcgcacacttcgaggaacgcaacaaggcacagaacggcaaggccatggtggtggcgatgagccgcgagatttgcgttcacctttacgacgaaatcatcaagcttcgccccgactggcacgacccggacccggagaaaggcgccgtcaaaatcgtcatgaccggctcggccagcgacaaggcgctgctgcgaccgcatatatacagcggccaggtcaagaagcggctcgaaaagcgctttaaggacccggccgacccactgcgcatggtcatcgtccgcgacatgtggcttacgggcttcgacgcgccatgtgtacacacgttgtacgtggacaagcccatgaaaggccacaacctgatgcaggcgattgctcgggtgaaccgcgtcttcaaggacaagcagggtggactggtcgttgactacatcggaatcgccaacgaattgaagagcgcgttgaaggaatacacggccagcaatggacgtggacgtccaacggtcgacgccgccgaagcgtattccgtgctcgaggaaaagctcgatgtgctgcgcggcatgcttcatggctacgactacagcggttttctgaccggcggccacaaatgcctcgccggcgcggccaaccacgtattgggattgaaggacggcaagaagcgttttgcggatacggcgctcgccatgagcaaggcctttacgctgtgctgcacgctcgatgaggccaagctcgtgcgcgaggaagtggccttcatgcaggccgtgaaggtcattctcaccaagcgcgaactgagcgacaagaagaagaccaacgaggagcgtgaactcgccatccggcaaatcatcagctcggcagttgtgtccgagaaagtggtggatgtcttcgaggcggtcgggctcgaaaagccgaacatcggtattctcgacgaagccttcctcgcggaagtccggaatctgcccgaacgcaaccttgctgtggaactgctagagcggcttcttgaaggcgaaatcaaaagccgtttcgcaagcaatgtagtgcaggaaaagaagttctctgagatgctcgccaacgtcgtgacgcgttaccagaaccgggcgattgaaacagcccaggtcattgaagagctcatcgatatggccaagaagttccgcgcagccgcgacccgcggcgaggagctgggcttgacggaagatgaaatccgtttttacgacgcgctcgccaataacgagtcagccgtccgcgagctgaccgacgagacgctcaagaagattgcacacgaactcaccgaaaacctgcgtcagaacatcacagtggactggtcggagcgggagagcgtgcgagccagactgcggctgatggtcaagcgtatcctccgtaaatacaagtacccgccggaccaacaggacggcgcggtggagctggttttgcagcaggcacaggcgctcggggaggcatggagc

SEQ ID NO: 13211 - DNA, 1230 bp, Burkholderia fungorum
atgaacatctatgcagtaggcggcgcgatccgcgacgagttactgggcgtaccggtgcaggatcgtgattacgtggttgtcggcgccacgccggagcagatggtggcgcaaggctaccgtccggtgggcaaggattttccggtgttcctgcatccgcagactcatgaggagtacgcgctcgcccgcactgagcgcaagacggcggccggctatcacggtttccagtttttctatgcgccggatgtcacgctggaagaagacctcgcgcgccgcgatctgaccatcaacgccatggcgcgcgaagtgcgtccggacggcgagttgaccggcccggtgatcgacccgttcaacggccagggtgatttgcaggcgcgcctgtttcgccacgtcagtgacgcgtttctcgaagaccccgtgcggattttacggatcgcccggtttgcggcccgttttgtggacttcaccgtcgcgccggagacactggcgctcatgcgcaagatggtggccgacggcgaagtggacgcgctggtggccgaacgcgtgtggcaggaagtgtcgcgtggtctgatggaaaggaagccgtcgcgcatgttcggcgtgctgcgcgagtgcggtgcgctggcgcggattctgccggaaatcgacgcgctgttcggcgtgccgcagcgcgccgactatcaccccgaagtggacaccggcgtgcacgtgatgatggtggtcgatcatgccgcgcagcagggttatacattgccggtccggtttgcggcgctgacgcatgacctcggcaaggcgaccacacccgaagacgtgctgccgcggcatatcggccacgaagggcgcagcgtggatctgctgaagcccctatgcgagcggctccgggtgccgaatgattgccgcgatctcgcgctgctggttgcgcgcgagcacggcaacattcatcgcgtgatggaaatgggtgctgctgcgctggtgaggctgatcgagcgctgcgatgcgatccgcaaacctgcgcgctttgctgaagccttgcaggcttgtgaagccgacgcgcgtgggcggctggggttcgagatgcgggactatccgcaggccgagcggttgagggtggcgctcgtcgcggcgcgcggcgtggacgccggcgccgtggccaaacggctcgccgacgcgccggccggcatcaaggacgccgtgcatcaggagcgggtccgggctgtcgaagcagtgctcggc

SEQ ID NO: 13212 - DNA, 1815 bp, Burkholderia fungorum
atgtgtggcattgtcggcgcggtagcgcaacgtaatatcgtccccgtcctgatcgaaggactgcgtcgcctcgagtatcgcggctacgattcgtgcggcgtggccgtgctcggcagcgacggtccgcgccgtgcgcgcagcgtcgcgcgtgtggccgatctcgacgagcaggtgcgcgagagccatcttgaaggcatcacgggtatcgcgcatacgcgctgggccacgcacggcgcgccggtcacggacaacgcccacccgatcttctcgaaagacgcactcgcgttggtacacaacggcatcatcgagaactacgagacgctgcgcgacatgctgcgcggcaagggttacacgtttgtttcgcagaccgacacagaggttatcgcgcatctgattcacagcctgtatcacggcgatctgttcgcggcggtgcgcgaagcggtcgggcaactgcacggcgcgtatgcgatcgccgtgttgcataaagaccagccgcatacggtggtcggcgcgcggcagggttcgccgctggtggtcgggctcggcgagggcgagaacttccttgcctcggacgcgttggcgctcgcgggcagcaccgaacggttcatcttcctcgaagaaggcgacgtctgcgaactgacgctcgagggcgtgcgcatcgccgatcgcgacggctacgaggcgcagcgcgaagtgcgccaggtggcggcgtatggcggcgcggtcgaactcggcccgtatcgtcacttcatgcagaaggaaatcttcgaacagccgcgcgcgatcacggacacgattccgcaagcggattcgttcgacccgtcgttattcggcgagggcgcgggcaaggtgttcgcggagatcgacagcctgctgattctggcgtgcggcacgagctattactcggggctgaccgcgaaatactggctcgaatcgatcgcgaagattcccacgcaggtggaaattgccagcgagtatcgttaccgcgagtcggtgccgaatccgaagtcgctggtcgtcgtgatctcccaatcgggcgaaacggcggacacgctggcggcgctcaagcatgcacaggagctcggtcacaagcatacgctggcaatctgcaacgtcggtacgagcgcgatggtgcgccagaccgagctggcgttcctgacgcacgcgggccgcgagatcggtgtggcatcgaccaaggcgttcacgacgcagctggttgggctgttcgtgttggcggcaacgctgggcaagttgcgcgggcgtgtgagcgaagagcaggaaggggagtatctgaagcaactgcgtcacttgccggcggcattgaatagcgtgctggcgctggagccgcagatcattgcgtggtcggaagagttttcgcgcaaggagcatgcgctgtttctcgggcgcggcttgcattatccgatcgcactcgagggcgcgctcaagctcaaggagatctcgtatatccacgccgaggcttatccggccggcgagttgaagcatgggccgctcgcgctcgtgaccgaagccatgccggtggtgacggtggcgccgaacgacgcgctgctggaaaagctgaagtcgaatattcaggaagtgcgcgcgcgcggcggtcagctgtatgtgttcgccgacgcggatacgaagatcgtcaacgacgaaggtttgcatgtgatccggatgccggagcattacggcctgttgtcgccgatcttgcatgtggtgccgctgcagttgctggcgtatcacacggcgtgtgcgcgcggtacggatgtggataagccgcggaatctggcgaagtctgtgacggtggag

SEQ ID NO: 13213 - DNA, 615 bp, Burkholderia fungorum
ttgtttctggagcgcgaattgaacccaagcatagcatgcaaccctgccgcggaatcgaaaaaggcgctgcgtaaaatgctattggaagcaaggctgcaagcggcttccgagcccgcgcgcaacaccgcgctcgcacggcacctgctcgatgcgttgaagcagtacggcgtgaacagcgtgggattctactggccgctcgccggcgaattcgacgcccgcgccgcgatctcgatctggcttgcggcgaacacgcagcgtgaagcgagtttgccggtggtcaaggagcgcggcgtgccgctcgaatttcatgcgtgggcgcccgatacgccgatgaagatcggtcatcacaggatcaccgtgccggcttccgggcggatcgtgattcccgaactgctgttcgtgccgtgcgtcggtttcgacgccaacggctaccggctcggttacggcggtggctattacgatcgcacgctggcagcgtggccgggcgcgacaaagcccatcaccgtgggtatcgcgtacgaagcgtgccgcacgcccgcattggagcgcgaagcccacgacattccgctcgacctgatcgtcaccgaggcggcgctttatccgcgcccggtggat

SEQ ID NO: 13214 - DNA, 1359 bp, Burkholderia fungorum
atgaacattgtgattttggcggcaggcaccggcaagcgcatgcggtccgcgcttcccaaagtgctgcatcccctggccggtcggccgctcctcgctcacgtcatcgacacggctcgcacgctcaagcccacgcatctcgtggtagtgatcggccacggcgccgaagccgtgcgcaaagccgtggcggcgccggacgtgcagttcgccgtgcaggagcagcagctcggcacgggccacgcggtgcagcaggcgttgccgctgctcgatccgtccgcgcccacgctggtgctttacggcgacgtgccgcttacgcgtgccggcacgctgcaggcgttgaccgatcgcgcggggcagggcggctacggcgtgctcaccgtcacgctggctgatccgagcggttacgggcgcatcgtgcgcgatgcgcatggcaaggtggcgcgcatcgtcgagcagaaagacgctacgcccgagcagctcgcgatcgccgagatcaacaccggcatcatcgtcgcgccgaccgaacgtctgggcgactggctcgccgcgctgaagaacgacaatgcgcaaggcgagttctatctgaccgacgcggtggaaatggcgatcgaggctggcctcgaagtcgtcaccacgcaaccggaccacgaatgggaaacgctcggcgtgaacagcaagcagcagcttgccgaactggagcggattcatcagcgcaacgtggctgacgcgttgctggtcgcgggcgtgacactcgccgatccggcgcgtctggacgtgcgcggcacgctcgaatgcggccgcgatgtctcgatcgacgtgaactgcgtattcgaaggccgtgtcacgctggccgacaacgtcaccgtcgggccgaactgcgtgatccgcaatgcgaacatcggcgccggtacgcgcgtcgacgcgttcacccatatcgaaggcgccgaggtcggcgcgaatgtcgtgctcggaccgtatgcgcgcttgcgccccggtgcttcgctgcacgacgagtcgcatgtcggcaacttcgtcgaggtgaagaacgcggtgctcggtcacggttcgaaggcgaatcacctcacgtatatcggcgacgcggatatcggcgcgcgggtgaacatcggcgcgggcaccatcacctgcaattacgatggcgcgaacaaattccgcacgattatcgaagacgacgtgttcgtcggttcggacacgcaactggtcgcgccggtgcgtgtgaagcgcggcgccacgatcgcggcgggcaccacggtctggaaggacgtcgaagctgatgcactggtcctgaacgacaagacgcaaactagcagaacgggctacgtgcgcccgaccaaaaagaagagc

SEQ ID NO: 13215 - DNA, 774 bp, Burkholderia fungorum
gtgatactgaggcagaggaacatcatggaaatcgatttgaacgccgatctgggcgaaggctgcgggtccgacgaggcgctgctcgatctggtcagctcggcgaatattgcgtgcggctggcatgcgggcggcgccaatgcgatgcgcgactgcgtgcgctgggcggtgcagaaaggcgtgtcgatcggcgcgcatccgagcttcaacgatccggaaaatttcggccgcaaggaaatggatctgccggccaacgacatctacgcgggcgtgctgtatcaactcggcgcgctgtccgcgatcgcccaggccgagggcggccgcgtcgcgcacgtcaagccgcacggtgcgctctataaccaggccgcgcgcgacagcaggatcgccgacgcgatcgtttcggcggtgcacgatttcgacccgtcggtggcggtgttcgcgctggccaacagtggactcgtgacggcggcgcgcaacgtgggtctcatcgccgtcgaagaagttttcgctgatcgcggctatcgcgcggacggctcgctggtgccgcgcaaagaacccggcgcgctgctcgacgacgaagacaaggtgctggcgcgcacgctctcgatgattcgcgagcagcgcgtacaggccgtggacggtcaatgggtgccgctgaacgcacagaccatctgcctgcatggcgacggcccgcatgcgctggcgttcgcgcggcgcatccgcggcgcgctccaggacgccggcatcgaagtccacgcggccggcgccgcccgcgcc

SEQ ID NO: 13216 - DNA, 1602 bp, Burkholderia fungorum
gtggcacggccaaccaacggtttgcatgtcctttgttccgagcggacagagcgcgcgcgactggcatggccgatgcaacgtccttcgattcgctatcgatggtccctatcccaaggaggaatcatggctcagttcagtgcagcgcccggcagtcccgcaattcccgcttacgccgacggcggcgcgcccggcgatccgtcgatgccggcaggctacagcgagcggctctataacgaagacctcgcgccgttgcgccatcaaacctggggcgcctacaacatcttcgcgttctggatgtcggacgtgcacagcgtcggcggctatgtgttcgcgggcagtctgttcgcgctcggcctgacgagctggcaggtgctgatcgcgctgctggtcggcatcacgatcgtgaacctcttgtgcaacctgatcgcgaagcccagccaggcgaacggcgtaccttatccggtcgcatgccgcgcgactttcggcgtgctcggcgcgaatattcccgcggtgattcgcggcctgatcgcggttgcgtggtatggcattcagacctatctggcgtcgagcgcgctggtgatcgtggtgttgaagttcgttccgcagttgctgccttatgccgatgttcatcatcacggcttcatggggctctccacgctcggctgggccggtttcatgctgctgtgggtcttgcaggcactcgtgttctggcacggcatggagaccatcaagaagttcatcgactttgccgggccggccgtctacgtggtgatgttcattctcgcgggctacatggtgtatcgcgcagggtggcgcaacatcggcatcaatctgggcggtgtcaaatatcacggcatgcaggtcgtgccggtgatgatcacggcgacttcgctggtggtgtcgtacttctccggacccatgctgaacttcggcgacttttcgcgctacggcaagagctttcgcagcgtgcagcgtggcaacttctgggggctgccggtcaactttctggccttctcgctggtgactgtgatcacgaccgcggccacgctgccggtgttcggcgagctgatcacggacccggtcgaaaccgtgggccgtatcgactacccgaccgcggtgattctcggcgcgctgaccttcacgatcgcgacgatcggcatcaacatcgtcgccaatttcgtctcgcccgcgttcgacttttccaatgtcgcgccgcgcctgatcagctggcgcgcgggcggtatgctcgcggcggtggcgtcgatcttcatcacgccgtggaatctgttcaacaacccggccgtgattcactacacgctggacgttctcggcagcttcatcggacctttgtacggtgtactgatcgtcgattactacctcgtgaagcgtcagagaatcgttctcgacgatctgtacacggtcgcgcccaccggctcgtactggtatcgcaacggcgtgaactatcgggccgtggccgcgctgctgccggcagccgtgatcgcggtgatctgcgtgatggtgccctcgctcgacggtatggcgaacttctcgtggttcatcggcgccgggctcgccgcgctgttctatcgcgtgattgcacgc

SEQ ID NO: 13217 - DNA, 627 bp, Burkholderia fungorum
atgcccgttagcgaagtcgtagaactgtcgcgcctccagttcgccatcacggcgctttatcacttcctgttcgtcccgctcacgctcggcctgtcctggctgctcgtcatcatggaatccgtctacgtgatgaccggcaagcagatctacaaggacatgacccagttctggggcaagctcttcggcatcaactttgcaatgggcgtgaccaccggtctcacgctcgaattccagttcggcaccaactggtcgtactactcgcattacgtgggcgacattttcggcgtgccgctcgccgtcgaaggcctgatggcgttcttcctcgaatccaccttcgtcggcctgttcttcttcggctggaagcggctctccagggtgcagcacgtgatcgtgacgttcctcgtcgcgctcggctcgaacctctcggcgctgtggattctggtggccaacggctggatgaacaatccggtcggcgccaccttcaactaccagaccatgcgcatggaactcgacagcatcttctccgtgctgttcaatccggtcgcgcaggtcaagttcgtgcacaccgtctccgccggctacgtgacggcctcgatgttcgtgctcggcgtgtcgtcgtggtatctg

SEQ ID NO: 13218 - DNA, 594 bp, Burkholderia fungorum
atgaaacatcttgccgtagtagctcaccccgtcgaaaacagcttcacgatgggactgacgcgtgcctataccgatgaactcgaaaagctcggacatacccagcgtacttacgacctctatcgtatgggattcaacccggcgctcaacgcgcaggagttgtcgccagccaacgacaaacaccctgtctgtgccgatgtggccgaggctcaggatgaaattcgcgccgccgacgccctcactgtgatttatccgctctggtggatgtcgatgccggccatgatgaaggggtatatcgaccgggtctttgcacgcggtttcgcctatgagtccagtcatggcgtggtgcgcggactgctgggcggaaagaaggctgtgctgatcacctgctcgggtgcgccgctgccggtcctggtgaagagcggaaactggaacgccgtgcaggttctgcaggatacgcatgtgctccgttccaccggtttcgagttgatcgagcacctgcatttcgacgagatcgcgcctgaactgccggcggacgtggcagcacaacatatggaacgcgttcgagcctgcgcgcggcagcattttggccgcggc

SEQ ID NO: 13219 - DNA, 507 bp, Burkholderia fungorum
atgcgacggctcgaagccgcatgccgcaggaggtttcgtcggctggagagccggaacgatcgtgcgctgcctgatagaatgcttgggccgcaacgtagtggatcgcagatgaaattgcttgatgcgttagtcgaacagcgtattgccgccgcagccgcacgcggcgagttcgaccagttaccgggcgcgggcgcgccgctatccctgggcgacgatgcgctggtccccgaagaagtgcgcgtcgccaaccggattttgaagaacgcgggtttcgtgccgcccgctgtcgagcagttgcgcgcgttgcgcgacctgcgagcggagttgaatgccgtgagcgaccgggctgcccgctgccggcttcaggcgcgcatgctggcgctcgatatggcgcttgaatcactgcgcggcggcccgctggttctgccacgcgaatactgtcggcggatcgccgagcggttgtcggagcgcgccggcagtcccgatacggcagaggcgggttcgccg

SEQ ID NO: 13220 - DNA, 2760 bp, Burkholderia fungorum
gtgatggagattcgggctcgcttaatgaaacgactatttggcataactaacagaaatggtctggccatgcggccgctgtgcgctgccatgctgctggcgtatcttccggcatcgtgggccgcaactcaggatggcgtcagcgccacggcggcgcgtgacgcgatgctcaacgacgcggggaaaaagacggtctcctccgcaccgcttctgatggcttccgcggcgccgcttctggcgtcggtccagttcgattcgtcattcctcatgagttcggcggatcgtgccgtcgatgtctcccgctatgagacgggcaaccccgtcatgccgggcgaataccgatcggacgtctatctgaatggccgtctgatcggccgtgaaagcctggttattcgcgcagacgccgagggcagggcgcaagtctgtttcaatcgtgccctgctggagcgactcaatgtcgataccagcaagcttgatagcgggcatgtggccgagttcgcccaaccggatggctgcctcgacctgtcgtccatcgtttccggcgccagcgtgacgttcaatcagtcggatctgcggctggacgtcgacattccgcaagcgtcgttgcagcgcacggcccgtggctatgtggatcccgcgttgtgggatgagggcgcgacgtccgcgcggttgagctataccgccaatctgtatcgcaacgaatttgagggaagcggggcggccaactcgggatatctcggtctcaatgctggtttcaatatgggtggctggacattccgccacagcggcacactgacctggtccgacggcggcgggcaccattacgagagcgcccggcgccactacaacacggcctacaactatgtccagcacgatgtcaccaggtggaaatcgcgcgtcaccctgggcgactcgtacaccaatggcgaactgttcgatacatttgcctaccgcggcgtgcaactcgcatcggatgaccgcatgctgccggactccatgcggggctacgccccggtcgttcgcggcgtggcggaaacgaatgcacgggtgacgatccgccagaatggctacgtcctttatgatacggccgtgccggcgggtccgtttgttatcgacgatctgtatcccacgggctatggcggtgatctggatgtttccatcatcgaagcggacgggcgtgtgcgcaccttcagggtgccctacgcatcggtcgcgcaggcgctgcgccccggcatgacgcgctacaacctgatggcgggctcgatccgcagccgtcagctttcctatacgccggcggtggcgctagcgacggtgcagcgtggtgtgacgaatgcgctgacgctgtacggcggcgtgctggccagcaacaattacggttccgtgctcgcgggcgcagcagtcggcacgcccgttggcgctatagcgctcgacgcgtccggctccaatgcgtcgccctctggcgcgagggccagccgcggcctgagtattcgagccgcctacagcaaactcatcacgcaaaccgatagcaacgtctcggtggcggcatatcgtttctcgtccacagggtatctggacctgaacgatgcgctgacgttcatcaacaatgcgcgcactggccaaagcgatatgtcgtctctccagcgcgcaaggaaccgcctgtctgtcacggccagccaggggctgggccatgatagccgctggggacaactgtttgtcagcggctatatccaggattactggacgcgccccggacgcgacacgcagtttcagatcggtcatgtcaatcgtatcggcgcggtgaattacggcgtttccgtggaacgcgtgcgcacgggcggcggtgcgatggatacgcggtacatggtgaacctgtcgctgcctctcggtcgcaccctgcaggcgccgacgttgagcttcaacgttgtcaacgatcggtcgagtggaacggcggtgcaaaccctcgtgaacggtgtggcgggcgaggacaaccagatcggctatgccgccggtgtgacgcgtgacggcggcgctcgctacgcgggcaacctgtcgggccagtaccgcgcgccgtacaccaatctgcaggccggcttctccacaggctcgggctacaaatcggttaacgctggggtgagtggctccatcgttgcgcaccctcgaggggtgactgctagcgcatacaccgccgataccatcggcatcgtgtcggccccgggtggcgcgggcgctgtcgtcacgggctatcccggggtcaagctcgatgcgaacggcaacgccgtggtgccctatctgacgccctatcggctgaatgaggtcacgctggatccgaaaggcaccgacgccaatatagaactgcagacgaccagccggcaggtcgcgccacgtcttggcgcggtggtcatgctggattatccgactgtcaccggtcgccccgtgctcatcaggtcacacctgccggacggaaatgcgctgccgttcggcgcccccgtcagtgacggcaagggcaacaacattggcatggtcacgcagggcggcatggtctacgcgcggatcaacggactggccgacgagctcaaggtgacatggggcgcttcgccgtcggcttacagctgtgtcattcgtgtccggctgcctgagcataaggcgggcgataacgcgatggccttcgagcgcctggaggcaccctgcgagatgacggagggctcggctccgtcgagtcgccaggcagggaaggcagggaaaagtgcggatgggcttgcttcc

SEQ ID NO: 13221 - DNA, 1140 bp, Burkholderia fungorum
atggaagcgaatgaaccgggccgtcgcgggcggtcgaagccaggcgccgtggcgcgcatgcgaacgttgtggcggttgggaacaagagtgctgatatgcgtcgtatcgggccttgtcgccatgccgaatgcgttcgccgagaccaagccggtaatatgcagtcccgtcgcgggacttcctgctacggtaaccttacccaacagcctcggcctgagtcctaatacgccgataaatacggtagtctggcggcagtcgttcacgatttccggcgaatgtggaaaggatagtggcggtacttatccgcaaaccccgagggtcggctttttgctggtggggcacaccagcagcaccgccggtggcggggcgcagaagctccagttgtggaatggatctggattggaactttttgtcacgatcaacggcaaccagtattccaatgcgaccgattacgccctcgatttgggggtcgatgtgcccaatatttatgggtcgaagaatgtgaccttttcggcgcaggtcgatatcgaactggtgaaaaccggcgaaatgacggtaggcccgaataacctcacgagtagtgccattcccgttttgttccttgctacgatcatgcccaattatggcgctccgtatccggtgaccgtagtcagcaacttcctgaagataaacgggctgaatagcatcaagctgctcccgcagacgtgcgaggcggcatcgcccaatactaccgtcgatctggggaaggtaacgctgggcgaaaacggattcgggaattcagtgaacagtacttccgttggcaggtctttcacgatcgatatgaactgttacaccaacggaactccggcatcctacaagttggcattaacgctggatccggcgggtctatcggtgcccgggcaaaatggggtgctggcgctggatggcacgagcacggcaagcggtgcaggcattcagattctggatggcgctggcatcaacccggtgacattcggaaatttgcagatggtggggcagttcggcgtggatattcgtcctcccacgagcttttccgtgccgctatatgcacgctttattcagacgggccagacagtatcgccgggcagggcccgcgcgcaagcggcgttcacgattagctatcca

SEQ ID NO: 13222 - DNA, 498 bp, Burkholderia fungorum
ttgtatgttctcgcagcggcatgcgtcctggcgccacccatcgttgcgcaggcgtccgacggcacgattaccattgatggggaaattgtggatgtcacctgtaccgtttctgtcaacggcggtggttccgcaaatatcgtcacgctgccgacggtctcgaaaagccagctgccggcagccggcgccacggcgggggcgacggatctcacgattgggctgagcgcgtgtccggcctcgtacgcgagcgcccgtccgttctttgaaggcggcgcgaatgtcgcgcctaatttcaatctggtcaaccaggcgagcagccccgcggcgaatgtccagatccaactgacgtatgaggatggtacccaactccaggtgggtaatgcggctagccagcaggcagcggctgccacgccgatcaatggcggcacggcgacctgcactacagtacccagtactacgccgctggcgctgcagcgggtgccggcgacgtgcagggtacgg

SEQ ID NO: 13223 - DNA, 1536 bp, Burkholderia fungorum
atgagcttcgtcagtgcggtgctctatgacatgagacaggagagtttttctatgacgggacatctgccgaagctcagcatgtatatcggcggcgagtgggtagagccggcgtcgggcgaatatttcgaaacggtggatccattcacggcgaagccctgggcgctgatcccgcgtggtaatgccgaagacgccgaccgcgcgatacgcgccgccgacaaggcgttccgcgacggcccgtggcgtgccatgcatccgtccgagcgcggtttggtgctgcagcgcttcggccaactcatcgggcaacatgccgacgaactggccgggatcgaggtgcgcgataacggccggctgttggccgagatgcgccatcagatcagaggcatcccgaaatggtattactactacgggggactggcggacaagatcgaaggcgccgtacacccggtcgagcagccggcgctcagcttcacgcggcacgagccgctcggcgtgtgcgtaggcatcgtgccgtggaatgcgccgctgctgctgctctcgctgaaggcggcgccggcgctcgcggccggcaacaccatcgtgctgaagccggccgaatttacgtcagcgtcggcgctcaagctcatggaactggtggagcaagccggttttcctcccggcgtcgtcaacgtggtgaccggcttcggcaaagaggtgggcgagccgctggtcgcgcatccgctgacgcggcatctgggtttcaccggctcaacggccaccggctctcacctctatgcgctcgccgcgaaggacgtgaagcgcgccagcctcgagctgggcggcaaatcggccaatctcgtcttcaacgacgccgatctgaacaatgccgtgcgcggggtggtcggcggaattttcggggcagtcgggcagacctgcattgccggctcgcgcctcctggtgcagcgccgcatccacgacgaattcgtggacaagctcgcggctttcacgaaaacggcgcgcatcggcgacccgcgcaaaccggaaacccagatcggtccgatcgccaaccggatgcagtacaacaagatcctgggctatatcgacatcgcgcgcgaggagggcgccgagctggtgatgggcggggcgcgccccgatatcgccgagtgcggggaaggattcttcatcgagcccaccatctataccggcatccgcaacgacatgcggatcgcgcgcgaggaagtgttcgggccggtgctcgccaccattcccttcgatgatccggaagaagccatcgccatcgccaacgacagcgacttcggattgggtgcgggtgtatggacctccgacatgcgactggcactcaggatgagtgagcggctggaggccggcagtgtctggatcaacacctatcgcgacatttcgtatacgacgcccttcggcggctacaagaaaagcggcatcggccgggagaacggcatcgagggcattcgcgaatatctgcagaccaaggccgtctggatctccacagcggaagaaatcgaaaatccgttcgtcattggc

SEQ ID NO: 13224 - DNA, 558 bp, Burkholderia fungorum
atgaacaagaagtacgcaatgacggtgctgggcgccctcgccgcagccacgatggctctgtcgtcctcggctcaggcgtcggacggcgtgatcactttcaatggcaaggtggtcgaccagacctgcaacgtcgccgtcaatggcggtcccgcaaccagcaccgtgacgctgccgacggtggctaccggcttgctggtgaattcccagactgctggcgacacggacttcaccgtcgcggtgtcgggttgcacgggtgctgctcgtcccgctgccgttcgcaccttcttcgaagcaggtcctacgctcgacaccgcgaacgactacaccctgttgaatacggctggcaccccggccaagaacgttcgggtccaattggcctacgccgatggctcgggactgaaggttggtgacagcagccagcacagtgccactgcggtggccacggacagcggcggggcgaccatgcattacatcgctcgctattacaaggtcggctccggcgcgccgggcgcgggtgacgtcacgagctcggtgacctactcgatcgaatacgtgctg

SEQ ID NO: 13225 - DNA, 729 bp, Burkholderia fungorum
gtggcttgcgtttgctcggccaacccggcaggggcgaacgtggtgatcacgggaacgcgcgtaatctatcctgccgcagaacgggaggtcacggtcaagctgactaacaatggcgatctgccttcgctggttcaggtttgggtggacaagggcgattccaaagcggcgccggacaagatcgatgccaccttcattctgactccaccggttgcccgcattgagccgcataagggtcagacgttgcgcctgacgtatacgggcgacgcgctgccgcaagacaaggagtcggtcttctggctgaacgtgctggatattccacccaagccggccgcccccgctgacgatgcggcgaacctgctgcaggtggccattcgtacccgtatcaagattttctttcgcccggtcggcctcaccgacgagggtgcgcgcgaagcggtaaacgccgtcgcctggaaactggtgtcagcgggctcgcaaggcgcgtacgccattcgggcaacgaacgcatccgcctaccatgtcaacgtcgccggagttcagatccgcagcggcgggcacgaatacacgatcaaggaaggggccatgattgcgccgggcgcatcccggtcattcgagttcagcgagcggctttccacccttgtgcccgatggtacggagttcgacttcacggtggtgaacgacgccggcggcttcgtgcctgtcaaggcgcgcatcggtgcatattcacaa

SEQ ID NO: 13226 - DNA, 1305 bp, Burkholderia fungorum
atggcaaacgatcgacccccgcggccctcacggcgcgggtttctcaaggccggcggcgccgcggttgcagcgggcgcgagcctcggcgcgggcctggccgcgccgcagaatgcgctcggcaaaacgcagccgcatgccgccgccgatccgcagatggccgtcgagccgttctacggcgcgcaccagggcggcatcgtcacgccgcagcaaagccacacttacgtcgccgcgctcgatctgaccaccgagaagcgtgacgacgtgatcgccctgttgcgcgcttggaccgaggcggccgcacggctcacgcaaggcggcacggccgcgccgctgccgaccggcgacgccggcgacaacaaggccgcgcccgattccggcgacgtgctcggcctcggcccctgtgggttgacgatcaccttcggcttcggccccggcctcttcacgcatgaaggcaaggatcgctatggtctcgccgcgcgccgcccggccgcgctcgtcgatctgccgcgctttaacggcgaccagttgatcaaggagaaaaccggcggcgatctgtttatccaggcgtgcgcgaacgatcagcaggtggcgtttcacgcagtgcggcaattgtcgcgcatggcgtatggcacggcggcgatgcgctggggccagtccggcttcctgtcgggtccgcgcggtcagacgccacgcaatctgatgggcttcaaggacggcaccaacaatccgtctaccgcgaagccgcagttgatgaaccagttcgtgtgggccggcgccagcgccgacgcgccgtggatggaaggcggcacctacaccgtggtgcggcgcatccgcatcacgctggaacactgggacaacactgaactggacttccaggaacaggtgttcgggcgccacaaatacagcggcgcgccgatcggcaagaagaacgagttcgacgccgtggacctgaaggaagaagacaaggacggcaatccggtgattccggagaactcgcacgtgcgtctgtcgaaccaggcgagcaacaacggcgcgcagattctgcgccgctcgtactcgtataacgacggcaccaacttctatatcgagcgctggccgccgtggcgccaggaaacggagtacgacgcgggcctcatcttcattgcgcatcagggcgacccgcgcaccggcttcattccgatcaacgacaggctcgcgaagttcgacatgatgaaccagttcacgacgcacgtcggcagcgcgattttcgccgtgccgccgggtgcgaagccgggttcgtatatcggtgcgggattattcgagacc

SEQ ID NO: 13227 - DNA, 1200 bp, Burkholderia fungorum
atgatcgaactcgacaaactgaccaagacgtttacgcaaaaagacggccagcaggtgaaggccgtcgactcggtgagcctcacggtgggcgaaggcgaaatctgcgtatttctcggcccctcgggctgcggcaagaccaccacgctgaagatgatcaaccgtctgatcgcgccgacgtcgggccgcgtgctgatcaacggtgaagacacgtcgggtctgaacgaagtcgaattgcgccgccacatcggctacgtgatccagcagatcggcctgttcccgaatatgacgatcgaagagaacatcacggtcgtgccgcgcctgctcggctgggacaggaaacgttgccgcgaacgggccacggagttgatgtcgatggtcgcgctcgagccgaagcagtatctgaagcgttatccgcgtgagttgtcgggtggccagcagcagcgcatcggcgtgattcgcgcgttggccgcggatccgccggtgctgctgatggacgagccgttcggcgcggtcgacccgatcaatcgcgagtcgattcagaacgagttcttccagatgcagcgtcaactgaacaagacggtgatcatggtgagccacgacatcgacgaggcgatcaagctcggcgatcgtgtcgccgtgttccgccgtggtcgactggtgcaatacgatcatccggatacactgctcgcgcatccacgcgacgagttcgtcggcgcgttcgtcggtcaggacagcacgttaaagcgcctcctgctggtgaaggccggcgacgccgccacccagccggggactgcgcgcgccgctatgccggtggcgcgtgcgttccagatgatggacgacagcgatagccgttatctgaccatcgtcgacgagaaccagcaggcgctcggctatgtgacacgccgcgcggcgcgcacaggcgaaggcctgtgcggtgaccatctgagcacgttcaaggcgaccgtcagcgcggacgagaatctgcgcatcgtgctgtcgaagatgtatcagttcaactcctcatggatgccggtgctggacggcgacggccgttacgtcggcgaagtcacgcaggattcgattgcggactatctgagctcaggccgttcgcgcaggcagacggggcagcctgcgatcgtctcgcccgccgtcgccgcagcggaggcggccgctgcgcaggttgcaacggctgatcacgcg

SEQ ID NO: 13228 - DNA, 558 bp, Burkholderia fungorum
atgaagttatccctccccgcaatcgcgatcgcagctagcagtctgttcggtctcgtaccccttggcgcccatgcggcggacggcacgatctcgatcaccggcaccgtaacggatagcacgtgttcgatcaacggcaatgcgaacggtaccccggccgacaaggcgatcacgctggcgacggttccggccggttcgcttgcgtcggcaggcgcggtggccggcacgtccaacccgaccgatctgcaactgagcctgaccggctgcactggcacggccacgaaggcgattgcgcgcttcgagaacggcccgacggtcgaccagacgaatggctatctgtcgaacacggcgggtaccgcgcaaaacgtggaagttcgtctgctcaacgcgcagatgcagccgatcaacgtcacgacgggcgcgaacaacgatataacgacgaacgcggcaaccatctcgggcggcgcggcgacgctgcagtatttcgcacagtattacgcaacgggcgttgcgactgccggcacggttagctcgtcggttcaatactcgatggaatatcag

SEQ ID NO: 13229 - DNA, 741 bp, Burkholderia fungorum
atgaagctgctcaaaaagatgccgataggaatcggttttgcctgtgcactgctggccggcagtgcacaggcaagcgtgacgatcggcggtacgcgcgtggtgtatccgctcgagcagcgtgaagtcacggtcaagctggataacgacagcaagacaccctcgctcgtgcaggcctggatcgacgatggcaatgcggatgccaaacccggcgaaatcaaagtgccgttcgtgataacgccgccgattttccgcatggatgcaaaaaaagggcagacattgcgcgtgatgtacaccggcgagcccttgcctcaggatcgcgagtcggtctattggctcaacgttctggacatcccgccgaaggcaagcagtgcgacggaagtcaatagcttgagcctggcgtatcgcacccgcatcaaggttttcgcgcggccggccgggctgcccggcaaaccggaagacgcggccgcccaactgagctggaagatcgccgcgtcggcggatggcaagagccatgcgctcagcgtttcgaatccgacgccttactacgtctcgttcagtgagatcgacgtggagagcaacggccacacgttcagaaacgaacagggtggcatggttgctccacgcgcatcggcggtcctgccgattgcaaagatgaatgccgttgccgcgggcgcgaaggtgcactacatcgccatcagcgactacggcggtcctatcgacggcgatgcggctctcggcgag

SEQ ID NO: 13230 - DNA, 2064 bp, Burkholderia fungorum
atgtggcagaccggagtcaacgcggctttcctgagctacaacgcaaacgcgtaccacagcgccggatcgggcgttgaatcgacgcagagctatgtcggcttgaatgccggggtgaacctcggcgcgtggcacttccgccatcagtcgtcggtgacgcagcaagctggcgcagccacacaattcgacaacatcgcgacttaccttcagcgtgacatcaccagaataaagtcgcaattgacggtcggcgacggctacacgaccggcgatgtattcgacagcgtgcagtttcgcggcgcgcagatcgccaccgacgaccgcatgctgccggaatccttgcgaggctacgcgccgatcgtgcgcggcacggctgaatcgaacgcgcgcgtgacggttcgtcagaacggccaggtgatctatgaaaccaccgtttcgccgggtccgttcgaaatcaacgacctttacgcgaccggctatggcggcaacctggatgtcaccgtcaccgaagccaatggccgtaccaaaagcttcactgtgccttacgcctcggttgcccagtcattgcggcccggcaccacacggttttcagtcaccgccggcgagctccgcaattccacgctcgagacaaacccgaatttcgcgcagttcacgctacagcgcgggctgaccaatctggtcacggtctatggtggtgccgtggccgctaatggttacatggccgccgacatgggcgccgcactgaacacgaagttcggcgcgctgtcagccgacgtgacaggcgctcaaacgcagattccggatcacggcacgttgcgcggcacgagcttgcgcatcggttacagcaagttcatcgatccgaccaacacgaacattgcaatcgcagcgtatcgctattcgacggcggggtacatgaacctgtcggatgccgcgtccgtgcgtgacctcgccatgcacggcggcaatccggattcggtgtaccggcagcgcaaccgttttcaggtcacgctcaatcagaacttcaaggaatacggcacggtctttctgaacgcttccgcccagcaatactggaatcgcagcggcagcgacgtgttctaccaggccggctacaccaaccgtttcaagtacggtacgtacagtatcagcgcggggcgcacgcgcaactcgaacgggtcaatgtcggatcagattatgttgagtaccacgttgccgctcggtcgcgaccagcattcgccgctgctgtcggcgaacctcagcagttccggtggaaacgccaacctgcaggccaacgtgagcggctcgttgggcgagcgcaaccagttctcgtacagcgggtatggggcgtacggcgacggtccgggcgccagcacggcgagcgcgggcgcgagcggcacctatcgcacgccgtacgcgcagttgacgggatcggcgagcggcggaaccggctccagccaggtgtcggcgggtatcagcgggtcgatcgtcgcgcatccgggcggtgtcacgttctcgcagacggtgggtgacacgttcggcgtgatcgaagcaccgggcgcagcaggcgcgagcgtgaccagttcgcccggcgtgaaactcaatgggcgcggctttgcggtcgttccgtacctgacaccctatggcatcaacacggtggatatcgatccgaagggcacgtcgaccgatgtcgagtttgaatcgacgtcggagcaggcggtgccgcggctgggctcagtggtgatgatcaggtacaagacggtgaccggacgcgcggcattgattcgtgcgccgcaactcggcgacaaggcgctgccgtttggcgcggacgtggtcgatgcaaccgggcggacggtaggcgtcgttgcgcaggacagtcggattttcgcgcgcgggctcgaggacaaaggctcgctgttcgtgaaatggggcgcgtcggcttccgagcaatgccgcatcgagtacgtgttgccgaggcaaacgggtaaagcaggagcggcctacacgtctgtggaagggcattgtgtgggcgggacaccaaccgaaaacacgaactttgcttctggccgtaccagg

SEQ ID NO: 13231 - DNA, 1599 bp, Burkholderia fungorum
atgtcagtctccgaactcaaacgccgccgcacgttcgcggtcatttcccacccggacgcgggtaagaccacgctcacggaaaagctgctgctgttttcgggcgcgattcagatcgccggcaccgtgaagggccgcaagagcaatcgctacgcaacgtccgactggatggagatcgaaaagcagcgcggcatttcggtggcgagttcggtgatgcagttcgagtacggcgacgccgtcatcaatctgctcgacacgccgggccacgaagacttctccgaagatacctaccgcgtgctgaccgcggtcgatgcggccgtgatggtgatcgacggcgcgaacggcgtcgaagcgcaaacgctcaagctgctcgaagtctgccgtagccgcaagacgccgatcgtcaccttcatcaacaagctcgaccgcgaagtgcgcgagccgctcgaactgctcgacgaaatcgagcagcatctgggcgtcgccgccgtgccgttcacgtggccgatcggcatgggcaaggatttccagggcgtctacgacatccagcgcgatcaggtgcgcctgttccgcgccggccaggacaaggcgggcggcgaggtcgaaacgctgcaggcgctcagcgacgaagagggcgagcgccgcttcggccatgcctgggtcaaggcgaaggaagagatcgatctgatcacgggcgcgtcgccggatttcgatcgtgaacagttcctcgccggtcagcaatcgcccgtgctgttcggctcggcgatcaacaacttcggcgtgaaggaaattctcgacgcactggtcgatctggcgccgccgccttccatgcgcatgacggtgcagcgtcccgtgatgccggacgagccgaagttcaccggcgtcgtgttcaaggtgcaggcgaacatggatctggcccaccgcgaccgcgtggcgttcatccgcgtgtgctcggggcatttcgaacgcggcatggccgtgaaggtgacgcgcacgagcaagacgttccgtgcgaacaacgtggtgacgttcctgtcgcagcgccgcgagacggtgagcgaggcgtatccgggcgacatcattggtattccgaaccatggcacgctgagtctcggcgacacgctgaccgaaggcgagcagttgcaattcgtcggcctgccgttcttcgcaccggaaattttccagacggttgaagtggtcgatccgatgcgcgccaagcagctcggcgaagcgctcaagcaactcggcgaagaaggcgcgatccaggtgttccgtccagaagtgggcggtctgatgattctcggcgcggtcgggcaattgcagttcgaagtggtgtcgcaccgtttgtcgaccgaatataaggtcgacgtgcgcatggcgccggcgcgttaccgcatgtcgcgctgggtaacctgcgacgatgccgccgaactgcgccgcttcaccgattcatacgcggcacggattgcgctcgacgcttcggatgcgccgacttatctggcgtcgcacgtgtcggagatcgaagtcgcgcagaaggcctggccgaaaatcgtcttcaacgaattgcgcgagcattctggcgcgccgttcaagagggcgatg

SEQ ID NO: 13232 - DNA, 1131 bp, Burkholderia fungorum
atgagctatccgaccatcgaccaccgcgggccggagttcggcgagctcggtctgacggtgctcgacggcatcaagaaaatcttcaggacacagcagcccgtagtgatttatccggcctcgggcacaggcgcctgggaggcggcgttgtcgaacacgttgagccccggcgaccatgtgctgatgttcgaaacgggccacttcgccacgctgtggaaaaagatggcggacagcctcgggctgaagccggaattcctcggtctgccgggcattgaaggctggcgacgcggcgtgcagccccaaatgatcgaggagcgcctgcgtgccgacacgcaacacgcgatcaaggccgtgtgcgtggtgcacaacgaaacctcgacgggcgtgacctccgatatcgccgccgtgcgccacgcaatcgacgccgcgggccatccggcgttgttgctggtcgacacgatctcgggccttgcatgcgccgactaccgtcatgatgaatggggcgtcgacgtcacggtctcgggttcgcaaaaaggattgatgctgccgcccggcatcagcttcaacgcaatctcgccgaaagccgtggccgccagcaagcaggcaaaattgccgcgcagtttctgggactgggctgaaatcgtcgagatgaacaagacgggctactggccgtatacgccgaacacgaatctgctttatggtctttcggaagcgctggaaatgattctcggcgaagggctcgacaacgtgttcgcccgtcacgaacgtctcgccgaagcgacccgccgcgcggtgcgcgcgtggggcctggagattcagtgcgccgatcccgccgtctacagcccggtgctcaccggcgtgatgatgcccgacggtatcgacgccgacgcggtgcgcaagctcatctacgaacgcttcgacatgtcgctcggcacgggcctcggcaagatgaaagggcgcatgttccgcatcggccacttgggcgactgcaatgacctgatgctgctcgccacgctggctggctgcgaaatgggtctgcggctcgcgggcgtgccgctcgagggaagcggcttgccggccgcgatggaatggttgagccagccgaccacggccttgggcctgaaagtcgcggcc

SEQ ID NO: 13233 - DNA, 651 bp, Burkholderia fungorum
atgactgtattcgactatctatcggccaactggcctgaattactgcaactcacggcacaacatgtgtggctggtgggcattgcggtgggttgcgcgattttcgtcggcgtacccctgggtatcctgatcaattggcacgaatggctcgccgcgccgctgctgagcattgcaacggtggtgctgaccttgccttccatcgcgctgttcggcttgatgattccggtgttctcgcgcttcggccagggcattggcgcggtgccggcgattaccgccgtgttcctctactcgctgctgccgatcatgcgcaacacctacctcgcgctgcgcaacgtcgacgccggcatcaaggaagcgggcatcggcatcggcatgacggtgtggcaacggctgcgccttgtggacttgccgctcgccgtgccggtgattctcggcggcgtgcgtactgcggtggtgatgaacatcggcgtgatgacgatcgccgcggtgatcggcgccggcggtctcggcacgctgatcatccgcgcgatcggccagagcagcatgatgaaactgttggtgggcgccgtgctcgtgagcgtgctcgcgattgtcgcggacctgctgctgcaagcgttgcaacgcttgctgaccccgaagggagtacaaaagaca

SEQ ID NO: 13234 - DNA, 1416 bp, Burkholderia fungorum
atgtgctctgaccatatcaggctaccagcacaactggccgccggcgacgttgcgatacgcgtcgaaaacctgtccaagcgctttgctgtctaccacaccaggctggaacgcttgaagcacatcgtcgcaccgcgtcgaacaaaaggtttcgccgaattctgggcactcgaccatgtcgatctgactatcggtcgcggtgaagcctgcgcaatcatcggtcgcaatggatcaggcaagtccacgttgctgcagattctctgcgggactttgcgcgctacgtctggccgggttgcggtcaacgggcgcgttgccgcacttctggaactgggcgcgggcttcaacgccgactttaccggccgggagaatgtctacctcaacggcgcggtactggggctgtcgcatacggagatcaacgagcgctttgtggagattgaagcctttgcggaagtgggcgatttcatagaccaaccggtcaagacttactcgagtggtatgtatgtgcgtctggcgttcgctattgcgattcacgtcgatccgcagatcctgatcgttgacgaagcgctcgccgttggggacgcacgctttcaggcgaagtgtcttaaccggatcaagaagatgcaggccgatggcgtcacgctgttgttcgtgtcgcacgacgtcagtgcggttcgcacactatgcgaccgggcgctgtggctcgattgtggaaaggtcaaaatgctcgccgacgcattttcagttactgcgcaatacagccagttcctgttcgagggcgaagactacgcggttgccgggaacggctcgggcagtccgcaggactcatccggcgcgctgcaaagcgctgcttctcaggatatctcgccatcggcgcacccggaagaagcgaatcagtctcgcgctggcgcttgcggcgaggaactgatggccatgcatcgtccgatcaaccattggggcagccatgtcggctcaatcgttcaggcgggaatttacaacgcccgtggagagcgggcgtcgacctttgtcgccggcgagcctatcgaggtcagggtgatcttccggccgccgttgaacgccgatcggaaaacgatgagcgttgcattttcgctgaaggacttgcgcggcacggacctgatcgtctcgacgacatgggaccagcggcggctcgactttgaacaggccggtggcgaggcgtgcatccggttccggctcaggaatcaactgaacagaggcagttatctgcttgccgttgcgctggaagaccgggccggcgtcgcgccccaatactatgagtacatcgagggcgcgcattatttcacgtctctcgtcgaagacaccctgttcggatcttttgtcgtcgacgtcgagcaaacgatcgagccgggacatagcctatatgcgaatgcacgggtaagcgta

SEQ ID NO: 13235 - DNA, 1377 bp, Burkholderia fungorum
atgctcgactccagcgcccgtctgaccggccttctttgcggcacgcagcccatgaacgacatctgggcgccgcgtgccacgctgcaacgcatgctcgacgtggaagcggcgctcgcgcgtgcttcagccacgcatcacgtgattccgcctacggcggtggccgcgatcgaggccgcctgccaggccgatcagctcgacgcggacgcgctcgcacgcgacgccgcgctcggcggtaatctcgcgattccgctcgtcaagcaactcaccgcgcgcgtcaaggcggccgacgccgaagcgtcgaaatacgtgcactggggcgccaccagccaggacatcatcgacacggcgaccgtgctgcaattgcgcgacaccttcgatctgctcgaccgcggcctgcaagccacctgtcacgccgtggcgaaactcgcggccgcgcatcgcgccacgccgatgatcggccgcacctggctgcagcaggcgctgcccatcacgctcggcctcaaattcgcgcaatggctcgacgcgttgctgcgtcatcgcgagcggctcgatgcgttgcgcagtcgcgtgctggtgctgcaattcggcggcgcagcgggcacgctggcgagcctgcgcgaggccgcgccgcaagtcacgcaatcgctcgcagaggaactcggccttgccgtgccgacgctgccgtggcacacacagcgcgatcgcattgccgaaacggcggcgctgttcggcatgctgatcggcacgctcggcaagatcgcgcgcgacatctcgctgcagatgcaaaccgaaatcgacgaactggccgaaccggccgcagccggcaagggcggttcgtcgaccatgccgcacaagcgcaacccggtcggctgcgcggcggtgctgacggccgccacccgcgcgcccgggctggtcgccacggtgtttgccggcatggtgcaggagcacgaacgcgcgctcggcggctggcaagccgagtgggatgcgctgccggatctcgcgcgtctcgcgggcggcgcgctcgccaacatcgaacagatcgccgcggggctgaacgtgaacgtggcgcgcctcgccgccaatctcgacattacgcacggcctgattctcggtgaagcggtgatgctcgcgctcggcgacagcatcggccggctcgacgcgcatcatcgggtggagcgcgcgtcgaaagccgcgatccgcgacggccggacgctcttcgacgtgcttgccgaagacccggctgtgaccgaacatcttccgctcgagcgtctgaagcaactgctcgatccggctcaatacgtcggccaggcgcacgcttatgtggatgccgcgctggcccttcacaccacgcgctcgcagcgcgaccattccagggag

SEQ ID NO: 13236 - DNA, 1146 bp, Burkholderia fungorum
atgccggaactttcgtatccacaatcaggcactgctagcggaaaggggcgcaatatcggcctcatcatctttctcgcggtgattctggtcggcgccgtttattgcgccgtgcacttactggatgatttacagccggtccgcgaaagctcggctctgccttatctgctgctcggtgttgcgctgctgatcgcgctgggtttcgaattcgtcaatggctttcacgatacggcgaacgcggtcgcgaccgtcatctacacgcattcgcttgcgccgaacctggccgtggtgtggtcgggcggatggaattttctcggcgtgctcacgtcgagcggcgccgttgccttcggcattctgcagttgctgcccgtcgagctgatcttgcaggtggggagcagcgccggtttcgcgatggtcttcgcgttgctgatcgccgcgatcatctggaatctcggcacctggtatttcggactgccgtcgtcgagctcgcacacgctgatcggctcgattatcggcgtcggcctgatgaatcaattgatacacggcagcaacggcacgagcggtgtggactggaatcaggcgctcggcgtcggcaagtcgttgctgttttcgccgctggtgggctttctcgcggcaggtttgctgctgctgatcctgaaagccgtggtgcgcattcccgcgctgtatgccgaaccgaagggcaaggagccgccgcccttctggatccgcagcctgctgatcctgacctgcacgggcgtttcgttcgcgcacggctcgaacgacggccagaaaggcatgggcctcatcatgctgatcctgatcggcacggtgcccacggcctacgcgctgaacaaggcagtgacgccggcggaaacgcaaaccttcctcgcggtcgcgcatcagacctcggcgacgctcgccaaatacacccagggcgccgcaccgtccgccaatccgcgcgccgatgtcgagacctatgtccgtactcaccagctcacgcccgccacgttgccggccctgcagcaactgaccgagatcattgccggccaggtgggcgcgtccggatcgatggctgccgtgccgcagggcctcgtcgacaacgtgcgcaacaacatgtatgagcttgcccgcaaaaaatggatcccttgc

SEQ ID NO: 13237 - DNA, 1035 bp, Burkholderia fungorum
atgaaagccatcaaccgcatcattgaacaagcgcgccgttcgccgatgcgcatcgtgctgagcgaggccgaggatccgcgcgtgttgcaggcggcgcaacgcgcgagccacgaaggcattgcccggattctgctcgcgggcgacgccgcgcgcattcgcgaggcggcggcccgcttcgacgtcgatctgtccgggatggagctggtggaccccgccgcgtcggcgctcgcagcgtcttatgccgacgaactgttcgcactgcgcggcaacaaaggcatgacgccagaacaggcgcagcgcgaaatcctcaacccgctctgcttcgcgaacctgatggtgcgtctcggccacgcggacggttccgtgtccggtgcggtcaacaccaccgccgaggtcgtgcgcaccgcgctccagatcatcggtatcgcgccttcgttcaagctcgtgtcgagcttctttctgatgatgctgtgcgagccgttccacacgctcaaaggcggcctgatcttttccgactgcgcactggtggtggaaccggatgcaggccaactcgcggagattgcaatcgccgccgcggacagcgcgaaaagcctgctgatggacgaaccgcgcgtggcgatgctgtcgttttcgacgagcggcagcgcccaccacgcggccgtcgacaaagtggtcaacgcgacccacatggtgcaggaacgccgcccgcatctcgcgatcgacggcgacgtgcaactcgacgcggcgatcgtctccgaaatcgcgctgcgcaaggtcaaacactcgcaggtggaaggccacgccaacgtgctggtgtttccgagcctggaagccggcaacatcggctacaagctggccgagcggatcggcggcgcgaaggcgatcggccccttgctgcaaggcttgcgcaagccggccaacgacctgtcgcgcggctgcagcgccgacgacatctactacgtgatcgccgtcaccgcggttcaggcgcaggccgcgctcacgcatcccgacgctctcctcacaccgtcccattca

SEQ ID NO: 13238 - DNA, 1401 bp, Burkholderia fungorum
ttgaaggcgggcctcaagcagcgccacatgacgatgatcgccctcggcggcgtgatcggcgcggggctcttcgtgggcagcggggtggtcgtgcagcaggccggccccgcggcggtgttgtcgtttctgattaccggcgcgctggtggtgctggttatgcggatgctcggcgaaatggcctgcgcgatgccggccgtcggctcgttctatgaatacgcgcggctcgcgttcggcggcaaacgcgcctgcggcaatctggccggctttctgaccggctggatgtactggtatttctgggtcatcgtcgtggcggtggaggccgtcgcgggggcgaaactggtgcagttctggttgcccgatgtccccgcgtgggcgatcagtctcgtattgctcgtgacgctcactgcaaccaacctggtctcggtcggcagttacggtgaattcgagttctggttcgcgtcgatcaaggtcgcggcgatcatggtgtttctgtttctcggcagcatgtacgtgctgggactgtggcccgcgtcgaagcacgtcacggaggtgctgccgacgctgttctcacacggcggcctgatgcccaaaggaatcggaccggtactgagcggcgcggtcgccgccacgggtttttacttcggagcggaaatcgtcaccattgcggcagccgaggcacaggagcccgcgaaggccgtcgccagggcgaccaactcggtgatcacgcgcgtgctggttttttacgtgggctcgatcctgctcgtcgtcgcgctcgtgccgtggaactcgccgaagatggcgacgccgtatgtgagcgcgctcgacgcaatgggtattcccgccgccgccagcgtcatgaacgccatcgtgctcaccgcggtgctgtcggcgctcaattcgggactctatgcggcgtcgcggatgatcttcgcgctgacccgccacggcgacgcgcccgccgcgctcgccagggtcaaccggcgtggcgtgccggtgcgcgcgattctgatcggcaccgtattcggctatgcgtcggtcgtaatgtcgtatgtctcgccggatacggtgttcgcgtttctcgtgaattcgtacggcacggtggcgattttcgtctatgtgctgattgcgatctcgcaactgaaactgcgggcccggatcgagcgggatgcgccgcagacacttcgggtgaggatgtggtgctatccgtacctcacgtgggtttccattatcggcatggtcggcattctggttgcgatggccttcattccggagcagcgccagccgctatggttcggggtcgcgagtctgggcgtgctgctgctcgcctatccgctgcgagggcgccggagcgacgcgatgcccggcgagccggagacggtcgagtaccggcatcatcatcga

SEQ ID NO: 13239 - DNA, 858 bp, Burkholderia fungorum
atgaatgcccgtaccgatttctcagtgcttgccgtagcggaactgtcgtttgcgaccatcgcatcgggcatctgcgtgccgtacgtcgagtgcggagaaggcgaaccgctggtgttcgtgcacggctcgctttgcgactatcgctactggagcgcgcagaccgcggcgctgtcgcagcatttccgctgcatctcggtgagcttgagccactactggccggccaacgaggcttgcatccagggcgagttcggctggcagacgcatgttgccgaactggccgaattcatcgaggcgatcaacctcggccccgtgcatctggtcggtcattcgcgcggcggctgcgtggcgtttcatgtcgcgcgtgaatatccgcggctcgtgaaatcgctgacgctcgcggacccgggcggcccgctgcagctcgaaggcatgccggacgcgtcgctgccgggcgcgaccaacgtgctgcgcgcacgcgtggccgacctgatcgaaagccgggagatcgacgcgggactggagctgttcgtcgactcggtgagcgcacccggatcctggcgcaagagtccggcggccttccgcacgatggcaatcgacaacgcggacacgctgcccaagcagttccgcgatcccctgcccgcctattcccacgaggtggcacgcgacgtgaaatgccggaccttgctgatcgacggccagcgcagtccccgcatgttccgcaacaacgtcgagaagctcgcagaatggatcggctatgctgagaggcaaaccatcgccggcgcgtcgcatggcatgaacgtctcgaatgccggcgctttcaaccggctcgtgcacgcgttcgtcacattcgtcagcttc

SEQ ID NO: 13240 - DNA, 783 bp, Burkholderia fungorum
gtgagcacctctgcgtctctccccaatcgcaagcccgccggcaccagcagttcgctggtggtgcgcaacctgaaaaagcgttacggttcgcgcacggtcgtcaaggacgtgtcgctcgacgtgaaaagcggcgaagtggtcggtctgctcggccccaacggcgcgggcaagaccacctcgttctatatgatcgtcggcctcgtgccgctcgacgccggtgaaatcgatctggacggcaagtccatcagcctgctgcctatccataagcgcgcttcgcttgggctttcgtatctgccgcaggaagcttcggtgttccgcaagctcagcgtcgaagaaaacattcgcgcggtgctggaattgcagcacgaagacaacggcaagcggctcagcaaggacaccatcacgagccgcacggaagccctgctcgacgaactgcagattgcgcacttgcgcgcgaatccggcgctgtcgctctccggcggcgagcgccgccgggttgaaattgcccgggcgctggccaccaatccgagctttattctgctcgacgaaccgttcgccggcgtcgacccgatcgccgtgctggaaatccagaaaatcgtcaagtttctgaagcagcgcaatatcggcgtgctgattaccgatcacaatgtgcgcgaaacgctcggcatctgcgatcacgcctatatcatcagcgacggcagcgtgctggcggccggcgcaccggccgaaatcatcgaaaacgaaagcgtgcggcgcgtctatctgggcgagcacttccgcatg

SEQ ID NO: 13241 - DNA, 1014 bp, Burkholderia fungorum
gtgcgccgggatcgaggctctgttcgtgccgccggtgttcgcctgaccgccgcaaatggtgcgtgcgcaacgaacttgccgaaacacgttgcatcgaaccatgcacaccgaacaaaccacgcattgaagaagggagtcacccaggtcatgtcgaccgatcacagctttatcctcaaactgtcgtgcgccgaccggcccggcatcgttcacgccgtgtcgggctttctgttcgagcgtggcagcaatattctcgactccgcgcagttcggcgacagccgcaccggcgagttcttcatgcgcgtgcatttccagcaggtgggcggtgatccgggtctggaggcgttgcgcgcgtcgttcgcgacgctcgcagaacagttcggcatgcgctgggagttgcacgacgcgtcggtcaagccgcgcgtggtgatcatggtgtcgaagatcggccattgcctgaacgatctgctgttccgctaccgcaccggccagttgggtatcgagatcgcggcgatcatctcgaaccacaaggagttctatcaactcgccgccagctacgacattccgttccatcacttcccgctgatgggcgccacgcccgaggcgaaagccgcacaggaagcgcgcgtgctcgaagtgatcgacgagcatcaagccgacctcgtggtgctcgcgcgctacatgcagattctgtcgccgaagctgtgcgaagcgctggccggccgcgcgatcaacattcatcactcgttcctgccgagcttcaagggcgcgaagccgtattaccaggcattcgaccgcggtgtgaagctgatcggcgcgacggctcattacgtgacgacggatctcgacgaaggtccgatcatcgagcaggaagtggagcgcgtcgaccacagcatgacgccggagcaattgacggcgatcggccgcgacgtcgaatgcgtgacgctcgcccgtgcggtcaagtggcacgttgagcatcgcgtcgtgttgaacggcagcaagacggtggtgtttcgc

SEQ ID NO: 13242 - DNA, 2871 bp, Burkholderia fungorum
gtggaacaaatccgtattcgtggggctcgcacccacaacctgaagaacgtcaacctcgacctaccccgtcacaagctcgttgtcatcacgggcctttcaggctcgggcaaatcgtcgctggcgttcgacacgctctatgcggaaggacaacggcgctacgtcgaaagtctctccgcctatgcgcgccagtttctgcaattgatggagaagccggacgtcgatctgatcgaaggcctgtcgccggccatctcgatcgagcagaaagcgacctcgcacaatccgcgttccacggtcggcaccgtcaccgagattcacgactatctgcgtctgctgttcgcacgggtcggcacgccctactgtccggaccacgaaattccgctggaagcgcaaagcgtctcgcagatggtcgacgcagcgctcgccctgccggatgaaacgaagctgatgatcctcgcgcccgtggtggcgaaccgcaaaggcgagcacgtcgaactgttcgaggaaatgcaggcgcaaggctttatccgtttccgtgtgcgctcgggcggcggcaccgccaatgaaggcgtcgcgaaaatctatgaagtcgactcgctgccgaaactgaagaagaacgacaagcacaccatcgacgtggtcgtggaccgcctgaaagtgcgccccgacatgaagcagcgtctggccgaatcgttcgaaacggcgctgcgtcttgccgacggccgcgcgatcgcgctcgaaatggatacggacaaggagcatctgttcagttcgaagttcgcctgcccgatctgctcgtactcgctgcaggaactggagccgcgcctcttctcgttcaacaacccgatgggtgcgtgcccggaatgcgacggcctcggccagatcactttcttcgatccgaagcgggtggtcgcgcatccgtcgctgtcgctcgcggcgggcgcggtgaagggctgggaccggcgcaaccagttctacttccagatgctgcaaagtctcgcggcgttctacgaattcgatatcgacaccgccgtcgaggacctgccggagaaggtccgcaagatcctgctgttcggctcgggcaagcaggaaatcccgttctcgtacatcaacgaacgcggccgcacttcggtgcgcgagcatgtattcgaagggatcatcccgaatctggagcggcgttatcgcgagaccgattcggtcgcggtgcgcgaagagctcgccaagtatcagaacaaccagccctgcccggcctgcgccggcacgcggctgcgccgcgaagcgcgcttcgtgcggatcggcacggacagcgacgcgcgcggcatcttcgaaatcagcggctggccgttgcgcgacgcgctcggctatttccagacgctgcgcctggaaggctcgaagcgcgagatcgccgacaaggtggtcaaggaaatcgtcgcgcggctgatgttcctgaacaacgtcgggctggactatctgtcgctggagcgcagcgcggaaacgctgtcgggcggcgaggcgcagcgcattcgcctcgcctcgcagatcggctcggggctaaccggcgtgatgtacgtgctggacgaaccgtccatcggcctgcatcagcgcgataacgaccggctgatcgccacgctcaagcatctgcgcgacctgggcaactcggtgatcgtcgtcgaacacgacgaagacatgatccgcatggccgactacgtggtcgacatgggaccgggcgcgggcgaacacggcggcatggtgatcgccgagggcacgcccaaacaggtgcaggcgaacgcggcgtcgatgaccgggcagtacatgtccggcgcgcgcaacatcgagttcccggacgaacgcaaggcgccggacgagcggcgtctgcgtatcgtcgaggcatatggcaacaatctgaagcatgtgtcgctggatctgccggtcggcttgctgacctgcgtgaccggcgtgtccggttcgggcaagtccacgctcatcaacgacacgctgtatcacgcggtcgcgcatcacctgtacggttcggccacggagccggcgccatacgaatcgatcgagggcctcgaacacttcgacaaggtgatcaacgtcgaccagtcgccgatcggccgcacgccgcgctcgaatccagccacctacaccggcctcttcacgccgatccgcgaactgttcgcgggtgtgccggcggcgaaggagcgcggctacgaagccggccgcttctcgttcaacgtgaagggcggccgctgcgaatcctgtcagggcgacggcgtgctgaaggtcgagatgcacttcctgccggacgtgtacgtgccgtgcgatgtctgtcacggcaagcgctacaaccgcgaaacgctggacgttcagtacaaaggcaggaacatcagcgaagtgctcgacatgacggtggagaacgcctatgagttcttcaagccggtgccggtcgtcgcgcgcaagctgaaaaccttgctggacgtcggtctgggctatatccggctgggccagtcggccaccacgctctcgggcggcgaagcgcagcgcgtcaaactatcgttggaactgagcaagcgtgataccggtcgcacactatacatacttgacgaaccgactaccggcctgcactttcacgacatcgcgctgctgctcgaagtgattcacaggttgcgggaccagggtaataccgtcgtgatcatcgagcataatctcgatgtaataaaaaccgcggactgggtcatcgacctcggaccggaaggcggagcgggcggcgggcagatcgttgcccaaggcacgccggaacaggtagcgaagtcgaaagcaagttttaccggtaaatacctggcgcctctgctgaaacgcgcggccagcaaaaag

SEQ ID NO: 13243 - DNA, 531 bp, Burkholderia fungorum
atggcatccgtgaacaaggtcattctcgtcggcaatctcggagccgatccggaagtccgttatcttccgagcggcgacgcagtggcgaacatccgccttgcaacgacggatcggtacaaggacaaggcgtccggcgaaatgaaggaagcgaccgagtggcaccgtgtgtcgttcttcggccgcctcgcggaaatcgtgtccgaatatctgaagaagggctcgtcggtgtacctggaagggcgcatccgtacccgcaagtggcaggcgcaagacggcaccgaccgttactcgaccgaaatcgtcgctgagcagatgcagatgctgggcggccgcggcggctcgatgggcggtggcggcgacgaaggtggttatagccgcggtgaaccgtcggagcgcagcggcggcggtggtcgcgcggcgtccggtggtggctcgcgtggcggcagcggtggcggcgccggcggtggcgcgagccgtccgagcgcgccggctggcggcggcttcgatgagatggacgacgatattccgttc

SEQ ID NO: 13244 - DNA, 738 bp, Burkholderia fungorum
atgccaggatttcgtactccgggagagcaaccgctctatgaaatcgtccgcgcccgtattctcgagcgcctgcgtaccggccaatggacggccggcgacaagatccccgcagagccgcaactggccgaagaattcggcgtgggcatcggcacgatccgccgcgccgtcgaagaactggtggccgagcgcctgctgattcgccgcgcggggcgcggcacgatcgtcgcgaagttcgccgacgaacacgcgttcgaccagtacttcagctttgtcgatacgaccggcgagctgatgaaggtgaccgcgcgcctgctgcgctttggcaaggagcgcgcgagcccggcgctcgcctcgacgctcaggctcgagcgcggcgcacggcttgccactgcggataatcttcggctgcatgacgacgttccggtcatgctcgatcgcttgtggatgccactcgacgtgtttccggacctcgacgcaggaaagttcgaagcgcggcgcggctctatctacggtttttaccaggagcacttcgggatttcagtcgtgcgcgtggtggaagacctgggcggcgcggccgccgacgaagaagcggcgcgcgcgctcaacattgaagtgggcgcgccggtgctgcgcatcgagcgcacggcttacacgttcaaggaccagccggtcgaatttcgcgtgcgccttgtcgattcgagccgctgttcctatcggaacgtgcgcggcttgcaggac

SEQ ID NO: 13245 - DNA, 687 bp, Burkholderia fungorum
atgcgcgacaccgcagaggtaagcacgcccattcgagccatcatcgcggacgatcatcccctggtgttgctggcgatcgaaaatctgatcggcggttatccgaatatgcagatcgtcggccgcgcagccgacgccactgaactcttcacggaagtcgaccgcagttcatgcgatctggtgctcatggacctctacatgccaggcggtgccgacggcagcggactggaagtcgtgaggcagttcaagacgcgctaccccggcattgcgctcgtcgtgctgaccatggaaaccgcggcggccgaactgcagaaggtgatttcgctcggcgcggacgcactggtgagcaagcgcgaccggatcgatctgattcacgtggccgtcgtcacggcgctggcacgcgagtgctatgtcgggccggcagtgcgtgcattgatcgctgacgcaacggtgacccagcggctcgattttgtccggcagatgctgtcgcgccgcgaactcgaggtgttcacccagtatgcatccgggtatggagtgaccgagatcgcggcgcgtctggggcgcagcgtcaaaacgatcagcgcgcagaaatgcaccgcaatgcgcaagcttgctctgcacagcgacgcggaactgttccgcttcgctgtcgagtacggagtgatcccggaggagcgcgtgcagaacctg

SEQ ID NO: 13246 - DNA, 741 bp, Burkholderia fungorum
atgccccgccccaccagttcgctcgagttgcttcgctccgttacgctgtccggtctcgtgcaggaggagatccttcgccggatcaagactggcgagctcgaggccggcatgaaactcaacgagatggatctcgccgagcatctgaaaatcagccgcagtccggtgcgcgaggcgttccgcgcactcgaggaagccggtctcgtgtggctcgaaaagaatcggggcgtctacatccgcgagatttccgatgcggaagccgccgaactctatgaagtgcgcgccggactcgacgagttggccggccggcggctggcgtcgcggatcaccgacacgcagttgcaggatctgcacgccatgctcgatcaactcgaagccagctcgatccatggcgagctgaataattacttcacgttgaacattgcgtttcatgaccggctgatggaactgtcgggcaacgcaacaatgcttggcctgtaccggcaggtggtcaaccgcatgcatctgctgcgccgccgcggcttctccattgcgggcagctcgcaggcgtcgcacaccgaacaccggctgattctcgacgcacttgcaaggcgcgaccccgaagccgtcgcgcaggccatgcgtcagcacgtgcaggcgggtttccagcgcgcaatcgccgcgcacaacgccgacgacaccgcgtccgcagccgaagtccctgctggcgaagcggcgcaaaccaccctcgccgacggttcgcgc

SEQ ID NO: 13247 - DNA, 777 bp, Burkholderia fungorum
gtgtccgggcgcaaggttgaacgcgtcgaagtgcgtacgccggcgctgcgctggccgattccggccgatcttgcgaaaaccttgcgcggccgcgtggtgcgtaaggtcgagcggcgcggcaagtacctgttgttcgagatcgacgcgggctggttcattgtgcatcttggcatgactgggacgctgcgggtgctgcgccacgtaccgcatccgccggccgcggcgaaacacgatcacgtcgactggatcttcgacgagttcattttgcgctatcgcgatccgcggcgcttcggcgcagtgctgtggcatccgcgtgaagccggcgacgtgctcgagcatccgctgcttgcgggcctcggcgtcgaaccgttttcgcccgcgttctccggcgcgctgatgcaccggctcacgcgcgggcgcaaggtgtcggtaaagcaggcgctgctggccggtgaaatcgtcgtgggcgtgggcaatatctatgcgtcggagagtctctttcgcgccggcatccggccggctaccgcggcggggcgcgtctcgctcgtgcgctacgacctgctggcggacgccgtgcgcgtgacgctcgccgccgcgatcgagaagggcggcagcacgctgcgcgatttcgtcggcagcaacggcgagagcggctacttccagctcgactatttcgtctatgatcgcgcggggctgccgtgccgcgtgtgcggaacgccgatcaaacagatcgtacaggggcagcgttcaacgtatttctgtcccacctgccagcgc

SEQ ID NO: 13248 - DNA, 936 bp, Burkholderia fungorum
atggggaccagatgctatgatgaaatctacggtttcgacgactccatgcgcataatcctgatcaccggtatatccggctccggcaaatcagttgccctgaacgcgcttgaagacgcaggctactactgcgtcgacaacctgccgccgcgtttcctgccgcagctggcttcctatctcgccgaagacgggcaagatcgccttgcggtcgcaatcgacgcgcgctcgagcgcttcgctcgacgaaatgcccgccatgattcgcgacctgtcgcgtgcccacgacgtgcgggtgctgttcctgaacgcgagcacacagtcgctgattcaacgcttttccgaaacacgccgccgccatccgctgtccggttcaacctcgcacgacgcggatgtcggcctgctcaactcgcttgccgaggcgatcgaacgcgaacgcgaactcgtggcggggctggccgaattcggccatcagatcgacaccagcaatctgcgcgcgaacgtgctgcgcgcctgggtcaaacgcttcatcgagcagaaggattccgggctcgtgctgatgttcgagtcgttcggcttcaagcgtggcgtgccgctcgacgcggatttcgtgttcgacgtgcgcaccttgccgaacccgtactacgatcatgaattgcggccgctcacgggcctcgacaaaccggtgatcgattttctggatgcgctgccggtggtgcatgaaatgatcgacgacatcgagaaatttctcgccaagtggcttccgcatttccgcgacgacaatcgcagctatctcaccgtcgcgatcggttgcacgggcggccagcaccgctcggtgttcattgcggagacgctcgccgcgcgtctcgcggcatcggcgaatgtcattgtgcggcaccgcgatgcgccggtcgaagccggcgaatcatcgaagttagtggct

SEQ ID NO: 13249 - DNA, 966 bp, Burkholderia fungorum
atggatacgtccagcatcaacgcccagagcattttcgacgataacgccgccacgctgaagctcagctggttgacggggcatgaaggctgggagcgcggcttttcttcggaatcagtcgccaatgccacgtcgagcgccgacctcgtcggccacttgaacctgatccacccgaaccggatccaggtgctcggcgacgccgaaatcgactactacaagcgccaaaccgacgaagaccgctcgcgccacatggccgagctgatcgcgttggagccgccgtttctggtggtggcgggcggcgtccccgcgccgccggaactggtgctgcgctgcacgcgctcgtccacgccgctcttcaccacgccgatgtccgcggccgcggtgatcgacagcctgcgcctctacatgtcgcgcattctcgcgccgcgcgccacgttgcacggcgtgtttctcgacatcctcggcatgggcgtgctgctcacgggagactcgggcctcggcaagagcgaactcgggctggagctgatcagccgcggccacggtctcgtggccgacgacgcagtggacttcgtgcgcctcggtcctgacttcgtcgaagggcgttgcccgccgctgctgcaaaacctgctggaagtgcgcggcctcggtctgctcgacatcaagacgattttcggtgaaacggcggtacgccggaaaatgaagctcaagctgatcgtgcaactggtccgccggcccgacggcgaattccagcggctgccgctggagagccagactgtggacgtgctcggcctgccaatcagcaaggtcacgattcaggtggccgccggccggaacctcgccgtgctggtcgaagccgccgtgcgcaatacgatcctgcaactgcgcggcatcgacacgctgcgcgacttcatggatcgccagcgcctcgcgatgcaagaccccgacagccagtttccgggcaaactgatc

SEQ ID NO: 13250 - DNA, 453 bp, Burkholderia fungorum
atgaatcgtttagccaaatttcttcccctcgagaacgtcgtcgtcggactatcggtcaccagcaagaaacgcgtgttcgagcaagcgggcctgatcttcgagaaccagaacggcatagcccgtagcacggtcactgacaatctgttcgcgcgtgagcgcctcggatcgacaggccttggcgaaggcgtggcgattccgcatggccggatcaaaggcttgaagcagccgctcgccgcgttcgtccgccttgccgaacccatccccttcgaatcgcccgacggtcagccggtctcgctgctcatcttcctgctcgtgcctgaacaggccactcagcaacacctcgaaatcctttcggaaatcgcccagttgctgtccgatcgcgaaacccgcgagcgcctgcacacggaacaggaccgcgaaacgttgcatcgcctgctcactcagtggcaacct

SEQ ID NO: 13251 - DNA, 864 bp, Burkholderia fungorum
atgagcgacacgcagcgtcccacaccgccgtttccgaagcagcagcaaaatcacacgcctgggcacacggcagaaatgcaacctcaacccgatcacggcgagcgctcctatcgaggctcgggacggctcgcgggcaaagcggcgatcgtcacgggcggagatagcggaattggccgcgccgttgccattgcgttcgctcgcgaaggcgcggacgtgctgatttcgtatcttgacgaggacgacgacgcgcgcgagaccgcgcgctggatcgaggaggccggccgcaaggctgtcctgctgcctggcgatatcacgaaccccgcgcactgcaaggcgatcgtcgaaagagctatcgaggcgttcggccggctcgacgtgctggtcaacaatgccgcctatcagatgagctatccctcgctcgacgcgatcagcgaccaggagtgggacaagactttcgatacgaacattggcgcgatgttcaggatcacccgggccgcggtcaagcatatgaaaccaggcgccgcgatcgtgaacacgacgtcgatcaatgcggatcatccgaatcccggtctgattgcctacgcggcgaccaagggtgcgattcagaacttcaccggtggccttgcgcagttgctcgcggagaaaggtatccgtgcgaactgcgtggcgccggggccgatctggacgccgctgattccgtccaccatgccgccggagaaagtcgagcaattcggcgcccaggtgccgatgaagcgccccggccagcccgccgaactggcggctgcctacgtgatgctggcatccgacgaagccagctatatttccggcgcgaccatagcggtcacgggcggctcgccgatcatt

SEQ ID NO: 13252 - DNA, 1368 bp, Burkholderia fungorum
gtgcgcattgcgcgtcacaggctggcttttcctgacccaccgccgcccgtgttgaaaacctcacgttttttcgatctcctgcgcattcccggcttcaagccgctcgccgccgcaaccctgatgctcggtgtggcaatgtcgttcaccgctccctatctttcgctgttcggcgtcgagcgcgccggcatgacgccgttcaggctcggcgtcttcatgacgctgatcgcggcgagcggggtgctcgccagcaccttcgcgggccgttggagcgacgcgagcggacggcatcggccgttgctgctggcagcgctggtggcggcggcgctcggctatctgtgtttatgcgtggtgcgtgactaccggttgctgctggtggtcgggatcgtctttatcggcgcgggcggctcggccatttcaatggtgttctcgttcagccgcgcggcgttgccggtcgccgacccggcggagcgcgtgttcgccagcgcgactttgcgcaccatcctgtcggccgcctgggtgttcgggccgtcggtgggcgcgctggtgctcgccgccagcagcttctacggactctttctgttcgccgccgccagtttcggcgcgtgcgcgaccattgtctggcgcatgcgggagccgcagggtcacctgggcgatcacacggtggaagacacggcggccgagccgtcggcttcgatcaccgtgccgccgctgaccacgcccggtgaagacgcgcacgaggacttgcccggcgtcgcgtcggccaacgacatcggccgcgcggtggcggcgctcaccttgctcggcctcgccgcgaacgcgacgatgatcgtgttgccgctctacatcgtgcatggcctgaacggcacgcatctggacgtgtccgtcatgctcggcctgggggccttgatggaaattccgatgatgctcgcgctaggcgcgaagtcgtcggcgctgcacaagccgaactggctcggcgcgtgcgcggcggtgcatgcggtgtatttcgccggcatggcgctggcgggcaatgtgcacgtgctgattccaatgcagatgctcaacgcgttcgtggtcgccgtgacctcgtgtctcggcatgacctatgtgcaggatctgatgccgcatgcgccgggccgcgccaccgcgctgttcttcaacgcggcgcgggtcggctcgattctctcgggcgtgttgtcgggcttgctggtgcaggcgttcggctatcgcggcacgttcatgttctgcggcttgctggcgttgtgcgcgctggtgctgttcgccgtgccgggcgatcgttatccattgatgtggcaggccgtgaagcgttttgcgcgttcgcggtacggcaagctccaggcaggtcggcgc

SEQ ID NO: 13253 - DNA, 2082 bp, Burkholderia fungorum
atgcaaaacgatcccgccctcgaccagctgtgtatcaacacgatccgcacgctgtcgatggacgctgtgcaaaaggccaattccggtcaccccggtacgccgatggcactggcacccgttgcctatcacctgtggcaaaaccatctgcgctacgaccccgacgagccgctctggcctgatcgcgaccgcttcgtcttatccgtgggacacgcgtcgatgctgctgtattcgctgttgcaccttgcaaacgtgaaagccgtggacgacgacggcaacccgaccgacggacccgcagtttcgctcgacgatatcgaacatttccgccagatgggcagcaagacaccgggccacccggagtaccgcatgaccaccggcgtcgagaccaccacgggcccgcttgggcaagggctcggcaatagcgttggcatggcgatggcggcgcgctggtacgagagccatttcaacaagcccgatgcgccgctgttcgactatcgggtctacgcgttgtgcggcgacggcgacatgatggaaggcatctcgcacgaggcggcttcgctcgccggccacctgaagctgtccaatctgatctggatctacgacagcaaccgcgtgacgattgaaggccacaccgacctcgcttatagcgacgacgtggaaacccgctttcgcgggtacaactggcacacgctgcatgtgagcgatgcaaacgacgccgccgcgctggaagcggcattcgtcgaagcgaaaagcattaccgacaggccgacgctgatcgtggtgcacagcatcatcggctggggggcgccgcataagcaggacacctcggcggcgcacggcgagccgctcggcgtagaagaagtggcgctcgccaagaaagcgtacggctggcccgaggataaattcttctatgtgccggacggtgtgcacgaacgcttcgcggcgggcatcggcgcgcgcggcaaggcggcgcgcgaggaatggcaggcgaagtacgacgcctacagcagaaagtaccccgaactcgcgcgtgaattcgcgcagatcgaagcgcacgaattgccggccggttgggacagcgacattcccaccttcgacgcggacccgaaaggcgttgcgtcacgcgaatcgtcgggcaaggtgctcaatgcgattgccgcgcgcgttccgtggatgatcggcggcgcggccgacctttcgccgtccaccaaaacgaatctgaaattcgagggcgcgggcagcttcgaatacgacaactacggcggctgcaatctgcatttcggcattcgcgaacacgcaatgggcgcggcggtgaatggcctcgcgctgtcgaatctgcggccgttcggctcgaccttcctgattttcagcgactatatgaagccgccgatccgcctctcggcgatcatggaagtgccggccatctacgtgttcacgcacgattcgatcggcgtcggcgaagacggtccgacccatcagccaatcgagcagctggcctcgctgcgcggcgtgccggggctgaccgtgctgcgtccgggcgacgccaacgaagtggccgaggcgtggcgcgtggcgcttgccgatccgcggcggccgtcgtgcatcgtggtgtcgcgccagccgttgcccacgctggaccgcagccgctatgcggccgcgaagggcacgcagaagggcgcctatgtgctcgccgatgcagccgacgggcaaaagccgcaggtgatcctgatagccacgggcagcgaactctcggtctgcgtcgacgtgtatgagaagctcacgagcgaaggtattgcggcgcgcgtggtgtcgatgccgtcgtgggatatcttcgagcgccaggacgaggcctatcaggactcggtgctgccaccggatgtggacgcgcgcgtggcggtcgagcaggcggcctcgcttggctgggaccgttatgtggggcgtctcggcgcgcaggtggtgatgcatacgttcggcgcgtccgcgccgcttgccgaactgaagaagaagttcggcttcacgccggagcatgtgtacgaagcggcaaagcagcagattgcgcgggtgcaaggcaagcgcagccaggag

SEQ ID NO: 13254 - DNA, 1761 bp, Burkholderia fungorum
gtgaacgccatgcacgccacgcgcgatatgcgtgacacgcgcggcttcgcgttcgaatccacgctcagcaaggtcgcccgcgtgctgaccgggcaatacggcgtgacggtcgcgttcagtccggacggtccgcgcgtcgagcccgggcgcattgtgattcccgactacgagttgaatggcggggtcgagcgcgatgtgctgatcggctatctggatctgctggtcgcgcgcgccaggcatgcttcgctcgcgcaactcgacgcgctgccctcgggcgtcgccgcgaatctcgcgcaggtgatcgaagaccgccgcgtgtgcgggcaattgctcgacgaatatccgggcgcgcgctggttcatcggcaggttgcgcctgcatgccgccgagcgcgtgcggcagcgctggccgaagctgcattggcgcgacaggctggtctggctggtggagcgcgcgttgtgggacgaaacgcccaccagcaccgaagcaagccattcgctgctcgccgccttgcatgccgcgcaggacctgctgcacgacgcccgcgcgagccgttcgaccgcgcagagcatcgcgtcggcgcaggcgctcgtggcgcgcgtacgcgcgctgtcggcgggcgaagtgaacagcatggcgttcaccgcggatgcgctcgacgacatcgataccgaaacggccgcgtcatcgtccgcgccgctcgatgacggcgacaccgtgctgcccgatcaggccagcgcgaactcgccgccgtccgatcgaagcggcggcgcgcaggcagacaacgcggtcggcatgggtcgatcgccggcggacgcgcaacagccgtcagagcgttccgaaggcaacgcagccggcttcccagcggatgcatggcgagcccggctgtcgattccgctcgccaccgagttcgacgacatccgcgatctcacgggccagggcgacagcgccgcgtggcgcgaactgcgggcgcaggctcgcgcggacaccgcgccgctcaaggaaaagctcgaacgcgcgctgagcgcggacgagcgcacccgctggcgccgcgagcaggagcgcggcgagatcgatcgcaccgcgctggccaaactcgcgacttcgcccggctatcgcacgccgtttcgcacgcagcgggccgccaaaggacgcgacgtggccgtgaccctgctgatcgaccgcagcggctcgatggccggccgcaagatcgaactcgcgcgccagtgcgcggccgccctgtgcgatgcgctcacgcagttgtcgttcgattgcgaagtgctcggctattgttcggtcgaatccccgcccatgcagcagctctacgcacggcaactcgccgccggtgcggatttgcggcgctataaccgcttcgtcgaacgactcgatctgaaggtctacaaacgctttggcgcgaccgatctgagcgggatcgccgcaatcgactgcggacacgagaatccggacggcgaggcgctggcctgggccgcgacgcggctcgccgatcacccggccgaacgccgcattctgatgatgttttccgacggctacccgtccaccggcgacggcgatccgcaggtgctgcgcagcgatctgcgcgagcgcattgcggcgatcggcaagcgcggtatcgaactggtgggaatcggcgtgctgaccgacgcggtggaggacttctatccgcacaacgtggtagtgagccgcctcgccgaactgccggcgacggtgttctccgtattgagcgcaatgttgctcgcacgc

SEQ ID NO: 13255 - DNA, 1275 bp, Burkholderia fungorum
gtgcgttccgcttcccatcctgcctcgatgagttcagcccctcccgccgacggcgcgccccactggcagcgcaatctctatgtctgtctgttcggctcgttcacgaccatcgtcgcgatgaccctgttgctgccgttcctgccgctctatgttcagcagctcggcgtgcatccggccgcggccgccgtgcaatggtcgggcgtcgcgttcggcgcgacgttcctcgccgccgcgctggtgtcgccgctgtgggggcgcatggccgaccgctacggacgcaagctgatcctgattcgcgcgagcctcggcatggccgtcgtgatgtccctgctcgggctcgcgcagaatgtctggcaactggtgggactgcgctttctggcgggactcgtcggcggctatgcgtcgggcgcgaccgtcatgatcgccacgcagacgccgcgtggacgcaccggctgggcgctcggcacgctggcctcgggcgtgatggcgggcagtctcgtcggcccgctggtgggcggcgcgctgccgccgctgatcggcatccgcaatacgtttttcattgcgggggcgatgatcttctgcgctttcattgcgaccacgctgctcgtcaaggaacaaccggtggaccgcacacgcggcaaatcgcacgaggagcgggcggccaccggctgggccaccgtgccggacctgcgccccgtgctggccatgctgttcacctccggcttgctgatgttcgccaacatgtcgatcgagccgatcatcaccgtgtacgtcggccagctggtgcacgacgcgagacacgtcacgctcgtgtcgggcttcgtgatgtcggcctccgcgctcggcagcgtgctggcggcttcgcgcgtgggccgtctcgccgaccggatcggcgcgcccaaagtgatcgtggcgtgtctcagcgtgtgcgcggtgctgctcgtgccgcaggcgttcgtcacgagcggcctgcaactggtggtgctgcgctttctgatggggctcgcgctggccggcctgttgccatgcattacgagcgtgatccgccacagcgtgcccgaccgttccgccggctatatcctcggctacgccacttcggcgaactacacgggacaggtcacggggccgctcgcgggcggctttgtcggcgcgcacttcggcatgcagtcggtgtttctcatcaccagcgcgttgatgctatgcggggcgctgttcaacggctgggtgttcagaggctcgggctcgggctcgggctcgggctcggcgcgcggcgga

SEQ ID NO: 13256 - DNA, 1497 bp, Burkholderia fungorum
atgcaggatcagtacattctcgcgcttgaccaaggcaccaccagctcgcgcgcgatgctgttcgaccggctcggcaatatcgtgtcgaccgcccagaaggaattccagcaaatctacccgcgtccgggttgggtcgagcacgatccgcaggaaatctggtcgacccaggccggcgtcgccgccgaggccgtgacgcgcgccggcatgaacggcacctcgatcgccgcgatcggcatcaccaatcagcgcgaaaccaccatcgtatgggatcgcgaaaccggccatcccatctataacgcgatcgtctggcaggaccgccgcactgcggacttctgcgaccagctcaaggagcaggggctcgaagaaaaagtccgcgcgaaaaccggcctgccgatcgattcgtatttctcggcgaccaagatccgctggattctcgacaacgtcgaaggtgcgcgcgaaaaagccaaacaggggcgtcttgcgttcggcaccgtcgatagctggctggtgtggaatttcaccaagggcggcctgcatatcaccgacgtcaccaacgcgtcgcgcacgatgctgttcaacatccactcgctgaagtgggacgacgaactgctcgaagcgctcgacattccgcgcagcatgctgccggaagtgcgcgcttcgtcggaaacgtatgggccgaccaagaccaccgtgttcgcttcgaagattccgctcgcgggcattgccggcgatcagcacgccgcgctcttcggccagatgtgcacggagtcgggcatggtgaagaacacctacggcacgggctgcttcctcgtgatgaacaccggcgacaagccgatcgaatcgaagaacaatctcgtcaccacgatcgcgtggcagatcggcgaccagatcaattacgcgctggaaggcagcatcttcattggcggcgccgtggtgcagtggctgcgcgacggcctcgggatcatcaggaacgccgctgaaatcgaaacgctggcgcgcagtgtgccgcattgcgacggcgtgtatctggtgccggccttcgccggtctcggcgcgccgcactggaatgcgcgcgctcgcggcacgctgttcggcgtgacgcgtggcacgtcgtcggcgcatatcgcacgcgcggcgctcgactcgatcgcttatcaatcggtcgacgtactgaaggcgatggaagccgactccggcattcgcatcggcgaattgcgggtggacggcggcgcctgcgcgaacaatctgctgatgcaattccaggcggacattctcggcgtcgacgccgtgcgtcccaaggtgtcggaaacgacagcattgggtgccgcttatctggccggtctcgcggtgggttactggaaagatgtcgacgagctgcaaagccagtggaaactcgaccgccgcttcacgcctgccctgccgcacgccgaggtcaaggcatgcctcgacggctggaagcgcgcgatccgcgccgcgaaggcgtgggccgatacaccc

SEQ ID NO: 13257 - DNA, 879 bp, Burkholderia fungorum
atgtcgattctgattaataaagacaccaaggtcatcacgcagggcatcaccggcaagaccggtcagttccacacgcgtgcttgccgtgaatatgcaaacggccgcgaagcgtacgttgcgggtgtgaacccgaagcgtgccggcgaagacttcgaaggcattcccatctacgccagcgtcgctgaagccaaggctgaaacgggcgcgaccgtgtcggtgatctacgtgccgccggcaggcgctgctgctgcgatctgggaagcggtcgaagccgatctggatctggcgatctgtatcacggaaggcattcctgtccgtgacatgatcgagctgaaggctcgtatgcgcgccgaaaaccgcaaaacgctgctgctcggcccgaactgcccgggcacgatcacgccggacgagctgaagatcggcatcatgccgggtcatatccaccgcaagggccgcatcggcgtcgtgtcgcgttcgggcacgctgacgtacgaagcagtcggccaattgacggcgatcggcctcggccagtcgtcggcggtcggtatcggcggcgacccgatcaacggtctgaagcacatcgacgtgatgaagatgttcaacgatgatccggaaacggacgccgtcatcatgatcggcgagatcggcggtccggacgaagcgaatgccgcgtactggatcaaggacaacatgaagaagccggtggttggcttcatcgccggtgtcacggcgcctccgggcaagcgcatgggccacgccggcgcgctgatctcgggcggtgcggatacggccgaagcgaagctggaaatcatggacgcctgcggtatcacggtcacgaagaacccgtcggaaatggcgcgtcttctgaaggcgatgctg

SEQ ID NO: 13258 - DNA, 618 bp, Burkholderia fungorum
atggtaatgatgaaactcatcggttcgctcggcagccccttcgtacgtaaagcgcggatcgtgctggccgacaagaagatcgactacgaactggtgcccgagaatgtctgggcgccggacaccagaattcacactttcaatccgcttggcaaagtgccgtgcctcgtgatggaagacggcgaagcggtgttcgactcgcgggtcatctgcgaatacgtggatacgctgtcgccggtcggcaagctgattccccagtcggggcgcgagcgggtcgaggtgcgctgctgggaagcgctcgccgacggcgtgctggacgcggcggtgctgatccgtctcgaaggcacgcagcgcacgccggagcagcgcgtgcaagcgtgggtcgcgcgtcagcagcgcaagatcgacgaagctctgatcgcaatggcgcagggcttgggcagcaagacgtggtgtgcgggcaatcactacacgctcgccgacatcgcggtgggctgcgcgttgggctatctggatttccgcatgccggaattgaactggcgcgaaccgcatccgaatctggacaagcacttccagaagctctcgctgcgccagtcgttcatcgatacggtgcccgtcaac

SEQ ID NO: 13259 - DNA, 1701 bp, Burkholderia fungorum
atggccgacccgatgacttcccgctcgcgccgcggcgcgagcgcctctgccgcccagcaaacacgcggtcgcacgctgccccgctggcactacctcgttgcgctggccgcgggcgcggccaatacgctttcgttcgcgccgacgccgcacggcggctggctcgaactcgcgatcttcgcgttcttcttcgcctggctcacgcgcactaccggctggaagagcgcggcgctgacgggcggcgcgttcggcttcggcaatttcgtgaccggcgtgtggtggctctacgtcagcatgcatttctatggcggcatggcggcgccactggccggcgcggccgtggtgctgttctcgctctatctggcggtttatccggcgctggcggcggcggtctggtcgttctgcgccggtcacgcgcgcaacggcgcggccgacgacgacacgccgttctcgcccacatggcacggcgcgctagcgttcgcgagcgcgtgggcgatcggcgaatggttgcgcggcacggtgttcacgggctttccgtggcttgcgagcggttacgcccaggtggacggtccgttcgccggcttcgcgccggtggcgggcgtgtacggcgtcggctggatgctggcgctggtggccgcgctgatcgtgcaggcgctgctgccgctgctgccttcgcgccagccgggcggaagcgggggcgccgaccgcaagggcggcaaaccgggcgtgtcgcgcgtcgtggtgccgggcgcgatcgcgctggcgctgatcgccgccggcctgctgctgccgctcgtacaatggaccgtgcccgccaatgcgccgttgaccgtgcgcctgctgcaaggcaacgtcaaacaggaaatgaagttcgaggaatccggcatgcgcgccgcgatcgaccagtatcagcagatgattacgtcgaagccggccgatctgatcgtcaccccggaaaccgcgattccggtgcttgcgcagcaactgcccgcgccctttgcctcggcggtgcgcaacttctcggacacgacgggcagcgcgatcctgttcggcgcaatcggcggcacgattacgccggaaggccaggtgatcgactatacgaacagcctgttcggcgtcacacccggcacgcgcgacgtgtaccgctatgacaagcaccacctcgtgccgttcggcgaattcgtgccgtggggattccgctggttcgtcaacctgatgagcatcccgctcggcgatttctaccgtggcgcgccggtgcagaaaccgttcatcgtccacaaccagccggttgccgtggacatctgctacgaggatattttcggcgaagagattgcgcggaccattcgcgaaagtgatacgcccgccggcgtgctggtcaattcgaccaatctggcctggttcggcgacacgattgcgctcgaccagcatctgcagatcgcgcgcatgcgttcgctggaaaccggccgcccgatgctgcgcgcgaccaacaccggcatgaccgccgcgatcgatgccgacggcaaggtgctcgggcgcctgacgccgtacacggtcggctcgctcgacctcgcggtgcagggcacttccggcagcacgccgtatgtcacgagcggcaacaacaccgtgctggcggtttcattgctcctgctggcgttcggctttgcgttcggaccgggtatcaggcggcgccagaacggcaagcag

SEQ ID NO: 13260 - DNA, 933 bp, Burkholderia fungorum
atgctctgcaacagcgcgcccagtcttgccgggcgcactaccatgaacgacacgtatcccagtcgacgccataccgacaaaccgcaggaaaaacgctcgctcctcgagcgtctgaccgacttcatctcgcccgagcccgactcgcgcgccgaacttctggaaatcttgcaggacgcgcatgagcgcaacctgatcgacgccgactcgctgtcgatgatcgaaggcgtattccaggtgtccgaactcagcgcgcgcgacatcatggtgccgcgcgcgcaaatggacgcgatcaacatcgcggacaatcccgccgaattcatcccttacgtgctggaaaaagcgcactcgcgctatccggtctacgagggcaatcgcgacaacatcatcggcgtgctgctggccaaagacctgctgcgctactacgccgaagaagaattcgacgtgcgcggcatgctgcgccccgccgtgttcatccccgaatcgaagcgcctgaatgtgctgctgcacgacttccgcgtgaatcgcaatcacctcgcggtggtggtcgacgaatacggcggcgtggccggcctgattacgattgaagacgtgctggaacagatcgtcggcgacatcgaggacgaatacgatttcgacgaggaaagcggcaacatcatcgcctcgcccgacggacgcttccgcgtacgcgcgctgaccgaaatcgaacagttcaacgaggccttcggcacccattacccggacgacgaagtcgataccatcggcgggctcgtcacgcatcacttcggacgggtgccgcatcgcggtgaaaaagtccgcctcgacgatctgatcttcgagattctgcgcggcgacgcccgccagattcatatgctgctggtgcgccgcgatccgctcgccggccagcgcgagcgcgaagcgcagcacgtgcagacc

SEQ ID NO: 13261 - DNA, 618 bp, Burkholderia fungorum
gtgcatgtcggtgagcgtttcaacagcattacccacctcgtcggcgccgtgctgtcggtggcgggtcttgcaacgctcgtcacgatgggcgcactcgacggcgacgcgtacaaggtggtcagcttcagcgtgtacggcgcgatgctgttcgtgctgtatgctatctccacgctttaccacagcgtgcgcagtccgcgcgtgaaagcggttctgcagaaatgcgaccattcggcgatctacctgctcatcgccggcagctacactccgttcacgctcgtcacattgcgcggaccgtggggctggtcgcttttcggcgtaagctgggggctcgccgctctcggcatcgtgcaggaattgacgctggggcgacgcacccgcagcgtttcgatggtgctgtatgtgttgatgggatggctcgcgctcgttgccgtccgcccgctggtgcaagccttaccggcagcgggtaccgcctggctcgtggccggcggagtcatctacagcgccggcatctacttcttcatcaacgacgagcgcatccggcacggacatggtatctggcacctgttcgtactggcgggcagtctgtgtcaattcgtcagtgttgcgcgctacgtcgcg

SEQ ID NO: 13262 - DNA, 915 bp, Burkholderia fungorum
atggccgaccgcgacggcaagatctggatggatggcaagctcatcgactggcgcgatgccaagattcatgtgctcacccacacgctgcactacggcatgggcgtcttcgagggcgtacgcgcctacaagaccgctgacggcggcaccgcgattttccgattgcaggaacacacaaagcgcctgctgaactcggccaagatcttccagatggacgtgccgttcgaccacgaaacgctcgccgccgcgcaatgcgaagtggtccgcgaaaacaagctcgaatcctgctacctgcgcccgatcatctgggtcggttcggaaaagctcggcgtgtcggccaagggcaacaccatccacgtggcgatcgcggcctggccgtggggcgcgtaccttggtgaagacggcatcgccaagggcatccgcgtgaagacttcgtcgttcacgcgccatcacgtgaacgtgtcgatggtccgcgccaaggcgtcgggctggtatgtgaactcgatcctcgccaaccaggaagcgattgccgacggttacgacgaagcgctgctgctcgacgtggacggctacgtgtcggaaggctcgggcgagaacttcttcctcgtgaacaatggcaagctttacacgccggacctggcgtcgtgtctcgacggcatcacgcgcgacacggtcatcacgctggcgcgcgacgcgggcatccaggtgatcgaaaagcgcatcacgcgcgacgaggtctatacctgcgacgaagcgttcttcaccggcaccgccgccgaagtcacgccgatccgcgaactcgacaaccgcacgatcggctccggcgcacgcggcccgatcacggagaagctgcaatcgggcttcttcgacatcgtgaacggcaagagcgacaagtacgcgcactggctgaccaggatt

SEQ ID NO: 13263 - DNA, 1146 bp, Burkholderia fungorum
atgaaaatcacccggctcgaaaccttcatcgtcccgccgcgctggtgcttcctgaagatcgaaaccgacgaaggcattgtcggctggggcgagccggtggtcgaaggccgcgcgcatacggtggcggccgcggtggaagaactgtccgactatctgatcggcaaagatccgcttctgatcgaagaccactggcaggtgatgtatcgcgcgggcttctatcgcggcggtccgatcacgatgagcgcgatcgccggcgtcgaccaggcgctgtgggacatcaagggcaagcatcatggcgtgccggttcatgcgctgctcggcggccaggtgcgcgacaggatcaaggtgtactcgtggatcggcggcgaccgtccgagcgacgtggccaacaacgcgcgcgccgtggtcgaacgcggcttcaaggccgtgaagatgaacggctccgaagaactgcagatcatcgacaccttcgacaaggtgcaaggcgtcatcaacaacgtggcggcggtgcgcgaggcggtcggaccgaacatcggcatcggcgtggacttccacggccgcgtgcacaagccgatggccaaggtgctggcgaaagaactcgacccgtacaagctgctcttcatcgaagaaccggtgctctcggagaacgccgaagcgctgcgcgacatcgtcaatcagaccagcacgccgatcgcgctgggcgagcggctgtattcgcgctgggacttcaagcacattctgtcgggcggctacgtcgacatcattcagccggacgcgtcgcacgcgggcggcattaccgagtgccgcaagatcgcgtcgatggccgaagcctacgacgtcgcgctcgcgctgcattgcccgctcggcccgatcgcgctggcgacctgtctgcagatcgacgcggtgagctacaacgcgttcatccaggaacagagcctcggcatccactacaaccagggcaacgacctgctcgactacatcaggaatccggaggtcttcaggtacgaagacggcttcgtgtcgattccgcaaggcccggggctcggcatcgaggtcaacgaggagaaagtgcgggagatggcgaagatcggccaccgctggcgcaatccggtgtggcgccatgaagacggcagcgtcgccgaatgg

SEQ ID NO: 13264 - DNA, 1191 bp, Burkholderia fungorum
atgaacaaggtattgcgtctctccgatctgatcgccgaaggcaagctatccggcaaacgcgtgttcatccgcgccgatctgaacgtgccgcaggacgatcaaggcaacatcaccgaagacacccgtatccgcgcttccgtgccggccatcaaggccgcgctcgacgcgggcgccgccgtgatggtcacgtcgcacctgggccgtcccacagagggtgatttcaagcctgaagactcgcttgcgccggtcgcgaaacgtctggccgaactgctcggccgcgaggtgccgctggtggcgaactgggtcgaaaacggcgtgaacgtcgcgccgggctcggtcgtgctgctggaaaactgccgcgtcaacaagggcgaaaagaaagattccgacgagctcgcgcagaaaatggcgaagctctgcgacatctacgtgaacgacgcattcggcaccgcgcaccgcgccgaagccaccacgcacggtattgccagatacgcgccggtggcgtgcgccggcccgctgctcgcggccgaactcgaagcgctcggcaaggcgctgggcgcgccgaagcgtccgctggtggcgatcgtcgccggctcgaaggtgtcgaccaagctgaccattctgaagtcgctcgccgacaaggtcgatcaactgatcgtgggcggcggcattgccaacacgttcatgctggccgcgggcctgaagatcggcaagtcgctcgccgaagccgatctggtgaacgaagccaaagccatcatcgacgcggcgaaagcccgcggcgcctcggtgccgatcccgaccgacgtggtcacggcgaaagagttttccccgaccgccaaggcagaagtcaaagcagtcgccgacgttcaggacgacgacctgatcctcgacatcgggccggaaacggccaaagtgctcgccgcgcaactggaaaaggccggcacgatcgtgtggaacggtccggtcggcgtgttcgaattcgaccagtttggcaacggcacgaagacgctggcggaggctatcgccaaatcgtcggcgttctcgattgccggcggcggcgatacgcttgctgcgatcgccaagtacggcatccacgacaaggtcagctatatctcgacgggcggcggcgctttcctcgaattcctcgaaggcaagaagctgccggcggtcgaagttctggaatcgcgggct

SEQ ID NO: 13265 - DNA, 1890 bp, Burkholderia fungorum
gtggcgacgcgctccccaacggcaaagtctgcgaatgcgcgtggcggcaagccgcgcaacagcgcagcggcatcggcaggggagcgcgcggcgcgctccgccgccactccggcggccggctccgcaggcgagttcgcgagcggcccagctagccagcaacatgaagaatccggctcgcctctcgggctcgcggagttgaccactgccgggaaggccgcgaaatcgtccagcgcagacgctgtacaaaccgccccctctcccgcagaactcccggacgaagagatcgcgctcatctccccaccggcacctcccgtgctgctctcgaacaccgcttcaccctataaagcgacgctggtttcaaccggcgcgcagcccccggcagcatccttcggtgcgcagcctccgcatccgactcgcagcgctctttccagcgatctcacccagacgaggagactcatgcatcgcgccaccaagattgtcgccaccatcggaccggcttccaatacgccggaaatcctgctgcaaatgattcaggcagggttggacgtggtgcggctcaatttttcgcacggcaccgccgacgaccaccgccagcgcgccggattcgtgcgcgaggcggcccgccaggccggccgcgaagtcgccatcatggcggacctgcaaggcccgaagatccgggtcggcaaatttgaaaacggcaagatcatgctggtcgccggcgagccgttcgtgctcgacgccgactgcgaactcggcaacgagcaacgcgccggcctcgactacaaagacctgccgcgcgacctgaaaccgggcgacgtgctgttgcttaacgacggcctgatcgtgctgaacgtctcgcgcgtgatcggcaacgagatccacacggtcgtcaagatcggcggcgaactgtcgaacaacaagggcatcaaccgccagggcggcggcctgtccgcgccggcgctgaccgccaaggacatggaagatattcgcaccgccatgtcgctcggcgtcgattatgtcgcggtatcgtttccgaagaacgcgaccgacatggaaatggcccgccagctggcgaacattgccggcgcgccgttcggcgtcaagccgaagatgatcgccaagatcgagcgcgccgaagcgattccggcgctgcaaggcattctcgacgcgtcggacggcatcatggtcgcgcgcggcgatctggccgtggaagtggggaatgccgcagttccggcgctgcaaaagcgcatgattcgtatggcgcgcgaatcgaacaagttcgtgatcaccgccacgcagatgatggagtcgatgatccacgcgccggtgccgacccgcgccgaagtgtcggacgtcgccaacgccgtgctggacggcacggacgcggtgatgctgtcggcggaatcggcggcgggcaagtatccggtgcagaccatcgagacgatggcggcgatctgtatcgaggcggagaagtcggagcagtcggagctggacaaggatttcctcgaccgcacgttcacgcggatcgaccagtcgatcgcaatgggcgcgctcttcacggcgttccatctcggcgcgaaggcgatcgtggcgttgacggaatccggctcgaccgcgctgtggatgtcgcgtcactggactcacgtgccgatcttcgcgctcacgccgcgcgtcggcagtgaacgggcaatggcgctgtatcgcaacgtgacgtcgctgcatctcgataccaacaccgaccgcgacacggcgttgcagcaggcgttggagaccgtggtgagcaagggctacgcgtcgcgcggcgacatggtggtgctgacggtcggcgagccgatggggcaggccggcggcacgaatacgctgaagatcgtacgggtcggcgagccgtat

SEQ ID NO: 13266 - DNA, 1656 bp, Burkholderia fungorum
atggctaccgttggcgggcaaatctcgcacgtgccgatgacgaacgaagagaagcgggtgatcttcgcatcgtcgctgggtacggttttcgagtggtacgacttctatctggccggctcgctcgcggccttcatcagcaagagcttcttctccggcgtcaatccgaccgccggcttcatcttcacgctgctcagcttcgccgccggcttcgcggtccggccgttcggcgcgatcgtgttcgggcggctcggcgatctggtcggacgcaagtacacgttcctcgtgacgatcgtgatcatgggtctgtcgacgttcctcgtcggctttctgccgggctacgcggcgatcggtattgcttcgccggtgatcttcatcgccatgcggatgctgcagggcctcgcgctcggcggcgagtacggcggcgcggccacctacgtggccgaacatgcgccggcgggacgccgcggcttctatacggcgtggatccagacgaccgccacgctcggcctgttcctgtcgttgctggtgattctcggcgtgcgcacggtaatgggggaagacgcgttcggtgcctggggctggcgcattccgtttgtcgcgtcgatcatcctgctgggcgtgtcggtgtggattcgtctgcaactgcatgaatcgccggtgttcgagcgcatcaaggccgaaggcaagacctccaaggcgccgctgtccgaagcgttcggccagtggaaaaacctgaaagtcgtgattctcgcgctgatcggcctgaccgccggccaggctgtggtctggtacacgggtcagttctacacgctgttcttcctgacgcagacgctgaaggtggacggcagcagcgccaacatcatgatcgcgatcgcgctcctgatcggcacgccgttcttcctgttcttcggctcgctgtcggaccgtatcggccgcaagccgatcatcatggccggcctgctgatcgccgcatgcacgtacttcccgctgttcaaggcgctggcgcactacaccaacccggcgctggaagccgcaacggcgaaggcgccgatcgtcgtgatcgcgaatccggacgagtgctcgttccagttcaacccggtcggcacctcgaagttcacgagttcctgcgacatcgccaagagcgcactctcgaaggccggcctgaactacgagaacgttgcggcgccggcgggcacgctggccgagatcaaggttggcgatacggtggtcaacacgtatgacggcaaggccgccgacgccaaggatcggggcaagacgttcgactccaccctcgcgacgacgctgaagaccgcgggttatccgccaaaggccgatccttcgcagatcaactggccgatgagcgtggtgatcctgacgatcctcgtgatctacgtgacgatggtctacggtccgatcgcggccatgctggtggaaatgttcccgacgcgcatccgctacacctcgatgtcgctgccgtatcacatcggcaatggctggttcggcggcttcctgccggccaccgcgttcgcgatcgtggcggcgaagggcaatatctactccgggctgtggtatccgatcgtgattgcgctcattaccttcgtgatcggcatgctgttcgtcaaggaaaccaaggactcggacatctacgcgagggac

SEQ ID NO: 13267 - DNA, 711 bp, Burkholderia fungorum
atgcacccttacattgcggaattcatcggcacggcgctcgtggtgctgctcggcgacggcgccgtggccaacgtgctgcttgcgcgcaccaaaggcaaaggcgcggacctgatcgtgatcgtgatgggttgggcgatggccgtgttcatcgccgtgtacgtcaccgcgtctttcagcggcgctcacctgaatcctgtcgtgaccatcagcctcgcgctggccggcaagttcgcgtggaccaaagtgccgggctatgtggcggcgcaaatgctcggcggcatggccggcgcgctgctcgtgtggatcgcttatcgccagcacttcgcgaaagaaggcgacgccgacgtgaagctcggggtgttctgcaccgcgccggcgattcgcagcgtgccgcataacctgctcaccgaaatgatcgccaccttcgtgctgattctcggcgtgctgtatctggcttcgccgcaagtcggcctaggcgcgctcgacgcgctgccggtcggtctgctggtgctcggcatcggcatctcgctcggcggcccgaccggctatgcgatgagtcccgcccgcgacctgtcgccgcgtttgatgcacgcactgctgccgattccgggcaagcgcgatagcgactggcactatgcgtggattccggtttgcggtccgctgctgggcggcgcggcggcagcgtgtctgtatctgtacctgcacgtgcat

SEQ ID NO: 13268 - DNA, 1074 bp, Burkholderia fungorum
atggaagaaagcaagaaaggctcggctggactgactgctgaaaagagcaaggcactcgctgccgcactcgcgcagatcgaaaagcagttcggcaaagggtcggtcatgcggctcggcgcaggtgaggtaatcgaagacatccaggtggtctcaaccggatcgctcggtctcgacatcgcgctgggcgtcggcggtttgccgcgtggccgtgtggtcgaaatctatggcccggaatcatccggtaaaaccacgctgacgctgcaagtcattgccgaaatgcagaagatcggcggcacggcggcgtttatcgacgcggaacacgcgctggatatccagtacgcgagcaagctcggcgtgaacgtgaacgacctgctggtttcgcagcccgacacaggcgagcaggcgctcgaaattgctgacgcactggtgcgttcgggctcgatcgacatgatcgtgatcgactcggtcgcggcactcgtgccgaaggctgaaatcgaaggcgaaatgggcgactcgctgccgggtctgcaagcgcgtctcatgtcgcaggcgctgcgcaagctcaccggcacgatcaagcgcacgaactgtctcgtgatcttcatcaaccagatccgcatgaagatcggtgtgatgttcggcaatccggaaaccaccacgggcggtaacgcgctgaagttctacgcatcggtgcgtctggacattcgccgcatcggttcgatcaagaagaacgacgaagtgatcggcaacgaaacgcgcgtgaaggttgtcaagaacaaggtatcgccaccgttccgggaagcgattttcgacattctgtacggcgaaggcatctcgcgtcagggcgaaatcatcgacttgggcgtacaggccaagatcgtcgacaaggccggcgcgtggtacagctacagcggcgaacggatcggtcagggcaaggacaacgcgcgtgaattcctgcgtgaaaatccggatatcgctcgcgagatcgaaaaccgtatccgcgaatcgctgggcgtgaatgctatggctgaagccgcgaccgtcgcaagcgctgaagtcgcggacgaagaagag

SEQ ID NO: 13269 - DNA, 426 bp, Burkholderia fungorum
atgaagacgttttccgcaaaagcccatgaggttacgcgtgaatggtacgtgattgacgcgacggataaggttctcgggcgtgtcgccagcgaagtggcacaccgtcttcgcggcaagcacaagcctgaattcactccgcacgtcgacaccggtgatttcatcatcgttatcaacgcgggtaagttgcgcgtcacgggcaacaaggctactgacaagaagtactaccgtcactcgggctacccgggcggtatctatgaaacgacgttcggcaagatgcaggaacgcttcccgggccgtgcgctcgagaaagcggtcaagggcatgctgccgaagggcccgctcggctacgcgatgatcaagaagctgaaggtctacgctgaagcaacgcatccgcattcggcacaacagccgaaagcgctcgagatc

SEQ ID NO: 13270 - DNA, 390 bp, Burkholderia fungorum
atgatcggtaactggaattacggcacgggccgccgcaagagcgccgtcgcacgcgtcttcatcaaggcaggcaagggcgatatcgtggtgaacggcaagcctatcgccgattacttctcgcgcgaaacgtcgctgatgatcgtgcgtcagccgctggaactcacgaaccacggcgttacgttcgacatcaaggtcaacgtgacgggcggcggtgaaacgggtcaagccggtgcggttcgccacggcatcacccgcgcgctgatggactacgacgcaacgctgaagccggaactgtcgaaagctggtttcgtcacgcgtgacgctcgtgaagtcgaacgtaagaaggtcggcttccacaaggcacgccgcaggaagcaattctcgaagcgt

SEQ ID NO: 13271 - DNA, 1248 bp, Burkholderia fungorum
atgagcaccgagcccaccaagcccaacgccgcttccgccttcccgatcaccgacgaagtccgtcacgcgctcgccgtcaccaaacgcggggtcgacgaactgctgatcgaagacgaattcgcgcaaaaactcgcgaagagcgcggcgaccggcaaaccgctgcgtatcaagctcgggctcgatccgaccgcgccggacatccatattggccacacggtcgtgctgaacaagatgcgccagttgcaggacctcggccacaccgtgattttcctgatcggcgatttcacctcgctgatcggcgatccgtcgggccgtaacgccacgcgcccgccgctcacgcgcgagcagatcgaatcgaacgccaagacgtatttcgaacaggccgcgctcgtgctcgaccgcgacaagaccgaaatccgctacaacagcgaatggtcgatgccgctcggcgccgacggcatgatcaagctcgcgtcgcgctacacggtggcgcggattctcgaacgcgaagatttcaccaggcgtttccagagcggcgtgccgatctcgatccacgagttcctgtacccgttgatgcaaggctacgactcggtcgcgctgaacgcggacctcgaactcggcggcacggaccagaagttcaacctgctcgtgggccgtgagttgcagaagcagtacggccaggaacagcagtgcatcctgaccatgccgctgctcgaagggctggatggcgtcgaaaaaatgtcgaagtcgaagaacaactacatcggtatcagcgaaaagccgaccgacatgttcggcaagctgatgagcatttccgacgtgctgatgtggcgttacttcgaactgctgtcgttccgtccgatggaagaaatcgcgggcttcaaaaaggaaaccgaagcaggccgcaatccgcgcgatttcaaggtgatgctcggccaggaaatcgtcgcgcgcttccactcgcaagccgacgccgaacgcgcgctcgaagacttcaaccatcgcgcgaagggcggtgtgccggacgatatcccggccgtgacgctcgcgggcgcaccgctcgcgatcggccagttgctcaagcaggccaacctcgcgccgtcgaccagcgaagcgctgcgcaacatcgagcagggcggcgtgaagatcgacggcgcaaccgtgtccgacaagggcctgaaagtcgaagccggcgagtacgtcgtgcaggtcggcaagcgccgttttgcacgcgtcacgctgacggcc

SEQ ID NO: 13272 - DNA, 669 bp, Burkholderia fungorum
atgactacgcagattctgttcatccggcacggcgagaccgactggaatcgcatcaagcgcattcaaggtcacgtcgacattccgcttgccacgacggggctggcccaggcgcagcggcttgcgcgccgcatggccgaagaggcgaagcagggcgcacggctcgacgcgatctattcgagcgacctgcaacgcgcgcaacaaaccgcccagccggtcgccgacgcgctcggcttgccgctgcagttgcgcgaaaatctgcgcgagcgttcatatggcgccttccagggccatgacaacgacgagatcgcccagcgcttccccgacgaatacgcgcactggcaaactcgcgatcctggcttctcgccgccggacggtgagtcgcaacgcgcgctctaccaccgtgtgctgcacgcgatcgaaccgctggtcgccgcgcatcccggcgggcggattgcctgcgtcgcgcatggcggcgtgctcgattgcgtgcggcgcttcgcctgcggtttgccgctcgatgcgccgcgtgactatccgctgctgaacacgagtgtgaacacggtggatttcgataatggcaaggcgacgattgtgacgtgggcggacgtctcgcatctcgatgcgccgagcgaagacgatagtttcaagaaggcggcagagccgggccgt

SEQ ID NO: 13273 - DNA, 933 bp, Burkholderia fungorum
gtggccgccaggcgcacggccagcaaggacaatccaacgaacgcgtcgctcgccgcgaccgaatcaggagacctgatgcatatcgaccttcgcaacaagcgtgtcatcgtcaccggtgcgtcgcgcggcatcggccgcgcgattgcccgcgcattcgccgcggaaggcgcgcgtgtcgccatctgcgcacgcaccgccgccgacctcgaagccgccggcgcggaccttcagtctcgcggtgcaggcgacgtgatcgcccgcgccgtcgacgtcacggacacggccggggttcggcaattcgtcgaagacatcgccgcgcgctgggggggggtcgacgtgctgatcaacaacgccggccaggggcgtggcggcaatctggaaaccctgacacccgagcagattctcgaacacgcgaacgtgctgcaaatgggacacttccgtttcgtgcaggcggtcgtgccgcacatgcgccaacagcgctggggacgcatcgtcgaaatcaacgcgctggccggcgtggtgccgacgccggacggcattccatcggtggtcaaccgcgcagcctgcatcgcgatgtcgaagtcgctcggcatgtcgctcgcaaaggacaacatcctcgtcaacacgctcaacatgggctggatcgatactggccagtgggaccgacactaccgtgagatgccggcgggatgctcgcgagaggagttcgaccagatggtcctgaaagtcgtgccgcttggacgcttcggcaagcctgaggacgtcgcggggatggcgttgtttctcgcaagcgattacgccagtttcatcagcgcggcgtcgatcgacattgccggcggcatgggcgggcaaatcgcctactacccgacgctcaagcgcgacttctacgaggcggtcaaggcgcgcggcgcagtaccgcagcccgaagcaggc

SEQ ID NO: 13274 - DNA, 495 bp, Burkholderia fungorum
atggcggcgcgcgctctcgcaaacggccattcaccggtggcagcggaggaaacgttcggctggagcgaccgcttcctgcttggctttgccgcgatggacgaaacccatcgcgagttcgtcgatcgggtcgcggcgctcaagcgtgcgtccgatgccgaattgcccgcgcggctcgcggaattcgcgcagcacgccgtcgctcatttcgcgcaggaagagcgctggatgacgaccaccgcgtttcccgccgcgcagtgccacgccgacgaacacgcggcggtgctgcgttcggtgcgtgaggtcgagcagatgctgcgcgacggtgcggcgctcacgctcgcacgtgatctgacccaggcgctgatcgactggtttcccgcgcacgccgattacatggacgcagctctttcccactggatgagcaagcgcacgcacggcggcctgcctgtcgtgctgcggcgcggcgtcgccgggccggcccgcgtctcccacttc

SEQ ID NO: 13275 - DNA, 1260 bp, Burkholderia fungorum
atgccccgctcccgtcgttcccgtcttacggcaatcgatcccggtgagttcctcggcgcctggcgcatcgtgctggtcgcggtgctcgggctgggcgtgtcggccagcgcgtccctgctctattcgttcggcgcactggtgattcccttgcagcacgcattcggatggagtcgcgcggaattgcaaccggcgatcagttgtctgttcgccggcacgatcgtcagcacgcaagcggtcgccagcctcaacgcgcgtttcggcatgctgcgcgtcacggcgctctcgctcgtcggcatggggctctgctacgcgctgatgacgcagctcggccattcgatcggctggctctatctgatgtgcgtgctcctgccgctcgccggagcgggtgcgacacaggtcacgtgggcgcatctcatcatcctctggttctcgcgcaatcgcggtctcgcgctggccgcgatgctgtccggcaccgggttagcggcgatggtctatccgtccgccgttacatgggccatctcgcgctggcactggcaaggcggcttcgtgctgctcgccctcgcgccgctcgccgtcctgcctctggcgatggcctggatgagggtgcccgtgccacgcccggccgcaatagcggtcgccgcaccgatccgcagcgaagaaggcgtgtgctttcggaccgccgtgctgtcgacgcgcttctggacgctcaacattgcgctcgcgctcgttgtcgccgccgtcgtcgcgatgataagcaacaccgtgccgctgctttgcgacaaggggctttccgccgccggggcgagtcgcatattcggcagtttcggcgtctcgttgatcgtcggccggctgatcgtcggctatctgttcgaccggctgtgggcgcccggtgtcgccgccgtgacgctcgccatcccggcgttcggctgcgtgctgctcagcagcgcagcagcatcgcagaccggcttgctgacgcttgccacgatgctcgtcggcgtgggtgccggcgccgagttcgacatcggcgcctatctcgtctcgcgctacttcgggatgcgtgactacggccgcctgttcggcgtgcacgtctccctgatcaccgcggccgcggcgctcgctccgtggtgctccgccaggctctatgcgtcgaccggtacctacgcggcgatggtagcggcttgcggcgcggcgttcctgtgcggcgcactgctgttgctgccgctcggccgctatccgaagttcgatccagtcacccttgca

SEQ ID NO: 13276 - DNA, 1083 bp, Burkholderia fungorum
atgctcatcgaccttcatgctcacgcaccgcatccgggctattacaaccagcaccctcattggggacccttttttgaacggcacgaagacggcgacgtcaagttgcgcgtaggcgactggatcctcacgctgggttcgcccgaacgcaaggcgctcgtccgcgcggggaaggggccgacggtcgaggagtatcaggcgcgctgggccgacccgaaggtgcggcttgcaggcatggatgcggcaggccagaacgcgcaggtcgtatcggtgccctcgcattgctacatgtactgggcagagaaagagttctccgtgccgttcgcgacgaaggtcaacgatacgtttgccgaatactgttccgcggcaccggaccggctcatgttctgggcgcatgccgcgctgaatgcgccggaacaggccgcgctcgaactgcgccgggcttgcaccgagctgggcgcgaaggggctcgtggccggtggcgcgaatttcggcggcctcgagttcgattcgcccgaactcgacccggtctggaaagtgctttgcgatctcgatctgccgatgttcattcacggctataaccagtcggtcacctggggcaagaaggcaaacgacgaccgttacgaaacgactgcgatcgtcggcatgcagtacgacgagacgcgctgtttctggaacctggtgtgcggcggcgtgctggaccgctttcccggcctgaaggtctacatcacgcacggcggcggctacgtgccctatcaactcgggcgcctcgcgcagtgcaacggcaatctcgacgtcgcgcacaacaagaagccggtgctggagtacctgaagaacaacttctacttcgacgtcgagttgcacgaagttccgatgcgtcaggcactgatcgacatcatcggcgcagaccgcgtgctgtacggcagcaacttcggcggcagcgacgccgtgcgccacgacctgaccgaggggctgcggctttcggacgacgacctgcaaaagatccgctggaagaacgcatgcaagctgctgcatctcgatcctgcgaagatcggcgagcccgcgaagaagcaggcggtaagcgca

SEQ ID NO: 13277 - DNA, 1266 bp, Burkholderia fungorum
atgtccctctccgactcatcgcgtggcgccgcactcgatctcaccgaattccgcacaggctggcgcaccgtgctgatggccatgctcgggctcggggtcgcggccaatgcttcgctgctctacgcgttcggctcgctcgtgatcccgttgcacaatgcattcggctggagccgtggcgaattgcagccggcggtcagctttctgttcggcggcgcggtgatcggtgcgcagctggtgggctggctcaacgcgcgctacggcatgcgccgcgtgacagtcgtatcgctgctggcgctatcagccacgtatgcgctgatgcccttgatggggcgctcgattgtctggctttatctgatgtgcgcgctgctgccggtcgccgggatgggcacgatgcatatcacgtggacgcatctggtcaatctctggttcgaacgcaatcgcggcctcgcgcttgccgtgatgctctcgggcaccggcttgtcggccatgctgataccctccgcggtcacatgggtgatcgggcgctggaactggcaagccgcttttctcctgctcgcgttcctgcccgtcgtgctcgtgttgccactcgtgctgtggtggatgcagacgcccgacgaagaacgggcttcggccgcgcaacacatgacgcgcgcgacgcagcgtgcggggctcgtctttcgcgaggcggttcgctcgacgcgcttctgggcactcaatgcaggcctgtcactggtggtggcggccaccgtcgcgatggtcagcaacacggtgccgctgctgcgtgacaagggcttgtcggcggcggatgccagccacattttcggcagcttcggcattgcgctgatcggcgggcgtctcatcgtcggctatctgatcgaccgtctgtgggcgcccgccgtggcggccgccgccctcgcgatgcccgcgctcggctgcctgctgctgtcgaccgccagcgccgggcagaccggcctgctcacgatggcgacgctgctgaccggtgtcggcgcgggggcggagttcgacatcgccgcctatctggtcgcgcgctacttcggcatgcgcgattacggccggcttttcggcgtacacgttgcgctgatcacgctcgccggcgcgctgtcgccctggcttttcggatacctgtacatactgaccggttcgtacacggtgatgctgtcgatttgcggcacggcgtacctgctcggcgcgctcattctcctgccgctcggccgctacccgaagttcgactcgctgaatctggcc

SEQ ID NO: 13278 - DNA, 1092 bp, Burkholderia fungorum
atgctgatcgacctgcatgcccatgcaccccatcccggttactacaaccagcacccgcactggggaccattcttcgaagaagatgatcgtggtcatatccggatgcgcgtaggacactgggtacttacgttaggccagccggagcgaaaggccgcagaggcggccggcactgcgccgcgcctggatgaatggatgtccgcctgggcggatccctcaacgcgcatcaaggctatgaacgctgctggccaggacgcccaggtggtttcgctgccctcgcacgcgtacatgtactggacggatccggagttcagtgtgcgctttgcgcgcaaggtgaacgacaccttggcggagtactgttctgcgtaccctgaccggcttttcttctgggcgcatgcaccgctgaatgcgcctgtagaggcggcccgtgagatccggcgcgccgtcactacgctgggcgcaaaagggttggtcgcaggcggcgccaattttggtggccttgagttttacgacgaggccatgcacccggtcttcgagacgctctgcgagcttgatgtgccgatgttcgtgcatggctacaaccagtctgttacgtggggcgaaaaagctaacgaggatcgtttcgagacaacggcgattgtgggaatgaactacgacgaggcgcgatgcttctggtatctcgtctgtggcggcgtgctcgaccggtttccggatctcaaggtctatctgactcatgcgggaggctttgtgccgtatcagatcggccgtcttgcgatgaccaatccgaatctggaagatgccctgaacaagcggcctgtggaggaatatctgaaaaacttctggttcgatcccgagttgcacgagttgtcgatgcgtcagtccctggtcgatattgtgggtgccaatcaccttgtttacggaacgaatttcggcggcagcgatgctatccggtcggacatgacggaaggtcttcggctctcgcaggaagatcttgatcggatccgttacaggaacgcctgcgacctcctgcatcttgcaccggccagcattggtcgctgtccgggacagaacgaaaccacggctggaatcaggtca

SEQ ID NO: 13279 - DNA, 1803 bp, Burkholderia fungorum
gtgttcacctgtcatcgaagtggaccggaagcgattcgcgtcagacgcgcgcctccaatgaaaaaaccaggcatatcaggtagccaaggagacaaggagatgaacggaatgactagccgcgcaagactgaagaggaacagggtaagcgttggcgttgccgccgcgctcggatgctgggctgcgtcagcgagcgcgatgccgctcggggccatccccgactgggacatcaactgggacaatacgatcagctacaacatcggcatgcgtgcccaggggatcaaccccaacatcggcaacaacccgacattcagcgaatccgactacaagtttgcacacgcgggcgacatcgtcaccaaccgggtgtccgacctgtccgagttcgacgcggtgttccagaacaaattcggcttccgggtcagcgcctcgttctggaaagacttcgcctacggcggcggcgtgagcaacaatccgggcatggcctatccgggcaccccctactcgacgctgaactcctatgcgaacaaccgctacagcagctacaccgagcgctactaccagcaaggcgcggaactgctcgacgcgttcgtgttctacaacttcaacctcggcagtgcgccaagttcgatcaaggtgggccgcctgacccagtactggggcaatgcgctgttcttcagcggcatcgcttacggacaaaacgccattgacggcatcaagggtgctgccgtaccgggcacgcagttgaaagagctgacggttccccgggctcaggtgcttttccagacgaacatcaccccgactgtctcgctggcagcgcaatacttcgccgaatacaagcctagtatgttcccgcaaggcggtacctacctcggcacggccgggttcctgttccaggggccaaacctgctggacggacagattccgcagggtgctcccgtccagcccaccaacgggtttcattcggactacggcctcaaggccacgtggtcacccacctggctcaacggtacgatgggcttctattaccgcaacctcaccgaaaccaatccatgggtgctgctcggcgtgaatcccgcaacgggcgccacgaactatcatctgggatacgcttcggacgtcaagctctacggcttcagcctcgacaagcagatcggcccgtacagtaccgggcttgatgtctcgtaccgtcataacacagcgcttaacagctcgaccgggccgctgccgggcgacctgagcggccaggccggcgcgcgcggcgacgtactgaacgtgatcggcaacgtgatggcgggcctcacgcgcacgccgctgtgggacaccggcagcgcagtcgtcgaactgggctatacgcagaagctcaagaccaccagcaacggtgccctctataacggcgtgggcaattccctcgcctgtccgggcggcaacaagtgggacggctgctcgaccaatagcgctgttgcgatcgcggttcagttcgatccgcaatggttgcaggtgtaccccggcatcgatctcgacatgccgatcttcctcgagtacggcatctggggcaaccaggcgacggtggagccatcgcccggccagggaacgctgcagtacaccatcggtgtccatgcgctcattcagaacaagtacaacgtcacgctgcagtacaacggctatcacgcgcatgccggcggccagaccaatttcggtctcgccaatggcctgccaggcggcggcccgtcgtactatgcgggcggcaacagcacatacttctacaacgatcgcggctgggtatcgctgacgttctccgccgcgttc

SEQ ID NO: 13280 - DNA, 825 bp, Burkholderia fungorum
gtgatgagcaatgagaaggccggcggcaagctggaaaacaaggtcgcgatcgtgaccggcgcgggtgcgggactcggcgccgcgtgcgcccgcgcgctggcgcaacacggcgcgcgcgtcgcggtcgtcgacatcaacggcgaagcggccgccgccgtggcggccgacatcggcgagcgcgcgatgagcgtgcgtaccgacgtgtcgtcggaggcgcaggtcaaggcgatggtgagcgccgtgctggaacattttgggcgcatcgacatcctgcacaacaatgcggctgtgctcgacgacgcacagcgggccggcgaccgcgatgtgatcaacatgagcgtggaagtgtgggaccgggcaatggccgtgaatctgcgcggtgccatgctgtgctgcaagcatgcgatcccggcgatgctgcgtggtggaggcggctcgatcattcactcgtcctcgggcttcggcgcgcagggcgactttacgatgagcgcctacgcagcctccaaggcggggctcgcgatgctgagcaagtcggtggccgcgcagtacgggaaagagcgcatccgctcgaacacgatccagatcggcctcgtggtcgcggaccatccgcttcccgaggacatcaagggtgtgatcctcgacgggcacctcacgccctatctgggcgatccgaagcatgtcgccgacgtcgtgtgctttctcgcgtcggacgaagcggcgttcatcaccggggacacgctcgcggtggacggcggattctcgagccacgcgccgacgctcgcgccgctgcgtgccctcttcgccgcccgcggcaaggcagcctat

SEQ ID NO: 13281 - DNA, 609 bp, Burkholderia fungorum
gtgcgctctctgagccccctctcatccggccaccccaccgcgccctccatgacaaaatcgcgacttatcgaaatcacccccgccacgcatggcgtcgacatcgacctcgtctatgccaccgggcgcaacctgaccggcaagcccatttacaaggaagctcactgtctgctgctcgaacccgccgaagccggcttgcgcaacgcaatcgggattgcccgcgacgccggtctgaggctgcggattttcgacgcctaccgtccgccccaggcgcagcaggtgctgtgggatttcctgcctgattccacgtacgtcgccgagcctgagcgtggttcgaaccacagccgcggcacggcgatcgacctgacgctgctcgatgccggtggccacgaactcgacatgggcaccggcttcgacgccatgaccatcgagtccgagcacttccatccaggcttgcccgtgcacgtgcagcgcaaccgcctgttactgcttggcatcatgcacgccgccggttttgcccacatcaagaacgaatggtggcattacgagctgccaggctcccgtgcgctaccgctgatcgacgacagcgaaagcggcacgttgcgtctcatg

SEQ ID NO: 13282 - DNA, 1605 bp, Burkholderia fungorum
atgaaactggtattgcgcaatgtcctcgcggcggcggcgctcgcctccgccttgacctgctcgttcacagcggctgaccccgctgcggcggcgacgccgaaagacatgttcgtcatggcgacgttcctcgacgaattcaccacgctcgatcccggcgaagtctacgagctggtgccggaagaatatgtcgcgaatacgtatgaccggctggtgcgggtcgatctgaaggacccctcgaagttcaacggcgatgtcgcgcaatcatggaccgtgagccccgacggcctgacgttcacgttcaagctccgtgccggtctcaagttccactcgggcaatccgttgagcgccgacgacgtcgcctggtcgatccagcgcacggtcctgctcgacaaaggtgcagcggccgtgctgcaaggtatcggcctgaccagggacaacgtgcttgccaacgtgaagaaggttgatgacactaccgtcagcgtgacgacagaccggaaatacgcgccgacgttcgtgctgaacgtactcggcgcgtggcctgcatcggtggtggacaagcagttgctgctcgcgcaccagaaaggcaacgacttcggcaacgactggctgcgcacgaatgaggctggctccggcgcctataaactcgttaagtggaccgccaacgacagcctcgtgctgcagcgcttcgacggctatcgcttaccgctcgcgatgaagcgtatcgtgttgcgtcatgtgccggaagcctccagccagcgcctgctgatcgagaacggcgacgtcgacgtggcgcgcaatctgagtccggacgatctcgccgcgttgacgaagtccggcaaggcgcacgtgaccgcggtgccgcaggccacgcttctgtacctcggcctgaacgtcagaaatccgaatctggcaaaaccggaagtccaggaagcgatgaagtggctgatcgactataacggtatccagagcaacgtcgcgaaaaccacctacaaggtgcaccagacgttcctcccggaaggctttctcggcgtgctgaacacaaacccctaccagcaggacgtcgcgaaggccaaggcgctgctggcaaaagccgggcttccgaatggcttttccgtgacgatggacgtgcgtaacggctatccgtacagcgaaattgccgaagccgtgcaggccgatctcgcccagggcggcatcaaggttcagatcatcccgggcgacaacaaacagacgcttgcgaagtaccgctcgcgttcccacgatatctatatcggcgaatggtcggcggactacatcgacccgcacagcaatgcgcagggcttcgcctggaatccggacaattccgacaagtcggcctacaagatgctcgcatggcgcaactcgtgggatattcctgacctgacgaaagagaccaacgcggcgctcgccgaatcgtcgacagcgaagcgcgccgagctgtaccagacgatgcagaaacagatgctcgcgaactccccgttcgtgatcctgttccagcaggtctcgcaggtggccgcgcgaccgggcgtgacggggctcgaagtggggccgatcaacgacctcgtgtcgtatcgtgatctgaagaagcag

SEQ ID NO: 13283 - DNA, 558 bp, Burkholderia fungorum
gtggtaaccgtcggcacctcttcaggtttcgcgacgcatttgagtgacctcgatcgttccactcgaagtgcaatcgtcctcgaagcaattggaaggatcgaagtctcgaaggccgttcgcggcacgtcaatagccgacgcccggcagttgcggctggatctgctcagccagcagtccgccaggtctgacccgatggatagcagtttcaactacgccgaagcgttccgaagcctcgatctggccgcggtgaagaaagacctcgcggcgctgatgaccgattcgcaggattggtggctcgcagacttcggtcactacggtccgcttttcatccgcatggcgtggcacagtgccggcacgtaccgcatcggcgacggccgtggcggcgacggccgtggcggtgccggccggggccagcagcgtttcgcgccgctcaatagctggcccgacaacgttagtctcgacaagggccgccgcctgctctggccgatcaggcagaaatatgggcagaagatttcctgggccggtccgtcagggcggccgccctgtgccctgacggag

SEQ ID NO: 13284 - DNA, 756 bp, Burkholderia fungorum
atgatgacgatgaacgcgtggctcgaacctcgctatgtcgcgtggatatggcgcggctttgcgatgacgctggcgctgtcggccagcgtcgccgtttgtgcgacgctgctgggctttgcgctggcgctcgcccgcagcgctccttccgccgcgttgcgccgtgcggcggccggctacgttctgatattccggaactcaccgttgctcgttcaattgctgttctggtatttcggtgcggcggtcctgttgccggatggcttgatgaactggctcaatactccgcatgtcgtcgtgcttggacctgtcacgctgagttggccgacgttcgaattcgtcgcgggctggctcggtctcacgtgctattcgacgaccttcatcggcgaggaattccgcgcgggaatgcgcggcgtgcgcgatggccagtatcaggcggccgccgcgcttggcttgacgcggttcgcaacgtttcgccacgtgattttgccgcaggcggtgcggatcgcgacgccgccgctcgccgggcaatatatgaatgtcatcaagaattcgtcgctgacgatggccatcggcttcgccgaattgtcgtactcgtcgcgccaggtcgagacggagacgctcaagacgttccagtcgttcggaatggcgaccttgctctacattgcggcgatcgccacgattgaagtcgcgttgctgatctggcagcgccgcggcgcgtatggatcgggtggcgtgcggtttccgcgcggaggccgctca

SEQ ID NO: 13285 - DNA, 993 bp, Burkholderia fungorum
atgacgcggcgcgcttttacgcgcgccatgctggctgccgcactgaccatcaccggcacgcagggccatgcccaggcatcgcgaacggccgggtctcccgtcgccttgcgtatcggctaccagaaatcgtcgacgctaatcacgctgctcaaggcgcgcggctcgctggaacaggcgctcgcgccgctcggcgtgaacgtctcgtggcacgaattcgcaagtggcctgccgcttaccgaagcgcttaacgtcgatgcggtcgacttcagcgccgacgtcgcggatacggtgccggtcttcgcccaggccgcgcatgcgaacttcgtctatatcgcgcaggaagcgccgtcgccgggcgctcaggcaatcatcgtaagaaaagacggtccgctgcacacgctggccgacctgaaaggcaagcacatcgcggtaacgaaggcggcgggaagccactatctgttgctcgccgcgctcgccaaagccggcctttctccggcagacgtgacgatccactacctcgcgccggcggacgggcgggcggcgttcgagcatggcagcgtcgacgcctggatcacatgggatccgtatgtcgcttcggtcgacagagacaccagcgtgcgcattctcgcggacggcaacggactcgcgtcgtatcagcgttactacctcgcttcgagcaatttcgccgcggcgcaccccgcagtcattcagatcctgttcgaccagttgtctcaggcgggcacgtggctgcgcacgcatcccgaggatgccgcgaaaacgctctcgccgatctggggactcgataccacgacaatcgagcgggcgaatgcgcgccgcagttatgtggtgcgacccgtcgtcccgcagaatttcagcgaacagcagaagatcgccgatacgttcctgcaggccggcctgctgccggcacgcgtggatacgggcgaagcacagcgatgggatttcgccacgaagcgcgcggaacccgccgggagc

SEQ ID NO: 13286 - DNA, 849 bp, Burkholderia fungorum
atgctggatctcgaactgttgaacaccctgatttgcgttgtcgacgagggtagtttcacgcgcgcgggcgagcgtgtgcaccggacacaatccacggtgagccagcaggtgcgcaaactggaagagctggtcggccgaactctgctgctgcgcgatcgcaccggcaatcaggtcacggcgaccgagcacggcgagttgctcgcccaatacgcgcgccggctgctcgcgttggcgcaggaagcgcaggacgcgctggtcagcgacgtggagctgacgccggttcgcatcggcgtgccggaggatttcgacgcgcggcgcatgtcggcaatgctgtcgggtttcgtcaaggcaaaacccggcgtgcggctggagacggttgctggaatgagtgtcgatctgcaacgcaagctggcggcgggcgagatcgagatcgcgttggtcaagcgcgaaccgggcagtggcgagtgcctcgcatcctggccggaatcgctggtctgggtgcggggcgggaacgtcgaattaccggaagagtcggcggatgaacccattccgctagcgctgtttcctcacggctgcgtgtaccggcaacgcgcgattcgcagcctcgacaaggcactccggcgctggcgcatcgcgtttggaagtcaaagtctgactggcattcaggcggcggtttcgtcggggctcggggtttcggtgttgcccacgtcggcggtgcttcctgagcatcgcctgtgcgcgggcttgccgcagttgccgcccacggagcttgcgctcgtgacctctggtggcgtgctcaatgcgcttcaactggcattggtcgaattcctgagggcggagatcaaggtt

SEQ ID NO: 13287 - DNA, 2112 bp, Burkholderia fungorum
atgacgacgcttgcagcgcgcaaacgcctgcgccgtaatgcaccgtcggtggacagcgacagctaccgtgcgccggtcgaaagccgcgttacgacaatcggcgccgcgctgtcggcgttgatcgtggtcgtagccatgctgcgtcttgcacccggtgttcgcacctggctcgccgcgcccgcacgcagcgacgccgcgcagctcgccggcattctgctcttcgacctgagcgtgccgcgcattctggcggcattggtggcgggcgcctgcctcgcggtggccggcaccttattccagtcgctgacgcgcaatcctttggcttcgccggatctgctcggcattaccggcggcgcgcagctcgggttgcttgccgcgatgctggtgccttcgctggccggcgtcgcgtccgtgccgctgctgttcgcgtgcggtctcggcgcggcagcgtgcgtggccgcggccgccggcggctggcgcgcgacgccgttgcggctcatcctcgctggcagcgtttgcatgctgctgttttccgcgctgaccacgctgattctcgcgttcttcgagcagagcatcgtcggtgtgtcgttgtgggcgagcggcagtctttatcaacccggcgcggccggcttgaagaccgccgcgtcgtggctcgtgttgccgctggtcgcgttgcccttcgtgattcgcccgctcgatccgctcgcgctcggcgacgacgccgcagcggcggccggcgttcgtgtggatgccacgcggctcgcggcgatggtggtggcggtgggcttcgcgagcgtcgctgtgagtgtggctgggccgctctcgtatgtcggcctgatcgcaccgaacctgctgcgtcagatgcgcggcgcgaaggcatcgcggctggccgcgctcgtgcccttgtcggcgctcgtcggcggcgcgctggtgctcgtcaccgacagtgccgtgcaggcgctcgatctcgacgcgacactttcgaccggcgtggcgattgccttcgtcggcacaccgctgatgctcgcgatgatccgcagcggcgccgcatggtcgggcgcgttgcacgccggccaggagcgagctgctgcgcgcgcgggctcgcgcttcgtgcgcatggtgggcgcgtggccctggccgctgacggcaagcgcgctggtgctgctcggtatcgtgatcgtgtgcgcgggcgcctcgttcggtccgacgacgatcggcgtgcagcgctggctcgccgcattcgatcaccgcgacgagcttgcgggaatgctgctcgatctgcgtctgccgcgcctcatttgcgctctgctggcgggcgcattgctcgccgcgagcggggtgctgatgcaaagcatcgtgcgcaatccgctcgcgggtccggaagtgctgggcgtgacgcaaggcgcgggcctcgcgacactcgcggcactcgtgatgtggccgctcgccgcacattcgaccctggccgccgcttcgctcgcgggcggcggcatcacattggccctgacgctccttctgaatcgccgccatcgctatgcgccgctcgcggttgcgctgacgggcatcgtgatcggcacgctgtggacgaccctgtcgcaatggctcatcacccagcaaagcgtgcagcccgcgcgcttcgtggtgtggctggtcggcggtacctatgggcgcagttggggcgaagtggcgacgctgctgccgtggtgcgtgctggccgtgccggtgttcgcgttgctcgcgcggccgctcgatctgcttgccctgggcgacgaccaggccgcctcgctgggtttgccgatcggcgtgttgcgtccgctggtgctgacggtagcgacgctggctgcgtgcgccgcggtggcggcggtggggccggtcggttttatcggtttgatggcgccgcatctggcgtcgatgctcggtgcgcgtgctcatcgcacgcgtttgtggctggcggcggcgtgcggagcgctggtgctggtggtggccgatatcgcggcgcgcacgttgctggcgccacgtgagattccggctggcgtgctgaccgcgctgatcggcgcgccctatctgctggcactgctgatcgtggaggctcggcgcgagaagcggggcaaacgg

SEQ ID NO: 13288 - DNA, 3357 bp, Burkholderia fungorum
atgagacagaacatcatcaatagcaacacctattgggaccagcgtttccgtcaagattgggaaagcaacggcggcagggagcaaagccgtttttttgccgaagtggcgatcggcgcaatgccgcagtggctcgcgaacgagatcaaatggaacaaactgacggtgtgcgattggggttgtgcgcagggcgacggcacggaaacgttggcgcagtttttgtcatgggacataaccggcgtcgacttctccagatctgccattgaagccgcacagcaacgctacgggcgaatcaggttcctgcaggaaaacctgctggataagccgatgcgcccgaggttcgacgtcctgttctcatcgaacacacttgaacatttcgccaatccgtgggaagtctttgaacaggtcgcggagtacgcggcccgctttgtcgtattgctactgccttaccgcgaggtcgcccggcatgcggagcatgaggtctcgttcgacagccggaatattcctgtcgcacccaatccggcatggtctctggtgtatcactcggtggtcgatacccggcgctgggaacccagcttttggcccggtgaacagatattgctggtattcgcccgtaccgggtggcttgcccagcgccgcttttcgcttgcggacctgacgttgtaccagatgcggcaaccaggcagtgcaacgaccgtcgatacgccgcaaaactcgcccgggagcgaagcgtatacacagcacgtcaacgaacgactccacgcggtgctttccacaaaggaggcacgacatgcgcgcgagcttgaaatcgcgtgcgatgaactgatgcgtgaaaaggcgcgcgctgacgaactcgacattcaactgaatggcgagcgaatccgcggcgcggcggcggaccagcgtgcggaggcggcagaacatcaggccacggctcggcaagagcaactggcggagctgcaactccggatgagtgcgcagcaaacgcaactagacgccgcccgcgatcaggcgaaactcgtcgtcgcgctgcaagatgcggttgatcacgagcgggagaacggacgacaactggaagaagaaaaggcaagagttgttgcaacagcgcagcaagtcgaggaacggttgcactttcttcagtaccgcgagcgcgcgttgacaaccgaaatccagacgctgctcgcgaccaggagctggcgcttgaccgcgccattgcgcgtgcttcgtggctcgccgaactggatgaaaaatcggctgcgcgacgtgaactacgcctatgtgcatggcggtgtgcgtcatgttgtcggccggtgcgccggctattttttcaaacactttaaatcgccggtccggctgccggctttttcgggcgttccgccgacggtctcttccggcgtcgcggagataacacccgtttccattgccgccgatctgccgccgcagtttcataggcctgccgcagagcgagcgctcgcagatgttttcgtattcagcattatcgactggcacttcaggattcagcgtccgcagcacctggcgcgtgagtttgcgcgtgcaggacatcgcgtctacttcttttcgaatcatttcgtggatgcgaaggaacccgggttttcggtcgagcacctcgacccttctctgccgctatatcagatcaagctaaaggtgagtggagccccggcgatatatttctccgtgcccgggcagcaggcgattgaacagattctggaaggactccggctgtttcgggaatggaacggtggcggccgctcctatgctctggttcagcacggttactggatgcccgttgccacgcgtttgcaggcggattgcgtgacttacgattgcatggatcaccacgagggattcggtaatgtaccgcgcgaactgcttgagatggaagaagcgatgatgaagcgcgcggacctgctcgtggccacgtcatcatggctcgaaggccatgctcgccgatacaaccctcgtgtcgaggtgatccgcaatgccgggcagtacgaggatttctgccatccgcccggcgaatgttttgccgaccctcagggccgccgcgtgatcggctactacggcgcgatcgccgaatggttcgacgtggaactcgtggcgcgcgttgcggaggcttttcccgacgcgttggtgcttctggtgggggcggatacagccggtgtcggaacaaagctgcgctcattcgcgaacgtcgaaatgaccggcgaggttccgtatgcgcgattgccttattacctgtacggattcgacatctgtatgttgccattcagggtgatgccgctcacgctggcaactaatcccgtcaaggtctatgaatatctgggtgcgggccgttccgttgtgtcggtggatttgccggagatgacgcaattcggcgaccttgtgagggttgctggcacgcctgaggctttccttgaacagatcagatctgcgattgaggcattgcccgacagtgaggaagagaccagccggcgcaaggcgtttgccgcggggcaaacctggggacatcgcgtcgcgagttttcgcagtgccatagaggcgctcccgcgcgccaaggtcagcgtgatcgtactgacctacaacaacctggcgttgaccaaggactgcctggagagtctcgaacagcacagcaatggcgtcgatctggaaatagtcgttgtcgacaatgcttcgaccgatgggtccggcgaatacctctcgtcgtgggcagcatcgcgtcctgccgcgaaagtcatcctgaacgcagagaacctcgggtttgccggcggcaataacgctggcctcgctgcggccacgggcgactacctggtcattttgaataacgacaccgtggtcactcgagattgggcgcggcgcatggttaaccacttcaggaatcatccgcgcctggggattctcggtcccttgacgaacaacatcggcaacgaggccaaggtgcaaacgcactacacgaaccttgagtcaatgcattccgaagcagcgctacttaccggcccaaatttgggggcgctgttcgaactggatacggtcgccttcttctgcgcgatgttgccgcgctcaacctatgaattgtgcggatcgttgtgcgaggactacggccgtggattctttgaagacgacgactattgccggcgtgtgcaagctgccggtctcgtggtggcttgcgcggaagacgtcttcgtccatcatcatttgtcggcgtcgttcaacaagttgggtgaggagcgcaagcgtgcactgctggaaacgaatcgtgcaatttacgaggccaaatggggaccgtggaggccgcaccaataccggagtcagcgcgcgcggcgcaattggcggacattcgca

SEQ ID NO: 13289 - DNA, 522 bp, Burkholderia fungorum
atgcgaaccacccccgctctttcgctgcgccccgccacgctcgcggatgccgcgctcattgcttcgatccacagcagcagttggcaggccacctatcgcggtctgctgcccgacgcctttctcgacggcgaagtcgcgcgcgaacgcgccgcttactgggaagcgcgcctgagcgcgcccggcggcgaacgccgtatcgtgctgattgccgagctcgcgggcgagccggccggctttgtctgcgctgaacgtcagccggagtccgcatggggtgtgctgctcgataacctgcacgcgcggcctgcgtatcagggtctcggcgtcggcaagctgctgatgcaggccgccgaggactgggcgcgcgcgcaaggcgagttgcagctctatctctatgtgctcgaaggcaatacgccggcaatcggcttttacgaacggcaaggctggcaatttgtcggcgccgaacccgaccatatgggtggcgtggatattacggcgttgcgctacgtgtacagactcgaccga

SEQ ID NO: 13290 - DNA, 1317 bp, Burkholderia fungorum
atgagcactaccctcccggcggccgcgctggccgacaaccgcaacgcgcgcagccgggcccgcaaagcggcgctcggcagcttcatcggcgccgtggtcgactggtacgacttcctgctgtatggcatcgtcgccgcgctcgttttcaacgccgagttcttccccaaggtcagcccggcaatggggacgctcgccgcgttcgcgactttcggggtgggttttctgttccgtccgctcggcggcttcgtgttcggacacttcggcgaccggctcggacgcaagcgcatgctcgtgctcacggtcatgatgatgggcctctccaccgccgcgatcggcctgctgccgtcgttcgccaccatcggctggctcgcgccggtgctgctcgtgacattgcgcgcaattcagggcttcgcggtaggcggcgaatggggcggcgcggcgctgatggcagtggaaagcgcacctgagaagaagaaagcgttctacagcagcggcgtgcaggtcggctacggcgtgggcctcgtactctcgaccggcctgatcgcgctcatcagccgctcaatggataacgcctcgttcctgagttggggctggcgcctgcccttcctgttcagcgtggtgctggtgctgatcgcgctgtggatccgctcgagcatggaagagtcgaaggagttcgtcgagaaagtcggcgagcacggtgaacacagcgtgcgcctgccaattgtcgaagcgctgttgcggcatccgaaggctttcctgctgatcatcgcgctgcgacttgccgagttgttcacgatgtacatcgtgaccgccttcgccttgaactactccacggcgaatctgcacatgccgcgcgaattcttcctcaccatcggtctgctggtcggcgcgctcagttgcgtgacgatcccgtgcttcgcggcgctggcggaccgcttcggccggcgccgcgtgtatatcgtcggcgcgctggtcggcatgctgagcgcggtgcccttcttcctcgcactggaagcgcgctcgacggtatggatcgtggtctttgccgtcatgctcgccaacatcgcgcacgacatggtggtgagcgtgcagcagcctatgttcacggaactgttcggcacggagtaccgctacagcggagcgggtgtcggctatcaggtggcgagcgtggttggcggcggcttcacgccgttcattgcggtcgcgctggtcaattttgccggcggctcgtggcatccggtggccgcttatctggccgttggctgtctgatctcggtgctcgtggcggccagaatgaagaccgggcgcaccatcgcc

SEQ ID NO: 13291 - DNA, 114 bp, Burkholderia fungorum
atgaaagtgatggcatcggttaaacgcatttgccgcaattgcaagatcatcaagcgcaaaggcgttgtgcgcgtgatttgcagctctgatccgcgccacaaacagcgtcaaggc

SEQ ID NO: 13292 - DNA, 195 bp, Burkholderia fungorum
atgatgaaggcttccgaacttcaccagaaagatcaggccgcgctcaacaaggagctgtcggacctgttgaaggcgcaattcggcctgcgcatgcaactcgcgacccagcagctcacgaacacgagccagctgaagaaggttcgtcgcgacatcgcacgtgtgcggaccgtcctgactgagaaggcgaaccagaaa

SEQ ID NO: 13293 - DNA, 135 bp, Burkholderia fungorum
atgaacgatagcgtaaaaacctcgcttaagcggacgctggtcggcaaggtcgtcagcaacaagatggacaagacggtcaccgtgctggttgagcaccgcgtgaagcacccgatctacggcaaatacgttgtgcgt

SEQ ID NO: 13294 - DNA, 312 bp, Burkholderia fungorum
atgagcgagattcgcaagaacgatcatcgtttgatgcaggtcctgctcgcgccggtgatctccgaaaaggcgacgctggtggccgacaagaacgagcaagtcgtgttcgaagtcgcgcccgatgccacgaagcaggaagtgaaagctgcagtcgagctgctgttcaaggtggaagtcaattccgtcaacgtgctggtctcgaagggcaaagccaagcgctttggccgcttcatgggcaagcgcaaggacgtgaaaaaggcgtacgtctgcctgaagcccggccaggaaatcaactttgaagcggaggccaag

SEQ ID NO: 13295 - DNA, 1002 bp, Burkholderia fungorum
atggtcgtaggcgacgtgatgctcgattggtattggcatggttcgacctcccggatttcgccggaggcgcctgttcctgtcgtccatgtgcaatccgaagagacgcgagtgggtggggcgggaaacgtcgcattgaatgcggcggcccttggagcgcaggttcggctcctgggtctggccggagaggacgtgcacgccgaccggatcgagaatctgctgcgcgaaggtggcgtcgagtgttttcttcaacgggtcgcgggcagcaagacgatcacgaagttgcgcattctgtcccgtcatcagcagatgatccgggcggacttcgaggaccatttcccggcacgcaatggcgacgaattgatcttcagtttcgagcggcatttgcaagaggtcgatgccgtggttttatccgactacgccaaagggtcgctgcacgattcgaagaacctgatcgccgccgcgcggcgagcgggaaaacacgtgatcgtggatccgaaaggagcagatttcgagcgatatcgcggcgcgactgtcattacgcccaacctctcggagttcgaggccgtggtcggacattgcgacaccgaactcgctatcgaacagaaaggcgccgccctctgcgatgcatttgaactcgaagcggtgctcgtcacgcgtagcgagaaaggcatgacgttgattgctcgtggccatgctcctttacatttgcccacgcgcgcgcgcgaagtgttcgatgtgacgggagccggcgacacggtcgttgccacgctgagcgccgcgctcggcgcaggcatgccgctggacgaagcggtcgtgctttccaatgtcgcggcaggtatcgtcgtggctaaactggggaccgcaacggtccgccgccccgaacttcagcaggcattgcagcatgatttgcatacggcacgccgaagcaatattttcgcgcgcgtttccctgctgccttggcgagcgaaaccccgctcagagaaaacgagtaccgtgggtacc

SEQ ID NO: 13296 - DNA, 324 bp, Burkholderia fungorum
ttgtgggtgtgggtgttggtgttggtgttggtgttggtgttgggctcggagtgggagttggtgccggagttgggctcggagttggtgtcggactcggactcggactcggactcggactcggactcggactcggactcggactcggactcggactcggcgccggacttggactcggaactggactcggcgttgcagccggactcgacgtggctgtcgctgccgggcttgaagccggcgcgggcgtcgggctcggagcggggcgtggcgtcggcgtcggattttgcgttggcgcagaacccgatgtcggcgtacccgatgccggtg

SEQ ID NO: 13297 - DNA, 534 bp, Burkholderia fungorum
gtggcagaagtccaatccatcaattcgagcgtcgcgaacgcgagcggtacgaatggccgccgcgacgtgcagcaggccgacgccggcggtcaggaattcctggtctttacgctcggcgccgaagagtacggcatcgacatcctcaaggtgcaggaaatccgcggctacgacaacgtgacgcggatcgccaatgcgcccgagttcatcaagggcgtgatcaatctgcgcggcatcatcgtgccgatcgtcgacatgcgcatcaagttccatctgggccgtgtcgagtacgaccaccagacggtggtgatcatcctgaacgtcgcgcatcgcgtggtcgggatggtggtggacggcgtgtccgacgtgctgacgctcgccaccgaccagatcatgccggcgcccgaattcggcgccacgctgacgaccgagtacctcacggggctgggcacggtggacggccgcatgctgatcctgatggacatcgagaagctcatgaccagccgcgaaatggcgctgatcgaaacgctcggcgtc

SEQ ID NO: 13298 - DNA, 189 bp, Burkholderia fungorum
gtggacaccatgtctgataaaactgtcaaggtccagctcgtcaagagcctgatcggcacccgtgaaacgcaccgtgcgacggtgcgtggcttgggtctgcgccgactcaactcggttagcgagttgcaggacacgccggccgtgcgcggcatgatcaacaaggtttcgtacctcgttaaggtcatcagc

SEQ ID NO: 13299 - DNA, 447 bp, Burkholderia fungorum
atgaacaaacccgcacccgcttcgcgcaccgcttatccgcatttcctgccgatcaccacgcgctggatggacaacgacgtctacggccacgtcaataacgtcgtctattacagctacttcgacacggtggtgaacgagtacctgatccgcaccggcgtgctcgatttcgagcacggcacgacgatcgggctggtggtcgagacgcattgcaactacttcgcaccgctggtgtttcccgagcggatcgaagcgggcttgcgcgtggtgcggctcggcacatcgagcgtgcgctatgaagtggggctcttcaaggaaggcgaagaccaacccgccgcacaaggacacttcgtgcatgtgtatgtggaccgtgtcacgcggcgccccgtgagcctgcccaccgaactgcgcgcggcgctcgaaccgttgagcaccgccaggcaggcggaa

SEQ ID NO: 13300 - DNA, 864 bp, Burkholderia fungorum
atgacgaaatcgcagggcgcggcgctcgcggcgcattcgctgacggtcggctatcgcgatcacgtcgtgctccacggtctgaacctgaacatcgcggccggccgcgtcacggccttgtgcggaccgaacggctgcggcaaaagcacgctgttgcgcacgctcgccggtttgcagccggcgctgtccggcaccgtcgaggtcaacggcgtgccgctcgcttcgctccggcggcgcgtgttggcgcgcacgctgaccatgctggcgcagttcaaccagattccttcgggactcagcgtgcgcgaactggtcgcgtacggtcgttacgcgcatggcggctggcttcgcggattgtcgcgcgccgaccatgcggcaatcgacgaagcgctcgccaccagcggccttgccgccgacgccgcgcgcgacgtggccgcgctttcgggcggcgaacggcaacgcgcgtggatcgcaatggcgctcgcgcagcaggcgccgatcgtgctgctcgacgagccgactacctacctcgacatccatcatcaactggacatactgcgcgagttgcggcgcctgaatcgtgagcgcggcctcacgatcgtgtgggtgctgcacgacctgaaccaggcagcggcctacagcgacgacattgtgctcatgcgcgccggccgcatcgtcgcgcaaggctcgcccgatgcgatgctcgacccgcgtcacctgaacgagaccttcggcgtgccgatgctcaagatcgcgcacccgcaaacaggcgcgccgatgtgcgtgccggcctatgaaggcggcgcggtggatctcgacactgccgccgcctcgcttcacgaggaagccacgagcaaggacctcgccgca

SEQ ID NO: 13301 - DNA, 1200 bp, Burkholderia fungorum
atgttcccagaccgtatcttctccggcatgcggcccaccgggtcgttgcacctcggccactatcacggcgtgctgaaaaactgggtgcggctgcagtccgaatacccgtgtttcttctgcgtggtcgactggcacgcgctgaccacgcactacgaaacgcccgaagtgatcgagaagaacgtctgggacgtgctgaccgactggcttgcctccggcatcgatccggcgcaggccacgctgttcatccagagcaaggtgcccgagcatgccgaactggcgctattgctcggtatgagcacgccgctcggctggctcgaacgcgtgccgacctacaaggaacagcaggagaagctgaaggacaaggatctgtccacttacggctttctcggctatccggtgctgatggcggcggacattctgctgtatcgcggctcgctcgtgccggttggtgaagatcaggtgccgcatgtcgaaatgacgcgtgaaatcgcgcgccgtttcaactacctgtacggccgtgagccgggcttcgaggagaaggccaacgaggcggcgaagaagctcggcggcaagcgctccaagctctatcacgaactgcgcaacgcctaccagcaggaaggcgacgacgaagcgctcgaacaggcgcgcgccatgttgcaggaatcgcagagtctgtcgatgaacgaccgcgagcgcctgttcggctatctcgaaggttcgcgcaagatcattctggtcgagccgcaggccatgctgaccgaggcgtcgcgcatgccgggtctcgacggccagaaaatgtcgaagtcgtacggcaacacgatcggcctgcgcgaagacgcggagaccattacgaaaaaagtccgcaccatgccgaccgatccggcccgcgtgcgccgcaccgatccgggcgaccccgacaagtgcccggtgtggcagcttcaccaggtctacacggacgaagccacccacgactgggtgcagaaaggctgccggacggccggcataggttgcctcgagtgcaagcagccggtgatcgaaggcattctgcgcgaacagcaacccatgctcgagcgcgcgcagaagtacatggacgacccgtcgctgttgcgcgcgatcgtcgccgacggctgcgacaaggctcgcaaattcgcctcggaaacgatgcgcgacgtccgcgaagcgatgggcctctcgtacaac

SEQ ID NO: 13302 - DNA, 819 bp, Burkholderia fungorum
atgtacaaagttatcgccacggacctcgacggtacgctgctcaatgccgatcaccaggtggacccattcacggtcgccaccgtgcgcaaactcgagagcgacggcctgcacttcgtgattgctacgggccgccattattgcgacgtcgccggcatccgcgacgtgctgggcatcagcccgtatctgatcacgtcgaatggcgcgcgcatccacgcgccggacaacacggtgatccacgccgacgatctgcctcctgccatcgtgcaacggctggtgcagccggaaattgccggcgcgcatggccgtgtgatcgtcaacctgttcgccgatcaggcctggctgatcgaccgcgacgcgccggatctgctgaagtttcaccaggactccgggttcacctatgaggtgaccgatctgccgaaacatgacggtgccgacatcgcgaaggcgctctatattggcgagccggccgatctcgcgcaggtcgcggcgaatctcgcacgccaattcggcgacgcgctttacgtgacctattcgctgccggactgcctggaagtgatgacggcgaatgtatcgaagggacgggcgttgcagatcgtgcttgagcgcgtcggcgtcgatgcctcgcactgcgtggcgttcggcgacaacatgaacgatatcgatctgctggagacggctggacatccgttcatgatgaacaacgccaatcccgatctcatgacacgtctgccgaacgtgccgcgcattggcaacaacttcgaagcgggcgttgcgcaccatctgcgcaagcttttctcgctcgacgacgaattgatgtcc

SEQ ID NO: 13303 - DNA, 1191 bp, Burkholderia fungorum
atgcgggcaacacgcaagcggcgcggcgctaccgccgttcaatcacaacaggtatcgggatatcccgaccgtctggttttttgcctttcggagaaaagcgacatgacaaagacgaattcccttcacgccaggactggccgcgcacgcaagctgctgccggcgctggtcgccgcggcggcattcggcgccacggcaatgcaggcgcacgcggccgacgccgtggtgctgtacaccgccgacggcctcgaaaacctctataaagacgtgctgccggccttcgaaaagaaggaaggcgtgaaggtcaacatcgtcacggcgggtagcggcgaagtggtgaaccgcgccaccatcgaaaaggatcagccgaaggcggacgtgctcgtcacgctgccgccgttcatccagcaagccgaccagagcgggctgctgcaggcttatcagagcgccaactacaagaacgtgccggcgatcgccaaggcgcccaacggtgcatgggcgactttcgtgaacaactacttctcgttcgcgatcaacccggaagtcaccaagacccagccgaagactttcgccgacctgctgcatccggacttcagcggcaagatcgcctactcgaacccggccacggcgggcgacggcatggccgtgatcatcctgacctcgtcgctgatgggcgaagacaaggcgttcgactatctgaagaagctcgaaaacagtgccaagttccacaccaagggcacgggctatctcgacgtgctgctttcgcgtaacgaaatcgcggtcgccaacggcgatctgcaaatggatctggacgacgccgccaacggtggcctgtcgctcaagccggtgttcctcgcggccgcgcccggcggccagccgaccacgttccagttgccgtacgcgatcggcctgatcaagaacggtccgaaccaggcggaaggcaagaagctgatcgactacctgatgtcgacggaagtgcaggccaaggtgccggacatcttcggcattccgggccgtactgacgtgccgctcgccggcaagaacggcgaagccgtcaagcaggccatcgccggcgtgaagctgattccggtggactggaatcaggtgatggcgaagaaggccgactggaccgcgcgctggaagaacgacgtgatcggttcgtcgggcaagcagatcgaagtggtcaagccgaag

SEQ ID NO: 13304 - DNA, 795 bp, Burkholderia fungorum
atgcatgtgcaggcgtgccatgacggcgcgtctacgcatatcgatgtggcaaaatttgtcaaaatgaccgaatatatgcaaactgcttctgtcgatccgatcgaggttgtgcgcaggcattcgctgacgacgctggttcgcgacgaaatcgaacggcacatcatcgaaggggcgctcgcgcccggcgacaagctcaacgaagccgactgggccacgcgtctgcaggtctcgcgcggtccggtgcgcgaggcgtttcgcgcgctggagcaggccggcctcgtgcgcaccgagaagaatcgcggcgtgttcgtgcggacggtctcgctggcggaagcggacgagatttacgcggtgcgcgcggtgctcgaagaggcggcgtgccggatgctggcggcaagtatcgatgcccgcaagctcgcggtgttgcgcgattggctcgacgccatgcgcgcggcgctcgacgcgcgcgaccacgacgcctacgcgcgcgccaacgtggcgtttcacgacgcgctcgtggcggcgtcgggcaatctgaagctgtatgagacgtaccgcaggctggtgtgcgaattgagcctgtttcgacgtgccgcgctggtggtgcatgccgatgcgatggagcgctcgctggccgagcatcgcgcgatcttgacggcgctcgcttcgcgcgacgccgggcgtgccgcggcgctgatgcatgcacacgtgaacggcggcttgcagcgcgcccatgcggcgtgcgaaccggccgggccgttgggcatggtgcgcatgccgccggcatcgaacggt

SEQ ID NO: 13305 - DNA, 210 bp, Burkholderia fungorum
atgatcggcgggttcaaccagttgcagggaatcatgcgcactgtctacaaccagtacgactcgatggtgcgcccgctgcacaaatggctcgaccagcacggcgtgcggtttgaactgaatacccgcgtgaccgatcttggcttttgcgagatggacgcagcaaatgcgtggaatgcatcgaatacgagcgggagggacgctccggaaaaa

SEQ ID NO: 13306 - DNA, 399 bp, Burkholderia fungorum
gtgggtcgatcggcattaggagcggttgctatggctatgcacggtatcgttctgtttgggcatggcgcgagggatgtgcggtggcgggagccgtttgagcggttggctgtcaagttgcgggaggcttctgctggcgcacggcctgtggcgttggcgtttctcgagttgatggagccggatttgcctacggctttgggtgagcttgtcgctcagggctgtgatgtggttaccgttgtgccggtgttttttgggcaaggggggcatgtcaggaaagatctgcctctcgtcattgagcaatgccaggcgttgcatccttctgttctcattaaatgcgctgttgctgtgggtgaggatgaggcggttttggatgctgtggctcagtattgtctgcggcaggtt

SEQ ID NO: 13307 - DNA, 2103 bp, Burkholderia fungorum
gtgccccgcaagactcccatcgagcgctaccggaatatcggcatcagcgctcacatcgatgccggcaaaaccaccaccactgaacgcatcctgttctacaccggcgtgacccacaagatcggcgaggttcacgacggtgcggcgacgatggactggatggaacaggagcaggagcgcggcatcaccatcacgtcggcggccaccactgctttctggaagggcatggccggcaactatccggaacatcggatcaacatcatcgacaccccgggccacgtcgacttcacgatcgaagtggagcgctccatgcgcgtgctcgacggcgcctgcatggtgtacgactcggtcggcggcgtgcagccgcagtccgaaaccgtgtggcgtcaggcgaacaagtacaaggtgccgcgcattgcgttcgtcaacaagatggaccgcgtgggcgcggacttcttccgtgtgcagcggcagatcggcgaccgcctgaaaggcgtcgcggtgccgatccagattccggtcggcgcggaagaacacttccagggcgtggtcgatctcgtcaagatgaaagccatcttctgggacgaagagaaccagggcatcaagttcgagtaccgcgatattccgccggagctagcggcgaccgcgaaggaatggcacgacaagatggtcgaggccgcggccgaagcgaatgaagaactgctcgacaaatacctcggcggcgagacgctgaccgaagaggaaatcaagcacggcattcgcgtgcgcaccatcgccaatgaaatcgtgccgatgctgtgcggcagcgcgttcaagaacaagggcgtgcaggccatgctcgacgcggtgatcgactatctgccctcgccgctcgacgtgcccgccattaccggccacgacgaacacgacaacgaaatcgagcgtcatccgaacgacaacgatccgttctcggcactcgccttcaagatcatgaccgacccgttcgtcggccagctgattttcttccgcgtctattccggcgtggtgaattcgggcgacacggtctacaacgcgatcaaggaaaagaaggaacgccttggccgcatcctgcagatgcacgccaacgagcgcaaggaaatcaaggaagtctacgcgggcgacatcgccgcggccgtcggcctgaaggaagcgaccacgggcgacacgctgtgcgatccgaaccacgtgatcatcctcgaaaagatgatcttcccggagccggtgatctcgcaggccgtcgagccgaagaccaaggtcgaccaggaaaagatgggcattgcgctgaaccgtcttgcccaggaagatccgtcgttccgcgtgcagaccgatgaagaatccggccagaccatcatctcgggcatgggcgagctgcacctggaaattctggtcgaccgcatgaagcgcgagttcggcgtcgaggcgactgtcggcaagccgcaggttgcgtatcgcgagacggtgcgcaacaaggtcgaagacgtcgaaggcaagttcgtcaagcagtcgggcggccgcggtcaatacggccacgcggtgattacgctggagccggcgccgcaaggcaagggctacgaattcgtcgacgcgatcaagggcggtgtgattccgcgtgaatatattccggccgtcgacaagggcatccaggaaacgctgaaggccggcgtgctcgcgggctatccggtggtggacgtgaaggtgacgctcaccttcggttcgtaccacgacgtggactcgaacgaaaacgcgttccgcatggccggctcgatggcgttcaaggaagcgatgcgcaaggccaggcccgtgctgctcgaaccgatgatggccgtcgaggtggaaacgccggaagacttcatgggcaacgtgatgggcgacctgtcgagccgccgcggactcgtgcaaggcatggaagacatcgccggcggcggcggcaagctggtgcgcgccgaagtgccgctcgcggagatgttcggctactccacgtcgctgcgctccgcgacacaaggccgcgcgacctacacgatggagttcaagcactatgcggaaacgccgaacaacgtcgctgaagccgtgatcaacgcgaagcacaag

SEQ ID NO: 13308 - DNA, 849 bp, Burkholderia fungorum
atggcagctagcgaaggcacgcgcgcaatggatccgtccgagtacatcgcgcaccacttgcagaacttttccaccgcgcaccagacgtcgattttcgacattcacgtgtggaatctggacacccttttctggtcgatcgtttgcggtctggccacgatcttcatcctgcatctcgctgctcgcaaggcaacgtccggcgtgccgggccgtttccagtgcgcgatcgaaatgctggtcgaaatggtcgaggatcaatcgaagtcgatgatccacggctcgcgtaccttcatcgcaccgctggccctgaccgtgttcgtctgggtcgcgctgatgaactcgctcgactttatccctgtcgacctgccgggccacgtgattggctggctgggtctgtccgaagtcatcccgcaccaccgcatcgtgccgaccgccgacctgaacggtacgctcggcatcgcactcggcgtgttcgcgctgatgatttactacaacttcaagatcaagggcgccggcggcttcgtgcatgaactgctgtccgctccgttcggcgcgcatccgctcttgtggatcccgaaccttgcactgaacatcatcgagttcgtcgcgaagacggtctcgctcggcatgcggctgttcggcaacatgtacgcgggcgaactgttgttcctgctgattgccctgctcggcagcatctggagcttcggcgcggacacgacggtgcttggcttcatcggccacgtgatcgccggcagcgtgtgggcaattttccacatcctgatcgttctgctgcaggcgttcattttcatgatgctgacgctggtgtacatcggccaggcacacgacacgcac

SEQ ID NO: 13309 - DNA, 1422 bp, Burkholderia fungorum
atgcacgcacaaccatcgcgcaaggacggcgcagtacccgacgaagcggccgacacactcgcccccgacacgtcgactccggacaacaccgaacagggcctgccggttccgcaccgctactgggcgatgctggtcattgcgctcgccctcacgctcgcggtgctcgacagcgcgatcgccaacgtggcgctgccgactatcgcgcgtaacctgcgcgccagcgcggccggttcgatctgggtcgtcaacgcctatcagcttgcgatcaccatctcgctgctgccgctcgcctcgctcggcgaccgcatcggctaccggcgcatctatctgggcgggctgatcctgttcacgctggcttcgctgggttgcgcgctatcgacttcgctgtcgacgctcgccctcgctcgcgtgattcagggcttcggcgccgcgggcatcatgagcgtgaacacggcgctggtgcgcatgatctatccgcgcacgcaactcgggcgcggcgtcgcgatcaacgcgatggtggtcgcggtgtcgtcggcggtcgggccgaccgtcgcttccggcgtgctcgccatcgcctcgtggccgtggctgttcgcgatcaacgtgccgatcggcatcgcggccatcgtcggcggtttcaaggcgctgccgatgaaccgcggccacgaatcgccatacgactacctgagcgccgtgatgaacgcgttcgtgttcggcctgctgatttttgccgtcgacggactcggccacggcgaacgcttcggctacgtcgcgatcgaggtgatcgccgcggtggtgatcggctatttcttcgtgcggcgtcagttgacgcagcccgcacccctgctgccggtcgatctgctcaggattcccgtgttcgcgctttcgatcggcacctccatctgttcgttctgcgcgcagatgctcgccttcgtgtcgttgccctttctgctgcaggagaccttgggattctcgcaagtggataccggcctgctcatgacgccgtggccggcagtgatcatcgtcgcggcgccgattgcgggcctgctgtcggacaaggtgtcctcgggatggctgggcggcatcggactcgccgccatgacggccgggctgattctgctcgccacgctcggcccgcatccggacgtcatgcagatcacgtggcgcatggctttgtgcggcgcgggcttcggcatcttccagtcgcccaacaatcgcaccatactgtccgcggcgccgcgcgagcgcagcggcggcgcgagcggcatgctcggcaccgcgcgcctgaccggtcagacgctcggcgcggcgctggtcgcgctgatcttcggcattgcgccgctacacgggccgaccatcgtgctctacgtggccgcgtgcttttcagccgtcgccgcggtcatcagcacgctgcgcgtcatg

SEQ ID NO: 13310 - DNA, 924 bp, Burkholderia fungorum
atggagagtcaccccctgcgctactcgctgcgccagttgcgttacttcgtgatcactgcggaagcgctgtctttcacggccgccgcgaagcgtctgcacatctcgcagccgtcgatctcgacggcgcttgcggacttggaagtgtcgttcggcgtgcaactcttcatacggcatcacgcgagcggcctctcgctcacgcaagcggggcgcgatctgctcgggcaagcgcgcaatctgctgaagatcgcggaagaactacagatggccgccaaggaaatggacggcggcatgacgggcgccatcgcgctcggctgcctcgtctcgctcgcgccgccgctcatgccgaggctcatcagccgcttcacggccgaacacgcgggcatctcgttccgtaccgtggaggcgcaccaggatgggctgttgcgcggcctgcacgacggctcgctcgacatcgccctcacctacagcctcgatttgaccgaggatatcgccttcacgccactgctttcgctgccgccctacgcgatcctgccgagaacgcaccgcctcgcgcgcgcccgcaaggtatcgctcgcagaccttctgcccgagccgtacgtgatgctcgacctgccgcacagccgcgagtatttcgccgcgctcttcgatgcggtgggcaaccgccccgtgccggcgttccgttcgtcgcagccagaagttgtgcgcggcatggtggccaacggtctcggctatagcctgctcaacttcccgctcaaatcgaatcgcaccgtggatggcgaagagttcgtcattaaacgcttcaaagacaacgtcaacgcgacgatgctcggcatcgcacaatcgcgcacgatgaaaccgcgccaggtggtgcatcgtttcgcgtcgttctgcgagacctatattcgccgactgcacctcgacgat

SEQ ID NO: 13311 - DNA, 273 bp, Burkholderia fungorum
atggcacgttctgtaaaaaaaggtccgttctgcgacgcccatttgctgaagaaagttgaggcggcagcagcttcgcgggataagaagccgatcaaaacctggtcgcgccgttcgacgatcctcccggatttcatcggtctgacgatcgccgttcataacggccgtcaacacgttccggtgtacatctcggaaaacatggtcggccacaagcttggcgagttcgcattgacccgtacgttcaagggtcatgcagccgacaagaaggctaagaaa

SEQ ID NO: 13312 - DNA, 491 bp, Burkholderia fungorum
caccacaacgcgctgtggcacgcgctgaagaagaagttttccactcgtcgatcctcgatctggaagtggcaggcaagtcgcaacaggttctgctgcgcgacgtgcaataccacccgttccgtcagctcgtgctgcacgtggacttccaacgtgtcgacgcgaagaagaaactgcacaccaaggtgccgctgcacttcctgaatcaggaaacgaacccggcagtgaagctgtcgagcgcggtgatctcgcacgtcatcaacgaaatcgaaatcgagtgcctgccttcggcactgccggaattcctcgaagtcgatctggccaccatcgaagcgggtcactcggttcacgccaaggacatcaagctgccggcaggtgtgacgctggtcgcccacgtcgaagcagaaaacccggtgatcgcagctgcaacgatcccggctggtgcaatcgctgaaggcgaggccgccgctgctgaaggcgaaggcgaaacgccg

SEQ ID NO: 13313 - DNA, 1767 bp, Burkholderia fungorum
gtgaacggtgggtctttcgtcaacacgggtcacgtcgccttgacgacgggacaggtcagttttgacgatctgcagatcgctccgggcattttccagcgcaacgtcgtcctgaatacgaccggcggcgcgatcgtcattgggccgcaggggttgtccagcgcgctggtagacctggatctgatcgcgaagaccatccagatcaacggtccagtggcgaataccttcacttcggcgacggcgatcacgcgtgccgtcgccggcaccagcgccgtcacgctgaacacaggtctgtcgccctcggacaatgccaacgactggctaaccttgcaaacaggccaaccgctggccaccgcgaattccttcgcactcgacatcaccgctgcgggcagcgtgacgagcgggcgggttgaaatcatcgtgaccgacaaggggccgggcgtacgcagcgccggtccgcttgacgcatcgctcggcgatttcacgttgagttccaacggcagcgtccagatatcgaacaccacggtgacggccaacgggaatatcaactttcaggtgcaggacggcatctcgctcaccgataccagggtcaccagcggaacagcaacgcttgatgcttccggggccatcacgctgacgggcagcagcatactcaccaacggcggcgccacgctgtccgcaaacggtattacgctgacccccgacagcgcgcagaccgggtccacgctcgcctctgcaaccgcgggcgtggtgctcgacagcacggcagacatcaccaatctcggctcgctgatccaggggcaggcagcgaccagcggcgatgcgcaatcgctcggcgcggtcacgctcgatgcaagcggcaacatcctgaaccagtcgttgcccggcacccctctgggcatcctgtttggcgtcaagggcgacgttgtggtgagcgccggcggcaacatcgtcaaccagaatgcgcgaatcctgtcgaacgagaacgtgacgatcgccgccgggggggacgtcgacaacatcatcgaccacacgagcggcgtcgacaacggtgttgcatccagctattcgagcgatggctggtcgtttctgtttcttgagcaccacagcagcggcatttcggtgaactatggcgaactatccgatcccactgcgctgtcatatatcacggcggacgccggcaacgtgactatcaccggcaacaacatcaacaacgttggcggctcgatcctctcgaacgacggcgcaatcagcatcaccgcgcgtaactcgctgctcgatcagggtgtgttcaccggtcaggcgcagtttcacgagtcctgcttcatcttctgtcattcgtcggcgtcaagcgacgtgcagctatacggcggcgatatcgaggccggtacgagcatttccctgaaggctggcacgcagattctcaacacgggcggcaccgttctggccgagggcgcactgacactgaacgcgccacacgtcgttgcgcagggcgtactcggctacacagccatcgatgagaaccacgatctgaaggcctggtttggcagtgaatggtcggctatctatgcatcggatatgggcggcctgttcgatgctggctcaggtcaggtgcagattatcggagaaggggatatcgaaggtggtgcctttagtggacctggcggagtgagcgcgacgggtggaatcgtgacgcgtagcgcgccgtatcgggcgccagtgaccattggcacgcacaacagtatcgggctcatctcatggttcggcctg

SEQ ID NO: 13314 - DNA, 1236 bp, Burkholderia fungorum
gtgtcgggccttccgttttcctgcagttcagttcgcaccatcatgattattacttcgctgctcgacaccgatctgtacaagttcacgatgatgcaagtggtcttgcatcactttcccgcagcgaacgtcgaatatcgcttccgttgccgcacgccgaacgtcgatctcgtgccgtatatcggcgagattcgcgacgaagtgcgcaagctctgccaactccgcttcaccgacgacgaactcgactacctgcgccgcatgcgcttcatcaagggcgacttcatcgagtttctcgcgctgttccatctgaacgaaaaatacatttcgatcgggccttcgcccaagggcaatggcgaaatcgacatcgagatcaaggggccgtggctgcatacgatcctgttcgagattccgatgctcgcgatcgtcaacgaagtctacttccgcaacacccagcaaaagccggactatagcgaagggcgcggccgtctcgtcgagaagatcaagctcctcggcgcgcgtccggaattcgccgactgcaagatcgccgactacggtacgcgccgccgcttctcgaagcaatggcacgaggaagtgatcctcaagctcaaagagggcctcggcgagcagttcgccggcaccagcaacgtcttctacgcaatgaagcacggcctcacgccgctcggcacgatggcgcacgaatacctgcaggcgtgtcaggcgctcggtccgcggctgcgcgattcgcagattttcggcttcgagatgtgggccaaggaataccgcggcgacctgggtatcgcgctgtccgacgtgtacggcatggaggcgttcctgcgcgacttcgacatgtatttctgcaagctgttcgacggcgcgcgccacgattccggcgacccgttcgactggggcgaacgtctgctcaagcactacgaagcgaatcgctgcgacccgcgcaccaagatcctcgtattttccgacgcactcgacattcccaaagtgctgcaactctacgagcgctttcgcggccgctgcaagctggcgttcggcgtgggcacgaacctgaccaacgacctcggctataacccgctgcagatcgtcatcaagatggttcgctgcaacggccagccggtggcgaagctgtcggactcgccgggcaagaacatgtgcgaagacaaggcttacctcgcttacctgcgccaggtgttcggcattgcgcagcccgaggaagaggcggcgaag

SEQ ID NO: 13315 - DNA, 1731 bp, Burkholderia fungorum
atgaagttgtttcgcaacgccagatcgtcggtcagcggattcgcgctggtcgcactcgtctctgtttcaagcgcttttctcgagtccacgcccgcactcgcgaagccgcccgcgaaaacgcagcccgcggtactcaccgcttccgcgatcgcggtggccgacaaatacagcgccgatgccgccgagcagatcttcaaggaaggcggcaacgccgtcgacgcagccgtagcgattgccttcacgcttgccgtgacctatccggaagcgggcaacatcggcggcggcgggttcatgacgctctacgtggacggcaaaccgtattttctcgactaccgcgagcgcgctccgctggccgccaccagaaacatgtatctcgacgacaagggcgaagtcatcaagggcatgagcctgtacggctaccgcgcagtgggcgtgccgggcaccgtcgacggcatgtggcaggcgcagcgccgcttcggcaagctcaagtggaagcaggtactcgcgccggccatccactacgcgcgcgacggattcgaggtcagccagcaactgcaggaacgccgcgacgccgcggcgaaagacttcgccggcaagaccaacttcgatacctacttcggcaatctgaagcagggcgtcgacttcaaacaaccggatcttgccggtgtgctgcagcgcatttccgatcaaggcgccaaagacttctatcagggcaagacggccgatctgatcgccgcttccatgcgcggtcacggtctcatcaccaaggccgatctgcagcagtacaaagcagtctggcgtgaaccggtcgaggccgactggaacggctatcgcgtctacacggcgccgccgccgacctcgggtggtatcggtctcgtgcaactgctgaaaatgaaggccgatcttgcgcccgacttcaaggacgtcccgctgaattccgcgcaatacgtgcatctgatcgcggaaatcgaaaagcgcgtgttcgccgatcgcgcgcagtatctcggcgaccccgacttctacaaggtgccggttgcccagctgaccgacgacgcatacattgccaaacgcgccgccgaagtgaatccgaccgcgccttcggacacgaagaccgttcaggccggccttggcacgtcgatgccggagaaagcggagaccacgcacttttcggtgatcgacaagtggggtaacgccgtgtcgaacacgtacaccatcaacggctatttcggttcgggcgtggtggccgaccgtacgggcatcgtgctgaacgacgagatggacgacttctccgcgaagccgggcgtggcgaatatgttcggcgtggtgggcagcgatgcgaactcgatcgaaccgaagaagcggccgctctcctcgatgagcccgaccattctgacgaaggacggcaaggtatcgctcgtgatcggcacgccgggcggctcgcgcatcttcacgtcgatcttccaggtgatcaacaacatctacgactacaacatgccgctgccgcaggccgttgcggcgatgcgcttccatcatcaactgttgccgccggacacgattttctgggaaccgtacaagccgatcgacggcgaactcgccaaacagatcgaagccaagggttacacgctgaaggggcaggatttcagcggcgatatccaggcgatcaaggtcaacggcgatacgccggaagccgcagccgatccgcgtggccgcggtgtgacgcgtgtgatccag

SEQ ID NO: 13316 - DNA, 549 bp, Burkholderia fungorum
ttggttgccagcttatttaccagcttttgcacgcttcgcaccgtacttcgagcgagcctgcttacgatccttgacgccctgggtatccagcgagccacgaaccatgtggtaacgcacacccggcaagtccttgacacgaccgccgcgaatcagcacgaccgagtgttcctgcagattgtggccttcaccaccgatgtaagaaatcacttcgaagccgttcgtcagacgaaccttggcaaccttacgcagtgccgagttaggcttcttcggcgtcgtggtgtacacacgggtgcacacgccgcgacgctgggggcagtcctgcaaagccgggctcttgctcttcgtcgtttccgacgcgcggcctttgcgaaccagttgattgatggttggcattgtttattcctgaaattgaacaaaatcgacgcatctgtttccgggcaaagcagaaacgattgcgcatcgaacttccggaccggtagtcggcgcacgaatagacttcgcgcgcaggcattccaagaaccggaacctagcataatattccgaaattac

SEQ ID NO: 13317 - DNA, 237 bp, Burkholderia fungorum
atggacaatatcgaacagcgcgtcaagaagatcgtcgcagaacaactgggcgttgcagaagctgagatcaagaacgaagcttcgttcgtgaacgacctcggcgccgactcgctcgacaccgttgaactcgtgatggccctcgaagacgaattcggcatggaaattccggatgaagaagccgagaagatcactaccgttcagcaagcgatcgactacgctcgcgcaaacgtcaaggcc

SEQ ID NO: 13318 - DNA, 456 bp, Burkholderia fungorum
atgcggtgttccaaagaggttttcaacatggcaaagaaaatcatcggctttatcaagctgcagattcctgcaggtaaagccaatccgtcgccgccggtcggtccggcactgggtcagcgcggcctgaacatcatggagttctgcaaggcgttcaacgcgcagacccaagcactggaaccaggtctgccgattccggttgtgattacggcgttcgcggacaagagcttcacgttcgttttgaagacgccgccggcaacggttctgatcaagaaggcagcgaagatcgacaagggttcgagcaagccgcataccgacaaggtcggtaagatcacccgcgctcaagctgaagacattgccaagaccaagatgcccgatctgacggcagctgatctggacgcagcggttcgtacgatcgctggtagcgcccgctcgatgggcatcaccgtggagggcgtg

SEQ ID NO: 13319 - DNA, 603 bp, Burkholderia fungorum
atgcgaatatcgggcggtcgaaatactcctgactggtcggacgccgttattgaacgcggtacacaaggcgcacgctgcgtgtatcgaatctggaggttaaccgtgccactcaacaaagaaagcaagcaggctgtggtcgctgaggttgccgcgcaagtcgcgaaagcccagaccgtagttctggctgagtatcgtggaatcgcggttggcgatctgaccaagctgcgcgcgaaagcgcgtgagcaacaggtttaccttcgcgtgttgaagaatacgctggcgcgtcgcgctgttgaaggtaccccgtttgctccgctggcagagcagatgactggtccgctgatctacggcatctcggaagatgcaattgctgctgccaaggtcgtcaacgacttcggcaaaaccaatgacaagttgatcatcaaggctggttcctacgaaggcaaggtgatggacaaggctggcgtgcaagcgctggcaaacatcccgagccgcgaagaactgctctccaagctgttgtacgttatgcaagcacctgtttccggctttgcacgcgctctggccgcgctggcagaaaagaaacaaggcgaagaaaccgctgcg

SEQ ID NO: 13320 - DNA, 372 bp, Burkholderia fungorum
atggcaatcgcaaaagaagacatcctcgaggcagtaagctcgatgtcggttctggaactgaacgaactggtcaaggcgttcgaagaaaagtttggcgtgtcggcagctgctgttgcagtggcaggcccggcaggcggcggtgctgccgctgctgctgaagagcaaaccgaattcacggtcaacctgacggaagtcggcgcgaacaaggtttcggtcattaaggctgttcgtgaactgacgggtctcggcctgaaagaagcgaaggacctggtcgacggcgcgccgaagcctgttaaggaatcggtaccgaaggctgctgctgaagaagccaagaagaagctggaagaagccggcgcgaaggctgaaatcaag

SEQ ID NO: 13321 - DNA, 555 bp, Burkholderia fungorum
atgagcgatactccggcatccccgagcggcaaacgttggtacgtcgtgcacgcctactccggtatggagaagagcgtgcaacgggcgcttcaggagcgcatcgaacgtgctggcatgcaagaccagtttggtcaaatcctcgttccgactgaagaagtggtcgaggtaaagggtggtcacaaatcggtgaccgagcgtcgtttctttccgggctacgtgctcgttgagatggaaatgacggacgagacgtggcacctcgtaaaaaatacggcaaaggtgaccggtttcgtaggtggtgcgcgtaatcgtccgagtccgatttctccgcgcgaagttgagaagatcatgtcgcaaatgcaggaaggcgtggaaaagccgcgtccgaagaccctgttcgaagtaggcgagatggtgcgagtaaaggacggtccgtttaccgacttcaacggcagcgtcgaagaagtgaactacgaaaagtcacgagtccgtgtttcggttacaattttcggccgcgcaacgccggtcgagctggaattcggtcaggtcgaaaagctg

SEQ ID NO: 13322 - DNA, 2121 bp, Burkholderia fungorum
atggcaggtaaaacgaatacacagaagcccgcggcgaagaacgcgcaggcgagcggtccgcagtcggatccgaaagcgaaggatctcgaacagtttcgagtcagcccagaaggtgaggcgctgagaaccaatcagggcgtcaagatctctgacaatcagaacacgctgcgcgcgggcccgcgcggcccttcgctgctggaagatttcatcatgcgtgagaagatcacgcacttcgaccatgagcggattcccgagcgcatcgtgcatgcgcgcggctcggcggcgcacggcgtgtttcaggtgtacgaatcgatgcaggaatacaccaaggctgcgtttctgcaggaccccgccgtgcagacgccggtgtatgtgcgcttttccacggtacagggtccgcgcggttccgccgatacggtgcgcgacgtgcgcggctttgcagtgaagttctacacgcaggaaggcaattacgatctggtcggcaacaacatgccggtgttcttcattcaggacgccatcaaatttcccgacttcgtgcacgcggtcaaaccggaagcgccgaacgaaatgccgacgggcggttccgcgcacgacaccttctgggacttcgtctcgctggtgcccgagtccgcgcatatggtgctgtggaccatgtcggaccgcgcgatcccgcgcagcctgcgcacgatggagggcttcggcattcacacgttccgtttcgtgaatgcgcaaggcaagggacgcttcgtcaagtttcactggcgcccggtgctgggctcgtactcgctgctgtgggacgaagcgcagaagctggctggcaaagacccggattttcatcggcgcgatctatgggagtcgatcgaacggggggactttcccgagttcgagctcggcgtgcagatcatcgaggaagcggacgaacacaagttcgacttcgacctgctcgatccgaccaaactgattccggaagaacaggtgccggtgaagatcatcggcaagatgacgctcaatcgcaatccggacaacttcttcgccgagaccgagcaggtcgcgtttcatccgggccatgtggtgccgggtatcgacttctccaacgatccgcttctgcaaggtcgtctgttctcgtacacggatacgcagatcagccgcctgggcggcccgaactttcacgagattccgatcaaccggcccgtgtgcccgttcaacaacaaccagcgcgacgccatgcaccggcagaccatcaacgtcggccaggcctcgtacgagcccaattcgctgagcggcggctggccgaaggaaactgatccggcgccctccgacggcggcttcgagacctatcaggagcgcgtggaaggcaccaagattcgcgtacgcagcgaatcgttcgccgatcatttctcgcaggccgcgctgttttacaacagcatgtccccgccggagaaagaccatattgccgcggcttatcagttcgaactcggtaaggtgacgaagccggaaattcgtgcgcgcgtcgtgaacgagattctcgccaacttcgatgcggggctcgcggcacaggtggctgaagggctgggtttgccggcgccgaagaaaggcacggcgaagctgaccggtcccaaggaatcgccggcgctgagcctgctcaaccgcgtgaagccgggcatcaagacccgcaagatcgcgctgctggccgcgcccggttccgatggcgccgcgatcaaaaagctgcagcaggcgctgcaaggcgagggcgccacgccgatgctgatcgccccgacgcttgccgcgatcgacggcatggcgccggacgccacgattgccggcttgccgtcgatcatgttcgacgcggtgatcgtggtgggcggtgatcagggcgcgaaggcgctggcgcaatcgggcgacgcacggcatttcgtgcttgaggcgttcaagcatctgaaggcgatcgcggcaatcggcgcggggcgtgacgtgctcgccgccgcgcacttgccgcacaatgccgacggcgtcgcaaccggcgacgacaagcaggccgctgaagtgctgaaggcgttcatcgaggcagccgggcagcaccgcgtgtggtcgcgcgcgcagcaggctgagaccgtgccggcg

SEQ ID NO: 13323 - DNA, 906 bp, Burkholderia fungorum
atggcaaagatcggttttatcggcctcggcatcatgggcgcgcacatggcgcgcaacctcatcaagggcggtcactcgctgttcgtgaatggcgcgtacccggtgccggaagatctgggcaagacgacgagcgtcgtcgcgaattcgaccgctgtcgcgcaggccgccgacatcgtcatcatcatggtgccggacacgcctgacgtcgccaacgtgctgttcgccgacgacggcgtcgccgccggcctctcgccaggcaagctcgtgatcgacatgagctcgatctcgccgctcgacacgcaggcgttcgcgaagaagatcaatgcgctcggcgtcgactatctggatgcgccggtctccggcggcgaagtcggcgcacgtgaagcgtcgctgacgatcatggtgggcggcccggaaaaagcattcgccacggccaggccgctgttcgatctgatgggcaggaacatctcgctgatcggcgagaacggcgcgggtcagacctgcaaggtcgcgaaccagatcatcgtcgcgctgaacatcgaagccgtggccgaagcgttgctgttcgcgtcgcgctcgggtgccgatccggaacgtgtgcgcaaggcgttgatgggcggtttcgcctcgtcgcggattctcgaagtgcacggcgagcgcatgaccaaacgcacgttcaatccgggctttcgcatcgaactgcaccagaaggatctgaacctcgcactcgacggcgcacgcaagctcggcatctcgctgccgcatacggcgagcgcgcagcaactgttcagcgtctgcgcggcgaatggcggcaaggcatgggatcactcggcgatggtgcgagcgctcgaaatcatggccaaccatgaagtcgcgcaggcgccgggcagcgaagccaaggcggct

SEQ ID NO: 13324 - DNA, 4953 bp, Burkholderia fungorum
atgagccgtcgcgtcgaggagatcgcgttgaaagagccggaccgttttgtgtcggatgaatcgcccgacggctttgacgcgccgtccttcctcgccggcggcggcgagctgggcgcgctcattcgcgcttacgactggacgcagacggcgctcggcccgcccgagaactggccgcaagggctgaagatcgcgatccgtatcatgctcacgtcgcgccagccgatctggattggctggcgcgacgagctactctatttttacaacgacccatataaatcgatcattggcggcaagcatccggccgcgctcgggcagccgaccaaagtcgtgtggcgcgaaatctggaccgatatcgagccgcttctgaataccgcgctggcgggcgccgaaggcatcttcgtcgaacagaagctgctcatcatggagcgcaacggctttcccgaagagacgtattacaccttctcgtacagcccgattcccggcgacgacggcgaacccggcggcatcatctgcgccaacagcgacggcacggcgcaggtggtgggcgaacggcaactggcgctgctgaaggaactggcggcggtcagcccgaacggccgcgactggcgccacgcgtgcgagctcagcgcgcgggccttgcaggctaacccgcaagaccttccgttcgctctgttgtatgccgccgagccgggcagcgacaccgtcgcgctggttggcgcgtgcggcatcgagccgggccacgccgcggctccgcaaaccatgaagctcgacggcgaggcgctgtggcccgtcgtcgacgtgttcgatacccaggcgccgcggctggtgggtgatctgacccagcgtttcggcaccgcgttgccgagcggtccgtggcatatcccgccgcagcaggcggtcatcctgccggtgtcgcccggcagcgaatcgacgcaaacggtggttctggtcgccggcctgaatccttgccgtcttttcgacgacgcctatcgcagtttcctgaacctggccgccggtcagatcggcgcggcgatcggttacgcgcgggcgtacgaggaggagcggcggcgcgcggaagcgctggccgaaatcgaccgcgcgaagaccacgttcttctccaacatcagccacgaattccgtacgccgttgacgctgatgctcggcccgctcgaagaactgcttgccaagccgcagctggccgcaggcggcgacaacgcgcgggtaggcagcgacatcgaggaccgcgcgctgatcgagatcacgcatcgcaacggcttgcggctgctgaagctcgtcaatgcgctgctggacttctcgcgcatcgaggcgggacgcatgcagattcacatgcaacccaccgatgtcgcgtcgttcacggccgaactcgcttcactgttccagtccgcgatcgaggcggccggcctgcggctcgaagtggagattccggccgcacccgtggtcgtgcagctcgaccgcgagatgtgggaaaaggtcgtgatgaacctgctgtcgaacgcgtacaagttcacgttcttcggcacgattcgcgtcgcggttcgcgtggttgccggcgccggtgtcgaggtcagtgtgacggatagcggcatcggtattgccgaggaagaagtgccgcgcctcttcgaacgctttcatcgcgtggcgggcgcgccgggacgctcggtcgaaggcagcggcatcgggctcgcgatggtgcaggaactggtgaagttgcacggcggcacggtgcgggtggacagtgcgctcggcgaaggcgcgtgcttcactgtctcgctgccgcacggcgccgtgccggcccagcccgatgaagaatccgtgcatgccgccatgagcaggcacgcgcgcacctatgtcgatgccgcgttgcgctggagtcccgagaacgagatcgtcgccgacgcaccggccgagacggcactggccggcgcggcgccgcccatagccgcgcccgtcgccgccgcgcggctgctggtcgtcgacgacaacgcggatctgcgcgagtacatgagccgtatcctgcgcgcggcgggccacgaggtgcggcttgccaccgacggccaggccgcgctcgaagccgcgcggcaggagcgccccgatctcgtgctctccgacgtgatgatgccgcgcctcgacggcttcggcctgctgcgcgcgttgcgcgccgatccggagttgcgcgatacgccggtgctgatgctgtccgcccgcgcgggcgaggaagcgcgcgtggacggcatcgagcacggtgccgacgactatctgaccaagcccttctcggcgcgcgaactgctggcccgcgtgtcgggcaacctgcaactcgcgcgcctgcgccgcgagaccgagacgaagctgcgcgaagaatcgcgcactctggagattctcaatcgcgtcggctcgacggtggcggccgaactcgatctgaaccgcgcggtgcagatcgtgaccgacgcggccaccgaactgaccggcgccgcgttcggttcgttcttctacaacgtgctcgacgataagggcggcagctacatgctttacacgctgtccggcgtgccgaaggaaaccttcgggcagtttccgatgccgcgcaacacggcggtgttcgcgcctacgttcatgggcgaaggcatcgttcgtgtcagcgacatcacgcaggatccgcgctatggccacaacgcgccgcatcgcggcatgccggaaggtcatctgaaggtgcgcagctatctggccgcgcccgtgcagtcgcgcagcggtgaagtggtcggcgggctgttcttcggtcatccggagcccggcgtgtttaccgaacgcgccgagcggatcgtggccggcgtcgccgcgcaggccgccattgccatcgacaacgcgcgtttgtaccaggccgcgcaaaccgaaatcgccgagcgcaccaaggcccagagcgcgctgcacgatctgaacgaaacgctggagcgccgcgtgatcgagacggtggcggaccgcgaccgtctgtgggaattgagcgaggatctgctggtggtggccgatatcgaaggccgcttgcagcgcgtgagtccgtcatggagcaacgcgctcggtcacaatacgcattggctgatgtcgcgttcctatgtcgacctggttcacccggatgatgtagaggtggtccgcgcccatctggccgaactgcggcgcacgggcgtgccggtgcgttatgaaaaccgcttcaagcggatcgacggcacgtggcgctgggttgcgtggacgctcgcgctcgatcccgacacggcgcgcattcacggcgtgggccgcgacgtcacggccgacaaggaaaccaccgaggccttgcggcacgccgaagaagcgctgcgcatggcgcagaagatggaagcgatcggcaagctcacgggcggcgtcgcgcacgacttcaacaacctgctgcaggtgataggcggcaatctgcaactgctggcgaaagacgtcgccggttccgagaagcccgagcagcgcgtgcgcaatgcgctggcaggcgtggcccgcggcgcgaacctcgcctcgcaactgctggcgttcgggcggcgtcagccgctggcgccgaaggtcgtcaatctgggccgcttcgtgcgagggctcgacgacatgctcagacgcgcgcttggcgacggcgtcgaaattgaaacgatcgtctcgggcggcttgtggaatacgctggtcgatccgttccaggtcgagaacgcgctgctgaatctggcaatcaacgcgcgcgacgccatgaacgggcatggcaagctcaccatcgaagccggcaatgccgcgctcgacgacgcctacgccaagcgcaacgccgaggtcacgccggggcagtacgtgatgctggcggtcaccgacacgggtgccgggatgccgccggaagtgcgcgagcgcgtgttcgagccgttctttacgaccaagcccgaaggtcagggcacgggtctcggcttgagcatggtgtatggcttcgtcaaacagtccggcggccacgtgaagatttacagcgaagagggtcacggcacgacgattcgcatctatctgcctcgggtgcgcgagcaggaagacctcgaaacgaatatcgacgccggtcccgccaagggcggcacggaaaccgttctggtggtcgaagacgacgaggaagtgcgcaccacggtggtcgaaatgctttccgatctcggctaccgtgtgctgaaagcgaaagacgcgcaaagcgcgctcgcgatcgtcgaaagcggcgtgccgatcgacgtgctgttcaccgacgtggtgatgcccggcccgctgcgcagcaccgaactcgcccgcaaggcgcgcgaacgcttgcctgcgatcgcggtgctgttcacgtcgggctatacggataacgcgatcgtgcattccgggcgactcgacgaaggcattgaactgctcagcaagccctacacgcacgaagcgttggcgcgcaaaatccgctacgtgctgcaaacgcagaatccgcaggcggccgaaatcgccgaggccggccagcaccttctcgatatcgatccgccagccatgccggatagcgccgatagcgccgatagcgtcgccgctcagccgcggccgcggattctgctggtggaggacgacgagctggttcgcgcgagcaccgctgaattgctgcgcatgttcgaattcgacattctggaggccgaaggtgagcacgacgcaaagcagattctcagcgagcatgcgatcagcgtaatgctgaccgacgtggggctggcgggcaagtcgggtgtcgatctcgcgctggaggtgtgtgccgggcggcccgatctgcgcgtgatctttctgaccggctacgacctcgtgctgaccccggagcagcgcaaggttttgccgcacgctatcctgctgcgcaagccgtacgatctgctcgatctcatcgatgcgctgaaaacgccgctgcgc

SEQ ID NO: 13325 - DNA, 2586 bp, Burkholderia fungorum
atgccgcaagacggcgcccgcaaccagcacatcgaggaaaccgcgctcatgaaaatcatcgttatcggtcacggcatggtcgggcacaaactggtcgagtgcctcgccgaggacgccgcgcacggcctggacatcacggtgctgtgcgaagaatcgcggccggcctacgaccgcgtgcacctgtccgagtttttcgcgggcaagacggcggacgatctgtcgctggtcgagccgggtttcttcgaacgtcggaacgtgttgctcaagctgaacgcgaaagccgtggcgatcgatcgcgatgcgcgcaccgtgacggtatcgacgggtgaaacattgccttatgacaagctggttttcgccaccggctcctatccgttcgtgccgcccgtgcagggacgtgagcgcaccgattgcttcgtgtaccgaaccatcgacgatctggaagcaatgcgtgaatgcggtgcgcgttcgaagacgggcacggtggtcggcggcggcctgctcggtctcgaatgtgcgaaggcgctgcgcgacatgggcctgcaaacccacgtggtcgagttcgcgccgcgtctgatggccgtgcaggtggacgacggcggcggccgcgtgctgcgcacgaagattgaagagctgggcgtgacggtgcatacgcagaagaacaccacggcgatcgtggacggcgaagcgggcacgcaccgcatgcaattcgcggacggcagccatctcgacaccgacatgatcgtgttctcggcgggcatccgtccgcgtgacgatctggcgcgcgagagtggcctgacgctcggcgcgcgcggcggcatcgtgatcgataacgcgtgccgcaccagcgatccgcacatctatgcgatcggcgaatgcgcgctgtggaacggccaactgttcggcctcgtggcgcccggttatgaaatggcccgcgcggtggccaagcaattgctcggtggcgcggccgaattcgccggcgccgacatgagcaccaagctgaagctgatgggcgtggacgtggcgagcatcggcgatgcgcatggcagcacgccgggtagccgcgcctaccagttcagcgacgaacgcaagcaggtctacaagaaactggtggtgtccgaatgcggcaaatacctgctgggcggcgtgatggtgggcgatgcgggcgagtacggcgcgctgctacagatgatgctgaaccgcatcgagttgccggcatcgcctgaattcctgatcctgccgcaggcggacggcaacgcgaagcccgcgctcggcgtggaggcgttgcccgccggcgcgcagatctgctcgtgcaacaacgtctcgaagggcgaactgtgcgccgcggtgtgcgcgggcgcgaccgacatcggcgcgctcaaaggcgcgaccggcgccggcacctcgtgcggcggctgcgtgccgctcgttacccaggtgatgaaggccgagatgaagaagcagggtctcgcggtcaacaaccacgtctgcgaacactttccgtattcgcgccaggagctgtatcacatcgtgcgtgtggaaggcgtgcgtagcttcggcgcactgctcgcgaagcacggccacggtctcggttgcgacatctgcaagccgctggtcgcgagcattctcgcgtcgtgctggaacgagttcgtgctgaagaaagaacacgcctcgttgcaggacaccaacgattactaccttgccaacatccagcgcgacggcacctattcggtcgtgccgcgcatggcgggcggcgaagtgacgcccgacggtttgatcgcggtcggccaggtggcgaagaaatacggcctctacacgaagatcaccggcggtcagcgcgtcgatctgttcggcgcgcgcgtcgaacaattgccgctcatctgggaagaactgatcgccgccggtttcgaatccggtcacgcgtacggcaagtcgctgcgcaccgtgaagtcgtgtgtcggttcgacgtggtgccgatatggcgtaggcgattcggtgggtctcgcggtcgagatggagaaccgctacaagggtctgcgcacgccgcacaagatcaagttcggcgtgtcgggctgcacgcgcgaatgcgcggaagcgcagggcaaggacgtcggcatcatcgcgacggagaagggctggaatctctacgtatgcggcaacggcggcatgaaaccgcgccacgctgaactgctcgcatcggacctcgataaggaaacgctggtgcgctacatcgaccgtttcctgatgttctacgtgcgcaccgccgaccgtctgcaacgcaccagtgtatggcgcgacaacctggagggtggccttgaatatctgatcgacgtggtcgtcaacgatcgcctcggcgtggccggcgaactcgagtcggagatgcagcacgtggtggacacctacgaatgcgaatggaagaaggcggtcaccgatctcgaaacgcgcaagcgcttccgtcatttcgtcaacagcggcgagtccgacagcaacctcgctttcgtcgaggaacgcggccagatccggccggccacgcccgccgagcgacgctcgaagctcgccgcgattcccgtggtcgccgaaaccgtc

SEQ ID NO: 13326 - DNA, 1353 bp, Burkholderia fungorum
atgactcaatcggctaaggcagcccaatcggcattccgcgcgcaactgctgaccttcaacggcgatcccgcgcaatcacccaacgcggcggtcttcaacgaggacggcctgctgatcgtcgaagacggccatgtcgtcgcggcgggcgcctatgccgcgctcgcgccgcaactcgcgcccggcacccaggtcgtggagatgcgcgacaagctgatcgtgccgggcttcatcgacacgcacattcattatccgcagacggacatgatcgcgtcgcccgcgccgggtttgttgccgtggctcgagacgtacacgttcccgaccgagcgccgcttcgccgacccggcgtatgcgcgcgacacggcgagctttttcgtcgaggaactgctggcgtgcggcacgaccaccgcgctcgtgtattgcacggtccataaggaatcggccgacgcgctcttcaccgagagcgaagcgcgcaatctgcgcatggtggccggcaaggtgctgatggaccgcaactgccccgaattcctgcgcgacaccgcgcaatcgggctacgacgacagcgccgagctgatcggccgctggcacaatcgcggccgccagatgtacgcgctcacgccgcgtttcgcgccgacttcgaccgaagcgcaactggaagcgtgcggcgtgctggcgggcaagcatccggacatcttcatccagagccacgtcgcggaaaatcacgatgaagtgaaatgggtggccgatctgttccccggccaccgcagctatctggacatctacgatcactatggcctgctgcgccgccgtgccgtgtacgggcattgcatccacctcgacgaggaagaccgcaagcgtatggcgcaaaccggcacggtcgcctcgcactgcccgacttcgaacctgttcctcggcagcggcctgttcgacttcgacaaggcggataaagccggcatgccgatcgcactggcaacggacgtcggcggcggcacctcgttctcgatgctgcagaccatgaacgaagcgcacaaggtcgcgcgtctgaccggccatcatctgacggctacgcgcatgttctatctggcgaccgccggcgccgccgaagcgctcgatctcgcggacaaggtcggcacgttgaagccgaagtcggaagcggatttcgtcgtgctcgatccgcgcgcaacgccgctgctcgcgcgccgcaccgggcgcaccgaatcgctggaggaactgctgttcgcgttcgcgctgctcggcgacgatcgcgcgatctatgaaacgtatgcggccggcaagcgcgtgcaccgccgcgacgacgtgcggcaatatgcatcgggcgcggagagagtcgcggct

SEQ ID NO: 13327 - DNA, 276 bp, Burkholderia fungorum
atggcgatgaaaaaaaccgaccttgaaaagaacaaggcgctcaagctgaacaatgcaatgaagctctcgacggccgagcgtttcggcaaagcggcggccgccgagccgaaactcgatcgccgcgaacagcgcaagctcgatcaggcacagggtctcgtcgcattcgcgtgcaagctgaacggcgatctggtgaccgaactgaaagagcgggccgcgacccatccagaaggaatgacagggctgctgaacgaagtcatcaagcgaggccttgcgggc

SEQ ID NO: 13328 - DNA, 1173 bp, Burkholderia fungorum
atgcgacgcggcgcgcaacacctcgtcgggacgaagcgaggcaggacaggacaagacagcgcgggtacatgccccgagccggatggcgatccgcgcttcacgcgccgtcagtggtcacgcgcattttcaccctactcaggagagtcacccatgttgatcgacgttcacgcgcacctcttcacccccggcatgctcaagcgccacgatttctgggggccgttcatgaagacccgggggctgacggtcgggcacttctcgctcggcaccacccagccctcgaaagcccgcgatgacgacgaagccgaagcgaacctgctcgcgcggatgacgcacgcggcgcgccgcaagctgatggccgagcgcggtgtcgacaagctcgtgctctcgacgccgtcccatgcgttcatgtactgggccggcgagttcggcgacgaatacgcgagcatctgcaacgacgaattgtcggcgttctgcgcgcaggatccggagcatttcgcattctgggcgcacgcgaacctggccaacccggcgcaggccgtgcgcgagatcgggcgcgcggtgacgcaactgggcgcgaagggcgtgtgcgtcggcggcgcgaacttcaacggtctggaggcccacagcgaggagcttttcccggtatgggaggcgctgtcgaagctcgacgcgccgatcatggtgcacggcttcaaccagtcgatctactggggcgagaagcacaccgacgacaagttcgagaccacctcgatcgtcggcgactgcgtcgacgagacgctgttcttctggaacctgatcaacggcggcgcactcgacacctttccgaacctgaagacctacatcacgcatgcgggcggcatggcgatctttcaactggggcgcctgaacgacctgaaccgggtaatggcgcctgactcgcgcaaccagcgcgagctgatcgaatatctgccgaacttctatttcgatctcgacgtgcacgcgcccggtctgcgacgcggcgtggtcgacgtggtcggcgtcgataacctcgtctacggcacgaacttcggcggcgcctacgagcatggagacctgaccgaggggctgggccttaccgacggcgagcgcgagaagatccgcagcggcaatgcgcgcaggctgctgaagctcgacgctcacgagccggtcgcggca

SEQ ID NO: 13329 - DNA, 1398 bp, Burkholderia fungorum
ttgcggctcggcctgctcaccgcgctggtgatcggttcgatgatcggcagcggcgtcttctccctgccgcagaacatggcatccggcgcgggcgccgccgccgtgctgatcggctggctgatcaccggcgtcggcatgttgatgcttgcgtttgtctatcagacgctgacaacccgcaagcctgaactcgacaacggcatctacgcttatgcgcgcgccagtgccggcgagttcgtcggcttcaattcggcctggggctactgggtcagcgcgtggatcggcaatgtcggctatctcgtcatcgtgttcggcacgctcggctacttctttcccatattcggcgacggcaacacgcccgcggccgtgctgggcgcgtccatcgcgctatggatcatgcatgccgtgatcctgcgcggcgtgcgcagcgcagcggtgctcaacgcgatcaccacggtcgccaaggtgatcccgctgctgctgttcatcgtgctcgcggccatcgccttcagaagccatgtgatcgctcaggacttctggggcaacgcgaagctcggcagcgtcttcacgcaagtcaaaagcaccatgctgatcaccgtgtgggtgttcatcggtatcgaaggcgccagcgtgttctcggcccgcgcgcagcggcgcgaggatatcgggcgcgccacgctgctcggcttcgtggtggtcctgctcctgctgatggcggtctccctgctgtcgctcggtatcgtgccgcaaggcgagctcgccgcgatgaagaacccctcgatggccggcgtgctcgacaaggccgtcggtgcctggggcgcggtgctcatcagtatcggcctgctggtctcggtgggcggtgcgttgctggcgtggaccctgctggcggcggaaacactcttcacgccggcgaacggcggcgtcatgccgaagtttctggcgcgcgaaaacagtcacggcgtaccggccaatgcactctgggtgaccaacggactggtgcaactgttcctgatcatcacgctcgtctccaacgcgacctatcaggcgctgatttcgcttgcgacttcgatgatcctgatcccgtatctgttctccgctgtctacgcgactggcatcgccatgcgcggcgaaggttacgcgccggcggaaggcgcgcgcacccgcgacatgctgatcggcgcggccgcaaccgtttattgctgctggctgctgtatgccgccggccccaagtatctgctgctctccgctctgctctacgcgcccggcgtgctgctgtacggctgggcgaaacgcgaacgcggcgcacgtctgttcaagccgttcgaagcggtgatcctcgcggctctgctcatcctcgccgccgtggcggcatggctgctttccaccggcgcgctcggtttg

SEQ ID NO: 13330 - DNA, 1089 bp, Burkholderia fungorum
atgattccagtcaccatcctgaccggctttctcggcagcggcaaaaccaccctgctcaagcgcatcctgaatgaaaagcacggcatgaagatcgccgtgatcgagaacgagttcggcgaagaaaacatcgacaacgaaatcctcgtgcaggacacgggcgagcagatcatccagatgagcaacggctgcatctgctgcacgattcgcggcgacctttcgcgcgtgctgggcgatctggcggcgcagaagcaggccggcacactggatttcgaccgcgtggtgatcgaaaccacgggcctcgccaacccgggcccggtcgcgcagacgttcttcatggacgaccagatcgccaacgaattcctgctggacgcgatcatcaccctggtcgacgccaagcacgcgaatcaccaactggacgaacacgaagtggtgcagcgccaggtcggtttcgccgatcgcctgttcatcaccaagtccgatctggtcgatgaaaagcacctggccgatctgcgccaccgtctgctgcacatgaacccgcgggcggcgatcaaagtcgtcaatttcggcgaagcggacatcaaggaaatcttcgacctgcgcggcttcaacctgaattcgaagctcgagatcgacccggatttcctcgtcgaagacgagcacgcgcacagccatgctcacgcgcatgacgagcacggccatacgcacgacgatcacgcgaactgcgatcacgatcacggccattgcgatcacgaaggccacgatcatgggcatcaccaccaccatgcgcaccatgacgacaagatcaagtcgttcgtctaccgcaacgaccgtccgttcgatccgaacaagctcgaagacttcctcggcggcattctgcagatttacggcgaacggctactgcgttacaagggcgtgctgtatatgaagggtgtagaccgcaaagtcgtgtttcagggcgtgcatcagatgatgggaagcgatctggccgcgaaatggcagccgatcgagaaaaagaccaacaagatggtgtttatcggtatcgaactgccgcaagacctgatcaccgacggtctggacgcctgcctcgtc

SEQ ID NO: 13331 - DNA, 1278 bp, Burkholderia fungorum
atgaagattcatattcaaggcggcacgctgatcgatccggcggcgggcaccgaacagcagcaggacatttttatcgcggcgggcaagatcgccgccatcggcaatgcgcctgcggatttcaacgcggacaagacgatcgacgcccagggcctccatgtcatgccgggtctggtcgatctgtccgcgcgtttgcgcgagccgggctacgaacacaaggccacgctcgaatccgaaatgaccgcggcgctcgcaggtggcgtgacgagcctcgtctgtccgccggacaccgatccgacgctcgatgaacccggcctcgtcgagatgctcaagttccgcgcgcgcaatctgaaccaggcgcatgtgtatccgctcggcgcgctgacggtcggcctcaaggggcaggtcatcaccgagatggtcgagttgaccgaagcgggctgcatcggcttttcgcaggccgacgtgcctgtggtcgatacgcaggtgctgctgcgcgcgctgcaatacgcgaagacctacggctataccgtgtggctgcgtccggtggatgcgtatctcggcaagggcggcgtggccgcgagcggcgcgctggcgtcgcggctcgggctgtcgggcgtgccggtatcggcggaaaccatcgcactgcacaccatcttcgaactggtgcgcgtgactggcgcgcgggtgcatctgtcgcatgtgtcgtcggcggcgggcattgcgttgatgcgcgcggcgaaggccgagggcttgccggtatcgtgcgacgtcacggtgaatcacgtgcacctgatcgacctcgacatcggctacttcgacgcgcagttccggctcgatccgccgctgcgccagcagcgcgatcgcgaggcgatccgcgcgggtctcgtcgacggcacgatcgacgcgatctgctccgaccacacgcccgtggacgacgacgaaaagctgctgccgttcgccgaagcgacgcccggcgcgaccggactggagctgttcctgtccttgacggtgaagtgggcggacgaagcgcgcgtgccgctcgccaaggcgctgaaccgcatcaccgcggcgcccgccaaggtgctcgaactggacgcggcaggccgtatcgcggtgggcggcgtggccgatctgtgcgtgttcgatcgcaacgcgcattggcgcgttgagccgcgtgcgctgaagagccaggggcacaacacgccgttcctcggctacgaactgccggcacgtgtgcacgcgacgatcgtgtccggtcacgtcgcattcgaacagcgc

SEQ ID NO: 13332 - DNA, 492 bp, Burkholderia fungorum
atgaccgaccaaacttctacgcggtttcctccgacgagggacgcccatgccccggtaccatccggcgacaatagtttcgcatggtctgatgcgcgcctgttgggcttcgcattgatggacgaggtgcacaaagaattctatgcggttgcgctgaatctggtgacctgcaccgacgcgacggctgccaccgcgatagaccggttcgaaagacatgcggttagccatttcgagcaggaggaccagtggatgcgctcgacgaactttcccccacgtgactgccatattgacgaacatgccgccgtcttgaagtcggtcagtgaagtcaaggaggcggtcgaacaggggcgggccggcgccgaaatggttcgagatcttggcatgcacctcttcgagtggtttcctggacacgcggactatctcgactctgcgctggcggcatggatgatgaagcggacgatgggtggaaagcctgttgtgctaagacggaaaatt

SEQ ID NO: 13333 - DNA, 843 bp, Burkholderia fungorum
atgaaggagagttggcgcgttgcgggtctcgccggggtcgacgttcacgacgacgcgcgggccatgcgggcatggcgctggatgcagtgggtgctgttcgctctcagcctgcttgcaattcccgcgttctatttcgaactggccgctgcgtcccggtttcatctggccggccgtgcgctttatgcgtccatgtccgcgggattcacgatggtccttggccggatcgcctttctcagccgcaagcccgaacggttcatcacacgcaacgcttacgatgtcctgatcgcagcgggctcggcgatcagcgtggcgtggggcgcgttgccgtggtcgccgctcgaatggctgttgcgcgttgtcttcgtggggctggtggcggcgcgcatcgtcgtgtcgttgcgaagctttttctccccgggccgcctggggttgctgctggtgatagccgtgttgctgctcgcttcagcgggggcggggttttactggctcgaaccgggcgtgcatacgtacgcggaaggcgtctggctcgcattcgagagcagcgcgacagtcggctacggagacatggcgccgaccacgcccgcatcacgcgttttcgccgccttcgtggtgttgctcggctacggcttgttgtcgctggtcttcgccagcattgccgcgacgttcgtcgagcaggaagagcggatcttgcggcgggaaatgcatcgcgacatcaaggcactgcgcgacgagattgccgcgttgcggcaagacgtacaggcggcggcaggcggcgaagcacgcgttgctgccgcttcagccgggccggtcaaaccggcggcgtctcatccgggcgaatcgcac

SEQ ID NO: 13334 - DNA, 1098 bp, Burkholderia fungorum
atgtccggcaacacgctcggtacgcttttcactgtcacgaccttcggcgaatcgcacggtcccgctatcggctgcgtgatcgacggctgcccgccgggcctggcgctcaacgaagccgacatccagctggagctcgaccgccgcaagcccggcacgtcgcgccacgtcacgcagcgtcaggaagaagacaaggtcgagatcctctcgggcgtgttcgaaggccagaccaccggcgcgcccatcgcgctcctgatccgcaacacggaccagcgcagcaaggattacggcaacattgccgacacgttccgtccgggccacgccgactacacctactggcagaaatacggcattcgcgactatcgcggcggcggccgttcgtcggcccgtctcacggcgccgacggtggccgcgggcgcggttgcgaagaagtggctgcgcgagaagttcggcacggagattcgcggctatatggccgcgctcggtgaaatcgacgtgccgttcgtcgactgggcgcacgtgcgcgaaaacccgttcttcgtgcccaaccagcagatcgtgccgcaactggaagcgtatatggacgcgctgcgcaaggaaggcgactcgatcggcgcgcgcatcaacgtggtggcctccggcgtgccggtcggcctcggcgagccgctgttcgaccggctcgacgcggacattgcgcatgccatgatgggcatcaacgcggtgaagggcgtcgaaatcggcgcgggctttgcgagcgtcgcgcaacgcggttcggtgcacggcgacgaattgacgccggagggcttcgtcggcaatcacgcgggcggtgtgctcggcggtatttcgaccggacaggacatcacggtgtcgatcgcgatcaagccgacttcgagcattcgcacgccgcgccgctccatcgacaaggcggggcaaccggccgtcgtcgaaacgtttgggcggcatgacccgtgcgtcggcattcgcgccacgccgatcgccgaatcgatgctcgcgctggtgctcatcgaccacgcgctgcgccatcgcgcgcaatgcggcgacgtgtccgtcagcacgccgaagatcgcggcgagcgcgcct

SEQ ID NO: 13335 - DNA, 2739 bp, Burkholderia fungorum
atgcctgaagaacgaagccttgaaggtaagaccctgctattggtcgacggttcgagttatctgtaccgggcctaccatgcgatgcctgatctgcgcggccccgacggtggtccgacaggtgcgctctacgggatgatcaacatgctgcggcgcatgcgcaaggaagtcacagcagagtatagcgcgtgcgtgttcgacgccaagggcaaaacgttccgcgacgactggtatgccgactacaaggcgaaccgtccgtccatgccggacgatctctcgcgtcagatcgagccgattcatgtggccgtgcgcgcgctcggctggccgctgctgatgatcgaaggcgtcgaggccgacgacgtgatcggcacgctcagcaccgaggcggaaaagcgcggcatgaacgtgatcgtgtcgactggggacaaggatctggcgcagctcgtgtcggatcatgtcaccctcatcaatacgatgaccaacgaaaaactcgaccgcgccggcgtgctcgccaagttcggcgtgccgccggagcgcatcatcgactacctgtcgctggtcggcgataccgtcgacaacgtgccgggcgtcgagaaatgcgggccgaaaaccgcggtcaaatggctgacgcaattcgactcgctggatggcatcgtcgcacatgcggacgaaatcaaaggtgcggtaggagacaatctgcgccgagcgctcgattttctgccaatggcgaagaaactcgtcaccgtcgagcgtaattgcgacttgaccgaccatatcgtgtcgatcggggaaagcctgcaaagccagccggaatcgcgcgcggaactgcgcgaggtgttcacgcgccacggcttcaagacatggctgcgcgaagtggaaatcgcggatgcggtggaaggtccggaaaccgacgtgccgccggctttgtccgtggatcacgagcggcattacgacaccgtgcagacgtgggagcagttcgacgcgtggctcgggaagatcaatgcggccgaactcacttccttcgataccgaaaccacgtcgctcgatcccatgatcgcgcagatcgtggggctgtcgttgtcggtcgaggccggccgtgcggcttatgtgccgctcgcgcatcgcggcccggacgcgcccgtgcaattgccgcgcgacgaagttctcgccaggctcaagccgtggctggaaagcgccgggcacaagaaggtcggtcagcatctcaagtacgacgagcaggtgctggcgaactacggcatcgaaatgcgcggtatcgaacacgacacgctgctgcaatcgtacgtggtcgaatcgcatcgcacgcacgacatggacagcctcgcgctgcgccatctcggcgtgaagacgatcaagtacgaagaggtggcgggcaagggcgcggggcagatcggtttcgacgaagtcgcgctggacaaggccgcggaatacgcagcggaagacgccgacatcaccttgcggctgcaccaggtgctgtacccgcaagtggcggcggagaagaccctccagtacgtttatcacgacatcgagttgcccacctcgcgcgtgctgcggaagatggaacgtaccggcgtgctgatcgattcggagaagctgcgtcagcaaagcagcgaaatcgccacgcgtctgatccagttggaaagcgaggcgtatgtgctggccggcggcgaattcaatctgggttcgcccaagcagatcgggcagatcttcttcgagaagctggagttgccggtggtcaagaagaccccgagcggcgcaccctccaccgacgaagaagtgctgcaaaagctcgccgaagattttccgctgccgaagattctgctcgaacaccgtggcctgtcgaagctgaaatcgacctacacggacaagctgccgcgcatggtcaacgctaccacgggccgcgtgcatacgaactacgcgcaggccgtggcggtcacggggcggctcgcgtcgaacgacccgaacctgcagaacattcccgtgcgcaccggcgaaggccgccgtattcgcgaagcgtttattgcaccggccggacacaagctggtctccgcggattattcgcagatcgaattgcgcatcatggcgcacatttcgggcgacgaatcgttgctgcactcgttttcgcaaggtgaagacattcaccgcgccaccgcggcggaaatcttcagcgtgacgccgctcgaagtctcgaacgatcaacggcgcgtagccaaggtcatcaactttggcctgatctacggcatgagttcgttcgggctcgcctcgaacctcggcatcacgcgcgacgccgccaagctctatatcgaccgctatttcgcacgttaccctggcgtggcgcgttatatggacgaaacgcgcgtgagcgcgaaggccaaaggctacgtcgaaacggtgttcggccgccgcctgtggctgcccgagatcaacggcggcaatggtccgcgccgccaggccgccgagcgcgccgcgatcaacgcgccgatgcaaggcacggcggccgacctgatcaaactctcgatgatcgcagtgcagaagtggatcgaagagtcgaagatcggcacccgcatgatcatgcaggtgcacgacgaattgattctcgaagtaccggacgcggaattgtccgacgtgcgcaagcgcctgcccgagttgatgtgcggcgtcgccgacctgaaagtgccgctggtcgccgaagtgggtgcaggcctgaactgggaagaagcgcat

SEQ ID NO: 13336 - DNA, 573 bp, Burkholderia fungorum
atggcgagcagtacgcagcaaaccaaacagcccatcgacgtggtggcgctctttccgcaggtcgcggatatccaggacgaagccttgcgcaaggctgtcgtggtggtctggcaagagctgtgggaaatgagtgcatggaagcggctggaggaagtgccgacctcacccgagattccctatccgaccctgccgcataaccagtgtgtgctcgacatggcgatgtccgtcgcggacctgttcgagcgccatcacggcctcaaggtcaatcgcgactatctgatcgccgccgcggtcctgcaagacgccagcaaggtggtcgaaatggagccgggcgccgaaggcaaggtggcggccacggcgctgagcaagcactatccgcacgctttctgggccgcccatctggccttgcgccacggcgttccggatgaggtcgtgcacgtcctgctgacgcactcgccgcaatcgccgaagttcccttccaccatcgaaggaaagattctttattacgtcgaccagatcgacgtaatcggcattttcaaggaccgctggcgcaaggatctgtacatcacgaag

SEQ ID NO: 13337 - DNA, 756 bp, Burkholderia fungorum
atgtacctacaactcaccggcactcacgttcgcgtgcttggctcgatgcatctctttcccgcgaccagtcgcagaacgccgccgtggatcgctgaagcgtatgactgggccgaagcgctcgtcttcgagtccgatccgccgacgattctcccgttgctgaaggccgccgggcaagacggcgccgcccggttgcagccgctgctatccgccgacgcatggcagcagcttcaagccgcgtggcctgttgaaggcccgctggcgccgctcgtcgatctgcgtccgtgggccgcgctgatcgtcgcgccgacgctgttccagcacgtcgtcgaaggtgtcgagccgcgcatgttgcgctcggcgatcgcgcaggccaaaccgtatcggtatctcgagaccgcgcaggaggtggcggcggcgctcgattcgatcccgctcgatgcgctcggcgcagcgctcggcctgctgatggccgatctcgacgaaccgcagcgcacgctcgagcgcatgcatgcggcctggctggaaggcgatctgcccgccgtgcaccgcatcgccgtcgaatcgccgatgttcaatctgcccggcatccggcacgcgattctcgacgcgcgcaatcgcgcctgggccgcgcgcctggccgagtggctcacacggccggaacgcacgttggtggtcgtcggcgcgctgcatttgtgcggacccggcaacctgatcgaatgtctcgcgcggcccgtcgagccggtctttgcccatcca

SEQ ID NO: 13338 - DNA, 744 bp, Burkholderia fungorum
gtgaccagcgcacgcacgcctcgccgcaagaccgttgcaggagcgtcggcgcagcaggtcggcctgaacttcgagacgccggacgacattgtctgcggcgtcgacgaagcggggcgcgggccgctcgccggcccggtcgtggccgcggcggtgattttcgatccggccaagccgatgattcgcggcctcgacgattccaaagtattgaccgcgaaaaagcgcgacgaactgtacgacaagatcgtcgaccgggcgctggcttactgcatcgcttcggcatcggtcgaagaaatcgattcgctcaatatcctgcatgccaccatgctggccatgaagcgcgccgtggaaggtctgtccgtcgtgccgacgctcgtgaagatcgacggcaatcgctgtccgacgctgagcgttcgcagcgaggcggtgatcggcggcgacgcgctcgtcaaaagcatttcggccgcctcgattcttgccaaggtcacgcgcgaccggatgctgctcgaattgcaccaggcgcatcccgtctacggcttcaatgcgcatgccggttacggcacgccgcagcatcttgcggcgctgcgcgaacacgggccttgcgagcaccatcggcgctcgtttgcgccggtgcgtgaagcgcatctgcggttgggcacgggcgtgccgctgccggccggcaatgtgatcgtcgtctccgaagtgatgctcgacgacgacgccttcggcgagcgcagcggcgccgcc

SEQ ID NO: 13339 - DNA, 1218 bp, Burkholderia fungorum
ttgcaacccgcttcccccgtgcccgacatcccctatctcgaacgcggcacacgcgcgtactggcgcgccagcatcgcgctgctgttcgccggctacgccacgttctcgctcctttattgtgtgcagccgctgctgccgtcgttttccgcggcgttcaacgtaacgccggcacaaagcagcctgtcgctctcattgaccacggctgcgctcgcgcttgccgtgttcgtcgccggcttcatctccgaaggctggagccgtcacaagctgatgacgctgtcgctcaccatttcggcactggcgaccatcggcgtgtcgatcgcgccgcattggcatcaactgctcgtgctgcgcacgctcgaaggtctcgcgctcggtggcgtgcccgccgtcgcaatggcctatctcgcggaagaagtgcaccccgacggcctcggcctcgcgatgggcctctatgtcggcggcacggcgatcggagggatggccgggcgcgtgattaccggcgtcgtcgcggatcttttttcgtggcgcgtcgcgatcgggacgattggcgtgctcgggctactgtccatgctcgcgtttcgcgcgctgctgccgccgtcgcgtcatttcgtgccgcggcgcggactcggcttcacgcatcaccgtaccgcgctgctcaggcagttcacgcggcccggcctgcctctgctgttcctgctcggcttcgtgctgatgggcagcttcgtcacgctgtacaactacatcggctaccggttgctggcgccgccgtaccgattggatcagacggaaatcggcgcgatcttcgtcgtgtatctgacgggcgtggtggcctcgccgtggtcgggacgcatggccgacaccttcggccgcgcacgcgtgctcaccgccagcctgctattgatggcgttcggtctcgcgctcaccatgctgcatccgctaacggcgatcgcggccggcattgcgtgcgtgacgttcggtttcttcgccgggcactcggtggcaagcggctgggtcggacgtctcgccaaagatgccaaaggtcaggctgcggcgctctatctgctcgcgtattacatcggctcgagcgtggtgggctcgtatggcggccacatgtggacgagttacggatggaacggcgtcgccggactggtcggcgcattgctcgtcatcggcctgatagcggcggcgcgtctgcgcaaacgggagcagcctctcgcg

SEQ ID NO: 13340 - DNA, 1068 bp, Burkholderia fungorum
atgccgcgccccctttcagccacgatccacacctccgctctcgccaataatctcgccgtcgcccggcgttacgcaccgaaatccaaaatctgggccgtcgtcaaggccaatgcttacgggcacggtcttgcgcgcgtttttccgggcttgcgcgcaaccgacggcttcgggttgctggacctggaagaagccgtgaagttgcgtgaactgggctgggccgggccaattcttctgctcgaaggctttttccgcccgaccgatatcgacgtgatcgaccgctacagcctgaccaccgcgctgcattcggacgagcaactgcgcatgctggaaatggcgcgcctgtccaaaccggtcaacatccagttgaagatgaacaccggcatgaaccgtctcggttacacgccggagaagttccgcgccgcgtgggagcgggcgcgcgctgcccagggcgtcggccagatcaccttgatgacccatttctcggacgccgacggcgaccgcggtgtcgactaccaggtggaggcattcgagcgcggcgcgcagggcattgccggcgcgcgcagcctcgccaattcagcggccacgctgtggcatcctgccacgcacttcgactgggtgcgcccgggcatcatcctgtacggcgcgtcgccgtccggcgtgacggccgcgatcgaaggcacgggtttgcagccggccatgacgttcgcctcggaactgatcgccgtgcaaacgctccacgaaggccatacggtcggctacggttcgtcgttcaaggcgcgcggctcgatgcgcatcggcgtggtggcgtgcggctacgcggacggctatccgcgcgtcgcgccggaaggcacgccggtgatcgtcgagggcgtgcgcacgcggatcgtcgggcgcgtctcaatggacatgctcaccgtggacctgacgccgattcctaccgccaacgtcggctcgcgcgtcgaactgtggggcaacgcgctgccgatcgacgacgtcgcgcaggcctgcggcaccatcggctatgagctgatgtgcgccgtggcgccgcgcgtgcctatgcgcgcggag

SEQ ID NO: 13341 - DNA, 4281 bp, Burkholderia fungorum
atgcacacggtagttttcggctggttcggcgggtcggccgtctggttcattcctcttttgtggcgtctcgtgaagtcggcgctgccgggcggcgcgggtctgcgcgggcccggcacgatccggctgtggctcggcttcgtctgcgtgctggtggcgagctgcatgctcgaggcgtcgctgatcgatgtggccggcgtgaatggcttcggccatgtgctcgccgcgggctccggccgcctgctcgggcatatcggcacgccgctggcggcgctcgcgctgctgctcgtcagcctgccctggctgctcgatttccgctggcgcgattttgctgcatgggccgacggcgccttcggcctcggcctgtcgcgcggccttgccaaacgcgacgaggaagcgcgccgtcatcgcagcgccgatgatggtttgccgtcgcacgtttcgccggccaccaatacgatggcgcccaaaaccaacggacgttatgcgcgtcctacggtctggcggcctccggcacgcggacgcgacgcggcggcgggcgctgcggcggcagccgcaggcaaggatgcggcggcgcgcggtgcaggcgcgagctggcgcaccggggcggcagcgccgcgcagccaggcggcgcaggccgagccggtgctgcgcacaggcgccgcgacgacaccgccacggcatgtgccgatgcaaacgcaaccacttaacgcggacaaagctgcgtggatgccggccgagccggtcgcgccggctggttggctgcgcggcgccgggccgcacgcggcagcgccggtagcggggtcgatggcgggatcgggtgtatccggggccgcggctcgcgacgccgcattgcaggttggacgtcgctcggcaggcgagcagcggccggtgggatcgtcgggcggcggtgcgggcttggcggcgggggcgggcttcgctgctgcgggtgctgcgggtgctgcgggtgctgtgggagcgacgggtactgcgaacgccgcagctgctgcgggagcggctacggcggccaggacagcgcaagcagctcatgcaggccatgcggcggccacccgcaccacggcaaccgcgcgcgccgtgccgggcgcggcctcgcactcggctacgggcgacacggggaacacatccggcgagggtcgtccgtcgacgactgccaaaggcacgaccgctccggtgtcttccgtcaatcgcacggcggcgcctctgcaagctttctcgccggcctcgcattcaagcgacgtcacgcgtacgccagcaacacgtcagccgcccagcttcacgcggccgatgcccacgacacagaaagtcgcgccacccgccagtgtgcaggagacgctgcgcagcatcgcggaaaacgccgcccgctggaccgaccttgccggggtcagcctcgcgcgcagcagcggcgcggagaccgcgaaggtcgcgagtgtgccggacgacgtgccgtcgttcgagggaccgcaatcgagtgtggatgtgccgggaacggacgcggttgaaacgcctttgacactggatgtgccggtgtcttcgctggaagttgtcgaaagtgggtcggccgggagtccggtaaagacggcggtcgattcgccgcgaatggaagccgcgttggatgtaccgctggaagcctgccacgagcccgtcgtgcaatggccgatcgagccgccggtcattcggccgccgttgacggcggcaccggtagcggagcccacgcttgcacctgcacctgcacctgcacctgcacctgcacctgcacctgcacctgcacctgcacctgcacctgcacctgcacctgcatcgcagtatgtgccaccggtcgctacgcctaccccgttccagatcttcgcggcacagttgcaagcaagcgaagcagacccggatgcatcgccgttcgaagacgattccgcacagtcgacacctcgcgccgacggccacgtgaacccgggcgtcgaagtcgcgccgacgctcagccagccagcggatcctcgagaagtgatcgcgccgaagattgccgaggcaccggctgcgtctgcgatcgccgaacagatggaagaaaccgcaccggttatcgagtcgcaagccactgcgcctgcgccgatcgcggaagtcgtgatcgataaaacactcgtgccttgggaagccgagctcgatgccaccttgtcgcaacatgcggcttcgtcgttgagcgggccggctgtcggcagcgtcgcggcgtcgagtgaagttgtccacacgcatgacgtcacgctgtcgccgggtatcgcgcacactgccgaatccgcagcgccaatcgaaacggaaacggtggagtactcccctgccctgtcggacgcacccgaagcatcgggctcgctaaccggcgcgcgcactgcaaacacaacgaccgcagtgaccgcggtgccgccgccaggcatcgcgccgcacgcaagcgactcgtcaaccactacacccgcggcaaacacaaccaccgccgcatcgcccgacatcgcatcgcacgcatcgaacgtggttcgctttccgggctttgcggttcacgccgcgcccgtcgcatccgatgtcgttgccgacgaaccggtcaccgcagaagaccggctcaacgaagtcgcgatctcgccggcagcatcggcaccgctcgccgcggtcccgctcgccgccacacccctagccgcaccggacagccctacggctacggccacagagcccaccgaacccaccgtccaacgcccaccgctgcgcggccacaaccccgccaacggcttcgagttccgcgcgcccgcggcgtcgatggtcgaactgcccacgctcgatctgctcgcgcccgcggacatcgacgtcgaaccggtctccgaagaaaagctgatcgaaaccggcctgctgatcgaacagcgtctgcaggaattcaaggtgccggtcacggtcgtcggcgcgtcggccggcccggtcatcacgcgcttcgaagtcgagccggcgctcggcgtgcgcggcagccagatcgtcggtctgatgaaggacctgtcgcgcggcctcggcctgacgtccatccgcgtggtcgagacgattcccggcaagacctgcatgggcctcgaattgccgaacgccaggcgtcagacgatccgtctatccgaaattctcgaagcgagcgtctaccagaattcgcattcgcaactgacgctcgctatgggcaaggacatcaccggccacccggtggtcgccgatctggccaaggcgccgcacatgctggtcgccggcacgaccggttcgggcaagtcggtggcgatcaacgcgatgatctgctcgctgctctacaaggcgacgcccgaagaagtgcgcctcatcatgatcgatccgaagatgctggagctctcggtctacgaaggcattccgcatctgctcgcgccggtcgtcaccgacatgaagctggccgccaacgcgctcaactggtgtgtcggcgaaatggaaaaacgctaccgcctgatgtcggcggtcggcgtgcgcaacctggccggcttcaaccagaagatccgcgacaccgaagccaagggcaagaagctcggcaatccgttctcgctgacgcctgaagcgcccgaaccgctcgcgccgctgccgctgatcgtggtggtgatcgacgaactggccgacctgatgatggtggccggcaagaagatcgaagagctgatcgcgcggcttgcgcaaaaggcgcgcgccgccggcatccacctgattctggcgacgcagcgtccttcggtggacgtgatcaccggcctcatcaaggcgaacattccaacgcgcgtggcgttccaggtgtcgtcgaagatcgactcgcgcacgattctcgatcagatgggcgccgagtcgctgctcggccagggcgacatgctgttcttgccgcccggcacgggttatccgcaacgggtgcacggcgcgttcgtcgccgatgaagaagtgcatcggatcgtcgagtatctgaagcagttcggcgagccgcagtacgaggaaggtattctcgacggcccggccaccgacggcggcgcggcacaggacctgttcggcgaagcgccggacgcggaagccgatccgctctacgacgaagccgtcgccttcgtggtgcgcacgcggcgcgcgtcgatctcgtcggtgcagcggcaattgcgcatcggctataaccgcgcggcgcgccttgtcgagcagatggaaaccgcgggtctcgtatccgcgatgggcatcaacggcagccgcgaagtgctggcgcccgggccggcggaa

SEQ ID NO: 13342 - DNA, 1944 bp, Burkholderia fungorum
atgtatgtgccgccgccggtcggcaccacggagaacgcaatggtttcgatacgtctgcctgacggttctgttcgacagtacgagcatccggtgaccgtcgccgaagtggccgcctcgattggccccggcctcgcgaaggccgcgctcggcggcaagatcgacggtgagttggtcgatacgtccgcgctgatcgatcacgacgtggcgcttgccatcgtcacggagaaagacgcagacggtctcgatatcatccggcactccacggcgcacttgctcgcgtacgcggtgaaggatctgtacccggaagcgcaggtcacgatcggcccggtcatcgacaacggcttttactacgacttcgcatataaccgtccgttcacgccggaagatctcgagaagatcgaaaagcgcatgcaggaactcgcgaagaaagacgagccggtttcgcgccgcgtggtgtcgcgcgacgaagcggtggactacttcaagagcatcggcgaaaagtacaaggccgagatcatcgaatcgattcccgccaccgacgagatcaagctgtactcgcatggcggcttcacggatctgtgccgcggcccgcacgtgccgtctaccggcaagctgaaagtcttcaagctgatgaaggtcgcgggtgcctactggcgcggcgattcgaagaacgaacaattgcagcgcatctacggtacggcctggacgaagaaggaagaccaggaagcgtacctgcacatgctcgaagaggcggaaaagcgcgaccaccgcaagctcggcaagcaactcgatctgttccacatgcaggacgagtcgccgggcatggtgttctggcatccgcgtggctggacgttgtggcagcaggtcgagcagtacatgcgccgtcgcgtgaacgacgcggggtacctcgaaatcaagacgccgatgatcatggaccgctcgctctgggaagcgtcgggccactggcagaactatcgtgaaaacatgttcacgacggaatcggaaaagcgcgactacgcgatcaagccgatgaactgcccgggtcacgtgcaggtgttcaaccacggtctgcgctcgtatcgcgatctgccgctgcgttacgccgaattcggctcgtgccatcgcaacgaatcgtcgggcgcgctgcatggactgatgcgcgtgcgcgggttcgtgcaggacgacgcgcacattttctgtaccgaagaccagttcatcagcgaatcgatcgcgttcaacacgctggcgatgagcgtctacaaggatttcggcttcgaccatgtcgagatcaagctgtcgctgcgcccggacgcgcgcgccggcacggacgagacgtgggatcgcgcggagcaggggttgcgcgaggcgctgacggcctgcggtgtgacgtgggaagaactgccgggcgagggcgcgttctacggcccgaaggtcgaataccacatcaaggatgcgcttggccgctcgtggcaatgcggcacgttgcagctcgatatggtgttgccggagcgcctcggcgcggaatacgtcgccgaagacaatagccgccgccggccgatcatgctgcaccgggcaatcgtcggatcaatggagcgtttccttggcattctgatcgagcaccacgctggtgcaatgcctgcgtggctcgcgccaatgcaggtcgttgtgatgaatatcgcggaaagtcagaccgaatatgcgcagtctttagcccaatcgttgcaaaaacaaggggttagagtagcggctgatttgcgcaacgagaagattagctataaaatacgggagcacacgctggagaaggtgccgtacctgcttgtggtcggcgacaaagagcgtgaagcccaaacggtagccgtgcgtgcccgtggtggtgtcgatctgggtgtgatgcccctcgacactttcattgagcgtctgcgccaggatgtgcagtcgttcaac

SEQ ID NO: 13343 - DNA, 681 bp, Burkholderia fungorum
atgacggtaagccagaagggaagcggcagggaggcgttggagccactgctggcggacggtgttcgcgaactcggcctcgccctgagcgatgcgcaactcggcaagctgcttgactacgttgcgttgctggcgaagtggaatgccgtctacaacctgacggcaattcgcgatccacggcagatgctgattcaacacattctggattcgctttcgatcgtgccgcatctcgcgccgcttgggccgtcctcggtactcgacgtcggttccggcggtggtctgccgggcatcgtgctggcgattgttctgcccgaatggaccgttaccgtgaacgacatcgttcataaaaagacagcctttcaggctcagggaaaggccgagctagggctcgcgaatctctcggtggtaaccggtcgggtcgagagtttgcagccgggcgccgaagtaccggcgaagttcgacgtaattgtctcgcgtgcattcgcagaactcgccgatttcgttacactggcccgtcatctggttgcggagcagggtgcgatctgggccatgaaaggcgtacgcccagacggcgagatcgagcgtttaccggcgggcgcccacgtggaacaggtcattcgactgaatgtgccgtcgctcgacgcagaacggcacctgatcaaggttgtggtggatgccggcggc

SEQ ID NO: 13344 - DNA, 783 bp, Burkholderia fungorum
atggcggtttcgcgcgctatccagtgtattgcgtcgacaatacacggtgttacgctcgggaaagcagccttcgcggcagtgagccgccgttcagcggcagaatcagcagctatcaagaacataccgcgaagcgcgattgcctacgagaggcgaaacatcgctgcgggagcgactgcgatgcaaatcaaaacatataccgtactgacgctagtggtgtttagcagtgctgccttcgcatggcagccgcttacctatccgattcgaagtcaaagcccttatcagcgcagcatcgataccgcgatgtgctatgcgactgccaacaggcagaccaaggtcaacatcgcccgggaaccacagactccgccgcgcaagccggctgccgccaaaacgtcgtcgaccggcgtgccgtcacggccgccgttgccttccagcaccttctcgagcacgccgatcggcgcgagcatgccggccgcagccgaagcgccgggtgcaagcgcgcccgccgcaaccacggcggcggcggccagaggcgccgccgcgcccaaagcggcgagcgcgactcaggcaggcaccacgactacggccacggctacggccgccacgggtgcatccgcaaccagcgcggacaacggcgcctcggaaacggcggctgcgagcgcggcacaggtagcggcggcatccggcgtgaagctgccgccgctgccggcaccggagccgccaatgacacagtattgggccgcgtatggcgcgtgcatgcaggcgcggggttacgtcgtcgcacag

SEQ ID NO: 13345 - DNA, 981 bp, Burkholderia fungorum
atgacggcaatgacgctcgcgctggcgggcgtgccggcagcgcacgcagagacgtcgctgctcaacgtgtcgtacgacgtgacgcgtgagctgtacaaggacatcaacgctggcttcattgccgcgtacaagcagaagagcggcgagaccgtctcgatccgccagtcgcatggcgcgtcgagcgcgcaggcgctgtcggtgctgcaaggcttgcaggccgacgtggtgacgatgaaccagccgaacgacatcgacctgctcgccgagaaaggtcaactgctgccggccaactggcgcacgcgtctgccgaacgacagcgtgccctacaccaccacgatggtgttcctcgtgcgcaagggcaacccgaagcacatcaaggactgggacgatctcgcgaggccaggcgtgcaggtgatcatcgccaatccgaagacatcgggtaacgggcgctatacgtatctggccgcgtggggttatcgcaagcagcacggcgggaccgacgcgcaggcgctcgacttcgaaaaggcgatcttcaaaaacgtgccggtgctcgacacgggcggccgcggcgcgacgaccacgtttacgcaacgcggtatcggcgacgtgctggtgacgttcgaaaacgaagtggcgctgatggacacgggcgtgggcgggggcaacttcgaggcggtgtatccgtccgtgagtttgctggcggcgccgccggtttcgatcgtcgacaaggtggtcgacaagcgcggcacgcgcaaggaagcgcaggcgtatctcgactatctgtggtcgccggccgcgcaggagatcatcgcgcagcatcacttgcgtccgcaggacaagaccgtgctcgcgaagcatgcgtcggagttcaaggcgatcaaaaccttcactgtcgaagagatgttcggtggctggcagaaagcgcagcaaacgcatttctccgatggcgggacattcgatcagatcatcgtcgacaagaag

SEQ ID NO: 13346 - DNA, 855 bp, Burkholderia fungorum
gtgaatcgatccgttgccgtttcgtcgccgccttcatcgtcgcgtttcatcgaattgcgaagcggtttgcacatgccctacgtggaagccggcgagggcgagctgttgctgttcgtgcatggctcgctgtgcgactaccgctattggcaaccgcaactcacgggtttgtcgaagcattaccgttgtgtcgccgtgagtctcacgcattactggccggcggccgatacggaccccggcttgccgttcagctggagcgagcatgcagacgaagtggctgagttcatcgagcgattcggcgcgggaccggcgcatgtagtggggcactcgcgcggcggttgcgtggcgtttcattttgcgcgccgccatgcgcagcacgtgcgcacgttgacgctcgccgatccgggcggcccgttgcagattgccggccgtccgcccgccagtttgccggagacggtcaacgcgttgcgctcgaaagcggcgcaactgattgaaagcggcgaggtggaggccggcctgcaactgttcgtcgattccgtcagccggcccggcttctgggcaatgagcacgccgggctttcgcagaatggcgaccgacaacgcgcacacgctcgcgcgccagttccgcgatccgttgcccgcgtatgttcccgaggaagccgctgaggtgcgttgcccagttctgctgatcgacggcgaaaagagtcctgacatgttccgccgcaccatagccgcgctgcaaacatggctgcccgatgcgcgccgcgaaaccgtgcgcggcgcgtcgcacggaatgaatctcgcgcatccgtcggcgttcaatcgctacgtggacgagttcatccgctccgtgcgggcg

SEQ ID NO: 13347 - DNA, 579 bp, Burkholderia fungorum
gtgcagttcaaccacgcggtcgccgggaccggtcgcccgcggaatgttctgaaactagatagaaaggttttctccatgaaaaagctgatgatcgccgccgtgattggcgccctgtccacgacgatgctgtccgtcgcgactgacgccgtcgcacaaacggcgaccaccacgaagccggctaccaaggctgtgccgaaaaagccgcagccgaagcgcctgatcaagcgcaaaccgaacccagccaaggaagcgaaggtcgatccggtgccggaaggcgcggaaaagtggtcgtgcaacgaaggcctggcgttcgaactgaagggcgacatgaagcgtgaccagatcgtcacggttcactgggctaacaaaaattacaatctgccgcgcgaagcgaccaccacgggtgcagaccgcttccacgacgccgcaaccggtatggatctcgtcgtgattccgaccaaggccatgttgttctcggacaaggacagctcgcgtctggccgacgagtgcaagacggcagccatgatcgaaggtgcaccggctccgacgcaatcgaacgcgatcaacaagaccagcaac

SEQ ID NO: 13348 - DNA, 2064 bp, Burkholderia fungorum
atgtccgaattctccgaaacgcctgccggcctcgacaccgcagccgcgcccgcggtttccgccgccacgcccgcgccgcgcccgttgcgcgcgatccagccccttcccgatcagttgatcagtcagattgccgccggcgaagtggtcgagcggcccgcttcggtcgtcaaggagctgctggaaaatgcactcgacgcgggcgcgcagtcgctgcgcatcctgctcgacgaaggcggcgtcaaacgcatctcgatcaccgacgacggctgcggcatccccgagaacgaactcgcgctggcgctgatgcgtcacgccaccagcaaaatccgctcgctcgccgaactggaagcggtcgctacgctggggttccgcggcgaggcgctggcctcgatcgcctcggtcgcgcagatgaccatcacgagccgcacggccgacgcggcgcacgcggtgcgcgtggatgcgcaaaccggcgtgctgagtcccgcggccggcacccagggcaccacgatcgaagtccgcgagttgtacttcaatacgccggcgcgccgtaaatttctgaagagcgagcagaccgaactcggccattgtctcgaacagatccgccgcgccgcgctggcgcggccggatgtcgcgatttcggtgctgcataacggcaaggcggtcgaacactggaacgccagcgagccgcccgtgcgggtcgcgaagattctcggcgacacgtttgccaccgctcatctgccgctcgacgaatccgccggaccgcttgcggtctacggttgcgcgggtctgccgaccgcgagccgcgggcgtgccgatcagcagtatttcttcgtcaacggccgcttcgtgcgcgacaagctgctcacgcacgccgtgcgcgccgcttatgaagacgtgctgcatggcgagcgctatccgtcctacgtgctgttcctcgacctgccgcctgaagcggtcgatgtgaacgtgcatccgtcgaaaatcgaggtgcgcttccgcgattcgcgctcgattcaccagttcgtcttccacgccgtgcagcgcgcgctggcgcggcatgcgggcgcatcgccggaaacgacggcgggcgggcatgcggcgcatctggcgccttccgttagcgggccggcttcgtttggcgcgacgccactgggcggcgcgggcgtcggcggcgtcggcttcggtgctggcaacggcgctggcggcatcggtggcggcttgggtggcgcatcgggcggcggcttcggatcgtcgtcgcagcagcccggcaatacctggatgcgccaggcgcgcatgacgcaaggcacgctgccggttgcccaaccgctcgcgttttacgacgcgctcttcggccgcaaagatacgaacgcgggcacggcggaaggcgccacgcttttcgaggcgcgcgattcggccgccgaagcaccgtcaccgtacaacgcgtccgcgccgtacccggcgcccgctttccatgccgccgacgagcaaccgctcggcttcgcgctcggccagatccacggcatctatgtgctggcccagaacgcgcacggtctggtgatcgtcgacatgcacgccgcgcacgagcgcattctgtacgagcagttcaagaacgcgctggccgatcgcacgatcgccgtgcaaccgctgctgatcccgcagtccatgcaggccgatccggtcgaaatcggtacggtggaagaagagcgcgacacactcgacgcactcggcttcgatctcgccgtgctgtcgccgaccacactcgccatccgcgccgtaccggcgctgctgaaagacgccgatctgcaggcgctggcgcgcgcggtcctctccgacctgcatgcattcggcggctcgcgcgtactgaccgaacgtcagcacgaactgctcggcacgctcgcctgccatcacgcggtgcgcgcgaaccggcgtctgacgctcgacgaaatgaacgcgctgctgcgtcagatggaagccaccgagcgcgccgatcaatgcaatcacggacgtcccacgtggtatcagttgacgctgtccgatctcgatcggctgttcatgcgtggtcag

SEQ ID NO: 13349 - DNA, 759 bp, Burkholderia fungorum
gtgatgagccgaatgacgcatcgtttctcctggctgcggtttgccgcagcggcctgtgtcgcgggcacggccttcgcggccgtgcccgcgcatgcgggcatcttcgacgacgatcaggcccgtcaggccattctcgatctgcgctcgaagaccgatagcctgtcgggtcagttgtcggccgcgcaacgcacgatcctcgatcagtccaaccgtctcgaccagttgaaccagcaggtcgctacgctgcgcggacagaacgaggacctgggcaaccagctcgccacgctgcaaaagcagcagaaggactactacaccgatctggatacgcgcctgaagaaattcgagccgcagcagcaaacggtggacggcgtccagggcgaggtgcagccgggtgagaccgagtcgttcaacgcggcttcgcagcaattccgcaatggcgacttcaagaatgcggcggcgtcgttccgcactttcatctccaggttcccgaacagcccttaccagccgacagcgcagtactggctgggcaacgcgctgtatgcgctgcgcgactacaagggctcgacggcgatctggcaaggcgtggtgaagaactatccgcagcatccgcgtgcgccggaagcgctgcttgcgattgcgaacaatcagctcgagcagggtcagaaggctgcggcccgcaagacgctggagcagatcgtcgcgcagtacagcggctcggacgtcgcgcaatcggctcaaagcaagctttcgcagatcaag

SEQ ID NO: 13350 - DNA, 678 bp, Burkholderia fungorum
gtgcgaggagccgcgcgccgctttgcttgtggcaggccctgtgacacggcacaattgcatctcactcgtcagacgctgcgcctgcccatgccgtttaatttcccgattttcctgacctggctgcggatcgtcctgattccgctcgtcgtcggcgtgttctatctgcccgacatgatgatgagccccgcgcaccgcaatctggcggccgcgacgatcttcattctcgcggcgttgaccgactggttcgacggttttctggcgcgcaagtggaatcagacctcggcgttcggcgcgttcctcgatccggtcgccgacaaactgatggtgaccgccgcattgctggtgctcgtgcagctcgcgcgaatcgattcggcgattgcgctcgtgatcgtcgggcgcgaaatcgcgatttcagcgctgcgcgagtggatggcgcagatcggcgcgtcgaagagcgtcgcggtcaattctctcggcaagttcaagaccgtttgtcagatggtcgcgattcccatgctgctgttttatggtccgctgcggtttggcggcggcgtggtggtcgatacgcgcgtgtggggcttgtggctcatctatctggccgcgttcctgacgatctggtcgatgctctactacatgaagctcgcatggccgcagattcgcgaacgcagcggtgtggcc

SEQ ID NO: 13351 - DNA, 474 bp, Burkholderia fungorum
atgcaacctgaggcggcgatctcgcgcatggcgatctacggcatcggtacggatattgttcaggtcagccgcgtggccgcggtcatgacgcgcaccaatggccgcttcgccgaaaaggtgctcggtccggatgaactgcgcgtctatcacgcgcggcacgcccgctcggcggcgcgcgggctcgcatttctcgccacccggttctcggcgaaggaagcgttctcgaaagcgatcggcctcggcatgcgctggccgatgacgtggcgcgcgctgcaaacgctcaacaagccgagcggcgaaccgatggtggtcgcgtccggcgagctggccgaatggctcgacgcgcgcggcatcacggcgcgcgtcaccgtcagcgacgagcgtgattacgcggtgtcgttcgtgatcgcggaagcggtggagacggcgccatcagcgtcatcaacgcaagcagcggcccccggcgccgccgga

SEQ ID NO: 13352 - DNA, 1290 bp, Burkholderia fungorum
atgaccggattgttgccacgttcgctgctaggacgcaacctcctgcttctcctgcttctcgtcgtcgccagcgacatttcaacgttcacgatattttttgttttcatcgagactcctcgcatcgatgaggccgcatcgctgtttgcatctcagacgagacaggtcgagcggttgctgagggcgctgccacctcaggtccgatacaacgagctcgtagccatcaacggcggtgaacaggcaccaccggcaaatgcggatacggatacggatacccacagcttttcagctcaccggttcttgcagaccctcacgcagcacttgccatccggtacgctggttagcctggaaggcggcaaggacagccgccggatatggattcagcttcggatcggcgaggggctcgagtgggtaatgttgccggtcccggccgaaatcagtcaccagttgccgtggagtctgattgcgcaactgctgaccatcgccgcattccccgcactcggcgcatggctcatccagcggtacacagtggtgcgactgcaacgcctcgcacgtgcggcgacaacggtcacacatggtgcgtggcccgaaccggtgcccgtcgacggacccgtcgagtttattacagtagcgagcatgttcaatcagatggtcgcgtcgctcgcggaaatggatgcaacccgaacagagatgcttgcgggcatttcacatgacatccgtactccgctcacgaaactgaagatggcgatttcagcgcccgaggcattcgaggctccgtctgcgagtgcagagcacttcgtcgcagagattgacgtcattgtcgagcaatttattgatttcggacgcagttgggacagcgagccagttgcgcaaggggatcttaacgcgctggtcgatcaactcgcggctgactatgtcggtctcggatacatcttccaggtatcactggcgccgttgccatcgatccctttccggcccgtcggcatgcagcgggtgctgatgaatttgatgcacaacgcggtaatccatggccggatcggactcgctgtccgcacatggacagagcccggttacgtcgtgctcagcgtggaagacgaggggccaggagtgccggaagcacaactgccattgctcaaacagccgttccggcgtattgcctcaccgggcaaggcgggcggtaccggacttggcctcgcgatagccgagcgcataatccgttggcacggaggtaggctggatctgagcctgcgaaccgaaggtggcctcgcggcgacgctgcgtcttccccttaaa

SEQ ID NO: 13353 - DNA, 330 bp, Burkholderia fungorum
atgtccatgatgaaaggccaactcgccgggctgatgaagcaagcccagcagatgcaggaaaacatgaagaaaatgcaggagcaactcgcactgatcgaagtcgaggggcagtcgggcgccggtctcgtgaaggtgacgatgacctgcaagaacgacgtgcgccgcgtatcgatcgacccgagcctgctcgccgacgacaaggacatgctggaagacctcgtcgccgccgcgttcaacgacgccgtgcgcaaggctgaagccaccgcccaggaaaaaatgggtggcatgacctcgggcctgccgctgccgccgggcttcaagctgccgttc

SEQ ID NO: 13354 - DNA, 1752 bp, Burkholderia fungorum
  misc_feature (1638)..(1638): n=g, a, t or c
atgacctatcaagttctcgcacgcaaatggcggccgaaggatttcgcttcgctcgtcggacaggagcacgtggtgcgcgcgctcacgcacgcgctcgacggcggccgtctgcaccatgcctatttgtttaccggcacacgcggcgtcggcaagaccacgctgtcgcgcatcttcgccaaggcgctgaattgcgaaaccggcgtgacctccacgccgtgcggtgtatgccgcgcgtgccgcgaaatcgacgaagggcgctttgtcgattatgtggagatggacgcggcgagtaatcgcggtgtcgacgaaatggcggcgctgctggagcgcgccgtgtacgcaccggtggacgcgcgcttcaaggtctacatgatcgacgaagtgcacatgctgaccaaccacgccttcaacgcgatgctgaagacgctggaagaaccgccggcgcacgtcaaattcattctcgccaccacggatccgcaaaagattccggtcacggtgctgtcgcgctgtctgcaattcaatctgaagcagatgcccgctggccatatcgtctcgcatctcgagcacattctcggcgaagagaaggtgccgtacgacgtccaggcgctgcgcctgctcgcgcgcgcggcggacggctcgatgcgcgacgcgctctcgctgaccgatcaggcgattgcctactcggccaaccaggtcaatgaagaagcggtgcgcggcatgctcggcgcgctcgaccagagctatctgatccgcctgctcgacgccctcgctgacggcgacggcgccgcggtgctgtcggtggccgacgagatggcgttgcgcagcctgtcgttttcgacggcgttgcaggatctggcgagtctgctgcaccggattgcgtgggcgcagttcgcgccgtcgtcggtgctggacgagtggcccgaggcgggtgatctgcgccgcttcgctgaagcgctgagcgccgagcaggtgcaactgttctatcagatcgcgaccatcggccgaagcgaactgggtctcgcgccggacgaatacgccggtttcaccatgacgctgctgcgcatgctcgcgttcgaaccggcgcctacgggcggcggtggtgccgtgggcgcggcgcgtgcgcctggccagtccggcgcgggcggagcgagacgcaccggtgcgccggccgtggccgcgcagcagggcgcgtcgggttcgccggtgtcacaggcgcgggcagtggcggcttcgggcgccgtgccggggacttcttttgaagcgcaagtgagcgccgctgcgccgggccgcgaaacacagccgggtaatgttgtcgtggctgacaagggcgccgtggtcggcgcggtgtcggttgaacccgcaacgcgtgccgtggcgcaagccggcagcacggttgaagtgccgcccgcggttggcgacgttcaggctgcggcggcggattctgctcaaggcgcagtcgcagggcagtcgcctgccgcggaaccggcaacagttgcagggccggcgccggttatcgatgaattgaatccggcgccggcgtctgcggcgcctgccgccccggcacccgcgttggccccgtgggacgatgcccctgccaacccggcagcgagagaagcttccacgaccgctgtgcccttnttgatgatcctgccgcgggtgaagtctctgcagccgctggcgacaacggttcggcagcgagcgaagcctccacaactgccggcctcgacgatcctgcctcgaaccacgtctccg

SEQ ID NO: 13355 - DNA, 1278 bp, Burkholderia fungorum
  misc_feature (1229)..(1278): n=g, a, t or c
atgcatttatccgagcttaagactctgcacgtgtccgaattgatcgagatggccaatggcctcgagatcgaaagtgcgaaccgcctgcgcaagcaggaattgatgttcgccattctaaaaaaacgagccaaaacgggcgacacgatcttcggcgacggcacgctcgaagtgctgccggacggcttcggcttcctgcgttcgccggaaacctcgtacctcgccagcacggatgacatttacatcagcccgtcgcaaatccgccgcttcaacctgcatacgggcgacacgatcgaaggcgaagtgcgcacgccgaaagacggcgaacgctatttcgcgctggtgaaggtggacaaggtcaacggccagccgccggaggcctcgaagcacaagatcatgttcgaaaacctgacgccgctgcacccgaacaaggtgctgctgctcgaacgtgaaatgcgtggcgaggaaaacgtcacgggccgcatcatcgacatgatcgcgccgatcggcaaaggccagcgcggcctgctggtcgcctcgccgaagtcgggcaagaccgtgatgcttcagcacatcgcccacgcgatcaagcagaaccatccggatgtcgtgctgttcgtgctgctgatcgacgaacgcccggaagaagtgaccgaaatgcagcgttcggtggcgggcgaagtgatcgcctccacgttcgacgaaccggctgcgcgtcacgtgcaagtggccgaaatggtgatcgaaaaagccaagcgcctcgtcgaaatgaagaacgacgtggtgattctgctggactcgatcacgcgtctcgcgcgtgcgtacaacaccgtcgtgccggcctcgggcaaggtgctgaccggtggtgtcgacgccaacgcgctgcaacgtccgaagcgtttcttcggcgcggcacgcaatatcgaggaaggcggttcgctgaccatcatcggcacggcgctgatcgaaaccggcagccgcatggacgacgtgatctacgaagaattcaagggcaccggcaacatggaagtgcacctggagcgtcgccttgctgaaaagcgcgtttatccgtcgatcaacctgaacaagtcgggcacgcgtcgcgaagaactgctgatcaagccggaagtgctgcaaaagatctgggtgctgcgcaagttcattcacgacatggacgaagtcgagtcgatggaattcctgctcgacaagatccgccagacgaagaggtaccnnnnnnnnnnnnnnnnnnnnnnnnnnnnnnnnnnnnnnnnnnnnnnnnnn

SEQ ID NO: 13356 - DNA, 1023 bp, Burkholderia fungorum
atgcccgaaaggcacttcatgctcacgtttcagcaaatcatcctgacaatgcagtcgtactgggacaagcagggttgcgcgttgctccagccaatcgacatggaagtcggcgcgggcacgtcccacgtccatactttcctgcgcgcgatcggccccgagccgtggcgcgcggcgtacgtgcaaccgtcgcgccgtccgaaagacggccgctacggcgagaacccgaaccgtctgcagcactactaccagtaccaggtggtgctcaagccggcgccggaaaatatcctcgacctgtacctcggctcgctcgaagccctcggcttcgacctgaagcagaacgacgtgcgcttcgtggaagacgactgggaaaaccccacgctcggcgcctggggtctcggctgggaagtgtggctgaacggcatggaagtgacccagttcacctacttccagcaggttggcggtctggactgcaagccggtgctcggcgaaatcacgtatggcctcgagcgcctcgccatgtatttgcagaaggtcgaaaacgtctacgacctggtctggacggagtgggaagagcaaggcccgaacggccccgaactgcgtcgcctgacttatggcgacgtctaccatcagaacgaagtcgaacagtccgcctacaacttcgagcacgcgaacgtcgagttgctgttctcgatcttcaacagctacgaagccgaagccaaacgcatgatcgaagcgcagatcgcgctgcccgcctatgagctggtgctgaaagccggccacacgttcaacctgctcgacgcgcgcggcgccatttcggtcacggaacgcgcggcatatatcggccgcattcgtgcgctgtcgaagctggtcgcccaggcttactacgattcgcgcgagaagctcggtttcccgatgctcggcaatccggtgcacggcgtacccggcctcacgactgacgaacaggacgccgccatgcccgcatgggcgccgccgctgaaagtcgaacgcaagatcgaccaggac

SEQ ID NO: 13357 - DNA, 1221 bp, Burkholderia fungorum
ttgctcactctgaccaccctgatgaataccgttacgctcaaaccgtcgaaagaaaaatcgctgctgcgccgccatccgtgggtctacgccaacgcgatcgaccggatcgacggcaatcccgcgcccggcgccaccgtgctggtacgcgcacacgatggccgctttctcgcgcgcgcggcctacagtccgcattcgcagatccgcgcccgcgtgtggagcttcgacgagaccgagccgatcgaccacgcgttcttcaaacgccgcgtgcagcgcgcgctcgcgcaccgtcagacgatggttcacgacaccggcgcggtgcggctgattttcggcgaggcggacggcctgcccggcctgatcgtcgatcactacgtggccgaagacgaaggccagcgcagccagctggtctgccagttcatggccgcgggcgtcgaggcgtggaaagaggcgatcgtcgcggcgctgacgggcgcgaccggctgcccgaatgtgtatgaacgctcggacgtgtcgattcgccagaaggaagggctcgaacagatcaccggcgtgctggcgggcgaaccgccgtcggaagcgctgatcgtgagcgagaacgacgtgcggtatcacgtcgatgtgcgcaacggccacaaaaccggcttttacgtcgatcagcgcgacaaccgcccgctggtgcagcagctcgcgcaggatcgcgatatgttgaactgcttctgctacaccggcggcttctcactggccgcgctgaaaggcggcgccaaacgggtggtgtcgatcgattcgtcgggcgacgcgctggcgatcgcgcagcagaacgtggcggccaacggtttcgacgccgaacgcgccacgtggctcgacgccgatgccttcaaaacgctgcgccgtctttacgacgacggcgagcgcttcgatctggtcgtgctcgatccgccgaaattcgcgccgtcgcgtgaacatgtggaccgcgcgtcgcgcgcttataaggacatcaatctgaccggcctgaaattgctgcggccgggcggcctgctgttcacctattcgtgctccggcgcgatcgactccgaactgtttcagaagatcatctcgggcgcggccgccgacgcgcgcgtggatgcccggattctcaagcggcttggcgccgggatggatcatcccttgctgacggcatttccggaaggcgagtatctgaagggcctgctgttgcaaatcgcc

SEQ ID NO: 13358 - DNA, 2406 bp, Burkholderia fungorum
atgaaccggaccgatgctttcgtcgaacccgccgccacgcacgccgccgctcatgaaagcgaggcgtcgatcggcgtttcgctgccgcatgaatcggccgcgctgcatgtgagcggcgaagccacctacacggacgacgtgcctgagttgcaaggcacgctgcacgcggcgctcggcctgtcgcgccatgcgcacgcgcgcatcgtatcgatggatctggacgccgtgagaaacgcgccgggcgtgatcgccgtgctcaccgccgaagacattcccggcgagaacaattgcggcccggtgctgcacgacgacccgattctcgccgttgaagaagtgctgtatctcggccagccggtgttcgccgtgatcgccgaaagccacgaactcgcccgccgtgccgcggcgctcgcaaagagcgacgacgtgatccgctacgaaccgctcgaagccatcctcacgcccgccgaagctaaagcccgccagcagttcgtgctgccgccgctgcatctgaaacgcggcgaaccggctgcgaagatcgccgccgcgccgaaccgcatcagcggcacgttcgaagtcggcggccaggagcagttctatctggaaggccagatcgcgtacgcagtgccgaaagaaatggacggcatgctcgtctatagttcgacccagcatccgagcgaaatgcagcaggtggtcgcgcatatgctcgactggccggcgcataacgtggtgtgcgaatgccggcgcatgggcggcggcttcggcggcaaggaatcgcaatcggcgctgttcgcctgcgtggcttcgctggcggcaaagcggctgcgccggccggtcaaactgcgcgccgaccgcgacgacgatttcatgatcaccggcaagcgccacgacgccatctacgagtacgaagcgggcttcgacgacagcggccgcattctcggcgcgcgcgtcgaaatcgcgttgcgcgcgggctattccgccgacctgtccggcgccgtcgccacgcgcgccgtctgccacttcgacaacgcgtactacctttccgatgtcgatatcgtggcgctgtgctgcaagaccaatacgcaatcgaacaccgcgtttcgcggcttcggcggtccgcaaggcgcgctcgtcatggaagtgatgctcgacagcatcgcgcgtcagttgaactgcgatccgctcgacgtgcgcctcgccaactactacggcatcggcgagcgcgatacgacgccctatgggcagcgtgtcgaggacaacatcatcgcgccgctgaccgacgagctgctcggcaccagcgactatcgcgcgcgccgcacggcaatcgcggccttcaatgcaaacagtccggtcctcaagcgcggcctcgccttttcgccggtgaagttcggcatctcgttcaacgtgccgtttctgaatcaggccggcgcgctggtgcatgtgtacaaggacggctcggtgctcgtcaatcacggcggcaccgaaatgggccaggggctcaataccaaggtcgcgcaagtggtcgccaaccagttcggtttgccgctctcgcgcgtgcgggtcacggcaaccgatacatccaagatcgcgaatacgtcggcaaccgcggcttccaccggcagcgacctgaacggcaaggccgccgaagccgcggcgagaaccattcgcgaaaggctcgccgaactcgcggccagacaactcggcggcagcgccggtgacgcgcaattcgccaacggccaggtgtcggtgaacggcggtgcgatgccgttcgaacaactggtcggcgcggcgtatctggcgcgcgtgcagttgtggtcggacggtttctacaccacgccgaaagtgcattgggacgcgaaaacgctgaccggtcacccgttttattacttcgcctatggcgcggcggtgtcggaagtcgtgatcgacacgctgaccggcgaatggaaactggtgcgcgcggacgtgctgcacgacgccggccagtcgatcaatccggccatcgacatcggccaggtggaaggcggcttcattcagggcatgggctggctcaccacggaggaactgtggtggaactgcgatggccgtctgatgacacacgcgccgtccacgtacaagattcccgcggtgagcgacacgcccgccgcgttccacgtgcagctctaccagaaccacaacgccgagccgaccgtgttccgctcgaaggccgtaggcgagccgccgttgctgttgccgttctcggtattcctcgcgattcgcgacgcaatcgcggccgcggtgccggatgcgcgtgaggcgccgccgttgcgcgcaccggccacgcccgaagcgattctcgacgcgctggatgcattgcagccgcagcgcgcgccgcaaccggcaacggagcccgcgacgaccgacacggccgcg

SEQ ID NO: 13359 - DNA, 723 bp, Burkholderia fungorum
atgacggtgttttttatcggcgcgggtcctggcgacccggaactgatcacggtgaaagggcagcggctcgtgcgcagttgtccggtgatcctgtacgcgggctccctcgtgccggccgcggtgctcgaaggtcatgcagccgtgcaggtggtgaacaccgccgaactcgacctcgatcagatcatcgcgttgctcgaagccgcgcacctcaaagggcaggacgtggcgcgcgtgcattcgggcgatccgtccttgtatggcgcgatcggcgagcagatccgcagactgcgcgagctgaagattccctacgagatcgtgccgggcgttaccgccacggcggcctgcgcggcggcgctgggttgcgaactcacgctgcccgatatctcgcagacgctgattctcacgcgcttcgcgagcaagaccagcatgcccgaaggcgaacagctcgccgacctcgcgcgtcatcgcgcgacgatggcgattcacctcggcgtgcggcatcttgcgcgtattgtcgatgaattgcggccgcattacggcggcgcctgtccgatcgcggtgatctatcgcgcgagctggccggacgaggagaagctcaccggcacgctcgatgatatcgtcggcaaggtgcagtccagttccatcgagcggaccgcgctgattctggtcggccaggtgctcgccgcggaaggtttcgcggattcgacgctgtacgcgaaagat

SEQ ID NO: 13360 - DNA, 1134 bp, Burkholderia fungorum
atgacgctcgcctccactccagagatcatcgccgaactgaaagccggccggatggtgatcctcgtcgacgaagaagaccgcgaaaacgagggcgacctcgtgatcgccgccgaattcgtcacgccggaagcgatcaatttcatggcccgctacggccgtggcctgatctgcctgacgctcacgcaggaacgctgcaagctgctgaacctgccgctcatgacctatcgcaacggcacccagtacggcacggcgttcaccgtcagtatcgaagcggctgaaggcgtcaccaccggcatttcggcagccgaccgcgcccgcacgatcgccaccgcagtcgcgccggacgccaaggccgagcacatcgtgcagccgggccacgtgttcccgatcatggcccagcccggcggcgtgctggtgcgcgccggccacaccgaggcgggctgcgacttcaccgcgctggcaggcctcacgccggccgcggtgatctgcgaagtcatcaacgacgacggcacgatggcgcgcctgccggacctgatggaattcgcgaaggagcacggcctgaaaatcggcaccatcgcggatctgatccactatcgcagccgcacggaatcgatcgtcgagcgcatttgcgagcgcaccatgcagacggcgcacggtgcgtttcgcgcggtcatgtatctcgaccagccgagcggccagccgcacatcgcactggtgcgcggcacgccgtgcacggatcaggacacgctggtgcgcgtgcatgagccgctatcggtgctggatctgctcgaagtgggcgaatccacccactcgtggacgctggacgcggccatgaaagagattgcgaggcgcgactgcggcgtgatcgtgctgctgaactgcggcgactcgaaagaccatctgatcgacgtcttcaaggcgttcgactcgaaggaaagagccgaggcgctcaaacgccggccggtcgacttcaagacgtacggcatcggcgcgcagatcctgcgtgagctcggtgtcggcaagatgcaggtgctgtcgaacccgcgcaagctgggcagcatgtcgggctacggtctcgaagtcacgggcttcgtgccgatgccgggcagcaccgcgcaggctccgcaacaaggc

SEQ ID NO: 13361 - DNA, 1233 bp, Burkholderia fungorum
atgaacgacctgacagtgacacgccagaccttcgacgaagtcatggtgccggtgttttctcccgccgccttcgtgccggaccgcggtctcggctcacgcgtctgggatacgcagggccgcgactatatcgacttcgccggcggcatcgctgtcaccgcgctcggtcatgggcatcccgaactgctgaaagtactgcacgagcagggcgccaagctgtggcacatcggcaatggctacaccaatgaaccggtgctgcgtctggccaaacgcctcgaagagctgactttcgccgaccgcgcgttcttcgccaactcgggcgcggaagcgaatgaagctgcgttgaagctggctcgccgcgtcgcgttcgagcgtcacggcgcggataaattcgaaatcgtttcgtttacgcagtcgttccacggccgcacgttcttcacggtgagcgtcggcgggcagccgaagtattcggaaggcttcggcccggtgccggccggcatcacccacttgccgtataacgacatcgaggccgcgaagaaagccatcggcgcgcaaacctgcgcggtgatcgtcgagccggttcagggcgaaggcggcgtgatcccggcggatccggcgttcctcgcggcattgcgcgaagcctgcgatcagcacggcgcactgctgatttttgacgaggtacaaacgggtgtgggccgcagcggctatttctacgcgtaccaggaaaccggcgtgacgccggacatcctgaccacggccaaggcgctcggcaatggcttcccgatcggcgcgatgctgaccaccaacgaactggccgcgtatttcaaggtcggcgtgcatggcaccacgtacggcggcaatccgctgggcgcggcgattgccgaaaaggtggtcgaactgatcagtgatccgaagctgctcgaaggcgtgcgttcgctcagtgaagcgctgaaaggccatctcgcgaagctgaacgatcgcttcggcctgttcacggaagtgcgcggccgggggctgctgatcggtgcggaactgaccgatgcattcaagggccgcgcgaaagatttcgtcaccgccgccggccagcatggcgtgatcatgctgatggccggtcctgacgtgctgcggttcgtgccgtcgctgatcatgccgctcgacgacatgaacgaaggcttcgcgcgtctggccagcgcgatcgagggcattgtcggcgcaaaggccgaagcagcgtcgcac

SEQ ID NO: 13362 - DNA, 2232 bp, Burkholderia fungorum
atggcaatcaacttcgaaaaccgctacaccgacgtgtccggaccggacgagcttcacctgtcggactatctgcgtacgatcgtgcggggttggcgcacgatcgcgatggtgacgctgatcgcgctcgcgctggggtgcgcgtacgccttcctcgcgccgccgacttaccgcgcggatgttctgtttcacgtcgaggacaagacggcgaatgccaatgcgaacggcaaggattccttgccgccgctcaccggcatgttcgacaccaagccttccacggcagccgagatcgagttgctgaagtcgcggctcgtcacggaagaaaccgtcaagaagctgcacctcgatatctcggcggcgccgcgttattttccggtcattggcggaatgatcgcggggttggtgaacgggcaatggggcttcaggttgccgcagttcatcaacctgtccggctatgcatggggtgacgaggccattacggtgtcgcagttcgacacgtcgaaagacatgtacgacaccaccttcacgctgattgccggcaatgacggttcatacgtgttgcgcgacaggaatggtatcgcgatcctgtcgggcaaagtgggcgagaccgtggaaacggataccgccgacggaccgatcacgttgcacgtcgacaagctggtcggcccggccggctcgcgcttcgaattgtcgcgcgcgtcgacgctgagcaccgtggaccggctgcaaaaggccctggtggtgcaggaaaccacgctgcaatccggcgtgatccgcgcgagtctggaaggcggcgacagcgcgctgaccgcggcgatcgtcaacagcatggcgcgcgagttcgtgcgccaggatgtcgagagccgttcgaccgaagccgagcatatgctggcctttctcgatcagcaactgccgggcttgcgcaaggaactcgacgacgccgagcaacgctacaacaagttccgcaacacgcacggcaccgtcgacctcggtgaagaaagccgcttgctgctgcaacagatcgtcgataacaagaccaagctgatggatctgcagcagcagcgcgcggagatgtcgcaacgcttcaccgcgaatcacccggcggtggccgcgctcgacgcgcagatcgccgcgttgcaaggcgcggcggccaatatgaaccgcagcgtggcggtcatgccggatacggagcagaccgcactgcgcttgctgcgcgacgtgcatgtcgacaccgagctgtacaccaatctgctgaacagcgcgcagcaactgcgcgtggcgaaggcggggcaggtgggcagcgtgcgcgtggtcgacttcgcggaagcgccggacgaccccgtgcgtccgaagcgcgtgatcgcgatcctgatcgcgctcggcggcggactcgtgctcggcattctgctgaccttcttcaagcgcgccatgtacggcggcgtggaacgtccggacgaactcgaaggcatgctcggcgtgccggtgttcgcggtggtgccgcgcagccagacccagctgaagctgcaggaaaacgtcatgctgcgccgtcgcgggctgcatgtgctggcgcagcaggcgccggaagacatcgccgtggaaggcgtgcgcaatctgcgcacctcgctgcagctctcgctcgatcacgccgagaacaacgtggtgatgatcaccggctcgcggcccgattccggcaagtcgttcctctcggtgaatctggcggcgctggtggcgtcggccaataagcgggtgctgatcatcgacggtgatatgcggcgcggcgacgtgcactcgcatttcggtatcggtcatcagccgggcctgtccgacgtgctgagcggcggcgacctgaacgcgatgatccagcgcgacgtgctgccgggtctcgatgtgctcgccaagggcacgctgccttcgcatccggccgaactgctgatgagcaagcgcttcgaaacgatgctcgaagaattgaagtcgcactacgacctcgtgatcgtcgatacgccgccggttctggcggtgaccgattcgacgctgatcggcaaatacgcgggcacgacgctgctggtggtgcgccacggccgccatccgctcaacgaggtgatggaaacggccaagcggctgcgcaacggcggcgtggcgctgcggggcgtgctgctgaccgacgtgccgcaggaaggcgcgttcctcggctcgggttatcaaggcggttactacggctacgacagcatcgccggt

SEQ ID NO: 13363 - DNA, 1335 bp, Burkholderia fungorum
atgaaacccgttattgccctcgttgggcgccccaatgtggggaaatccacgctgttcaaccggctcacgcgctcgcgtgacgcgctggttgccgacctgcccggtctcacccgcgatcgccactacggcgaagggcgcaccggcgagcggccgtatctggtcgtcgatacgggcggtttcgagccggtcgccaaagacggcatcctgcacgaaatggcgcgtcaaacccgccaggcggtcgaggaatcggacatcgtcgtgttcatcgtcgacgggcgcaatggcctcgcgccgcaggacaagtcgatcgcggactatctgcgcaaggtcggccggccgattttcctcgtcgtcaacaaggcggagggcatgaagtacagcacggtcgccgccgatttctacgaactcggcctcggtgacccgcgtgcgatttccgcagcgcacggcgacggcgtcacggaaatgatcaacgaggcgctcgaagtcgcctatgccggtcagcccgaagaaaacgacgacgaaaaagccgcgcgcggcgtgaagatcgcgatcgtcggccggccgaatgtcggcaagtcgacgctgatcaatgcgctggtgggcgaagaacgcgtgatcgcgttcgacatgcccggcaccacgcgcgattcgatctacgtcgatttcgagcgcggcggcaagccgtacacgctgatcgatacagccggcctgcgccgacgcggcaaagtgttcgaagcgatcgagaaattctcggtggtgaaaacgctgcagtcgatctccgacgcgaacgtcgtgatcctgctgctcgacgcgcgccaggacatttcggaacaggacgcgcacatcgccggcttcgtggtggagcagggccgcgcgctggtggtgggcgtgaacaaatgggacgggctcgatccgcatgtgcgcgagcgcaccaaggcggacctcgagcgcaaactaaaatttctcgacttcgccaaattccatttcatttccgccgcggaaaaaaccggaatcggcccgttgatgcgctcggtcgacgacgcctacgcagccgctatggccaagctgccgacgccgaagctcacgcgcgcgctgatcgatgccgtcgagttccagcagccgcgccgccgcggtccggtgcgcccgaaactgcgttacgcgcaccagggcggacagaatccgccgatcattgtgattcacggcaacgcgctcgacgcgatcaccgaaacctacaaacgctacctcgaaaaccgcttccgggaaactttcaagctgactgggactccattgcgcatagagttcagatcgtcgacgaacccttacgcggataaagcc

SEQ ID NO: 13364 - DNA, 1107 bp, Burkholderia fungorum
atgtcccgacgcatcatccctgttgccgatctcagtgccgtgccggtgattgccggccccgtgcagacgcccagcggcgcgctgcacgacacgctcgcgcgcccgttgcgcgatctgcgcatttcggtcacggatcgctgcaatttccggtgcgtctactgcatgccccgcgcggtgttcgacaaggactacacgttcctgccgcacagcgcgttgctgagcttcgaggaaattgaacggctggcgcggatcttcgtcgcgcatggcgtcgaaaaaatccgtctgacgggcggcgaaccgctgctgcgcaagaatctggagttcctgatcgaccggctcgcgcgcctgaccacgccggcaggccgcccgctcgatctgacgctgaccaccaacggttcgctgctggagcgcaaggcacgcagcctgaaggacgccggtctgacccgcgtcacggtgagtctggacgcgctcgacgacacactgtttcgccgcatgaacgacgccgacttcgccgttgccgacgtgctggacggcattgccgccgcgcatgcggtaggcctcgcgccggtcaaggtgaacatggtcgtcaaacgcggcaccaacgacggcgaaatcgtgccgatggcgcgtcatttcaaaggttcgggcgcggtactgcgctttatcgaatacatggacgtcggcacctcgaacggttggaatatgaccgaagtgctcccgtccgccgacgtggtcacccgcatcgccgaacacttcccgctcgcgccgctcgaagcgcacagcgccgccgagaccgcccagcgctggggttatgtggacggcggcggtgagatcggcgtgatttcgagcgtgacgcgcgccttttgcggcagttgcacgcgagcgcgtctttccaccgaaggcaagctctatctgtgcctgttcgcgtcggcggggcacgacctgcgcacgctggtgcgcaacggttcgggcgatgccgatatcgccactgccgtcgccgaaatctggcaaggccgcggcgaccgctattcgcaactgcgcggcagccagtccgccgattcgcgcgttcgcgacggccgccgggtcgaaatgtcgtacatcggcggc

SEQ ID NO: 13365 - DNA, 2238 bp, Burkholderia fungorum
atggctgctaatctacccgcgtcgcctgacgccacccgtgccaatgacgacgtttcgtttgccgattacctttcgctgatatatgaggggcggtggctcattgcgggaatcatggcgtttgtgatcgcgctcagtgtcatctatgcgttcggcgctcgtcccatctacgacgctaacatcctgattcaggtcgaagattccgacctctccgaaaagaatctgctgggagatctggcaccgctcctggacgcaaaatccgcgactaccgctgagatcgaacttttgcgatcacgacttgtggtcggatccgcggtttcgagtctgaagctctttatcgaggcgacgccccggcattttccgatcattggcggatgggtgaccaatcgctacgagagcaggatgtcggcggccgaaccggccgggatcgcgcctccatttcttggtctgagccgctttgcctggggcggcgagagcattcaggtcgatcaattcgacgttccaaagacatactggaagaaaaagttcacgctggtggctacgggtcgcgactcttatgtattgaagagttcgggcgacgtcgtgctcgaaggaaagttgaatcgtgtcgccagaggccgggtcgacgacggcgaagtcacgctgctcgtgagccggttggctgcccgcccgggaaccgagttcattctcaggcgcagttccgaacttcaggcggtggaagatcttcaggaagatctcaagatcgaagagaagggcaagcagtccggtatcctcagcgtcaccctgaatggaccgaatccgaagaagacgaaaagtattctggatgcggtggctaacgagtatgtgacgcaaaacgtcgcgttgaaatcggcggaagcacaacaaaccatcgagtttctcgaccgccagctccctcagttgaagagccagcttgacgatgccgaggtcaagtacaaccgtttcagaaacgagaaaggcacggtcaatctgagtgaggaagcgaaactcatattgcagcaatccgtggattcgaacacggcgcttctcgagttgcagcaaagacggctggagttgaggcagcgtttcactgaggagcacccgagtgtcgttgcgctcgacaagcagattgtggctgcaaaaagtcaaaccgagtcgctcggtagcagaatctccggtttgcccaacctggagcagggcgctttgcgtctgatgcgtgacgttgcagtcgatacggatctctacacgggccttctgaatagtgcacagcagcttcgcgtcctgaaggcaggcaaagtcggcaacgtgcgtgtggtcgattttgcacaggattcggaggaaccgatcaagccgaagaaggctttggtgatcgcaatgggtgttgtgctgggcgccattttcggcgtgacgaccgcgttcgtgcggaaggcgttcttcggcggcgtcgagagtggtgacgcgattgagcgtgctacgggtctgcccatcttcgccaccattccgcacagcgacgagcaacgcgcgctggacgatgccgtgcgtcagcgcttaaagggctctcatattcttgctcaccagagtcccgcggatacgaccgttgagagtttgcgcagcctgagaacggcaattcagttcgccatgctcgaggccgggaacaacatcgctatggtcacgagtccgagccctagcgtgggtaaatcgttcattgtcgccaacctcgcaacgatacttgcctcctccggaaagaaggtgttgctaatagattgcgacctgcgtcgtggacacgtgcatgactgctttggcttggcacgcgaaccgggcgtcagtgatttcatattgggcgagatcagtctcgacaaggttgttcagcgcgacgttcttccggggctcgatttcatttcgaccggcactgtgccaccgaatccgtccgagttgctgaccaacgcgagattcgcggaaatgctgcagaagctgcaagcttcatacgacatagtgatcgtggacagtccgccggtcctcgccgtgacggacgccgcgattatcggcaagcatgccgggacgacacttctggcgttgcgttatgcgcagcacccgctgcatgaaatcgtcgagtccgttcggcgactgcagcacggcggagttgcactgaagggcgcattgctcaacgatctgcctcgcactgcgctcggctacggtcgcagatatgggcggtactacgcgtatgaatacgggcagctaacgaaa

SEQ ID NO: 13366 - DNA, 654 bp, Burkholderia fungorum
atgaagcactcgttgaggaaccgattcaaagccgccgccatcgtttcgagcctgctgtgcgcgggcgcttttgcctcgcaggcgcatgccgagggcgatgatacgatgaacggcattcatgccggcgacgtgctggtgcggctgcgcgccatcagcatcatgccgaacgtgagcaccacccaatcgctgtcggcgctcaacgtggacgtgaacaacgcgatcatgccggaactggatctgacctatatgatccgcgattacctcggcgtcgaactgattctcgccacctcgcggcatcagctgacctcgagcctcggcaatctcggtggcgtgaacgtgctgccgcctacgctgttgctgcaatatcacttcaaccatgcgggacgcattcgtccgtatctgggcgccggtctcaactacacgctgttttacaacaacggcctgaacgcgggcggccagtcgatcgggattaccaaccatagctggggcccggcgctgcaggccggtgtcgacgttcaggtgaccaagacgttgttcgtcaacgcggacatcaagaaaatctggatgcatacggatgccacgctcggcggccagccgctgggtcgcctgagcatcgatccggtggtggtcggcctgggtgtcgggatgcgcttc

SEQ ID NO: 13367 - DNA, 3207 bp, Burkholderia fungorum
atggcaaagttcttcattgatcgcccgatttttgcatgggtgatcgccattattctgatgctcgcgggtatcgcgtcggtctttacgctgccgatcgcgcaatacccgaccatcgcgccgccggccgtgcagatcagcgctacgtacccgggcgcctcggcgaagacggtggaaaacaccgtcacgcaggtgatcgagcagcagatgagtggtctcgaccacttgctgtacctgtcgtccacgtcggacgactcgggcacggcaaccatcacgctgacgttcgcggccggcaccaatcctgacatcgcgcaggtgcaggtgcagaacaagctgcagctcgccacgccgctgctgccgcaagccgtgcaacagctgggcaccaaggtcacgaagtcgagcagcagcttcctgctggtcatggcgttcgtgtccgaagacggcagcatgaacaagtacgacctggcgaactacgtcgcgtcgaacattcaggatccggtcagccgtatcgacggcgtgggcacggtgacgctgttcggctcgcagtacgccatgcggatctggctggacgcgaacaagctcaccaacttcggcctcacgccggtggatgtgcaaacggcgttgacggcgcagaacgtgcaggtcgcgggcggttcgctcggcggcacgccgtcggtgccgggccaggtgttgcaggccaccatcacggaagccacgctgctgaacacgcctgaacagttcggcaacgtgttgctgaaggtgaacccggacggctcgcaggtccgtatcaaggacgtcggccgcatcgagctgggtggcgaaaactacaacttcgacaccaagtacaacggccagcctacggcaggcttcggtattcagctcgctaccggcgcgaacgcgctggccaccgccacggcggtgcgcgcgaaggtcgccgaactgtccaagtacttcccgcacggtctggtcgtgcagtacccgtacgacaccacgccgttcgtgcgcctgtcgatcgaagaagtggtcaagacgctgctcgaaggtatcgtgctggtgttcctggtcatgtacctgttcctgcagaacctgcgcgccacgctgatcccgacgatcgccgtgccggtggtgctgctgggcacgttcgcgatcatggggctggtgggcttctcgatcaacacgctgtccatgttcgggctcgtgctggcgatcggcttgctggtggacgatgcgatcgtggtggtggaaaacgtcgagcgggtgatgcaggaggagggcttatcgcctcgtgatgcaacccgcaaggcgatggatcagattactggcgcgctggtcggcgtggcgctcgtgttgtcggcggtgttcgtgccggtggcgttctcgggcggttcggtcggcgcaatttaccggcagttctcgctgacgatcgtggcggccatggtgctgtccgtgctggtggcgttgattctgacgccggcattgtgcgcgacgatcctcaagccgatcgaaaagggtcatcaggaaaaaaccaccggtttcttcggctggttcaaccgcaccttcaacaagagccgcgacaagtatcactccggcgtgcaccacgtgatcaagcgctcgggccgctggctgatcatctatatggtagtgattttcgcggtcggcctgctgttcgtgaagttgcccaagtcgttcctgcctgacgaagaccagggcacgatgttcgtgctggtgcaaacgccgtcgggctcgacgcaggaaaccacggcgcgcgcgttgaaggacgtgtccgactatctgctcaacaccgagaagagcatcgtcgaatcgacctttaccgtgaacggcttcagctttgccggtcgcggccagaatgcgggtctcgtgttcgtgcgcatgaaggattacgcgcaacgtcagcactcggaccagaaggtgcaggcgctggtgggccgtctcttcatgcacttcggcagctacaagaacgcgctggtgtatccggtgaatccgccgtcgattcctgaactcggcaccgccgcgggcttcgacttcgaattgcaggatcgcgcgggcgtcggtcacgaaaagctgatggaagcacgcaatatgttgctgggcatggcggcgaaagatccgacgctggctcaggtgcgtccgaacggcctgaacgacacgccgcagttcaaggtggatatcgaccacgagaaggcttcggcgctcggcgtgtcgctgtccgcgatcgaccagacgttctcgatcgcgtgggcgtcgcagtacgtgaacaacttcctcgataccgacggccggatcaagaaggtgtatttgcagggcgacgcgccgttccgcatgaaaccggaagacctgaacgcgtggtacgtgcgtaatggcgcgggtaacatggtgccgttctcgtcgttcgcgagcggcacgtggacctacggttcgccgaagctggaacgctacaacggtatttccgcggtggaaatccagggcgcggcggcaccgggcaagtcgaccggtcaggccatgacggcgatggaagccctggtggcgaagctgccggcgggtgtcggctacgaatggacgggcctgtcgctgcaggagcgccagtccggttcgcaggcgccgattctgtacggcatctcgatcctcgtcgtgttcctgtgtctcgcggcactgtatgaaagctggtcgatcccgttctcggtgatcatggtggtgccgctcggcgtgatcggcgcactgctggccgccacgctgcgcgggctcgagaacgacgtgttcttccaggtgggtctgttgaccaccgtgggcctgtcggcgaagaacgcgattctgatcgtggaattcgcccgcgaactgcagcagagtgaaggcatggggccggtcgaggccgcgctggaagcagcgcgtctgcggctgcgtccaatcctgatgacctcgctcgcgttcattctcggcgtgatgccgctcgccatcagtaacggcgcgggctcggccagccagcacgcgatcggtaccggcgtgatcggcgggatgttgacggcgaccttcctcgcgattttcatgatcccgatgttcttcgtcgtgatccgtgcgaagttcggcggcgagaaggaagacccggatgaggcgctcgcacactataaccagcaccatccgcatgacggccagggcggcggggcggctgatgaaggctcgggcaaggacggacac

SEQ ID NO: 13368 - DNA, 1209 bp, Burkholderia fungorum
atggacttgactcaggtttcctcatcctcttcttcaccctcgcggcccaggaaagcgcccgccggtgaagtgcccaacgtcgcgcagtacgacgagcggccgttcctgaaacggctcggcgttgtcgactggctgtttgccgtcgcgatggtcgcgggcgccgggtttgcgctgtcgcgctatcacccgttcatgaactactacgacaagctggtgctggtgtgcgcggtgccggtgttcatggtgctcggctggcgctggaaaccggtgcgtccgctgatggtggggatcacggcgctgtcgctgctggccatccagatctaccacggcgacctcagccgcgcggataacgcattcttcctgaagtatttcctgtcgagccagtccgcgatcctgtggatgagcgcgctcttcgtgttcgccaccgtgttctactggatcggcctgctgtcgcgctcgccgaccggcgcggcgatcggctcgaagatgacgtgggcggcggtgctgatgggctttgtcggcctgatggtgcgctggtacgagtcgtacctgatcggcgcggacgtcggccatattcccatctcgaacctgtacgaagtgttcgtgctgttcagcctgatcaccgcgctgttctatctgtactacgagcagcactacaacactcgcgcgctcggcgcgttcgtgctgctggtcatcagcgccgcggtcggcttcctgatgtggtactcggtggcgcgcgacgcgcagcagatccagccgctcgttccggcgctgcaaagctggtggatgaagattcacgtgccggccaacttcatcggttatggcagcttcgcgctgtcggctatggtgggcgtcgcgtatctggccaaagagcgtggcgtgctggccgaccgcctgccggcgctcgaagtgctcgacgacgtgatgtacaaatccatcgccgtcggttttgcgttcttcacgatcgcgacgattctcggcgcgctgtgggccgctgaagcctggggcggctactggagctgggacccgaaggaaacgtgggcgctgatcgtctggctgaactatgcggcctggctgcatatgcgtctgatgaaggggctgcgcggcgcggtggcggcgtggtgggcgttgaccgggctgctggtcacgaccttcgcgttcctcggcgtcaacatgttcctgtcgggcctgcatagctacggcaagctg

SEQ ID NO: 13369 - DNA, 657 bp, Burkholderia fungorum
gtgcgaatgaatcgactgagcaagactctgatggtgcttcatgtagcggcaggtctttcaggtttggcaattcaggcacgagcagcagatccggtaaagccggacgtcaatcgggggcaggcaatcgcggtgcaggtgtgcgcatcgtgtcacggcgcagacggcaacagcgccggcggtgcgtatccgaaactggccggccaacaccctgagtatctcgtcaagcagctcaaggatttcaagaccgagccgggcgccaggcagccggcgcgcaacaatgcgatcatggcgggcatggctgcggcgctgtccgatcaggatatggtcaatgtcgccgcttatttcgccgcgcagaccccgaagcccggttacgcgcacaacaaagacaccgttccgcttggccagaagatttatcgcggcggcattgccgacaagggcgtgccggcctgcgcaagctgccacgggccgaccggtcaggggatcccgtcgcagtacccgcgcctgtcggggcagtgggcggaatatacggtggcgcagttgaccgcgttcacgcaaggtcccggcgcacgtaacaataacgaggcgatgcatgcaattgccacgcgtctgtcggacagtgagatcaaggctgtagccgattacatcgcgggcttgcat

SEQ ID NO: 13370 - DNA, 2076 bp, Burkholderia fungorum
atgaatgctccgactgaacacgctcgcgccgtgtgcccgcacgattgccccgacacctgcgcgatgcgcgtgacggtcgaggccggtcgggcgatcaaggtcgtcgccgatcccgagcatcctccaacgcaaggcgcgctgtgcaccaaggtcagccgctacgcggagcgcgtgcatcatccgcagagactgacgcggccaatgaagcgtgtcgggcgcaaaggcgaggggcgctttgagccgatcggctgggacgaggcgttccagctcgcggcgcgtcgcctgtcggaaattgcacatcgcgcgccggaggcaatcctcccttacagctatgccggcacaatgggcttgattcagggcgacagcattgcacaacggttcttccacaagctcggcgcctcgcaactggatcgcacgatttgcgcggccgccggcacagccgggctgaagtacacctacggcgcgagcctcggcatgctcaccgagtttttcgacgaaagcgagctcatcctcatctggggctcgaatccgatcgcgtcgaacctccatttctggacgcgcgcccaacaggccaaacgccgcggtgcacggctgatcgcaatcgatccgtaccgctcgctgacggccgaaaaatgccatcagcacatcgctttgaaaccgggcaccgacagcgctttggcgctcggtatgatcaacgtgttgatcagggaaaatctgctcgatcacgcttacatcgaagctcatacgtcaggttttgaagcgctgaaagcccgcgcgcttagctacccgccgtcgcgcgctgcggaaatctgcggtattgacgaacgggtgatcgtcgatctcgcacgactttacggtggcaccagaaaggccgcgatccgcatgaactacggcctgcaacgcgtacgtggcggcggcaatgccgtgcgcgcgatcgcttgcctgccgtcgctcacgggtgcttggcgcgagagagcggggggcgtgttgctgtcgtcgggcggctgggcgccggtcgactcgtatgcgttgcagcgtccggacctgatgccgggttggccgaccaggacgagccgcgtcatcaacatgaacgggatcggcgacgcgctgctgcacaagggcgacgcggcgttcggtcccaaggtcgaagcgatcgtcgtctacaactcgaatccggtggctgtcgcgccagattcggagcgagtcgccgcgggtttcgcgcgcgaagatctgttcacaatcgtcctcgagcatttccagaccgacacagccgactacgccgatctgttgctgcccgcgacaactcaactcgagcacctcgacgtgcacaagtcgtacggccacacgcacgtcatggtcaacctgccggcaatcgcgccggtcggcgaagcgcttccgaacacggagattttccgcggcatcgcgcgtcatatgggcctcgacgagcccgcgctgttcgagagcgacgagaccgtcgcgcaggcggcgtttcgctggcaagacagaacgctcgaaggcgtagattgggagaccctcaagaagaccggctgggccaagctgaatctgcccgatgcgcctttcgccgaaggggggttccaaacgccgtccggcaaatgcgagttctacagcgagcgcctcgcgcaacggggactcgacccactgccggactatctgcctccctacgaatccgctgatggcgcgccggaacttgccgcccgttatccgctggcgatgatctcgccgcccgcccgcaacttcctgaacagcaccttcgtgaatatcgaaagtctgcgttcgaccgaaggcgagccgcatctcgacatgcatccggccgacgcgcaatcgcgggatatcgtcgacggcgatcaggtgcgcatttttaacgatcgcgggtcgatgcaggcgcgcgtccgcgttaccgataaagcacgcgaggggctcgtggtgggcctgtcgatctggtggaagaagcttgctccggacggccgcaacgccaatcaggtcaccagccaggcgctcaccgatctgggcggatcggcgactttttacgactgcctcgtcgaagtcgagcgcgtc

SEQ ID NO: 13371 - DNA, 567 bp, Burkholderia fungorum
atgttgatcgccttcggggcgctggcttcttctttctcattgggcgcgttcgcggccgctgatacctatcagctcgatccgacccacacgtatccgagcttcgaggcggatcacttcggcggcctttcggtgtggcgcggcaagttcaccaagagctccggcacggtcacgctcgaccgcgcggcgaaaaccggcacggtcgacgtgacggtcgatcccgcctcggttgatacgggcaacggcaagctcgacgagcatctgaagtcggacgcgttcttcgacgtcgccaaatatccgtcggtaacctacaagggcaccgatatcaggttcgacggcgacaagccggtggaagtgatcggcaacctgacgattcgcggcatcaccaaaccgctgaatctgaagatcgagtcgttcaagtgcatgcagcacccggtgctcaagcgcgaggtgtgcggcgtggaagcgagcgcgcatttcaaccgtgccgactacggcatggatttcggcgtcaaatatggcttcagcatggataccaaactgcatatccagtccgaaggcatcaggcaa

SEQ ID NO: 13372 - DNA, 462 bp, Burkholderia fungorum
atgagcaccgaaaaaatcaatctcgacattcataagattctcacgctgctgccacatcgttacccgatcctgctggtggaccgggtgctcgaactcgagccgcacaagaacatcaaagcgttgaagaacgtgtcgatcaacgaaccgtatttccagggccactttccgacccgtccggtcatgccgggcgtgctgattctcgaagcgctcgcgcaaacggcggctttgctgacgttttcggaagagccgagcgacccgtcgaacacgctgtatctgttcgtcggcatcgacaatgcacgcttcaagcgcgtggtggaaccgggcgatcagctgatcctgaactgcacgttcgagcgtcatatgcgcggcatctggaagttcaaggcgcgcgccgaagtggatggcgtagtagcggcggaagccgacctgatgtgcgcggtgcggcacacggacaaggacgct

SEQ ID NO: 13373 - DNA, 444 bp, Burkholderia fungorum
atgagcatcatcgacaacagaaaggccttctacgactactcggtcgaagaacgctatgaagcagggctcgtgctcgaaggatgggaggtcaaggcgctgcgcgccgggcgcggccagatcaaggaaggttacgtcgttatcaagaataacgaactgttcctgatcggcacgcacatcagcccgttgcccgaagcctcgacccatatcaaccccgacccggtgcgcacgcgcaagctgctcctgcacagcgaggaaatcagcaaactgatcggcaaggtcgaacagcgcggctacacgctcgtgccgctgaacttccattacaagggcggccgcgtcaaatgcgagatcggtctggccaagggcaagaagcagcacgacaagcgtgagaccgagaagaagcgcgattgggaacgtgagaaggcgcgcctgatgcgctcgccgggc

SEQ ID NO: 13374 - DNA, 813 bp, Burkholderia fungorum
atgccgcccaccgtattcatcgtctccgacggtaccgggatcactgccgaaaccttcgcgcattcgatcctctcccagttcgaccagaaattccgcctggttcgcgtgcctttcgtcgactcgacggaaaaagcgtatgccacgctcgaaaagatcaacgaagccattctgcaggacggccgccgtccgatcgtcttcacgacgctggtggacagcgcgtcgaatcagatcgtcaaaggctcgaatgcactcgtgctggatatgttccagacctttgtcgagccgctcgaacaggaactggaactgaagtcgagccatgcaatgggccgcggccaccagaatgcggacaccgaggaatacaagaaccggatcgaggcgatcaatttctcgctcgctcacgacgacggtcaatcgaaccgcaatctggccgacgccgacgtgattctggtcggcgtatcgcgcagcggcaagacgccgacgagcctctatctggccatgcagtatggcgtgaaagcggccaactatccgctgattccggaagatttcgagcgcggcaaattgcctacgccgctactcgcgcatcggcagaaaatgttcggtttatcgatcgatccgcagcggctttccgagattcgcaacgagcgccggcctggcagcaagtacgccgcaccggagaattgccgctacgaaatcaacgaagcggaagcgatgatgcggcgtgaagggatcaagtggctgtcgtcgacacacaagtcgatcgaagagattgcgacgacgatcctgcaggaaatcaaactggagcgcgcggcttat

SEQ ID NO: 13375 - DNA, 783 bp, Burkholderia fungorum
gtgaaagccatcacctcgcgggacaatccgctctataaacgtctgaaggcactggccggctcgacgcatcaacagcgcaagagcgggcatgcgctgctcgaagggtttcatctcgcgagtgcgtatctcgacgtggccgggcaaccggaaatgtgtatcgtcacggacggcgcgctgcgtcacgacgaagcgcaggcgatcgtttcgcgcatcgaagatcatcggctcgtgacactgccggatgcattgttcgggcagttgtcgaatgtcgtgcacggagtgggcattctgctgctggtcgaaaagctcgctacgccactgcccgacgaggtcgcgcaaacctgcctcgtgctcgacggcgtgcaggacgcgggcaacgtcggctcgattctgcgcagcgcggcggcggcgggcattcagcaagtgttctgcgcgccgggcacggcgtacgcgtggtcgtcgaaagtcttgcgctcgggtatgggcgcgcatttcctgctgcagattcacgaggacgtggaagcgcaggcgctgatcgaacggctcgcggtgccgatcgtcattacggattcgcacggcgccgaggcgatctacgattgcgatctgagtggaccgcttgcgtgggtgttcggcaacgaaggggcgggggtctcgcagatctggcgcgatgcggtctcgttgcgggtgacgattccccagccgggcggcatggagtcgctgaatgtggcggctgcggcggccgtgtgcgtattcgagcagtgccgccagcagcgcgggcgcggt

SEQ ID NO: 13376 - DNA, 909 bp, Burkholderia fungorum
atgatccgactcgcccgcttcgccctcgccgccgcgctcctcatcggttcgctgcactcgcacgccgccgtctccgtcacggacgacaccggcgccaccgtcacgctgcccgctcccgcgcaacgcgtgatcagcctcgcgccgcacgtcaccgaattgctgtatgcagcgggcggcggcgccagggtgatcggcgccgtgtcgtacagcgactatccgcccgaagcgaaacagctgccacgcgtcggcgataacaaggcgctcgacctggagcgcatcgtcgcgctcaagcccgatctgatcgtggtgtggcggcacggcaatgcgcagcgtcagatcgagcgcctgcgcgagatgcatattccgctcttcttcagcgagccgcatcgtctggacgacgtggccgtgtcgctgacgaagctcggccagttgctcggcacgtcgccggtcgcggatgcggccgcggccgcctatcgccgggacatcgcggcgctgcgcagccgctatgcgagccgggcgcccgtcagcgtgttctatcaggtgtgggatcaaccgttgatgacgctcaacggcgagcatatggtgagcgacgtgatcgcgctgtgcggcggccgcaacgtgttcgcccaactcgaaccgctggtgcccaccgtctcgaccgaggcagtgctcgcggcgaatcccgaggcgatcgtcacggcggcgccgggcgcgaccaaaccggacaccaccttgccgcaactcggcgcatggcgtgcgtggccgagcctgaccgccgttgccaataacaacctgtttgcgatcgacggcgacctgatcaaccggccggcgccgcgcatcgcgcaaggcgcgaagcaaatgtgcgaagacctcgacctcgcgcgctcacgcagaaagtcggccacgcaa

SEQ ID NO: 13377 - DNA, 693 bp, Burkholderia fungorum
atgacgcggcgcgcggagctgtccatgcgaaccagaccctccagcgcggcacgcgcgccgaacggcgcgctgcgtgccgtcgataccgacagcatcgaaccgttcgacgacgtgagcgaaccgggcgcgccgaatcatgcagatcgcgcgcatggtttgaacggcatgaacggcgcaagcgttgccgatggcacggcacgcgcgacgcagcccggcacggaacgcgtcacgcagcacgacgggcaacacgacgcgccgcatgaaccgctcagtcccgacgatccgctcgcgccactgcccttcaatccgtacaagggcaatcgcggcgtcacgcgcgcctggcacgcgatgaaaaattcgcttgccggctttcgcgtcgcgattcgcgaggagagcgcatttcgccaggaactcacgctcgccgcgatcctgattccatgcggcgtgctggtgccggtcgatccggtgtcgcgcgtcttgctgctcggctccgtgctgctggtgctgatcgtcgagctgctcaattcgagcgtggaagcggccatcgaccggatttcgctcgaacgccacgaactctcgcgacgcgcgaaggatctcggcagcgcggccgtgatggtcgcgctcggcatgtgcctgatgacgtggttgctgatcgtcgggccgctcgtcgtgcaatggctcaaggcatggctg

SEQ ID NO: 13378 - DNA, 930 bp, Burkholderia fungorum
atgaaatcgacaatgcatgaccgtgatggcgtgatctggctggatggagaactggtgcagtggcgcgatgcgcaactccactttctgacgcattcgctccactatggcatggcggtattcgaaggcgtcagggcatacgaaaccgccgcgggtccggcgattttccggctcgacgaccacacgaaaagactcttcaattccgcgaagatcttcgaaatggccatccccttcagcgtggagacgattcgcgacgcgcagctggaagtggtgcgccgcaatcagctggcagcatgctatctgcgtcctctcgtatggctcggcagcgaacagatgggcctcggtgcgcgcggcaacaccgttcacgtcggcatcgccgcgtggccctggggcagctatctcggcgaggaaggactcgcgcgcggcattcgagtcaagacgtcgtcgctatcgcgccatcatgtgaatgtgtcgctggtccgcgccaaggccagcggctactacatcaactcgattctggccaatcgcgaagtcacccgtaacggttacgacgaggccttgctgctcgatacggaaggctatgtgtccgaaggcgccggggagaacgttttcatcgtgcgcaacggcgtgctgtatacgccggaccttgcgtcgtgcctcgacggcatcacgcgcgcgtcggtgattgaaatcgcgcgggatcagggccttcagttcgtcgaaaagcgtattacccgcgacgaaatgtattgcgccgacgaagcctttttcaccggcacggcagccgaggtcacgcccattcgcgaactcgacgatcgcgtgatcggcaacggcgagcgtggaccgatcacggcgtcgctgcaggaaacgttcttcgccgcggttgccggcaaatcggaacgctacgcgcactggctgacgcgtgtggtgcgc

SEQ ID NO: 13379 - DNA, 1101 bp, Burkholderia fungorum
atgagctcaaattcaaagcagtcctccgactatccggcagtcgaagtccgtaaaggacaggtgacagaaaagatgccgcgcgaagcgtttcgcgagcgtttcatggcgcgtttctacgaccccgcgttccgggcggaagacgacgcgctcggccgcctcgaggcgatcgcgtgggatgcctattgcaacgcgcgcaaatcgcctgtcaccgcgaaagccgggcctggattcgcggaccccgactacgatctgtcagtcgaatggcgcgcggcgagtgagcgggtcaaggccgcccagatccggcaacaggagcgcgcgacgccttcgcgcgtgctgatagtcaacgcttcgtcgcgaaacgactacacgtgccctggcgaaatgtcgaagagcttccggctcggcaaactcgcgcaggaaacgttggagcgcaaagcctgcgaggtcgatttccttgatctgtcgcttctgaactccgagcacgatctgcatattcacccttgcaaaggctgcgtttcgacggcgatgccgctgtgccactggccgtgcagctgctatccgaaccactcgttgggtctcgtgaacgactggatgaacgagatctacgaacgttttgcggcgtgtcacggcgtattgttcgttaccccggtctactggtatcaggtaagcagcccgctcaagctcttgatggaccgtctcgtctgcgcggacggcggcaatcccgaccccacctcgacgcatggcaaacaggccgatgaagcgaagcggctcgaactcgcgggatgggattatccgaagcatctggcgggcagagcgtatggcatcgtcgtgcatggagatgtggccggtatagagggctcccgccgggcgctgaccgactggctcaactggatgggcttcatcgaagccggtgcgaagtcgcgtctggaccgttttatcggctattacgaaccctatgcgacgagtcacgccacgctcgatcgcgacgctgacatgcagaaagaggtcgtcaacgttgccgaggcggtcgccctctgcgtcgcccagatccgcaatggacgcaaggagccggacgagcatctcgaacccgcgcgcgccaag

SEQ ID NO: 13380 - DNA, 903 bp, Burkholderia fungorum
atgagcacgaccgccaccgagccgaatgcggccagcaccgtgaaagccgaatccgcgatccgcacaccgtggagcgagttctggcgcaaattccgcaagcagcatgtggcgcttgccgccggcattttcgtgctgctgctgatcgcgcttgcaattgcggcaccgcatatcgtgccgtacgacccggagaatttcttcgactacgacgcgttgaacgcggggccgtccgccgcgcactggttcggcgtggactcgctgggccgcgatattttcagccgtattctggcgggctcgcgtatttcgctcgaagcgggctttctgtccgttgcgatcggcgcggtgatcggcacgttcttcggcttgctggccggctattacgaaggctggtgggatcgcatcacgatgcgcgtcgccgacgtgctgttcgcctttcccggcattctgctggccatcggcgtggtggcgattctcggcaacggcatgatcaacgtgatctgcgcggtggcgatcttcagcattccggcgttcgcgcggctcgtgcgcggcaatacgctgatgctcaagcagctcacgtatatcgaagcggcacgcagcatcggcgcgtcggattggaccatcatcgtgcggcacattctgccgggagcgatctcttcggtggtggtgtacttcacgatgcgtatcggtacgtcgatcatcacggcggcaagcctgtcgtttctcggcctcggcgcgcagccgccgacgcccgagtggggcgcgatgctcaacgaagcgcgcgccgacatggtgactgcgccgcatatcgcgctgtttccgagtctggcgattttcctgacggtgctggcgttcaacctgctcggcgacggtttgcgcgatgcgctcgatccgaagctcgaccggcca

SEQ ID NO: 13381 - DNA, 921 bp, Burkholderia fungorum
gtgaccgccgccgacccgatcgccgcctatctgtcgaatctcgaacacgagcggcggctctcggcgcatacgctgcgcggctacacccacgaactggaagaactcaagctgctggccaaaggccggccgctcgaaagcctgagcgccgtggacattcgcggcgccgtttcacgggcgcacgcaggcggcctgacggcgcgctcgatcagccaccgcctctcggcatggcgcgcgttttatcgctggctcgccggccgcgtcgatctgccggccaatccggtcgcgaccgtgcgcgcgccgaagcagcccaaaacgctgcccaaagcactttccgtcgacgacgccacgcgtctgatggagagcccgcccgctgcatcgcccgaaggtttgcgcgatcacgccatgctcgaactgttttactcgtcgggcctgcgtctcgcggaactggtcggcctcgacgcccgtttcgccgatgccgatggctaccgctccgccggctggatcaagctcgactcggctgaagtcgaagtgctcggcaaaggcaaccggcgccgcgtcgtgccggtcggcagcaaggcgctggaagccttggccgcctggctcgcggtccgcgaccagatggtgaagcacgatccgcatccgctgttcctgtcggcgcgcggcaatcgcctgtcaccgaacgtggtgcgcgagcgcgtaaagcgcgcggcgctggtcgccggcattcccgccaacgtgcatccgcacgtgctgcggcattcgttcgccacgcacgtgctgcagtcgagcggcgatctgcgcgcggtgcaggagctgctcggccacgccagcatcaccgccacgcaggtctacaccgcgctcgatttccagcatctcgcgcacgtctacgatcaggcgcatccgcgcgccaagaaacgcgac

SEQ ID NO: 13382 - DNA, 195 bp, Burkholderia fungorum
ttgatctgcccgattagcggcggcggaaaaaaaaaaaaaaaaaaaaaaaaaaaaaaaaaaaaaaaaaaaaaaaaaaaaaaaaaaaaaaaaaaaaaaaaaaaaaaaaaaaaaaaaaaaaaaaaaaaaaaaaaaaaaaaaaaaaaaaaaaaaaaaaaaaaaaaagagaacgagacaacgaaaacaaagaagagagga

SEQ ID NO: 13383 - DNA, 450 bp, Burkholderia fungorum
atgcaaattattcttctggaaaaagtcgtcaatctgggcaacctgggcgatatcgtgaaggtcaaggacggttacgcacgtaacttcctgatcccgaacaagcaggctcgccgtgcaacgaaggaagccctggctgaattcgaagtgcgccgcgcagaactcgaaaaagtcgccgctgaaaagctggctgccgctcaggctcaaggcgaaaagctggccggctcgacggttcagatcaatcagaaggctggcgtcgacggccgtctgttcggttcggtgacgaacgcggacatcgctgaagccttggtcaagcaaggcttcgcagtggaaaaggcgcaagtgcgtctgccggaaggcccgctgaagctggtcggcgagcacgctgtccaaatctcgctgcacaccgacgttctggtcgatgtgacggtggctgtgatcggcgaacacgtc

SEQ ID NO: 13384 - DNA, 1383 bp, Burkholderia fungorum
atgaacgcaccgtccaaagatccccaactcgagtcgctgaaagtcccgccgcattcgatcgaggccgagcaatcggtgctgggcggcctgctgctcgacaacgccgcatgggaccgcattgcggactttctgtcgcagagcgatttttaccgctatgaccaccgcatcatcttcgagcacatcggcaagctgatcgcggctacgcgtccggcggacgtgatcacggtgtacgaggcgctcggcaccgcgggcaaggcggaagaggtcggcggtctcgcttacctgaatgcgctggcccagaacacgccgagcgcggcgaatatccggcgctacgcggaaatcgtgcgcgaccgcgcggtgctgcggcggctggtttccgtcgccgacgaaatctcggccgacgccttcaatccgcagggcaaggaagtccggcagttgctggacgaagccgaatcgaaggtgttttcgatcgccgaagacggcgcgcgcggcactcagggtttcctggaaatcgggccgttgctgaccgaagtcgtcgagcggatcgatacgctgtatcacacggccaatcctagcgacgtgaccggcacgccgaccggcttcgtcgatctggaccgcatgacgtccggcatgcacggcggcgagctgatcatcgtcgcgggccgtccgtcgatgggtaagacggcgttttccatgaacatcggcgaatacgtggcagtcgagtatggtttgccggtcgcggtgttctcgatggaaatgccgggttcgcagctcaccatgcgtatgctcggctcggtcgggcggctggatcaacaccgcatgcgaaccgggcgcctgaccgacgaggattggccgaagctcacgcacgccgtgcagaaaatgagcgaggcgcagattttcatcgacgaaaccggcggcctgaacccgatggaattgcgctcgcgggcgcgccggttgtcgcgccagtgcggcaagctgggactgatcatcatcgactacctgcaactgatgagcgggtcgtcgtcaggcgaaaaccgcgcgaccgaaatctcggaaatctcgcgctcgctgaagagtctcgcgaaggaactcgacgtgccggtgatcgctttgtcgcagctcaaccggggtctcgagcagcgcccgaacaagcgtccgatcatgtcggacctgcgcgaatccggcgctatcgaacaggatgccgacgtgatcctgtttatttaccgcgacgaagtatacaacccggacagcccggacaaaggcaccgccgagattatcatcggcaaacagcggaacggtccgatcggacccgttcggctcacgttccacggtcaattcacgaagttcgacaactttgcaggcgcacagaatttctacagcgat

SEQ ID NO: 13385 - DNA, 408 bp, Burkholderia fungorum
gtggcttctatccaaaagtcagcacaaggagtgtgtatgcgtcattatgaaatcgtctttatcgtgcatcccgatcagagcgagcaggtgcccgccatgatcgagcgttacaagagcacgatcacctcgcacggtggccagatccaccgtatcgaagactggggccgtcgccaactggcctacatgatcgagaaactcgcgaaggctcactacgtctgcatgaacatcgaatgcgaccagaccacgctcgacgagctggaacacgcattcaagttcaacgacgctgttctgcgtcacctgatcgtcaagatgaagaaggccgaaaccggcccgtcgccgatgatgaaggaagtgcagcgcgaagaagccaagaagtcggctgctacgcaaccgtccgaagcgcaggct

SEQ ID NO: 13386 - DNA, 297 bp, Burkholderia fungorum
atgaaccggctgcaactcacggccagcgtcgtcgaacgcgaaccggtgcggtacacacccgccggcgttccgattgcaggctgcacgttgcaccaccgcacggaagtcgtcgaagccggtattgcccggcaagtcgaactgaccatgcaggcagtagccgcaggcgaggcgagcggtaagctcgaaagctgtcagatgggcgtggaaacgctcttcacaggctttctggcgaaaaagcaccgcaacgcaagaactctggtatttcacatcacagcattgcaggacattggaaaggac

SEQ ID NO: 13387 - DNA, 273 bp, Burkholderia fungorum
atgccccgcccgactggtaagaaattcgacaagcgtcgtcagcaacagaatccgctcttcaagcgcaagaagttctgccgtttcacggccgctggcgtcgatcacatcgactacaaggacctcgaaacgctgaaggacttcatcggcgaaaacggcaagatcacgccggcgcgtctcacgggtacgaagtcgcactatcaacgccagctggatacggcaatcaagcgcgcacgtttcctcgcgctggtgccgtacaccgaccagcacaaggcc

SEQ ID NO: 13388 - DNA, 537 bp, Burkholderia fungorum
atgagcgcggcgcgcggtgccgtgatatggatgacggggctctccggcgccggcaagtcgacgttggccaacgccttgcatctacggttgaaggaagcagggcaggccgcgatcgtgctcgacggcgatgtgctgcggcgtgggctgaacgccgacctaggcttcacgcccgaggaccgcactgaaaacctgcggcgggtcgcgcacgttgctgcgctcttcatgcagcagggcttcgtggtgatcgccgcggtgatttctccggagcatcggcaccggcgcgcggcgcgtgaaattgtcggcgaagggttcgtggaagtgttcgtgaatgctccgctacaggtctgcgaagcgcgcgacgccaaaggactctatgcgcgcgcgagacgcggcgaaattgcgcatttcaccggtatttccgatccgttcgaagcgccgctcgccgccgacctggtgattgaaactgatcgcatgccggtcaacgagggtgtagaccggctgctcgcgcatctggtcacgatggggcgtgtgagcgga

SEQ ID NO: 13389 - DNA, 1452 bp, Burkholderia fungorum
atgcgccaccggaaaacacgactgggtccgccacggttgcgagcgttcgaaggccgcgaagccgcaaccggatcgaaacattccgtctttcagaaggacacagccatgacagtggaaacaacgtcaatcgatacgctggtggtcggcgccggccaggccggcgtcgccatgagcgaacacctgagcaggctcggcgtgccgcacctcgtcctcgagcgcgcccgtatcgccgagcgctggcgcacggggcgttgggattcgctggttgccaacggccccgcatggcacgaccgtttccccaatctcgagtttgccgatgtcgacccggacgctttcgcgccgaaagagcaggtcgcggattacttcgtcgcttatgcgaagaagttcgatgcgccgatccgcaccggcgtggaagtgaagaacgtcgtgcgcaatgcggggcggcagggcttcacgatcgaaacgtcggaaggcacgatcgaggccaggcgcgtggtggttgcaaccggacctttccagcgcccggtcattccgccgatcgcgccgcaagattcgagtctcacgcagattcattccgccgactatcgcaatccggggcaattgcccgaaggaggcgtgctggtggtgggcggcggatcgtcgggcgtgcagatcgcggacgagttgcaacgtgcgggcaggcgcgtctatctgtcggtcggcgcgcatgaccgtccgccgcgcgcctatcgcggccgcgacttctgctggtggctgggcgtgctcggcgaatgggacgcggaggtcatgaaacccggcagggaacacgtcacgattgcggtgagcggcgcgcgtggcggccatacggtggacttccggcgtctcgcgaatcagggcatcacgctggtcggattgacgaaatcgttcgacaacggcgtggcgactttcgaaacggatctcgcggagaacatcgcgcgcggcgacgagaactatctgtcgctgctggatgcggccgacgcctatgccgcccgcaacggcctcgatcttccggaggaacccgaagcccgcgtcattcccgcggatccggaatgcgtgacccatccgttgcacgatctcgatctggcgaaagccggcgtgacgtcgattgtctgggcgactggctatgcactcgatttcagctggctgaacgtcgacgctttcgatgaaaagggtaagccgaaacatcaacgcggcgtggcgaaggagccgggcatctattttctcggtttgccctggctgtcgcgtcgcggttccgcttttatctggggcgtgtggcacgacgcgaagcacattgccgatcacatcgtcacgcagcgcaaatatctcgcctattacgacgactcgcaacgccatgcacagggcggcagcgagcaaagcaccggcaacacgtccgccgattcacgcgttcacaaagtcagcgagttgggcgtgaat

SEQ ID NO: 13390 - DNA, 1140 bp, Burkholderia fungorum
gtgatcaggtttctgcacaccgcggactggcagataggcacgcaattcggccagttcgaaccggacgaggcggcgcaccttgccgaagcgcgcttcgagaccgtgcgccggatcgccggagaagccgccgcacgcaaggtcgacgccgtgctcgtggccggcgacgtattcgatctgcaaaccgtctcggacacggtaatccgccgtctgttcggtgcgctgcaaggcttcaccgggccgtggatcatgttgccgggcaatcacgacgccgcgctcgtcgagagcgtctggacgcgtgcccagcgcctgaactgcatcgcgccgaatgtgcgcgtggtgctcgaacccggcgtggtgctgctcgacgcctgccgttgcgcgctgctgtgcgcgccgcttacgcagcgcatcacgtatgacgacaccaccgggttcttcgataccacggagacgccggccggctatcaccgcgtcggactcgcgcacggcagtgtgagcggcattctgcaggaaggcatcgactcgtccaatccgatcgcgcccacgcgtgccgcgagcgcgcggctggactatctggcgctcggcgactggcacggccatctgcgcgtcgacgagcgcacctggtacgccggcactcatgagcaggaccgtttccgcgccaacgatccgggcttcatgctcgacgtcacgctgcgggagccgggcgcgccgccggaggtcgagccggtgcgggtcgggcaatatcaatggcatcgctgggacgaaaccattgccgtgccgaccgatgtggattcgctcaaggcgcgtcttgccaagttgggtagccacgacgtgctgcgcgtcaccgtcggcggtacggcggcgctcgccgacgcggaagcgatccacgtcgcggtggaagaagcccgcgcccgtgtgcgggccttgcgcgtcgacctgagcggcctgcaagtgctgcccaccgccgacgatctcgccgaactcggcgcgcaaagcggttatctcgcgaaagtggtggcgcgtctgcgcggcttgcaggaagatccgcagtccgacccgcaggcggtcaggcgcgcggcggaggcgttgttgctgctggcgcgttttcaacgtgaattgccgcgcgaagcgaggtccgca

SEQ ID NO: 13391 - DNA, 1008 bp, Burkholderia fungorum
atgttccgctttgttttgcgccgcgtcggcatggtgattccgaccttcatcggcatcacgatcctcgcgttcgcgctgattcacctgataccgggcgaccccatcgaagtgatgatgggcgagcgcggcgtcgatcccgccatgcacgccgtggcgatgcaccggctcgggctcgacgaatccctgcccatgcagtacgtccactacatcgggcgcgcgctgcacggcgacctcggcacctcgatcatcaccaacaccagcgtgatgggcgaattcctcgcacgctttcccgctaccgtcgaactgtcgatctgcgcgatgctgttcgcattgatcgtcgggttgccggcgggcgtgttcgcggccttgaggcgcggcaccgtggtcgatcacggcgtgatgggcacggcgctcaccggctactcgatgccgatcttctggtggggcttgatcctcatcatggtgttttccgtgaagctcggctggacgccggtgtccggccgcatcgcggtcgaatacgacattccgcacgtgaccggcttcatgctgatcgacgcgatgatgtcgaccgacgaaggcgcgttcagatccgcgctgagccatctgatcctgccggccatcgtgctcggcacgattccgctggcggtcgtcgcgcgcatgacgcgttcgtcgatgctcgaagtgctgcgcgaggactacatccgcaccgcgcgcgcgaagggcctgtcgccgggacgcgtgatcgtcgtgcatgcgttgcgcaatgcgctgattccggtggtgaccgtgatcggtctgcaggtcggcacgctgctcgcgggcgcggtgctgaccgagacgctgttttcgtggccgggtatcggcaagtggctgatcgacgcgatcggccggcgcgactatccggtggtgcagggcggtatcctgatgatcgccacgctggtcattgtcgtgaacctcgtcgtcgatctgctgtacggcgtgctcaacccgcgcatccgccatacgagg

SEQ ID NO: 13392 - DNA, 1113 bp, Burkholderia fungorum
gtgagcgacatcgtcgaacgccgccatacgttgccgatcctcgccaatttgctgattaccaagaacggcccggacgtgtcgttcctgtccaccgacctcgagttgcagatcaccacgcgtgccgatttcggcgtgggcggcgattcggtggcgaccacggtggcagcgagaaagctcctcgacattctgcgcgccatgcccgacggccaggtcacgctcacgctgaacgacaagcgtctgaccgtgcaatccggcaagagccgctttgcgctgcaaacgctcgccgcggacgaattcccgacggtcgcgcaagctaaagactacggcgcgaacctcgtggttccccagaagacgttccgccagttgctcggcatggtccatttttcgatggcccagcaggacatccgctactacctgaacggcatgctgctggtagtggacggcgaccagctgatggcggtcgcgaccgacggacaccgtctggcgttctcgtccatgaagatcgaaggttcgttccagcgtcaggaagtgatcattccgcgcaagacgattctggaactccagcgtctgctggaagacatcgacgacacgctgaagatcgacatcgcgcagacgcaggtcaagttcacgttcggccaggtcgaactggtgtcgaagctggtggaaggcaaattccccgacttccagcgcgtgattccgaagtcgcacaagaatcagttcgtgatcggccgtgaagaactgcagcgctcgctgcaacgcgccgcgattctgacctcggacaaattcaaggggcgtgcgctgcatcatcgagccgggccagttgaagatcatgtcgaccaacgccgatcaggaagaggcgcaggaagaactggaaatcgcatacgacggcgacagcgtcgatatcgggttcaacgtcacgtatctgctcgacgtgctcgcgaacctgaaggtcgacacgttgcaggtgagcctgggcgacgccagctccagcgcgttgatcacgattcccgagaacgacgaattcaagtacgtcgtcatgccgatgcgcatctaacgcgtccagaaaccagagaacacaccaaggggcgcagcgcccctttggcgtttttatgg

SEQ ID NO: 13393 - DNA, 330 bp, Burkholderia fungorum
gtgtttgttatggcgtcggtttcccgctataatcgcgtgtttcagtcgttccgaaccccggttttcaaggattctagtatggtcatcatccgcttggctcgtggcggctccaagaagcgcccgttctacaacatcgtcgcaaccgattcgcgtaaccgtcgtgacggccgcttcatcgagcgcgttggcttctacaacccggtcgctacgaagggcgaatccctccgtatcgctcaggaccgcctcacgtactggcaaggcgttggcgcacaactgtcgccgaccgtcgagcgtctcgtgaaggaagctgcaaaggcgcagccggctgct

SEQ ID NO: 13394 - DNA, 732 bp, Burkholderia fungorum
atgtccgagcgtgattccggtagttcaggtcccgtgaaggcaaaagctgcggccccgcgcgcaaagacgtctggtcaggcgccgttcggtgccttcgtccgcaagccggtcgaaaaaaccgaaggcaaggcgaaagccaatgcggcaaacgccggttccggtgcaacagaaatgcgcatggaaacggcagaaagctggccggtcgatgcggtcgaggtcggcgcaatcgtcgacgcttacggcctcaaaggctgggtcaaggtagccgctcatgcggatgccggccacggcggcgacgctttgctgagcgcgaagcgctggtggctgctcaaaggccaggagcgcaaatcggcgccgtcgttgcaggcgaaaacgcatagcgacagtgtggtggcccatctgggcggcgtcactgaccgcgatgtggcgctggcactgcgcggctcccgcgtctatatcagccgcagcgagtttccggctctcggagccgacgaattctactgggtcgacctgctcggcctggacgtggtgaacgttgccggagtcagtctcggcaaggttgcagacatgatcgacaacggtgcgcactcggtgttgcgtatcgaatatccggctaccgacaaaagcggcaagccggtcaccggtgagcgtttgatcccgttcgtcggcgtctttgtcaaaacagtggaccaggcggcgaagcagatcaccgtcgactgggaagctgattac

SEQ ID NO: 13395 - DNA, 309 bp, Burkholderia fungorum
atgaacaagacctttcgtttgatgctcgccaacaccgtattgatcgccgctggcgcagccgccgtggcgtcggcttcggccgcagaagtcgtcgtgatcgcgccttccgcgccgccgcccgtgcgctacgaagcggtgcccgcgccgcgcgtcggctacgtgtgggatcgcggtcactggcgctgggatcatggccgctatgtgtggataggcggccactggcaggctgagcgcgtcggctatcactgggtgccgggccactgggtcgcgcacggcccgcactatcgctgggttgaaggccactgggcg

SEQ ID NO: 13396 - DNA, 996 bp, Burkholderia fungorum
atgaacaccgagacgttttccacgccaccccacacgcttgtgattgcgtcgcgagagagccgcctggccatgtggcaagcggagcatgtgcgatgtgcgctgcacaaattatatccatcttgtgacgtaaaaatcctcggaatgacaacacgtggcgatcaaattctcgatcgcactttgtcgaaggttggcggcaagggcctcttcgtcaaggaactggaagccgcgcttgccgacggccgcgccgatctcgccgtgcattcgctcaaagacgtgccgatggcattgcccgaaggctttgcgctatccaccatcatggaacgcgaagatccgcgcgacgcactggtttccaatacgtacgactcgcttgccgcgttgccggaaggcgccgtggtcggcacctccagcctgcgccgcgaggcgatgctgcgcatgcgctatccgcatctcgaagtgcggcctttgcgcggcaatctggacacgcgcctcgccaaactcgatcgcggcgattacgcggcgatcattctggcggcggccgggctgaagcgcctgggtctcggcgagcgtatccgcgcgttgctcgatcccgaagacagcttgcccgcagcggggcaaggcgcgctcggcatcgagattcgcgccgaccgcgcggaactcgcggcatggctcgcgccgctgcatcacgaacacacggccgcagccgtcgaagcggagcgcatggtctcgcgcgcgctcggcggcagttgcgaagtgccgctcgccgcctatgccacatggcatgacggcgcgctgcatctgcgcggcatcgtggcgacgccggacggccagcgcgtgctgagcgcgcaggcgtcggcgccggcaaccagcgtcgagcaggctatcgcgctcggccaggaagtcgcgggcgcgctcgagcagcaaggcgcgatggagatcgttcgcgcactcggcgccgccaacggcgcggctgcggcggacagcgcggtgaccggcgag

SEQ ID NO: 13397 - DNA, 1683 bp, Burkholderia fungorum
atggctgcgaacgaatacgactacatcatcgtgggcgcgggttcggcgggcaatgtgctcgcctcgcgcctcgccgaagacgcggacgtgaccgtgctgctgctcgaagcgggcggccccgactaccgcttcgacttccgcacgcagatgccggccgcgctcgcctatccgctgcaaggacgccgctacaactgggcgtacgaaacggaccccgagccgcacatgaacaaccggcgcatggaatgcgggcgcggcaaggggctcggtggctcgtcgctgatcaacggcatgtgctatatccgtggcaatgcgctcgattacgacggctgggccgcgcacgcgggcctcgaaaactggacctatctggattgcctgccgtatttccgcaaggccgagacgcgcgatatcggtgcgaacgcgtatcacggcggagacggtccggtgcacgtcaccaccagcaagcccggcaacaacccgctctttgccgcaatggtcgaagccggtgtgcaggcaggctttccgcgtaccgacgatctgaacggctatcagcaggaaggcttcggcccgatggatcgcacggtgacggcaaacggccggcgcgccagcacggcgcgcggctatctggatcgcgcgaaagcgcggccgaatctgaccatcgtcacgcatgccgtgacggatcgcgtgctgttctcgggcaagcgcgcagtcggcgtctcgtatctgcatcatggcaatgtgctgaatgcgcaggctcgccgcgaggtgctggtgtgcagcggcgcgattgcttcgccgcaactgctgcagcgctcgggcgtgggccgctccacgtggctgcgcgaactggacgtgccgctcgttcacgatctgccgggtgtgggcgagaacctgcaagaccatctggagatgtatatccagtacgagtgcaaggagccggtttcgctttatccggctttgcagtggtggaatcaaccggccatcgggctcgaatggatgctgaacggaaccggcatcggcgcgagcaaccagttcgaagcaggcggctttatccgcacgcgcgacgacgatccgtggccgaacatccagtatcacttcctgccggtcgcgatcaattacaacggttcgaacgcgatcaggatgcacggttttcaggcgcacgtcggttcgatgcgctcgccgagccgtggccgcgtgaagctcacctcgcgcgatccgaacgcgcatccgggcatcctgttcaactatatggccgatccgctcgactggcgcgagttccgcgacggcattcgcatcacacgcgagatcatgcggcaaccggcgctcgaccgttatcgcggccgcgaactgaaccccggcgccgaactgactaccgacgaacagctcgatagtttcgtgcgcatgcgagcggagacggcgtttcatccatcctgttcctgcaagatgggctacgacgacatggccgtagtcgacaacgagggccgcgtgcacggcatgcaaggactgcgtgtggtggatgcgtcgatcatgccgcgcatcaccaccggcaatctgaacgcgccgaccatcatgctggcggagaagatcgccgaccgtattcgcggacgcgaggcgctggcgcgggtggatacgccctatttcgtggcgaatggcgtggcttcgcgcaaacgggagagcgcgacggtg

SEQ ID NO: 13398 - DNA, 1477 bp, Burkholderia fungorum
gcgtacattgccagcgatgcggacccgtcgaagaacacccttgccacgggtacgctgacgtactcggacatgcagaatcattcggactacagcgcgtcgacaagcggcttcagtgcgggcacgcagggcgtcatgccgatgctgggtcagtcggcaagcggcagttccagtgcgacgacgaagagcggcgtgagcgcgggcacgattaccattaccgattccgcgaatcagaagcaggaagtggcgagcctgaaccgggatacgtcgaacctgaacggtacggtgtcgaagctgcctgacgtgaacacggtgcttggcaatcaggctgatgtgatgaacgcggccaatgcggcaggggaagcggtggcgaaggacatcggcacgtacgcggactacaagcagaaagcggcgcttgacggcgcgaaggcggcgaacgcgctcggagaaaccggtacggcggcgcaatacgggcaggatgcggcggactggggagaagggggcgcggatcgcgtcggtatgcacattgtggcaggcgcggtgcttggcgggctgggtggtggcaactttggcagcgcgctcggcggggcggcaggtgcgggggtttcggctggactcgcgccgaggttgaatgagttgagtaattcgattgccaatggggatccgaccggcaatgcgacggctgacaggatgctcgggcaggttgtttcgaatctggtggcggggggcggcgggtgcggctgcagggggtggtgcaggtgcttttgctgcgtcgaatgcggatatgtacaatcggcagttgcatcctgaggaaaagcaggcaatcaaaaatctggccaacggggacaccgataaagaacaccgcttggaagcggctggatgtgccttggttcactgtgcggccgaatttgcgccgggtacggtggactacgctaaatattcagcgctggaggcagaaggtgcaggctacaccaccgaacaggctcagttgcggaactacaccggtacgtctgtctcgcttgcgggctatggtggcatggtgcggcagaactcggggggattgttccaatatcctgtggctgattcaactgctgacaacaaggcaatgcaggctgcaatggaggctcagcgccccgggtcagttgactatttgacggtacaaggtggcggacttggggtcagcggcgcattaactgtcaatcttcataacggcaatgtttacttgtcgggctcaggctcggtgcctgtcgtgccaggcgcgtcaattgttgggggtatggtcgcctccaacccgggattaccttcgggacagaaaggaagcaacaccgacgactttttggcgggcgcatctgctggaggcggtgcgtgcgcgttcggtgtctgcgggggcgtgaaccacggaatcggtggtgatactgccttcgaggtaggcgtaggaacaggtgggataaccaaggcgcctaatctgagtgggtatggc

SEQ ID NO: 13399 - DNA, 897 bp, Burkholderia fungorum
atgaccttcgcagtcgaagcaatccaggaacccattgcagcgcgcattaccggcctcgaccttcggcaacctctgtcggctgccgacgcgcaagccatcgacaacgtaattgcacagtatccggtactcgtattcccggcgcaggatatcgacgacaatcaactgctcgcgttcagcgaaaacttcgggccggtgcaggtctccgtgcaatacgcgacgcgtcagaacgaacatcgcctgcagccgcgtatcagcgacatttcgaacgtcggcaaggacaacgagacgttcaaggcgggcgacaaccgccgcatgaatacgtttgtgagccggcgctggcattcggaccagtcgtaccagcccattcccgcccgctactctttcctgctcaactactcggtgcccgcgagaggcggcgagtcccagttcgccgacatgcgcctcgtctatgactcgctgccgcaggatcttcgcgagacgatcgaaaatctctccgcggagttcgacatcctccatacgcgagcgatgtgtggtttcaccgatttcccggaagaagagcgcgcgatgctcaagccgtcgatccaccggctggtgaaaacgcatccgctgtcgggacgcaagacgctctatctttccgtgcatgcgactcacgtagtggactggccgattcccgaaggccgcgatctgttgcgggaactgatggagttcgccacgcagccgcaattcatttacacccaccactggactgtcaaagacctcgtgatgtgggacaaccgcacactgatccaccgcggcctgcgctactcgccgccgacggatcgccgcgaaatgcatcgcgcaaccgtcatggacgaaccggaatggacgcgggccgccgcgccggtgaacgttcccgcg

SEQ ID NO: 13400 - DNA, 873 bp, Burkholderia fungorum
gtgcgccgagcttctgcgagccttacagaagccgcatatacttcggcgattcaagccaatgttcgtgcacgcgcgcgtcgcatcatccgcccgtctgaacgccccgcccgcttgtccgccacacttttcggaaaccgcatgctgcttcgtgaggaaagcgtcgttcccgcgctcgagtgccgtggattgagcaagacgtacggcgcaggccgcatcgtgctggcgcacctcgatttcacactcgcgccgggcgagttcgtcgcgatcatgggcgattccggcgtcggcaaatcgacgctgctcaatctggtagccggcctcgacagcgcggatagcggcgacgtgatcatcgacggcagcgtcgtctcgcgtctggacgacaacgcggccacccgcttgcgccggcagaaactcggcttcgtctttcaggcgtttcacgtgctgcctcacctgacgctcgcgcagaacgtggcgctgcccctgttgttgaacgatctgcctactgctgccgcgctcgacatgctcgcggccgtcggtctcagcggacgcggtgacgactttccacgccaactctcgggcggcgaactacagcgtgtcgcgatcgcgcgggccctcgtgcatcgcccgaaactgattctcgccgacgaacccacgggcaacctcgaccccgacaccgcccacgacgtgctcgccctgttccgcgcgcaaagcaaggcgaccggcgcggccacgatcatggtcacgcactcggaggccgccgcggccgttgccgaccgcatcctgatcctgagcgacggcggtctgcacgcttcgtcccgcacctccgcgcctttcggttcgcgctcccccgcagcttccgccgacgatgtccac

SEQ ID NO: 13401 - DNA, 1191 bp, Burkholderia fungorum
atgtataacttgcctgacgaaagaggccatttcggccagtttggcggcacgttcgtcgctgaaacgctggttcacgcgctcgacgagctgcgggcggcgtacgggaaatatcagaaagaccctgatttcgtcgcggaatacgagcgcgaattgaagtatttcgtcggccgtccgtcgccgatctatcacgcacagcgctggagcgacatgctcggcggcgcgcagattttcctcaaacgcgaggatttgaaccacacaggcgcgcacaagatcaacaacgtgatcggccaggcgctgctcgccaagcgcatgggcaaaccgcgcgtaatcgcggaaaccggcgccggccagcacggcgtggccacggccaccatcgccgcgcgtttcggcatggagtgcgtcgtctatatgggcgccgaggacgtgcgccgccaagccgccaacgtgtaccgcatgaagttgctgggcgcgactgtcgtgccggtcgagtcgggctcgcgtaccctgaaggacgcattgaatgaagccatgcgcgattgggtgactaacgtcgaagacacgttctatatcatcggcaccgtggcaggaccgcacccgtatccgatgatggtgcgcgatttccagcgtgtgatcggcgacgaatgcaaggtgcagatgccggagctggtcggtcgtcagccggatgcagtgatcgcgtgcgttggcggcggttcgaatgcaatggggatcttttacccctatattgacgacgcttccgtgaaattgatcggcgttgaagcggccggcgacggcatcgaaaccggtcgccacgctgcttcgctgatcggcggaagtcccggcgtgctgcacggcaaccgcacctacctgcttcaggacgaaaatggccagatcatcgaaacccattcggtgtcggcgggcctcgattatcccggcgtcggtcctgagcacgcgtggctaaaagagagcaaacgcgcggaatatgtcggcatcaccgacgaagaagcgctcaaggcgtttcacgattgctgccgcatcgagggcattattccggcgctggaatccagccacgcgctggcctacgccacgaagctcgcgccgacgctgccgaaggacaaataccttctggtcaatctgtcgggccgcggcgacaaggacatgcatacggtcgccgagcgatcgggcattcagttc

SEQ ID NO: 13402 - DNA, 1761 bp, Burkholderia fungorum
atgaatatgcccagcgcggaattctccacgtcggatacgacccctcatcccgaagctgactctatcggcgccaccgtgctcatgaaggcactggccgacgaagacgtcgagtttgtctggggctatcccggcggctcggtactctacatttacgacgagctgtacaagcaggacaaattccagcacatcctcgtgcgccacgagcaggccgcagtccacgccgccgacgcctacgcgcgttccaccggcaaggtcggtgtgtgcctcgtgacctccggccccggcgtcaccaatgcggtgaccggcatcgccactgcctacatggattcgattccgatggtggtgatcagcggccaggtgccgactgccgcgatcggccaggatgcgttccaggagtgcgacacggtcggtatcacgcgtccttgcgtgaagcacaacttcctcgtgaaggacgtgcgcgacctcgccgccaccgtcaagaaagccttttacattgcccgtaccggccgtcccggccccgtgctgatcgacattccgaaagacgtgtcgaaggcgccttgccagtacgagccgctcaaaagcgtgtcgctgcgctcgtacaacccggtcacgaagggccactccggccagatccgcaaagcggtcgcgctgctgttgtcggcgaagcgtccttatatctataccggcggcggcatcattctcgcggacgcatcgcgtgaactgaaccagttcgccgatctgcttggttatcccgtcaccaacacgttgatgggtctgggcggctaccgcgcgagtgacaaaaaattcctcggcatgctcggcatgcacggcacgtacgaagccaatatggcgatgcagcactgcgacgtgctgatcgcgatcggcgcgcgtttcgacgaccgtgtgatcggcgacccggcgcacttcgcgtcgcgtccgcgcaagatcatccatatcgacatcgacccgtcctccatctccaagcgcgtcaaggtcgacattccgatcgtcggcgacgtgaaggaagtgctgaaggagctgatcgagcagctgcaaacggccgagcacggcccggacaccgcggcgctcgccgactggtggaaggacatcgaggcgtggcgcgcgaaagactgcctcaagttcgaccgcaagagcgacatcatcaagccgcagtacgtggtggaaaaggcgtgggaactgaccgacggcaatgccttcgtgtgttccgacgtcggccagcatcagatgtgggcggcgcagttctatcgcttcaacaagccgcgccgctggatcaactctggtggtctcggcacgatgggcttcggcctgccggcggcgatgggcgtgaagatggcgcacccggacgacgacgtgctctgtatcacgggcgaaggctcgatccagatgtgcatccaggagctctccacctgcaagcagtacgagactccggtgaagatcatttcgctgaacaaccgctatctgggcatggtgcgccagtggcagcagatcgaatacagcaagcgctattcgcattcgtacatggatgcgctgccggatttcgtgaagctcgccgaagcgtacggccacgtgggcatgcgtatcgaacgcacggcggatgtggagccggcgttgaaggaagcgctgcgcctgaaagatcgcacggtgtttctcgatttccagaccgatccgaccgaaaacgtctggccgatggttcaggccggcaagggcatcaccgagatgctcatgggttcggaagatcta

SEQ ID NO: 13403 - DNA, 567 bp, Burkholderia fungorum
gtgtattgcggctcctccaacggggccaaaccgttgtacgcggaagccgcgcgcgcttttggccgcgcgctggtgcaagccggtctcgcgctggtctacggcggcggcaaggtcggcctgatgggtgtgatcgccgatacggtgatggccgaaggcggccgtgcgatcggtgtgattcccgagttgctggtcaacaaggaagtcggccacgacggcctgaccgaactgcacgtggtgcccgacatgcatcatcgcaagaagatgatggccgacctgtccgacgcgttcgtcgcgatgccgggcggcgcgggcacgctcgaagaactgttcgaagtctacacatgggcgcaactcggctaccaccagaaagcggtggcactgctgaatatcgacggcttctacgatccgctgatcaagctgttgcagcacaccgtcgaagaaggtttcatgcgccagacctatttcgacatcctgcagatcgaggccgatcccgccgcgctgatcggcaagctgcaacgctatcagccgcccgccagcgacaagtgggcaatcagccgcaacgcggtc

SEQ ID NO: 13404 - DNA, 270 bp, Burkholderia fungorum
atgtccgcagttgaaacaagcaagaagtccgaagtcgttgcgcaattcgcacgcgcagctaacgacaccggctcccccgaagttcaggtcgcgctgctcacgacccgcatcaacgaactgaccgttcacttcaaggcacacacgaaagatcaccacagccgccgcggtctgctgcgcatggtgagccgtcgtcgtaagctgctcgactacctgaagggtaaggacgcggatcgttaccgcgcactgatcgagaagctgggtctgcgtaag

SEQ ID NO: 13405 - DNA, 489 bp, Burkholderia fungorum
atgagacacatcatttccgtcctgctggaaaacgaaccgggcgcgttatcacgcgtggttggtctcttctcggcacgcggctacaacattgaaaccttgacggtggctccgaccgaagaccgttcgctgtcgcgcatgaccatcgtctccattggctcggacgacgtgatcgaacagatcacgaagcatctgaaccgcctgatcgaggtggtgaaagtggtcgaccttaccgagggcgcccacatcgagcgcgagctgatgttgatcaaggtgagggcggtcggcaaggaacgtgaggagatgaagcggatgtcggatattttccgcggccgcatcatcgacgtcaccgaaaagacctacacgatcgaactgacgggcgcgagcgacaagctcgatgccttcatcgaagggatcgacgctacggcgattctcgaaacggtccgcacgggcagttcgggcattggtcgcggcgagcgcattctgaaggtg

SEQ ID NO: 13406 - DNA, 2142 bp, Burkholderia fungorum
atgttcaataagatcgtcaaagaatttcagtggggacaacataaggttcgcctcgaaaccggcgaaatcgctcgtcaggcaagcggcgccgtgatcgtcgacgtcgaagataccgtggtgctggccaccgtggtcggcgccaggacggccaagccgggtcaggactttttcccgctgaccgtcgactacctcgaaaagacttacgcagccggcaagattccgggtggcttcttccgccgcgaaggccgtccgtcggaaggcgaaacgctgatctcgcgcctgatcgaccgtccgctgcgtccgctgttcccggaaggcttctacaacgaagtccaggtcgtgatccacgtcctttcgctgaaccccgaaatccccgctgacattcccgcgctgatcggcgcgtcggcggcgctcgccgtgtccggtctgccgttcaacggcccggtcggcgcagcacgcgtggcctacatcaacaacgaatacgtgttgaacccgacgcgtccgcaaatgaaggaatcggcgctcgacctgatcgtggccggtacggaacgcgcggtgctgatggtggaatcggaagcgcagcaactgagcgaagaagtgatgctcggcggcgtggtgttcggtcacgaacagatgcagatcgcgatcgacgcgatccacgatctggtccgcgaaggcggcaagccggaatgggattggcagccggcggcgaagaacgagccgttgatcgcccgcgtaacggaactggcgcaagccgatctgctcgccgcttatcaattgcgcgacaagcaggctcgttcggccaagctgaaggaaatctacgcagccacgtcggcaaagctggaagaagacgcggcagcaggcggcacggtagcggccgacaaggcaactgtcggcaacgtgctgttcgacatcgaagcgaagatcgtccgtacgcagatcctgaacggcgaaccgcgtatcgacgggcgcgacacgcgtaccgtgcgcccgatcgaaatccgtaccggcgtgctgccgcgtacgcacggttcggcactcttcacgcgcggcgaaacgcaggcgctggtggtggccacgctgggcacgaagggcgacgagcagaacatcgacgcgctcgaaggcgaataccgcgaacgcttcatgctccactacaacatgccgccgttcgcgaccggcgaaacgggccgcgtcggttcgccgaagcgccgtgaaatcggtcacggccgtctggccaagcgcgcgctggccgcgtgcctgccgagcgcggacgagttcggctactcgatccgcgtcgtgtcggaaatcacggaatcgaacggttcctcgtcgatggcttcggtgtgcggcggctgcctcgcgctgatggacgccggcgtgccgatgaaggcgcacgtcgccggcatcgcaatgggcctgatcctggaaggcaacaagtttgccgtgctgaccgacatcctcggcgacgaagatcacctcggcgacatggacttcaaggtggcgggcaccgagcaaggcgtgaccgcgctgcaaatggacatcaagatccagggcatcaccagggaaatcatgcaggtcgccctcgcgcaagccaaggaaggccgtttgcacatcctcggcaagatgacctcggctgtctcgggcgcgaacacggtgctgtcggactacgcaccgcgcatgatcaccatcaagatcaatccggaaaaaatccgcgacgtgatcggcaagggtggttcggtgatccgcgcgctgaccgaagaaaccggcacgacgatcgatatttcggacgacggcgtcgtcaccatcgccagcacgagcagtgaaggcatggcggaagcgaagaagcgtatcgagaacatcacgctggaagtcgaagtgggtcaggtgtacgaaggcaccgtgctcaagctgctcgatttcggcgcgatcgtgaacatcctgccgggcaaggacggtctgctgcacatttccgaaatcgccaacgagcgtatcaaggacatcaacgactatctgaaagatggccagcaggtgaaggtcaaggtcatccagacggacgaaaagggccgcgtgcgtttgtcggccaaggcgttgctgaacgacgccgcgaacggcgcgccgcaaggcgagccgacgccgcagcag

SEQ ID NO: 13407 - DNA, 1014 bp, Burkholderia fungorum
atgaaagttttctacgacaaggacgccgacctctccctcatcaagggcaagcaagtcaccatcatcggctatggctcgcaaggccatgcgcacgcgctgaacctgaaggaaagcggcgtgaacatcaccgtcggtctgcgcaagggcggcgcatcgtggagcaaggccgagaacgccggcctgcaggtcaaggaagtggcagaagccgtcaagggcgcagacgtggtcatgatgctgctgccggacgagcagatcgccgaagtctatgcgaaagaagtgcacgccaacatcaagcaaggcgcggcgctcgcgttcgcgcacggcttcaacgtgcattacggccaggtgattccgcgtgccgacctcgacgtgatcatgatcgcgccgaaggcaccgggccacacggttcgcggcacctactcgcaaggcggcggcgtgccccacctgatcgctgtcgcgcaggacaagtcgggcgcggcgcgtgacatcgcgctgtcgtacgctgcggcgaacggcggcggccgtgccggcatcatcgaaaccaacttccgcgaagaaacggaaaccgacctgttcggcgaacaggccgtgttgtgcggcggtacggtcgacctgatcaaggccggcttcgaaacgctggtggaagcgggctacgcgccggaaatggcgtacttcgaatgcctgcacgaactgaagctgatcgtcgacctgatctacgaaggcggcatcgcgaacatgaactactcgatctcgaacaacgccgaatacggcgagtacgtgacgggtccgcgtatcgtgacggctgaaacgaagaaggcgatgaaggccgtgctgaccgacattcaaacgggcgagtacgcgaagagcttcatcctcgaaaacaaggccggcgcgcccacgctgcaatcgcgccgccgtctgacggccgaacaccagatcgaacaggtcggttcgaagctgcgcgccatgatgccgtggatcgcgaaaaacaagctggtcgatcagtcgaagaac

SEQ ID NO: 13408 - DNA, 963 bp, Burkholderia fungorum
gatattgcttcgctgcatgccgtgtttctcgcgttcaccgcgcaaacgcgcatgagcggcgtcgatctgcctggccgggaaatccgcaagggcgcggccgacgcagtgaagaactatgtcgaagcgaatggcggccggttcccgaacgaagtcagcaacgccgtggccgaagtcgcccgccgtggcagcacgccgctcgtggtcgccgagaagggcgagcagggcgcgcgcgtgctcggcgtgatcgagctgaaggacgtggtgaagggcggcatcaaggagcgtttcgccgaactgcgcaagatgggtatcaagaccatcatggtgacgggcgacaaccggctgaccgcggcggcgattgccgctgaagccggcgtcgacgatttcctcgccgaagccacgccggaagcgaagctctccacgattcgcgcgcaccaggccgaaggccgcctcgtggcaatgacgggcgacggcaccaacgacgccccggcgctcgcgcaggccgacgtcgcggtggcgatgaacaccggcacgcaggccgcgaaggaagcgggcaacatggtcgacctcgattcgaatccgaccaagctgatcgagatcgtcgagatcggcaagcagatgctgatgacgcgcggctcgctcaccacgttctcgattgccaacgacgtcgccaaatacttcgcgatcattcctgccgcgttcgccacgacctatccggcgctgaacgcgctgaacgtgatgcatctggccacgccggcctcggcgatcatgtcggcggtgattttcaacgcgctgatcatcgtgctgctgattccgctggcgctcaagggcgtgcgttatcgcgcgctgggcgcggcgatcctgctgcgccgcaatctgctgatttacggtttgggcgggatcatcgtgccgttcatcggcatcaagctgatcgatatggtgctggccgcattcggttgggtc

SEQ ID NO: 13409 - DNA, 2832 bp, Burkholderia fungorum
atgaaccgccccgatcccgatgagttgctcgacaagctgcaacgcgacgaagaaaaacgtcagcgaggcaggctgaagatttttttcggcgcgtcggcgggcgtcggcaaaacctatgcaatgctgcaggccgcgcgccgccgtcacgacgaaggcgcggacgtggtggtcggcattgccgaaacgcatggccgcagtgaaaccgcggcgctgctcgaaggcctcgacgtgctgccgctcgcgcagatcgagtatcgcggccgcaagctcggcgagttcgatctcgacgccgcgctcgcccgcaagccgcaactgatcctcgtcgacgaactcgcgcattcgaacgtgcagggcgcgcgccatctgaagcgctggcaggacgtctacgaactgctcgacgcgggcatcgacgtctatacgacggtcaacgtccagcacctcgaaagcctgaacgacgtggttggccagatcaccggcattcgcgtctgggagacggtgccggaccgcgtattcgatagcgccgacgaagtcacgctggtcgacctgcccgccgaggaactgctcgaccgcatgcgcgacggcaaggtgtatttgccgcagcaggccgagcgcgcggtgcgcaacttttttcgcaaaggcaatctgatcgcgctgcgcgaattggcgctgcgccgcaccgcggaccgtgtcgacgcgcaaatgcgcgagtatcgcgccgaccgctcgatccggcgcatctggcaggcgcgcgagcgcttgctggtgtgtgtcggccccggtccggaagcgccgatgctggtgcgcgcggcggcacgccttgccgccagcctgaaggccgactggatcgcggtttatgtcgagacgcccgcgttgcagcgcttgccggatgcgcgtcgcgaacgcacgctgaacgcgctgaaactcgccgccgaactcggcgccgaaaccgcgacactggcgggcgccgacgcggccaccgcgttgatcggctatgcgcaggcgcgcaacgtatcgaaactggtggccggcgcgtcggcgcgcacgggtgcggagcgctggctgcgccggccgctcagtgaacggatcgccgaaaaggcgggcgatctcgatctcacgctgattcgcgcttcgtccgggcgcgacggcggcgagcatcggcatctgctgaacaccaccgcgaatgcgtggcgcgaggcgctgagcgcggcgcgcgaacgccgctcgccgccgcgcgcctatgctttcgcgctggcgatctgcgcggccatcacgctgctcgcgagccagctgagcgaccatatcgatctgaccaacctcgtcatgctgtatctgctcggcgtgatcttcgccgcggtgaagctcgggcgcgggccgggtgtggtgctgtcgttcatgagcgtggccgcgttcgatttctttttcgtgccgccgcgcatgtcgctgtcggtctccgatacgcagtacctgttgaccttcttcggcatgctgctgacttcgctggtgatcagccatctcacgtcgagcttgcgccgcgaggcgagcgtggcgcggcgccgcgagcagcgcaccggcgcgatgtacgcgatggcgcgcgaactggccgcggcgttgaccacggagcagatcgtcggcattggcagccgtcatgtgagcgaggtgttcggcgcgcgcgttgcgattctgttgccggacagcgtcgatcaggtgaagcagaagatcgaggatcccgacgcggcggtcacgctcgaaggcgagatgctcgatagcgatgtcggccagtgggtctacgatcagcagaagccggccggccacggcaccgacacgctgccggccgccgccgcgctatacctgccgctcaaggcgccgatgcgcacgcgcggcgtgctggcggtcgtgacgcgcaacgagggtgaactcgacgtgcccgagcagcagcgtatgctcgacgcgttcgccgcgcagatcgcgctcgcgctggaacgggtgcactacgtggatatcgcgcgcgatgcgctcgtcaacatggagtcggagcgtttgcgcaactcgttgctgtcggcgatctcgcacgatctgcgcacgccgttgacgaccatcgtcggcttctcgtcgatgctcgcgcaatcgcccgacgcgcagcccaacgccgaactggtcgaagcgattcacgaggaagcgctgcgcatgaccggcatcgtcacgaatctgctcgacatggcgcgtctgcaggcgggcagtctgcaactgaatcagcaatggacgctgctcgaagaaaccgtgggcgccgcgctgcgtgcgtgcaaacgcgtgctggcgaatcatccggtgcaggtgaagctgcccgccgatctgccgctcctgcatctggacgctgtgctgatggagcggcttttctccaacctgttcgaaaacgccgccaaatacactgcgccggccacgcctttgacgatcggcgcgcagcgtctcgacacggacggcaaatcgttcgtgcgcgtgaccgtcgacgataacggccccggcctgcccgccggcatggaagcgcgcgtgttcgagaaattcacgcgcggcgagaaggaatcggcaaagccgggcatcggtctcggacttgcgatctgccgcgcgatcgtggaagcgcacggcggtacaatcggcgcgctcaatcgcgtgtcggcgaacggccatgtggaaggcgcgcgcttctggttcacgctgccggtggaaaccccgcccgaggcaccggatgcactggaagacgaaggcgccgatgccttgacgcatgtcgataccgacagcgaatcaactcctaacccgtttgccaagcccagccatgac

SEQ ID NO: 13410 - DNA, 753 bp, Burkholderia fungorum
atgggtaaggtttatctgatcggcgcaggcccgggtgctgcggacctgattacggtgcgtggcgcgcggctgcttgggttggccgatgtcgtgctgcacgatgcgctggtcgagccggctatgttggactatgcgccttcgcatgcgcggcggattgctgttgggaagcgttgtgggcagttgtcgaccgcgcagcagttcatcaataagcagattgtggatgctgctttggagcatgacgtggtcgtgcgccttaaaggcggcgatccgatgttgttcgggcgcgctgatgaggaaatgcgggcgctcgaggctgcgggcatcgagtatgaggttgtgcctgggattacggcggctctcgcgagcgctgcctctttgaaacggtcgctgacgttgcggggtgtgtcgcgcagcgttgcgttggctacttttagtcgggcgcctgggtctgaggagattcgcgagcaggttaatgcggattctctggtgttttatatgggccgggatagtggggttgagattgcgcagcagttgattgaggctgggcggtctgttgccacgcctgtggctattgttgaggcttgttctactgcgcgggagcggatgctttcgcttactcttgaagaactggccgccggcgatgcgcagaagtgggtcgatgcttcgcagcctagtttgctgatgattggggaggcttttgctgcgcggcaaagtggggtggttcgctccgcgggtgggttgttggtcgcggct

SEQ ID NO: 13411 - DNA, 1086 bp, Burkholderia fungorum
ttgcgcgcgccgtggcacgatagcgcacacgtaaggagcagcgacatgggacttttagtggacggacaatggcaggaccgctggtacgacacgaagtcgaccggcggccgtttcgtgcgcaacgacgcggcattccgcaactgggtgacggcggacggctcgccgggtccgagcggcgccggcggcttcgaagcgcaagccggacgctaccacctgtatgtaagcctcgcctgcccgtgggcgcatcgcaccttgatcgtgcgggcgctcaaaggcctcgacgcaatgatcgacgtctcggtcgtgcactggctgatgctggaaaacggctggactttcgcggacggccccggcgtcgtgcccgacaccgtcaatcacgcggcgctgctgcaccaggtctacaccgccgccgaccctcactacagcggccgcgtcaccgtgccgatcctgtgggacaagcagcgcgccacgatcgtcagcaacgaatcgtcggaaatcattcgcatgctgaattcggcgttcgacggcattggcgcgaagcccggcgatttttatccggcgccgttgcgcgcgcaaatcgacacgatcaacgcccgcgtctacgacacgctgaacaacggcgtttatcaagcgggcttcgccaccacgcagcaagcgtatgaagaagccgtcacgccgctcttcgaaacgctcgactggctcgacgcgaaactcgcgacgcaacgctatctgaccggcgcgcacctcacggaagccgatatccggctgttcacgacgctgatccgtttcgacgccgtctatgtcggccatttcaaatgcaatctgcgccgcatcgccgactatccgaatctgtccgcctacacgcgcgacatctaccagttgcccggcattgcacagacggtcgatttcacgcacatcaagcggcattactacgagagtcaccgcagcatcaatccgaccggcatcgtgccgctcggcccggttcaggacttctccgcaccgcacgatcgcgcgcggcccggtgtgtccggctcaacctgcgccctgaccgccgccgccggctcgcagccgtatccggtcaaggaa

SEQ ID NO: 13412 - DNA, 537 bp, Burkholderia fungorum
atggccgaacttgcaaccatcgcccgtccgtacgcagaagcgctgtttggcgtggccgaagctggtgacatcgccgcctggtccacgctcgtgcaggagctggcacaggttgcgcgtctgcccgaagtgctgtcgatcgcctcgagcccgaaagtaagccgcgcccaggtcagcgaactgctgctcaccgcggtcaagtcgccgctcaaggacaacgcgcaagcgaagaatctggtgcaaatgctggtggacaaccatcgcctgcccttgctgccggaaatcgccgtgcagttcgaagagttgaagaacgcccgcgaaggggcggccgatgtgctgattgtcagcgcattcccgctcgaaggcgcacagttgaatgacctcgtcgcaagtctcgaacgtaagttcaaacgcaagctgaagccgacggttgaagtcgactcgtcgttgatcggcggcgtgcgcgtaacggtcggcgacgaagtgctcgatacctcggtccgcgcgcggcttgccagcatgcagacggctctgacggcc

SEQ ID NO: 13413 - DNA, 468 bp, Burkholderia fungorum
gtgaatctcaacgcaaccctgtttgcgcaaatggtcgtgttcctgatcctcgcgtggttcacgatgaagttcgtgtggccgccgctgatcaacgccctcgacgagcgctcgaagaagattgctgacggtttgtcggctgctgaaaagggcaaggcagaactcgaagccgctcacaagcgcgtcgaccaggaactcgctcaggcacgcaacgacggtcagcaacgtgttgctgacgcagaaaagcgcgctgtggcagtcgctgacgaaatcaaggctcaagcacaggctgaagccgctcgcatcatcgcgcaagcgaaggcagacgcggaacagcaagtcgtgaaagcgcgcgaaacgctgcgcggcgaagtcgccgcactcgctgtgaagggcgctgaacagatcctgaagcgcgaagtcgaccaggcagctcacgctgacctgctgaatcaactgaaagccgagctc

SEQ ID NO: 13414 - DNA, 273 bp, Burkholderia fungorum
gtgatcatgcaagctttcatcgccaacatccagggtctgaccgccatcggtatcggcatcatcatcggcctgggtgcaatcggcgcctgtatcggtatcggcctgatgggcggcaagtacatcgaagcatgtgcacgtcagcctgaactgatgaacccgctgcaaaccaagatgttcctgctggctggtctgatcgatgcggcgttcctgattggcgttggtgtggcaatgctgtttgcgttcgcgaacccgctgctgtcgaagctggcaggc

SEQ ID NO: 13415 - DNA, 597 bp, Burkholderia fungorum
gtggagtacaccttcctgtccgcgaccatcctgctgattctgatcaccgacccgctcggcaacattccgctcttcatcagctgtttgcgcggtgtgtcgccgaagcggcgcacgatcgtcattctccgcgaggtggcaatcgccttcgcgatcctgctggtcttcatggtggccggcgacggctttctgcgcatgatgagcctgaccgatcagtcgctgcgcatcggcggcgggatcgtgctgtttctcattgcgctcaggatggtgtttccgcacccggacggtccattcggcggcgacacgcgcggcggcgaaccgttgatcgtgccgctcgccattccggccctggcaggaccgtccgcgctggccaccgtgatgctgctgacgtcgcaggcgcccggcaagatgttcgagtggatcgccgcgctaaccgtcaccatgatcgtctgtgcggtcgtgctgatgctggcggagcgcattcaggcgtggctcggcgagcgcgccatgatggccttcgaacggttgatgggtctcgtgctggtggcaatttcggtggagatgatgctcggcggtatccggtcgttcgtgcatcaactg

SEQ ID NO: 13416 - DNA, 372 bp, Burkholderia fungorum
atgtataatcacgggtttccgcgcgcggtgcgtgggaaaaatgaacacagagtgaggttctcaatgtacgcggtcataaaaaccggtggcaagcagtataaagttgccgtcggcgaaaaacttaaagtagaacagataccggcagacattgacgctgaaatcacgctcgaccaggttctcgcagtgggcgaaggcgaatcgattaagttcggtacgccgctggtcagtggggcttccgtcaaggctaccgtcgtgtcgcaaggtcgtcacgcaaaagtgaccatcttcaagatgcgtcgccggaagcactaccagaagcatggcggccaccgccagaactataccgaactgcgcatcgacgcgatcaacgcg

SEQ ID NO: 13417 - DNA, 261 bp, Burkholderia fungorum
atggcacacaaaaaggcaggcggatcgtcccggaacggccgcgactccgaatcgaagcgtctcggcgtgaaggtttacggcggtcaggctatcaacgctggcggcatcatcgttcgccaacgcggcacgcgtatgcacccgggcgaaaacgtcggtatgggcaaggatcacaccttgttcgcgctgacggacggccacgtcaatttctcgacgaagggcgcagcgaagaagcacatggtcaacgtcgtcccggcagcagtc

SEQ ID NO: 13418 - DNA, 1119 bp, Burkholderia fungorum
atgaagttcattgacgaagcgaggattgaagtcatcgccggcgacggaggggatggcagcgcgtcgatgcgccgcgagaaattcgttccgttcggcggcccggatggcggcgacggcggccggggcggcagcgtgatcgcggtcgcggaccgcaacatcaacacgctgatcgactatcgctacgcgaagaaacacctggcgcgcaacggcgaaaacggccgcggtgcggactgctacggcaagggcggcgacgacatcacgctgcgcatgccggtgggcaccaccatcaccgacatggagaccggcgagctgatcgccgatctgaccgagcacaaccagagcgtgcagatcgctcagggcggcgcgggcggtctcggtaacctgcatttcaaatccagcacgaaccgcgcgccgcgtcagaagacggacggcaagccgggcgagcgccgcatggtgcgcctcgagttgaaggtgttggcggacgtcggtctgctcggcatgccgaacgcgggcaagtcgaccttcatctcgtcggtgtcgaacgcaaggccgaagatcgccgattacccgttcaccacgctcgcgccgaatctcggcgtggtgcgtgtcgggccgagccgcagcttcgtgattgcggacattcccggcctgatcgagggcgcggcggaaggcgcgggcctcggtcatcagttcctgcgccatctgcagcgcacgggtttgttgctgcacatcgtcgacctcgcgccgttcgacgaatcggtcgatccggtcgcggaagccaaggcgatcgtcaacgaactgcgcaagtacgacgaactgctgtatgaaaagccgcgctggctggtgttgaacaagctggatatggtgccggaagacgagcgcgaagcgcgtgtctcggcatttatcgagggctttggctgggacggtccggtgttcgaaatctcggcgctgactggccagggctgtgaaaacctttgctacgcggtgttcgactacatcgccgcgcattcggacgcacagcgcgcggccgaggccgaagatctcgccgccgacgtgcgtttccgcgcgaagccggcagatccggtcgcagcggacgactccggcgtcgacccgcagcaa

SEQ ID NO: 13419 - DNA, 3003 bp, Burkholderia fungorum
atgcaaaccaccgacaacgtgacgacccggtatgagggctcaccgactggccaggcctttggccaggcacaaggcgcacaagcgctcgcgccgcaagcgaccttcgccgactacaaggtgatccgtcgtaatggcagtgtcgtgtcgttcgaaccgtcgaaaatcgccatcgccgtgacgaaggcatttctggccgtcaacggtggtcaaggcgccgcgtcggcgcgcgtgcgcgaactggtcgagcaactcacgcagaacgtggtgcgcgcactcgtgcgcagccgcccgaacggcggcacgttccatatcgaagacattcaggatcaggtcgaactcgcgctgatgcgcggcggcgagcacaacgtcgcgcgtgcatacgtgctgtatcgcgagaagcgcacgcaggcgcgcggtcatgacgatcagatcgtggcgaacacgccgggtctgaacgtgaccgacaacggcgtcacgcgtccgctggacatggctgcgctgcgcggcatcatcgaactggcctgctcgaatctgggcgatgcagtgagcgccgatccgatcatcgcggaaacggtgaagaacctgtacgacggcgtgccgatgagccaggtctacgactcggcgattctggcggcccgcacgatgatcgaaaaggacccggcttatagccaggtcaccgcgcgcatcctgctgcacaccatccgccgcgagatcctcgaagaggaagtcacgcaaacggaaatgggcgagcgctacgccgaatacttcccgcagttcatcaagcgcggcgtgcaagccgaactgctcgacgacaagctgctgcagttcgacctgaagcgcctcggcgccgcgctcgacaacaaccgcgacctgcaattcggctacctcggcctgcaaacgttgtacgaccgctacttcctgcatcacgacggcgtgcgcatcgaaatgccgcaggcattctttatgcgtgtcgcaatgggtctgtcgctgaacgagatcgaccgcgaagcgcgcgcgatcgagttttacaacgtgctgtcgaccttcgacttcatgtcgtccacgcccactttgttcaactcgggcacccgccgttcgcaactgtcgtcgtgctacctgaccacggtcgacgacgacctcgacggcatctacgaagcgctgaaggaaaacgcgctgctgtcgaagttcgccggcggtctgggcaacgactggacgcgcgtgcgtgcgctcggttcgcacatcaagggcactaacggcaagtcgcaaggcgtggtgccgttcctgaaggtggtgaacgacacggcggtcgccgtgaaccagggcggcaagcgcaagggcgcggtgtgcgcgtacctggaaacgtggcacctggacatcgaggaattcctcgaactgcgcaagaacaccggcgacgaccgccgccgtacccacgacatgaacacggcgaactggattcccgacctgttcatgaagcgcgtgatggaaggcggcgactggacgctgttctcgccgtccacctgcccggacctgcatgacaagttcggcgccgagttcgaaacggcttacacggcttacgaagacaaggttgcgcgcggcgagatcaagctgttcaagaagatcccggcggcgcaactgtggcgcaagatgctgggcatgctgttcgaaaccggccacccgtggatcacgttcaaggatccgtgcaatgtgcgctcgccgcaacagcacgtcggcgtcgtccattcgtcgaacctgtgcacggaaatcacgctgaacaccagcgacgccgaaatcgccgtctgcaacctgggctccgtgaacctcgtcgcccacctgaaggaacaggccgacggcacgctcgtgctcgaccacgacaagttgaagcgcaccgtcagcgtggcgatgcgcatgctcgacaacgtgatcgacatcaactactacgcggtcgccaaggcgcgtaactcgaacctgaagcaccgtccggtcggcatgggcatcatgggcttccaggactgcctgcatctgctgcgcacgccgtacgcgtcggaagaggcggtcaggttcgccgacacgtcgatggaagcggtctgctactacgcttactacgcgtcgacggaactggcgcaggagcgcggccgctactccagctaccgcggctcgctgtgggatcgcggcatcctcccgcaagactcggtgaagctgctcgccgaagcgcgcggcggttacgtggaagtcgattcgagcgaatcgatggactggaccgaactgcgttcgcgcatcgcccagtacggcatgcgcaattcgaactgcgtcgcgatcgcgccgacggcgacgatctcgaacatcatcggcgtgtcggcctgtatcgaaccgaccttccagaacctgtacgtgaagtcgaatctgtcgggcgaattcacggtggtcaacgactacctggtgcgcgacctgaaggcacgcggcctgtgggacgaagtgatggtcgccgacctgaagtacttcgacggcacgctctcgcgcatcgaccgcatcccggccgacctgcgcgcgatctacgccaccgcgttcgaagtcgatccgaagtggctggtcgaagcggcctcgcgtcgtcagaagtggatcgaccaggcgcagtcgctgaatatctatatgggcggcgcgtcgggtaagaagctcgacgagatctacaagctcgcctgggtgcgtggcctgaagacgacctactacctccgcacgatggcggcgacccacgtcgagaaatcgacggtggcgcacggcgcgctgaacgcggtgagctcgggtggcggcgaaggttcgggcggtgccgcaggtggcgcggccggcgggttcggtgcgaacaacggcgcggctggtggtgccgcgggtggctttcaggctgcagcggccgcgccagcagtcgcggttgaagcagcgccggaagcggatggtccggtgtgcatgatgcgtccgggcgacccgggcttcgacgagtgcgaggcttgccag

SEQ ID NO: 13420 - DNA, 1233 bp, Burkholderia fungorum
atgctcaactgggatgacgagatcactgccgtaactccctcgagcgctacgcaacagaatgtgttgcgcaacgctgcgggaccggctgtcggttcgcaagtcggaacgcgttccgctcctcatgctccctcggctcaagacgtcttcgcgaacgacattgctgtcgctcccgtcgctcatgtgacccacgctgcggctggaacggctgccgtttcggaagcgcgggtcaacgtcgccgacaagcgcatcatcaacggccagaccgacgtcaatcagttggtgccgttcaaatacaagtgggcgtgggaaaagtatctggctggttgtgccaaccactggatgccgcaagaagtgaacatgtcgcgtgacatcgccctctggaaagacccgaacggtctgaccgaagacgagcgccgcatcgtcaagcgcaacctgggcttcttcgtgacggccgattccctcgccgccaacaatatcgtgctgggcacctaccgccacatcacggcgcccgaatgccgccagttcctgctgcgccaggcgttcgaagaggcgatccacacgcacgcctaccagtacatcgtcgaatcgctgggcctcgacgaaggcgaaatcttcaacgcgtatcacgaggtctcctcgatccgcgcgaaagacgaattcctgattccgtacatccacgtgctgaccgatccggccttcaagaccggcacgctcgaagcagaccagacgctcctgcgctcgctgatcgtgttcgcctgtgtgatggaagggctgttcttctacgtcggctttacccagatcctggcgctgggtcgccagaacaagatgacgggcgcggcggaacagtaccagtacatcctgcgcgacgagtcgatgcactgtaacttcggcatcgacctgatcaaccagatcaaactcgaaaacccgcaactctggacggctgagttccgcgcggaaatccgcgagatcttccagcaggcggtcgaactcgaatatcgttacgcagaagacacgatgccgcgcggggtgctcggcctcaatgcgtcgatgttcaagagctatctgcgcttcatctgcaaccgccgttgccagcagatcggtctcgatccgctgtacccgaacgaggaaaacccgttcccgtggatgagcgagatgatcgacctgaagaaggaacgaaacttcttcgagacgcgagtgatcgaatatcagactggcggcgcgctgacctgggag

SEQ ID NO: 13421 - DNA, 1734 bp, Burkholderia fungorum
atgaaagcttcccgtttctttatcggtaccctcaaagaagctcccgccgacgcagagatcgtcagccacaagctcatggtgcgcgccggcatgatccggcgcgttgccggcggtatctataactacctgccgatcggcttgcgctcgatccgcaaggtggaagccatcgtgcgcgaagaaatgaaccgggcaggcgcgatcgagttgttgatgccggccgtgcagccggccgagttgtggcaggaatcgggccgctgggaaaagtacggccccgagctgctgcgcttcaaggaccgcaagcagtccgatttcgtgatcggaccgacccacgaagaagtggtcacggatattgcgcgtaatcagatcaagagctaccgccagttgccggtgaacttctatcaggtccagacaaagttccgcgacgagatccgtccgcgtttcggcgtgatgcgcgggcgcgaattcatcatgaaagacgcgtactcgttcgacaaggacatggacggtctgcgcgagtcgtatcgcaagatgtacgacgcgtacgtgcgcatcttcacgcgcctcggtctggacttccgcgcggtggcggcggacaacggttcgatcggcggcagcggctcgcacgaattccacgtgattgccgagaccggtgaggacgcgatcgcctattgcccgacctcggatttcgcggccaacgtcgaggcggctgaagcgctgccgctccacgcggaacgcgcggcgcccgccgaggaaatgaagaagaccgcaacgccgggcaaggcgaagtgcgaagccgtggccgagttgctgaacattccgctcgaacgcaccatcaagtcgatcattctcgcaaccgagaacgaaggcgccgagccgaccatctggctgctgatgctgcgcggcgaccacgatctgaacgagatcaaggcgagcaagctgccgggtctggccgacttccgcatggcgaccgaggctgaaatcatcgaaaccttcggcacgccgccgggctacctcggcccgctcaacacgaagaagccggtcaaggtcgtcgcggatcgcacggtcgcgaacatgagcgacttcgtggtgggctcgaacgaggtggattaccacaccaccggcgtgaactggggccgcgacctgccggaaccggtcgtcgccgacattcgcaacgtgaagaagggcgatccgtcgccggacggcaagggtgtgatcgacatctgccgcggtatcgaagtgggccacgtgttccagctcggcaccaagtattccgaggcaatgaacgcaacctgcctcgacgaaaccggcaagccgcggccgatggaaatgggctgctacgggatcggcgtcacgcgtatcctcggcgccgcgatcgaacagaatttcgacgatagaggcatcatctggccggaatcgatcgcgccgttcgaagtcgtgctgtgcccgatgggttacgaccgcagcgaagccgtacgcgaagccgccgacaagctgtacgcaacgctgctcgaagcgggcatcgacgtgatcctcgacgaccgcggcgaacgccccggcgtgatgttcgccgactgggaactgatcggcgtgccgcatcgcctcgtgatcggcgaccgtggtctcaaggacggcaagctcgaatatcagggccgccgcgacgccgaggcgacgctgctgccggttgaagacgccgcgcaaacggtgatcgcgaaggttcgcgcagcgttggcgcgc

SEQ ID NO: 13422 - DNA, 915 bp, Burkholderia fungorum
atgttgaagcagcgcactatcaaacaaatcgtcaagacagtcggcattggtctgcactcgggccgtaaagtcgaactgacgctccgtccggcggggccggatacgggcatcgtgttttcgcgcgtggatctggccacgccggtcgacattcccgcgtcggcgatggcgattggcgatacgcgtctggcttctgtcttgcagaaagacggcgcgcgcgtctcgaccatcgagcatctgatgtccgcctgcgccggtcttggcatcgacaacctgtatgtcgacgtcaccgccgaagaaattcccatcatggacggcagtgccggttcgttcgtgtttctgattcaatctgcaggtattgaagagcagaacgcggcgaagaaattcatcaaggtcaccaagccggtggagattcgcgacggcgataaattcgcgcgtctcgatccgtatttcggtttcaagctcaaattcacgatcgatttccgtcacccggctgtggataaaaccggccaggcgctggaagtggattttgccaatacgtcgtatgtgcgcgagatcgcgcgtgcccgcacgttcggttttgcgcatgaagtggaaatgatgcgcgaactgggtcttgcgcgcggcggcagcatggacaacgcaatcgtgctggatgagtaccgcattctgaacaacgacggcttgcgctacgacgacgagttcgtgaaacacaagatgctcgacgcgatcggcgatctgtatgtggtcgggcatccgttgctggcgtcgtacaccgcgtacaagtccggccacggcctgaacaacgcgctgctgcgggagctgttggcgcacgaagattcgtacgaaatcgtcaccttcgacgacacgcagaaggcaccgcgcggctttgcctacgaaacgcagacggctttcgcc

SEQ ID NO: 13423 - DNA, 2808 bp, Burkholderia fungorum
atgaccaccggttttctacagaagatttttggcagccgcaaccagcggctagtcaagcaatatcaaaagaccgtcgcggcgatcaatgcgctcgagccgcagatcgagcaattgacggacgaccaactgcgcggcaaaacgggtgaattccgccagcgcgtcgcgagcggcgagtcgctcgacaagctcctgcccgaagccttcgcggtgtgccgcgaagccagcaagcgggtgctgaaaatgcgccacttcgacgtgcagctgatcggcggcatggttctgcactacggcaagatcggcgaaatgcgcacgggcgagggcaagacgctcgtcgccacgctgccggtgtacctgaacgcgttgtcgggccgcggcgtgcacgtcgtcacggtcaacgactacctggcccagcgcgacgccgaatggatggcgcggctgtacaacttcctcggtctgtcggtcggtatcaatctgtcgcagatggatcacgccgcgaagcaggaagcctacgcggcggacatcacctacggcacgaacaacgaattcggcttcgactacctgcgcgacaacatggtctacgagaccgacgcgcgcgtgcagcgagccctgaatttcgcggtggtcgacgaggtcgactcgatcctgatcgacgaagcccgcacgccgctgatcatctccggccaggccgaagatcacaccgagctctacgtgcgcatgaacgcgctgccgccgctgctggagcgccagatcggcgaagagaaagcggacggcaccggcgtagaaaagccgggcgactacacgctggacgaaaaaggccgccaggtgttcctcacggaatcgggccacgaaaaggccgagcgcctgctctccgagtggggtctgatcggcgagggcgaaagcctgtacgcgccgcagaacatcacgctgatgcaccacgtgtacgccgcgctgcgcgcgcacacgctgttcttcaaggaccagcattacgtcgtgcagaacggcgaggtggtgatcgtcgacgaattcaccggccgcctgatgtcgggccgccgttggtcggacggcctgcaccaggctgtcgaggcgaaggaacacgtcaagatccagagcgagaaccagacgctcgcgtcgatcacgttccagaactacttccgcatgtacgcgaagctgtccggcatgaccggcacggcggataccgaagcctacgaattcaacgagatctacgggctcgaaacggtcgtgatcccgaccaaccgtccgcccaagcggatcgacaagcaggatcagatctacaagaccgccaaggaacgctacgacgcggtgatccgcgacattcgcgattgctatgagcgcggtcagccggtgctggtcggtactacgtcgatcgaaaactccgagttgctgtcgcatctgctgaagcaggccggtttgccgcacgaagtgctgaacgccaagcagcacgcgcgtgaagccgagatcgtcgccgaagccggccgtccgaagcgcattacgatcgccaccaacatggccggtcgcggtacggacatcgtgctcggcggcaatgcggaaaagcaggcgtcgttcctcgaactggacgaaacgctgccggaagacgaaaagcggcgccgtatccagaagctgcacgacgaatggcaggcgctgcacgatcaggtgaaggccgcgggcggcctgcacatcatcggcaccgagcgtcacgagtcgcgccggatcgacaaccagttgcgcggccgtgccggccgtcagggcgacccgggttcgtcgcgcttctatctgtcgctggaagacccgctgctgcgcattttcgccggcgaccgcgtgcgcgcgatcatggaacgcctgaagatgccggaaggcgaagcgatcgaggccggcatcgtctcgcgctccatcgagtcggcgcagcgcaaggtcgaagcgcgcaacttcgacattcgcaagcaattgctcgaatacgacgacgtgtcgaacgatcagcgcaaggtgatctaccagcagcgcaatgaattgctcgaagcgaacgacatcaccgaaacgatcggcgcgatgcgccagagcgtgatcgccgatatcgtccaccagttcgtgccggccggcagcattgaagagcagtgggacgtgcccgagctggaggaagtgctgcgcaacgagtggcagctcgacctcgcgatccaggaaatgatcaacgagtcgaactcgatcagcgccgacgagattctcgaagcggttgaagccgcggcagacgaagcgtacgaagcgaaggtcgaactggtcggccgcgagtcgttcagcgcgttcgagcgctcgatcatgctgcaaacgctggaccgtagctggcgcgaacatctggccgcgctcgaccatctgcgccagggcatccatctgcgcggctatgcgcagaagaacccgaagcaggaatacaagcgcgaggcgttcgaactgttcgccgcgatgctcgacgccgtgaagctcgaagtcacccgcgtggtgatgaacgtgcagatccagtcgccggaacagctggaacaggccgccgaacagttggaagagcagggcagccacctggagaacgtcgagttccgtcacgccgaattcgccgaagccgctgcggcggcgccggtcgccgcggaggcggccaccgccgccatgatcggcgacgcgatgagccacggctcgtcgcaggcggccgcagcgaacatgagcgcggacaacgtgccgaaggtcggccgtaacgacccgtgcccgtgcggcagcggcaagaagtacaagcagtgccacggcaagatcgtg

SEQ ID NO: 13424 - DNA, 1284 bp, Burkholderia fungorum
atgttgcatcgaaaaatcagccgctggtggacggccgtcgcgggggcgctcggggcggccaccggcggcggggtgatcgcggtctacgtgtttggcgtgtttgccaaaccgatcagtgcggaattcggctggtcgagagcgacggtttcgctggggctcaccgtgttttccatcgccaacggactcggcacggtatttctcggtgtcgcgatggaccgctggggcgtcaagcgcacgacgatggcgatgatcctgctgttcggggtgtcgctcgcgtcggtctctctgctgtcgcccaatttaccggcttatctcggcgtctttgcggtagtcggattcgcagccgcagcggcgaccatcatgccttatgcgttggtcgtgtcggtatggttcgaccgcacgcgcggctgggttctgggactcatcaatgccggcacgggtctgggcggcgctatcatgccgttctacgcgaattatctgctggcccatttcggctggcgtggcggctatctgggcgtcggtatcgcggtagcggtcgtcccactgctggcgatggcttttctggtcaggctgcccgagggctttgaggagaaccggctgcgcgatcgtctcgctgccgcgaaaacggccgttccgctacatacgatcgtgcgcaccagccggcatttctggctgcttgcgctcgcgattttcggcatctcgtttgcgacgtacggcatgctttcgcaactcacgccgatgatgctcgaccgcggtgtgacgccgatcgtcgcagcaggcgtgatgtctgccgccagcatcagctcaatctgctcgcgactcggcgccggcgctttcctggatcggttcttcgcgccgtacgttaccgcggtgatcttcatcctcgcggcgatcggcatgttgctggtgtcgggcagtcattcggtgctgctgctgacttgcggcgcagtgcttctcggtctcggcctcggcgcggaaggcgacctgctgacctacctagtgagccgctatttctcgatctactcgttcggctcggtcaccggtgcgatctggctgacgtttgcatggggtggcgcgtcgggcatttatcttctcaatcgatcgttcgacgtgacccattcgtacaagccggcggcatacagtttcgtcgcaatcgtcgtgcttgccgcgatcgcggtttcccgcctcggcccatatcgttttccgcctgcgcataagggttcgcatgcaagttccagcgatagcgagctaggcgacgagacggccggcgcagtatccaggctt

SEQ ID NO: 13425 - DNA, 1227 bp, Burkholderia fungorum
atgaagaaacccaccctgctggctatcgccgttgccagcacggccgcttcggccgtacatgcacagagttcggtcacgctgtacggcctgatcgaccagggcctcaactatgtgagcaacgtgcagacgggccgcgtcgacggagctctcgtcggcaagcggcagatcgcgatgtccgacggggcgaccggcatcggcgggagccgatgggggctgaagggcaacgaagatctgggtagcggccttcgcgcgatcttcacgctggaaaacggcttcaacatcaatacgggcgggttggcgcaaggtgggctgctgttcggccgccaggctttcgtcggcctggcgaaccaggccgggcaggtcacgctgggccgtcagtacagcatcgttagcgacatgctggccccgctgtcagaagccggcgagattcccggccacatgggcgcaaatcctgacgatttcgacgacctgggccactcgatacgcctgaacaacaccatcaagttcaagagcacgtcgttctcgggcgtgacgttgggcgccctatactcgctgggtggagtgcctggcgcgacgggtcgcaaccaggtgtgggcgctcgccgctacctacgcgaacggtccattcgccgccggagcgggttatctaaatgcacgggatccgaacctgtcgtacttcggcacgaacggcaactccggcaatagcagtacgaacaatcttggctcgttcggatctgatactaccgcgcagtccaaccccgtctacgcgggatttgcatcggccacgacgctccagttgatagttgcaggcatgaaataccacttcggcccagtgagcgtaggcgcgacatggtcgcacgccggcttcggcggccttggtaataccagcgcgggccccaacccgctacactacgccggcactgccgcgctcaacaatggtgcgctcaatgtgagctacacgttcacgcctgccttcaacgtcaacgcagcgtatagctacacgcacaagggaagcgtcggcgagttcggcagcgcgaactatcatcaaggcacgctctcggcggcgtactacctttcgaagcgcacccagttgtacgcgcttgcaatctaccagaaagccagtgggaccgattcacttggccaatcggccgtcgcgtcgatcacgcaactcacgccgtcggccaccgaccatcaggcactcgtgcgcctcggcatcctgcacaccttc

SEQ ID NO: 13426 - DNA, 984 bp, Burkholderia fungorum
gtgaccctgcgtgatggcatgcacgccatccggcatcagtacagtctggccgatgtcgggcgtatcgcccgggcgctggaccaggccggggtcgacagtatcgaggttgcacacggcgacggtctgcgaggctcatcgttcaactacggctttggtgcccatacggatctcgagtggatcgctgctgttgccgaagtcgtggagcaggcgaagatcgcgacgctgcttttgcctggcatcggcacgatccatgacctcaaggctgcctatgacgctggcgcgcgtgtcgtgcgcgtcgcaacgcactgcacggaggcggatatctccaggcagcacatcgaatatgcacgctctctcgggatggataccgttggcttcctgatgatgagccacatgacgacaccggagaacctggctgtcgaggcacggaagatggaaagctatggcgcgacctgcatctacgtggttgactcgggcggagcgatgaacatgaacgatatccgggaccgctttcgcgcgttgaaggaggcgctcgatccggcgacgcagacaggtatccacgcacatcacaatctgagtcttggcgtcgcgaattccatcgtcgctgtggaagaaggctgcgaccgggtggatgcgagcctcgccggtatgggcgcgggagcgggcaatgcaccactggaagtgttcatcgcagcagcggaacggcttggctggaatcacgggaccgacctttacgccttgatggatgccgcagacgacatcgtgcgaccgctgcaggaccgaccggtgcgggtcgatcgcgagacgctagcgcttggctatgccggcgtgtattccagcttccttcggcactcggaggtcgcagccgacaggtacggcctgaaggcggtggatattctcgtcgagctgggtcgccgcaagatggtgggcgggcaggaggacatgatcgtcgacgtggcgcttgacctgctgcgcaaccctgcc

SEQ ID NO: 13427 - DNA, 1164 bp, Burkholderia fungorum
atgtggcccgcacacggacccgcatccggccgaactgacctaggggacgccatgtcactcgaacccttcatcgattcgaaaccgttcacattcggtgtcgaactcgagatgcagatcgtcaacacgcacgactatgatctgaccaaagccggctcggatctgctgcgcctcatcaaggacgaaaagatccccggcaacatcacgccggaaatcaccgaaagcatgatcgagctgtcgaccggcatctgcacgacgcatgagcaggccgtcgccgacttgcgcaagattcgcgatacgctggtttccgcggcggatcacctgaacgtcggcctgtgcggcggcggcacgcatgcgttccagcaatggagcgagcggcagatcgtcgatacgccgcgctttcagtacctctccgagttgtacggctatctcgccaagcaattcacggtgttcggccagcacgtgcatatcggctgtccagatccgaacagcgcgctctatctgctgcattccatgtcgcgcttcattccgcacttcatcgcgttgtccgcctcgtcgccgttcgtgcagggtgtcgataccggctttcattcggcacgactgaattccgtgttcgcgtttccgttgtcgggccgggcgccattcgtgttgacgtgggacagtttcgaggaatatttctcgaagatggtccacaccggcgtggtcaacagcatgaaggatttttactgggacatccggccgaagcccggtttcggcacgatcgaagtgcgcgtgatggacacgccgctgtcggtggatcgcgcggcggcgattgcctgctacatccagacgcttgcccggcatctgctgctcgacaagcctatctcgccgaaggaagacgactacctcgtctacaccttcaatcgtttcgaagcatgccgctttggtctcgccggcacctgcatcaatccgcaaacgggcgaacgcaagacgatttccgaagacattctcgaaacgctcgaccggatcgctccgcacgccgaagcgttgggttcgggcaatgcgctggccgaaatcggtgcgattgcacgcagtcaggtcaatgacgcgacgtggctgcgcggcgtcgtcgaacgggaaaagtccttgcacgaagccgtcaggcaacaatgtctggagtggcgcgcc

SEQ ID NO: 13428 - DNA, 1569 bp, Burkholderia fungorum
atgcttgtcgccgtcgaggaaaccgccacggctatgggaaaggaaagcggacagaccgcggtttacggtcgcggtaacccggcaggttatacagcgctattcacactcaggcagatcgcattcgcggcgcttgcgttgctcggcgcgttgccaacgtggtcaggcgcgcagattgtaccgggcggcgcgcacgctccttccgtcgcgcaaacgcagaacggactggatcaggtggacatcaaccggccttccggcgggggcgtgtcggtcaacacgtacaaccagttcgatgtgcagcagcgcggcgcaatcctgaataattcgccgaccatcgtgcagacgcagcaggcgggcgtgataaacggcaatccgaacctcggggcgggccagtcggcgcgcgtcatcgtcaatcaggtgaacagcagcgcggcgagccagattaatggctatctcgaagtcgccggacagagagcccaggtcgtcatcgccaatggttccggtatcagcgtgaacggtggcggctttatcaatacgtcgcgcgcgatcctgactaccgggacgccgaactatggcgcggacggcagcctgacgggcttcaacgtgaccggcggtaacgtcaccatcgacggcgccgggctgaacgcgggcaacgtcgatcaggtcgatctgattgcgcgcgccgtgcgagcgaatgccgcgatctacgcgaagaacctgaacgtcattacgggcgcgaacagtgtcgatcacgatacgctgaacgccacggccgtcgccggcaacggacccgcaccgggcgtctccatcgacgtgagcagtctcggcggcatgtatgcgaaccgtattgttctcgtcggcacggagtacggtgtgggcgtgtccactaaaggcgtacttgccgcgcaggcgggcgatctgattctgaccacacagggcaagctcgtcctcgcggggcagaccaacgcgagcgggaacattgcgatcaacgcgcacgacggcatcgataacagcggcacgacctacgcgcagcaaaacgtcagcgcgaacacatcgggcgcgctgaacaacagcggcacgctggtcgcgcagcaggacgcgacgatcaacgccgggagcgttgcatcgggcggaacgcttggcgcaggtatcaacggcgacggctcgattgcacaggcgggcgaactaaacctgaacgcgagcggtgcgctctcggcaaccggccgcaacgcggcgggtggcaacgcgaccgtacagggcgcatcggtcaatctccctggcagcagcacatcggcgaatcgcaacctcgtcctgaccgcgacgggtggcgacctgaacacatcgggcgccacgacgaccgcaggcggtgcgctgacggccagcacggcgggcgcgctgaccaacgacaacggcgttatgtcgtcaggcggcgcgcagaccgtcaacgccgccgcactctcgaaccgtagcggccagatggtagcgggaggcacgctctcggaaaacgtcacgggtgcagtctcgaacacaggcggcacgatgcaggcggcacgatgcaggcggcgggcgcgc

SEQ ID NO: 13429 - DNA, 1248 bp, Burkholderia fungorum
atggcggcgcggcgcttcatctggattcccatgtctcacgtcaccagaagccggcccgatggccggctgattctgttgctcggtgcgctcgccgcatgcgggccgatttcgatcgatatgtatctgccgagcctgccgaccatcgcgcaggcgttcgctatcagcaccggcgctgcgcagaccacgctcaccagtttcatgttcggcttttcgatcggtatgctgctgtatggtccgctgtcggatacctatggccgccggccggtgctgctcggcgggatcgtcatgtatgcgctggccagcgtggcctgtgcgttgtcgttctcgatcggctcgctggtgatattccggttcgtgcaggcgctgggcgcgggcgcggcttcggtgctggcgcgcgccattgcacgcgacgcccacggaccggccgacgccgcccgcgtgctgtccatgctcgccatcgtcacatcgatcgggcctttgcttgcgccgctgatcggggggcagttgctgctgctcggcggctggcgcgtcgtcttcatcgtgctgacgctgttcggtacggtgtgtgcggtcaccgcgtttctcaaggtgccggaaacgtggccgcgcgagaagcgcgcgcagtcggcgctgctgaaatcgttcggcgcatacggcaagttgttgcgcgatccggttgcgtgggggcacatgctgtgcggcggcatggcgttcgcgtcgatgttcgcgtacatcacggcaacgccgttcgtctacatcgagtatttccatgtgtcggcgcagcattacggcttcctgttcgcgttgaatatcgtcggcatcatgttcggcaacttcatgaatacgcggcttgtcggccggcttggcccgctgccgctcatttcttttgccgcaaccgtgagttgcattgcctcgctgttcgtctgtctcgtatcgctgaccggttggggcggtctgtggtcgatcgtgttcggcctgtttttcgtggtcggtgtggtgggtcttctgtccgccaactgcacgaccgatctgatgcatcgctatccggtgaatgccggtgctgcggctgcggtgttcggcgccgtgcagctggcgctcggcgcgctgtcgagcctcgcggtcggactctggcaggatggctcgcccaaaggtatgggcgtggtggtgggcgcggcgggcctgctctgttatctcggccggattctggtcgtcaggtggcacggaaccagggcgcccgttgctgtcgtt

SEQ ID NO: 13430 - DNA, 1023 bp, Burkholderia fungorum
atgcattcgatccgaaggaccgttgacatgccgctactcgaagtcaaagacctcagcgtgcgctttacacgccgcgaaggcgcacccgtcgacgcggtgcaacgcgtgtcgttttcgctggaagcgggccgcacgctcggcattgtcggcgaatcgggttccgggaaaagtcagaccgtgatggcattactggggctgctcgccggcaacggcaaggtgtcgggcagcgcgacctatcgcggcgaaaacctgctggccatgaacgaagcggcgctgaaccggattcgcggcgaccgcatcggcatgatctttcaggacccgatgacctcgctcaatccgttcctgacgatcgagcggcagatgaccgagacgctcgaactgcaccgcaagatgtcgcgccgcgaagcgcgccgccgcgcgatcgaaacgctggaatcagtgcgcattccggatgccgcgcgccgcatcaacatgtatccgcacgaattttccggcggcatgcggcaacgcgtgatgatcgcaatggccttgctttccgaacccgaaatcctgattgccgacgaacccaccaccgcgctcgacgtgaccgtgcaggcgcagatcatcgaactgttgcgcgaactgaaccgcgaacgcggcacggcgatcattctgatcacgcacgacatgggcgtagtggccggcctgtgcgacgacgtgatggtgatgtacgccggccagaccgtcgagcaggcgagcgccgccgcgctgtttgccgcgccgacgcatccgtacacgctcggcctgctgaacgcgctgccgcgtctgaccgacgatgacgacgagcgtccgctgcaaaccattccgggcaatccgccgttgcccggcgaagtcggcgcgggctgcgcttttgccccacgttgcggatactgcaccgagcgctgccgcgaatcgcgcccctcccttgttgctgaagaaggctatcccgacgccctgcgcgcatgcttcaggccggcaggcgaaattctggaggcacaacacgta

SEQ ID NO: 13431 - DNA, 2286 bp, Burkholderia fungorum
gtgtacgtctccccaaggaggtatcgcatgtcaagcgaagcaaagtgcccgttcaaccatgccgccggcggcggcaccacgaaccgcgactggtggccgaagcagttgcggctggatctgctcagccagcactccggcaagtccaacccgctggatggcggcttcaattacgctgaagcgttcaggagcctcgatctggcggcagtgaagaaagacctggccgctctgatgaccgactcacaagactggtggcccgcggacttcggccactatggcccgctgttcatccgcatggcctggcacagcgccggcacttatcgcatcggcgacggccgcggcggcgcggggcgcggtcagcaacggttcgcgccgctcaacagctggccggacaacgtcagcctagacaaggctcggcgcctgctctggccgatcaagcaaaagtacggccagaagatttcctgggccgacctgctgattctcacgggcaacgtcgcgctcgagacgatgggcttcaagaccttcggtttcgcgggcggtcgcgaggacacatgggagccggatctggacgtctattggggcaacgagaagacctggctgggcggcgacgtccgttacggcaagggcgcggccggcgataacgacgacggcggcgtgatcgtcgccgacgaagaaaaacacggcgaagaggtgagccgcgacaacagcgggcgaaacctggaaaatccgctgggcgccgtgcagatgggcctcatctatgtcaacccggaaggccccgacggcaatccggacccgctcgccgcggcgcacgacattcgcgaaaccttcgctcgcatggccatgaacgacgaagagaccgtcgcgctgatcgccggtggccataccttcggcaagacgcacggcgcgggtcctgcggacaacgtcggccctgaacccgaggcggccgatctcgagaaccaggggctgggctggaagaacagcttcggcaccggcaagggcgccgacacgatcacgagcggtctggaagtcacctggaccaccacgccgacgaagtggggcaacggcttcttcgaaaacctgttcaagtacgaatgggagctgaccaaaagtcctgccggcgcgcatcagtgggtcgccagggacgccggcgaaacgatcccgcacgctcacgacccctcgaagaagctgcggccgaccatgctcaccaccgacctctcgctgcgcttcgatcccgtctacgagaagatttcgcggcgttttctggagaacccggaccagctcgccgatgccttcgcccgcgcctggttcaagctgacccaccgcgacatggggccgcgcgcccgctatctcggtccggaagtccccgccgaagaactgaactggcaggacccgattccggcgctcgaccatccgctggtgaacgagcaggacatcgcctcgctcaagcagaagattctggcgtcggggctgtcggtctcgcagctggtgtccacggcgtgggcttcggcatccactttccgcggctcggacaagcgcggcggcgccaacggtgcgcgcattcgcctcgcgccgcagaaagactggccggtcaatcagcctgagcaactggcgaaggtgctgaaggttctcgaaggcattcagagcgagttcaacggcgtgcagtccggtggcaagaagatttcgctggccgacctgatcgtgctgggtggcgccgccgctatcgagcaggcggcaaagagcgctggccagcaggtgagcgtgccgttctcgccgggccgcatggatgcctcgcaggagcagaccgacgtgcaatccgtcgcggcgctcgaaccgcttgccgatggcttccggaactacctcaagggcaagtatcgcgctccggcggaggccttgctgatcgacaaggcgcaattgctgacgctgacggctcctgagatgacagtgctgctcggcggcttgcgcgcgttgaacgttcacgcagggcaggattcgcacggcgtattcacgcaccggccgcagacgctgtccaatgacttcttccgcaacctgctcgacatgggcacggaatggaagccgctgtcgccggcccgggacgtgttcgaggggcgtgatcgcaagaccggcgaactgaaatggacgggcacgcgtgtcgacctggtgtttggttcgcatgctcagctcagggccttatgcgaagtctatgcaagcgaggacgcgcaggagaaattcgtccgcgacttcgttgcggcctgggcgaaagtgatggatctcgaccggttcgagattgcg

SEQ ID NO: 13432 - DNA, 843 bp, Burkholderia fungorum
atgacgagcgacatcgcaagcgtgagcctgcccgacggcgaacgcattccgaaactgggacagggcacctgggagatgggtgaggtgccggcgcggcgtgccgctgagatcgacgcgctgcgttgcggcatcgaactcggcatgacgttgatcgacacggcggaaatgtatggcgacggcgcgaccgaatctctgctgggcgttgcgctggccgggttgcgcgacaaggtgtttctggtcagcaaggtgtatccgcataacgccagccggcgcggcgtgatcgcggcctgcgagcagagcctcaagcgtctgaagacggatcagctcgatctgtatctgctgcactggcgcggctcggtgccgctcgcggaaacggtcgagggcttcgaggcgttacggcgggcgggcaagattcgccactggggcgtcagcaacttcgacaccgcggacatggaagaactcgtcgccacgccgggcggcgatgcgtgcgcaaccaatcagattctctacaacgtggcgcgccgcgggccggaattcgaactgctgccgtggctcgccgcgcgcaagatgccggctatggcgtacagcccggtcgatcacgcacgcttgccgaaacgctcgccgctcgacaatatcgccgacgcgcgcggcgtctcggtgttccaggtggcgctcgcatgggtgctgctcgcgcccggcgtgttcgcgattccgaaggcggggcgcgccgagcatgtgcgcgacaaccatcgcgcggcgcaactgcaactcggcgcggatgaactggctgccatcgacgcgtatttcaaaccgccgcgcagcaagcgtccgctcgaaatgctg

SEQ ID NO: 13433 - DNA, 1062 bp, Burkholderia fungorum
gtgcccgtttcctccgccattgccaccaccgttccctccgctacccttgcccccgtgaccgccgccggagcctccgccaaagccgccgccgaaaccgccaccgaagccgccgccaaaaccaccacctttgccaccgccgaaaccgccgccaaagccaccgcctttaccgccgcctgcaccggcgcctgcaccggcgccgccgctggagcctccgcaaccgcagccgccactgcttccgccgccgctgcttccgccaccgctgcttccgccgccgctgcttccgccgccgctgcttccgccgccgctgcttccgccgccgctgcttccgccgccgctgcttccgccgccgctgcttccgccgccgctgcttccgccaccgctgcttccgccgccgctgcttccgccgccgctgcttccgccgccgctgcttccgccgccgctgcttccgccgccgctgcttccgccgccgctgcttccgccgccgctgctcccgccgccgctgctcccgccgccactgcttccgccgccactgcttccattaccacttccgttgccgttccccttgccgcccccgcttgcaccggcgctgccactgcccgaacccgccgccccggctgcgccgccggcgccgctgttgcccgaacccgccgccccgttgctgccgctgccgccaccacggggcgcgcatccactgacgttggcgctgctgcagtcgtgcggccgaaacaccagcgcggcatcatcggcggcggtcggctcgccggccgcgatgcccgtgctcgacgtgccggtagtcgagctgcccgccgcggcgccgtcgtcctgcgcgagctgcgccgcgccatgcacggcgctggctggcagcgcagcatcggcgagcacgatccactgcgggatcacatccgtcgaggccggatacgcgacctgagtcgctatcgcaactacacctgctacgatcgcagtgctccgtatcaccccgcagtagtactgattgaatctcgtggtcttcatcacgtctctcccgagggaacgacggcacctcgttgccgccatctctcacgc

SEQ ID NO: 13434 - DNA, 663 bp, Burkholderia fungorum
atgcgtttgattcttttgggtgcgcccggcgcaggtaagggcactcaggccaccttcatcaaggaaaagttcggcattccgcaaatttccaccggtgacatgctgcgcgcagccgttaaagccggcacgccgctcggccttgaagccaagcgcttcatggacgctggtgaactggtcacggacgaactgatcatcaatctggtgaaagaacgtctgcagcagccggactgcgcgaacggctatctgttcgacggttttccgcgcaccattccgcaggccgaggccatgaagcaggccggcgtcgcgatcgactacgtgctggagatcgacgtgccgttcgaggagatcatcgtgcggatgagcggccgccgctcgcacgccgcgtcgggccgtacgtaccacgtcaagttcaatccgccgaaggttgaaggcctggacgacgtgaccggagaaccgctgatccagcgcgacgacgacaaggaagaaacagtcaagaagcgtctggaagtgtatgaggcgcagaccaagccgttgatcgagtactacaccaactgggcgaagaacggcgattcgtcgaccccgttgaaggcgccgcagtatcgccgcatttcgggcctcggcagcgtcgatgaaattcgtgaacgcgcgtttgaggcgttgaag

SEQ ID NO: 13435 - DNA, 1377 bp, Burkholderia fungorum
atgaatcccgaaagcccatttttctcgtcggccgcgcccggcggcgaagtcgtcgttcccgtttcggcgctcaatcgcgcaatcggcacgatgctcgaacgctcgtttccgctcgtctgggttgccggcgaagtatcgaacttcacgcgcgccgcgagcggccactggtatttctcgatcaaggacgcgcaggcgcagatgcgctgcgtgatgttccgcgggcgggcgcaatacgccgaattcacgccgcgcgaaggcgatcgcattgaagtgcgcgcactggtgacgatgtacgagccgcgtggcgagctgcaactgaatgtggaagcggtgcggcgcaccggtcaggggcgtctctatgaagcgttcctgcggctgaaagcgcagctcgaagccgagggtctctttgccgccgaacgaaaacggccgctgccgtcgcatccgcgagcgatcggcattgtgacgtcgttgcaggccgcggcattgcgcgatgtcctgaccacgctgtcgcgccgcgcgccgcacattccggtgatcgtctatccggcgccggtgcagggcgcgggcgtgagcgggaagctcgccgcgatggtcgatgccgccaacgcaaggcgcgaagtcgacgtgctgatcgtctgccgcggcggcggctcgatcgaagacctgtgggcgttcaacgaagaagtgctggcgcgcgcgattgcggaaagcgccattccggtggtgagcggcgtgggtcacgaaaccgatttcacgatcgccgattttgccgccgacgtgcgcgcgccgacgccgaccggcgcggccgaactggtgagtccgcagcgcgtgctgctgttgcgcgagctcgaccaccgccacgcgacactcgcacgcggtttcggccgcatgatggagcggcgtgcgcagcaactcgactggctcgcgcgcaggctggtgtcgccagccgagcgtctcgcgcggcaacgcactcatttgcagcaactgagtgtgcggctcgcgtcggggggcacgcgcccggtgcgtgatgcaagagcgcggttttcgctgctacagatgcgctggcaacgctggcgccctgatctcgccgggcaccgggcgaagctcggcaatctcgcagggcgtctggacacggctttgttacggcagcatgaacgtcagaccgcgcgcatcgacacgcttgccgcgcgtctcgaagtgctgagcccgcagcgcacgctggagcgtggctatgcggcggtgctcgatgcgcagagcgggcgcgcggtgcgtgcaccgtcgtcgttgaagccggggcggcgcctcacggtgcatctcgcggaaggtgccgcggacatcgcgctcgcggatgtgcagccgcgtctgaccgacggattc

SEQ ID NO: 13436 - DNA, 534 bp, Burkholderia fungorum
atggagcaatttcacggcacgacgatcgtctccgtgcgccgcggcgacaaggtcgcgctcggcggcgacggccaggtgacgctgggcaatatcgtcatgaaaggcggcgcgaagaaagtccggcgcatctataacggcaaggtgatggtcggctttgccggcggcacggccgacgccttttcgctactcgaccgcttcgaagcgaagctggaaaaacatcagggcaacctcacgcgcgccgccgtcgaactcgccaaagactggcgcaccgaccgcatgctgcgccggctcgaagccatgctgatcgccgcggacgccaccaccacgctcgtcatcaccggcaacggcgacgtgctcgatccggaaggcggcatctgcgcgatcggttcgggcggcgcctatgcgcaagccgccgcgaaagcgctcgctgataacaccgagctgtcgccccgcgaaatcgtggagaagtcgctggagattgccggcgacatgtgcatctacacgaaccacaaccgcgttatcgagacgatcgag

SEQ ID NO: 13437 - DNA, 1041 bp, Burkholderia fungorum
atggcttacgaagcagcttcagaacgctattcggatatgcagtaccgcgtctgcggcaagtcgggactcaagctgccggcgctatcgctcggcttgtggcacaacttcggcgacaccacgccgatctccacgcagcgcgacatcctgcgcacggctttcgacctgggtatcacgcacttcgacctcgccaacaattatgggccgccgtacggcagcgccgaaaccaacttcggccgcctcttcaaggacgacttcaagccgtatcgcgacgaactgctgatttcgtcgaaggccggttgggacatgtggccgggtccgtatggacaaggcggcggctcgcgcaaatacgtgctcgcaagtctcgataagagcctgcaacgcatgggcctcgattacgtcgatattttctattcgcatcgtttcgatgccgagacgccgctcgaagaaaccgcgggtgcgttggcgagcgccgtgcagcaaggcaaggcgctgtacatcggcatttcgtcgtactcggcaagcaagacgctcgaaatggcgaagctgctcgccgaatacaaggtgccgctgctgattcatcagccttcgtacaacatgctcaatcgctggatcgagcatgagttgctgggcgcactggagaaagccggcgcgggcgccatcgcgttcacgccgctggctcaggggctgctcacgagcaagtatctgaacggcgtgccggaagacgcgcgcgtcaacaagccgggcggcggttcgttgaagcaggagcatctgagcccgcagaatatcgagcacgtgcgcaagctcaacgacatcgcgcaacgtcgcggtcagagcctcgcacaaatggcgctcgcgtgggcgctgcgcgatccgcgcgtgacttccgtgctgatcggcgcgagccgcgcggagcaggtgcgtgaaaacgtcggcgcgctgaagaaccttgcgttctcgaaggacgagctggccgagatcgaccgctacgcgaccgaaggcggcatcaacctgtgggaaaagccgtcgacggatcaggcgatc

SEQ ID NO: 13438 - DNA, 1227 bp, Burkholderia fungorum
gtgaaactcaaccgtaaccacaaaacaggagtctgcaacgtggcaaacgactatctcttcacttccgaatccgtctccgaaggccatcccgacaaagtcgcggatcagatttccgacgccattctcgacgccatcctggctcaggacaaatactcgcgtgtcgccgcggaaacgctgtgcaacacgggtctcgtcgtgctggccggtgaaatcaccacgaccgctaacgtcgattacatccaggtcgcacgcaacacgatcaagcgcatcggttacgacaacaccgactacggcatcgactatcgcggctgcgccgtgctcgtcgcgtatgacaagcaatcgccggacatcgcccagggcgtggaccgcgcgcacgacaacaacctcgatcaaggcgccggcgaccagggcctgatgttcggttacgcgtgcgaagagacaccggaactgatgccgttgccgatccacctgtcgcaccgtctggtggagcgtcaggcgaatctgcgccgtgacggccgtctgccctggctgcgtccggacgcgaagtcgcaggtcaccgtgcgttatgtcgacggcaaaccgcattccatcgacaccgtggtgctgtccacgcagcattcgccggacatcgatctgggcacgctgcgcgaagccgtgatcgaagaagtgatcaagccgacgctgccggccgacctcatcaagggcgacatcaagttcctcgtgaacccgaccggccgtttcgtgattggcggtccgcaaggcgattgcggcttgaccggccgcaagatcatcgtcgatacgtacggcggtgccgcaccgcacggcggcggcgcgttctcgggcaaggacccgtcgaaggtcgaccgttcggcggcctacgccggccgttatgtcgcgaagaacatcgtggccgcgggcctggcttcgcgctgcctgatccaggtttcgtacgcgatcggcgtcgcccagccgacttcggtgatggtgaacacgttcggcaccggccgcgtgtcggatgcggtcatcacgcgtctcgtgcaggagcatttcgacctgcgtccgaagggcatcatccagatgctcgacctgctgcgcccgatctacgagaagagcgccgcctatggtcacttcggccgcgaagagccggaattcacgtgggaatccacggacaaggcgctggcactcgccgaagccgccggcacggaaccggttgccgcgttggccgag

SEQ ID NO: 13439 - DNA, 333 bp, Burkholderia fungorum
gtgctgcggcggtccaccacattttccggtgactgcatggctctgaccctgaccgatgtaaaacgtatcgcgcatcttgcgcggctcgaactggccgacgccgaagctgagcacacgctcgttcagctcaacgattttttcggcctcgtcgagcagatgcaggcggtcgataccaccggcatcgcaccgcttgcccacccgatcgagcagatcgaagacgtcgcgctgcgtctgcgcgacgacacggtgaccgaaacggtcgaacgcgaagctttccagcgcccggcgccggccgtgcaggacggtctgtacctcgtgccgaaggtgatcgag

SEQ ID NO: 13440 - DNA, 1485 bp, Burkholderia fungorum
atgcatgaaaaaagtctgaccgaactgcgcgccgccttgacggcgagggaatgctccgcagtcgaactggcgcagctctatctgaagcggatcgaagcggccaacagcctgaacgcattcatccaggtcgaccccgatctgacgctcgcgcaggcaaaagccgcggacgcgctgctccataccggccacgccggcccgctggtcggcctgccgatcgcgcacaaggacgtgttcgtcaccaaaggctggcgctccacggccggctcgaaaatgctgtccaactacgagagtccgttcgacgcgaccgtggtcgcgcgtctgcagaacgccggcatggtgtgcgtgggcaagaccaacatggacgagttcgcaatgggctcgtccaacgagaattcgtactttggtcccgtgcagaatccgtgggacgtcaaggccgtgccgggcggttcgtcgggcggttcggcggcggccgtggccgcgcgcctcgcgcccgctgcaaccggcacggataccggcggttcgatccgtcagccggcgtcgttttccggcatcaccggcatcaaacccacgtatggccgcgtgtcgcgttacggcatgatcgcgttcgcctcgtcgctggatcagggcgggccgatggcgcgaagcgccgcggattgcgccacgctgctcaacgcaatggccggtttcgacgggcgtgattcgaccagcctcgtgcgtgacgacgaagactacacgcgctacctcggccagccgtggaaagaagacggcgccggcaaaccgctcgccggcctgcgcatcggcctgccgaaagagtatttcggcgccggtctcgccgacgacgtgcgtgcctcgatcgacgccgcgctcaagcaatacgaagcgctcggcgccacgctggtcgaggtttcgctgccgaaaacggagttgtcgatcccggtgtactacgtgatcgcgccggcggaggcttcgtcgaacctgtcgcgtttcgacggcgtgcgcttcggccatcgcgccgcggagtatcgcgatctgctcgacatgtacaagaagtcgcgcgccgaaggtttcggcccggaagtgaagcgccgcattctggtcggcgcctacgtgctgtcgcacggctattacgacgcgtactacctgcaggcgcagaagatccgccgcattatcgcgcaggacttccaggaagcgttcagacagtgcgacgtgatcatggggccggtcgcgccaacggtggcgtgggatctcggcgcgaagggcgacgatccggtgcagatgtatctggccgacatctatacgctgtcggtgagcctcgccggtttgccgggcatgagcgtgccgtgcggcttcggcgcgggcgcgaatgcgcagcgtccggtaggtctgcagatcatcggcaactatttcaatgaagcccggatgctgcaggtggccgacgcgttccagcgcgcgaccgactggcaccgcaaagcaccggcaggagtg

SEQ ID NO: 13441 - DNA, 1482 bp, Burkholderia fungorum
gtgagcaccatgaccaagcaatgggaagtcgtgatcggtctggagacccacgcgcaactgtcgacccactcgaagattttttcgggcgcctcgacgcaattcggcgctgcgccgaatacgcaggcctgccccgtcgatctggcgttgccgggcacgttgccggtgatgaaccgcggcgccgtggagcgcgcaatccagttcggcctcgcgatcggcgcgacagtggcgccgcgcagcatcttcgcgcgcaagaattatttctaccccgatctgcccaagggctaccagatcagccagtacgaaatccccgtcgtgcagggcggccaggtgacgattcaggtgccggccaatgaaaaggcgaatactccggcgtacgaaaaggtcgtcaacctcacgcgcgcccacctcgaagaagacgcgggcaagtcgctgcacgaagacttcgcgggcatgaccggcatcgacctgaatcgcgccggcacgccgctgctcgaaatcgtcaccgagccggaaatgcgcagcgcggcggaagcggtcgcctacgcgaagacgctgcatacgctcgtcacgtggctcggtatctgcgacggcaacatgcaggaaggctcgttccgctgcgacgcgaatgtatcggtgcgtccggtcggtcaggcggaattcggcacgcgtgccgagatcaagaacctgaactcgttccgcttcctcgaagaagcgatccagtacgaagtgcgccgtcagatcgaactgatcgaagacggcggcacggtggtgcaggaaacgcgtctgtacgatccggacaagcgcgaaacgcgctccatgcgcagcaaggaagacgcacacgattaccgctatttccccgatcccgatctgatgccgctcgtgatcgacgcggcgtgggtcgagcgcgtcaaaagcgaaatgccggaactgccggttgcgattcagcagcgcttcgtcacgcaatacggtttgacgccgtacgacgccaacgtgctgacgtcgagcaaggcaatggcggcgtactacgaagcggtggtgagcaagctcggcccggccaacgccaaggccgcggcgaactggctgatgggcgaagtgtcgtcgcaactgaatcgcgaggacctcgacatcgctgcgagcccggtatcgtccgcgcaacttgcgctgctgctacagcgtatcgcggacggcacgatctcccacaagatcgccaaggaaattttcctgtcgatctgggaagagaaagccaccgacgaagccgccaccgatcgcatcatcgaagcgaaaggcctgaagcagatttcggataccggcgcgctggaagcgatcatcgacgaagtgctcgccgcgaatcagaagtcggtcgaggaattccgcgccggcaaggaaaaggcgttcaacgcgctgatcggccaggccatgaaggcgaccaagggcaaggccaatccggcgcaggtgaacgaactgctcaggaagaagctgtcc

SEQ ID NO: 13442 - DNA, 822 bp, Burkholderia fungorum
atgtctcgaatcggtcggcagcagcatcggtcttttctgttcgttccggggaatcgccccgagcgttacctcaaggcctgggagagcgatgccggcgccgtgattgtcgacctggaggacgccgttccaatcgaggaaaaagaccgtgcgcgagcggccgtggcgaactggatcagcccggaaaggccggtgctgatccgcgtgaacggattggccacgccctggttggaagaagacgcccgcgtcgccaggctgccgggcgtcgcgggcgtcgtgctgccgaaagcggcgaacgcgtcggacgtggccgcgctgcttgcgcggatcaagcgcgatatccccgtctatccgctcatcgaaagcgcggcaggaatgtggaacgtgctcgaagtcgcgagtgctccaggcgttcggcaattgatgttcggtacgttggatttctgcgtcgatatgggcatgacactggagagcggcacgctgagtccgtttcgcgcagatatgatcatggcttcccgggtggccggcatccggccgcctgtcgatggcgtcacgccggacatcgatgacgacgagctgttgcgaacggaaaccgtcgaaggcaggaaatggggatttgccggcaagctctgcatccatccccgccaggcgccggtggtgaatggttgctatgcgcccagcgaaacggaactggcgtgggcgagacgcgtgctcgaggcgttcgagcgagccaacggcgccgccgttgccgtggagggaaagatggtcgatcgtccggtgattctgcaggcacggcgcattcttgaggaagacgagcctgaggct

SEQ ID NO: 13443 - DNA, 3612 bp, Burkholderia fungorum
atggcaatgtctaaaagaaacaatgccgggctggtgaggttaacgctgatcgctggcgccgtggtagcgctattgcacaatggcacgagcttcgccggttcgagcgtcgacgctggggccgcggacaacgagccggcatccacccggcagaatgacgagtccactgcgaagcgcaaaaactacaatctggatttactgccgcagcagccgtcagatctgatttatctgacgaccgtaaccgagcccgattctctttatctcaaactgacgttcgacagggcctcgctgcccgcgggtggctacgtccagatctcgaacggcgcttcacaggatgtcgccacctaccgtgctgaagatctgctgaccggaccggtcacggtacgcggcgacacggcggtgatccgcaccgtcctgccgcgactgcgcgtgttgggggagttgcatctcagtcacgtggactacgggaagccggcggtcaacgcaagtgtgcgtgccctgatcggaaatgacgagcgccgtcagcgcgcatgttacgtgggcaccgacatgtatcgctattcgctcccggcagtcgtggcgatgggcagcgggtcgggctcggtggtcggcaacggcaggtacctgctgaccaatcagcacgtcacactgggcgtggctgggaagaccgaaagccgtggcatcgaactcaactatttccgaaacagctgcgataccacgagtgagcccaacgacccgttgcgcatccgcactgatcgcatcgttgcgatcggggatggcggcagtaccgactattcgcttgtgtcgctcaatgatttcgacgttcagcatgctcatacgaaggaactcttcgggagcgcgcgtattcgcccgctgggcgacaatgccttgggcgacgaaatctacattccccaatatgggaatggggggctcatgccccaggtgatcggtgacttgttcgagggcaagcacgcggcggtgaccagtgttggcacgaccatcaaatacaacgccgatacacagtccggctcgtcgggttcgccggtcttatcgcgcgctaccaatgagattatcgcgctgcattatgctggcagcgatagcgcaaactatggtgtacgcctgaccacactccacaaaaacgtccttccgttcatcgagcgggaaaacgacaacattgtcggcgaaggcaatgtgaagtcggtcgcgctggtcattccgccttttgttcttggcaagtcggtgggtaccatcgcatcgggcgctatcgtcgcgcccttcccggatgtccggatgactcaccacggtgcgtattccgaagccctgctcgatagtcaggacgagttgaccctggacctcggcgccgtacgctatcagctttacttccagggcccagccggtgcccatgatctgtcgtcgcaggcggttgcgggtgatgaactctttatccgtctggtcccgccggcgacaccgtcaacgacgttgtccacgtcgctggcatggttgccgctgaaggttaccgacgcccggggcacgctactggaaaacctgatcgtgcgggtggagaattccgaatatgatcccttcaccgtaccgttcgatgccagctcgcccgacgtgacccggctgagtttcgacatcgcgaatgcgaaaaaagactacatgctcgacagtcgcttcgacggcgaacagtacggctatgtcgcgctctatccgggtgaagggccggcgcaactggtcggctccacgacggagccgtatgcgtcgatccagctgcctttgaagaatcagatgggcagagcggaggtcgtgcgcttgcgcggctatcgcgctaccgcttgctcacgccgcgcgatgcagtcgacgattggctgtgccagcggtgagtacagcacattgcggctggaatacctggcggccgacaatcccaatctgtccgcgggtacttacgatgggtttttgcccttgcaggcccagaggagcagcgccacgagcaggaagattctcgcagaggtccatctgaaggtggcgagtgatgcgctgcccgtagctaatgtgggcgagagcgcgcgtacagtcgtcgcgagcagcgttgaacagacctatgcgctggacgggacgggcagccgcgacccggcggacgaaaagctgacctataaatggcgtgtggcaagcggatcgttcggcattcgcaatgcggatcaggccaaggcccaggcggtcgtgccgaagaatgcgacgggtgagggcgtctatgagctgaccgtcacgaacgagtcgggcaagacggcgaaggcgacggtcaaggtcaccgcggtggcgccgcaggtcacgatcagcggcggtacgcagcaggtgaaggacaacgagcaggcgagctacagcgcgaatgcgaacttcgacggcgcgacctactcctggaagctgtccagcgctgccggcaagcaggcggcgacgggtagcggggcgcaatggaaaacgccggtgggtctggatgcgggcacgtacacggtgtcgcttgacgcacgtaacggcgccggcgaccggagcgcgagcgcgcagcagaaactgaccgttgagcgcacggtagcgcttcccggaccggaggccaacgcgggcgcggaccgcacggtggtggcgacgaacgacaccgggtttgcgtatccgctcgtcggcagcgcaagtcgcgacccgaacgggcaggcgatcacgtatcaatggcgcgtggtgtcgggcccgttcacgttgcgcaacggtgatcgtgccgatgcggaggcgatcgtaccgaagggcaccaccggcacgggcgtgttcgagctgaaggtgacgaacgcggcgggcaagacggcgacggcgaccacgaaggtgaccgcgatcgcgccggccgtgacgctcacgggcagcacgaccgtgaccggcagcggggcagccagctacaaggcgaacgcgaacttcgaggaagcgacctatagctggacgctcaccgatacgtcgggccagcaggtcgtatcgggcagcggtgcggattggaacctgtccgctgacgtgaagaacggcaactacacgctcaaggtgctcgcatcgagcgtcaaggggcagcgtagcgcgacggcgaccctggcgctgaaggtggagcgcgcggtggcgcccaagccggtggaggccaaaatcagcggtccggttgaaatcagggcgggcacgaccatcgagctttccggagcgcaatcggtcaacccgaacggtacgccgaccacttacttgtggaccgtgccgccgcagctgggctcgaatgccgaaacgccgagcgtccggttgacggcgcctgccaatgccacagtgggcgcgcagtacaccatcaagctgtcggtgtacgacacgcagaacaagctgtccagtacggcgagctacacggtgacggtgaaagccggcgaaacaccggccggcccagcctatccggcctacaaggcgggtacggagtacaaggctggtgagctggtgctcaactacggtcagctctatcagtgcaagccgttcccgtacgccggctggtgcagtcaggcgccgcccgcctatgagccgggtaaaggctgggcatggacggatgcctggatcaagaag

SEQ ID NO: 13444 - DNA, 1035 bp, Burkholderia fungorum
atggcaatcgtccgcaccgtgcttggcgacattactcccgatcaagctggcagcactctgactcacgaacacatccgctacgcctacccggggtgcgagcttgatcaccgctgtgtatgggactttgattttgtcgccgaggatgtcggcaagcagttcgaggaaatgcgtgaagggtgtgggattaagaccgtcgtcgagttgaccccgccagagattggccggcaccccgaactgtttgcacaaattgcccgccgaagcggcatgaatatcgttgcgacaaccggctttttccctgaggctaacgcgatgggcatcccgttccactggcgacgtcagcgcaaggaagacgtcgttaacatgctcatcagggacctgaccgaaggcatgatttacgatgggcagaagacgccttatcgtgcaggtatcctgaaagccgcgaccgggtcgctaaccgcgaagacgcgtacgccggtcaacgagaagggacgtcgcatcggaaatgtcgaaacccacgtcatttccgcaatagctgccgcgcagcgcgaagtggggtgcgcgatcaatacgcatacgcagccgcttgactatgcggtgtgcaaccctggcatcgaacttctcgacgagttggaggaaggaggcgcggatccgaccaaggtgatcatcggtcatgctttcgtccaccccaacatcgatcagctcaaggcgatatgcgagcgcggcgccagcgtccaggtggatcacatcggtattccctggcagaacgacagccgcgcacaactggacgagctgattgcggtggccatgtgccaactggcagacctcggccatctcgacaagttggttgtctcatacgacaagtttttcagccatgcgcgaggtccggtgacggaagaagagcccgagcagttgaatgaactggtccctaacgactacatcatgacggagttcgctccgcgtctggagcgcaaaggctttggggcaagagagctgcatcaggttatggtcgaaaaccccaagcgtctgcttgctttt

SEQ ID NO: 13445 - DNA, 888 bp, Burkholderia fungorum
atgaacgcacaagcgaacgcacaaccgaacgcacaggcaaccccccactcctacctggtcggtctgattggctcgggcatcggcggatcgctcacgcccgcgatgcacgaggaagagggcagccaactcggcctgcactacgtgtaccgccgcatcgatctggaagcgttgaagctcgacatcgccgcactgccggatctgctcatcgccgccgagcgcatgggcttcaacggtctgaacatcacgtacccgtgcaagcaggcggtgattcctttgctcgacgaactgtccggcgacgctcgtgcactcggcgcggtcaacaccgttctgttcaaggacggcaaacgcattggccacaacacggactggtccggtttcgcccgtgcgttccagcgcggtttgcctgacgtgtcgctggaacgtgtcgtgcaactgggcgcgggcggcgccggcgcggcggtcgcgcacgccgcgctgaccttgggcgcgaaatcgctcacgctattcgatgtggatgcttcgcgcgccgcctcactcgcccgcgaattgcagaagcgctttcccgccgccgcgatcagcgccggcagttcgctcgccgggtcgctcacagctgccaatggcctgattcacgccacacccaccggcatggcgaaattgcccggcctgccgctgccggtcgaattgctgcaccgtgacctgtgggtagcggacatcgtctatttcccgattcgcacggcgctgctgcaggcggctgagtcactcggctgccgcacgctgagcggcggcggcatggcggtgtatcaggcggtcgacgccatgcgcatcttcaccggtctcgaacccgacgccgagcgggtgtatcgccattttcagtcgttgttgcagcgc

SEQ ID NO: 13446 - DNA, 999 bp, Burkholderia fungorum
atgtccgatatccaattagcgtccggcgcgagcagatccaccccgcccggcagcgcatcgcagcagaaagcgcccaggcgggccggcgacgtgatcttcggcggtctcgcgcgcctcgccgccatcatcaccctgttgctgctcggcggcatcatcgtttcgctgatcgtcgcgtccatgccgtcgatcaggcaattcggtctcagcttcctgtggaccgccgactgggatccacccagcaagcagttcggcgccctggtgccgatctacggcacgatcgccacctcgatcattgcactcatcatcgcggtgcctgtgagcttcggcatcgcgcttttcctgaccgaactcgcgcccgcgtggctgcgccggccgctcggcatcgcgatcgagctgctcgccgcgattccgtcgatcgtgtacggcatgtggggcctgctcgtgttcgcgccgatcttcgcgacgtggttcgagaagccgctcggcgcggtgctcggcggcattcccttcgtcggtgcgctgtttcagggcgcgccgatcggcatcggcatcctgtgcgcgggcgtgattctcgcgatcatgatcatcccgtacatcgcctcggtgatgcgcgacgtgttcgaagtcacgccggtgctgctgaaagagtcggcttacggcatcggctgcacgacgtgggaagtgatgtggaagatcgtgctgcccttcaccaagagcggcgtgatcggcggcgtcatgctgggtctcggccgcgcgctcggcgagacgatggccgtgacgttcgtgatcggcaacaccaatctgctcgacaacgtgtcgctgttttcgccgggcaacagcattacgtcggcgctcgccaacgaattcgccgaagcggatccgggcctgcatacgtcggcgttgatggaactcggccttattctgttcgtgatcactttcatcgtgctggcgatttcgaagatcatgctgcttcgtctcgaaaaaggggagggcgcgaaa

SEQ ID NO: 13447 - DNA, 1314 bp, Burkholderia fungorum
atgggtttttcgatgcattccgaagctcaatcccaatccagtagcaagatcgtttccaatgagccggtgttcggcggccaggccgcgcggcgcaagtcgcacgcggtcgacgtccgttggggcggtcagctcgtcacgatcggtggcgacgcgcctgtgcgtgtccagtccatgaccaacacggacaccgcggacgcgatcggcaccgcaatccagatcaaggagctggcgcaggccggctcggaactggtgcgtatcacggtgaacacgccggaagcggctgcggccgtgccggccgtgcgcgagcagctcgaccgcatgggcgtgtcggtgccgctcgtcggcgacttccattacaacggccatttgctgttgcgcgattaccccgcctgtgcggaggcgttgtccaagtaccggatcaacccgggcaacgtgggccacggcgcgaagcgcgacacgcagtttgcgcagatggtcgaagccgcggcgaagtacgacaaacctgtgcgtatcggcgtcaactggggcagtctcgatcaggatctgctcgccaaaatgatggacgagaacgccgcgcgttccacgccgtgggaagcgcaaagcgtcatgtatgaagcgctcatccagtcggcgatcggctcggcggagcgggcggtcgaactcggtctgtcgcgcaaccagatcattctgtcgtgcaaggttagcggcgtgcaggatctgatcgccgtgtatcgtgaactcgcgcgccgttgcgatttcgcgctgcatctcggcttgaccgaggccggcatgggctcgaaaggcatcgtggcgtcgacggcggcgctgtccgtgttgctgcagcagggcatcggcgacacgatccgcatttcgcttacgccggaaccgggcggatcgcgcaccggcgaggtgatcgtcggccaggaaatcctgcagaccatggggctgcgctcgttcacgccgatggtgatcgcgtgcccgggttgcggccgtaccaccagcacgctgttccaggaactggcgtcgcagatccagacctatctgcgcacgcagatgccggtgtggcgcgatcagtatcctggcgtcgagaagatgcacgtcgcggtgatgggttgcatcgtcaacggtccgggcgagtcgaagcaggccaacatcggcattagcttgccgggttcgggtgagaatcctgccgcgccggtgttcatcgacggcgagaaggtgaagacgctgcgcggcgaaaacatcgcccaagaattccagcaaatcgtgagtgactacgtcgagcgccgctacggccgcgccgaagcgctcaat

SEQ ID NO: 13448 - DNA, 825 bp, Burkholderia fungorum
atgtcgcaacaacttcagcagatcattgacaccgcctgggaaaaccgcgccgagctgtcgccgaaggccgctccggccgacgtgcgcgaagccgtcgcccacgccatcgagcaactggacaagggcctgctgcgcgtcgccgagaagaaagacggcgactgggtcgtcaatcaatggctgaagaaagccgtactgctgtcgttccgcctggaagacaacgcgccgatgccggccggcggctactcccagttttacgacaaggtgccgtcgaagttcgccagctacaccgctgaagacttcgcggccggcggctttcgcgtggtgccgcccgccatcgcgcgccgcggctcgttcatcgcgaagaacgtcgtgctgatgccgtcgtacaccaacatcggcgcgtacgtggacgaaggcacgatggtcgatacgtgggccaccgtcggttcctgcgcgcagatcggcaagaacgttcacctgtcgggcggcgtgggcatcggcggcgtgctggagccgctgcaggcaaacccggtgatcattgaagacaactgcttcatcggcgcgcgctcggaagtggtggaaggcgtgatcgtcgaggaaaactcggtgatctcgatgggcgtgtacctcggccagagcacgaagatttacgaccgcgaaaccggcgaagtcacgtatggccgcattcctgcgggctcggtggtggtggcgggcaacctgccgtccaaagacggcacgcacagcctgtactgcgccgtgatcgtcaagaaggtggacgccaggacgcgtgcgaaggtcggcctgaacgagctgctgcgaggcgac

SEQ ID NO: 13449 - DNA, 1302 bp, Burkholderia fungorum
atgtcccgtcaggaacaagccaaacaacttcagcagcaatgggaaacggatccgcgctggaaaggcgtgaagcgcagctacacggcggaagacgtgatccgcctgcgcggttcggtgcaggtcgagcacacgctcgccaagcgcggcgcgcaaaagctgtgggaaagcgtgaacaacgagccgttcgtcaactcgctcggcgcgctgaccggcaaccaggccatgcaacaggtcaaggccggcctcaaggcgatctatctgtccggctggcaagtcgcgggcgacgcgaacgtggccggggaaatgtatccggaccagtcgctgtatccggcgaactcggtgccgctcgtcgtcaagcgcatcaacaacacgctgacgcgtgccgaccagatccagtggtcggaaggcaagaacccgggcgacgaaggctatatcgactacttcgcgccgatcgtggcggatgcggaagcgggcttcggcggcgtgctgaacgcgttcgaactgatgaaggcgatgatcgaagcgggcgctgccggcgtgcacttcgaagaccagctcgcctccgtcaagaagtgcggccacatgggcggcaaggtgctcgtgccgacccgcgaaaacatcgccaagctgaccgccgcgcgtctggccgccgacgtctcgggcgtgccgaccgtgctgctggcgcgtaccgatgcggaagccgccgacctgatcacctcggacatcgacgaaaacgacaagccgttcctgaccggcgagcgcacggtggaaggcttctaccgcacgaagccgggtctcgaacaggcaatctcgcgtggcctcgcctacgcgccgtacgccgacatgatctggtgcgaaaccggcaagccggacctcgagttcgcgaagaaattcgccgacgcgatccacaaggaatacccggatcaactgctgtcgtacaactgctcgccgtcgttcaactggaagaagaacctggacgacgcaacgatcgccaagttccagcgcgaactcggcgcgatgggctacaagttccagttcatcacgctggccggcttccacgcgctgaactactcgatgttcaacctcgcgcacggctatgcccgcaaccagatgaccgccttcgtcgaaatgcagcaggctgaattcgctgcggccgaaaagggcttcaccgcagtcaagcaccagcgcgaagtcggcaccggctacttcgatgccgtgacgcaaacggtcgaacgcgaagcatcgacgaccgcgctgcacggctcgacggaagacgaacagttcttcgacaagcgggtcgcg

SEQ ID NO: 13450 - DNA, 1971 bp, Burkholderia fungorum
gtgatccgctttaaccagttcagcctcgcgcgcggcaccaagccgctcttcgacaacaccacgttcaccctcaaccccggcgaaaaggccggtctggtgggggcgaacggcgcgggcaagtcaacgctgttcgccgtgctgcgcggcgaactgcatgcggacggcggcgatttttcaattccgcccacctggcagatcgcccacgtcgcgcaggaaacgcccgccgcggacaagaccgccctcgcctacacgctggacggcgacgccgcgctgcgtacgatcgaagcgcgcattgccgccgcctccgccgcccatgacggcgcggccgaaggtgaagcgcacgcggccttcgccgacgccgacggctacaccgcgcccgcgcgcgccgaagcgctgttgctcggcctcggcttcacgctcgaacagacgcgcgagccggtcagcagtttttcgggcggctggcgcatgcggctgaatctcgcgcaggctctgatgtgccgctccgacctgctgctgctcgacgaaccgaccaaccacctggatctcgacgcgatcgtctggctcgaagactggctgcaccgttatccgggcacgctgatcgtgatctcgcacgaccgcgaattcctcgactcggtctgcaatgtcacgctgcatctggagcagcagcagatcaagcgctacggcggcaactactcgcaattcgaagtgctgcgcgcgcagcagatcgcgctgcaacaaagcgcgtacgaaaaacagcagcgcacggtcgagcatttgcagagctatatcaaccgcttcaaggcgcaggccaccaaggcgcgccaggcgcaaagccgcgtcaaggcgctggaaaagatggagctgatcgcgccggcgcatgcggcctcgccgttcacgttcgagttccgcacccccgattccgcgccgaatccgatgatggtgatggaagacgtgcgctgcggctatcgcagcgagagcgaaccgggcgtcgagattcccatcgtcgaccacgtcatgctgtcgatccagaacggtcagcgcatcggcctgctcggcgcgaacggccagggcaagtccacgctgatcaagacgctcgccggcacgctcgaaccgctcggcggccacgtgcgggaaggcaaggggctgcgcatcggctatttcgcgcaacatcagctcgaaacactgcgtccggaagacacgccgttgcagcacctcgcgcgcctcgcaccggacacgcgcgaacaggaattgcgcgacttcctcggcagcttcaatttttccggcgagatggcgacctcgaagatcgcgcccttctccggcggcgaaaaggcccgcctcgcgctcgcgctgatcatctggcaaaagccaaacctgctgctgctcgacgaaccgaccaaccacctggatctcgaaacgcgtcacgcgctgactatggcgctcgcgcagttcgaaggcacgctgattctggtctcgcacgaccggcatctgctgcgtgccaccacggatcaattcatgctggtcgcgaaacatcggctgcaggagttcgacggcgatctcgacgactaccgcgactggctgctgcaacacgcggccgaacagcgcgccgcgctcaaggcgggcacggcgtcgaacggcggcaatggtggtaatggcggcagcggcagtgacggcggcgcggacaacggcgtgaatcgcaaggaacagcggcgcctcgaagccgaaacgcgccagaagctcgcgcacctgaaaaagccgctgcaaagccggatcacgaagatcgaaaaggaaatggacgcgctcaacgcggagaagaccacgctcgatgcgttcgtcgtcgatccggcgagttacgagcccgggcagaaaagcaaactgacggaggcgatccgccgtcaggcagatgtgaacgcgcgcctcgaagcgctcgaagccgagtggctcgaggcgcacgaggaactcgaacagatcggc

SEQ ID NO: 13451 - DNA, 960 bp, Burkholderia fungorum
atgagccaacgcattcgccgccgcatcctggtggctgccgtcctcgccatcgctagcgccgccttgccgttttcgtctgcgtacgcgcagaacgcgcccgcccacaagccgagggtcgcgctggtgatgaagtcgctcgccaacgaatttttcctgactatggaaaccggcgcgaaggactatcagaagcacaatgcctcgcagttcgacctgattaccaacggcatcaaggacgagaccgataccgcgaaccagatccgcatcgtcgagcagatgatcgtgtcgaaggtcgacgcgatcgtgctggcgccggccgattcgaaggcgctggtgccggtcgtcaagaaggcggtggatgcgggcatcatcgtcgtgaatatcgacaaccggctcgatccggacgtgctcaggtcgaaagacctgaacgtgccgttcgtcggcccggataaccgcaagggtgcgcagaaggtcggcgattacctggccagaaagctcaaggcgggcgacgaggtcggcattatcgaaggcgtgtcgaccaccaccaacgcgcagcagcgcaccgcgggtttcagggacgcgatgcagaaggtcggcgcgaaggtcgtctcggtgcaatcgggtgaatgggaaatcgacaagggcaacgcggtcgcttcggccatgctcaacgaatacccgaacctgaaggcgctcctcgcgggcaacgacaacatggcgatcggcgcggtctcggccgtgcgcgcggccggcaagcagggcaaggtgctggtggtcggctacgacaacatcaacgcgatcaggccgatgctcaaggacggccgcgtgctcgccaccgcggatcagtatgcggccaagcaggccgtgttcggtatcgacaccgcgctgaaggcgttgagcgagcacaagaagcagtccgatctttccggcgtggtggaaacgccgtgcgatctgatcacgaag

SEQ ID NO: 13452 - DNA, 873 bp, Burkholderia fungorum
atgaccatccgaaatattgtgggcttcgtcgcgacagccgttatttttatcgtcgcgattttgattggacgtgtgctgtgggtccattacatggacgaaccgtggacgcgcgacggtcgcgtgcgcgccgagatcataaatatcgcaccggatgtctcgggagcgatcgtcgatctgcccgtgaaggacaatcagctggtgaagaaaggcgatctgctgatgcagatcgacccgtcgcactatcagcttgcggtcgagcaggcccaggccgcggtcgccgcgcgaaaggccgaactacagatgaggcgcgatgacgcgcaacggcgtgcggatatggatgcgctggtggtgtcgaaagagaaccgtgagaatgcgactcacacggcttcggccgccgaggcttcctatcagcaggcgttggctgcgctcgatgcagccaggctgaatctcgaacgcacgcgggtggtgtcgccggtcgacgggtatgtcacgaacctgagcgtgttccgcggcgactatgcgacggttggttcggccaagctggcgattgtcgatagccactcgttctgggtgtatgggtatttcgaagaaaccaagctgccgcacgtgcatgtcggcgataaggcagcagtccggttgatgagcggcggcacactgcaagggcatgtcgagagtatttcccgagggatttatgatcgggataatcctgaaagccgtgaactgcttgccgacgtgaatccgacttttaactgggtgcggttggcgcagcgcgtgcctgtgcgggtgaagatcgattcggtacccgacaatgtcgtgctggcggcggggattacttgtacggttgtgattacgcctgcgagtgccaaggctggg

SEQ ID NO: 13453 - DNA, 1083 bp, Burkholderia fungorum
atgccgccgtcgtatcgtttcgatatcgaaatcgaagaagacctgatcgaagaagtcgcgcgtatttacggcttcgagaaaattccggcgcgtccgccggtcgcgaccagcgaaatgcgcgcgaccaacgaaacgcagcgttcgatccacgtgatccgtcacgcgctcgccgctcgcgactacgcggaaacggtgaacttcagtttcgtcgacgccgagtgggagcaggacttcgccggcaacgacaaaccggtacgtctgctgaatccgattgcaagccagttgtcggtgatgcgcaccacgcttttcggcagcctgattcacgtgctgcgcacgaatctgaaccgccgcgcggcggatcgcgtgcgcgtgttcgaggccggccgcgtgttcctgcacgatccgtcgatcaaggctggcgagctgacggtcgaaggcttcgcgcagccgaagatgatcggcggcctcgcgtacggtcccgcgctcgacgagcagtggggcgcggcaacgcgcacggtcgactacttcgacgtgaagggcgatctggaagccgtgctggcgccggcggtcgcgcgtttcgtcaaagcggaacatccggcattgcatccgggacgcagcgcgcgtattgaactgaatggccgcgcagttggctggattggtgaattgcatccgcgctggatgcaaaaatatgatttgccgcatgcgccgattctgtttgaaatcgaggcggaagcattaatgcagcgcgtattgcctactccggcggaagtgtctaaattcccaccggtgcgtcgtgatattgccgtggtcgtcgaccagaaaatcgaggttcaggcactgctcgacgagcttcagaaagcccagtccgaacccgcgtgcaaggccgttcagaaggttgcgcttttcgacgaattccgtccaaaatcaaacacttccggcggtctggctgctcatgagaaaagccttgcgttccgtgtaaccttgcaagatactggtggaacccttcaggacgaaacggtcgaactggctattcaaactctggtggcacgtctggctcgagtatatggcgcacggctgcgcgga

SEQ ID NO: 13454 - DNA, 1206 bp, Burkholderia fungorum
gtgaccctcacctttgtcaggcgcccccccgggctgcagttcggcggcctcgacgtgcgccagctggccgaccgcgccgggcgtacgccgttcttcgcctacgaccgctctgcgattgacatccgcgtgcgggaactacgcaacctgctgcccgccggcatgcatcttcactactcgatcaaggcgaacccgatgcccgccgtgatccaccacctcgcccaacgggtcgacgggttcgatgttgcctccgcacaggagatggcgctggcgctcgatgccggcaccgctccggacgcaatcgggttcgccgggccgggcaagtctcacgacgacctgcgccgcgcagtggccagcggcatcaatgttcacgtcgagtcggaaacccagttgcggcttgtcaccgcccttgggtgggagctgggcgtgcagcccagcgtggcgatccgcgtcaatccggattttcaggttggacacagcggcatgcgcatgggcggcggtgccgcaccgttcggcgtggatgtcgaccaggtcccggcactgctgcgcgaactcgaagcgcgggaagtcgccctcgctggctttcacgtcttctggggctcgcagtgcctgcatgcggcaaccatcatcaaagcccagcgccagagtgctgatctcatccttcgactcgccagcggggtgccgcggccgctgcggttcgtgaatctcggcggcggctttggcatcccctactttccgggcgaaaccccgctcgatgtaaaggcggtctgcgaggcgatgcaggactggctgccgccgctttgcgaacgtctgcccggaacgacgccgatcctcgaactcggccgttacctcgtgggcgaggccggtatctacgtgtgccgtgtcatcgaccggaaagtgtcgcgcggcaggacgttcgtcgtcaccgacggcggactgcatcatcacctggcggcctccggcaacttcggccaggtcctgcgccgcaactttccggtcgtgatcggcaaccgccccgacggcgtgccacgcgagcggtgtcatgtggtcgggtgcctctgcacgccactcgatcgtcttgcggacgaggttgaacttcccgaagcgcacatcggggatttcgtggtgattatgcaatcgggtgcctatggccgttcggcgagtcctgtgcgttttctcagccacccggaacccgtcgaaatgctcgtg

SEQ ID NO: 13455 - DNA, 1875 bp, Burkholderia fungorum
atgttttcgaaagcagcagtgtggctggttatcgcactggtgctgtttacggtgttcaagcagttcgacaagccccgtgtccaggaaggcgtttcctattcgcagttcatggacgacgcaaagaacggcaaagtcaagaacgtcattgtccaggggcggaacctcacggtcactccagcagacggccagaagtaccagatcgtgtcgcccggcgacatctggatggtcggcgatctgatgaagtatggcgttcaggtgagcggcaaggctgatgacgaacccaatgcgctggtgtccgcgctgtactacctcggaccgacgatcctgatcatcggtttctggttctacatgatgcgacagatgcagggaggcgggaaaggcggtgcgttctcgttcggtaaatcccgtgcacgtctgatcgacgaaaacaacaacgcaatcaatttcaccgacgtcgccggttgcgacgaggccaaggaagaagtctccgaactggtcgacttcctgcgcgatccgcagaaatttcagaaactgggcggacgtattccgcgcggcgtgctgctggttggcccgccgggaaccggtaagacgctgttggcgcgcgccatcgctggcgaggcgaaagtgccgttcttcagcatctcgggttcggacttcgtcgaaatgttcgtcggtgttggcgcggctcgggttcgcgatatgttcgaacaggccaagaagcacgcgccgtgcatcgtgttcatcgacgaaatcgacgcggtcggccgtcatcgcggcgccggcatgggcggcggtaatgacgaacgtgaacagacgctgaaccagatgctggtcgagatggacggcttcgaagcgaactcgggtgttatcgtgatcgctgcaacgaaccgttcggacgtgctcgacaaggcgctgttgcgtccgggccgtttcgaccgtcaggtgtacgtcggtctgccggatatccgcggtcgcgaacacatcatgaaagtccatctgcgcaaggtgccgatctcgaacgacgtcgacgcagcggtgatcgcgcgcggcaccccgggtttctcgggcgccgatctcgcgaacctcgtgaacgaagcggcattgttcgcggctcgccgcggcaagcggatcgtcgaaatgacggacttcgaagacgcgaaggacaagatcttcatgggtccggagcgcaagtcggccgtgatccgcgaagaatcgaagcgtgccacggcgtaccacgagtcgggtcatgcggtgatcgccaagctgttgccgaaggccgatccggtgcacaaggtcacgatcattccgcgcggtcgtgcgctgggtgtgacgtggcagttgccggagcatgacaacgaaacgtattcgaaggactacctgctggatcggcttgcgatcctgttcggtggccgcgtggcggaagaattgttcctgaacctgatcagcaccggcgcgtcggacgacttcaacaaggcgacgcaaacggcgcgtgcaatggtggctcgctttggtatgacggacgcacttggaccgatggtctacgtcgacgacgaaaacgacgcaacgccgttcgggcgtggtttcacgcgcaccatttcggaagcgacgcagcagaaggtcgacgccgaaatccgccgcgtgctggacgagcagtacaacctcgcgaagcgcctgctggacgaaaaccgcgacaaggtcgaagcaatgaccgccgcgctgatggagtgggaaacgatcgacgccgatcagatcaacgacatcatggccggccgtccgccgcgttcgccgaagagttcgacgccgtcggcaaccgacgcctcgtcgggcggcagcccgggtaccgaggtcaagcccggtagcgcaacggcgccggcc

SEQ ID NO: 13456 - DNA, 1023 bp, Burkholderia fungorum
gtgatgaacagcaatcgtgggacgattccagttgctttcttcggtatcgcggtgggcgcgctggcgttcgccaacttgtggcgcgtagcgatcaggctctggcatctgccggccgccatcggcaccttgacgacagcggccgcactcgtcgtgtggctggtgattctggccgcatacggccagaagtggctgacgcatgccgccgaagcccgcacggaaatgcagcatcctgtgcagtcgtcgtttgcggcgctcggccccgtttcgactctgctcgccgcgcagcttctccagccctacgcgcatgctttggcgctcgcgctgttcggcgtggccatagtcgcgcaactcgcgctcggcgtgtatttgcatggacggctctggcagggcggccgccagcccgaactggtgacacctgccatttatctgccgaccgtggcaccgagcttcgtggcgggcacggctgcggccgccttcgggttccatcaactgggcgggctttttttcggtgcgggtttgctgtcgtggctggcgatcgaatcgctgatcctgcaccgcgccgccgtgcatgaaccgctgcccgacgcattgcgcccgttgctcggcgtgcaactcgcgccgccggtggtaggcggcgtgacctatctgagcctgagcagcggcacgcccgacctgttcgccctggccctgctcggttacggcctgtatcaggcgcttctgctgttgcgtctgctgccgtggattcgccaacgggctttcgtgccgggttactgggccttcagcttcggcgtggcagcactgccgacgatggtccttcggatggtcgaacgaggcgcgacgggtccgctcgaatgggccgcgccggttctgttcgtcgcggcgaatctgatcatcgcgattctggtggtgaagacgctgggtttgctggtgcacggcaagctgattcccgccatcgtcaccgcggccgccggttcgcggcccgtaccgcaggcgccggccgcctcacgtatctcacgggccggc

SEQ ID NO: 13457 - DNA, 1665 bp, Burkholderia fungorum
atggcccaatacgtcttcaccatgaaccgggtcggcaagatcgtgccgcccaagcgtcaaatcctgaaagacatctcgctgtcgttttttcccggcgcgaagatcggcctgctcggcctgaacggctcgggcaagtcgacgctgatccgcatcatggccggtgtggacaaggacatcgaaggcgaagccacgcctatgccgaacctgaacatcggctatctgccgcaggaaccgcagctcgatccgaacaaaaccgtgcgtgaaacgatcgaggaaggtctcggcgacgtgttcaacgcgcagaagaagctcgacgaaatctacgcggcttatgccgaaccggacgccgacttcgacgcgctcgccgccgagcaggccaagtatgaagcgatcctcgccacgtcggatggcggcaacgccgagcagcagatcgaaatcgccgccgacgcactgcgcctgccgccctgggacgcgaagatcgaacatctgtcgggcggtgaaaagcgccgcgtcgcgctgtgcaagctcctgctcgaaaagccggacatgctgctgctcgacgagccgaccaaccacctggacgcggaatcggtcgactggctcgaacagttcctcacgcgcttcccgggcaccgtggtcgccgtgactcacgatcgctacttcctcgataacgccgccgagtggattctcgaactcgaccgcggccacggcattccgtggaagggcaactacagcagctggctcgaccagaaggaagagcggctgaagcaggaagagtcgtcggaatcggcgcgccagaaggccatcaagaaggaactggagtgggtgcgccagaacccgaagggccgtcaggcgaagtcgaaggcgcgtatcgcgcgcttcgaggaactgaacagccaggactaccagaagcgcaacgaaacctcggaaatcttcattccggtcggcgatcggctgggcaatgaagtgatcgagttcaagaacgtcagcaagtcgtatggcgaccgtctgctgctcgacaacgtcagcttcaagattccggcgggcgcgattgtcggcatcatcggaccgaacggtgcgggtaaatcgacgctgttccgcatgctcaccggccgcgaacagccggattcgggcgagatcgtgcagggcccgaccgtcaagctcgcgtacgtggatcaaagccgcgatgcgctggacagctcgaagaccgtgttcgaggaaatttccggcggcgcggacgtgctgacagtcggcaagtacgaaacgccgtcgcgggcgtatatcggccgcttcaatttcaagggtggcgaccagcagaagatcgtcggcaatctgtcgggcggtgaacgcgggcggctgcatctggccaagacgctgatctcgggcggcaacgtgctgctgctggacgaaccgtcgaacgacctcgacgtcgaaacgctgcgcgcactcgaagacgccttgctcgaattcgccggctcggtgctggtgatctcgcacgatcgctggttcctcgaccggatcgccacgcacatcctcgcgttcgaaggggattcgcaagtcacgttcttcgacggcaattaccaggagtacgaagcggacaagcgcacgcgtctgggtgaagaaggtgcacgtccgaagcgtctgcgttacaagccgatcgcgcga

SEQ ID NO: 13458 - DNA, 2418 bp, Burkholderia fungorum
atgcgcgacgctgccagcatcgtcagttccgtggtattcgaccattacgacgaggcggacgagcgccgccgcgaatccttgctggggctcggcaacggcgtgctgttcgtgcgcgcgtgcgcgcccgaaagcatgttcgcatcgccggccgacgacggggcgagtcactatccgggcacctatcgcgcggggctatataacgagctcgaaaccgaaatccagggtgaacgcgtgcgcagtacgttcacgccgcgtctgcccgacgccaccgtgcttgccgtgcgccctcgcggtggacgctggctgggcgccgatacttcgcgtgtgctggattaccggcacgcgctcgacatgagccgcgccaccgccacacgtcatctgctgctcgccgacgacggccgcaccacgcgcattgaagaactgcgcttcgtgagtgccgcgcatccgcaaatcatcgtgctgcgctggcgcgtgacggcatgcgactggactggcctgctcgacatcggcgctggcatcgacggcgatgtgcgcaatgccaacgtcgcgctgcagcgcgcatggcgcggtcgtcacgtgacggatttcagcgcgcgccaggccgctcccgagacgctgcttgcgaccgcgcgcctgagcggcgcgctcgtctggctggcgctcgcggcccgcaccgtcgtgcgcggcgcccacggcgcgctcgcgccgagccaactggcagcatgcggagcgggcctcttcgagttgcatcgtgtgcctctgcaggcaggcgaaaccgtttgcatcgaccgcgtaatcgcggtgtgcacctcacgcgacgcaaccgtgagcgatccggccgaagctgtcctcgcgctggtgtccgatgaatttgccgcagacgccgacgcgttgcaggccgcgcacgaacgtacatgggcctcacgctgggagcggattcaatgccgctcgagcgatgcccggctcgcccggcaactcaacctgcgggcgtttcacgtggctcaaacgctgtcaggggcggtggtgcatgaagacgccggttttcccgcgcgcggctggcaggaggcttaccaggggcacatattctgggatgacatgttcgtgctgccggcgctgctgcgggactgcccggaggccgcccgcgcgccgctgctgtaccgctaccggcgcttgccggccgcgcgacgcgccgccgcgcgcgaaggctacgcgggcgcgatgtttccgtggcgcagcgcgacgaccggcggcgaggagacgccgcgtttcgagctgaatccgctgaacgggcactggatgcgcgacgacacgcggctgcaacggcacgtcggcgcgtcgattgcatggaacatctggcgctactactgcatgagcggcgacgccgcgttcctgtatcgcgagggcggtgagatgctggtcgagatcgcccgcttctgggcgagcattgcgcgcttcgacgaagcgcgccgccgctacgtgatccgggccgtgatcggcccggatgagtatcacaacgcctatcccggtgccgactcgcccggtctcgacaacaacgcctacacgaacgtgatggccgcatggacgctacgatgcgcggccgatgcgctccgcgcgatgccgcggccgcagcgtgacgcgctcgcggtgaaactcgaactgggcgacgccgaagccgctcgctggaacgcgatcgcgcggcgtatccatgtgccgtttctggcgggcggcatcatcgaacagttcgacggcttttcggcgctcaagccctaccccgatgtgtccgcgcaagcgcggcacggccagcggaccgactggcgtctcgaagcggcaggcgacacggtcgaggcctggcaagtctgcaaacagccggacgtgctgatgctgttcgcgctgctcggccagccacagcttgcctcgctactgaccgatctgggttatccgttcgacgacgcgaacgcccggcgcacgctcgactattacaccggccgcatgacgcacgagtcgagcctttcgaaagtggcttgcgcggccgcgtttgcgcacgccgacccgcagcgctcatggcaatacttcgtcgatgccctgcaggtggatgccgccgccggcgccggcagcagcgcagccgaagggctgcatcttggcgcgctcggcggtgcattcagcgtggtcctgcggcactacgccggcatcgacttcataccgcatgcgatgcggctgtttccggcatggcccgaacccctgccggcgctgcaactggcctttgcctatcgcagcaatcgcttcgagttgcagggcgacgcccgcaccgttcgcattctgtccgatccgggaaatctcagcgcagtcgccgttcagcatgtgggcggaacgtgccagttagcgcccggcaagacgatcgcggtggcggcgcgcgcggca

SEQ ID NO: 13459 - DNA, 1284 bp, Burkholderia fungorum
atgcagcttctaacgatcggaatcaatcaccacactgcgcctgtcgccttgcgcgaacgcgtggcgtttccgctcgaacagatcaagcccgcattggacaccttcaagagcatctggctcggtccgtcggcccgcacggcgcccgaagcggcgattctgtccacctgcaatcgcaccgagctctactgcgcgaccgacgaccaggccgcgcgcgaagccgcgatccagtggctgtcccgctaccacaacctgcccatcggcgaactcgcgccgcacgtctacgcgctgccgcagtcggaagccgtgcgccacgcgtttcgcgttgcatcggggctggattcgatggtgctgggcgagacgcaaatcgtcgggcaaatgaaggacgcggtgcgtaccgcatccgaagctggcgcactcggcacctatctgaaccagttgttccagcgcaccttcgccgtcgcgaaggaagtgcgcagcacgaccgaaattggcgcgcagtcggtttccatggccgccgccgccgtgcgcctcgcccagcggattttcgacaaggtcgcgaaccagcgcgtgctgttcatcggcgcgggcgagatgatcgagctgtgcgccacgcatttcgcggcgcagcagccgaaggaactggtggtcgcgaaccgcacggccgagcgcggcacgcgtctcgccgaacgcttcaacggccgcgccattccgctgtcggaactgccctcgcgcatgcatgagttcgacatcatcgtgtcgtgcactgcgtccaccttgccgatcatcggcctgggcgcggtcgagcgggcggtgaaagcgcgccgtcaccggccgattttcatggtcgatctggccgttccgcgcgatatcgaacccgaagtcggccagctcgaagacgtgttcctgtacaccgtcgacgacctcggcgcgatcgtccgcgaaggcaatgcttcgcggcaagccgcggtcgcgcaggccgaagcgatcatcgaaacgcgcgtgcagaacttcatgcaatggctcgacgcacgcagcatcgtgccggtgatccgccatatgcacacgcaggccgacgtgctgcgtcgcgccgaggtggaacgcgcgcagaaaatgcttgcgcgcggcgacgatccggccgccgtgctcgaggcgctgtcgcaggcgctcaccaacaaactgatccacggccccacgcacgcgctcaatcgcgcgagcagcgaaaaccgtgacacgctcatcgaactcatgagcggcttctacaaacactccggttccacggagcgt

SEQ ID NO: 13460 - DNA, 1080 bp, Burkholderia fungorum
atgaaaacgagcatgcaacgcaagctcgaccagctcactacccggctggccgaactgaacgatctgttgagccgcgaggacatcacctcgaatctcgaccaataccgcaagctcacgcgggaacacgccgagctcgggccggtggtcgagcattacgcgctgtggcgccaggccatgaacgacgccgccaccgcgcaggaactgctggcggacgcgtccatgcgcgacttcgcggaagaagagattcgggcggcgcgtgagcgcatggacaagctcggcgccgagttgcagaaaatgctgctgccgaaagatccgaacgacgatcgcaacatcttcctggaaatccgtgccggcacgggcggcgatgaatccgcgctgttcgcgggcgacctgctgcgcatgtacctgcgctatgccgagcgcaaccgctggcaagtggagatgatgtcggcgagcgaatccgacctgggcggctacaaggaagtgatcgtgcggatcgccggcgaagccgcctattcgaagctcaagttcgagtccggcgggcatcgcgtgcaacgcgtgccggcgaccgaaacccagggccgcattcacacgtcggcgtgcacggtcgcggtcatgccggaagcggacgaaatcggcgaagtcgagatcaatccggccgatctgcggatcgacacgtttcgcgcgtccggcgcgggcggccagcacatcaacaagaccgattccgcggtgcgcgtcacgcacttgccgaccggcatcgtcgtcgaatgtcaggacgaccgttcgcagcacaagaacaaggatcgcgcgctgaaggtgctggccgctcgcatcaaggacaagcaatcgcacgagcagcaggcgaaggaagccgccacgcgcaagagcctgatcggctcgggcgaccgctcggagcggattcgcacgtacaacttcccgcaagggcgtctgaccgatcaccgcatcaacctgacgctctaccgtctcgacgcaatcatggacggcgatctcgacgagctgatcgcggcactcgtcagcgagcatcaggctgagttgctggcgtcgctgggcgacgcggac

SEQ ID NO: 13461 - DNA, 858 bp, Burkholderia fungorum
atgacttcggccacgtctaccgcgccgacgacaccggccgcgctgttacgcgcctcgccactgccaccgcccgaagcgcggatcctgctcacgcacgtgctcggctggcggcccacgcagctgattacgcgcagcgacgaaccgctcggcgccgagctggtcgagcgttaccgggctttagaagcgcgccgcgcggccggcgagccggtcgcgcaactggtcggcgcccgggaatttttcggactggatttcgaagtcacgccgcacgtgctgataccgcgccccgaaacggaattgctggtcgaaaccgcgctggcggcgctggaaaatctctcgcggcctcgcgtgctcgatctcggcaccggaaccggcgcgattgccgtcgcgatcgcatccatgcggcccgacgcgcaggtctgggcgctcgaccactccgccgaagcgctggcggtggccacgcgcaacgccgcccgtctgctcgacgcgaaacggcccggcggcgccgtggcgttgacccaaagcgactggtacgactcgctcgacgccgcgctgcgctttgacgttatcgtcagcaatccgccgtatatcgcgagcggcgatccgcatctggcgcaaggcgatctgcgcttcgaaccgcgcggcgcgctcaccgacgaagccgacgggctcagcgccattcgcgccatcattgccggcgcgcccacacggcttgccgccgggggcgtattgtggatcgagcacggctacgatcaggcggaagccgtgcgcaaactgctgacggcgcgaggtttcacccaggtccgctcggagcgcgatctcgccggcatcgaacggatcagcggcggacggttggccggg

SEQ ID NO: 13462 - DNA, 1092 bp, Burkholderia fungorum
atgagcctcaaatgcggcatcgtcggcctgcctaacgtcggcaagtccactctgttcaatgcgctgaccaaggcgggcatcgccgccgaaaactatccgttctgcacgatcgagccgaacgtcggcatcgtcgaagtgccggacgcgcggctgaaggcgctcgctgaaatcgtcaagccggagcgcatcctgccggccgtggtggaattcgtcgacatcgccggtctcgtggccggcgcgagcaagggcgaaggtctgggcaaccagtttctcgccaacatccgcgaaacggatgcgatcacgcacgtggtgcgctgcttcgaagacgagaacgtgattcacgtcgcgaacaaggtcgatccgctgtcggatatcgaagtgatcaacaccgaactggcgctggccgacctcgccaccgtcgaaaaggcgttggcgcgctattcgaaggcggccaagtcgggcaacgacaaggaagccatcaagaacgccgccgtgctggaaaaagtgcgcgctcagctcgaccaggccaggccggtccgcgcgctcgacctctcggacgaagaaaaagccacgctcaagccgttctgcctgatcaccgccaagccgaccatgtacgtggccaacgtgaaggaaaacggtttcgagaacaatccgcacctcgacgcggtcacgaagtttgcggccacggaaaacgcgccggtcgtcgccgtgtgcgctgcgatcgaagcggaaatcgccgacctcgacgaagccgacatggaagtattcctcgccgacatgggcatggaagaaccgggcctgaaccgcgtgatccgcgccgccttcaagctgctcggcctgcaaacctacttcacggccggcgtgaaggaagtgcgcgcgtggacgatccatatcggcgatacggcgccgcaggctgcgggcgcgattcacacggacttcgagcgcggcttcattcgcgcgcagaccatcgcgttcaacgacttcatcacctataagggtgagcaaggcgcgaaggaagccggcaagatgcgcgcggaaggcaaggaatacgtcgtgcacgacggcgacgtgatgaacttcctgttcaacgtg

SEQ ID NO: 13463 - DNA, 1398 bp, Burkholderia fungorum
atgccgtcaaggcggcggccatccatccgcagtgaccggatggacggcgttcaaggaggcttcatgtctgttttcacctcgaaagtggtgcgcaacctgttcggcaccgacgcgatgcgaaccatcttttccgacgacacgcgcgtggcgaactacctgaaaatcgaagtcgcgctggccaaggtcgaggccgggctcggcgtgattccgcaggacgcctggcgcgatatcgagcagaagtcgcatagcttcgaaatcgactgggaacgctttcgcatcgacgtggaagcggtcggctacccggtgatgcctttcgtcacccaactcgccgaacattgcggggagtccggtgaatacctgcactggggttccaccacgcgcgatatcaccgacacctcgttcgtgctgcaattgcgcgaagcgctcggcgtgctcgccgccgatctcgacaaggtgcgtcgcaagctgcgcgagatgacggcgcgacatcgttcgacgctgatgatcgcgcgcacgcatggcaagcatgcgctgccgtccaccttcgggtttcgttgcgcggtctggtatagcgaagtcgagcggcaatgcgaacgcctcgcggcattgcgcgccgagccgttcgtgggccagttcggcggcgcgatcggcacgctggccgcggtggggccgcgcggcctggaagtgcagtctgcgttaatggcggaactgggactcggcacggcagagatcgcgtggtttgcctcgcgcgaccgcgtctccgaggtggtgttcagaatcgcctcgattgcgcaatcgatggcgagcatcgccaaatcgctggtcatcatgacgcgcgacgaactcgccgaagcctccgaaggcggcggcgagcagcgtggcaccagctcggcgatgccgcacaagcacaacacggtcgtgccggaactggtgatcgtgcacggcaagatggcgacacagcaggtggcgatcgtgatggagtcgatggtgcaggacttcgagcgcgactggcaggggcatttcgagaccatcgccgtgcctcagactttccagcacgcgcatgccgccgtcacgcagatgcacaccgtgctgtccggcctgattctgcacgaagaccgcatgcgcgcgaacctcgatgtaacacgcggacaggtgatggccgagagcgtgatgatggcgctcgcgccgaagctcggccgcaagaacgcgcaccatgcgatttcgcggctgtgcaaccaggcgctggcggaagaccggccgctcggcgaagtgctgcgcgccgatccgcaggtcgcgcaatatctgggagagcacgaactcgccgatgcgctcgacccggccggctatatcggccttgccacgcaagtggtcgataacgtgctgaaagcacacgcggat

SEQ ID NO: 13464 - DNA, 612 bp, Burkholderia fungorum
ttggcggtcgttgcgccgttgacgccgggaaccgacgtgcccgagaccttggtgccggtgtcggcgactgtggtgccaacagccgtgatgaggttactggcctgggtgacgatgttgccgactggggtggaagaggtgcctgaggtacccgaagtacccgaagtacccgaagtacccgaagtacccgaagtacccgaagtacccgaagtacccgaagtacccgaagtacccgaagtacccgaagtacccgaagtacccgaagtacccgaagtacccgaagtacccgaagtacccgaggtgcccgaagtacccgaggtgcccgaagtacccgaagtacccgaagtacccgaagtacccgaagtacccgaagtacccgaagtccccgaagtccccgaagtccccgaagtccccgaagtccccgaagtacccgaagtacccgaagtacccgaagtacccgaagtgcccgaagtgcccgaagtgcccgaagtgcccgaagtacccgaagtgcccgaggtgcccgaggtacccgaagtacccgaagtacccgaccccgaagtcccccctagcccgcccccgccgatactcggagtgttaagagtcgacccgcaaccg

SEQ ID NO: 13465 - DNA, 1107 bp, Burkholderia fungorum
atgacgagattaccaatatcggcgccacagtcgcgccgaaccaacaaaaccccttgtttcaggcagctttgcgttagcgctgcgctggcggccacggttttctccggttcgtatgcattcgcgcaaggcagtcaaagcgttgcacccgcagcgggcacaagtaatccatctcgcgccggcatcacgcaagcgcagcagcaaacctgcacaccgctcgcggacaacccgatcgtctcgcaagcgagttcatcgctacccgcacggcccaggcgcatcgtcgtgctcgaattcatgttcgccgaagacctcgctgcggtcggcctcacgccggtcggcatggccgatcccgagtattacccggtgtggatcggctacgacaacgcgcgtctcgcgtcggtgcccgacgtcggcacgcggcaggaaccgagtctcgaagcgatcgcggcgacgaggcccgatctgattctcggcgtcggcttgcggcatgcgccgatttttgcggcgctcgaacgcattgcgccgaccgtgctattcaaatacggcccgaactttaccgaagacggcgcccacgtcacgcaactcgattggagccgcaagattctgcgcaccatcggctgcctgacgggacgcgaagaggcggcaaatgccgtcgaggccaaagtcgatgcaggtttcgcccgcaatgcccagcgcctggccgaagcgggccgccgcggcgaacaggtcgcgtggctgcaggaattgggtttgccggaccgctactgggcattcaccggcaacagcacggcggcgggtgtcgcgcatgcgctcgggctcaacctgtggccggcagaagcgactcgagaaggcacggcctacgtgagttctgaagatctgttgaagaagccgaagctgaccgtgctgttcgtcagcgcgacggacaaggacgttccgctcgccaccaaactcgattcgccgatctggcgtttcgtgcccgctcgcagttcggggcgagtcgggcttgtcgaacggaatatctggggtttcggcgggccgatgtccgcattgcggctcgccgacacgatgacggatacgttgctgtccctgccggcgcctgtagcaaagaag

SEQ ID NO: 13466 - DNA, 2181 bp, Burkholderia fungorum
atgcagaattcatttgtcgccggccgcccaacttttgcgcgcggccaacgtcggaccccgtcgctgctcagcgcggggctactggccagcgtcggtttgacgctttccacgctgtcctcttcgggatgggcgcaggtcgcggcaagcgacacggccgcgaccttgccggccgtgagcgtgtcggcaacgaaagacaccagcgtggcgcaagccgacacggtcagcgcgggcgcgctgggttcgcgcaagcaggtggacacgccgttctccacccacgtcgtgacgagcgacgaagcgcaggacctgttcgcgacgaccgccaatgatctgtacaagtacgacccggccgtgtcggtcaccagcgaaaacgcgatcagcgaaaattcgatgttcaccgtgcgcggcatgccgatcgacacactgaacagcatcaaggtggacggccagacctttccgtcgtgggataccgacctctcgctcgaaccgttcgagcaggtggagttgctcaagggtctgtccggcttcatgtacggcttcggctcgccgggcggcatcgtcaactacgtgctgaaacgccccaccgacacgccctaccgcagcgtcacggtcggctaccggtcggccggcgtgttcaccgaggcggtcgatctgggcggccgcttcggcaatgacgaccgtttcggctatcgcctgaacctcgtcaacgaagacggcaataccgccgaagaccacggccacattcgccgccaggtggcctcgctcgcgttcgacttccgcattacgccggacctgacgtggagcgccgacgcgttctaccagaagcgcagaaccaacggcacgctgttcggcctgatgttcggcggcgacgccggcggcattcccgacgcgagcaaagtcacccacgcgctcacgcaaccgcagaactactaccagaccgagatggcctcgttcggcacgggcctggattaccgcatctccgaaaactggcatgcaagcctgaaataccgcttcgccaaggagaaccgcaccaactcggacagtctcctgttcgtcaccgaccccgcgggcaactactcgaacacgctgtatgcggccatgacgcgctacttctatcagaacgtagacggcatggtgcaaggtcatttcaacaccggcagcatcaagcatgacgtggtggtaggcgcgggcttcgaaacgcagaccgccgagtacagcaacagcacgggctggaacgagggttacttcctcggctacggcaatctgtacaacagcacgttgctgaccaacgacgaagtcagcatcggctcggacctgtaccgccagcagcgcaccacgcaggccgccgtgtacgcgagcgacaccgtgcaactgacgtctcgtctgtcggcgctggtcggtgtgcgctatacgcaatatcgcgagcatgtgtacgacccgagcggtgcggtctcgtcgcaatacgacgccgatccggtcacgccgaccttcgcgctgatgttcaagaccgatccgtactccacgctgtacgcgagctatgtggagtcgctggaacagggcggcgcggcgtcgaacaccaacctcaactacccggacacgttcggcccgctgcgcagcaagcagtacgaggtcggcttcaagaccgatcacgccaagtggggcgccaacctcgcgctgttccgcgtcgatcagggttacaactacacgaacgtggacaacatcttcgtgcaggacggcaccaaacgctatcaaggcctcgacgcgagcggctggctcgcgctcacgagcgaatggcgcgtgatgggcggcgtgatgtggctcgacacgaaggccgtggacgtgaacgatccgaccgtggaaggcaagcgcatttacggcgcgccgcgtttcaccgtgacgggccggatcgaatacaacccgtcgtatctgcgtccgctgacgctggcgttcggcggcaagtacgtcggcaaccaggcggtggacgcgcagaacacgcagttcgtgccggcatacaccacgttcgatctgagcggccgctatgagacgaagatcgccggcaaggacgtgacgttccgcgcggggatcaacaacctcttcaatcgccgctactggaccacggcgtggggttactacgtggcgccgtcgccgacgcgcactgcggtagccagcgcgacgctgcaattc

SEQ ID NO: 13467 - DNA, 741 bp, Burkholderia fungorum
atggctacaccactggcatccgcggcaccgccacgacgcgctcgtaatcttgccgagttcgtcgtcagctacgtcaccgagcagattgcgtccaatgccttgaaacccggcgacaaactgccaaccgagtcccagctcatggtcacgctgagcgtgagccgcaccgtcattcgcgaagccatctcgcgcttgcaggcgggcaagatcatcgaaacgcggcacggtatcggcagtttcgtgctggaaccgccgcgcgaaaaactgggcatcgacatggtgccggccaccaccttgcgcgacgtgctgtcgatcctggaactgcgcatcagcctcgaaacggaatgcgcggggctggccgcccagcgcgccaagccggacgacctcgcgcgcatgcgcagcgcgctcgacgcgatcgaagccacgcgccacaacgggctggacagtgtcgacgccgatctgcagtttcatatctcggtggcgcgcgccaccggcaaccgctatttcgtggatattctcacgcaaatgggcagcgcgctgattccgcgcaaccggctcgactccgccggcattgcgcgcgcggaaccggacgcgtatctgtcgctcgtgaacctcgaacacgaaagcattctcgaagcgatcacccggcacgacgcggaaggcgcgcgcgcggccatgcgcatgcatctgtccaacagccgcgagcgcttgcggcgtgcgaacgaggccgccgaggcgaatagc

SEQ ID NO: 13468 - DNA, 1218 bp, Burkholderia fungorum
gtggcagaggaaagcgacctcgaaaaaaccgaatcagccacgccccggcgcctgcagaaggcgcgcgaggaagggcagatcgtgcgttcgcgggagctgtccacgtttgcgctgctggcggcggggttctttggcgtgtgggggatgtcgggcagcatcggcgaacacttgcagggcatgctgcgcgcggccttcacgttcgatcatgccggtgctttcgaaacccgccgcatgctgatcggcgcgggcgtggcgagccgcgaagggctttacgcgctgctgccgattctcgccttcaccggcgcggccgcgctgttcgcgccgatggcgctgggcggctggcagttgtcgtcaaaaggcctcgaaccgaagttcgaccgcctcaatccgatcgccggcctcggcaagatgttttcgatcaacggaccgatccagctcggcttgtcgctcgtcaagacgctggtggtgggcgtgatcggcggtacggcgatctggaatcgccgtgaagaaatcctcgcgctggcgacccagccgctgcaactcgcgctcgccaacaccgtgcatctgatcgccgtgtgctgcggcatgacggtggcgggcatgttcgtcgtcgccgcgctggatgtgccgtatcaactgtggcagttccacaagaaactgcgcatgtcgaaggaagaagtgaagcgcgaacaccgcgaaagcgaaggcgatccgcatgtcaaaggccggattcgtcagcagcagcgtgcgattgcccgccgccgcatgatgaccaacgtgcccaaggccgacgtggtggtgaccaacccgacgcactttgcggtggcgctgcaatacaccgacggcgagatgcgcgcgccgaaggtcgtcgccaagggcgtaaacctggtggccgcgcggattcgcgagatcgccgccgaaaacaacgtgccgttgctggaagcgccgccgctcgcgcgggcgctgtatcacaacgtcgaactgaaccgcgagattccgggcccgctctatggcgcggtcgccgaagtgctcgcctgggtgtaccagttgcggcgcttcaagaccgaaggcggcgccgtgccgatggcgccgaccgagctcgacgtgcccgccgaactcgacaagggcggcatatcggacgacgaagccgatcaggaagccgccgacacgctcaatcccgccatgaaccccgataacgacgcttcaggagcctccgca

SEQ ID NO: 13469 - DNA, 1650 bp, Burkholderia fungorum
atgaaagcatcggacctgttcgtcaaatcgctggaagccgaaggtgtcgagtatgtgttcggcattcccggtgaagaaaacctagatctgctcgaatcgctgcgccgctcgaaaatccgtctgatcctcacgcgccacgaacaggcggccggtttcatggccgccacgtacgggcgtcttaccggccgcatcggcgtatgtctggccacgctcggcccgggcgcgaccaacctcgtgaccgccgcggcgtacgcgcaactgggcggcatgccgatgctgatggtcaccgggcaaaagccgatcaagtcgagcaagcaagggcatttccagatcgtcgacgtggtgcgcatgatggagccgctcaccaaatacacgcggcagatcgtgtcggtcgccaatattcctgcggcggtgcgcgaggcggcccggcaggcggaagaagaacggcccggcgccacgcacctcgaattgcctgaagacgtggcgcacgaagagggcgatggcaagccgattccgaagagctacagccgccgccccgtcgccgaggaaaaagccgtggcgcgcgcggtcgaggcgatcaccggcgcgaagcatccgttactgatgatcggcgcgggcggcaatcgcaagaccaccacgaagatgctgcgcgagttcgtcgaccagatcggcattccgtttttcaccacgcagatgggcaaaggcgtgatcgacgaatcgcatcccatgtggctgggcaatgcgacgctgtccgacggcgacttcgtgcaccgcgcgatcgaccacgcggactgcatcatcaatgtcggtcacgacgtgatcgagaagccgccgtttttcatgcgcagcggcgacgcgggcgagaagacggtgattcacgtcaacttcctcggcgcggaagtcgatacggtctacttcccgcagatcgaagtggtgggcgatatcgccaacgccgtgtggcagctcaaggaaagtctcaagcagcggcaggagcattgggacttcacgcgcttcaaggaaatcaaggagcacttcgaggcgcatctggtcaaaggccagcacgacgaccgctttcccatgtacccggtgcggatcgtcaacgacgtgtacgagaccacgccggtggacggtatcgtgtgtctggacaacggcatgtacaagatctggttcgcccgctactaccgcgcgcacgaaccgaattcgctgctgctcgacaacgcgttggcgtcgatgggcgcgggtctgccgtccgcgatcgccaccaagatcgtgcacccggaccgcaaggtcatggccgtatgcggcgacggcggtttcatgatgaattcgcaggaactcgaaacggcggtgcggctgaggctggatctggtgatcctgattttgcgcgacgacgcgttcggcatgatccgctggaagcaggaaaacatgaatttccccgactacggcatgacgctcagcaatccggatttcgtcgcttacgcgcagagctacggggcgaaaggtcaccgtatcgaaacggcggcggagttcgcgccgttgctgcgtgaatgtttcgcgacgcccggcgtgcatgtgatcgacctgccaatcgactattcggacaacgaacgcgtgctgaatcgcgagatcaagcggctttcggcgcaattg

SEQ ID NO: 13470 - DNA, 3579 bp, Burkholderia fungorum
atgtcgcccatgtcagatcctcgcttcgttcatcttcgcgttcactccgaattctcgattgccgatggcatcgtgcgtcttgacgacgtcgtcaaggccgctgccaaagacggccagggcgcgctcgccctcaccgatctcggcaacgccttcggcctcgtccgtttctacaaggaagctcgcggcaaaggggtcaagcccattgccggctgcgacgtctggatcaccaatccggacgaccgcgaaaagccctcccgtttgctgctgctcgtcaaagaccggcgcggctacctgaatctgtgcgaactgctcagcaaggcgtcgctcacgaatcagtatcgcggccgcgcggaaatcgaggccggctggctcgaatccggtctgggcgaagggctgcttgcattgtccggcgcgcagcagggcgatattggcctcgcgctcgcggcgggtaacgaagaagcggcaaaacgcaatgcactgcattgggcgaaggtgtttccgggcggtttttatatcgaggtgcaacgctgcgggcagccgggcggcgagcactacgtgcagcaggcggtcgcgcttgcggcgtcgctgaaattgccggtggttgccacgcatcccatgcagttcatgacgccggacgacttcaccgcgcacgaagcgcgcgtgtgtatttccgaaggcgacattctggccaatccgcgccgctcgaagcgctttacgcccgagcagtacttccgcacgcaggaagaaatggccgcgctgttcgcggacattccgtcggcgctcacgaactcggtggaaatcgccaagcgctgcaaccttacgttggaactcggcaagcccaagctgccgctcttcccaacgcccgacggcatgtcgctcgacgactacctcgtgcatctgtcgaaagagggtctggaaaagcgcctcgagcagttgtatccggacgaggccgagcgtgccgcacagcgcgcgacgtattacgaacgcctcgaattcgagtgcggcacgatcatcaagatgggctttcccggctacttcctgatcgtggcggacttcatcaactgggcgaagaacaacggcgtgccggtcggtccgggccgcggctcgggcgcgggttcactggtcgcgtacgcgctcggcgtgaccgacctcgatccgctgcgctacaacctgctgttcgaacgtttcctgaatccggagcgggtgtccatgcccgacttcgacatcgacttctgccagcacggccgtgatcgcgtgatccagtacgtgaaggaaaagtacggtgcggacgccgtgtcgcagatcgccacgttcggcacgatggcggcgaaggcggcggtgcgcgacatcggccgggtgctcgatctcggctacatgttcacggacggcatcgccaagctgattccgttcaagccgggcaagcacgtcacgatcgcagacgcgatgaaggaagagccgctcctgcaggagcgtttcgacaacgaagacgaagtgcatcagctgctcgaactcgcgcagcgcgtggaagggctgacgcggaacgtcggcatgcacgcgggcggtgtgctgatcgcacccggcaagctgaccgatttctgcccgctgtacacgcagggcgacgaaagcggcgtcgtgagccagtacgacaaggacgacgtcgaagccgtcggcctcgtgaagttcgactttttgggtctcaccacgctgacgattctcgactgggccgagcgctatatccggcgcctcgatccgtcgaaacaggactggtcgctcgcgcaggtgccgctggacgacccggcgtcgttctcgatcctgaagaaagcgaatacggtcgccgtgttccagctggaaagccgcggcatgcagggcatgctgaaagacgcgcagcctgaccgcttcgaggacatcatcgcgctggtcgcgttgtaccgtccgggcccaatggacctgatcccgagcttctgcgcgcgtaagcacggccgcgaagtggtcgagtatccggatccgcgcgtcgaacctgttctgaaagagacctacggcatcatggtctaccaggaacaggtgatgcagatggcgcagatcatcggcggctattcgctcggcggcgccgacttgctgcgccgcgcgatgggtaagaagaaggccgaggaaatggcccagcatcgcgagctgttccgccagggcgccgcgaaaaacgggctgaccggcgagaaggccgacgaaatcttcgacttgatggagaagttcgcgggctacggcttcaacaagtcgcacgcggccgcgtatgcgctgctcgcgtactacaccgcatggctgaaggcgcaccatcccgcggaattcatggcggcgaatatgtcgctcgctatggacgacacggacaaggtcaagatcctgttcgaagactgcctcgtgaacaagatggcggtgctgccgccggacgtcaatctgtccgcgtaccgcttcgagccggtggccgagcctgacggcaagcgttcgcgaacgatccgttacggcctcggtgcaatcaagggcagcggccagaacgcgatcgaagaaatcctgcgcgcgcgcgaggaaggcccgttcatcgacatcttcgatttctgcaaccgggtcgaccgccgcatcgtcaatcgccgtacggtcgaagccttgatccgcgccggcgctttcgacagcttgcatgcgaatcgcgcgcaactgatcgcttcggtctcgctcgcaatggaagccgccgagcaggcgagcgccaacgcgctgcaagcgggcctgttcgacatgggcgacgcgccgtcgcaaggtcacgaactggtcgatgagccggagtggccggaaaagaaaaagctgcaggaagagaaggccgcactcggcttctacctgtcgggccatctgttcgacgcctataaggacgaagtgcgccgcttcgtgcgccagaagatcggcgagctgaaggaagggcgcgacaagctggtcgcaggcgtgatcgcctcgctgcgcacgcagatgacccagcgcggcaagatgctgatcgcgctgctcgacgacggcaccggccagtgcgaagtcacggttttcaacgagacgttcgaagcgcacaagcaactgttcaaggaagacgaactgctggtcgtgcaaggtcaggcgcgtaacgacgcgttcacgggcggcatccgtttcacggtcgacacggtcatggatctcggccgcgcgcgctgccgttatgcggaggccgtgaaggtgcagatgaacggcaatgcggacgcgctggccttgcgtcgtgtgctcgaagcgcatagcgcgggcaaggacgaaccgcaggcggcagcggcgccggcggcttcatcgcgtggcggaaacggcgggggcaacggtggtggccgtaacggaggcggctatggcggcggtggccagcgtcagacggtgcagatcccgaacgggcttgccgtgcaggtggtttatcgtagccagaatgccgaaggtgaaatgcgtctgggcgacgcatggcgcgtgaagccgaccgacgaactactcgcggcgctgcgcggcgagtttgccggaagctcgatcgagatcgtttat

SEQ ID NO: 13471 - DNA, 1902 bp, Burkholderia fungorum
atggcacaagaaaccatgagctttcaggcagaagtgaaacagcttctgcacctgatgatccattcgctgtacagcaacaaggagattttcctgcgcgagctgatttcgaacgcgtccgacgcggccgacaagctgcgcttcgaagcgatcgaaaacagcgcgttgtacgagaacgatccgaacctgcggattcgcgtgtcgtacgacaaggacgcgcgcaccatcacgatcgacgacaacggcatcggcatgagccgcgacgaagcgatcgccaacctcggcacgatcgcgcgctcgggcaccaaggaattcttcggcaagctctccggcgaccagcagaaagacgcggcgctgatcggccagttcggtgtgggcttctattcgggctttatcgtcgcggacaggatcaccgtggaaacccgccgcgccggtttgccggcttcggaaggcgtgcgctgggaaagcgcgggcgagggcgatttcgcggtcgagcagatcgagcgcgccgcgcgcggcacgaccatcacgctgcatctgcgtgcggatgaagacgaactgctgtcgtcgcatcgtctgaaatcgatcattcagaagtactccgaccacgtcgcgctgccgatcctgatgaagaaggaagagtgggacgcggaaaagagcgcgatggtcacgaaagacgaagacgagaccgtcaaccaggccagcgcgttgtggacgcgttcgaagagcgacatcaccgacgagcagtacaagcagttctatcagcacctctcgcacgatcatcaggacccgctcacgtggacgcataaccgtgtcgaaggccgcagcgagtacacgcaactgctgtacgtgccgacccacgcgccgttcgacatgttcaaccgcgatcatcgcggcggcctgaagctgtacgtgaagcgtgtgttcatcatggacgacgccgagcaactgctgcccgcgtatctgcgtttcgtgaagggcgtggtcgattcggcggatctgccgctgaacgtgtcgcgcgaaattctccaggaaagccgcgacgtgaaggcgatccgcgaaggcgtgaccaagcgcgtgctgtccatgctcgaagatctggccaattcggataacgaggcggacaaggaaaagtacgccggtttctggaaggaattcggccaggtgctgaaagaaggcattggcgaagacttcgccaatcgcgagcggatcgccaaactcctgcgctttgcgtcgacgcatacggacacgcctgagcagaccgtgtcgctcgccgactacgtcgcgcgcatgaagcccgagcagaccaagatctactacgtcaccgccgacacctggcaggccgcgacccacagcccgcacctcgaagtgttccgcaagaagggcgtggaagtgctgttgctgaccgaccgcgtggatgaatggatcctgtcgttcctgaccgagttcgaaggcaagccgctgcaaagcgtggcacgcggcgatctcgatctgggcgcgctgaacgacgaagaaaaagaggcgcaggaaaaggttagcgaagagttcaaaccgctcgtcgagaagatgaaggaagcgctgaaggacaaggccaaggacgtgcgcctcacgttccgcctgaccgattcgccgtcctgtctcgttgccgacgacggcgaaatgagcggctatctgcaacgcatgctgaaggccgcgggccagcaggcgccttcgttccatccgattctcgaggtgaatccggagcacgcgctggtgaagggcctgcatgcggacagcgcgaacttcgacgactggtgccatttgctgttcgaccaggctttgctcgccgaaggtggcgcgctggaagatccggcgagcttcgtgaagcgcaccaatgcgctgctgctggcgcgcgcgaacgaggcg

SEQ ID NO: 13472 - DNA, 1107 bp, Burkholderia fungorum
atgcgtcaacatctctccggcaataaacgctacccgctcgccctgatgctggagccgctgttccgctgcaatctcgcctgcaatggctgcggcaagatcgactatccggatcccatcctgaatcagcgtctgtcgctggaagaatgcctcggcgccgtcgacgaatgcggcgcaccggtggtctcgatcgcgggcggcgaaccgctgctgcacaaggaaatgccgcaaatcgtgaagggcatcatcgcgcgcaagaagttcgtgtatctgtgcacgaacgcgctgctgatggaaaagaagatggacgactacgagccgaatccgtacttcgtgtggtcggttcacctcgacggcgatcagcaggcgcacgatcactcggtgtcgcaggaaggcgtgtacgacaaggcggtcgccgccatcaaggaagcgaagcgccgcggtttccgcgtgaacatcaactgcacgttgttcaacgacgccgtgccggaacgcgtcgccgcgttcttcgacacgctgggcccgatgggtgtggacggcatcaccgtttcgccgggttatgcgtatgagcgcgcgccggatcagcagcacttcctgaaccgcgacaagaccaagcaactgttccgcgaaatcttcaagcgcggcaacaatggcaagaactggtcgttcagccagtcgggcatgttcctcgacttcctggccggcaatcagacgtacgagtgcacgccgtggggcaaccccgcgcgtaccgtgttcggctggcaaaagccgtgctatctggtcggcgaaggttacgtgaagaccttcaaggaactgatggaaaccacgcagtgggaaaaatacggcacgggtaactacgagaagtgtgccgactgcatggttcactgcggtttcgaagcgaccgcagtgatggacacggtggcgcatccgctgaaagcgttgaaggtcagcctgcgcggaccgaaaacgtcgggcgcgttcaccaaagatattcctctggataagcagcgtccggctgagtacgtcttctcccgccacgtcgagatcaagctggaagagatcaaggtttccggcaagggcaagaaagtacagacggctactgcggcacac

SEQ ID NO: 13473 - DNA, 1290 bp, Burkholderia fungorum
atgacccagcctgtgcgaatcgtaatcgtcggcggcggcatcgccggcctgttgcttgcaacccggctcggcaaccgcctggggaggcggggcgaggctcacgtcacgctcgtggaccgcagccccacgcatatctggaaaccgatgctgcatacgattgcagccggcaccacggatgtccaccagcagcaggtcttctatctgacgcacgccagggcacacggcttcacctaccgtccaggcgagatgtgcgggatcgaccgcgacacgcagcagatacagctggctgcactcgcgatgcccaacggtgaagtggtcatggggccgggcacgctgggctacgacatcctggtcctcagcaccggcagccgggccaatgacttcggcacgccgggcgtgcccgaacactgccacttcatcgacagccagccgcaagccgaggcgttcaatgaggcaatccgttcacgcatcgtacgcagcgtggtcgagaacgagccgctgcgagtcgccatcgtaggcgcaggcgccaccggcgtcgaactggcggctgaactcagtcacctgctggacgtggcatcgagctatggggacgccagcattcgcgcacgcctgcatcttggactctatgaaagcgcacccagagtccttaccgcattcccgccggacatctccgcgtcgagcgaagccctgctgcgcaggctgggcttcgaggtgcatacgcgcacgcgagtcacggaggcccgcgcacaaaggttacgcctgaatgacggtagcgaggtggcagccgatctgatggtctgggcagcaggggtgaaagcgcccgattttctgggcaaactgccaggcatcgaagccagtcatgcgaaccagcttttcgtgcggccaacgctgcagaccacccatgacgaccatattttcgcgctcggcgattgtgcgagcctgactccaccgggcaatgaaagacctctgccgcccaccgcacaggtcgccacgcagcaggcagagcatctggcaaagcatctgccacgctggctgaatggagaaccgcttccagaattcacttttcgcgatttcggcgcgctggtgtcgctgagcgactacaacgcattcggcaccctggggaaattcggattcttcaagggcggattcatccggggacgttttgcccagatcagccatgcgatgctgtaccggcgtcatcaacaggcccttcacggattcggcaaggccagtcttctttggacggcggaacgcatcaacgcgctggtccagccgaaaatccgtctgaag

SEQ ID NO: 13474 - DNA, 1539 bp, Burkholderia fungorum
atgaaagtgctcaccgttcaccccagcggcctgatgtacacccgcgtattccttcgtctcgagccgctcggtctcgagaccgtggcggcggtcctgcgggaggcaggccacgaggtccgcctgatcgatctgcaggtcgagactcatcgcgacctgcaccggctgatacgcaactggcaaccagacgccgtctgtttctccggcaactatctcgccaatatcccggagatcgtcgacctcgcgaaatcggtcaaggaaaaacagccgcgttgcttcgtgttcgttggcggtcatagcgtatcttttacggcagccgatatcctgcggcatgccgaaggcgcggtggactgcgtactcaagggagaaggcgaagcgtcggtcgtcgcattgctggaggccgccagccacggcgctgacctgctgcaaatccccggtgccgtcacgcagcacggcgaagggccgccgccgcactttgtcgagtccctcgatccggtccgtccggcgcgcgacctgctgcggcaccgacgcaaatatttcatcggcacattggacccgtgcgcttccatcgaatttgcgcgcggctgcccctgggactgcaccttctgcagcgcctggacattttacggacgcagctaccgtgcgcgcagtccggaagtggtggccggggaactcgcgtcgatccgcgaaccgggcgtgttcatcgtcgacgacgtggctttcgtgcacgccgatcacggtatggaaatcggcaaggccgtacaacgccggggcatccgcaaaaaatactatctggagacgcgcggcgacgtgctcttgcgcaacagggaggtattcgagttctggcgcggtctcgggctgcagtacatgttcatcggcatggaagcgatcgatgccgaaggtctgaaggccttccgcaagcgcatcaatctggaccggaacttcgaggcgctggccttcgcacggtcgcttggcatcacggtagccatcaacctgatagccgatcccgactgggatcatgaccgcttcgaagcagtacggcagtggtgtctggagataccggaaatcgtcaatatcagcgtgaatacgccctaccccggcaccgagatctggttgcgcgaacaacggcggctcaccagtctcgattaccggctctacgacatccagcatgcggtcttgccgacccggctgccgctgccggaattctatgcggagctggtgcgcacgcagcaggtgctcaatcgcaaacatctgggctggaccgcgctgcggggtgcggcgggacacgcgtgtcacctgctgctgcgcggccagaccaacttcgtgcggatgctgtggcgtttcaactcggtcttcaatccgcaactgcaactcaacgatcatgcgcgcgaagtgcattacacgatgtcgccgccgcccggtatcaccgagcagcgaatcgatgtgaaagccctctatgtccacggcccgatcgggcgcaaggggcggcgcatcgacgacgccacggagaactttgtggagcagacccgcatgggcgccgga

SEQ ID NO: 13475 - DNA, 1518 bp, Burkholderia fungorum
atgaatcacgcggatatgcagtttctcgatgtcgaatttccgtatgcgcggcaatacggcaatttcataggtggcgagtgggttcctccagtacgcggcgagtacttcgacaatgtgtcgccgatcaccggcgaaccctttacgtcgattccccgttcaactgaagaagatatcgaactcgctctggatgcggctcaccgcgcccgcaaagcctgggccgatactgcacctgctctgcgcgcgaacgtgttgaaccgtattgcggaccgcatggagcagaacctctcgcgtatcgcgttttccgaatcgatcgacaacggcaagccgatccgcgaaacgctcgccgccgacattccactcgcgatcgaccacttccgctacttcgccagttgcattcgcgcacaggaaggaacgctctccgagatcgatcacgacacagttgcctatcactttcacgaaccgctcggcgtagtcggccagatcattccgtggaatttcccgatcctgatggccgtgtggaagctcgcgcctgcactcgccgccggcaactgcgtggtgctcaagcctgccgagcaaacacccgcgtcgattctcgtgctgatcgaactgattcaggatttgctgccgccgggtgtgctgaatgtggtcaatggtttcggtctcgaagccggcaaaccgctggcgtcgagcaagcgtatcgccaagatcgcgtttaccggcgagacttcgaccggccgcctgatcatgcagtacgcgagccagaacatcattcccgtgacgctcgaactcggcggcaagagcccgaacattttcttcgccgatgtggtcgatcaggacgatggctacttcgacaaggcactcgaaggcttcgcgatgtttgcgctgaatcagggcgaggtgtgtacctgtccgtcgcgtgtattgatcgatgaaaagatttacgaccgcttcatggaacgcgcgttaaagcgcgtcgcggcgattgcgcaaggacatccgctcgaccccaggacgatgatcggcgcgcaggcttcgcaggaacaactcgaaaagatcctctcttatgtggatctcggcaaacaggaaggcgccgaatgcctgattggcggcgaacgcaatacgctgggcggtgagttgagcaaaggctattacgtgaagccgaccgtatttcgcggcaacaacaagatgcgcatcttccaggaagagatcttcggaccggtggtgtcagtcacgacgttcaggaccgaagaagaggcactcgaaatcgccaacgattcgctctacggcctgggcgccggcgtgtggacgcgcgacggtacacgcgcgtatcgcttcggcaggcagattcaggcaggccgcgtgtggaccaattgctatcacgcctatccggcgcatgcggcgttcggcggctacaaacagtcgggcattggccgcgaaacgcacaagatgatgctcgaccattatcagcagaccaagaatctgctcgtgagctatagcgagcagccgctgggctttttc

SEQ ID NO: 13476 - DNA, 465 bp, Burkholderia fungorum
atgagcaccgaaaaaatcaatctcgacattcacaagattctcacgctgctgccgcatcgttatccgattctgctcgtcgatcgggtgctcgaactcgagccgcacaagcgcatcaaggcgctgaagaacgtgtcgatcaacgagccgtacttcatgggtcactttccgagccgtcccgtgatgccgggcgtgctgattctcgaagcgctcgcgcaggccgcggcgctgctgacgttctcggaagaaccgcacgatcccggcaacacgctgtacctgttcgtcggcatcgacaatgcgcgcttcaaacgcgtagtcgagccgggcgaccagctgatcctgaacgcaacgttcgagcggcatatgcgcggcatctggaagttcagggcgtgcgcggaagtggataatgtggttgcggcgtcagcggatctgatctgcaccgtgcgcaacactgatgcggacgcacgg

SEQ ID NO: 13477 - DNA, 261 bp, Burkholderia fungorum
gtgcgcgcgttgcgctgcgagcagtactgcatcgccgacggacgcgccgacgccgcgttcctgcatgcgaacctgaagatcggcgcaggccgctcggaagccgcaaaaaaggccaccggcgacgcgttgttcgcgctgatcaaacagcacttcgcggctgaattcgaacagcacggcctggcgttgtcgctggagatcaatgaattcagcgaagccggtacgtggaaacacaacaacctgcacgcgcgcctgaaggccgaa

SEQ ID NO: 13478 - DNA, 468 bp, Burkholderia fungorum
atgaaactgcatatcctcgccgtcggccacaagatgccggactggatcgccaccggcttcgacgaatacgcgaagcgcatgccgcccgagctgcgcatcgagctgcgcgaaatcaaacccgagcagcgctcgtcgggacggccggccgaaagcgtgatggccgccgagcgtatcaggatcgaagccgcgttgccgaagaacgcgcgcattgtcgcgctcgacgaacgcggcaaggactggaccaccatgcagcttgccggcgccctgcccagctggcagcaggacggccgcgacgtggcgtttctgatcggcggtgccgacgggctcgaccccgatctgaaagcgcgcgccgatatgttgctgcgggtatcgagcctcactttgccgcatgcgatggtccgcgtgctgctcgccgaacagctttaccgcgcgtggaccatcacgcaaaatcacccctatcatcgcgtg

SEQ ID NO: 13479 - DNA, 468 bp, Burkholderia fungorum
atggatctacgtaaactgaaaactctgatcgacctcgtctcggagtccggtatttccgaactcgaagtgaccgagggcgaaggcaaggttcgcatcgtcaagaatgcgccgccggtttacgtgcaaccgtccgcctcgtatgcaccgcaatacgcgcagccgctgccggccgccggcggcgaagcgccggccgctgccgcagccgcaccggctacgccggccgccgccgcgccgcaaggccatgtggtgacttcgccgatggtcggcaccttctaccgcgcgccgtcgccgggcgccgagccgttcgtccaggtgggcgacacggtcaaggaaggccagacgatctgcatcatcgaagccatgaagctgctcaacgaaatcgagtcggacaagtccggcgtggtgaaggaaatcctcgtcgaaaacggccaggcggtcgagtacggccaaccgctgttcgtggtcggc

SEQ ID NO: 13480 - DNA, 3246 bp, Burkholderia fungorum
atgcaccaaacgcaaccacagacccctccgcccgccgctgccgccacccaagctggggcatcgcgcccgccggcaggcggcacgcagcgcatcgtcaagatccgccgcgactacaacgcgtgggtcggcgacgagacgctcgaggactacgcgctgcgcttcacgccgcgcgcgttccggcgctggtcggaattccgcgtcgccaatacggcgatcggcgcggtgtcgtttctggtgctcgaagcgattggcggcgcgctggtcgtgaactacggctttaccaacgcgatctgcgccatcctcgccgtctccctgctgatctttttgacaggtatcccgatcagctactacgccgcgcgcaacggcgtcgacatggacctgctcacgcgcggtgcgggtttcggctacctgggctcgacgctcacttcgctgatctatgcggtcttcaccttcgttttcttcgcgctggaagcggccatcatgtcgctcgcgctggagctgtatctgaaggtgccgctttccgtggcctacgtgatcagcgcgctcgtgatcattccggtcgtgaccttcggcattaccttcatcaatcgccttcagggctggacccagccgttgtggctcgtgctgctggtcgtgccgtacgtcgtggtgttgtggcgtgaaccgcacgtgctcgcggaatgggtgacgtttagcggcgtttcaggcaacggccacgaattcaacctggtcgctttcggcgcgggctgcaccgtggtgttttcgctgatcgtgcagattggcgagcaggtcgactatctgcgctttctgccgccgcgcacgcgcgccaaccgctttcgctggtgggccgcgctgatcgcggccggccctggctggatcgtgccgggcgcgatgaaaatgctgggcggcgcgtttctcgccttcctcgccatccagcacgagatcgatccggtcaaggccgtcgagcccacgcagatgtatctggtcgcgtatcactacgtgttccattcgcctgaaggtgcgcttgccgcgatgacgctgttcgtcatcgtgtcgcaactgaagatcaacgtgaccaacgcctatgccggctcgctcgcgtggtcgaatttctttgcgcggctcacgcatagccatccgggacgcgtggtgtggctcgtgttcaacgtgctgattgcgctgctgctcgtcgagatgggtgtattcgaagccatcagcaaggtgcttgcgctgtatgcaaacgtggcgattgcctggatcggcgcggtggtgggcgacctcgtcatcaacaagccgctcgggtatagcccgcgccacgtcgagttcaagcgcgcgcatctgtacgacgtcaatccggtcggcgtgggcgccatgctgatcgcttcgctgattgccgcactctcgcatgcgggtgtgttcggcaccacggccgaggcgctgtcgtcattcattgcgttgctggtggcgttcgtctgcgcaccgctgctggccatcgccacacgcggacgcttctatctggcgcgcgacggccgcgacctcgaagaaggcgcgatactgcgctgcgtgatctgcgaaaacaccttcgaacgcgaggacatggcgcactgcccggcttacgccggttcgatctgctcgctgtgctgctcgctcgattcgcgctgcaacgactcgtgcaagccgcatgcgcgactacccgcgcaattcggcaagtcgatgcgcacactcttccccagactcacgcttgggcccgcaggtttgcggctcgcgcagtacgccggcctgctgatcgccgtggtgacgctgctcggcggcgtgctggcggtgcagtggtatcagagcgtgcgcacgctgcccaatctcgacacgaccgttcacgacgtgctgctacagggctatctgaaggcgtttttcgcgctggcgctggtcggctgtattgccgcctggtggctcgtgctcgccaacgaaaaccgcaaggtcacccaggaagaatcgcagcggcaagccgaattgctgatgcaggaaatcgaggcgcaccgcaagaccgacgccgcgcttcagcgcgcgagcgccgcggccgagtccgccaatcgtgccaagagccgctacgtgacgggcctgagtcacgaactgcgcacgccgctcaacagtattctcggttacgcacaactgctgctgcaaggcaccgacgaactgccgccggcgcggcgcaatgccgtggcgaccatctatcgcagcggcgagcatctgctggcgctggtggatggcctgctcgacgtcgcgcggatcgaggccggcaagctgcagttgaacgtgacggagatttcgctgccggacttcgtcgcgcaactcgctgccatgctcgaaccgcaggccaccgacaaaggattgcagttcgaattccagacgagcggccgcatggcggacgtggtgcgcatcgacgaaaaacgcgtgcggcagattctcatcaacctgatcggcaacgcgatccgcttcacctcgcacggttcggtgaaggtgcgtgccagctatgcgtgggaagccattacgtttgaaatcaccgataccgggcccggcatgccggccagcgaactggagcggctattcctgccattcgagcgcggcgcggcggcgcgcgaacacgatcatggcgcggggctgggactgaccatctgccgcctgctcacggaactgatgggcggcaacctggaagtgcaaagcgaggtgggcaaaggcacgcgctttatcgtgaagctgttcgcgcctgaagtgcgggcgccgcagttgctggcgagcggcccgctcaacgtgaagggttacgacgggccgcgccgcaccgtgctcgtggtggacgatctcgcggagcagcgccgcattgtcgtgcagacgctggcgccgctgggcttcaacgtggtggaagccgcgagcggaccggaggcgctgcaatggctcggcaccgcgtcggcggatctgatcgtgatggacgtgtcgatgccggacatggacggcttcgaggcgagccggctgattcgcgacaatcatctgtcggcggcgccggttctgatcctgtccgccaacgcattcgcggacgatcgcgacaaaggcgccgcagccggttgcgacgactacctcgccaagccgctctacattccgctcctgctcgacaaactggccgcactgctgcaactgcactggatcgtcgagccgaccgaagcggcggccgcctccgccgttgcgcgtgtcgacgtg

SEQ ID NO: 13481 - DNA, 762 bp, Burkholderia fungorum
atgtcgacatcaaaccagtcgaatgcagctgcagtgcgagcctttcgcgttctcgaaacactcgccgaagcgggcggcccgctctcgatgacggaactcgtcaatgcgctcggcctgcccaagcagaccgtccaccggatcctcgtgcaactgatggatgcgtggctcgtcacgcgcggcgccggcgaccgtctctatgaatgctcgccgcgcgtgcgcatgctcgccgtcaacgtgttgatgcatgcgggaccggcggccgctcgccacgtgctgctcgaacaactggtggcgaaaatcggcgagacgtgcaatctgaccatgctctccggcaacgacgtggtgtatgtagaccgcgtcgaaaccggctggccgctgcgcatgcacctgcagcctggctcacacgtgccgctgcactgctcggcgagcggcaagctgctgctgagctttctgccgaaagacagacgcgaacgcgtgattgaaacgctgccgctgcgcggttattccgagcgaacgattaccgaccgcgacctgttgcgcaaagaactgagcacgacacggcgccggctgctcgcgatcaacaatcaggaacatctgcaagggttgatcgcgattgccgtgcccgtcatgctcgatcgcaatcgcgcctgcgcggcgattgcggtgcaggcgccggtgggccgggtcacgctcgacgatctgctcgccttcgtgcccgatctgcgtcatgccgcggaagagacggcgaaaacgtttcgggaa

SEQ ID NO: 13482 - DNA, 891 bp, Burkholderia fungorum
atgagcgttgaggcttttcccatgagcgaagcattcgatccggcggattcctccgccggcgtcctccccggcggcgcgaaggccggacggcccgaagcgcggttgtacaatggcgccgatccattttccggaacggcaggcatgaccaaagcggatactccgacgctgcgcgcgtttgcgttgctagaacacctcgtcaactcggacggcccggtgtcgctcgccgatatcgcacaagacgtggcgctacccaaggcatcgctgcatcgcatgctcgcttcgctggaagccggcgggctcgtgatccgcgaacccggtcagaagaacgcgtatgtgatcggcccgcgcctcgcgcaactcgcgttgggggtgatgatgcattccggcgcgcggcgcctgcgtcacgcgattctcgcgcgtctggtgaccgatctcggcgagacctgcaatctcaccatgctgcacgagaacgaggtgctgtatctcgaccggatggaagcgccgtggccgttgcgcctcgatctcaaacccggctcgcatgtgcccgcgcattgcagcgcgagcggcaaactgttgctggccatgctgccgcgcgaacagcgctcggcactcgtgcgcgcgctgaaactcgaacgctttacgcagaacaccatcacggatcccgaattgctcgaagcggaactcgaccggaccgcgcacaaacgcattgcgatcgataacgaggagtttctggcgggcatcgtgtgtgtggcggcgccggtcgtagacgggaacggcacctgtatcgcggcggtcgccgtgcatgcgccggtctcgcgcgcgccgctgtcgcgtgcgctcgaattcgtgccgcgtcttcaggaagccgcgcgggaactcgcagccaccttc

SEQ ID NO: 13483 - DNA, 1110 bp, Burkholderia fungorum
atgagtgagccgcagcacccgcagccgcaggacacagacacgaacgaaggccatccggcgccggttgcacgggcggtggtgcagcccgtcgtgcagccgggcatggattcgttggcggcggttggcgcgcgcttgacccaattgcgtgaatcgaaaggctggacgatcgaggatgtatcggcgcgtctgaaagtgtccgccatcaagttgcgtgcgctcgaatcgggcgacatcagccatttgccggacaccactttcgcgctgggtgtggtgcgcagttacgcgaagatgctcggcgccgaccctacgccgttcacggcggcattgcgccgtgaaaagggtgtggccgcgccggatctgtcgatgccggcctcgtcgggtaaggatttgccgcgcggccgggtgtcgctttcgctgggcggcagcgggcaaaagagccgctcgtggttgtggggcgtggcggcggtgatcgtcgcggtgatcgcgctgggcatgtggcataccaatggcggcgattcgtcggcgtggcttgcacggttgaaagcgagtgcgaatggtgccgctggtggcgcgaccggcgcttcgggcgcggtggcgcaaggtcaagccgcgggttccgaagtaacggcgggcgaggctgcgtccacgccggacgcgcaggtggcagcagagaatccagcgtcggccacgccgatgcccgcgccgcttgccaccggcacgacgccgtcgtcggcgccggcggttacggcgacagcggccgcgcccaaggccggctcgcaggcccaggctgccgcagcgccgggcgcaagtgcgccggcggcggtggtcgcgggtgcgtcggcggcaacggtggcgccggctgccggtgaggcgatcgttgcattgcgcgtgacgcaggacagctggttcagcgtgcgtggacaggacggcaaggaagtgttctccggcctcgtgcacgcaggcgataccaaagaagtaacgggtgtggcgccgttcaggatcacggtcggcaacaaggccggtctcgaatcgctgacgctcgacggccagccggtcgatccgtcgaaatatgcggcggccaaaggtaatgtggcgcgtttcgcgctgcct

SEQ ID NO: 13484 - DNA, 468 bp, Burkholderia fungorum
gtgcgtctggtcggagtcgagaacgaaccgctcggcatcgtgaaactcgctgatgcgttccgcatgtcggaacagcaagacgtggatctggtcgaaatcgcgccgcaagcggttccgccggtttgccgcttgatggactacggcaagttcaagtactcggaagcgaagaagcaacacgaggccaagctgaagcagaagattgtccaggtcaaggaagtcaaattccgcccgggcacggacgacggcgactacaacgtcaaactgcgcaacctcatccgcttcctcgaagacggcgacaagacgaaaatcacgttgcgtttccgtggccgcgaaatggcccaccaggaaatcggtatgcgcatgctcgagcgcctgcgcacggacctcgacgaagtcggtcaggtcgagcagatgccgaaaatggaagggcgccagatgatcatggtgctcgctccgaagaaaaagaag

SEQ ID NO: 13485 - DNA, 2172 bp, Burkholderia fungorum
gtgctgaaatccttgacccgtaccgtaaccatgcgtggtgcagcactgcctggcacaccgctgggcgagcccgcgttgctcttgcgatccattcagggagaagaagtcctttcccagatatatacgtacaccctcaactgctgcacgccgcttgcctcggtcatgccggagcatgcagcggccaacatcgacctgaagtcgatgatcgggaaagagctgactgttactatcgaactggaaggaatgggcgactatgtgccgggcctggccggaattgcaggcgcggccaacatcggcgcgggcacgcgcgagatcagcgggattgtgacgaaagcgcactacgttggccaatcgaatcagcagagtcactatcagttgatactcgcaccgtggatctggctcgctgaccagcgttcggacttcaggatatttcagggcaagacggtcgtggagatcatcgagcaggtgttcgagaactatatgtactcgtatcagatgcgcctgagcgagcagtatcccgtgctggactatcaggttcagtatggagagacggatttctattttgttcagcgcctgatggccgaacacggcatatattggttcttcgagcacagcgacggttttcaccggatgattctggtcgatcagcccggtgcgcacaagccggttgaaagtgccgcctatcagacactgtggtattttccgccgggccataagatcgatcgggaatacgtcgatcgctttactctgggtggaagcctgcaatccggacggtggaccacgaacgacttcgacttcaagaagccgaacgcggtgctgatcgagcaaaacgaacttccgcagaaaaccgcgcatagtaatcttgagcgctacgagtggcccggtgactataccaatccatcacacggcgagcagttcgcgcgcttgcgtatggaagaggtacgcgcgcacggagagcgcgccagagggtccggcaacgtgcgcgacattgtgtgcggcacgacctttcggctggaaggttatccgcatgaagcggccaatcaggaatacctcgtgatttcgtcgtcgattgctgcgtcggaggcagatcagaccacgggttcaagcgagtacaccttcaaatcctcgttcctggttcagccggcaacgaccgtattccggccgtcgcgcaagccttatccgaagccgcgcacaagcggtccgcagaccgccatcgtgacgggtccgccggaccaggagatctggaccgatcagtacggcagagtgaagctgagtttccactgggatcgctcaggggtgaaggatcagagctcgtcgtgctggatacgcgtgtcctatccgtgggtgggaacgaactacggctcaatcaacattccgcgcattggcacagaggtgatcgtcgacttcgagaacggcgatccggatcttcccattgtcacgggcagggtctacaacgcggcatccatgccgccctggccgttgcccgccggcgccacccaaagcggtacgctgtcgcgctccacgaagggcggcggatatgacaacgccaatgcgattcgcttcgaggacatgaagggtagtgaagaactctggctgcacgcggagaaagaccagcgcatcgaagtcgaacatgacgagagtcactgggtcggaaacaaccggctgaagactatcgacggcaacgaaaccgtgaaggtcaacatgaaccgcacggaagcggttgcgctgaacgaaaccatcgccgttggcatgaacagatcggagattgtcggcctcaacgaaacggtcgttgtcggagtcaaccggatgatcacgaccggtatcgaccaggcggtacaggtcggcgtgaactcgatgatgactgtaggagcaatgcaaacagaatcgatcggctcgaactatcaactcacggtgggttcgaatttcacgagtcagatcggtaattcgctttcgcagagcgccggacagtcgatctccatgaccgcgggaaaaatggtcagcgtgaactcgggcggaacggccggctatagcgcgagcgataagctgacgttgcagtgcggtcaggcgtcgatctcgctcgagagcaacggaaacatcacgatcagcggcacttccatcgatgttcagggttcacagcatgttggtatcaacggtgcgatcgtggacatcaat

SEQ ID NO: 13486 - DNA, 1855 bp, Burkholderia fungorum
  misc_feature (1806)..(1855): n=g, a, t or c
atgccaaggggaaaactgacaccgacgcaggttcagaattttttgaacggaggctcaggaaatacgtttggcaatccgactcagaaacaacttccacagtcacagaggagtattagtaaccctggaggcaagggaggcgttaacttaaaacccaccgatccggactggaaagagcacttccacgagatcatggatatgttcggcaatataccggtcataggtagcttattcaacgcgatcaatgcgggcgtataccttgccgagggcaacgtagcgagtgcaatggagaaccttggctacgtggtcatggatctcattcccggcgccggcgagcttaaatcggcgggaaacataggtgaggatatcgggaagctggcagagaaaaccggtaccaggctcaccgagggggaggcggaaaaagccgggaagcagatcgccgagaagcaggctgagaagcaggctgagaagcgggcggaaaagcgggcggaaaagcaggccggcgagcaggccgagaaggacggaggcaaggctgagaaggaaaagcaggaggcgtgcaggaacaacaagggcgtcggccatccggtcaatccgatcaccggcgtcaagttcctggacggagaggaagacctggactttgtgctgccttgcgccgtgcctctgcactggcagcgcagctatttttcgaatctggtgggcaacggctggcttggacaaggctggtcgctgccgttctcgttgtgtctgaagcgggtcggctactcggtattgatggtcgatgcgcaaggacacgaaacccgtctgccgatgctcgccccgggcgagcgcaaacgcatggacagtacgggcttcgaagtgcaccgcgaaacgtccgcccgttatcgattcacctcggccgattgcagtacgcagtatgtgtttgcgtcgctcaccgtcggcgagtatgacggcgccgggcagaatgacggcacgctcccgctcgttgccatcggcgatcgttacggcaaccaccagcgtctgctgtatgacgaggccggcatgcccgcgctcatccacgacgctggcggccgcgtgctgcggttgcaattcaccgcgctgcccgtggacgaaggtggaaccgtgcagcggttgcagcgcgtggtgctgggaagtcaagcactggtctcgtatgagtactcgcccgagggtgatctggtgcgcgtgcgtgatgccgacggacaggccacgcgcgaataccgctacaacaatcacattctgatcgaacatagccagcccggtgcgctgatcgcacgctacgaatacgaccagtacacgttggacggcaaggtgttgcggctcgagaacaacctcggacagacctggcagttccgctatctgcccagccggacggaagtgaccgatgcgctcggacagacgcggtgctatctgttcaatgaccagaagatgatggtgggccagatcgatgccgccggcaacgcgacgcgtatcgatgtcgatggacagggcaatccgctgcgcgtcaccgacccggccggcggcgtacgtcttgccacttacgacgcacgcgggaacatgacctcgctcaccgacgcagccggccgacgcaccgagatccagtaccatccgcaatggcagcggcccacgctcatcgtcgatgcgatgggcgcggcaacgcgcgttgcctacgatgcagcgggcaacctgattcgcaggacaaacgcgctggggcacgtcaccgggtacgcttacgacgatgacggacgcgtcattcgcatcaccgatgcgcacggcaagcaccggcacttggtnnnnnnnnnnnnnnnnnnnnnnnnnnnnnnnnnnnnnnnnnnnnnnnnnn

SEQ ID NO: 13487 - DNA, 1398 bp, Burkholderia fungorum
gtgaagatgagctacaccgagacgatcggcagccgcacataccggtttgccgatctgaaaaccttgatggcgaaagccagtccgcaacgctccggcgatcaactcgcgggcgtggcggcagcgagcgaggaagaacgtgtcgcggccaaaatggcgctcgcgcaggtgccactgcgcaccttcctcaacgaagcgctgatcccctacgaaagcgacgaagtcacgcgcctcgtgatcgacgatcattcgccgcaggcgtttgccgagatcgcgcatctcacggtcggcgattttcgcaactggctcttgagcagcacgaccgatgccgacgcgctcacgcgtatcgccgcgggcctcacgccggagatggtcgcggcggtgtccaagctgatgcgcaatcaggacctgatcgcggcggcgcgcaaacgtcctgtgattacgcgctttcgcaacacggtcggtttgccggggcatatgtcggtgcgtttgcaaccgaatcacccgaccgacgacgtcaaaggtattgccgcatcgatgctcgacggcctgatgtacggctgcggcgacgcgatgatcggcatcaatccggccagcgacaatctcgccgcgatcaccaggctgctgctgatggtcgacgacttccgccaacgctaccaggtgccgacacaatcgtgcgtgctgactcacgtcaccaatacgattgccgcgattgaaaaaggcgcgccggtcgatctggtgttccagtcgatcgcgggtacggagaaagcgaacgcgggctttggcatttcgctggcgttgctgcaggaagcctatgaagcgggactttcgctcaagcgcggcacggtcggcaacaatctgatgtacttcgaaaccgggcagggcagcgcgttgtcggcggatgcgcatttcggcgtggatcagcagacctgcgaagtgcgcgcctacgcggtcgcgcgcaagttcaatccatttctggtgaatacggtggtcggctttattggcccggagtatctgtacgacggtaaacagatcacgcgcgccggtctcgaagatcacttctgcggcaaactgctcggcgtgccgatgggttgcgacatctgctacacgaaccatgccgaagccgatcaggacgacatggacaacctgctcacgctgctcggcgtagcgggcatcaacttcatcatgggcattccgggcgcggacgacgtcatgctcaactatcagagcacgtcctttcacgacgcgctgtatgtgcgggaggtactcggcctgcgccgcgcgccggagttcgaagaatggctggagtcgatgcagatcaccgacgcgcgcggcgcgttgctgagcgcgtcgacacaacagccgctgctggaaggggcgcctgactggatgggcattgca

SEQ ID NO: 13488 - DNA, 2628 bp, Burkholderia fungorum
gtgccttgcaagctgtccctgaaacgcaaatatcagcaggtccccatgcttgaaaactatcgtgttcacgcggccgagcgcgccgcactcggcattcctcccctgccgctgacggctcagcagaccgccgaactggtggagctcctgacaaatccgccggccggcgaagagcagaccctgctcgacctgatcaccaatcgcgtgcccgcgggcgtggacgaagcggcccgcgtgaaggcaggcttcctggccgccgtggccaaaggtcagaccgcctgcgcgctgatctcgcgcgcccgtgccaccgaactgctcggcaccatgctgggcggctacaacatccatccgctgatcgaactgctgtccgacgccgaagtggccaccgtcgccgccgacgcgctgaagaaaaccctgctgatgttcgaccagttccacgacgtcaaggacctggccgacaagggcaacgccaacgcccgcgccgtgctgcaaagctgggccgacgccgaatggttcaccagccgtccggaagtgccgcaaagcctgaccattaccgtcttcaaggtgacgggcgaaaccaacaccgacgacctgtcgccggccccggatgccaccacccggccggacattccgctgcacgcgctggcaatgctgaaaaacgcccgtcccggcatcacgccggaagaggacggcaagcgtggtccggtcaggttcatcgagtcgctgcgggaaaagggccacctggtcgcgtatgtgggcgacgtggtcggcaccggctcctcgcgcaagtcggccaccaactcggtgctgtggttcacgggtgaagacattcccttcattccgaacaagcgctttggcggtgtgtgcctcggcggcaagatcgccccgatcttctacaacacgatggaagacgccggcgccctgccgatcgaactcgacgtgtcgaagatggaaatgggcgacgtggtcgaactgcgcccatacgaaggcaaggcgctgaagaacggcgaagtgatcgccgaatttcaggtcaagtccgacgtgctgttcgatgaagtgcgcgccggcggccgcattccgctgatcatcggccgcggattgactgccaaggcacgtgaagcgctgggcctcgcgccgtcgaccctgttccgcatgcctcagcagccggccagcagcggcaaaggtttttcgctcgcccagaagatggtcggccgcgcctgcggtctgccggaaggtcagggcgtccgtccgggcgcgtattgcgaaccgaaaatgacctcggtcggctcgcaggacactaccggccccatgacccgcgacgaactcaaggacctggcgtgcctgggcttttcggccgacctcgtcatgcagtcgttctgccacaccgccgcctatccgaagccggtcgacgtcaagactcaccacacgctaccgaacttcatcagcacccgtggcggcatcgcgctgcgcccgggcgacggcgtgatccactcgtggctgaaccgaatgctgttgcccgacaccgtcggcacgggcggcgactcgcacacgcgcttcccgatcggcatcagcttcccggctggttcgggcctcgtcgcctttgcggccgccaccggcacgatgccgctggacatgccggaatcggtgctggtccgcttcaagggcaagatgcagcccggcgtgaccctgcgcgacctggtcaacgcgattccgctgtacgccatcaagcaaggcatgctgacggtggccaagcaaggcaagaagaacattttctcgggccgcattctcgaaatcgaaggcctgcccgaactgaaggtcgagcaagcgttcgaactgtcggatgcttccgccgagcgctcggccgccggttgcacggttcacctcaacaaggagccgatcattgaatacctcaacagcaacatcacgctgctgaagtggatgatcgccgagggctaccaggacccgcgcagcctgcagcgccgcatcaaggcaatggagcagtggctggccgacccgcaactgctgtcgccggatgccgacgccgagtacgcagccgtcatcgaaatcgacctcgccgacatccatgagccgatcgtggcctgcccgaatgacccggacgacgtgaagacgctgtcggacgtggccggtgcaaagatcgacgaggtgttcatcggctcatgcatgaccaacatcggccacttccgtgccgcgtcgaagctgctggaaggcaagcgcgacatcccggtcaagctgtgggtggcgccgccgaccaagatggaccagaagcagttgaccgaggagggccactacggcgtgttcggcacagccggcgcccgtaccgaaatgccgggctgctcgctgtgcatgggcaaccaggcacaggtgcgcgaaggcgcgacggtcatgtcgacctcgacgcgtaacttcccgaaccgtctgggcaagaacacgaacgtgtatctcggctcggcggaactggccgcaatctgctcgcgtctgggcaagattccgagcaaggaagagtacatggcagatatgggcgtgcttaccgccaacagcgacaagatctaccaatacatgaacttcgatcagatcgaagacttcaaggaagtggcggacaccgtggagatg

SEQ ID NO: 13489 - DNA, 1401 bp, Burkholderia fungorum
atgaacagtccccataccgcgggcgcgccgtttagccagctatcgctgccgcccgcgacgctcgccaacctgacgcagctcggctacgtcgagatgacgccgattcaggccgcgagcctgcccatcgcgcttgccggccatgatctgatcgcccaggcgaaaaccggcagcggcaagactgcggcgttttcgctggcgctgctggcgcgcctcgacgtgcgcaactttgccgtgcaggcaatggtgctgtgcccgacgcgcgaactcgccgaccaggtcacgcaggaaatccggcgcctcgcgcgcgccgaagaaaacatcaaggtgctgacgttgtgcggcggcacgccgatgcgtccgcaaacggcgagtctcgaacacggcgcgcacatcgtggtgggcacgccgggccgcatcatggatcacctggagcgcggcagcctgccgctgcagtcgctcaatacgctggtgctcgacgaagcggaccgcatgctcgacatgggtttcttcgacgatatcgccaccgtcgtgaagcaatgcccgaaggaacggcaaacgctgctgttctcggcgacgtatcccgaaggcatcgtcaaactgagccagcaattcctgcgcaatccgaaagaagtcaaactcgcggaacggcacgacaacaccaagatccgtcagcgcttctatgaagtgaccgaagacgagcgtctgcacgcggtcggtctgctgttgaaccactatcgtccggtgagcacgctggcgttctgcaataccaagcagcaatgccgcgatctgctcgacgtgctgcgcgcgcagggttttcatgcgctcgcgctgcatggcgagctcgaccagcgtgaacgcgatcaggtgctgatccagttcgccaatcgcagctgctcggtgctggtggccaccgacgtcgccgcgcgcggtctcgacatcgcgcaactcgaagccgtgatcaacgtcgacgtgacgccggacccggaagtgcatgtgcaccgcatcggccgcacgggccgcgccgatcaggaaggctgggctttgagtctggcgagcatgaacgagatgggccgtgtcggcagtctcgaacaggcgcaaaagcgcgacgtcgaatggcacaagctgtccgaactcacggcgacgagcaatgaaccgctgttgccgcctatggaaacgttgcagattctcggcggccgtaaggaaaagatccgtcccggcgacgtgctcggcgcgctgaccggtgaagcgggtttcgccggctcgcagatcggcaagatcaacgtgacggaaatgtccacctacgtggcggtggagcgcagcgtcgcccgtgaggccgtgcgcaagctcagcgcaggcaaggtgaagggcaagaaggtcaaagtccgcctgatggacgacgcc

SEQ ID NO: 13490 - DNA, 807 bp, Burkholderia fungorum
atgatccaaatcgacttgaccgggcaggtagcggtggtgacgggcggctcgtccggcatcggcctcgccactgccgaactgtttctgcgagccggcgcctcggtcgcgatctgcggccgcgataccgaacgtctcgcgcaagcggaagccgcgctgaaggcgcagttcccgcaggcgcaattgcttgcgcgccgctgcaacgtgctcgacgccgacgacgtaaaagctttcgcggaagccgtgcagagccgcttcggccgcactggcatgctgatcaacaacgcgggccagggccgtgtgtcgactttcgccgacaccaccgacgaagcctggcgcgaagaactcgacctgaagtacttcagcgtgattcgcccgacccgcgcgttcctgccgatgctgcgcgatgcctccgcatcgaacagcaacgccgcgattgtctgcgtgaactcgctgctcgcactgcaacccgagccgcacatggtggcgacttcgtcggcgcgtgccggcgtgcagaacctgctcaagtcgctcgcggtggaactcgcgccgcagcgcatccgcgtcaattcgattctgatcggcatcgtcgaatcgggtcaatggcgtcgccgttatgcgaaagaagcgcagccgggccaaagctgggaagactggacggcagaactggcgcgcaagaaaaacattccgctaggccgcttcggtcgccccgaagaagccgctcaagcgctcttttatctggctacgacgctgtcgtcctatacgacgggcagtcatatcgatgtttctggaggcgttgcacgacatgtc

SEQ ID NO: 13491 - DNA, 1356 bp, Burkholderia fungorum
ttggaaaaatcagcgccaccacccgcccccgaagactggatcgcccgcagcctgcgcgccgtctggcacccctgcacccagatgaagcaccacgaacgcctgccgctcgtccccgtcgcgcgcggtcaaggcgcgtggctctacgaccgcgccggccatcgctatctggatgcgatcagctcctggtgggtcaacctgttcggtcacgccaatccgcgcatcaacgcggcactgaaagaccagctcgacacgctcgaacacgccatgctcgccggctgcacgcacgaaccggccatcgaactcgcggagcgcctcagcgcgctcaccggcaacacgctcggccacgcattcttcgcatcggatggcgcgtccgccgtcgaaatcgccctgaaaatgagcttccactcgtggcgcaatcgcggtttcgccgacaagcaggaattcgtctgcatcgccaacagttaccacggcgaaaccatcggcgcgctcggcgtcacggatgtcgcactcttcaaagacgcctacgacccgttgatccgccacgcgcacgtcgtagcgtctccagacgcccgcctcgcgcaagccggcgaaaccgccgccgatgtcgctcgccgcgcgctcgatcacgtccgctcgcttttcgaagcacgcgccacgaaaatcgccgcgctgatcgtcgagccgctcgtgcagtgcgcagccggcatggccatgcacgacgcgtcgtatatcgccggactacgcacgttgtgcgatcagtacggcgtacatctgatcgccgatgaaatcgccgtgggctgcggccgcaccggcactttcttcgcgtgcgaacaggccggtatctggccggacttcatctgtctgtcgaaaggcatcagcggcggctatctgccgctctcgatcgtgctgtcgcgcgacgaaattttcgaagccttctatcacgacgacaccgcgcgcggcttcctgcactcgcactcgtacacgggcaatccgctcgcctgtcgcgcggcgctcgccacgctcgatctgttcgcagccgacaacgtgatcgccgtcaacgcacaaaaatccgcgaagctgaaagccgcgctcgcaccgctcgccgaacacgaacaagtccgcaatctgcgtcagtgcggcacgatcttcgcgttcgacgccctgatcgacgatgctcagcaggccagaacattctcgcgccgcttcttcgaaaacgcgctgcggcgcgaactgctgctgcgcccaatcggcacgacggtgtatctgatgccgccttatatcctcgacgacgaagaactcgcgctgctcgcctcgcgcacgcgcgagaccttcgacgccacgctcgcggagacccgc

SEQ ID NO: 13492 - DNA, 1134 bp, Burkholderia fungorum
atgcgcatgcgcagcgctgaaccaccatcacatccatccatgaggatcgacgacatgacgcaactgaacatcgctccggcgtccaccgacacggccgccgccagcaacaacaacgccgcagccggcacgaagcagctcgcgcgctggcgcgtggcggacatcgtctcgttgtacgaactgccgttcaacgacctgatgttccaggcgcagcaaacccatcgcgagcatttcgacgcgaacaccgtgcaactgtccacgctgctgtcgatcaagaccggcggctgcgaggaagattgcgcgtattgtccgcagtcggtgcatcacgacacgggcctgcaagccgacaagctgatgccggtcgacgaagtgctcgccgccgcgaaggtcgccaaggaaaacggcgcgacgcgtttctgcatgggcgccgcgtggcgcaacccgaaagaccgtcacctcgaaccgatcaaggacatgatccgcggcgtgaaggcaatgggccttgaaacctgcgtgacgctcggcatgctcgaaacgcatcaggcgcaagggctgcgcgaagcgggcctcgactactacaaccacaatctcgatacgtcgccggagttctacggtcagatcatttcgacgcgcacgtatcaggaccgcctcgacacgctcgaacgcgtgcgcgacgcgggcatcaacgtatgctgcggcgggatcgtcggtctgggcgagtcgcgccgtgaacgcgcgggcctgatcgcgcaactggcgaacatggatccgtatccggaatcggtgcccatcaacaatctggttcaggtggaaggcacgccgctgaccggcaccgaagcgatcgacccgttcgaattcgtgcgcacgatcgcgattgcgcgcatcaccatgccgcgcgcaatggtgcgtctgtcggccggccgcgaacaaatgaacgaagcgttgcaggccatgtgtttcctcgcgggcgcgaactcgattttctacggcgatcaattgctgaccacgagcaacccgcaagccgaagccgaccgcaaactgctcgaacgtctcggcattcgcgccgaggccgcgcagcagatgccactcgatcaaagcggctgcgaacatggctgcgataaacacgctgcgccgaac

SEQ ID NO: 13493 - DNA, 1596 bp, Burkholderia fungorum
gtgagtaccatcctctcccgcatcgatcgccagtccgacgcgttcaggaacaacgaagcgcactacgacgcgctgctcgccgaactgcgcgaacgccacgcgcatgtgctggcgggtggcggcgagcggctggtcgaacggcatcatgcgcgcaacaagatgctcgcgcgtgaacggatcgacctgctgctcgacccgctgtcgccgtttctcgaactgtcgccgctcgcggcctggggcatgtacggcaacgcggtgccgtcagccggcgtgattaccggtatcggcctgatcgcgggcacgccctgcatgctgatcgccaatgacgccaccgtgaagggcggttcgttcttcgccgagaccgtcaagaaacacgtgcgcgcgcaggacattgccgggcatcaccgtttgccggtcatttatctggtcgattgcggcggtgcgtatctgccggaacaggatcgtgtgttccccgacaaggaccacttcggcaatacgttctaccggcaatgccagatgtccgccgcgggcattccgcagatcgccgccgtgttcggcggctgcacggcgggtggcgcatacatacccgcgctcgccgacgaagtcgtgatggtacgcggccaggcacgcattcatctgggcggcccgcagatcgtcaaggcggcgatcaacgaaatcgtcgacggcgagacgctcggcggcgccgagatgcacacgcgcgtgtccggcgtctccgactatctggcggaaaacgaagcacaggcgctccagcgcgtgcgcgacatcatcgccaatctgaaccggccacggccgctttccggcgcggtgcgcgaagtcgtgccgccgcgctatgacatcggcgagttgcgcggcatcctgccgccggggctgaaggaatcgtatgacgtgcgcgaagtgatcgcgcggctcgtcgacgattccgggttccaggaattcaagcccgagttcggcagcacgctcgtgtgcggcactgcatactggtgcggttatccggttggaattctcgccaacaatggcgtgctgttttcagagtcggccacgaagggtgcgcatttcatcgaactgtgcaaccagcgcaatattccactgctgtttctgcagaacatcactggcttcatggtgggtacggaggccgagcgcggcggcattgcaaggcacagcgcgaagctcgtctacgcaatggcgactgcgcgcgtgccgcgcctcacggtgatcatcggcggctcgttcggcgcgggcaactacggtatgtgcggtcgcggtttcgatccgcgcttcctgttcgcgtggccgaactcgcgaatcgcgaccatgagcgcggacgtggcggcgaccgtgctgaccgacttgcggcgcagcagtctgaaagccgccgccgatgaagccgagatcgccgaaatcgatcgcgtcacgcgcgagcagttcaccacgcaaagcgatccgtattacgccaccgcgcgcctgtgggacgacgggctgatcgagccttcggaaacgcgcgaagtgatcggcctgtgcctcgcactcgcggcggccgaagcgccggcgacgggtccttcacccgtcttccggatg

SEQ ID NO: 13494 - DNA, 870 bp, Burkholderia fungorum
gtgagcgcggcgcaatcgtggctgttcgtgcccggcgacagcgcgcgcaagatcgaacgtgcgctgcaaggcgacgcgcacgcgctgatcttcgactgggaagatgcggtggcgcccgcggcaaaagcggcggcgcggcagaccacggcggccgcgctcgctgcggcgggcgcaccggccgggcgctgctggattcgcgtcaatgctttgtcgacagcgtatttcgacgacgacattgccgcgctgcccggcgccgcgattgcgggagtcgtgctgccgaaagcgtgcggcgtgcgcgatatcgaacggctcggcgcagtgctggaacagtgtgaacgcgcgaacgggcttgctgccggcgtattgcggatcgtcgcgatcgtgaccgagtcggcggcttcggtactcgccttatcggaattccgtgcgcccgtatcgagactgcacgcggtgatgtggggcggcgaagatctcgcggccgatctcggcgtggcgaataatcgcgagacccgccacgacgctcatgcggcctatcgggcgccgttccagctcgcgcgcaatctgacgctgtttgccgcggccgcggcagagtgccttgcgatcgacgcggtcttcaccgacctgcatgcgcaggacgcgctgctcgccgaaagtgccgcggcacgcgccgacggtttcggcgcaaaggcggcgatacatccggatcaggttgccgtcatcaatcgtacgttcgcgccgaccgcgcaagaacggatgtgggcgcaacaggtgatcgcggcgttggaccagcagcggggcgggctcgccgtgctcaacggcaagatgctcgatgcgccgcatttgaggctcgcgaagcgcattctttcgcgc

SEQ ID NO: 13495 - DNA, 498 bp, Burkholderia fungorum
atgaatgttttcgtcggtattttgttatttgtcgcctgggccgcggcggtcgcgattagcgactgccgttggcggcgtatatccaattcaattgtcgttgcgggtttggcggcggcattcggctgcgcgttatttcaatgcggcccttttggtatttcgccggctcgcgcgggtattggagcattgatcggactcgccgcgttattgcctttttttgtgctcggtgtgatgggtgccgccgacgtcaaaatcttcgccgttttgggtgcatggtgcggcatgcaagcattgcctggcctgtggatggccgcgagtctcgctgccggcgcgcacgcgctgtggttgctgatcacgacccgcacacgcctcgcggagctcgtccgtcgatccggcgcgaccttcgagttggccggcaaagcctccacgccgtatgccgcgtgtctgagcgtggccgcgagcggctggctcgtgctgcatggcatggccggggggctgcga

SEQ ID NO: 13496 - DNA, 1041 bp, Burkholderia fungorum
atgttcggttttctgcgcggctatttttccaacgacctggcaatcgacctcggcacgtcgaacacgctcatctacatgcgtggcaagggtatcgtgctggacgaaccttcggtggtctcgattcgccaggaaggcggtccgaacggcaagaagatcattctggccgtcggcaaggaagcaaaacagatgctcggcaaggtgccgggcaatatcgaggcgatccgcccgatgaaagacggcgtgatcgccgacttcaacattacccagcagatgatcaagcgcttcatccagatggcgcacgagtcgcgtatgttcgcgccgtcgccgcgcatcatcatctgcgtgccgtgcggctccacccaggtggagcgccgcgcgatcaaggaggccgcgcacagcgcgggcgcttcgcaggtctatctgatcgaggagccgatggccgcggccaccggcgcgggcttgccggtgtcggaagcgaccggctcgatggtggtcgacattggcggcggcaccaccgaagtgggcgtgatctcgctcggcggcatcgtttataaaggctcggtgcgcgtgggcggcgacaagttcgacgacgcgatcgtcaactacattcgccgcaattacggcatgctgatcggcgagcaaacggccgaagccatcaagaaggaaatcggctccgcgtttccgggctccgaggtcaaggagatggaagtcaagggccgcaatatgtccgaagggattccgcgcagcttcacggtgtccagcaacgagattctcgaagcgctgaccgatccgctcaatcagatcgtctccgccgtgaagatcgcgctggagcaaacgccgccggaactgggcgcggacattgccgagcgcggcatcatgctggcgggcggcggcgcgctgctgcgcgatctggaccgcctgctcgccgaagaaacgggcttgccggtgttcgtcgccgaagcgccgctgacttgcgtggtgcgcggctcgggcatggcgctcgaacggatcgacaaattcggcggcgcgttctcttacgaa

SEQ ID NO: 13497 - DNA, 891 bp, Burkholderia fungorum
atgctcgactatgcgttgctcgacgcactggccgccgtggtgcgccacggctcgttcgatcgcgccgccggcgaactcaacgtgacgccgtccgcggtgtcgcagcgggtcaagctgctggaagagcgcgtgggcagcgtgctggtgaagcgcggccagccatgcgtcgcgaccacctcgggcgcgctgctgtgtcgccataccgaacgcgtgcaattgctggaagcggagctgaccggccgcctgccggcgctgcccggcgcgctggtcgaaccgtggcccgcgctgcgcgtggccgtcaacgacgacagcgtgggcacctggtttatcgacgcggttgcgcaattctgcgtagagcgggaaatgctgctcgatctggtgatcgacgatcaggaccataccgcgcagcggattcgcgacggcagcgtgcaaggcgcggtcaccacgcaggccgagccggtgcagggctgccgctccacgcgtcttgggcggatgcgctatctggcggtgtgttcgccggacttcctcgcacgtcactttgccggcggtgttacgcgcgagagtttgcggcgcacgccgtgcgtcgacttcaatccgaaagaccagttgcaaaagcgcttcatgcgccgcatcacgcgcgcggaactcgatccgccgctgcactggattccgcatgtcgccggtttcttgcgcgcctgcgtgacgggccttgggtggggcatgtgcccggaacgcatgatcgccccgcatctggcgagcggcgagctggtggaaatggcgcccggcaagcccatcgatgtcgacctgtactggcagagctggcgtttgtcgattggctggctcgacgatttcggcgcggtgctgcgcaagcgggcagcggagtttctggac

SEQ ID NO: 13498 - DNA, 300 bp, Burkholderia fungorum
atgtcggaaatcaacaaggagagattgatgtcggatatcaaaaccgtcctcgcggacgctgaagatctgctgaaacaggccgcgagcgccaccggcgagcgcgcttcggaacttcgtgaaacagcgctgacgcgcctgaaacaggccagggaaaaggcggctgacgttcaggtcgtcgtggtcgaaaaaggcaagaaagcggcccgcgctaccgacgattacgtgcacgagcatccgtgggcatccatcggcattgcagcgggcgccggtgtgctgcttggattgttgatcaaccgcaag

SEQ ID NO: 13499 - DNA, 384 bp, Burkholderia fungorum
atgacgatcgacacacaatcgcagcgcggagaacatagtcccttgcgccgcataatcggttccgtgtttgccattctgcagacgcggctggaactggtcggcattgaactcgccgaagaaaaagaccgtctgctcggcgtgctgttccttggcctcgcggccatgatgctcgccacgatggccttgatcgcgctgacagcactgatcgccattgcattctgggacacctaccgctggcaagcgctcgccggcatcaccgcggtctatgcgatcgcgggattagcctgtgcgctgaaagcgcgcagcggcttgcgcaacgcgccaatggtgttcgaagcgaccattgccgagttcgaaaaagaccgcgacgtgttccgcaaaccg

SEQ ID NO: 13500 - DNA, 1164 bp, Burkholderia fungorum
atgcctttgcccctgctcgcccttgccgttgccgcttttggaatcggtaccaccgaattcgtgatcatgggactgctgcccgacgtggcgcgcgacctggccgtttcgattcccgcggccggcatgctggtgtcggcgtatgcgctcggcgtcacgatcggcgcgccgatcgtcgcgatcgcggtcgccaacatgccgcgcaagaaggcgctgatgagtctgatcggcgtgtttatcgtcggcaatctgctgtgcgcggtggcgccgggttatgcggtgctgatggccgcgcgcatcgtgacggcgttctgccacggcgcgttcttcggtatcggttcggtggtggctgcgggcctcgtcgcgccgaaccgccgcgcgcaagccatcgcgttgatgttcacgggcctcacgctcgccaacgtgctgggcgtgccgctcggcaccgcgctcggccaggcggtgggctggcgcgccactttctgggcggtaacgggcatcggtctcgtcgcggcggccgcgctcgccgtgtgcctgccggcgaagatcgagatgcagaaggcgagcctcgtccacgaattcagcgtgctgaagaacccgcaagtgctgatggtgctcggcatcagcgtgctcgcgtcggcaagtctcttttccaccttcacgtacatcacgccgattctcgaagacgtgagcggattcacgccgcatgcggtcaccctcgtgctgctgctgttcgggctcggcctgacggtgggcagcacgctcggcggcaagctcgccgactggcggctgatgccttcgctggtggcgtttctgctggccatcgtggtgattctgaccatcttcgccggcaccatgcactcggagatcccggcgatgatcacgattttcgcgtggggcgttctggccttcgccatcgtgccgccgctgcaaatgctgatcgtcgaccgcgcgagccatgcgccgaatctggcttcgaccttgaaccagggcgccttcaatctcggcaacgcgacgggcgcgtggctgggcggcatggcgatcggcgcgggcgcaccgctcaccacgctgccgtgggtcggcgtggcgaccgcgatcggcgcgctggcgctgacgctgtggtcggtgtcgatcgagcggcgcgcgcagcgggtcgccgtggcgggc

SEQ ID NO: 13501 - DNA, 600 bp, Burkholderia fungorum
gtgagcttaaagatggggcgtcacagacagttcgacgaaggcgaggcgctcgaagctgcgctgtcggtcttctggcagaagggctacgagggcgcttcgtttgaagatttgtcccaagccacgggcgtggcacgccctggtctctattcggcattcggcaacaaggaagcactcttcatcaaggcgctcgatctctacgacgccaggtacatgggcttcatgagcgaagcactgagcgagcctacgtccttgaaggttgtggagcgtattctgcaaggctccgccaacatccataccatggactcagcccatccgggttgcctgggtattaacggtgcgctcgcctgctcggacgatgccgaacccattcgccgtgaactcatccgacgccgcgccgcaacgcaattggcactccgtaaacgcctggaacgtgctcaacgagaaggcgaactacccgcttcagtcgatggggcaacactggcctcgtttgtaatggctatctcacaaggcatggcggtgcaagccaaagctggagcgtcaaagaaagcacttgaaggattggttgagtacgttatcaagacctggccgtcggcgtccaga

SEQ ID NO: 13502 - DNA, 1347 bp, Burkholderia fungorum
atggccatcaagcaaaccggcgacattgccgctcagcgcctgtcgcccgagcagctctcgtgcgagttctccgacatcgcaccgctgctcgacgcgagcgccgcggccgcggcggcgagccgctgtcattactgttacgacgcgccgtgcgtgaacgcgtgccccacgcagatcgacattcccagtttcatccgcaagatcagcaacggcaatctgaagggcgcggccgtggacattctgtcggccaacccgatgggcggcatgtgcgcacgcgtctgccccacggaaattctttgtgaaggcgcttgcgtgcgcaaccatcaggatgcgaaaccagtggcgatcggcgcgctgcaacgtcatgcgacggactgggcgatggcgcgcggcgaagtgctgttcaagcgcgcggcggaaaccggacggcacgtcgcggtggtcggcgcgggtccggcgggactcgcctgcgcgcatcggcttgcgcttgccggccacaccgtgacgatctacgacgctcacgaaaaagccggcggcctgaacgaatacggcattgccgcctacaaaaccgtcgatgattttgcgcagcgtgaagtggcgtggctgtgctccgttggcggtatcgaaatcaaacatggcgtggcgcttggtcgcgatatcgagctcgacacgctgcgcaagcagcacgacgcggtgttcctcgctatcggcctcggcggcgtgcgggcgctcgcgatggaaggcgaagaccttggcggtgtgatgaacgcggtggacttcatcgaacaggtgcgcagcgcgagcgacctcggcacggtgccggtgggccggcgcgtcgtcgtgatcggcggcggcaatacggcggtggatgctgccgtgcaaagccgcaagctcggcgcggcgtcggtgacgatggtgtaccggcgcggcgtcgaagcaatgagcgccacctgggccgagcgcgacttcgctcagaccagtggcgtgacgctcatcacgcatgccacgccgatgcggttgattggcgacaacggcgtggtcacgggtgtcgaattcgcacgtgcgtcgaatgatggcggcgaggagcgcttcgtagtcgaagccgacatggtgctcaaggcgatcggtcaaacgctggtgccggtcggcatcgggcgcgagttgctgaccttggacggtagccgtatcgccgtcgacgcgaacggccagacctcgctggcaaacgtatgggccggcggcgattgcgcggccactggtggcatcgatctcacggtgcaggcggttcaggacggcaaggtcgccgctgccgctatcgatgcgcagtttgcccgcacggcggcgaaagccgcc

SEQ ID NO: 13503 - DNA, 990 bp, Burkholderia fungorum
atgtcgtcgactgccactccctcctccaacgccgccagcctgctcgctccgatcgccgaagacatgcagcaggtcaatcgcgtcatacggcaccgccttgcgtccgacgtgatgctgatcaaccagatttcggagtacatcatcagcgccggcggcaaacgcctgcggcccgcgctgctgttgctggtggccggcgcgctgggtgaaaccacggggcaccggcacgaactggcggcggtcgtcgaattcatccatacggccacgctgctgcacgacgacgtggtcgacgaatccgacctgcggcgcggccggcagacggccaatgcgctgttcggcaacgccgcgagcgtgctggtgggcgacttcctgtactcgcgctcgttccagatgatggtcggcgtgggcaagatgcgcgtcatggaaattctgtcggaggcgaccaacatcatctccgaaggcgaagtgctgcaactcctcaacatgcacgacgccgacgtggacgaagcccgctacatgcaggtgattcgctacaagaccgccaagctgttcgaggccgcggcccaactcggcgcggtgctggccggttcggacgcgaaaaccgaagcggcggcggcggaattcggccggcgcatcggcaccgctttccagatcatggacgactggctcgactacacgggcacggccgagtcgatgggaaaaaatgccggcgacgaccttcgcgaaggcaagccaacgctcccgctgatctatctgatcgaacgcggcacgccggagcaatcggcgctggcgcgcgaagcgatcgagcaaggcggcacggatcgtttcgacaccattttcgaggcaatcacgcgttccggcgcgctggatcacacgctcgaatgcgcgaaacaggaagcccaggcggccgcggcagcaatttcttcgtttccggattccattttcaaagatagcctgctagaattatgttcttactcgacggcaagacagtct

SEQ ID NO: 13504 - DNA, 834 bp, Burkholderia fungorum
atgatcgaaatcacgaatgtgcacaagagttttggcgcggtgccggtcctgaagggcatttcgctgaacgtccgtcagggcgaggtggtctgcctgatcggcgcgtcgggctcgggcaagtcgacgctgctgcgctgtattaacgcgctcgaatcgtacgacgaaggcgaaatccgtctgctcggccagcctgtcgaacaacgcgcgcgcaacatcaaccagttgcgcacccaggtcggcatggtgtttcagcgcttcaatctgtttccgcaccggaccgcgctcgaaaacgtgatggaaggaccggtgcatgtcaaacgcatgccgcgcgccgatgcgcagcgcgaggcgtccgaactgctgatgaaggtcgggctcggccacaagctgcatgcgtatccgaatcagttgtcgggcggccagcagcagcgggtggcgattgcgcgttcgctcgcgatgaagccgaaggcgatcctgttcgacgagccgacctcggcgctcgatccggagctggtcggcgaagtgctcggcgtgatgcgcacgctcgcacgcgaaggtatgacgatgctggtcgtcacgcacgaaatgggttttgcgcgcgaagtggcggacagggtctgctttctgcatgcgggcctgatcatcgaagaaggcaccgcgcagcaggtgctgggttcgccgcgcgaggcgcgcacccgcgaattcctgcgccatgtgctgaccaatcgcagcgacgggcatgacgcgcatgacggcggcgcccccgctggcggtgcgctctccggcggcgcgcacgatgatttggcgcccggcggcgtcgggggagcggcgata

SEQ ID NO: 13505 - DNA, 813 bp, Burkholderia fungorum
atgatcagctatccacacaacgccggatcggcgatgacgcgcgtcatccagggcgggctcgacggcccggtcgtcgtcctgctccacggcctgtccgcacgcgcagatcgctggaagcacaatctcgacgcgctggggcaggccggcgtgcgcgccatggccatcgacttgccaggacacggcttcgccagcaagcatgaagacttcgactactctgcgcacggctacagccggtggctcgatcagttcgtccagacactcggcgtggagaagctcgtgctggtcggaacgtcgttcggcggcttcgtcgctgcgcactacgcagccgatcacccggagcgggtcgcgggactgatggcggtgggcgccattggtctcgtcccggccggggaagcgcgccggatgaagacggtccagtggctcggcgaaatgcagaaggaacagatccgcagccgcatgtaccggggcgtgctggatccgcagctgatcagcgaggaactcgtcgaagaggactaccggatcaacaactcggccggcgccgccgaagcgtttgcggccctcgctcgctactaccgcgagcgcctcgacgatgacgcggttgccgcccgcctcgcggatgccgcgagccgcttcccggtaagcatcgtatggggccgggacgacccgtccgtctcgcccgactatggagccagggcgcaccagatcattgccggttcgacgctgaccttcgtcgacgactgcggacactttccatactgggagcgtccggctgaattcaacgcattgctcacaaatttcgtgaagcgctgcatc

SEQ ID NO: 13506 - DNA, 693 bp, Burkholderia fungorum
atgaccgaatcaccgcttaccatcgcgccgcttctgcagcttggcccggttccgatcaccgggcccgtgctgatcacctggggcatcatggccatcgtcaccgccggggctgtcgtgctgagccgaagactctcgcttgcgcccggcaagacgcaaaccgcgctagaactgctcgtcgagacgatcgaccagcagattcgcgacaccatgcaaaccgaggccgcaacgtatcgcgcgctgatcggcacgctgttcgtcttcgtgctggtcgccaactggtgcgcgctggtgccgggcgtcacgccgcctaccgcgcacctcgaaaccgatgccgcgctcgcgctgatcgtgctcggcgccacgatcttttacggcgttcgcagccgcggcgcgacgggctatctcgcgtcgttcgcggagccgagctgggtgatgattccgctgaacgtcgtcgagcagatcacgcgcacgttctcactggtggtgcgcctgttcggcaacgtcatgagcggcgtgttcgtgatcggcattctgctgtcgctcgccggcctgctcgtgccgattccgctgatggcgctggatctgctcacgggcgcggttcaggcctacatctttgctgttctctcgatggtcttcatcggcgccgcgatcggcgatccgcaccatgtcagtgtcaaaaagggcgaagtctca

SEQ ID NO: 13507 - DNA, 495 bp, Burkholderia fungorum
ttgtacgccgagcctcgttggacgctgacgccgcgctgcgcgcagccggcgacggagggcatcatgttcaggcacattctggttccgacggacggttcagacctgtctcgcaaagcgatcgagggcgccatcgatctcgcgcaagccgtcgacgcgcgcgtgaccgcttatgcatgtctgccgcaatatccgtactcgccgttctccgacgtggtggtcgaaccgccgtccgaattcctgcagcgcagcgaacgcgaagcgcgtgtgcatctgcgtgaagtggaaatggcggcgcgccgtgtcggcgtcgcggttcatagccggaccagcgtgcacccggcgccgtatctcggcatcatcgaggcggccgagcagggcggctgcgacgtgatcttcatggcgtcgcatgggcgccgcggtctgggcagcctgctgatcggcagcgaaacgcagcgggtgctcacgcatacgaagattccggtgatcgtgtatcgc

SEQ ID NO: 13508 - DNA, 999 bp, Burkholderia fungorum
ttggcccctgactgcaacgagttgccggtcgaattggaagctcagatagtagagcagctcgaccatccgttcgcctgcgcggcatccgagcaactcggcaaggcgcggcgtctcgacgacgcagcgggccgctatatcgagttctgcaagagcacctttccggccgcgttcgatctgcgcggtctgaagctggtcgtcgactgcgcgcacggtgccgcgtatgacgtcgcgccgcacgtgttccatgagctcggcgccgacgtgattccgatcggcgtcgcgccgaacggtttcaatatcaacgacggagtcggtgcgaccgcaccggatgcgctggtgcgcgccgtgcgggcgaatcatgccgatctcggcattgcgctcgacggcgacgccgaccgcctgcaggtggtcgacgccgcaggccgtctctataacggcgacgagttgctgtacatcctcgtcaaggatcgcatcgcgaccgagggcaaggtggagggcgcggtcggcaccctgatgacgaatatggcggtggaggtggcgctgcaggaagccggcgtgaagttcgtccgcgcggcggtcggcgaccgttacgtgctcgagcagctgcgcgaacacggctggcagctcggggccgaaggctccggccatattctctctcttgaccgccattccacgggcgacggcatcgtctccgcgctgctggtgctggcggccatgaagcgcagcgacaagacgctcgccgagttgctcggcggcgtcacgctgttcccgcaaaagctgatcaacgtgcgtatgaagcccgacgcggactggaagggcagcgacgtgatccgccgcgccatcgccaaggctgaggacgcgctgaacgggcgcggccgcgtgctgatccgcgcgtccggcaccgagccggtgctgcgcgtgatggtggaagctgaaaatgtcgccgacgcagttcagtatgcggagtcgatcgccagcgcggtgaagcaggccacggcg

SEQ ID NO: 13509 - DNA, 1002 bp, Burkholderia fungorum
atggcacgcaagatcacattttctcaggcaatcaacgaagcactgagtcaggaaatggcccgcgatgaaaccgtcatcgtgatgggcgaggacaacgcgggcggcgccggctccccaggcgagcaggacgcgtggggcggcgtactcggcgtcacgaagggcctgtttcacaagtatccgggccgcgtgctcgatacgccgctctccgagggtggctatatcggtgcggcggtgggcgcggccgcgtgcggcatgcggccggtggcggagttgatgttcatcgacttcatgggcgtgtgcttcgaccagatattcaatcaggccgccaagtttcgctatatgttcggcggcaaggcggtgacgccagtcgtgattcgcgccatgcagggcgccggcttgcgcgcggccgcacagcactcgcagatgctgacctcgctgtttactcacataccgggcctgaaagtggtgtgcccctccacaccgtacgacgcgaaaggcctgttgatccaggcgatccgcgacaacgacccggtgattttctgcgagcacaagctgctctatagccgcgaaggcgacgtgcccgaagagtcgtatgcgattccgttcggcgaggcgaacgtcgtgcgtgacggcgacgacgccacgatcgtcacgtacggccgcatggtgcattacgccacggaagccgcggaaaagctcgcgaaagacggtatcgaagtcgaggtgatcgatctgcgcaccacgtcgccgctcgacgaagacaccattctcgaaagcgccaaccgcacgggccgtgtcgtggtagtggacgaagcgaatccacgctgctcgatggccacggacatctcggcgctgatcgcccaacgcgcatttcgctctctgaaggcgccgatcgaaatggtgaccgcgccgcatacgcccacgccgtttgccggcgtgctcgaagacatgtacatcccttcggcccggcagattgccgacgccgtgctgaaagtgagaggt

SEQ ID NO: 13510 - DNA, 1704 bp, Burkholderia fungorum
atgacccgaatcgttacgcgcgccgcgtcccccgtcgacgccgaaatcctcacccgccacggtctgcatccggtgctcgcgcgcctctacgcggcgcgcggcgtgtgcatgcccgacgaaatcgaaaccggcctcgcgcggctcgtaccgcccgtcgcgctcaagggttgcgaagacgccgccgccctgctcgccgacgccatccagagccaacgccgcatgctggtggtcgccgactacgattgcgacggcgccaccgcctgcgcggtcgccgtgcgcggcctgcgcatgttcggcggccggatcgagtatctggtgccgaaccgtttcgagtacggctatggtctgacaccggagatcgtcgcgctggccgcccgcaacgcggcgggcaagccggatctgctgattaccgtggataacggcattgccagcgtggacggcgtgcaagcggctaacgcgctcggcatcgacgtgctggttaccgatcaccacctgcccggcgacgaactgccgcccgcccgcgcgatcgtcaatccgaaccagccgggctgcacgttcccgagcaaatgtatcgcgggcgtcggcgtgatgttttacgtgctgctcgcgttgcgcgcggaattgcgccgccgtggcgcgttcaacgataactttcccgaaccgcgcctcgacggcctgctcgatctggtcgcgctcggcacggtcgcggacgtggtcaagctcgacggcaacaaccgcgtgctggtcgcgcagggtctgcagcgcatccgcaaaggcaagatgcagccgggcatcgccgcgctgtttcgcgccgccgcgcgcgacgcccgcagcgcgtcgggcttcgatctcggcttcgcgctcggaccgcggctgaacgcggcgggccgactgtcggacatgtcgctcggcatcgaatgtctgactactgacgacatcggccgcgcctgggacctcgcgcagcaactcgacgcgatgaaccgcgaacgccgcgaaatcgaagccggcatgcagcagcaggcgctcgaagacctctcggcgatcgaccccgacggcaccaccaccatcacgctgttcaatcccgactggcaccagggcgtgatcggcatcgtcgcgggacggctgaaagagaaattccaccggccctcgttcaccttcgcgctcgccgacgacagcggccggaccgtcaaaggatcgggccgctcgatcgcgggcttccatctgcgcgacgcgctcgacctgatctcgaagcgcgagccgggcctgatcgtcaagttcggcggtcacgcaatggccgcgggcctcacgctcgccgccgccgacgtgccgcgcttcaccgccgcgttcgaagcggtcggccgcgaatggctgtccgaagaagcgctctcgcgcacggtggaaaccgacggcgaactcgaagacgcctacttcacgccgcaattcgtcgaaatgctggacgcggccgtgtggggtcagggctttccggcgccggtgttttcgggcgaattcgacatcgtctcgcaggcgctggtgaaggacaaacacctgaagctgcaactcgtgcgcggccgccagcgcttcaacgcgatctggttcaatcacaccgacacgctgcccgcccgcaccacggtcgcctaccgcctcgcgagcgacacgtggaacggcgtctcccgcgtgcagttgatcgtcgagcacgcggcgagc

SEQ ID NO: 13511 - DNA, 840 bp, Burkholderia fungorum
atggcccgcgaagaaggcgacgaggaaactctcctcgcctgcgaatccgacgcgcaaggcatcgaacagcgcgtggcggacatggaattccgccgcatgttcgcgaacccggccgatccgaacaatgcgttcctggacatccaggccggcgccggcggcaccgaagcgtgcgactgggcggccatgctgctgcgccaatacctgcgctactgcgagcgcaagggcttcaagaccgaagtgctggaacagaccgacggcgacgtcgcgggcatcaagaacgccacgatcaagatcgaaggcgaatacgcgtatggctttctgcgcaccgagaccggcgtgcaccgcctcgtgcgcaagtcgccgttcgactcgtcgggcggccgccacacgtcgttctcctcggtgttcgtgtacccggaaatcgacgactcgatcgaagtggacatcaacccggccgatctgcgcatcgacacgtaccgcgcgtccggcgcgggcggtcagcacatcaacaagaccgactccgcggtgcgtatcacgcacttgccgtcgggcatcgtcgtgcagtgccagaacgaccgttcgcagcaccgcaaccgcgccgaagcgatggccatgctgaaatcgcgcctgtacgaggcggaaatccgcaagcgtcaggccgagcaggacaagctcgaagccggcaagaccgacgtgggctggggtcatcagatccgctcgtacgtgctggacaacagccgtatcaaggatctgcgcacgaacgtcgaaatcagcaataccaagagcgtgctcgacggcgacctcgatccgttcatcagcgccagcctgaaacagggcgtc

SEQ ID NO: 13512 - DNA, 1566 bp, Burkholderia fungorum
gtgcgggccaccgaataccaaatcatcatgaccgaaccgacccaaccgaacgcggcccagcctaatgtcgtacccgaggtggacgacaacaagatcatcgccgagcgccgcgaaaagctgcgcgagctgcgtgagcaaggcgtcgcctatccgaacgatttccgccccacgcatcacgccgaagatttgcaagcgcaatacgagcactccgacaaggaagcgctcgaagcgaatccgctcgaagtcgcgatcgccggccgcatgatgctcaagcgcgtgatgggcaaggcgagctttgcgaccgtgcgcgacggctcgggtcagatccagttcttcatcacgcccgccgacgtcggccaggaaacgtacgacgccttcaagaagtgggacatgggcgacatcgtcgcggcgcgcggcgtactgttccgcaccaacaagggcgagctctcggtgcgctgcaccgaactgcgtctgctgtcgaagtcgctgcggccgctgccggacaagttccacgggctgtccgaccaggaaatgaagtatcgccagcgctatgtcgatctgatcgtcacgccggaaacgcgcaagactttcgttgcgcgcacgaaggcgatttcgtcgatccgcaagttcatggccgacgccgacttcatggaagtcgaaacgcccatgctgcacccgattccgggcggtgcggcggccaagccgttcaccacgcaccacaacgcgctcgacatgcagatgttcctgcgcatcgcgccggagctgtatctgaagcgtctggtggtcggcggcttcgagcgtgtgttcgagatcaaccgtaacttccgcaatgagggcgtgtccgtgcgccacaatccggaattcacgatgatcgagttctacgcggcgtacaccgactacaagtggctgatggacttcaccgagcagttgatccgccaggccgccatcgacgcgctgggcacggccaccatcacgtatcagggccgcgaactggatctggccaagccgttccatcgcctcacgatcacccaggcgatccagaagtacgcgccgcagtacacgaacgagcaactcgccgacagcgctttcctgcgcaccgaactgaagaagttcggcgtggacgcatcgcagccgcagttcctgaacgcgggcgtcggtgcgctgcaactcgcgctgttcgaggagaccgccgagtcgcaattgtgggagccgacctacatcatcgactacccgatcgaggtttcgccgctcgcgcgcgcgtcggacaaggtcgagggcatcacggagcgtttcgagctgttcatcaccggccgtgaaatcgccaacggcttctcggagctgaacgatccggaagaccaggcggcccgcttcaggaagcaggtcgaccagaaagacgccggcgacgaagaagccatgttctacgacgcggactacattcgcgcgctcgaatacggcatgccgccggccggcggttgcggcatcggtatcgaccgtctggtcatgttgctgaccgatagcccgagcattcgcgacgtgattctgttcccgcatctgcgccgcgaagac

SEQ ID NO: 13513 - DNA, 9858 bp, Burkholderia fungorum
atgctggtcgcggtatcggaaaccgccacggcggcaggtaacacagtatcgggagaaaccggatgggcgcggcaggccgcgcgccagacggtattgcgccggtcgctttcgtgcttcgcgctgcgtcatgccgcgtttggcgcgatgacgctcgccggcgcgctcgtcatctccacgcccgaggcgcacgcgcagatcgtgccgggcggcgcgcatgcgccgtcggtgatccagacgcagagcgggattccccaggtcaacgtgaaccggccgtccgctgccggcgtttcggtcaacacatacggccagttcgacgtccaacgccccggcgcgattctgaacaattcgccgaccatcgtgaatacgcagcaggcaggctatatcaacggtaatcctaactacctgccggggcagtccgcgtcgatcatcgtcaatcaggtcaacagcaataatccctcgcaattgcgcgggtacgtcgaggtggcgggccggcgcgcggaggtggtgattgcaaattcgtccggtctgattctggacggcggcggttttatcaacacctcgcgggcgattctcaccaccggcaatccgacctatggcgggaacggcgccctgaccggtttcgatgtcacggcggggcggatcacggtccagggcgcggggctgaacgcatcgaacgtcgaccaggtcgacctgattgcgcgagccgtagcggcgaacgcggcgatctacggcaacacgctgaatgtcgtcgccggcgcgaatcacgtcgatcacgatacgctggctgccacgcctattgcgggcagcggatcattgccggccgtttcgatcgacgtgagccagttgggcgggatgtatgcgaacaggatttttctggcgagcaacgagtacggcgtgggcgtctcgaatgcaggcgtgctcgccgcgcaggcgggcgacctgacgctgcagtcgaacggccagctcgtgcttgccggcaagaccacggcgagcggcaatctcgccgccacggcggccagtatccagaacagcggctccacgtacgcgcagcagtcggtgacggtcaatacgtcgggcgcgctgtccaacaccggcacgctcgccgcgcagcagaacacgaacatcagcgcagcgagcctcagttcgagcggcacgctcggcgcgggcatcaacggcgacggatcgatcggtcatgcaggcgatctgacggtcgcggcttcgggcgcgctgggtgcgacgggacacactgccgcaggcggcaacgcgacgctgtcgggcgcggcgctgagcctcggcggtagccagacttcagccagcggcaacctcacgttgctggccagcattggcgacatgagtctcgcgggcgcgagcgtcgctgcgggcggtgcgatcaatgccaccgcgcgggggacgctgacgaacgataacggcgcgctttcctccgccggtgcgcaaacggttgcggcgggcgcgctgtcgaatcagggcggccagatcatctcgcagtcgacgctgaacatcggtaccggcggtgcgttgaacaaccgtcagggcatcatccagtcttccggaaaccagacgcttggcgcggcctcgatcgacaataccgcagggcgggtggtgatgctcggcaacggcgctcagagcgtcacggcgaccggcgcgctggtcaatgcgccgggtaccactgcaacgggcgcgccaggcggcgtgatcggcagcaacggcgcgctcggcgtgtcggccggatcgattgcgaaccaggggcagttcaacgcgctgggcgacgcatcgcttcacgcccagtcgatcgacaatcatgcgggcagcgtcacggcgggcggcaatctcagcgcgagcagcacgggcgcgctcaataaccgcgacggtacgctctcaggaacggtgacgaccgtgagcggcgcgtcggtcgacaattccagcggcacggtcgaaggcaatacgctgacgctgtccagtagcggcaacctgaccaatcgcggcggccatatcagccagtccggcaatgcggcgcagcgcattttcgcaggcggcgcattcgacaataccgggggttcgattgcatcgaacgcgacgaacctcgacgtctcggcgcaatcgcttgcgaacgatgccggttcgatccagcacgcgggtagcggcacgctggccgtgactaccacgggaaatctgtcgaacagcgcaggcaaggtggtgaccaatggcgcgctcgacgcgacgggcgcggccgtatcgaatcagggcagtctgagcgcgaagggtgatgcgaccgtgcgggcgcagacgctcgataaccacgcgggcagcatcgtcgccggcggcgcgctggtcgcgtcaggcattggcgtcgtcgacaaccggaacggcacgctttcaggtgcggctacgaacgtgagcggcgcgtccgtcgacaactcgaacggcacgatcgaaggcgacacgctggcgctgtccagcagcggcaacctgagcaatcgcggcggccgcctcacccagtacggcagcgctgaccagacgctttcggccggcggcacgctcgacaacaccggcggtttcgtcgccaccaatgcgaccaacctgaccgtgtcaagccagtcggttacgaacgacaccggttcgatccagcacgcgggtagcggcacgctcgcgctggcctcggcgggcacgctgtcgaatacgggcggcaacgtcgtgaccaacggcgcgctcgacgtgtccggtacggccgtgtcgaaccaggggagtctgagcgcaaagggcgatgccactgtgcgggctcagtcgctcgacaatcatgcggggagcgttgttgcgggcggcaacctcggcgctaacatcgcgggcgcgctggctaaccagagcggcacgctttcgggtgcgaccacgaccgtgagcggatcgtccgtcgacaactcgaacggcacgatcgaaggcaacacactggcgctgtccagcagcggcaacctgagcaatcgcggcggccgcctcacccagtacggcagcgctgaccagacgctttcggccggcggcgcgctcgacaacaccggcggcacgcttgccaccaatgcggcgaacctgaccgtgtcaggccagtcgatcacgaacgacgccggttcgatccagcacgccggcaccggcacgctgaatgtgacgacgcctggcgcgctgtcggatgtggccgggcagatcgcgaccaatggcgcactcatcgcccgctcggccagtctcgataattcgaacggcaccgtgtccgcccagggctcggcacaggtcgatgcgaacacgagcctgacgaaccgcggcggcacgctgtacggtaaagccggcctgacggcgaccacccaaggcgcgttcgacaacacccaagggtccgtgcagaccgacggcaatctgtcggtgaacgcaggcggggcgctttcgaacacgagcgggacgatttcggtgaacggcgcgtccggcaatgccgcgaccgccaccgtgtcggcctcgtccatcgacaacacctcgggcaagctcacgaatagcggcagcggcgcgaccaccattacggccgcgaccggcatcaccaacagcgcgggtacgatgggcggcaatggcgacgtgacgctcggcgcgcagacgctcaccaacaccgccagcgcaaaatttgttgccgcgcgcgtggccagcctgaacgtcacgaaccgggtgaacaattcgggcgggacgatctacggcggtacggcgctgaacctcaaccagtccggtgcgagcgtgatcaacgacagtggccgcctcgaaggtggccaggacgtgtcggtgcgggtggcgtcgctcgcgaattcggcgggcgcgctcagggcaaatcgcgacatcacggctagcggcgtggtcagcggtgatggcaccatgacggccggccggaatctggggctcgccgtcacgggcgactacaccaacggcgcgtcgaacagcctgcatgcggacggcaacatgacggtgtcggccaccggcacgctgacgaacgccggcacgctcgcggcgagcggtgcgttgagcgcaagcggcgcgaacgtggtcaatgcggccggcgcggacatcaactcggcgtcgaccacggtcaatgcgacgggcacgctcaccaatgccggaaggatcgagggcgattcggtcacgacccacagtgcgacgctcgcgaacaccggcacgctgatcggcaacaccgtgcaggtcaacgcggcggacgtgcagaataccggcgcggccgcggcgattgcggccgctcagagtctgaacatctatgcgtcgaactcggtcacgaattcggacggcgcgctgatctatagcggcggcagtctcgcgatcgcgaaggatggcgcgcgcgacggctcgggcatgctcgcgaaccagacggggacgcttacgaacagcgccgcgacgatcgaggcggtgggtgacgtggatatcgccgctcacacggtcaacaacctgcgcacgggggttcagacgcaggcgggcacgccgcagaacaccgggacgaacacgctgacgctgtggaccgcaggcctctccggtgatgacctcggcttttacgacagttcggtctatccgcagtggaactggcggggcggagcgatcggcacggcgaccatcggtgcgctgatgcatccgatcacggtcacggtcccgaaatcgcaggtcgccagcctcgatgccaacgcgcaaacattgtcgtttgcgcagccgctgaccgatacgtatatcagtacctcgaccccgctggtcgaggtctgcaacacccacgatttctgcagccagcagcatgtctcgcagacgcgcaccatcacgaacaacgcaacccagtactacaacagcatcactgacaacggcagcacctacacgatcacgttgtggccggactacaaccccgccacgaacatccggcccgacaacgtgaccgtgcgcaccgatctcggttcggacaatcacgactacgtcgagatgaagcgcgtatcgaccagcaccacatcgactgaccagctgctgagcgccggcacgcccgcgcttctgcaggcgcagggttcgatccggatcaattcggacggtggcgcgatcaacaaccaatcgtcgaccatgaccgcgggcgggaatctcattcgccgcgccgtgggcggcagcgtgaacgactcaggcacggtgctgcagcagaccgtgaccgccgacacacagtccacctattactggcatcagaagaccggcggcagtgacgacacgaagatcgtcgaagacggcatcacgcagagcacgaccacggtcgcggcgctgcccgcgattgcgaccgccaacggcgcggtgcagacgagcggccagaccatcagcgtcgccagtgtgaaccgggtcggccagacagtcgtgggttccggcgtgacgggcggcaacgcgacgggcacgcaactcggcggcgtgaacggacaggccgcggacgcgggcacggcaggcggcgtgactggccagacggcgagcgcgaacattgccacaggcgtgagcggcctcaccgtacgtccacagacactcggtggcgcggcaggcggcatcccgaacctgaagctgccggtgaacagcctgtacacgtatcagaccgcgccaggggcgacgtatctggtcgcaaccgatccacgcctgacgacttacacgaaattcatctccagcgactatctgctgggcgcgctggggctgaacccgcagaccacggagaaacgcctcggcgacggggcttatgagcagcaactcgtgatgaaccaggtcacgcagttgaccggccgaacgttcctcgccggctattcggacaatctggatgagtacaccgcgctgatgaacagcggtgtcacgtatgcgaagtcgttcggactcacgccgggcatcggcctgaccgacgcgcaaatgaagcagctgacaaccgacctggtgtggctcgtgtcgcagaccgtgacgctgcccgacggcacccagcagaccgtgctcgtgccgaagctgtatcttgcacaggccaacacggtcgatctgcaggacagcggcgcgctggtcgccggtaacgcggtgagcctgaatgcgaccggcgacgtgagcaacagcggtcacattgtgggggacatggccactgcggtgctcggcaacaacatcgtcaatagcggtgtgatcggcagcggcggcacgacggtggtgtcggccgtgcaggacgtgcgtaacacgagcgggcgcatcggcggggtgcagacggtggttcaggccgggcgcgatgtgatcaacgaaacggcgaccgcgagtgtgtcgaacacactgcagcaggccggtttcacgtccagtgcttcttcgcaaaacatactggccaccggcacgatttcggcgtcggagaatgcggtggtgctggcgcagcgcgatgtgaatctcgccggcgccgccatcgagtcgggcaacagtgcctttgtgggcgcgggccgcaatatcaacgtcggcacgacgacgcttggcgcgacgcaggatgcgggtactaacgacgggctcaacggcgggcataccaccacgacacagaacgtcggcagcatgatcacgacgggcggcaacctgaccacggtgtcgggcggcaatacgacgctcaccaatgcgaccgtcaggacgggtggcgatgcagcgatgattgccgccaacaatctgacgctgaccgccgcgaccgacacgcgttcgcacaaagagcaatcgctcggcggcccgcagtcgaagcacaccggttcgagctacgacgagacggcgcagggtagcaatctgaacgccgccagagatctgacgctcggggccgggcagacggcagcggcggctgctctgctgaaggagcatggcctcgtcgcggcagcggacgcgcccatcggcgcaggcaatctcacggtgctggggtcgagcgcgaccaccggggcgagtgccgcagacggtagcgtgagcggaggcgccgccacgctggcggcgaccggcaatgtgacgatcggcgcggtgaccgaaacgcacgactcgcagagctggtcgcacaatgaacactcgggcttcatgtcgagcgacaagacgaccgaccagacatcgtcgcatcaggtgatctccgttggctcgacggtctcgggtgatacggtgagtgcgaatgccggtcacgatctgacgattgcgggctcgacagtcgcctcgacgaacgacatgtcgctgtcggccgggcatgatctgacggtgacgacgacgcaggacaccagtcagagcagccgttttcaccaggaacagaagtcgggtctgggcggcacgggcggcgccggcatttcgtacggcacgagcgaccggaaggaaacgacgaccgataactcggtcacgcagaacggcagtctggtgggcagcacggacggcagcgtgacgatgacggcgggcaacggtttgcatatcacgggcagcgatgtgatcgcggcgcgggatgtgacgggcaaggcggcgagcgtcacgatcgatgcggcgacgggtacgaatcaccatgacgagacgcaggagacgaagacgagcggcttcacgcttgggctgggcggtagtgtgggggatgcgatcaataacgcgatccagcagtcgcaggcggcgggtagcggtgcgggtgattcgagggcgaaggcgttgcacggtattgcggcggccggaaacgctgcaatggctgttgcaggtgtgaccggtggctcgctcgccggttcgaacccgagcatttcggtgcagttgagctacggcacgagccagtcgaagaataccttcacggaagaccagacgatgcagaccggctcgaccatcaaggccggtggtacggcctcgttcaccgcgaccggtggcggtgatgggccggcctcgccgaataatggcaatgtgacgatcgccggttcgagcgtcagcggcaacaacgttgcgctgagcgcgcagaacgaggtgaatctcatcaacacgacgaacaccgattcgacgcgcagcacgaacaggtcgagtagtgcgagcgtaggggtttcgtacggcaccaatggtttcggtgtgtcggcatcgatgtccaacgcgcacggcgacgcgaattccgatgcggcgatgcagaacaacacgcatgtaagtgcggcaaacaacgtgtcgatcgtctcgggcggcaacaccagcatcgtcggcgcggatgtgagcggcaatcacgtgtcggcggatgtaggcggtaacctgaacgtgcagagcgtgcaggacacgaccgtgagcgccgcgcaccagtcgagcacgagcggtggcttcagcatcagtcagggcggtggcaatgcgagcttcagcagccagcacggcagttcgagcgggaactatgcggcggtgaacgggcaggcggggattcaggcgggcaatggcgggttcgatatcaatgtaaagggcaacacgaatctcacgggcgcgtacatcgcgagtacggccgatgcctcgaagaacggtttgaccaccggcacgctgacggtgagcgatatccagaaccactccgattacagcgcctcgagcggcggcttcagtgcgggcgcggggatcggttcaacgggcaaggcggtggggccgggttcggtcagcggtgcgggtggcgtgacgccgatgatgtcgcaacacgatagcggcagcagcagtgcgacgacgaaaagtgcgatcagtgccggcacgatcagcgtcacggacgcggcgaaccaggcgcaggatgtggcgggtatcaatcgcgatacgacggacctgaacggcagggtgtcgaagctgccggatgtcaataatctgctgtcggcgcaggcggatacgatgaatgcggcgcaggcggcggggcaggttgtggcgcagggaattggtgcgtatgcggatatgaagcgtgatcaggcatctgatgaagcgactgcagcttcttgggatgagggtgggacggatcgcaccttgctgcatatcgcgggcggtgcactcatcggcgggctcggtggtggtggaattggaacggccctgcagggtgcagcaggcgcggggctgtcggcagcgatggcgaagcaactggaggatatctacaagggcgtaggatcagccaccggttcggaactgctgggcaacattgctgccaatgtggttgctggcgtcggcggtgcgctggtcggtggcggcgttggggcgagcacggcatcgaacgtcgagttgtataaccaggcggcacaccggaagccgaaagacctcgtatcacaggtgtgcccagcaggggcgcaatgtagcgacgcgacgttgaacgcggtgattcaggcgcaaggggacaatgcggcggtggcctcggggaacatgaagacggcggccgcttacggcgctccggctgctgctgtgattgctcttgggcctgaagctgtgacggctgctgcccttgcaggtggccttgactacacgggaggtgtttacagttatgcgacagggcttacaaaggacgcgccaagcgttacgaattcgtatattgccggggttgtgggtggtctggcctatcctctcgcaattggagatgcagcgattgccggaatgggaacggccgggaagattgcggccaatgcatataacgccggggtaacgggtgttggtgcgtttggtacggccgcaatgactggaggtaatccggatatctctgccggctttgccactggatctgttgcaacaggcagcttggtaaaggcgatgttccctggtcccattggtaacttcttgaacaacttgattcaaggcgctgcggggccgatacagaatgccgtaacccaaggtgggtcaaataaa

SEQ ID NO: 13514 - DNA, 2757 bp, Burkholderia fungorum
gtgggacgcgcgcggtcctccatgcgggcaggccgcgcaagcgtcctaacattcggttacgcatgtcaggttgctctggtggaaactgcggctacactggcgtctcccgttttcctacggattgccatgcaatcatgcccgttgcggcgtgagtccggggctgcgccgttcaacggcgggcagccggcgactcacgccgccttctacttttccccttgccgtagcgagcgcgacgcgcgccgcgccgtgcgcccgccactcgcggcgcggcttggcgcatgggccgcagcgctttgcgccgcgctgatcctgtgccttggcgggatgcccgcgaatgcgctcgcggccggcgccgccaccggcacgccggttattccggccctgcagagtctgatcaacagcgcgacggtgactgcggcgccggcgtcttctgcttcaggcgcatcggcggcggaggtggcatccgcgccctcgccggcgagtcaggcggaactggcgcgttcgctcgacagcgtgatctccacgctcgacaacgaccggcaacgcaccgcgctcgtcgcccagctcaaaaaactgcgcgacgtctcgcagaacgttgcgccggccgcgcccgtgcaaccgagccctggcttgctcggcgcgatcgcgtccggcattgcgtcgttcgaatccgacgtgcatcaagggcgcacgccggtccgctattggggcggacgcttcaatgccgccggcaacgagctctacacgatcatttcggggcaggggcacgagagcttcggccgcattgtgttctcgatgattgcgatgctggcgggctggggcgcgtgcgccggcgcgctgatctacgtgcagcaccggttgtaccggcgcttcggcatcgtcatggggctcaatccgaaccccaccacgcgcgagttgctgatcttcgcgctgcgccgcgtcggcccgtggatcatcgcctttctcgccgcgctgctgttcgtgcgcgccatgcccgacgcgctcggccgcacgctcggcatggtggttgcctatgcgatcgttgcgggtgcggtgttctcggcgatctgtctgatcatgttttcgctgttcggctcggggcatcggcggatcgcggtgcgcctgctgatcgatcatgcgcggcgcgtgctgttcgtggtcggcgtgtgcggcgcgctcggcgacgccgccgtcaattacgacgtcgcgcatcaactcgggccgaatctcgccgcattgatttcgaccgcggccaacatgacggccgccgtcctcaccggctacttcgcgctcgcgtttcgccggccggtcgcgcatctgatccgcaaccggccctacgagcagcgcaccacccacaaggccgcgaccgacgccttcgacgtactcgccgcgctgtggcacgtgcccgtgctggtgctcgccaccgcgtcggtggttgccacgctcggcggctcgggttcgagcgaaaacgtgctgcagatctcggtggtgaccgcgctgctgctggtgctggcctttttcgtgtcggccatcgtgttgcgcctgacgcgtccgcgcagcgcgcgcacgcggcgccgctcgccgtatctgacgcgcctgctgcgttttttcggcacgctggtcacgctgtttgtctggctgtttttctttgaactcgcggcgcgtttgtggggcgtctcgctcgctgcggtggtcgaagaaaacgtggcggcgcgcggcatcgcgcatgcggtgacggcgatcatcgccaccgtgttcattgcgtggctgctgtggattctggtcgataccgcgatcacggaagcgctcaatccgggggggccgcgcaacaagtcgcgcgcgccgagcatgcgcgcccgcaccatgctgccgctgttgcgcaacgtgctgctcgtcacgatcatgacgatcgccggcatcgtgacggcggccaatctcggcatcaatgtcacgccgctgctggcgggcgccggcgtgatcggcctcgcgatcggcttcggcgcgcagtcgctcgtgaccgacctgatcacggggctgttcatcatcatcgaagacacgatttcggtgggcgactggatcgacgtggacggcggccacgcgggcacggtcgagcatctgtcgatccgcacggtgcggctgcgcgacgggcaaggcgcgattcacgcgattccgttctcgcagatcaagatcgtcaagaacctgtcgcgcgatttcgcgtatgcggtgttcgaagtgcgcatgtcgttctccaccgacgtcgatgagatcacgcagttgatccgtgaggtcggcgccgatctgatggccgatttccgttaccggcgcgagatgctcggaccgatcgaagtgtggggactggaccgtttcgatccgaactggatggtcgtgaaaggacagatcaagacgcggccgctgcagcaatggagcgtggcgcgcgcgttcaatctgcgtctcaagcgcaagatggacgaagcgggcatcgagattccggtgccgcagatgcgtgtgtatacgtcgtcgaaggatagcgaagggcagcctttgcaggacgacgagatgtcggggttgggcccgcgtgggcatgccgagagtcagccgggggcgtcggcgtccgcatcggcggcgcgggccgtgcatccgccgcttgcggtggcgcgcgacgtgtcgcacgaaccgcggccggcgccgccgccgaccgggcagacagcgccggttccaccgcagattcctacggccggcgaggcgggcgggaagacc

SEQ ID NO: 13515 - DNA, 957 bp, Burkholderia fungorum
atggatattcaaatgttcaagtcgcttcatagataccgcgccattgcgctcgtttccgccgcgttgctgatcggctcgacggcggcttcgtcggccttcgccgatgcggggccgccggaagtgtcgagtggcaagaccgcgctggtgaaacacccggacgtgtcggtgggcgcgcagtacgacaccacccatgtgtacgtcgcctcggccgacctcgatgcgttcgtcaacagctttctcgcgaccttcggcggcaaggcctcgccgcgcgcggtcttcaccgtgacgccgacgccgagcaagaccgcctcgcaatatgtgcagacgccggtcggcatgctgtcggtgttcggcttcgagacgccaattccgtatccgttcggcaatgaacgcaccggctacctcgtcacggacatcgatcagggcgtgaaagcggcgcgcgccgccggcgccgacgtgctggtcgagtcgttcgacgatccgatcggcaaggacgcgatcattcaatggccgggcgggctgaccatgcagctctactggcacaccaaggcgccgaattacgcgccgttgcaaagcgtgcccgacaaccgcgtgtacgtgtcgcgttacgaagcgaacaacttcgtgcgccgctggctgcacttctcgcatggcaaggtggtgtcggacaatccgcgcgcggacgccggcgtgatcggccggccaggcgaaacgattcgcgagatccgcatcgcgtcgggcttcggccgcatgatcgtgttcgtgacggacggcaagctgccgttcccgttcggacgtgagaccaccggctacaacgtggacgacgtggcgcagacgctggagcgcgcgcaggcggccggcgcgaaggtgttgtatccggcatatgcggtcggatcgggcaagaccgcgatgctcgaattcccgggcgggtacattgccgaagtgcacgatggcaag

SEQ ID NO: 13516 - DNA, 987 bp, Burkholderia fungorum
gtgcccattgccgcctccgtctctcatgggtttgccgccagcatgaaatacaaagactattacgaaatcctgggtctcgagcgaagcgcgtctcaggatgacatcaaacgttcgtatcggaaactcgcgcgcaagtatcacccggacgtcagcaagcacgccgacgccgaagaacgtttcaaggaattgggcgaagcctacgaggtgctcaaggacccggagaaacgcgccgcctacgaccgcatgggcagcgactggcgcaacggccaggacttccagccgccgccgaactgggacgaaggtttcgaattcagcggcgcgggcagcgggcccggcgaacaagccgacttccacgacatcttcgagaagatgttcggcggcgcgcgcggtgcgcatccgcatgcgcggcagcggtccttcgacgcgcgcggcgaagaccatcatgccaaggtattgatcgatctcgaagacgcctatcgcggcgcccagcgcgcgatttcgctgcaaatgccggtggtcgacgcgcaaggccatgtttcgctggaaacgcgcacgctcaacgtgaccattccgaaggggatccgcgcgggtcagcatctgcggctgagcggccagggcgccgccggcgccacgccggaaacggccggcgacctctacctggaaatcgcctttcgggaccacccgcgttttcaggtggacgggcgcgatgtttcgctcgagttgccggtggcgccgtgggaagcggcccttggcgcgaaagttaccgtgcccacgcccgacggttccgtcgagatgacggtgccggcgggttcagccagcggcaggcgcttgcggctcaaaggcaagggcattccggccaacccgcctggcgatctgtatgtgattctgaacattgtcctgccgcctgcggataccgaatcagcgaaggccgcttacgatgcgatgcggcaggcgttcaatttcgatccgcgcgcgcacttctatcgg

SEQ ID NO: 13517 - DNA, 1215 bp, Burkholderia fungorum
atgctgctggcgatagcgatcgccggcacgaccgcttccgcggctcacgcgcaaagttcggtaacgctgtacggcctgatcgaccaggggttcaactacgtcagtaacgtgcagacgggccgtgccggcggcgcgctcgccggcaaacaccaatatgcgatgtcggacggcgcaacgggaatcggcggcagtcgctggggcctgcgtgggagcgaagatctgggcggcgggctacgcgcgatcttcacgttggaaaacggcttcaacatcaacaccggcggtctcgcgcagggcggcctcgagtttggccgccaggcctatgtgggcctcgccaatccattcgggcaagtgactttcgggcggcaatacagcatcgtcagcgacatgctcgcgccgctttcggaagccggagaagtgcccggccacatgggcgcgaaccccgacgatttcgacgatctcggccactccatccgcatcgacaacacggtcaaattcagaagcacgccgtatgcgggcgtgacgctgggcggcatgtatgcggtgggcggcgtggcgggggcgacggcccgcaaccaggtatgggcactcgccgcgtcgtacgcgaacggaccgtttgccgcagccgcgggctacctgaatgcacgcgacccgaatctgtcgtacttcggcacggccggcaattcgggcggcaacacggccaataacctcggctcattcggctcggctaccgccggtcagtcaaatccgatctatgcgggctttgcatccgccgccacgctgcaactgctgatcgcaggcgcgaagtatcacattggcccggcaagcatcggcgcgaccatttcgcatgcgggcttcggcggcctcggcgacaccagcgccggaccgaacaccttgcactatgcgggcagcgctgttttcaacaacggcgaagtcaacgcgagttacgcattcacgcccgccttcagcgtgaacgctgcgtacagttacacgcgtaaagcgagcgtcggcgtgtatgacggcgcgacctatcagcagggaacgctgtcgagcgcgtacttcctgtccaagcgcaccgagttgtatgcgctcgccatctatcagaaagcaagcgggacggattctctcggccagacggccgtcgcgtcgatcacacaattgacgccatcggcgagcgatcatcaactgctcgtacgtctcggcatactgcacacgttc

SEQ ID NO: 13518 - DNA, 450 bp, Burkholderia fungorum
atgaatgcaggcgatatctgtacaagagacgttgtgacgtgcgggctgaacgcgaccatcctcgaagcatgcaagatcatgcgtgatcgtcacgtgggcgatattgtcgcggtggagaaaagcgcggatggaaagcttcatcctcgcggtctgctgaccgaccgcgatatcgtgctcgcggtgctcgcacgggaagtcgatgcgttcgggctgtttgtcgccgatgtcatgtcttcgccactcatcgtcgcgtacgaaggcgaagacgtgtggcaggtcgtgaagcggatgcgtctgcatgccatacggcgcatgcctgtcgtcggcaatgcgggcgaactggtgggactgctttcgttcgacgatctgctcgatgcgacatgcgtcctgctcgccgagctatcgttggtgacggcgcggcagccgcatttcgaggagaagcagcgagcg

SEQ ID NO: 13519 - DNA, 1806 bp, Burkholderia fungorum
atgacgttttcttccggtcttcccgaccgcggttccgattctccggcgcgcggtcgttccgccactaccgtgaaaaaggagtcaagcatggccagcaacaccattgccgcttatctcgcccgcacgctcgccgcagcgggcgtccaacggatctggggcgtgacgggcgacagcctgaacggactcgcctacagtctcgatcaggtcggctcgatccgctggatgcacacccgtcatgaagaagcggccgccttcgcggccggcgccgacgcggcttcgagcgggcgcctcgcggtgtgcgccggcagttgcggaccgggcaacctgcatctgatcaatggcctgttcgattgccatcgcaatcaccagccggtgctcgcgatcgcggcgcatatcccgtcgagcgaaatcggcctcgggtacttccaggaaacgcatccgcaggagctcttcaaggagtgcagccactatgtcgaactggtgtcctccgcggcgcagtttccgcgcgtgctggcgcgcgcgatgcgcaccgcggtggaggagcgcggcgttgcggtgatcgtgctgccgggcgacgtggccttgagcgagggaccgtccgaagcgccgtcgtggacggaaagcgcgccgccgcgaatcgtgcccgccgaagccgatctcgatcggctcgcggcgctgctcaatgcgtccgacgcggtcacgatcatgtgcggcagcggcacgcagggcgcgcacgacgaagtggtcgcgcttgccgacacgctcggcgcgccggtggttcacgcgttgcgcggcaagcagttcatcgagtacgacaatccgtacgatgtcggcatgaccggactgatcggcttcagctcgggctatcacgcgatgatgtcgtgcgacacgctgctgttgctgggctgcgactttccctaccggccgttttatccgcccgacgcgaagatcatccagatcgactggaagggctcgcagctcggccaccgcgcgccgctcgcgctgggcctcgtcggcacggtgaaggaaaccgtcgcggccaccttgccgaagctacagcgcaagaccgaccgcggtttcatcgacaacgcccgcaagcactacgcgtccgcgcgcaaggggctcgacgatctcgcgacgccggccggcgcgggccgcccgatccatccgcaatatctggcgaagatgatcgacgagtccgcgagcgacgacgcgatcttcactgccgacgtgggcacgccgaccgtctgggccgcgcgctatctgaccatgaacggcaagcgccagttgcacggctcgttcaaccacggctcgatggccaacgcgatgccgcaggcactcggcgcacaaggcgcgcatccggggcgccaggtcgtgtcgctgtcgggcgacggcggcctgtcgatgctgctcggcgatctgctcaccgcgcggcagctcgacctgccgatcaaggtggtggtgttcaataacagcctgctcggtttcgtttcgatggagctgaaggcgggcggctatctggacaccaacgtcgatctcgccaaaaccgatttcgcggcaatcgcgaaaggggcgggtattttcggtctgcgtgtcgaagagtcggaagacgtggcgggcgcgttgaggcaggtgttcgaccatcccggcccggcgctgctggacgtggtcacgtcgaagcacgaactggccatgccgccgacgatcgagctcgcgcaggccaagggcttcagcctctacatgatgcgggcgatcctcaacggacgcggcgacgagatcgtcgagctggcgcgcaccaacttgcgc

SEQ ID NO: 13520 - DNA, 2394 bp, Burkholderia fungorum
atgacagcgcaggcaccggacgccacgcaatgggaggccaacgacgactgggcccggcaatgggttgcgtccactgtggactactccgtttttcgtatcacgaccgacggcaggattgccagctggaacgagggtggtatccggatcgagggctaccggccggcggaaatcatcgggcagcatttctccgttctctacaccgatgacgaccgccgggacggcatccccgaagcagtgatggagagcgcccggcgccacggacgtcacgactcggaaggatggcgccagcgcggggatggcgggacgttctgggcaagcgtggtgactaccgcccttcgcgaccggcggggcgagttcagcggagcggtacaggtagtgcgcgatgtgagcgagaaccgccggtcacacgaggccgtgattgaaagcgaacggcgtttccggctgctggtgcagggcgtgacggattacgcgatcttcatgctctcgcccgaaggctgcgtgacgaactggaacagcggcgcgcggcggatcaagggctacaccgaggaagagatcgtcggttctcatttttcccgcttctatacgccggaagacgccgcggccggcttgccgcagcgcggtctgcaagccgcggcccgcgacggtcgcttcgaggcggaaggctggcgggtccgcagcgacgggacgaccttctgggcccatgtggtgatcgatgcaatctacgaagacgacggcacgttgctcggcttcgcgaagatcacgcaggacatcaccgagcgccgtcaggcgcacgagcttctggaaaagacccaggccgcgctgttccaggcgcaaaaaatggaagcgatcggcaagctgacgggcggcgtcgcccacgacttcaacaacgtattgcaggtgctgcgaggcaatctcgaactactcgaaaacaggcatagccgggacgtctggagcagggagcggctcgctcacgccatcgatgccgtcgagcgcggcgccaaactggcgtcgcaacttctcgcatttggccggcgccaggcgttgcgccccgttgtcgtcaacctggccgcgatggtgcgcgggacggacagcatgctcgcccgcgcgctcggcgagacgatcaatgtcgaaacggtcgttgccgccggactatggaatacgctggtggacacccaccagcttgaaaatgtgttgctgaacctggcgatcaacgcgcgcgacgcgatgcccggaggcggccgtctcaccattgaactggccaacgcaatgctggacgaccggtacgtgcggccactatcggacgtgcccgcggggcagtacgtcatgctgggagtgacggacacgggcatcggcatgccgccggagatcgtcgagcgtgccttcgatccattcttcacgaccaagccggaggggcagggcacggggctcggcctgagcatggcttatggcttcgtcaagcagagcggcggacacatcaggatctacagcgaagtggggcatggcacgacggtccggatctatctgccgagatccatggataccgcagtcgatctgctggcaagacacgagcacccggtgaaggtgggcggccgcgagaccatcctggtggtggaagacgacgcgaacgttcagtcgacggtcgtcgatatgctgacggaactgggttattccgttctcaaggccgacaatgcggagcaggcgctgaccgtgctgcgtagcggcattcacatcgacgtgctgttcacggacgtcgtcatgcccggtccgctgcgcagtcctgaaatggcccgccaggctgcgttgctgctgccgcacctgaaaatcctgttcacctccggctatacgcagaatgcgatcgtgcatgcaggacggctggacgccggtgtcgaactgctcagcaagccctatagtcaggaagaactggcccacaagctgcgctacattctcggcacacccggggaagcgattgccgcgaccgccggcagtggcgacaccgtgcaagccggtgcagtcccggtgccggaaggaccattgcatatcctcgtggccgaagacgacaccgactctctggatgcggcctgtgaaattctccagatgctcggccacgatgccgcgaaggccaccgacgcgacgcaggcgatggagcggctgcgcgccaggcgcttcgatgtcctgctgactgatctgaacctgcccggcgcctccgggatcgaactcgcgaaacaggcggtggcggtgcatccgcgtctgcacgtggtgtttgcatcaggagacgaattgccggacaacgtgttgttcgacttctcacacaacagattgcgcaagccctacgcggtgaacgagcttgacgatgtgcttcgggcgattcagcgcgcattgcacgctgccggccgt

SEQ ID NO: 13521 - DNA, 1008 bp, Burkholderia fungorum
atgtctgaagctccttccctgtcttcgtcggtcgtcgcgctgcgcggcacgccgctcattcatccagcgcgcaatccgggggtcccgttcgacgcgtcgtggctcgacggtttgcgcgtcaaccagtcggcggccgaacggcgcgcggtaacgctcgccacgcgccgctcggtcaagaaggacgcgcaggcggcctggcttctgaaggccgtcacctgcatcgacctgaccacgctaagcggcgacgacaccgaagggcgggtgcgccgcctgtgcgcgaaggcgcgccagccggtgcgcgccgagattctggaagcgctcggcatggagccgcgcggtatcaggaccggcgcggtctgcgtgtatcaccgcttcgtggcggcggccgtcgatgcgttgcagggcagcggcattccggtcgcggcggtgtcgacgggttttccggccgggctgattccgcacccgctgaagttgaaggagatcgaggcttctgtcgcggacggcgcgcgggaaatcgacatcgtggtgacgcgcgaatacgtgctcacgggcaactggcaggcgctctacgacgaagtacgcgagtttcgcgcggcctgcggtcccgcgcatctgaaggcgattctcgcgaccggcgacatccgcacgctctccaacgtggcgcgcgcctcgatggtctgcatgatggctggcgcggatttcatcaagacctcgaccggcaaggagggtgtcaacgcgacgctcgacgtgtcgctcgtgatggtgcgcatgatccgcgaataccagcagcgcaccggcatgccgatcggcttcaagccggcgggcggcgtctcgagcgcgaagtcggtgctggcgtaccagatcctgatgaaggaggagctaggccgcgcctggctcgaacccgagctgttccgcatcggcgcgtcgagcctgctggccgatatcgaacgccagctcgaacatcacgtgagcggccagtactccgctttcaaccgtcaccccgtagcc

SEQ ID NO: 13522 - DNA, 486 bp, Burkholderia fungorum
gtgctgaagaatctggacccgctgttgaacgccgacgtgctgtacgcactgcgcgcgatggggcacggcgacgagctggtgctgtgcgacgcgaattttcccgccgactccgtcgcccgcgccacggtgaccggcaagctgctgcgcctcgacggcgtggacgcggcgcgcgcgattcgcgcggtgctgtcggtgctgccgctcgatacgtttgtcgacgctccggcgctgcgcatggaagtggtgggcgagccgcatacgttgcccgcggtgcagcgcgaagcgcaggccgaagtgaatgccgccgaagggcgcgacgtgccgtttgcgtcgattgaacggttcgcgttttacgagcgtgcgcgccgggcttactgcgtgatcgcgacgggcgagcagcgcggctacggctgtttcgtgttcaagaagggcgtcctgctcgcccaggacgcgccctcgaccgcattgcagcaaggagcgcggcaa

SEQ ID NO: 13523 - DNA, 546 bp, Burkholderia fungorum
atgctccgtttcaatcgttgcacgctcgaagcacgcgtggtcgacatcaccgaactcgccgtggatgcgatcgtcaatgccgcgaacacgtcgttattgggcggaggcggcgtggatggcgcgattcatcgcgcggccggcaaggaattgatccgcgagtgcgagacgctcggcggctgcgcgaccggcgacgcgaagctgacacgcggctaccgcttgccggccagatacgtgattcacgcagtgggtccgcgctggcggggcggcgggcatggcgaggccgatttactggcgtcctgctaccagcgttcgctcgaggtggcgcgcgaggcgcagtgcacgagcattgcgttccccgcgatcagttgcggtatctaccattttcccgccgacgaggccgtgcggattgcgctcggcacggtgctcgccaccttgccgcgtacgccgcagatcgaacaggtggtgttcgcctgtttcgacgacgccatgttcgcgcgctacgaagctgaattgatgcgccgtcaggcgccgccttcgaagccggtc

SEQ ID NO: 13524 - DNA, 942 bp, Burkholderia fungorum
atggatattacgcttcccttccgctacaggaagctcggctatgccgcgatcaatgtgactgacctggaccggtcagtcgccttctacagggacattgtcggccttgagctcatgcagaccgaggacgatgtcgcttatctgcgatgcagtcgggaccatcacagcatcctgctctgtcaggcagaagagcacggactcaagcgtgttggtttcgaactggagcaggaaagcgacgtgcgcgctgccttcgaccatttcgagcggctcgacatggcgccggtgtgggtgtcgaaagaggaggcccgccagatgaaacagggtctgggcttgcgtgtgcgggaacggcacagcggcctgctgttcgagctgttcgcgggcaatatgcatgtggcccggccgttcgtgcagacggtcgcgaagatcgcacgtatcggccatgtggtgattggcgcagaaaacttcgaggcgagccgggattcgctggtgcgtgatttcggcttcaggatttcggatctgatcgaagatcgcattgtgttcatgcggtgccatccgaatccgtttcaccatacgttcgcggtcgggccggcgagcagcagtcacttccatcacgtgaacttcatggtgacggacatcgacgacatcggcaaggcgctctaccggatcaggaaacacgatgtgaaggtggtgtttggcccgggcaggcatccgccttcggacagcattttcttctatttcctcgatccggacgggatcaccgtggagtacagcttcggcatggaggaatttgcggagcacggtgcgcggccgccacgctccatggagcccgtgccggagtcgctcgatgtctggggcgcggtgccggacggacagttcggccgcagtggtccgattgaacgggaagcggtcgaagtttccactcaaaaaatccagaaggtggttggt

SEQ ID NO: 13525 - DNA, 789 bp, Burkholderia fungorum
atggcaaaaatcttctgcgttgcgaaccagaagggcggcgtcggcaagacgacgaccgcagtcaatctggccgcgagcctggcagcgcagggacagcgagtccttctcatcgatctggacccgcagggcaacgccacgatgggcagtgggatcgataaggctgcgtgcaccaacaccgtctacgaagtgctggtggacggcgtcgcggtggccgatgcgcgagtgcggccggaggccgtcggttatgacgtgctgccggcgaaccgcgaactcgcgggcgccgaggtcgaactggtcagcgtgcagaaccgcgagcgtcaattgaaggtcgcgctctcggcagtcgaaaacgaatacgattttgtgctgatcgactgtccgccggctttgtcgctgctgacgctcaatggcctgtgcgctgcacacggcgttgtgattccgatgcagtgcgagtacttcgcgctagaaggtctgtcggacctggtcaatacgatcaaacaggtgcacgccaacctgaatcgggatctgaaagtaatcggcctgctgcgcgtgatgttcgatccgcgcattacgttgcaacagcaagtctcggatcaactgaaagagcattttggcgacaaggtgttcgacgtcgtgattccgcgtaacgtacgtcttgccgaggcgcccagctatggtttgccgggcgtggtattcgacagggcgtcacgcggcgcgcaggcatacgtgcagttcggcgcggaaatgattgagcgggtgcgcgcattgaatgacgcgccccaggcatcc

SEQ ID NO: 13526 - DNA, 504 bp, Burkholderia fungorum
atggaaatcggacaatatcaaccgaatctcgacggcgacggactgcgtatcggcatcgtccaggcgcgctttaacgaacccgtttgcaatggtctcgcagactcctgcatcgaagaactcgaacgcctcggcgtgacgggtgaagacgtgctgctcgtcaccgtgccgggcgcgctggaaatcccgctggcgttgcaaaagctcgccgaaagcgcgcaattcgacgcactgatcgcgctcggcgcggtgatccgcggcgaaacgtaccacttcgaactggtgtcgaacgaaagcggcgcgggcatcacgcgtatcggcctcgacttcggcattccggtcgcgaacgcggtgctgactaccgaaaacgacgagcaggccgttgcacgcatgaccgaaaagggtcgcgacgcggcgcgcgtggccgtcgaaatggcgaatctcgcggtcgcactggaacaactcggcggcgatgacgacgaggaagaagacgaagaggaagaggca

SEQ ID NO: 13527 - DNA, 201 bp, Burkholderia fungorum
gtggagccgaacatgaacaaggaccaggtgaagggtgtgaccgagcaagtcaagggcaaggtcaatgaagcggtcggcaaggtcacggacaacccgggtaaggagttgaagggcgacctgcaacaaggcgcgggcaaggtgcaaaaggcctatggcgacgctaaggaagacgccaaggacaatgccaagcgcaacgcgccg

SEQ ID NO: 13528 - DNA, 1008 bp, Burkholderia fungorum
atgaatctggttacgacgcttcgccgcgggcatcttctgaagcacaacgatctctcgggcgtcggtctggaaatcggaccgtatgaccagccgaccgtcttcaagtcggaagccgacgtgcggtatctggactggaaagataaagcgcaactggttcaggagtgcacgcacccggatatggtgatcgacatacccgaaatcgattatgtggttcattcgaatcggtacggtgactatatcagcgataagttcgactacattatcgcgaatcatgtgatggaacatgcgccgaacatgattcaatggctgtccgatctgtgcgacatgctgcagcccggcggaatcctctttcttgcgctgccggacaagaagttcagtttcgacaaatatcggcaggatacggcgctgagccatttcgtggccgagtatctggccggcgtggaagaaattccacgcgaacatcaaatcgaatgcgagatctattacgacgaagcattcgtcaaccggcccatgcaggtgtcggacaaactggacatgaaccgcatcagggagaagctgaaggcgcctccgcatgtcggtattcacagccatgttttcgaaagcggcacgatcgtgtccaaggtcttgaaacctatcctcatgatgggtttcatggaattcaatcttgccgacttcgtgcccgcgcgcggagagaccggcggtgagatgatcattgtccttcgcaaagaacctccgcgcgtggaactcacgaccgaagagttttacaccgcgccaatggacacgacgaatatgtcgaacacagtcgatgcagcggggcggcttgccgaggccgagaaagctcttgcggaattgcgagcgagacttgctgtgatgcaggaggagatcgcatcgaggacttcgacgatcagggcactcgagtcgtcgacctcatggcgactcacggcaccgctgcgcgcggcggtgacaaagctccgggcgcttggggcgggtgggcgaaacatttcgtat

SEQ ID NO: 13529 - DNA, 1935 bp, Burkholderia fungorum
atgtcgctttacaccattaccggagcccaactggccttcggtcacgtcgcgttgctcgatcacgcggatttctctctcgaagcgggcgagcgcgtcgggctgatcggccgcaacggcgcgggcaagtcgtcgctgctgaagatcgtcgccgatctgaccaggcctgacgacggcctcgtcacgcgccagcagaacctgaccacggtttacgtgccgcaggagccggagttcgatacggacgacacggtgttcgacgcggtcgccgccggcctcacgcacgcccgcgcgctgctggacgaatacgacgcggtcgccaaccagctcgccgacgagccggaaggcgcggagcacgacgcgctgatgtcgcgcatgaacacgctgcagtcgtcgctggacgccgtggacgcctggaactggagcacccgcgtgtcgaccacgctgcagcagatcggcctgaacggcgaggcgcgggtgggttcgctgtcgggcggcatgcaaaagcgcgtcgcgctggcgcgcgcgctggtcgtgcagccggacgtgctgctgctcgacgagccgaccaaccacctcgacttcgaaggcatccgctggctcgaagatctgctggtctcgctgcgcgcgggcctgcttttcattacccacgaccgggcgtttctcgatcgcgtcgccacgcgcatcgtcgaactggatcgcgggcgcctgctgtcgtatccgggcaatttctcggcttaccagacgcgcaaggcgcagcagctcgaagtcgagcaggtggaggcggccaagttcgacaaactgctcgcgcaggaagaagtgtggattcgcaagggcgtcgaggcgcgtcgcacgcgcagcgtcggccggatcgcgcggctcgtggaaatgcgcaaccagcgcgcggaacgccgcaacgtgcagggcaacgtcaagctcgacgtcggccagggcgagaagtcgggcaagatcgtcgccgagttgaccgacgtgaccaaacgctacggttcgcgcacggtggtcgacaacttcacggccacggtcatgcgcggcgacaagatcggctttgtcggcccgaacggcgcgggcaaaaccacgctgctcaagctgatcctcggcgaactggcgccggatgaaggcacggtgcgcatcggcacgaatctgcaggtcgcgtatttcgaccagatgcgcgcgcagctcgatctggaaaagagcctcgccgacaccatcagcccgggcagcgagtgggtcgaagtgaacggccagaagaagcacgtcatgagctacctcggcgacttcctgttcgcgccggaacgcgcgcgttcgccggtcaagtcgctgtcgggcggcgagcgtaaccgtctgctgctcgcgcgcctgttcgcacgcccggccaacgtgctggtgctggacgagccgaccaacgacctcgatattcccacgctcgaactgctcgaagaactgcttacggaatacgacggcacggtgctgctggtcagccacgatcgcgcgttcctggacaacgtcgcgacctcggtgatcgcgtcggaagggggcggcaagtggcgcgagtacgtcggcggctttaccgattggcagatccagcgcgaccgctcgcagcagatggcgctggacgcgcagaaagaagccggcaaggacgcgggcaaagacgcggcgccgggcaaagacggttccgcgggccgcaatacgcaacgcgccgcgaagctgtcgttcaaggagcagcgcgaacttgaggcgctgccggggaagatcgccgcgctcgaagcggagcagaaaacgatcggcgcgcaactcgaagacggctccgtgttcgccaaagatgcgcaggaaggtacgcgcctgaccgaacgctacgccgcgatcgacgaggaactgctggtcgcgctcgagcgctgggacgagctggaaaatcgccgcaag

SEQ ID NO: 13530 - DNA, 858 bp, Burkholderia fungorum
atgaaactggtacggtggggacagcccggcgcggagaagccgggcatgctggataacgaagggcgggtgcgcagtctggtcggcgtgatcgacgactggcacggtgcggcgctcgcggacggcgcgctcgcgcgcgtcgcggcgctcgatccgcaaacactgccggcggtcgcgccgggcgaacggctcggcccgtgcgtcggcgcggtcggcaagttcgtatgcgtcggcctgaactacacggaccatgccgccgaagcgggcatggcgctgccgaaggagccgatcctgttcctcaaggcgacgagcgcgatcaacggcccggccgatccgatccgcatgccgcgcgacgcggtgaaggtggattgggaagtggagttgggcatcgtgatcggcaagaccgccagctacgtgacgagagacgacgcgctggcgcacgtcgcgggctactgcgtggtcaacgacgtctccgagcgcgcgttccagctggagcgcggcggccagtgggacaagggcaaggcggcggacacgttcggcccgctcggcccctggctcgtcaccgcggacgaggtgccggacccgcaggcgctgccgctctggctcgacgtggacggcgtgcgccgccaggccggcaacacacgcgacatgatcttcggcgtcgcggaactggtgtcgtacatcagcggcttcatgagcctgcaaccgggcgacgtgatcgcaacgggcacgccggccggcgtcggcatgggcttcaagccgccggtctacctgcaggccggccagaccgtgcgtgccgggatcgcgggccttggcgagcagtcgtcgccggtggtcgcgttccacgcgacagcgcaggcc

SEQ ID NO: 13531 - DNA, 1290 bp, Burkholderia fungorum
gtgccgggatcgcgggccttggcgagcagtcgtcgccggtggtcgcgttccacgcgacagcgcaggcctgacatggccgatacgattacctgtgtcgacgatctgcagcggctcgcgcgccggcgcgtgccgaagattttctacgactacgtggacagcggctcgtggaccgagtccacctatcgggcgaacgaaacggacctcggcagcctgaggttccgccagcgcgtgggctgcaacgtcgaggcgatccgcaccgcgtcgacgctgctcggccacgcgtgcagcctgccgctcgcgcttgcgccgaccggcctcgcaggcatggtgcacgcggacggcgagatcctcgccgcgcgggcggccgcaaggttcggcgtaccgttcacgctgtccacggtcagcatctgctcgatcgaggacgtggccgagcaggtcgcgcagccgttctggttccagctgtacatgatgaaggaccgcgatttcatcgtccggctgatcgagcgcgcgcgcgacgcgggctgctccgcgctcgtgctgacgctcgatctgccgatccaggggcagcgccacaaggacgtgcgcaacggcctgtcggtgccgccgaaactgaacgtgcgaaatctgtccaccatgctgtcgcggcccgcatggtgcgcgcgcatgctgggcacgcggcggcgcacgttcggcaatatcgtcgggcatgcgaagggcgtatcggacacgttcgcgttcgcggaatgggtgagccggcagttcgaccgcagcgtgacgtgggacgacgtccgctggatcaagcgccattggggcggccggctgatcgtgaagggcattctcgacgccgacgacgcgcgcctcgcggtcgcggccggcgccgatgcgatcgtcgtgtcgaaccacggcggccggcaactggacggcgcgccctcgtcgatcagcgcgttgccggcgatcgccgcggcggtcggcaggcagaccgaagtactgatggacggcggcatccgcagcggccaggacgtgctgcgcgcactcgcatggggcgcgcacggcgtgatgatcggccgtgcgtttctatacggcctcggcgcgctcggtgaggcgggcgtcacgcgcacgctcgaactcatccagaaggaactcgaatcgacgatggcgctgtgcggcatcaccgacgtcgccgacgtcggccgcgacgcgatcgtctcgccggcgcacggcgccgcgcccgcgtggcccgaaccggtcggccggcgcgttggtgaaagcaatcttccggtgcttgcttcg

SEQ ID NO: 13532 - DNA, 780 bp, Burkholderia fungorum
gtgcgtgctagcggaagcatcatctttttaggattaccaatcatgcagttgtcaaaacgccttgccgccgagttgttcggcaccttctggctcgtcctcgggggctgcggcagcgccgtcctcgccgccagtttcgacgggccggtccacggtctgggcatcgggttcgtgggcgtagcgctcgccttcggcctgactgtcctgacaatggcttatgcgatcggccatatttccggctgccatctgaatcccgcggtgagcgtcggcctgaccgtcgccggccgcttcccggcgcgcgatctgctgccgtacatcgtcgcgcaggtgatcggcgcggtgctcggtgcattcgtgctgtcgctcatcgcaacgggcaagccgggcttcgacctcgttgccagcggtttcgcgagcaatggctacggcgaacgctcgccgggtcattactcgctcgccgcggcattcatttgcgaagtggtgatgaccggcttcttcctcttcgtcattctcggcgcgaccgacaagcgcgcgccggccggctttgcaccgatcgccatcggcctgtgcctcacgctgattcacctgatctcgatcccggtgaccaacacgtcggtcaacccggcacgttccacgggcccggcactattcgtcggcggcgcggcggtggatcagttgtggctgttctggcttgcaccgattctcggcgcagtgatcgcgggcgtgctgtatccggccctcgccgaaagccgcgacagcaattcacagaagctggcgctcgac

SEQ ID NO: 13533 - DNA, 2946 bp, Burkholderia fungorum
atgtccgacatgctcaactcatccactggcggctgcggctccggcaactgcgcgtgcaaggcgcaagcccagcagcagcgctcgccccgttccttcttcgacgacacggactacggcacgcccgagcgtcacgccgacatcgacgtcacgctggaaatcgacggccagtccgtcaccgtgccggccggcacctccgtcatgcgcgccgccgtcgaagcgggcgtcaacgtgccgaagctctgcgcgaccgattcgctggaaccgttcggctcgtgccgcctgtgtctcgtggaaatcgaaggcaagcgcggctatcccgcgtcatgcacgacgccggtcgaagccggcatgaaggtgcgcacgcagaccgatcgtctgcagtcgctgcgccgcaacgtgatggagctgtacatctccgatcacccgctcgactgcctgacctgccccgccaacggcgactgcgaactgcaggacatggcgggcgtcacgggcttgcgcgaagtgcgctacggcttcgacggcgcgaatcacctgaaggataagaaagacgagtcgaacccgtacttcacctacgacgcgtcgaagtgcatcgtctgcaatcgctgcgtgcgcgcgtgcgaggaaacgcaaggtacgttcgcgctgaccatcgccgggcgcggtttcgaatcgcgcgtggcggccagcgaaaacgtgccgttcatggaatcggagtgcgtgtcgtgcggcgcgtgcgtggccgcatgcccgaccgcgaccttgcaggaaaagaccgtcatcatgcttggccaggccgagcattcggtcgtgaccacgtgcgcgtattgcggcgtcggctgctcgttcaaggcggagatgaagggcaaccaggtcgtgcggatggtgccgcacaagaacggccaggccaacgaaggccacgcctgcgtgaagggccgctttgcgtggggctacgcgacgcacaaggaccgcatcaccaggccgatgatccgtgcaaagatcaccgatccgtggcgcgaagtgagttgggaagaagcgctcacgtatgcagcgtcggaattccgccgcattcaggcgaagcacgggcgcgattcgatcggcggcattacgtcgtcgcgttgcacgaacgaagaaacgtatctggtgcaaaagctcgtgcgcgccgcgttcggcaacaacaacgtcgacacctgcgcgcgcgtgtgccactcgccgaccggctatggactgaagaccacgctcggcgaatcggcgggcacgcagacgttcgcctcggtcgataaagccgacgtgatcatggtgatcggcgcgaatccgaccgacggccacccggtgttcggctcacgtctgaaacgccgcgtgcgcgaaggcgcgaagctgatcgtggtcgatccgcgccgcatcgatatcgtcgatacgccgcatgtgaaggcgtcgcatcatctgcaattgcgcccgggcaccaacgtggcagtggtaaacgcgctggcgcatgtgatcgtcaccgaagggctggtgaacgaagcgttcgttgccgagcgttgcgaaacgcgcgcgttcgagcaatggcgcgatttcgtcgcgctgccggaaaacgcgccggaggcgaccgaggcggcgaccggcgtgccggctcaagccgtgcgcgaagccgcccgcatctatgcgaccggcggcaacgccgcgatctactacggtctgggcgtcaccgaacacgcgcaaggctcgacgatggtgatgggcatcgccaacctcgcaatggcgacgggcaacatcggccgcgaaggtgtgggcgtgaatccgctgcgcggccagaacaacgtgcagggttcgtgcgacatgggctcgttcccgcacgagctgccaggctatcgccacatcagcgacacggtcacgcgcacgctgttcgaggaagcgtggaacgtcacgctgcaacccgaacccggtctgcgcattccgaacatgttcgacgccgccgtgcacggcaccttcaagggtctgtactgccagggcgaagacatcgtgcagtcggatccgaatacgcaccacgtgtccgcggcgctgtcggcgatggaatgcattgtcgtgcaggacattttcctgaacgagaccgccaagtatgcgcacgtgctgctgcctggttcgtcgttcctcgaaaaggacggcacgttcaccaacgcggagcgccgcatctcgcgcgtgcgcaaggtcatgccgccggtaccgggttacgccgactgggaagtcacggtgctgctcgcgcgcgcgctcggctatgaaatggactacacgcatccgtcgcagatcatggacgagatcgcgcgtctcacgccgaccttccacggcgtctcgtacaaaaagctcgacgaactcggcagcatccagtggccgtgcaacgagaatgcgccggacggtacgccgaccatgcatatcgacaccttcgtgcgcggcaagggcaagttcgtgatcacgaagttcatcgcgacgccggagaaagtcacgcgcaaattcccgctgctgctcaccacgggccgcatcctgtcgcaatacaacgtgggcgcgcagacgcgccgcaccgagaactcgcgctggcacgacgaggaccggctggaaatccatccgcacgacgccgaagaacgcggcatcaggacggacgattgggtcggcattgaatcgcgcgcgggacagaccgtgctgcgcgccaaggtgaccgagcgcatgcagccgggcgtcgtttatacgacgttccacttccccgaatcgggcgcgaacgtgatcaccaccgatagctcggactgggcgaccaactgtccggaatacaaggtgaccgcggtgcaggtgatgccggtcgaacagccgtcgcaatggcagagagactattcgcgtttcaacaccgaacagctcgatctgctgaagcagcgcgagctggccaacgcaacatcgggcaag

SEQ ID NO: 13534 - DNA, 1956 bp, Burkholderia fungorum
atgctctttcccacagaatttgacgtaatcgtcgtcggcggcggtcatgccggcacggaagccgcgttggcttcagctcgcatgggcaatacgacgctcctgctgacccacaacatcgaaaccctcggccagatgagctgcaatccgtcgattggcggcattggcaaaggccatctggtcaaggaagtcgacgcgctcggcggcgcaatggcggccgcgacggacgagggcggcatccagttccgcatcctgaattcgtcgaaaggcccggctgtacgtgcaacgcgcgctcaggctgaccgtctgctgtacaagcaggctatccggcaccggctcgaaaatcagccaaacctgtggctgttccagcaagcggttgacgatctgatggtggagggcgaccgcgtcgtcggcgctgtgacgcaggtgggaattcgtttccgcgggcgcgccgtggttttgacggcaggcacgttcctcgacggcaaaattcacgtggggttgaacaactataccggcggccgcgccggtgatccggcggcggtttcgttgtcggcgcgtctgaaggaattgaagttgccgcaaggccgtctcaagacggggacgccgccgcgtatcgatggccgcacgatcgatttttcgcaactcgaagagcagccgggcgatctggatccggtgccggtgttctcgttcctcgggcgcgtcgagcagcatccgcggcaggtgccgtgctgggttacgcacacgaacgcgcggacgcacgacatcatccgtggcggactggaccgttcgcctatgtacaccggggtgatcgagggggtggggccacgctattgcccatcgatcgaggacaagattcaccgattcgcttcaaaggagtcacatcagatcttcctcgagccagaagggctgaccacgaacgagttctatccgaatggaatctccacgagtctgccgttcgacgttcaactggaactggtccgctcgatgcgaggtttggagcatgcgcacatcctgagaccgggctatgcgatcgaatacgactacttcgatccgcgtgggttgaaggcttcgctcgaaaccaaggttatcagtgggctcttttttgccggccagatcaacggcacgaccggctatgaagaggcagcagcgcagggtctgctggccggcatcaacgcgggcctgtatgtgcagggcaaggaagcatggtgcccgcgccgcgatcaggcttaccttggcgtcttggtcgacgatttggtgacgcgcggcgtgtctgaaccgtatcggatgttcacgagccgtgccgaatatcgtctgagtctgcgcgaagacaatgcggatatgcgtctcaccgagattggccgtgagttgggtgtggtcgacgacgttcgctgggatgccttcagccgtaagcgcgacgctgtttcacgtgaaacagagcggcttcgcacgacatgggtcaatcctaagacgttatccgccgacgaggccacagcgctgctcggcaagccaatcgatcacgaatatagtctggcggatctgctgcgccgcccgggtgtgtcgtacgacggcgtttgcgcgttgcgtgccggcgcgtgcgccgcgcctgaaaccttggccgaagacgacgtgctgctcgcgcagatcaaggaacagatcgagattggcatcaaatatcagggctacatcgaccgccaggcgggtgaaatcgagcgaaatgaggcgcacgaaagtacgcgtctgcccgaagggctggattacgcggaagtcagagggctctcgttcgaagcacggcaaaaattgacgcagtttcgccccgaaaccatcggccaggcgtcgcgtatttcgggtattacgccggcggccatttccttgctgatggtccatctgaagcgcggcttgggtcgtcgcccgacgaagcccgccgagtcgggcaccgacagcgcgccggtgacgcaa

SEQ ID NO: 13535 - DNA, 2256 bp, Burkholderia fungorum
gtgggccaccgcaccatgaataccgaaatcgttacgagcacgccgaagcccctgccttctttcgaagaagcaatggcgttcgtgcgtgaacatgcgggcgaggtgcggctctcatcgggcgaaatgctggcggatcatgcggcgggtacggcgtcgatcatgcgcacgctcaacgtcgatccgccggcggtgctggcggcggcattgtttgcactgacgccgcatctgcaggacccggagcgcgtgatcgccgacaacttcggcgaagaagtcgcgcaactggtcggcgacgtgcgcaagttgctgcgtcttggcaccgtgagcttgcgtgccgcgcagaatgccatgcccgaggccgggcgcgacgcccaggctgcgcgccgcgcgcaggtcgaggcgctgcgcaagatgctgctcgcgtttgcgcaggatattcgcgtcgtgctgatccggctcgcgtcgcgcctgcaatcgctgcgctattacgcggcggcgaaaatcacgccctcgccggacgtggcgcgcgagacgctcgatatctatgcgcctctcgccaaccgtctgggtatctggcaattgaagtgggagctcgaagatctcgcgttgcgcttcgaagagccggtcacttacaagcgcatcgccaaactgctcgacgagaaacgcgtcgagcgcgagagctatgtcgcgcaggctatcgaacgcctgcaaaaggaactggctgcggcgcatattcgcgcagaggtgagcggcaggccgaaacatatctacagcatctggcgcaagatgcgcggcaaggagctggacttcgccgagctgtacgacgtgcgcgcttttcgtgtgatcgtgccggacatcaaggattgctacaccgtgctcggcatcgtgcacaacctgtggcaaccggtgccgaaagagttcgacgactatatctcgcggccgaaaccgaacggctataaatcgctgcacacagtcgtgatcggcgacgacggccgcgcgttcgaagtgcagatccgtacgcaggaaatgcatcagttcgccgaatacggcgtggcggcacattggcgctacaaggaagcgggcacgcgcgggtacgccggtcagttcgccgcgaacgggaagtacgacgagaagatcgcgtggctgcgtcaattgctcgcgtggaaagacgaagtctccgagggcgagcacggcgagaagcgcgcggcgcagccgtgggagcaactgcgccaggctacgctcgacgacgaccatatctacgtgctgacgccgcaggcgcgggtgattccgctgccgcacggcgcaacgcccgtcgatttcgcgtatcacctgcatagcgagttggggcatcgctgccgcggcgctcgtgtggatggcgcgatggtgccgctcaacacgccgctgcagaacggtcagactgttgagatcgtcgcggtcaaggagggcggtccgtcgcgcgactggctgaacccgcaactcggctatctgcaaagtccgcgcgcgcggcaaaaagtgcgcgcgtggttcaacgcggtcgaagtgcaggaacacatcgcgagcggccgcgcgatggtcgaaaagaccttgcagcgcgagggcaagacgtcggtcaatctggaccagctcgcggccaagctcggcttcaagaccacggacgatctgttctccgtggtgggcaaggaagaattcagtttgcggctcgtcgagcaggcgctgcacgacgcgccgccgccggagccggtggtcgatgcgcctgagcaattcgaaaagcgcagtagtggcgcgagcgtggcgcgcggcgcgtccaccggcgtgctggtggtcggtgtcgacgcgttgctcacgcaactcgcgcgctgctgccggcccgcgccgcccgacgatatctgcggttttgtcacgcgcggcaaaggcatgtcgattcaccgcagcgattgcgcgacgttcctgcgcatggccgaacgggcgcccgagcgcgtgttgcaaacggcatggtcggcggaggtgatgagcggccgcggccagtcggtctatccggtcgatctctcgatcgaagcaacggaccggcagggtttgctgcgcgatatttccgaagtgttcgcgcgcgaaaagatgaacgtgatcggcgtgaagacgcagacgcgccgcaacgctgcgttcatgcaatttaccgtcgaggtgtcgaacgccgcgcagattcagcgcgcgtgtacgctgctcggtgaagtgacaggcgtgatgcgtgcgtcgcgcaagagt

SEQ ID NO: 13536 - DNA, 1560 bp, Burkholderia fungorum
gtgtccgacaacaagcgccccgtctccactgagctagccatgaccgtcatcaaacaggaagatctgattcagagcattgctgattcgcttcagtacatcagctattaccatccgctcgactacatccaggccttgggccgcgcgtacgaactcgaacagagcccggccgcgaaagacgccatcgcgcagattctcaccaacagccgcatgtgcgccgaaggcaagcgcccgatctgccaggataccggcatcgtcacggtgttcgtgaaagtcggcatggacgtgcgttgggacggcgcgacgatgggtgtcaccgacatgatcaacgaaggtgtgcgccgcggttatctgaacccggacaacgtgctgcgcgcgtcgatcgtgagcccgcccgaaggcggccgcaagaacacgaaggacaacacgccggccgtgatccactacgagatcgtgccgggcaatacggtcgacgtgcaggtcgcggccaagggcggcggctcggaaaacaagtcgaagttcgcgatgctgaacccgtcggattcgatcgtcgactggatcctgaagaccgtgccgaccatgggcgcgggctggtgcccgccgggcatgctcggcatcggcattggcggcaccgccgagaaagcgatggtgatggcgaaggaatcgctgatggatccgatcgacattcaggacgtgatcgcgcgcggcccgaaggactggatcgaagaactgcgcgtggaactgcacgagaaggtcaacgcgctcgggatcggcgcgcagggtctcggcggtctcgccaccgtgctcgacgtgaagatcatggccgcgccgactcacgccgcgtccaagccggttgcgatcatcccgaactgcgcggccacgcgccacgcgcacttcacgctggacggctcgggcgccgccagactcgaggcgccttcgctcgacgcatggccgaaggtgcattggcagccggacacggagaagagcaagcgggtcgatctgaacacgctcacgccggaagaagtcgcggcgtggacgccgggccagacgctgctgctgtcgggcaagatgctgacgggccgcgacgccgctcacaagcgcattgccgacatgctggcaaagggcgaaaagctgccggtcgacttcacgaaccgcgtgatctactacgtcggcccggtcgatccggtgcgcgatgaagccgtcggtcccgcaggcccgaccacggcaacccgcatggacaagttcaccgagatgatgctggcgcaaaccggcctgatttcgatgatcggcaaagccgagcgcggccctgtcgcgatcgaggcgatcaggaagcacaaggccgcttatctgatggccgtgggcggcgcggcgtatctcgtgtcgaaggcgattcgcagcgccaaggttctcgcattcgaagacctcggcatggaagcgatctacgagttcgacgtgcaggacatgccggtcaccgtggccgtcgattcgaacggcacctccgttcaccagaccggcccgaaggaatggcaggccagaatcggcaagattccggtcgcgaccgtt

SEQ ID NO: 13537 - DNA, 771 bp, Burkholderia fungorum
gtgcgggcgcaattgcctgacgaagcaatcctgtatgtcgccgactcgctctatgccccatacggtgaacgcgacgacgatttcatcgccgaccgcacgctcgcgatcggcgaatggctggtcaggcaaggcgcgaaagcgctcgtggtcgcctgcaatacggccaccgcgcaatccatcgcgatggttcgcgaaaagctgcccattccgctggtcggcgtcgaacccggcatcaaacccgctgcattgcagtcgaaaacccgcgtcgcgggcgtgctcgccacgcaggtgacgctgcgcagcgcgcgcttccaggcgctgctcgaacgctacgccgcggattgccgctttctttgccagccgggccacggactggtgcaggccgtggaacgctgcgacgtcggctcggccgaattgcgggcgttgctgcgcggctacctgcagcccatgctcgacgcgggcgcggatacgctggtgctcggctgtacgcactacccgtttctcgatacagcgatccgcgagatcgtcggcgatcggctcgcgctgatcgatacgagcgtcgcgattgcccgtcagctggaacgggtgctggatcaacacggcctgcgcgcggcgccggaaagcgccggcaccgctctgccccgtttttattcaaccggcgacggcacccatcagcagcaattggcggctacattgctgcatgtcgatgcaacggtcgagcaggtggtgatcccgtcccgccgcacggtagcgccgaattcccaagccgca

SEQ ID NO: 13538 - DNA, 1044 bp, Burkholderia fungorum
atgaatccggcggatcgcggccgggagcgtgttacgcggcactcgccgcaaagcgcggtgcgcatcgcggcgtcgcgtacaatacgcggccgcgctgcacaccgcgccgtatggccgttgtgcagcagcattgcaccgtattgcatccgcagcgccgaatccgccctggagcggcatgccctctttcagcgtctcctcatcatgctcagctaccgccacgcctttcatgcaggcaatcacgccgacgttctgaaacacgccgtcgtgttgcagcttctgcgttacctcggccagaaggacaaatcctactggtatatcgacacgcatgcgggcgctggcgtctattcgctgaaggaaggttacgcgaccaaaaccggcgagttccggaccggcatcgccagattgtgggagcgcaacgatcttccgccgatgttcgccgactacgtcgacgaagtcagcgcgctcaatccggacggccagttgcgcttctatcccggctcgccgtatatcgcgtggcggcagatgcgtgagcaggaccgcatgcgtctgttcgagctgcataccaccgaaatcgacgtgctgcgccacaatttccgcgacgcgggccgccgtgccatgctgtatgcgggcgacggcttcgacggcattctcgccttgctgccgccggcgccgcgccgcgcgctggtgctgctcgatccgtcgtatgaggacaagcgcgactacacgcgcacgctgcgctgtgtcgaagaaagcctgaagcgtttcccgaccggcacgtatgcggtctggtatccgcaggtgaggcgccctgagtcgctgcgttttcccgatcagttgaagaaactgcaggacaagaactggctgcacgtgagcctgacggtcagcaatccgcccgaggatggttttggacttttcggcagcggcatgttcattctgaacccgccgtacacgctggcgaaaacgctgaaagagcagatgccctggctcgtcaaggtgctcggcgaagacaacgccgcacagttcaaggtggagtatcgcggcgac

SEQ ID NO: 13539 - DNA, 1119 bp, Burkholderia fungorum
atgaacgtaggtctcgtaggttggcgcggcatggtcggcagcgtcctgatgcaacgcatgcagcaggaaggcgatttcgatcttatcgaaccggtgtttttcagcaccagcaacgcgggcggcaacgcgccgtcgttcgccaaaaacgagaccaagctcaaagatgcgacaagcattgaagacctgaagaagtgcgaagcgatcatctcgtgccagggcggcgactacacgaacgaagtgttcccgaagctgcgcgcggcgggctggaacggctactggatcgacgcggcttcgtcgctgcgcatgaaggacgacgcggtcatcattctcgatccggtcaacctcgacgtgatcaagaacgcgctggtcaagggccagaagaatttcatcggcggcaactgtacggtcagcctcatgctgatggcgctcggcgggctgttccgcgaaaacctcgtcgactggatgacggccatgacgtatcaggccgcttcgggcgcgggcgcgcaaaacatgcgcgaactgctgcagcaaatgggcacgctgtacggtgcagccaaggaagatctggctgatccgtcgtcggcgattctcgacatcgaccgccgcgttctgagtgcgatgaacagcgaccgcatgccgaccggcaactttggcgtgccgctcgccggctcgctgattccgtggatcgacaaggatctcggcaacggcatgtcgaaagaagaatggaagggcggcgccgaaaccaacaagattcttggcaagccggctatgggcacgccgggttcgattccggtggacggcctgtgcgtgcggatcggcgcaatgcgctgccactcgcaggcgctgaccatcaagctgaacaaggacgtgccgctggacgaggtgaacagcatcctcgcgtcgggcaacgactgggtcaaggtcgtgccgaacgagcgtgaagcgtcgatgcgcgatctgtccccggcggtcgtgacggggacgctgacggtgccggttggccgcgtgcgcaaactggcgatgggcggcgaatatctgtcggctttcaccgtcggcgatcagctgctgtggggcgccgcggagccgctgcgtcgcatgcttcgcattgtgctcgacaag

SEQ ID NO: 13540 - DNA, 237 bp, Burkholderia fungorum
atgacgatcgaattccaggttgaaggcatgagctgccagcattgtgtcgcggcggtcacgaacgccatccgcgaacacgatgaagccgcgcaggtccaggtggatctggcgtccgggcgcgtgacagtcgaatcggcgcaaccggctgaggcgctcaaggccgccatcgacgaagccggctacacggtgacgggcgcggcaactcgcgcaacgaccggcgcatccggcacagtccgc

SEQ ID NO: 13541 - DNA, 1695 bp, Burkholderia fungorum
atggcagcaggaacggatgcgcagtgccctatgttgattctcctaaaccttctggccggtgtggcgctcctcgtgtggggttcacacattgtgcgcaccggcatcctgcgggttctcggcgccgatctgcgcagcgtgctggggcgcagcaccagtagccgctggcgggcgttcctctcgggtgtcggcgtcacgagtctggtacagagcagcaatgccaccgcggtcatcgtcacgtcgttcgcggcgcaaggacttttaccgctcgccagcggtctcgcgatcatgctcggcgccgacgtcggcaccgcattgatggcgcgggttctcacactcgatctgtcctggttgtcgccgatcctgattctgctcggcgtgccgctctttttgtcgcgcaagcaaacccgtctcggccaggccggccgcacgctgatcggcctcgggctgatcctgctggcgctgcgtctgatcgtcgaagccgcccagcccatgatgcaaggcgccggcgtgcgcgtcatgttcggtgcactgaccggcgacaccatgctcgacgcgctggtcggcgccgcgttcgccatgctgtcctattcaagccttgccgccgtgctgctgaccgcgacgcttgcctcatccggtgtgatttcgctgaaggtggcgctgtgcctcgtgatcggcgcgaatctgggcagcggcctgctggcgctcctcggcaccgtcgcacagaacgcggcggcgcggcggctcgcgttgggcagttttgcgttcaagctggcgggcgcgttgctgatcctgccgttcacttcgctgctcgcgcgcggactgccggtattgatcgcgaatccgcgtgaagcaaccgttggatttcacctgatctataacgcgctgcgttgctgcgcgtgcctgtcgctgatcgatccggtggcgcgcatctgtgtgcgcattctgcccaaccggccggtgccgaacggcgagctacggccgctccacctggacaccgccgcgctgtccacacccacgctcgcgctcgcgcatgccgcgcgcgaggtgctgcggatcggcgacatcgtgcgcaccatgctcgacaatgtcgcggacctgatccatcacaacaatctggacaaggcgcgggaaacggtgcgcatggacgacgacgtggacgagctctacgccgcggtcaaaacctatctgacgctgatctcgcgcgagcagctcgacgaagccgacagccgccgctggaccgacatcatttcattgacgatcaacctggaacatgcgggcgacatcatcgaacggatcgtgggcgatatcgaggaaaagaagatcgctcaccggctgtcgttttcggaggaagggctgggtgaactggacgatttgcaggcacgcctcgtcagcaacctccagcttggcctgtcggtgtttctgaataacgacttgcggtgcgccgagcgcctgctggcggagaaggagcgctttcgcgatctggagcgcgcctattcataccggcatctggaccggctcgccgggcaaaccttgcgaagcatcgagaccagtgcactgcatctcgatctgatcagcgacatgaagcggctcaattcgctattctgctcgaccgcctatccggtgctcgacgcagccggcgcgttgcacgacacgcgcctgcgcaagcgcgcgctcgatacgatgcacgtgaaggaa

SEQ ID NO: 13542 - DNA, 783 bp, Burkholderia fungorum
gtgggaaacgggattaatcgcgcttcatccgcagactggccttatccgcgactggccgcgcatcgctgcggcggctcgctggcgccggagaacacgctcgccggcttcgacgcctgcgtgcgctatggctaccgcatggtcgagttcgacgccaagctatccgccgacaaccagctctttctgctgcacgacgacacactcgagcgcaccaccaacggccacggcgccgccgcggatcacacatggcagcaactggccacgctcgacgccggtacatggtacggaccgcaattcgccggcacgcgtctgccgacgctcgccgaggcggccgggcgctgcgcgcgcgacggcattgccgccaacatcgagatcaagccgtgtccgggccgcgacgaaatcaccggaacgctggtggcaagcggcgcgctgacgctatggcaaggacagacgccgccattgctgtcgtcgttttcgttcgaggcactggccgccgcgcgcgacgcggcgccgtcattgcaacgcggcatgctgttcgacgaggtgccggcggactggctgcgtgtcgtgcgtgaactcgactgcgtgtcgtttcacgcgaaccatcggtatctgagcgagccgctggtcgccgagattcatggcgccggcctgcgcgtgctcgcctatacggtcaacgacccggcgcgtgcgcaactgctcgcgcaatggggcgtcgacatgatttgtacagatcgcatcgatacactgcgacacgacatgttctccgcgccggccaacccggcc

SEQ ID NO: 13543 - DNA, 1257 bp, Burkholderia fungorum
gtgctgtacgtccaggtgatcgtggcgatcatcatcggtatcgggctcgggcatttctacccggatctcgccgtcgacatgaagccgctcggcgacggcttcatcaagctgatcaagatggtgatcgggccgatcattttctgtacagtggtgacaggtattgccggcatggaggatatgaagaaagtcggccgggtgggcggcaaggcgctgctgtatttcgaaatcgtctcgaccttcgcactggtgctcggccttatcgccacgcatgtactgaagccgggcgtcggcttcaacatcgatccggccacgctcgacggcaaggccgtcgcctcgtacgccgcgaaagcgcacgggcagaccacggtcgacttcctgatgcacatcattccggatacgctcgtctcggcgttcgcgcagggcgagatcctgcagatcctgctgatcgcgctgctgttcggcgcggtgctcgccacggccggtgagaagggcaaggtcgtgacgggctttatcgacgggctctcgcatgtgctgttcggcatcgtgcgcatcatcaccaagctggcgccgatcggcgcgttcggtgcgatggccttcacgatcggcaagtacggtatcggctcgctgttgccgatgctcaagctgatcggcacgttctatctgacctcggtcgtgttcgtggtggtggtgctcggcatcatcgcgcgtgcggtgggcttcaacatcctgcgcttcgttgcgtacatcaaggaagagatgctgatcgtgctcggcacgagctcgtccgaagcggcgctcccgcaactgatgctgaagctcgaacggctcggctgctcgcgttcggtggtgggcctcgtggtgccgaccggttactcgttcaatctcgacggcaccaacatctatatgacgatggccgtgctgttcatcgcgcaggcgaccaacaccgacctgacatggacgcagcagctcacgctgctcgcggtcaccatgctgacctcgaagggcgcgagcggcgtgacgggcgcgggcttcatcacgctggcggcgacgcttgccgtggtgccgaccattccgctgtcgggcatggtgctgattctgggtatcgaccgcttcatgagcgaatgccgcgcgctgaccaacattgtcggcaacggtgtggcgacggtggtcgtgtcggcgtgggaaaaggaactggaccgcagcaagctgaacgccgccttgcgcggcgacgtggcgatcaaagagccggccggcgtt

SEQ ID NO: 13544 - DNA, 1350 bp, Burkholderia fungorum
atgctgaatcacggcctgcaagtgctgtatatcgaagacgacgaactggtgcggcgcgccagcgtgcagagtctgcaactggcgggcttcgaggtgatcggccatgcgtcggtggaatcggcggcgaagacgatcggcgcggacttctccggcgtgatcgtcagcgacattcgcttgccgggcgcaagcggcctcgacctgcttgcgcaatgccacgagcgcgcgcccgacgtgccggtgattctggtgacgggccacggcgacatttcaatggccgttcaggccatgcgcgacggcgcgtacgacttcatcgagaagccgttcgcgtcggaacgtttgatcgaaaccgtgcggcgcgcgttggagcgccgcaagctggtgctggaaaacctcgcgttgcgccgtgaactggcggagcagagttcggtggcgccgcggatcatcggcaggagtccggcgatcgaacaggtgcggcggttgattgccaatatcgcgccgacggacgcctccgtgctgatcaacggcgacaccggcgcgggcaaggagctgatcgcgcgcagtctgcatgaactgtcgccgcggcgtgacaagccgtttatcgcagtgaactgtggcgcgctgccggagccgatgttcgaatcggaaatgttcggctacgagccgggcgcattcaccggcgcggcgaaacggcggatcggcaagctcgagcatgcgtcgggcggcacgctgtttctggacgaaatcgagagcatgccgctcgcactacaggtcaagctgctgcgcgtgctgcaggacggcgtgctggaacggctcggctcgaatcagccgattcgggtgaattgccgcgtggtcgccgcagccaagggcgacatggccgagcacgtcgcggacggctcgttccggcgcgatctgctgtaccggctgaacgtggtgacgattgcgctgccgccgctcggtgagcgtcgcgaggacatcgtgccgcttttcgaacacttcctgctggacgcggcggtgcgttatcaacgcccggcgccgatcctcacagaccgtcagcgcgcgggcctgatgcagcgcgactggccgggcaacgtgcgggaactgcgcaacgccgctgaccgcttcgtgctcggcgtcgccgacgatcccgtcatgtctttcggcgacgacggcgcggccgcgcagcctttgaaagagcgcgtcgaacaattcgagcgggcggtgatcgcggaggcgttggagcaggccggcggcgtggtcgccgtcgcggcagacaggctgcaactcggcaaggcgacgctctacgagaagatcaagcgatatcgcctcgcggccaaaggggaaggggagcgg

SEQ ID NO: 13545 - DNA, 1017 bp, Burkholderia fungorum
atgaacgcagtacccgaaacgcgccgccagtcggaccatgcgggcgatcacgtgctggtggccgacaagctcgcgcgctactacacggtcaagcgcggcatgttcgcatccggcacggtgaaggcgctcaatggcgtctcgttcgcgctcgaacgcggcaagaccctggcggtggtcggtgaatccggctgcggcaaatcgacgctcgcgcgtcaactcaccatgatcgaaccgcccagcgcgggccgcctgctgatcgacggtgaagacgtggccggcgccgatcacgcgaagatcgcggcgctgcggcggcgcgtgcagatggtgttccagaacccgtttgcctcgctcaatccgcgcaagaccgtcgagcagacgctcggcgagccgctcgcgatcaacacgcagctgagcgcgaccgagcgcgccgaacggatcgcgcagatgatgcgcaccgtcggactgcgtccggaacacgcgaagcgctatccgcatatgttctccggcggccagcggcagcgcgtggcgattgcgcgcgcaatgattctcgatccgcagatcgtggtcgcggatgaacccgtgtcggcgctcgacgtgtcgatccaggcgcagattctcaatctgttcatggatctgcaggagcagttcaagaccagctacgtgttcatctcgcacaacctctcggtggtggagcatatcgccgacgatgtgatggtgatgtacttcggcggcgtggcggagctcggcgacaagacgcggattttctcgaagccgcgtcatccgtacacgcgcgcgctgatgtcggctacgccttccatcttcgaagcggatcgcagcatcaagatcaaattgcagggtgaaatgccgtcgccgctgaatccgccgtcgggttgcacgtttcatcagcgctgcccgtacgtgatcgaccgctgccgcagcgaagaaccgaagctgcgtgaagtggatggccgccaggtgtcgtgtcaccgcgccgaggaggtgggggacgtggatgcc

SEQ ID NO: 13546 - DNA, 534 bp, Burkholderia fungorum
ttgccgtgcaccgtgtatcgtgacggcacttccttgttcctcaccgactccgtcatggccgctacttttgaacgcaagatccttacgcgcgatgctctcgtgacgctgcgcccttcgctgagctcgccggtggtgtttaccaacggcgtattcgatatcctgcatcgcgggcatgtcacgtatctcgcggatgccagggcgttgggcgcatgtctggttgtcggcgtgaatagcgatgcatcggttcgcatgctcggtaaaggcgacgaccggccgatcaataacgaggctgaccggatggccttgctggcggcactggagagcgtcgactacgtcgtgtgcttcggcgagaaaacgcccgtggagttgatttcggcgcttcggccggatgtgctcgtcaagggtggcgactacgacatggacgcgttgcccgagtcggccattgtgcgaagctggggcggcaaggcgttggcgattcccttcgagcatgaccgctccaccactgcgttgctgaagaaagtccgcacgcagggc

SEQ ID NO: 13547 - DNA, 1032 bp, Burkholderia fungorum
gtgcacttaccgcctgactggaccgaacgaatgactgacgttaccgcgaacctcgcagcttctcccgctcctgatgccgtgccggctcccgccgcctacgacgccaccgcgaagcagaaagcgcaagccaagaccgcccgtatccccatcaaggtcatcccgatcgaaaagctgaagaagccggactggattcgcgtgaaagcggccaccggcaattcgcgcttctacgaaatcaagcagattctgcgcgaacataacctgcatacggtgtgtgaagaagcgagttgcccgaacattggcgagtgtttcggcaagggcaccgcgaccttcatgatcatgggcgacaaatgcacgcgccgctgcccgttctgcgacgtcggccacggtcgcccggatccgctcgacgccgacgaaccaggcaatctggcgcgcacgatcgccgcgctcaagctgaagtacgtggtgatcaccagcgttgaccgcgacgatttgcgtgacggcggcgcggctcacttcgtggaatgtatccgtcagacgcgcgagctttcgccgcagacgcgcatcgaaatcctgacgccggacttccgtggccgtctggatcgtgcgctcggtattctgaatgccgcaccgcccgatgtgatgaatcacaacctcgaaacggtgccgcgcctgtacaaggaagcgcgtccgggttcggactatgcgcattcgctgaagctgctgaaggacttcaaggcactgcatcctgacgtggccaccaagtccggtttgatggtcggcctcggcgaaaccgaagaagagattctgcaagtgatgcgcgacctgcgcgaacacgacgtggatatgctgacgatcggccagtacctgcagccgtcggaacaccatctgccggtgcgctcgtacgtgcacccggacacgttcaggatgtacgaggaagaagcgtacaagatgggtttcacgcacgcagccgtgggagcgatggttcgttcgagctaccacgccgacttgcaggcgcatggagccggcgtggtc

SEQ ID NO: 13548 - DNA, 2139 bp, Burkholderia fungorum
  misc_feature (2090)..(2139): n=g, a, t or c
atggatcaattcgccaaagagactctgccaatctccctagaggaggaaatgcgccgttcgtatctcgattacgcgatgagcgtgatcgtagggcgtgcgcttcccgatgttcgcgacggcctgaagccggtgcaccggcgcgtgctgtacgcgatgcacgaactgaacaacgactggaaccgggcttacaagaagtcggcgcgtattgtcggcgacgttatcggtaagtatcacccgcacggcgacacggctgtttacgacaccatcgtccggatggcgcaagacttctcgctgcgctacatgctggtggacggccagggcaacttcggctcggtcgacggcgacaatgccgcggccatgcggtacaccgaaatccgcatggcgaagatcggccatgagttgctggccgacatcgacaaggaaacggtcgacttcacgccgaactacgacggcagcgaaaacgaaccggccatcctgccggcgcgcattcccaatctgctgatcaatggttcgtccggtatcgcggtcggcatggcaaccaacattccgccgcacaacctcaatgaagttgtcgacgcctgccagcatctgctcaagaacccggaagccacgatcgacgaactgatcgagatcgttccggcgcccgacttcccgaccgccggcatcatctacggcgtggcgggcgtgcgcgacggctatcgcacgggccgcggccgcgtggtgatgcgcgcgctcacgcactttgaggaaatcgaccgcggccagcgcatggcgatcatcgtcgacgaactgccgtaccaggtgaacaagcgctcacttctggagcgcatcgccgaactggtcaacgaaaagaagctcgaaggcatctccgacatccgcgacgagtccgacaagagcggcatgcgggtcgtgatcgaactgaagcgcggcgaagtgccggaagtcgtgctcaacaatctgtacaaggcaacccagcttcaggacaccttcggcatgaacatggtcgcgctggtcgacggccagccgaagctgctgaacctgaaggaaatgctgtcgtgcttcctgtcgcatcgccgggaagtgctgacgcggcgcaccgtatacgaactgcgcaaggcgcgcgaacgcggccacgtgctcgaaggtctggcggtcgcgctcgccaatatcgacgagttcatcgccatcatcaaagccgcgccgactccgccgatcgccaagcaggaattgatggcgcgtgcgtgggattcgtcgctggtgcgcgaaatgttgtcgcgcgccgagacggaaaacgcaacggcgggtggtcgcgaagcctaccgtcctgacggattgaatccgtcgttcggtatgcagtccgacggcctttaccgtctgtccgacacccaggctcaggaaattctgcagatgcgtctgcagcgcctgaccggtctggagcaggacaagatcatcggcgagtaccgcgaagtcatggcgcagatcgccgacctgctggacattctggctcgcccggaacgcattacggcgatcatcgtcgaggaactcacgtcgatcaaagccgaattcggcgacgcgcgccgctcgaaaatcgagctgaacgcaaccgagctgaacacggaagatctgatcacgccgcaagagatggtcgtgaccatgtcgcacgcgggctatgtgaaatcgcagccgctgtccgagtacagcgcgcagaagcgcggcggtcgcggcaagcaggccacggccatgaaagaagacgattggatcgacacgctgttcatcgcgaacacgcacgatcacattctgtgcttctccaatcgcggccgcgtttacagcgtgaaggtctatgaagtgccgcaaggttcgcggaactcgcgcggccgtccgatcatcaatatcttcccgcttcaggaaggcgaaaagattacggttgtcctgccggtcaaggaattctcggctgacaaattcgtcttcatgggcaccgcgttaggaaccgtaaaaaagacgccgctggaagccttcggccgcgtgttgcgcaagggtattattgcggtcggtctggatgacggagactacctgatcggcgccgccattannnnnnnnnnnnnnnnnnnnnnnnnnnnnnnnnnnnnnnnnnnnnnnnnn

SEQ ID NO: 13549 - DNA, 372 bp, Burkholderia fungorum
ttgtcgctcttcgtcatggcttcttccctcgcttcgtccacctcggttgccggctacgacgatcttccggtcgacaccatcgtgccgctggccgacctgtttcgcctgctcggcgaccccacgcggttgcgcatcgtgctggcgtgtctcgacgagcggcgcgcggtcggggcgatcgcggaggcgctggggttgtcgtcgtcgctggtgagccatcatttgcggctgctgcgcgcggcgcggatcgttcgcgcggagcggcagggcaagcaggttttctatctcgccgccgatcgccatatcagcgcgatgctggcgggcatgctcgaacacgtggccgaaccggccggcaacgattcccaggacgcgtca

SEQ ID NO: 13550 - DNA, 462 bp, Burkholderia fungorum
gtgctgaagaatctggacccgctgctcaatgccgacatactgtatgcgctacgctcgatgggccacggcgacgaactcatcatttgcgacgccaactttccgggcgactcggtcgcgcgcgagagcgtgctgggcaaactgcttcgcctcgacggcgtgagcgcgccgcgcgcgattcgcgcggttctctcggtgatgccgctggatacgttcatcgaacacccggcgtcgcgcatggaggtggtcggcgaaccacacacgcttccggccgtgcagcgggaagcacaaaccgaagtcaacgccgcggaggggcgcgatgtgccgttcgcgccgatcgagcggtttgcgttttatgagcgggcgcgcaaagcgtattgcgtgatcgccaccggcgaagcgcgcggttacggttgcttcgtgttcacgaagggcgttctgctcgctccggacgcgccgcagtcg

SEQ ID NO: 13551 - DNA, 327 bp, Burkholderia fungorum
gtgggcagcaatcagagaggaactgtcatgagcaagatcaaaaccgcacggttcgacgcgtcacactacctcgatagcgaggaaatgatcgccgagtatctcaacgccgcgctggaagaaggcgacgccgacctcctgctcgccgcaatcgccgacatcgccaaagcgcgcggcatcgccaagatcgcggcagatgccggacttggccgcgaaagcctctacaaaacgctcgcgcccggttccaaaccacgcatggatacggtgttcaagctgctgcgcgcgctcggcgtcaaactcaacgcggtgccggaaggcgtggcggcggcc

SEQ ID NO: 13552 - DNA, 2343 bp, Burkholderia fungorum
atgaaaaaccgcacacgcgtctcctccgcagccctgctgctattcgccctggctgcccacgtccatgccgcaaccgacgaagggtccgtaaccggtgcggtcacggataccgccggccaacccgtcaataacgccaccgtgatcgtgcaggacgcgagcggcgccgccgtcggcgaggcgaaaacgaacgccgaaggccgcttcgtaatcgcgcatgtgacgccgggcacctatgctgtcgtcgtcaccgcaacgggattcgcgagcggcaacaacatcacgacgacgggcaccggcacgcaaagcgcggtcagtgtcagtctcgcgaagagcggcacactcgacgtccaggtgaatgcgaagcgactggacagagcgcgcaacgggttgtcgccggagaccggcagcagcgtgtaccgcttcagtcaggccgatatcgatgcgttgcccgcgggccaggacacgccgctcaatcaggtgctgctgcaggcgcccggcgtggcaagcgattcgtacgggcaattacacgtgcgcggagaccatgccaatctgcagtaccgcatcaacggcatcatcattcccgagccgatcagcggtttcgggcaggcgctcgatacgcggatcatcgaccaggtcaatctgctgaccggtgcgctgccggcacagtacggctaccgcacggcaggtgtcgtggacattcgcacgaagacgggcgaggcgggtaacggcggcagcatcgacgtattcggcggcagtcaccagaccctcaagaccagcgcagacgtgttcggcacgcaaggcccgttcagctactacttcagcggctcactcggcgtgaacaacctcggtatcgagaacccgactgcaagcgcgaacgccgtgcatgaccatactcgccagggcgatgcgttcggctatatgtcgtacatcatcaatccgctcacgcgggtgagcctgatgttcggcaccacgagcaaccagttcgaaatccccaacacgcccggtctgcagaccaatttcacgctcaatggcaatagcacgttcgattcgagtcagctgaacgaaacgcaatcggagttgaacaattttgcggtggtggcgcttcagggcaccaacgggggcgcactggactaccaggtcgcgctctttacccgctacacgcgaacgcagttcaatcccgacccggtgggcgacctgcttttcaacggcgtggcatcgcaggactttcacagtaactcggccaatggcgcccaggtggacaccacatggcgcctgaacgacaagcatacaattcgcgccggcctcttcttccagcaggagcacgctgtattcgacgacagcgtcaacgtattcgcaacggacgccgacggcaatcagttatcggaccagcccttcaatatccacgactcgagcagcaaaaccggctacctgtacagcgcctacgtgcaggacgagtggaaaatcaccagcaagctcacgctcaattacgggctgcgatacgacaagatggacgagtatgtcagcgcgagccagttgagtcctcgcatcggcctggtctatgcgctgacgcccaccaccacggttcacgccggctacgcgcgctacttcacgccgcccgcgttcgaactgttgtcgggttcgaccatcagccgcttcaatggcacgaccaaccagagtccgtcgagccagaacgatccggtgcagcccgagcgcagtcactacttcgatctcggcgtcacgcaacgtctgggttcgaacgtgaccatcggcgtggacgcgtactacaagaaatcgaccaacctgctcgacgaaggacagttcggctccgccctcattttcacgccgttcaattaccagtacggacgcgtgtacggactcgagttcaccgcaaactataagcaggacaacgtatctgcctacctgaatctcgcttacagccgcgcacaaggcaaacagatcgactcggcccagttcaatttcgaccccgacgaactcgcctatatcaacagtcattgggtgtatctcgatcacgaccagcgcgtcaccgcctcattcggcggaacgtacgacctcggcagaacgacgttcacattcgacggactggtgggtagcggcttgagaagcggttttgccaacaccgatcgccttcccgtctatgcgcagatcaatctcggcgtgatccagcatttcaaccagccgcttgtcggcaagttcgatgcgcgcctgctggtcgtcaatgcattcaatcgcgtctatgagttgcgcgacggatcgggcattggcgtgggtgcgccgcaatacggcccgcacttcgccgtttacgccggcatcaccaagcatttc

SEQ ID NO: 13553 - DNA, 954 bp, Burkholderia fungorum
atgagcaccatgaaaaccttggacatcatcgactcgcacaccggcggtgaaccgacccgcctcgtggtgtcgggcggcccggatctcggcggcggcacactggcgcaacggctcgacgtattgcgcacagggttcgacgaatggcgcgcgggcgtcgtcaccgaaccgcgcggctcggacgtcatggtgggcgcgctgctctgcgagccggacgacccgacctgcgccgccggcgtgatctttttcaacaacgtcggctatctcggcatgtgcgggcacggcacgatcggtctcgtcgtctcgctggcgcacctggggcggatcgggccggggcgtcaccgcatcgagacgccggtcggcgtcgtcgaagcgacgctcaacgaggacggcagcgtcgccgtgcgcaacgtgccggcctatcgctatcgcgagtccgtgcgggtggacgtgccgggccacggcgtgttgaccggcgatatcggctggggcggcaactggttctttctcgtggccgaccacgggcgcgcgctggaggcatcgcgtatcggcgaattgacggcgttcagcggagcgatccgcgacgggctgatcgcgcagcgcatcaccggcgcggagggcgcgctgatcgatcacatcgaactcttcggacccgcttcgcgtgacggtatcgacagccgcagcttcgtgctgtgtcccggcaacgcgtacgaccgctcgccgtgcggcaccggcacgagcgccaaggtggcctgtctcgcggccgacggcaaactggccgaaggcgcggtgtggcggcaggagagcattatcggcagcgtgttcgaggcgagctatcgccatgccggcgatggcgtccatgtgattcccaccattaccggccacgcgtacatcacggcgcaggcgcgcctgtgcttcgacgagcgcgatccctttgcctggggcatccgcacggca

SEQ ID NO: 13554 - DNA, 1413 bp, Burkholderia fungorum
atgaaacgcttcgaattgctggccaacacaatggccgacgagattcgctccggccggcgcctcgttggctcccggatgccttccctgcgtcagatcacaacgcaacacggcgtgagtcagtcaacggtattccgcgcgtactatcttctcgaagaatgggggctgattcgagcacgcgaacgctccggatactatgtagcgccgggtgccgcgcttaagcagccgctggcttcgaaccctcctcccgctttggcatccgccagggtcgagatcagcgacctcgtcttctcggtgctcgaggcagcgaagcatcccaacgtggttccgttcggctccgcatttccgtctcccaagctttttccccttcagcgccttgccagatcgctcgcgcactcgacccgtttgatcagtccgtggagcactgtcgtcgaccttccgccaggcaatgagcaactgcgtcgcgagatttcgctgcggtatatggcgatgggcatcgcgcaacccatggaagagcttgttgtcacgaatggcgcactggaggcgctcaatctttgtctgatggcggtgacgcggccgggagacgtggtggcgatcgagtcgcccggattctatgcggcgctgcaggcactcgaacgcctcgacttgcgggcggtggaaatcccggtcgatcccgtttcgggtcttgatctggaggctctggcccatgcgttcgagacgcagcccattcgggcatgctggttcatgacgaactttcagaacccgacaggcactacgatgtcgcaggagaagaagaaagcgctggtcgagcttctggcccggcacgacgtgccgctcattgaagacgatgtgtatggtgagctacatcacggagccgccaacccgctaccggcgagggtctttgaccagaagggactcgtcatgcactgcagttcattctcaaagacacttgcaccgggctatcgcattggctgggtagcggcgggccgtttcgccgggaaggtccaacgtctgaagttgatgaccaccttatcggccagcattcccgcgcaggccggcatagccgactatctgcagcacggcggctacgacaggcatctccggaaactacgtggcgcgttgcgcaatcagctggatacgatggatgccgcactgcaccgctggatgcctgctgattcgcactggacgcgaccgtccggtggctatttcgtctgggtccggctgccccaccatgtcgacgcgatgcaattgcatcgccttgcgatagaaaatggaatcagcattgcgccgggccccattttttccgcgcagcacgcattccgcgaccacatccgtttgaatttcggtcatccgtgggacgagagaaccgagctggctgttaaaaccctgtgctcgctgatcaaactgtccagccag

SEQ ID NO: 13555 - DNA, 420 bp, Burkholderia fungorum
atgagcgggcgagccgcccgagtcgaatcgatgctgcgttatttcaatccggtcggtgcgcacgagagcggtctgatcggcgaagacccggccggtgagctcaagcatggcccgctggctctcgttacggacgcgatgccggtcgtgacgatcgcgccgaacgacgcgctgctcgaaaagctgaagtcgaatcttcaggaagtgaaggcgcgaggcggcgaactgtatgtgtttgccgacgccgacacgcggatcggcagcgagccaggcattcacgtcatcagaatgccggagcattacggcccgttgtcgccgattctgcatgtggtgccgttgcagctactcgcttaccacacggcgtgcgcgcgcgggaccgatgtcgacaagccgagaaatctggcgaagtccgtcacggtggag

SEQ ID NO: 13556 - DNA, 1251 bp, Burkholderia fungorum
atgacaggccgcactctggtaacggcgcgcagcttgcgcgcgctcgattggctgaattttttcgtcgccaacgtgcaaacaggttttggaccgttcatcgcgtcctatctcgcctcgcataagtggacccagggcgagatcggcatggcgctctccgtgggcacgatcagcgcgatggtgagccaggtgcccggcggcgccgccgtcgatgcgttgcgcaacaagaaaggcgcggcggcgtgggcaatcattgcgatcattctgagcgcggtgctgctggccgtcagtccgacggtgctgccggtgatcgccgccgaggtgttccacggcttcgcgagttgcatgctgacgccggcgctcgcagcgatctcgttcgcactggtgggacgcgcgaatctcggcgaccggctggggcgcaatgcgcgctgggcgtcgatcggcagcgcggtcgcggccggcctgatgggcgtattcggcgaatactattcgccacgcgcggtgttctggctgaccgccgcgctcgccgtgcccgccctgttcgcgctgacgatgatccagcgcaccgacaccgtcgaattgccgaaggccgcgccgacgccgcagcagatcgagcggcgcgaaagtctgcgcgagttgttgcgcgacaggcggatgctgctgttcgcggcgtgcatcgtgctgttccacttgtcgaacgcggcgatgctcaatctcgccgccggcgaggtgacggccggcatgggcgacaacgtgcagctcgtgatcgcggcgtgcatcatcgtgccgcaggcgatcgtggcgatcatgtcgccgtgggtcgggcgctccgccgagcgttggggacgccggcccattctgctgctcggcttttcggcgctgccgatacgggcgctattgttcgccggaatcagcagcccctatctgctcgtgccggtgcagatgctcgacggtttgagcgcggccgtgttcggggtgatgctgccgctgattgccgccgacgtggcgggcggcaagggacgctataacctgtgtatcggcctgttcggattggccgccgggatcggggctacgttgagcaccaccgccgccgggttcgtggccgatcatttcggcaatgcggtgagcttttttggtctggccgcggccggcgcgctggcggttttgctggtgtgggcggccatgccggagacgcgcgacgcggcggctgaagacgaagcgccggtggcggacggagggaagtcggcggctcgg

SEQ ID NO: 13557 - DNA, 981 bp, Burkholderia fungorum
gtgcaaaaacgcaaactgggcaacggcggtctcgaagtgtcggcaatcggtctcgggtgcatgggcttgagcttcggctacggtcccgccacggagaaagccgccggcatccaactgattcgggccgcttacgagcagggtgtgaccttcttcgacaccgccgagtgctacgggccgttcgtcaacgaggaactggtcggcgaagccgtggcgccgtttcgtgaccacgtcgtgatcgccagcaagttcggctttcaggacggcgacacgaagaaaccgaccgacagccggcccgagaatatccgtgccgtggccgacgcttcgttgaaacgcctcaagaccgatcgtatcgacctgttctaccagcatcgcgtcgatccgaacgtgccgatcgaagatgtcgcgggcacggtcaaggacctgatccgggaaggcaaggtgaagcacttcggtttgtccgaagcgggcgagctgtcgatccgccgggcacacgcggtgcaaccggtggccgcgttgcaaagcgaatattcgttgtggtggcgcgagcctgaacacaaggtgctgcccaccctggaagaactgggtatcggcttcgtgccgttcagcccgctcggcaagggctttctgaccggcgcgatcgacgcggacaccaccttcgacgcaaccgacttccgcaacctcgtgccgcgcttctccgaagaaaaccgcaaggccaatgcgggcctcgtcgaagtgctgggccggctcgccgactcgaagggcgccacgcgtgcgcagatcgcgcttgcctggctgctcgcccagaagccgtggatcgtgccgattccggggacgaccaaactgcatcgcctgcaggaaaacgtcggcgcggccgcgctcgaactgtcggccgatgacctgagcgcgatcgaagccgcgctgcggcctatcgaagtggcgggcgatcgctatccagcgcaatggcagcagcgtgtggatcgc

SEQ ID NO: 13558 - DNA, 1458 bp, Burkholderia fungorum
atgaccacgttgaccttgaaagacccgtcgcttctgaaaacgcacgcgtacatcgcgggcgaatggcaaggcgcggacgacggctcgaccttcgaagtgaagaaccccgccacgggtgaaatcatcgcgaccgtgccgcgcatgggcacggcggaaacccgccgcgcgatcgacacggccaacgccgcgtggcccgcctggcgcgccacgaccgcgaagcagcgagcggtgatcctgcgcaaatggcacgacctgatgatggagaacgccgacgatctggcaaagatcctcaccacggaacaaggtaagccgctcgccgaagccaaaggcgaaatccagtacgccgcttcgttcctcgaatggttcgcggaagaaggcaagcgcgtgaacggcgacaccatcccgacgccggccaacgacaagcgcatcgtcgtgacgaaagaaccgatcggcgtgtgtgccgcgatcacgccgtggaacttccccgcggcgatgatcacgcgcaaggtcggtccggcgctggcggcgggctgcccgatcatcgtcaaaccggctgaagccacaccgctctccgcgctcgccctcgccgtgctggccgaacgcgccggcgtgccgcgcggcgtgttcaacgtcgtcaccggcgagccgaaagccattggcgcggaaatgacgggcaatccggtcgtgcgcaaactgtcgttcaccggttcgacgccggtcggccgtttgctgatggcgcagtgcgcgccgacagtcaagaaagtgtcgctcgaactcggcggcaacgcgccgttcatcgtattcgacgacgcggatctggatgccgcagtggccggcgcgattgcgtcgaagtatcgcaatagcggccagacctgtgtgtgcacgaaccgtttctatgtgcacgacaaggtctacgacgcgttcgccgaaaaactgcgcgtcgccgtcgaacagctcaaggttggccgcggcaccgaagacggcgtgacgcaaggtccgctgatcaacgaagccgccgtgctcaaggtcgagtcgcatatcgaagacgcgctcgccaaaggcgcgcgcatcgtcaccggcggcaagcgtcatgtgctcggccacggcttcttcgagccgaccgtgctcgcggatgtcacgccggccatgaaggtggcacgcgacgaaaccttcgggccgctcgcgccgctgttccgcttctcatcggacgaggaagtgatccgcctcgccaacgatacggagttcggtctcgcgtcgtacttctatagccgcgatatcggccgcgtctggcgggtcgccgaagcgctggaatacggcatggtcggcatcaatacgggcctcatctcgaatgaagtcgcgccattcggcggcgtcaagcaatcgggcctgggtcgcgaaggttcgcattacggtatcgatgattacgtggtcatcaagtacctgtgcgtcggcgggatc

SEQ ID NO: 13559 - DNA, 1140 bp, Burkholderia fungorum
gtggaagcaagaacgggtcgctggcggtcgctttggccggaatatggggcattaacgttacgtcatcgtgcagttcaggcatcacacaggccgtatcgcatgtccgggggccgctctcgtccggtttcatctgctcatgcgcggcccggttcgaaacacgctgttgaacgtgtcagaagagggaacatcatgaagttacgcatcaaagccgtgcttgcccatcttgcgtgcctcgcggccgctatcgctgcgcccctggcctttgcccaggatccggccgcctgccgcacggtgcattttgccgacatcggctggaccgatatcacctcgaccaccgcgctcgcttccaccgtgttcgaagggctcggctatcagccggtgacgaccgtcgcctccgtgcccatttcgttcgcaggcctgaagagcaaacagctggacgtgtcgctcggctactggtggccggtgcaggaaaaggcgatcgcgccgttcgtcgactcgaaatcgatccaggtgctgcaaccgcctaacctgtccggcgccaaggccacgttcgccgtgccgagctacgaatacgacgcaggattgaagactttcgccgacatcgccaaacaccgtgaccagctcgacggcaagatctacggcatcgaacccggcagcagcgcgaacgcggcgattcagaaaatgatcgccagcaatcagttcggcctccgcggcttcaagctgatcgaatcgagtgaagcgggcatgctcgtctcggtcgatcgcgcgatccgcgagaagaaatgggtggtctttctcggctgggaacctcatccgatgaacatccagatcgatatgaaatacctcaccggcagcgagggcgtattcggtcccaacgacggcgaagcacgcgtttatacgctgacgtcccccgactttctgacgcgctgcccgaacgcgggcaagctcgtgagcaatctgcgcttttcgacgcagctcgaaaacgtggtgatgcaatcggtcatgaacaaggaaaaacccgccgacgccgccagagcgtatctgaagaaaaacccgcaagtactcgatgcatggcttgccggcgtaaagacttatgacggcaaggaaggcctgcccgcggtcaagtcttatctgggtctt

SEQ ID NO: 13560 - DNA, 744 bp, Burkholderia fungorum
atggacaatccgaagcgcatcctgatcgtcgaagacgacgtcgacattgccaacgtgctgagccttcatttgcgcgacgagcgctatgaagtcgtgcatagtgccgacggcaatgaagggctgcgtctgctggaacagggcggctgggatgcgctgattctcgatctgatgctgcccggcgtcgacggactggaaatctgccggcgcgcccgcgcgatgacacgctatacgccgatcatcatcaccagcgcgcgttcgagcgaggtgcaccgtattctcggcctcgaactgggcgcggacgactatctcgccaagccgttctccgtgctggaactggtggcgcgcgtcaaggctctgctgcgccgcgtcgacgccctcgcgaaagattcgcggatcgaagccggcaatctgcggattgccgggctctcgatcgatccgctcacgcgcgaggcggccgccaacggcaagccgatcgaactcacaccgcgcgaattcgacctgctgtattacttcgcgcagcatcccggcaaggtgttctcgcgaatggacctgctcaatgccgtgtggggctatcagcacgagggctacgagcacaccgtcaacacgcatatcaaccggctgcgcgcgaagatcgaggccgatccggcccagcccgagcgcatcctgaccgtctggggacgcggctacaagctcgccgtgcctggagagacacccgcgcccaccggcgcaccgaaggacgcatcg

SEQ ID NO: 13561 - DNA, 924 bp, Burkholderia fungorum
atgactgctttcgacgtacgtatcggcatcaatccgttatcgtggatgaacgacgatctgccttcgctcggcggcgaaacgccgctcgaggtggcgttgacggaaggccgccagattggctatcaaggcttcgaactcggcaacaagtttccgcgcgagccgcaggcattgaaagcgctgctcgcgcagtacgatctcgcgctggtatcgggctggtattccgggcggctcgcgcggcgcagcgtggaagaagaaatcgccgctgtcggcccacacctggagctgctcgcgcagaacggcgcgacagcgatggtgtatggcgaagtcgccgattcgattcagggcgcagcgcagccgctttatcaacggccgcgttttttcagcgacgcgcaatgggccgcctatgcggcgcgcgtggacgaattcgcgcgctatacgctgagccgcggcgtgcggctcgcgtaccatcatcacatgggcgcttatgtcgagacaccggccgatgtcgatcaactgatgtcacgcaccggcgaggccgtcggcctgctgttcgacgcgggacacatcacgtttgccggcggcgatccgctcgccgtgctcgacaaacatatcgggcgggtttgccacgtgcactgcaaggacgtgcgccccgctgtgatgaagctcgcgcgcaatcgcaactggagttttctcgacgcagtcatcgccggcgccttcacagtgcccggagacggcgctgtcaatttcgcggcgatcatcgaacgattgaagcgccacggttatcgcggctggctggtggtggaagccgaacaggacccggtcgtggcgccttcgttcgagtatgcacagaaaggctaccagacgttgcgcgcgctggtggatgcgccgctcgacgcggctgacaggagcaggcaggaggcagca

SEQ ID NO: 13562 - DNA, 939 bp, Burkholderia fungorum
atgagcgcggcgggggtagccatgcagattggcgcgcccgggggaggggcggctgacgcagcggcggctgacgcaggcgcggccggcacacgagtggccggagcgggggcggctgacgcaggcatgatgtccgcgcccatgtccgctgtcgatgcggaccgcggcggcgcgccggtttcgcatcggccgctcgggattctcgcggctttgccgcaagaactcggcgatctgctcgaagcgatgcgcgccgaggccggcgtgcgcacgatcacccacggtcaacgcgactatcacctgggcaccgttcacggggcgccgtgcgtcgtcacgctggcgcgcgtcggcaaggtcgcggcggcggccacggtcagcgcgctgatccatgctttcgacgtggaagcgatcgtgtttacgggtgtggccggtggcgtcggcgccgaggtgcgggtgggcgatatcgtcgtcgccgacgcgctgctgcagcacgatctcgacgcgtcgccgctgtttccgcgtttcgaagtgccgttgctgggcgtctcgcatttcagcgccgatgcggccttggccgggcagttggcggcggcctgcgagcgtttcgtcgccgaagaaggcgcggcctcggcggcgcgctttggcacgcgcgagccgcgcgtgcatcgcgggttgattatcagcggcgatcagttcgtggccagcgccgagggtgtgcgcgctttgcgcgatgcgttgccgaacgcgctcgccgtggaaatggaaggcgcggcgatcgcgcaggtgtgtcacgaatacggcgtgccgtgcgcggtcgtgcggactatctcggatacggcggacgatcacgcgccggcatctttcgtgtcgtttctcacggagatcgccggcacgtattcgaacgcgatcctgacgcggtttctgcaggcgcgcggctcgcgggtt

SEQ ID NO: 13563 - DNA, 2877 bp, Burkholderia fungorum
atgagcgagaccccgagcgacaccacctccacgcttgccaaaagcttcgagccccagaccatcgaagcccactggggccccgaatgggaaaagcgcgcttacgcgacgcccgtcatccaggaaaaccggaaagacttctccatccagctgccgccgccgaacgtcacgggcaccctccacatgggccacgcgttcaaccagacgatcatggacggcctcacccgctaccaccgcatgctcggcgaaaacaccctgtgggtgccgggcacggaccacgcgggtatcgccacgcagatcgtggtcgagcggcaactggacgcgcaaggcgtctcgcgccacgacctcggccgcgaaaagttcgtcgaacgcgtgtgggaatggaagcagcaatccggctcgaccatcacgaaccaggtgcggcgcctcggcgcctcgatcgactggtcgcgcgaatacttcacgatggacgacaagatgtcggccgccgtgcgcgacgtgttcgtccgcctgtatgaacaaggcctgatctatcgcggcaagcgcctcgtgaactgggacccggcgctgctcaccgccgtctccgacctcgaagtggtcagcgaggaagaaaacggctcgctctggcacatccagtacccgctcacggacggctcgggccatctgacggtcgccaccacgcgtccggaaaccatgctcggcgacaccgccgtgatggtccacccggaagacgggcgctacgcgcatctgatcggcaagacagtcacgctgccgctgtcgggccgagaagtgccgatcatcgcggatgattatgtagaccgcgaattcggcaccggcgtcgtcaaggtcacgcccgcgcacgatttcaacgactaccaggtcggcctgcgccacaagctgccgcaaatcgaaatcctcacgctcgacgcgaagatcaacgacaacgcgccggagcaataccgcggcctcgaccgcttcgaagcccgcaagcaggtggtggccgacctcgaagcgctcggcgtgctcgaatcggtcaagccgcacaagctgatggtgccgcgcggcgaccgcacgggcgtcgtgatcgagccgatgctgacggaccaatggttcgtcgccatgagcaagccggcgccggaaggcaccttcaatccgggcaaatcgatcgccgaaacggcactcgacgtggtgcgcagcggcgaaatcaggttcgtgccggaaaactggaccaccacttactaccagtggctcgagaacattcaggactggtgcatctcgcgccagctctggtggggtcatcagatcccggcgtggtacggcgaaaacggcgaaatcttcgtggcgaaaaccgaagaagacgcgcgcgccaaggccacggcagccggctacacgggcgccctcaagcgcgacgaagacgtgctggacacgtggttctcgtctgctctggtgccgttctcgtcgctcggctggccgaatgaaacgctggagctcaagcacttcctgccttcttcggtgctggtcaccggcttcgacatcatcttcttctgggtcgcgcgcatggtcatgatgaccacgcacttcaccggcaaggtgccgttcgacacggtgtacgtgcacggtctcgtgcgcgacgccgaaggccagaaaatgtcgaagagcaagggcaatacgctcgacccgatcgatatcgtcgacggcatcgacctcgacgcgctggtcgccaagcgcaccaccggcctgatgaatccgaagcaggccgcgtcgatcgaaaagaagacccgcaaggaattccccgacggcattccggcattcggcaccgacgcattgcgcttcacgatggcctcgatggccacgctcggacgcaacgtcaacttcgatctcgcgcgctgcgaaggctaccgcaacttctgcaacaagctgtggaatgccacccgtttcgtgctgatgaactgcgaaggccacgattgcggcttcggcaaaccggaacaatgcggcgaatgcggtccggacggacacctgcatttttcgcaggccgacttctggatcgtctcgcgtctgcagcgcgtggaagcggaaatcgccaggggcttcgccgactatcgttttgacaatgtggccaacgccctatacaagttcgtatgggacgaatactgtgactggtatctcgaactcgccaaggttcagatccagacgggtcagccgaaccagcagcgcgcaacacgccgcacgctgctgcgcgtgctcgagacggtgctgcgtctggcgcatccggtgatcccgttcatcaccgaagcgctgtggcagaaagtagcgccgttggccgggcgttatcccgaaggcaaagccgagggcgaagcgtccatcatggtgcagccgtaccccgttgccgaaccgtcgaagatcgatgaagacgcggagcaatgggcggccgacctgaaagcggtgatcgatgcgtgccggaatctgcgcggcgaaatgaacctgtcgccggcagtcaaggtgccgttgctcgctgccggcaacgcggagcgtctgcgcacgtttgctccgtacgcacaggcattggcccgtttgtccgaagtgcagatcattgccgacgaggcagcgctggatgcgcaggcggatggcgcgccaattgctatcgtagggaatgacaagctcgtgctgaaggtggaaatcgacgtggcagtcgagcgcgagcggttgtcgaaggagattgcgcggttgagcacggaaatcatcaagtgcaacggcaaattgcagaatgaaagtttcgttgcaaaggcgccgccggcagtcgttgagcaggagcagaaaagactggctgaattcgaagccaccctgggcaagctgaaggcccagttggtgcgtttgccggtc

SEQ ID NO: 13564 - DNA, 879 bp, Burkholderia fungorum
atgctaaaagttacaaaggcagtttttccggtagcaggtcttggcacccggttcctccctgccacgaaggcgagcccgaaagagatgctgccgatcgtcgacaagccgctgatccagtacgcggtcgaagaggcaatggcggccggcatcaccgaaatgatcttcgtcacgggccgcagcaagcgcgcgatcgaggaccacttcgacaaatcttacgaaatcgaagccgagttgcaggcgcgcggcaaggacaagctgctggaactcgtgcgcagcatcaagccgagccatgtggactgtttctacgtgcgtcagccggaagcgttgggcctgggccacgcggtgctgtgcgccgaaaagctggtgggcgacaacccgtttgccgtgattctcgcggacgacctgctgtacggcacgccgcctgtcatggcgcagatgatcgaggtgttcgatcactatcacagctcggtgatcggcgtcgaagagatcccggcgcaggaaaccaagtcgtacggcatcgtcgacggcaaggagtgggaagattcgatcatcaagatgtcgggcatcgtcgaaaagccggagccgaacgtggcgccgtcgaatcttggtgtggtgggccgctatgtgctcaagccgcgcatcttcgaacatctgcgtgcgctgaagccgggcgcaggcggtgaattgcagctgacggacgcaattcaatcgctgctcgccgacgaacaggtgctggcgtacaagtatcacggcacgcgtttcgactgcggcagcaagctgggttatctgaaggcgacggttgaattcgcgctgcgtcacccggaagtggctgcggatttcgaagaatatctgcgcacgcgttcgccggtactggaaggc

SEQ ID NO: 13565 - DNA, 1707 bp, Burkholderia fungorum
atgaataccgaacgcaacgacgcgccagcggcatccaatttcatccgcaacatcattgacgaagacaaccgcaccggcaagtggggccagcgcgtcgaaacgcgctttccgcccgagccgaacggctatctgcatatcggtcacgccaagagcatctgcctgaacttcggcgtggcgcgcagctacggcggcgtgtgccatctgcgctttgacgacaccaacccggaaaaggaaagcgtcgaatacgtcgactcgatcatcgacgccgtgcgctggctcggcttcgagtgggaaaaagacggcaaggaacagctctactacgcgagcgactactacgacaagctgtacgaattcgccgaactgctgatccagcgcggcaaggcgtacgtggacagccagtcggccgaggaaatgcgcgcgaaccgcggttcggccacggaagtcggcacaccctcgccgtttcgcgaacgttcggtgcaggagaacctcgacctgttccgccgcatgaaagccggcgagttcaaggaaggcgagcacgtgctgcgcgcgaagatcgacatgtcgtcgccgaacttcaacatgcgcgatccggtcatctaccggatccgcttcgcgcatcactaccgtaccggcgacaaatggtgcgtgtaccccatgtacgactacacgcactgcatttcggacgcgctggaaaacatcacgcattcgctgtgcacgctcgagttcgaagatcatcgtccgctgtacgactggatcctgaacgagctcgcggaagccggcattttcacgcgcccgctgccgcagcaaatcgaattctcgcgcctgaacctgacctatgcgatcaccagcaagcgcaagctgctgcaactcgtgaccgaaggccatgtagacggctgggacgatccgcgtatgccgaccatcgtcggcgtgcggcggcgcggcttcacgccggaatcgatccagttgttctgcgagcgtatcggcatcaccaaggtcgattcgtggatcgacatgagcgtgttcgaaggcgcgctgcgcgacgatctggacgagaaagcaccgcgcaccgccgccgtcctcgatccggtcaaactgatcatcgacaacttcccggaaggcgtaacggagccgtgcaatgcgccggtccacccgcatcatccggaaatgggcgtgcgggagtttccgatttcgcgcgagctgtggatcgaacgcgacgactacaacgaaacgccgccgaagggctacttccgcctgttcccgggcaacaaggttcgcctgcgctacggctacgtgatcgaatgcattggcgcggacaaggacgagaacggcaacatcgtcgcggttcactgcaactacttcccggacagcaaatcgggcaccgaaggcgcgaacaactacaaggtcaagggcaacatccactgggtcagcgcggcagccgcatgcccggccgaagtgcgtatctacgaccgtctgttcaaggaaccgcaaccggacgccggcggccgcgacttcctcgaagcgctgaatcccgattcgaagcgcgtggtcaacgcgtacctggaaccgggcgcgcgcgaggcgctgccggagcaacgctatcagttcgagcgccacggctacttcgttgccgatcgcgtcgattcgaaaccgggcaagcccgtattcaatcgcatcgtcagcctgcgcgatagttggggcaagccggcg

SEQ ID NO: 13566 - DNA, 1050 bp, Burkholderia fungorum
gtgttcgcgagcgccagtcccggaggtccgatgaaagttgcagcccatcgcagggcaagtatcgagctcacaacaccggctgcaacgcggcccgcagcaaggcgcgcatcgggcatcggcgcgcgtgccacgtgcggcggcgcacgcggtgcgcgtagtgcgcgtggcgcactcatggcgctggccgcgttcggtgcggtatcgctggccggctccgtacatgcggatgaactcaccggcacgctgaagaaaattcacgacgacggcgtagtcgtgctcggcgtgcgggaagcgtcgattcccttttcctacttcgacggcaagggcacggtcggctactcgcagaccatcgcgctgcaaatcgtcgacgagatcaagaaaacgctcggcatgccgcaactgaaggtgcacgagatcaccgtcacctcgtccaaccgtacgccgatgctgctcaacaaccagatcgatctggaatgcggctcgaccacgcacacggtggaacgcgaaagtgtggccgcgttctccgacagtttcttccagtacgccgtgcgcatgatcgcgcgcaaaagcagcggcattacggactttcaggacctggccggcaaaacggtcgtgacgacggcgggcacctcggacgaacgcctgctgcgccgtctgaacaccgacaagcatttgaacatgcgcatcaccagtgcgcgggatcacctcgaagcctttggcgcggtcaaggacgaccgggcggtagccttcgtgatggacgagccgattgtgtacggcttcaaatcaaccgatccgcgccccgacgatttcgtggtgaccggcacgccgcttggctatgaagtctatgcgtgcatgttccgcaagggcgacgagccgtttcgcaacctcgtgaacggcgtgatcgcgcgcggccagacttccggtgaagcggaacgtctgtacaggcaatggttcacgcagcccattccgccgcacggcatcaatctgaattttccgctctcggaacagaatcgcgccctgttcgcgcatcccaacgaccgcgcactcgac

SEQ ID NO: 13567 - DNA, 726 bp, Burkholderia fungorum
atgtctttcgactcaaccgcgccggctgcgggcgcccaagctcagatcgtggccgacgcgacgctcacgcgcgccgaggtggagcaactcatcgcagcgagcggcgccggcaatcaggcgccgctgcatttcaccgactgcgatttcgagggcgtggacctgtcgcggctcgatctgcgcggcgccgggttccagcgttgcacgatcgccgagacttcgttttttggcgcgaacctctcgcatagccgctgggttcgctgtcgtggccgagaggcggatttcgggtcggccgatctggtcgacgcgcagttccagtcgagcgacctgaacaacaccagttggcgccgtgccaagctcgcttcggcgtcgtttcacggttgcaagctgaccggcgccaatttcgaagcgtgcgcggcgctgggtttgagcttcgtcgaaagcctgctggtcggcgcacatttgcggggcctgtcgtttcgcaaagccaccctgcatcagctggatttctccgacgccgaccttgccggagtcgatttccgcgaggcgatcttcgacggcggcagcctgaaagacgcgcatctgaagggcgcgcgcttcgacggcgcggacctgcgcgaagccgacctgagcggcgtgcggctcgtcgacgcagcgctcttcaagggcgcgacgatctcgcatgcccaggcggccgtgctcgtcaccgagctgggtttgcgagtcctg

SEQ ID NO: 13568 - DNA, 1800 bp, Burkholderia fungorum
atggattcgtcagccaactctttgatcaaccccgacgcccgcatgggcctcgccggcgcgcagcctggcgccggtgcggccggcgccggccaggccggcggcgcggacctgggtggcctgtcgggcggtctcggcggcaatttcggtcagcgcctgtcaggcctcgcgcaaatgcgcggcaacccgcgcgccccgttgattttcgcagtcgcgctgctggtcgccgtggtggcgggcctgttcctgtggtcgcgggcgccggactacaaggtgctctacagcaatctgtcggaccgcgacggcggcgccatcatcaccgcgttgcaggcggccaacattccctacaagttctccgacgcgggcggggcgatcctcgtgccggccgagcaggtgcatgaaatgcggctgcgcctcgcgtcgcaggggttgcccaagagcggctcggtcggcttcgaactgatggacaaccagaagttcggcatcagccagttcgccgagcagatcaactatcagcgcgcactggaaggcgaactggagcgcacggtcgaatcgatttcgtcggtgaaatcggcccgcgtgcatctggcgattccgaagccctccgtattcgtgcgcgacaaggaagcgccgtccgcctccgtgctggtcaacctttacccgggccgcgcgctcgacgaaggccaggtgctggcgatcacgcatatggtctcctcggcggtgccggatatgccggtgaagggcgtgaccattctcgaccaggacggcaatctgctcacgcagccgtccaccggcagcggcctcgacgcttcgcaactgaaataccgccagcagatcgagcgcagcacccagcagcgcatcgacgcgatcctcgcgccgctgttcggctcgggcaacgcgcattcgcaagtgagcgccgacatcgacttctcgcgcagcgagcagacctcggaaaactacggcccgaacggcaacccacaacaggcggcgatccgcagccagcagtcgagcagcgccaccgaaatgtcgcaaggcggcgcctcgggcgtgccgggcgcgctgtcgaaccagccgccgcagccggcttcggcgccgatcaacgcgccgaccggcgcgagcggcgtgacgaccacgccggtcagcgaccgcaaggattcgaccaccaactacgaactcgacaagaccgtacggcacctcgaacggccgatgggcggcatcaagcgtctgtcggtggcggtggtggtgaattacctgcgggtggtcgacgccaagggtcatgccaccatgcagccggtcaccgccgacaagctcgcgcaggtcaatcagctggtcaaggacgcgatgggcttcgatgccgcgcgcggcgactcggtcaacgtggtcaacagtccgttcaccaccgacctcgacccgaacgccgacctgccgtggtggcgcacgccggacatgatcgcgctcgccaggcaggtcgccacttacctcggcatcggcgcggtcgccctgttcctttacttcgtgatggtgaagccggcgctgcgccgcgccttcccgccgccggagccggtggtcgccggggcgctgccgtcgccggacgagccgatcctgctggatggcattcccgccgccgagcgcgcgggcgcgggcggaagttcggtcgccgaactggaatccgacagcgaactgctcgcgctcgaaaactccaagcacaaatatgagcggaacctggaattcgcgcgcaacatcgcgcgccaggatccgaagatcgtcgcaaccgtcgtgaaaaattgggtgtccgatgagcgc

SEQ ID NO: 13569 - DNA, 993 bp, Burkholderia fungorum
atgagcgctgaaggcgtaatgaagagcgcgctcctgctgatgtcgattggcgaggaagaagccgcgcaggtgttcaagttcctcgggccgcgcgaagtccagaagatcggcgtcgcgatggccgcactgaagagcgtgacccgcgagcaggtcgacgaagtcctgcaggagttcgtgcgcgaggccgagcagcacaccggcatgtcgctcgattcgagcgagtacatccgctcggtgctgaccaaggcgctcggcgacgacaaggccggcgcgatcatcgaccggattctgcagggcagcgataccagcggtatcgaaggcctgaagtggatggattccgcggcggtcgccgaactcatcaagaacgagcatccgcagatcatcgccaccatcctcgttcacctggaccgcgatcaggcgtcggaaatcgtcgcctgcttcacggagcggctgcgcaacgacgtgctgctgcgcatcgccacgctcgacggcatccagccggccgcgctgcgcgaactcgacgacgtgctgacgggcctcctgtccggcagcgacaacctcaagcgcagcccgatgggcggcatccgcacggcggccgaaattctcaacttcatgtcgagcaatcatgaagaaggcgtgatcgagaacgttcgccagtacgacgcggaacttgcgcagaagatcattgatcagatgtttgtgttcgagaacctgctcgatctggaagaccgcgcgatccagctgctgctgaaggaagtcgagtccgaagcgttgatcatctcgctaaagggcgcgccgcccgcgctgcgccagaagttcctgtcgaacatgtcgcagcgtgccgccgaactgctcgccgaagatctggacgcgcgcggtccggtgcgcgtctccgaagtcgagacgcagcagcgccgcatcctgcagatcgtgcgcaacctggccgaaggcggccagatcgttctaggcggcaaggccgaagatgcatatgtc

SEQ ID NO: 13570 - DNA, 1041 bp, Burkholderia fungorum
atgacgacggctgcggcacggcttcgggtgggcgtggttgggctcggccgtctcggcaagcggcacgcggagaatctggcgtatcgcgtgccgggcgcgtcggtcgtggcggcttgcagtccggtggaggaggagcgcgagtgggcgcgtgaggcattgcccgcgccgcgtctgtacgacgactacgcggcgttgctcgccgatcgcgaggtggacgcggtctggctggtcacgccgtcttcgctgcatgcgcagcagatcgtcgacgcgttgcgcgcgggcaagcatgtgttctgcgagaagcccttgtcgctggatcttgcggaatgcgagcgcgtgctggcggaggccgcgcggtatccgcatctgcaggccacgatcgggttcatgcggcgcttcgatccgagctacaaggacgcgttcgacaggattgcagcggggaagatcgggcggccttttctcgtgcgctcgcagactgcggatcagaacgatcgtgacggtttttttgtgcgctttgcggcgacctcgggcggcatctttctcgattgcaccgtgcacgatatcgatgtggcgcgctggctgctcggcaagccgcgcgcgaaacgggtgtttgcagcgggtgcggcagtgatgcatgaaggcctgcgtgaattcggcgatgtcgataacggcgtggcgatctgcgagttcgaagatggcaagctggccgtgttttacgcgtcgcggacgcaggcgcacggcaatgatacgcatagcgaagtgatgggtacggccggggcgctggctattggccataatccgcgtgcgaaccgcgtcgagatttacgatgccaccgggatccggaacgaatgcacggcgaattttttcgatcgcttcgaggacgcgtttctgttcgaggcgcgggcatttgtggtggccgtgcgggatggggtggcgtcttccgccgctcgggccggggcttcgcttgctgatgcgttagaggcgacgcggattgcggtggcgttgagggagtcgttgttgaccgggcaggctgtgatggtg

SEQ ID NO: 13571 - DNA, 1332 bp, Burkholderia fungorum
atgttcttcaatgcccgcacgcagaggcatcgcgtgagcgatcaatatgcaatgcgcgcggtgccggcagtgaaagcgccgcgcatccgcacgaacttcctcgccatgatggtatggcaggtcggcaactacctcgtgccgctggcgacgtttccatatctgacgcgtgtgctcggcgcggcgaatttcggcgtgctcgggtatgcgatggcgatcgccacgtacggaatgctggtgacggagtggggtttttttctcagcggccccaaggcggtagttgatcgccgagagcggccggaagcgcttaacgaactcgtctggtcgacgatgatcgcgaagggatgcctatgcgcactctcgtttgcggtgctgctgaccgtcgtgcactttgatcgcaagctggcttcggtctttcccgtggtactcgcggcatggccgatggcgatcggcaacgtctttacgttgaactggctattgcaaggattggagcgctttccggtgtttgcgacggtggcgttggcgggccgctttgcggcgttgccgctgacgttcatcttcgttcgcgatagtggcgacgttgctttcgcggcggggatccagggaggagcggcggttctgaccggtctgttctctctggtcgccgcacggcgtctgggtgtgctgcgccttccctcggcctcggcacgttcggtttgccagcgcgttcgggaaagcgccgacatgttcatttcgtcggcgtccgtgagtcttttcggcatcacgaacgccgtcattctcgcctcaatggcgacgccgtatcaggtgggcatctatacggccgccgacaagctgaaaaccgtggccaacatggtgccggcccagatcaatacggtttgctacccgcgtatcgcgtcgttattcaaggcgcagccccgctcggctgcgcggcttacggttatcggcgcacttgccactatggcgacgacacttgccggcctggctgtcgtcgcctgtgcgtcggcgccccttaccgcattgatattgggtgcgggctacgccggttcggcgtcgctgctgaagctgctttgcggggcaacggtattcggcaatctggcttatttcctcggattgcaggtgctggtgccattcgggagagctcgtacccgctcgttgttgatgctggccgccggcgcgctaaacgttggcctggcgctcgttctgacgccgcgtttcggcgccgagggcgcggcgatgtcggtgctcgccgcggaggcagcgttgcttgccgtgtttgtggcgatgatcctgagcagaccatcgctgcgccaccactttacccaactgttgattcga

SEQ ID NO: 13572 - DNA, 3462 bp, Burkholderia fungorum
atgaagcgtgacgatccagcccaaaccacgtcgcaagcccactcgagcgccgccaccggcggcgtcgcgaaagcgcgcacgcatcggcgcggcaaacccgcggccttgagcgacgatccgctctggtacaaagacgcgatcatttaccaggtgcacatcaagtcattcttcgacgcgaacaacgacggcgtcggcgactttcccggcctgatcgcgaagctcgactacatcgccgaactcggtgtgaacgcgatctggctgctgccgttctatccgtcgccacggcgcgacgatgggtatgacattgccgattaccgcaacgtgcatccggactacggcaatctgtccgacgtaaagcgcttcattcaggaagcgcacgcacgcggcattcgtgtgattaccgaattggtgatcaaccacacgtcggaccagcatccgtggtttcagcgcgcgcgccgcgcgaagccgggttcgaaccaccgtaactactacgtgtggtccaacaccgatcagaagtatctggaaacgcggatcatcttcatcgattcggagccgtccaactggacgcacgatccggtagcgggcgcgtattactggcaccgcttctactcgcatcagcccgatctgaatttcgacaatccggccgtgttgagggaggtgctgcaggtcatgcgcttctggctcgatatgggcatcgacgggttacggctcgacgcggtgccgtatctggtggaacgtgaaggcaccaacaacgagaacctgccggaaacgcacgcggtgctcaagaagattcgcgccacgatcgacgccgaatatccgaaccggatgctgctcgccgaagccaaccagtggccggaagacgtgaaggaatatttcggcgacgaagacgaatgccacatggcgttccacttcccgctgatgccgcgcatctacatgtcgattgcgagcgaagaccgcttcccgatcaccgacatcatgcggcaaacaccggacctcgccgaaacgaaccagtgggcgattttcctgcgcaatcacgacgaactgacgctggaaatggtcacggattccgagcgcgactatctgtggaacacctacgcgagcgatcgccgcgcgcgcctgaatctcggcattcgccgccgtctcgcgccgttgatggaacgcgaccgccgccgtatcgagctgatcaattcgctgctgctctccatgcccggcacgcccgtgatctattacggcgacgaactcggcatgggcgacaacattcacctcggcgaccgcgacggcgtgcgcacgccgatgcaatggtcatcggaccgcaacggcggtttttcgcgcgccgaccctgagcaactcgtgctgccgccggtcatgggctcgctgtatggtttcgacgcggtgaatgtggaagcgcaaagccgcgacccgcattcgctgctgaactggacccggcgcatgctcgccacgcgtcgcgcgaagcagactttcgggcgcggcacgatccgtttcctgaagccggaaaaccgcaagattctcgcgtacctgcgcgagatgccgggcgagccgccgattctctgcgtggcgaatctctcgcgcgcgccgcaagcggtggagctcgatctgtccgaattcgacggctccgtgccgatcgaaatgaccgcggactccgtgttcccgccgatcggccaactgacgtatctgctgacgttcccgccgtacggcttcctgtggttcatgctgtgccccggcggccaacgtcctacctgggctcaagcgccttctgagccgctgcctgaattcgtcacgatcgtgattcgcgaaggccaggtcggtccgacgccggagaacgtgcgcctgctcgaatcggaagtgctgccttcatggctgagccggcgccgctggtttgcgtcgaaggatcagaagctcaatgcggtgcggctcgcggcattgaccacgattccgaacggcggctttgcgttcaccgaaatcgaagcggacgtgggcaagcataccgaacgctacgtggtgccgatcgcgattacgtggggcggcgaaaccactttcccgctgttcaagcaactggcgttggctcgcgtgcgacgcggccgcaatgtcggtcatctgacggacgcgttcgccctgccgatcttcgctcatggcgtgatgcgcaagctgcgcgaacgcgccgtggtgccgaccgtgcagaagagcgaaatcaggttcctgccgaccgaacgtttcgccgaactcgaaggactcggcgaacggcccgagatccgctggctcgcggcggagcagagcaacagttcgctgatcatcgcggacgccgcggtgctgaaactggtgcgccgtctcgtgagcggcattcatccggaagccgaaatcagccgctatctgacgcaattgggctatgcgaacaccgcgccgctgtatggcgaagtggtgcgcgtggatccggaaggcgtgccgcacaccctctgcattctgcaaggctatatcgacaatcagggtgacgcgtggaactggtcgctcgactatctgcgccgctcggtggacgaactcgccattgccgtcgataccgaaacgcagtcggtgccggaccgttccaacgaggcgattctggtggaaggctacagcacgctggccggcatcatcggcagacgcctgggcgaactgcacgtggcgctcgcctcgccgacggacgacccggcattcgcgccggaacccgccagcgcggagcaggtgaaggcatgggtcgacggcacgcaggccatgctcgccagcgcgctggatctgctcgcgccgcgtatcgagcagatgagcgatacggaaacccgggcgctggcgcagagcctgatagaccgtcgtgcggcattggttgccgctgtcgactcgctggtttccgccaacgcgggcgcgctgcgcattcgcattcacggcgatttccacctcggccaggtgctggtcgcgcagggcgacgcgtatctgatcgactttgaaggcgagccggcacggacgctcgaacaacgtcgtcagaaatcgagcccgttgcgcgacgtggccggtctgctgcgctcgctctcatatgccagcgcggccgcgcaatccaccacggaagccgcgccgcaacagaccgccgatcgcaagcgcgcgctgttcgaccgtttccgcgcgcatgccgcggagaagttcctcaacgagtaccgcgcggccgctgcggaagcggcaacgccgctcgtcgcgcccgaagccgaacaggccttgctcgatctgttcctgatcgaaaaagccgcgtacgaaatccgttacgaagcggccaaccgcccgacgtggctcagcctgccggtacgcggccttgccgcgctcaccagccgcctgctcggcgataccggcgcgccgggccacgattcctcaaaccaggcgccaggcgccgccacaccgcctaatccggccgagggcgactatgag

SEQ ID NO: 13573 - DNA, 5586 bp, Burkholderia fungorum
atgaaagcgtccacgcgtaccgccttacgacaactcgaacaaagccgcctggtgcggggcgacatgcctgaccggaccgctcagtcgtcacgactgcgctggttcgccagcatgccgtcgcgcagctattgctggtggcagcgtgcggtgtccgcgctggtcgcggtgacgctcttcgcgggaccgctttcggtgaccttcgagcagagtcgcgatgcggctgacgtgctcgctgcgggtaaccggcgcctcgacgacgaggcgtggcagcggatcatcgatctggctgcggtgcgcgtgcgcttcgccatgcaggaagcgcaggcgacgccgatggtcgaccccaccgcgccgatctcgtttcagcccaaaatcacgcaatccaccggagccggtggcggggttccggttgtcaacatcacggcaccgaacgcggccggcatctcgctcaatcaatatcagagctttaacattgacccggttggcctgatcctcaacaacagtctgatgtcgggcacgtcgctcacaggcggcaatgtgcaggccaacccgaacctgagcggccgcacggcgagcgtgatcgtcaaccaggtgacgtcgaccgggacggcctacgccagcctgctgaatggaccactggaagtattcggcgcacccgcgaccgtcatcatcgtcaatccgaacgggattgccacacagggcaccggttttaccaatacgatcggcgtcacgctttccacgggcacgccgcagtttctgaccggggtcggcggcacgcccaccagttttgacagtgcgcaggcgattggttacaacgtcacgggtggacacatccagatcgagggtaatgccggagtcaacggacctggctcgggcatcgaaggtacggtcggcacgattgatctgattgccgaaactattggcgtcaatgcaccgctgtatgccgggacgcgtatcaatgcgatagcgggcgaccagtttgtatcgccgtccgccgtggacgcgacgggcaccacttacacgaccgcggcaaacggatcggccaatacggctgctgcaattaacgcggcgaatggaaatgccaacaacggcctcgctatcgacgccaccgcctatggggcaatgacggctggccagatccaggtgatcggcacggccgccggcatgggcgtgcgcaccgatgcgcaactcgcggcgaatgcgggtgacctgtcgttatcggtgaatggcgacgtcacgatggcgggtagcgcggcgcagcagcaggcgagcgtgacatcgagcggcaatgtttcgctgaccggcacgcacatcggcgtcggtggctacgcgatcagtgcaaacggcgacgtgacatccaccggttcgatccagtccggcaacacgctctcgatcaatgcggggggcaatatcaatgttgcgaacacgcaatcgaacggcgacacgacactcgtcgcgggtgcaaacgctaccacgggcgatacgcagagcgggggcgcactgtcggtgacggcgcagggtaaggacgggaccggcgacatcaccttgaatggcacgtctgtcatcacgggcgccacgaccctcgtggccgcgcaggacaccaacatcaacggccagaccagcagcgggacgctgcaggcaacggcccagcgcaacgtcaacgtcaacgcggcggtacagacctccggcgatctggcgctgagcgcgacgaacggcaacctcacgaccagtgccaacgtgaacagcgccgggaatctggcgcttaactcgggacagaccaccacgatcgccgggcaggccactgggcagaatgcggtcacgcttacggcggggcagggcgcctcggtgacgggctcgctcgccagcggcatgacgttgaccgccagcacgcctggtgcattcagcgtaacaggttcgttgctcgtgggcacgaacgcgaccatcggcagcggcagcctcgatgttccgggggtgctgatcgtgcagaacaacggcacggtcaccgcccagggcgatattaccggtagcggttcgatggcgttcggacagaatggcacgttgacgagcggtcaggatgtcaacgtcaccggcaaactgctcgctaacggcttgcaggtgagcgccgccaacagcgtcacgctgaacggcgtgcaggcgggtggcgcgttcacggtcaccgcgaatggcgcgtcgggcaatggcgacgtcacgttcaacggcaatgcggcagccgtgggcgtgacaaccgcgcaggccgcaggcgatgtggtggtgaacgggacgctggcgggcggtgcccaggttgcattgactggccagggcaacgtgacggtggcggcagccgggacggtacagtccgtgggcaatgccttgctcacggcgaacacaggcagcgtgaattcgaccggcacggtcaacagcgcaggtacgctcgtcgcgcaggcggcgcaaaacgtctcgctgacaggtgcgacgagcgtaaccggcgatacgacgctcacagccggcagtgacgtaacgaccggcggcacgtttgccggccagggcaacggaacgatcacggccgggcaggacgtgaaccttggtggcaccaatggtttcacgaaggatgtcacggtcacggcggggaataacgtcaacgtgcctggggcattgcagggcaacaacgtcacgcttaatgccggcaattccgcgacgttaggcaacgtgcaggcgaattccgcactggcggtcacggcgaacggtagcggcggcaccaatggcaacggtggcgctatcacggtgaatggctccgtgacgtcgcagaccggtagcactctgaatgcgggcggttcagtcagcgttgcggcgaccggcacgcttggcacctcggcgacgatgagcgtcaccgccgcaggcaatacgacgaacgccggcacgatcgtgtcgaacggcaacatgaacctcgcgaataccgcggggtcgctgaccagtagcggcaccatcgagtccggtacggatctcaacatcaacgctgcccagtcgatcgacctgggtagcaacagcacgaccgccctcggtaatcttacgctgactgccgggcagaacatcacgatgaacggctcgatagtgagtcagggcaacggcacgctcaacgccggcggcaccatcggtggcgtcggtgcgctcgccttcggcaacgccgcgaccctgacctcgggccgcgatacggatctgaccggatcgttgcgcggcgccacgatccagacgggcgcaggtggctccggcacgtttgccgacgtacaggccggctccacgatcgcgctgaccgccagcaacgatgtcaacctgacgggcacgctggctggtggttctaccgtggcgctcacggcggggcaagacgtcaatgtcagcggtacgctgcagtcgtccagcgataccaacctgacggcgttgtacggcagcgttggcgtgaccggttccgtgaacagcaatggcgcgctgaacgttctggcaggtacggacatcaatctcggcggcacgaccacggtagcgctggatacgacgttgcagagcgcgcgcgacgtaaacgtcaccggttcgctgagtggtcagggtaacggattcgtcacggctggccggaacattggcggagccgggtcgcttgcgtttgctcaatcggccgtgttgaatgcggctggtgcgatttcgcaaggcggcctgattcaaggccagaacgtgcaggtctcggctgtcgggaacgtggccgtcaataacatcgagtcgacgtcgacgctcgctctgtctgccgggacaggtggcagcggcagtctgacggtcaacggcgcggcggccgcggctagtgcgatcacggcaacggcaaacggcgacgtgaccgtagcgagtgccggcaagctggcggccggtaccacggtcggcgtgacggcactgaacgacatcaacgttgcgggcgcgatcgagtcgaatggcgatgctgtgctgaatgcgcagcaaggcagtctgaatgcgacaggaggcatcaatagcggcgctgagctgaccattacgaccggactggatctgtcgctcggcgccagcaccagcgcggtgggtgacgtgacgctcaatgccggacgcaacgcaatcctgaacggtacgctggtgggtcaggggaacggctacattagcgccgggcaagacgtcaccggaccgggtacccaggcgttcaccaatgcagcagtccttggcgcccaaggggatatcgcgctgaccggatcgctgcaggccaattccgtgcaggcgaccggcggcgacaacgcagcgctgaacaacgttacgtcgtccacgacgctgacactcacggcgaacggcaacgcgggcaatggcgatgcggccatcactggcacggcgacggcaccgggcctggtcacgctcaatgcggcgcgcgatgttctgatcagcggggcgttgggtggcggcacgacagtgacgctcgccgcacagcgcaacgcgacggtgagcggcacggtgcaggcagtcggcgacctggacgtgacggcgaccaatggcagcgctgcactcacgggaaccgcgacgacgaccggcgcgttgaacgtgacgtcagggctcgatacgcagcttggcggccagatcgcggtgacgaacagcctgacggttcaagctggcactgacgttgaattgactggtacggtcgcgggtcaagccgcgggctcgctgacagcgggacaggacatcacgggcggcggttctgccgcgtttgcgcaagccgcgaccttgagcgcagcgaacaacgttgcgctgaccggagcgctgcaaggctcgggcatctcggtgactggcggtaacaacgctggccttggcagtgcgcaggctacgaccggcaatctggacgtgaccgctaacggcaacgcaggccagggcgacgtgacattcggcggcgcggtcactgcaatcggcacgacgacgctgcaggcggcacgcgatgtcagcgtcgcgggagcaatcaacagcggtggcacggcgagtattaccgcggcacgcaatgccgcgactgccgatgtgaactcggcgggcgatctgacgatcaccgcgacgagcggcaatctcagcgccggcaacgtgacgacgcagggcaatctgaacgaaagcgcggggcaggccctgagcgcctccgggcaaaccgaagcgggaggcaatgcgacgctcgcgtcgggcggcgacatgacactgacgggtggaatcgccgcgcagaacacgggaacgctaacctccggcggcacattgaccgctggttcggtcgccttcggtcagcaggcgaccatcaatgcagacggcagcattaacgttagcggcagtgtcgcgaccaatggcaatcttgccgcgacggcgaccgacagcctctcgatgggttcggtgcaggcgggggtgcccctatgtggttcgtcaagcgttaggggcggatttcggttgatagaaggcgccgtcgcggagcatcgcgaacagcacgtcgcagcgtcgtctggcaagagcaatgagcgcctgattgtggcgcttgccctgctggaccttgcgagcgtagtagtccct

SEQ ID NO: 13574 - DNA, 957 bp, Burkholderia fungorum
atgggacgtttgatcgatatcgcatggccgcaactgaacgtgaaagtcgtggccgaactgaatgacgagcgcaatccggaactgtgcgaagagttctggcaacagttgccgttcaaggtgacgcaggcgcatccggttgtctccggcgcgtcgatgtatgcatggacgccggtggtcagcagcgcgcctgtgcatcaccgcgagctgatcacggaatgcccgattggccgtctgcgttattcgcaatcgaccggcaacaagatgtcggtgcaatacggcaagggtcaggagccgctcgcacagccggtgctgggccaggtgctgccggagtattgccatctgctgccgggcgtcggcaaggccgtgtggaacaacctgttctacgagaaggacgtgatcttcctggaagtgtcggcacacgaaggccagggccattcaggcaagccggcgaagccgatgaacctggcgccgcttgcgcaaaagctgtacgacgaagcggagcgcatccagctcgtcgagccggaagaaattcgtgcgctgcggctcggcgaagtggaagacgcgggtacgtatggccagtatttcagtgcctgggacttcgcaaacggcatgctgcgcgactacatcatgtacacgatctacccgatcctgacgcttgccggcaagctggagccgaaggcgctgagtcaggtgctgaacgaactcgacgtgccttattccagctatctgtcggtcgttggattcaagaagctcgaggcgcttgcgggtgagctgcgcgaatacgtggcgacggcggaaacgaaagaagagatccagcaggttctgcgtgcctttctcaagtatggcaatcgcctgtgcgcctggtcgtatcagatgttcccctggtatctcggcatgttctacaaccgcagcaaggacggccaggagcgtccgggccgctggaagccggacgccgag

SEQ ID NO: 13575 - DNA, 2799 bp, Burkholderia fungorum
atgaacttctcccgtctgttcatcctcagacccgtggcgacgtcgctgctgatggtcgcgctcgtgctcgtcgggctggtcgcgatgcgctttctgccggtgtcttcgctgcccgacgtcgactatcccactatccaggtccagaccttctatcccggcgcgagcccgaacgtgatggcgaccaccgtcacggcgccgctcgaggtccagctcggcgagattccggggctgcagcagatggtctcgtacagttcggaaggcgcgtcggtgatcacgctgcagttcgatctctcgctgaacctggacattgccgagcagaacgtgcagcaggcgatcaacgccgccaacagctttctgcccaccggcctgcccgcgccgccgacctacgcgaaggtgaacccggccgatcagccgatcctcacgctcgcggtcacgtcgaagtccatgtcgctgacgcagttgcaggacaccgccaacaatcgtctcgccaccaagatctcggaagtgccgggcgtcggtctcgtgacgacggccggcggcaacgtgccggccgtgcgcgtggaagccgatccgcagaagctcgccgcttacggcctgaatctcgacgatctgcgcaccctgctcgccaacgtcaacgtcagccagccgaaaggcaatttcgacggtccggagctcgactacacgatcaacgccaacgatcagatcgtggacccgcaagactatctggactccgtgatcgcctatcagaacggtgcgccggtgtatctgcgcgacgtcgcgcgcgtgagccaggcggcccaggacgtggaacgcggcgcgtggtacaaccgcacgccggccatcgtgctgaacgtgcagcgtcagccgggcgcgaacgtgatcgccaccgtgaaccagatcatgaagcagttgccggcgctcgaatcgacgctgcccgccggcctgcaggtcaccgtggtggcgaacaccaccggcgtgatccgctcgtcggtctcggacgccgcgttcgaactggtgctcgccgtcgtgctggtggtgctggtgatcttcgtgttcctgcgcaacgtgcccgccaccatcattccgagcatctccgtgccggtctcgctgatcggcacgctcgcggtgatgtaccagctcaactattcgatcgacaatctctcgctgatggcgctgatcatcgcaacgggtttcgtcgtcgacgattcgatcgtgatgatcgagaatatcgtgcgctatctggaggaaggcaagacgccgctcgaagccgcgctcgaaggcgccggccagatcggcttcacaatcctctcgctgacggtctcgctgatcgcggtgctgatcccgctgctgttcatgggcggcgtgatcggccggctcttcagcgaattcgcgatcacgctcgcggtgacgatcgtgatttcggcggtggtctcgctgaccgtggtgccgatgctgtgcgcgcgcctgttgcgcgcgcaggcgcagcgccatccgagccgcttcgagcgcttcagcgaaggcctgttcgacaggacgctcgccgcctacgagcgtggtctgaactgggtgctcgatcaccagatgctgacactggcggtcgcgctcatcaccgtcgcgctcacggcgatcctgtacatcgtgattccgaagggcctgttcccggtgcaggacgtcggcgtgatccagggtatcagcgtggccgacaactcggtttcgtacacggcgatggtccgtcgccaaagcgccctcgccgacgcgattctgaaggaccccgacgtggtgtcgctcacctcctatgtcggcatcgacgggaccaatccgacgctgaacaacggccgcttcctgatcaatctgcgcccgcgcgacgaccgctcggtcaccgccgaggaaatcggccggcggatccagcaggaagtcgcgaacgtgcccggcattcgcctgtatctgcaacccgagcaggacctgacgctcgacacctcggtctcgcgcaaccagtacaacttcgtgctgcgcgggccgaaccagcaggccttcaaccagtacgtgccggccttgatcgcgcgcatgaagcagatttcgtcgatcacggacgtgacgagcgatctgaacaccaacggcctgagcgtgaacgtggaagtgaaccgccagcttgccgcgcgctacggcatcaccgcggccacgatcgacaacgcgctgtacgatgcgctcggccagcgcatcgtctcgaccatcttccagcagtccgatcagtaccgcgtgattctggtggcgaagcccgagacgctgcctaccgtgcagtcgatcggcaatctgtatctgccgagtcagaccagcagcagcggccaggtgccgctgtcgggcatcgcgaagatcagcatcacgcagtcgccgctgatgatcagccatctcgcgcagttcccctcggtgacgatctcgttcaacctcgcgcaggacgcgtcgctcagcgccgccgtggcgcaaatccgcgacgccgagcgcgcggtgcaactgccgccgtccatcacgacctcgttccagggcgcggcgcaggcattcgaagactcgctctccagcgaggtatatctgctgatcgccgcgctcgtcgccgtgtatatcgtgctcggcgtgctgtacgagagctacattcacccggtgacgattctttcgacgctgccctcggccggcatcggcgccctgctcgcgctgatgatcgcgggcagcgatctcgacgtgatcggcattatcggcatcgtgctgctgatcggcatcgtcaagaagacagcgatcggatggtccgac

SEQ ID NO: 13576 - DNA, 1491 bp, Burkholderia fungorum
atgcgtcatcagtatgcaacgccctggatatggattttcctgataccgcttgcgttcgactataaggcgaccgacgcgaatacaggtcacttcgcgcagttcatcttcgtccttccggcgatcgccgcggggattgccctgcttctcatcgcaccgcgttttcacgagcgttcgcggctacgctcggccgtcacgtggagcatgatgctgtgcgtgttcggcagcatcgtcgcgcaactggttcaggacaacgattccggcaactatctgcgggtgctgctgccgttcatcctcttcatgctcggctatctcgtggcgtgccgcccgtggagcgagtttcgcatcgcccagttcgaaaaagccctgttcattgccaacgtcatcagcctcgtgttcacgatggtctacggcctcgcgaccggcggcgatctcgaggacgtgcgtttccgcatcctctccgtgacgctgctgggtttgcaaggcgtgttgctgcatgaattcgtcgtggcgaagcgtttttccttttttaccgtgggcgtgttcgcgctcagtatcctgatcgaattgctgagcgtcacccgcagcgtgctggtcggcaccgtgctgctgttcctgatcgccgtggcgctcagcgcgccgtcgatccagcatatctggcgcgccatgagccgcagcatcatcatcggtgccgtgctcgccggcatcgcgggcgtcgccgccttgagttttccgaccgtcgccgagcactggacgcagcgcattttcgcttccgaggaaacgcgctccggcaaggatccgaccaccatcacgcgtctcgcggaaatgcgcgaccagtacgatcaggtgacggcggacccggcggcgttatggttcggcgaaggctacggccattactatcgctactcgccggtctatctgccggatctcgccggccagatcagcgagaaagacttctatgcgatcaatgaatgggccgcgggacacaacttctgggtctatcagttcttcgcgggcggcctgctgttcggcctcgccatgccgctggtcacgctcgcggcgctggcgatctgcttcttctcgtatcgatactggcgctcggtcgtgccggacgcgccgatgctgccggtgctggggcgcgccatcatgctgtttgccgctttaccggccacctcgatcggcggcaatccgctcgggccgcgtttttccggcctgatattcggcgtcgcgctcggcttgatgatcgccacgcacgcgcgtttgcagcgcgcactgccggcgcgcgcgagacgcttgcgccgcccgccatacgtgcgcccggacgcgatgcccgaattgccgggcagggtccagccgggcatgggccgcgccgacctgccgtccacgctcggcatgtcgcgcacggcgcacaccgcgcgcgactccggccagttcggcgccctcgttccgcacacgccgcccaggcaccgctccaaccgacccgatatcgtccga

SEQ ID NO: 13577 - DNA, 912 bp, Burkholderia fungorum
atgaagttcaccactttcgcctgcgatggtcaaccgtgcctcggcgtggcaacagaaaacgatactgtattgagtctgacgcacacatggggtgctggcccgctaatagacggcgctgcgccgcgcgatatcggtcaattgatcgagctgggtgacaatgcactcaaggtggtgcgaacgatcatcgaggatcaggcgggaagtgaggtgtatcgtcacgctgcacacactttgcagttcctgccgccgctcggcgtgcctcgcaagaatgtgttttgcgtcggccgcaattatcgcgagcacattatcgaaggcaatctcgcggcggggcgcgatccgcacgatttccccaaggcgctggaactttttacaaagccgccaaccgctatcgtcggacatcgtgcgcctgtgaagttgcacgctcacgtcacgaaactgctcgactatgaaatcgagctcggtatcgtgatcggcaaacgcggaatcgacattccgcgcgaagccgcgctcgattacgtgttcggctacacgatcgtcaacgacatcacggcacgcgatctgcagaagcgccacgggcaatggttcaaaggcaaggcgctggatacgtcctgcccggtggggccttatgtgctgcatggctcggcggttcgcgatccacaggcgttcgaactcgacctcgacgtgaacggcgaactgcggcaacgcgcaagcacggcgtcgatgctgtttggcgtagcggagatcatcgaacagctgtctgccggcctgacactggagccgggggatctgatcgcaacaggcacgccgagcggtgtcggcttcgcgatgcagccgccgcgcgcgctcgcagcaggcgatacggttcgcgcgaggatcgggggaatcggagagttgagcaacacgatcgtcgaa

SEQ ID NO: 13578 - DNA, 1458 bp, Burkholderia fungorum
gtgcagaacgtgtcgaacccggtcgatgctggaaccgctgcccggttgagcgactggatgcgcaaccgcagctgggcgatcgccatgacggtggcgatcgtcattaccgtgggcggcctcgtgattctcgaaaccgcgcgcgagcgcattgccgccgagtacgagaccgcgctcgaagcacgcgacgtcaccgtacagctgagcacgctcgcgagccagctatcgcatctgagcgcgcagcaaagcgattttcttctgacaagacaggacgcctccgcgcgcgaattctgcgctaccgctgtgcgcatccgtcagagcgagcagcagttgaaccgcttctaccgcagcggcaaggcggacagcgccgaactcgcgagcttcacgcagattctcgcgctgatcgaggcgcgtatcggcgcgggcgcgtccgcgctgcagcgcgcggcgccgcatccgctcgacctggccgcgtgcggcggcgcgagcgaggccaatccggccgacgcatctctcgtggacagcacgctcacgctgctgcgcgacaacgaggagcgccgcgcgcaacacgcgctcgccgcgagccgcggcgatcagcgcatttccacactatgcgcagccggtctgtcggcgctgaatatcgtgctgttcatcctgctgtttcgcaatctcggcattcagatcgatcgtcaggcgcgcgtgcagcgtcaattgatcacacaacaggaaggactcgaccagctcgtcaatgaacgcacccgtcagctggaggcgctcggctggcacctgcaggccgtcagcgaaaacgaaaaaacccagctcgcgcgcgaactgcacgacgagctcggcgcgattctgaccgcgagcaagatggacgtggcatgggccaaccgcaagctgaaggacagcgagccggacatctcggagaaactcaggcgggcgctcgcgaatctcgaccagggcatcgcgctcaagcggcgcatcatcgaagacatgcggcccaccgtgctggcgaacttcgggctcgtcaccgcgttgcgcacgctcgccgacgaagccgcgcagcgcaacaactggacgctcgacctgcacctgcccgccgacgacatccagctcgacgagcagaccgaaatcgcactgttccgcgtcgcgcaggagtcgctcaccaatgcggccaaatacgcgcgcgcgtcgaaggtctcgatcgccttgcaggtcggcgacggccaggtggccctgcatatcgccgacaacggcgtcggcatcatgccggccgatctgaagcgcacccacactcacgggctgctcggcatgcgccagcgcgtcgcggcgcacggcgggcgcttcgagatccggcgcggcgtgcccaacggcaccgacatccacgtggagatgccgagcgtcagcaccgcgacgccttcggtcgatctgccgccggccacgcccacgcgaacgcccgtc

SEQ ID NO: 13579 - DNA, 2004 bp, Burkholderia fungorum
atggagcacgcctacgttcacctcctgcatctgctggccggccacccgggctggacactcacggtcgttttccttgcggccttcctggaggccatcgccgttatcggcaccttcattccgggcagcaccgcgatgttcctggccggcgcgctgaccggcaccggctcgctcagcctcggctgggtattcgtgtgggcaatcgcgggggcgatcgccggcgacggcatgagcttctggctcggcagccgctacaagcaccggatcgtccagttctggccgttctgcaaacatcccgaagtgctcgaagcaggccaccgcttctttcgcaaacatggcgccaagagcgtcgtgctggcgcgcttcatcggtccgttgcgcgccatcgtgccggtagtggcgggcatgctcggcatgccgccgctgcgtttctacggcatgaacgtgctgtcggcgctgatctgggcgcccgcccatatcctgccgggcatgatattcggcgcctcggtgctgctggcgggcgcggtgtcgttccggctggtcgtcatcatcgcgttgctggtggggattgtctggttgagctttcgtgccgcgcgggttctgctctcgcacgccaatgtgtggtcgaccgccgccggccgccaggtgggaagctgggcctgccgccaccctggtccgttcggccgcttcgcgcgcaagatgctcgacccgcggacgccggacgccggcagcatcctgctgacgtcgctggtcgtgctcgtatccggcgcgctgtttttcggcgtgctcgacgacgtcatcagcggcgatccgctgacgcaagtggacctctcggtctatcacttcctgcgctcggtacgcacgccctggagcgatacggttctcgcgggtctgtcgacgctcggcagcaacatgacgctcatggcgctgatcgtgacggtcgtcgtgtggatgctgctcgaacggcgctggcgcaccatcggttactggctcgcggccgttgtgttctcccagttgctgatcttcgtgctgcaattcgcgatgcaccgcgcgccgcccaacgaactgatggtcggcgcctatgtgtttccgagcaatcacgtcgccgcgaccgtcatcgtgtacggcttccttgcgtttctgctggcgcgccgggtcggcatgctcgaaggggtgctggtggcggccgcgagcacgatcgtggtgatcgtggtcgcgctcgcgggactgtacttcggcaggtactgggtgtccgatgcgatcggcggcgccgcgctcgcgtacgtctgggtggcgatcgttgcgttgacagcgatgtggcggcacccggaggcgccgcccgagcgcacgttcatgcccgtggtggtgctgctggtcatgctggtcagcgtgggcgtgcaactcggcgtcgccatgcccgcgccgccgccggacaccgcgctgcttccgccgcccgtgctggtgacgcaggcgcaatggacgctttccacgtggaagcatctgccctgctaccgctcggatatgggcggcgaccgcaaggagccgctcacgctacagtgggcctcgaacctcgattcgatccgcggccggttgcgcgcccagggctgggtcgagggaacggacgtgtcggcgcacagcctgctctcgctcgcctcgcccaacgtcgcggcggtgtcgctgccggtattgccgaagctgaacaacggcgtgccgtcgtcgctggtcttcatgcgtccgggcaacacgcgcgacgagcgcgacgtgctgcgcttctggcccagcggttacgcggtggcgacaggcacctccacccaaccgttgtgggtgggcgctttcgcgcacgaacggctgtcccgcgcatcctggccgatcaacattctgcgggtcgaccgggagatgacctcggtcgatgcacacgcccgatccagcgccggtctcgacgcggcgatcgtcgcccgggtaagttgccacggtgtgccggtgtcgctgcttgcctcgccggtggag

SEQ ID NO: 13580 - DNA, 852 bp, Burkholderia fungorum
atggcgcgctataaaaaggacatccccatgctgctggctcaaattagcgacctgcatatcaaacggcccggcgcgctcgcttaccgccgcgtcgataccggcgcctatctcgcacgctgcgtcgccgccctgaatgcgctcgaaccgcgtcctgacgcggtgatcatgaccggcgacctcgtcgatcagggcgatcccgaacagtacgagcacctgaagacactgcttgcgccgctggaaattccctacttcatgctggtcggcaatcacgacgaacgcgctgcgttgcgcgccgcgtttcccgatcgcaaggaactggcgagcggtggtgagttcgtgcaatacgcggtcgatctcggagcgctgcgactcatcgcgctcgattcaatggtgccgggccaaagcgcgggcgatctatgcgacgcgcggctcgcctggctcgccgctcagctcgatgcggcccaaggcaagccgaccatcgtcgcgctgcatcatccgccgttcgtgtgcggcattgggcatatggacgaactgcggctcgatcccgccgccgccggcagactcgcggcgttgatcgcgcgctatccgaacgtggagcgggtgatctgcgggcacgtgcaccggcccatgttcgtgcgctttggcggcacgatcgcctccgcggtgccggcgcccgcgcatcaggtcgcgctcgatctgcgcgaagatgcgccgtccgcgttcatgatggagccgcccgcctatgcgctgcatcactacgatccggcaaccggtatcgtcacgcatcatgcgtatgtggatgccgccgatgggccgtatcctttttacgagcccgagggcgatctgatcgat

SEQ ID NO: 13581 - DNA, 696 bp, Burkholderia fungorum
ttgccgcgcgcattcgcagacccgccttgcagcatctgtgccgccaaccagtcaggagcaagccaggtgacatacgcctacaagctgatggattcgcccgtcggccagttgaaactcgttgcgaacggcgagcgcctcgccgccattctgtggcaaaacgacaagccgaaccgggtgcgtctgggggaattgatcgaagcaaatgaccggcctgtcctgatcgacaccgaacggcagctgaacgagtattttgccggtacgcggcgcgagttcgaccttccgctcgccttccagggaacggagttccagaaacaggtctgggccgcgctgttgacgataccgttcggccagacgcgcagctacgcggaaatcgccgtgcagatcggcaacgtcaacgcggtgcgggcggccggcgcggcgaacggcaggaatccgatctccatcgtggcgccgtgccaccgggtgatcggcgcatccggcgacttgaccggctttgccggaggcctggcgaacaagatgtttttgctgtcgctggaggctgggcagacgtcgctcgaagcgcaagccgaccggcagaccgacatgtttgccgaagaaggcaaggcgaaggtcgaagctcaagccaggcccgaagctcagacgaaacccgcacgccatgcgccgaggcgcggcacgcaaagttcgctgttcggaacc

SEQ ID NO: 13582 - DNA, 1704 bp, Burkholderia fungorum
atgaccttacgcattggccgccgcgcatacgcggaaatgttcggccccaccaccggcgaccgcgtgcgcctcgccgacaccgaattgctgatcgaagtcgagcgcgacttcaccacctacggcgaagaagtgaaattcggcggcggcaaagtgattcgcgatggcatgggccagtcgcaacgcgtgcatgccgacgtggtcgataccgtcgtgacgaatgcggtgattctcgatcactggggcatcgtcaaggccgacatcggcatcaggaacggccgtatcgccgccatcggcaaagcgggtaatcccgacatccagccgaacgtgacgatcgcgatcggcgcctccaccgaagtgatcgcgggcgaaggcctgatcgtcacggcgggcggcatcgatacgcatattcacttcatcagcccgcagcagatcgaagaagcgctcgcgagcggcgtgaccacgatgctcggcggcggcacggggccggccacaggcacgaacgcgaccacctgcacgcccggtccgtggcatctcgaacgcatgctgcaggcagccgacggctatccgatgaatctcggctttctcggcaagggcaacgtgagccagccgcagccggcgctggagcagatcgccgcgggcgcgatcggcttgaagctgcacgaggactggggcacgacgcccgccgcgatcgacaactgcctttccgtggccgacgacaccgacacccaggtcgcaatccacacggacacgctgaacgaagcgggtttcgtcgaagcaacggtggccgcgttcaagggccgcacgatccacacgtaccacacggaaggcgcgggcggcggccacgcaccagacatcatcaaggtgtgcggcgaggcgaacgtgctgccctcgtcgaccaatccgacgcgcccgtacaccgtcaacacgctcgaagaacatctcgacatgctgatggtgtgccaccacctggatccgtcgatcgcggaagacattgcgttcgccgaatcgcgcattcgccgcgaaaccatcgccgccgaagacatcctgcacgacctcggcgcgctgtcgatgctgtcgtcggattcgcaggcgatgggacgtgtgggcgaagtgatcatccgcacgtggcagaccgcgcacaagatgaaggtacaacgcggcgcgctgcccgaagacaacgcgcggcacgacaacttccgtgcgaagcgctacgtcgccaagtacacgatcaatccggcgatcacgcacggtatcgcgcatgaggtcggttcgatcgagccgggcaagtgggccgatctggtgttctgggagccggcgttcttcggcatcaaaccgtcgctgatcctcaagggcggcatgatcgcgatggcgcagatgggcgaccccaatgcatcgattccgacgccgcagccggtgcactatcgcgagatgttcgcgacacgcggcggcgcattgagccgcacgtcgctcaccttcgtctcgcagatggccgccgacgccggcgtcgccgaacgctacggcctgaacaagcgtatcgttgcggtcaggaactgccgcaacatttcgaaggcagacatgatccacaacgcgtggcgtccggcaatcagcgtcgatccggaaacctatcaggtgatcgccgacggtcagttgctgacctgcgaaccggccaccgtgctgccgatggcgcaacgctacttcctgttc

SEQ ID NO: 13583 - DNA, 675 bp, Burkholderia fungorum
atgcgcaccatcgacaaactgattgcaccgcatctgaagctcgcgcccgtgctggtgaagcgcgcaccgaccttgacgctggcgttcgacgaccggcgcaagagccgcctcgcggccacgctcgacagcggcgaagaagtcgcgctgctgttgccgcgcggcaccgtgctgcgtgacggcgatgtactggtcgcggacgacggcggcctcgtgcgggtgatcgccgcgccggaagcggtactctacgtgcgcgcgaaagatgcattgacgttgactcgcgccgcgtatcacctcggcaatcgccacacgccggtggaagtcggcgccgattatctgaagctcgaattcgatccggtgctggccgatatgctcaagcgcatcggcgcgaccgtcgatcaggtctcgatgccgtttcagccggaatcgggcgcgtacggcggcgggcataagcatggtcacgacgaaacgttcgccgaagactatgcgttagcgcaacaggtgttcggcgagcatcatggtcatgagcattctcatgaccacgagcatggacatagtcacgcggcgcatgagcattcgcacggccatgaccatacgcacggtcacgaccacgatcacggcgatcacgtccacgacgaatcgtgcggccacgggcatcaccaccatcatgcgcatcgc

SEQ ID NO: 13584 - DNA, 678 bp, Burkholderia fungorum
atgcgcatcgctgaactgacggcgctgctgcaccttgcgtcgccggcgctgccgatcggcgcattcagctactcgcaaggcctcgaagccgcgatcgaagcgcaactgatcaccgatgccgactccgcccgcgagtggatcgccagcggcttgaccgacgtgctcgcgcgcggcgaactgccgttcctcgcgcatcagatggaacgctggcgcacgcacgacgcggaaagcctgcgcgttgccaacagcgaattcctggcgagccgtgaatccgcggaattgcgccgcgaaaccgagcagatgggctggtcgctgcggcagttgtgtgtatcgctggaatggggcgatgccgaccggcgcgcgacgctcgcctccatgacgccgctcgctcaacccaccgcatttgcgttcgccgcctacgcccacgacgccgccgtcgacgccaccctcgccgcctacgcgttcagctgggtggaaaaccaggcggccgccgcgctcaaggccgtgccgctgggacaacttgccgggcaacgcatcatcgtcgcgctgcgcgagccgatcgatgccgcggtaacgcgcgctctcgccacatcgccggacaacatcaacaccttcgcgccgcaactcggcattctgtcggcgcgccacgagtcgcagtattcgcggctctttcgctct

SEQ ID NO: 13585 - DNA, 651 bp, Burkholderia fungorum
atgaacgcacctcatcatcccgcccactcgaccgtccgcacgaaaaagctgccgccgctgcgcgtgggcgtcggcggcccggtcggctcgggcaagaccacgctgctcgaaatgctgtgcaaggcgatgcgcgaacagtacgacctcgtcgccatcaccaacgacatctatacgaaagaagaccagcggctgctgacggtggcgggcgcgttgccggccgaacggatcatgggcgtcgaaacgggcggctgtccgcacacggcgatccgcgaggacgcgtcgatcaatctcgaagccgtcgaccgtatgctcacgcgttttccggacgcggatatcgtgttcatcgaatcgggcggcgacaacctcgcggcgacattcagtccggaactgtcggacctgacgatctacgtgatcgacgtggccggtggcgagaagattccgcgcaagggcggccccggcattacgaagtccgatctgctcgtgatcaacaagacggacctggcgccgatggtcggcgcgaatctcgaagtgatggccgcggacgcgaagaaaatgcgcggcgagcggcccttcgtgatgtgcaatctgaaggcgctcgacgggctggacgtggtggtgaagtttatcgagaagaaggggttgttgaaggtt

SEQ ID NO: 13586 - DNA, 999 bp, Burkholderia fungorum
ttgagcgtgcaaaagatattgatcgtgagggtgtcgtcgttgggcgacgtcgtccacaacatgccggtgatcgccgacatccggcgccgccaccccgaggctcagatcgactggctcgtcgaagagagcttcgtggggctggtgcaactcgtgagcggcgtgcgccgggcgattcccgtgtccctgcggcgctggcgcaagcgcattctgtcgctggacaactggcgcgagattggcgcattccgccgcgcgctcgccgccgaaaactacgatctcgtgatcgactgccagggactcatcaagaccgcatgggtggcgaacatggcgcgcgggccgctggtcggcctcgcgaaccgtaccgacggcgcgggcttcgaatggccggtgcgcttcttttacgacaggcgcgtgccgatcgagccgcgcacccacgtggtggaacgtacgcgccaactggtggccgcggcgctgaacgacccgccgccgcaacccaccgaccacatcgacttcggcatcgacaccgggcgggccgcgctggctttgtccgaggcgaatctgaacctgccggtgccgtatgtggtgttcgtgcacgccacctcgcgcgccgacaaacagtggccggacaccgcgtggatcgagttggggcagtcattggtgcggcgcggcgcgtcgatcgtgctgccgtggggcagtgaggcggaacgcgccaccagcgagcgcctcgccaaggaattcggcgcggcggccatcgtgccgccgaagctctcgttgccggccgtggtcgggctgatcgaaggcgcggccgcgaccgtcggagttgacacaggtctggttcacatcgccgcggcgctgaagcgcccgaccatcgagttgtacaatttcgccaccgcgtggcgcaccggcggctactggtcgccgaacgtcgtcaatctcggcacggccggacagccgcccacgctgcaacaggtgaagtcggcactcgcgggcttcggcctgctg

SEQ ID NO: 13587 - DNA, 951 bp, Burkholderia fungorum
ttgtcggtcatcgtgctttgttaccggcaggacgagtacgtcggtgcatgtctgcaaagcgtcgtcgaccagcatctcgatgtgccattcgagatcatcgtgggcgatgacaattcgcccgacaattcactggctgtcatcgagtccttccgggcgcgttacccggacctgatcaaggtcgttgcgcacgacaccaacgtcggctgcgcagcgaatttcgccgataccgtggcgatcgcgaagggcgaattcatcgcgaacatcgacggcgacgatgtcatgctgcccggcaagcttcagcgccagctcgacttcctgaaagcgcatcccgaatgcggcctcgtggtgcacaggatgcgcacggtggaccaggatactttggagcccgtgctgtatccgttgccgaaaaaaaagcccgccacgttcgacgctgcctacctcatcagaaatggaccgtacttctttcacagctccgaaatgtatcgggctcgcctgcgccgtcgcgggcccgtcgacgtaggtctgaaagcagtctgcgatctggcccatctgctacaggtcgtggtcggtacgcaaggctgctacctggacgaagagttgggtctttaccgcgtcaaccggaccggcatgacctccatgcgaatcaggaatccggagcgtcatagggaaagcatgaacgacatgatcgagacctgtctgattgcggccaatctgggtgtggagagtgatgcggtcaaccggggccgcgcgaggttctatctgacctcggccatcttctatctggagcatgggcgcgaggacagtttcgaggattgcatcgaagcgagccggcgttccgcacgaatcggtatgaagcaactggttctgtactccatgcgccggtggccgcgtgtgttgtgcactgtctatacgcgagccaagcaggtggcgggacgacaacggatgaacgca

SEQ ID NO: 13588 - DNA, 363 bp, Burkholderia fungorum
ttgtcgcagccggtcccgcacgggaccgccgccacgaccgtcgcaaccctacgcacatattcgatgaagctgacacctcgcgagaaggacaagctgctgatcttcaccgccgcgctgcttgccgaacggcgccgcgcgcgcggcctcaaactgaactacccggaagcgatcgccttcatcaccgccgcgctgatggaagcggcccgcgacggcaagaccgtcgccgaggtgatgcactacggcaccacgctgctcacccgcgacgacgtcatggaaggcgtgccggagatgatccccgacatccaggtcgaagccacgttccccgacggcaccaagctcgtcacggttcaccatccgattccc

SEQ ID NO: 13589 - DNA, 3738 bp, Burkholderia fungorum
atgttgaacaagtcctataagaccgtatggaacaaaacgacccgaacatatgcagccgcgtccgaagtgacgaagagccgtggcgcaaaaggggcttcggtgcgtggctcgctggtagcggcgagtgccgggctgctgggtgcgctggcattttcgcagccggcggcggctgcggaatgtgcgtcgtcggagccggactgtctcagcgtcgcgcaggcgctggcgcaggtggccgcatcgtccgctgcgtcggtgccgcctgccgcggacgatgcggcgaagcccgccgacctggcagccgcgctcgacaatgcgcgcgtattcacgggtaatccggcgctcgacgcggcggcggcgccagtcacggtcagttcgaaccgggccggtctgcttggggcaaccgtgcctacgccggtgaccgactacatcgccgtgagtcccaatgtcgttcagggcacgcgcaccagcgcgtcgaccgatctgaacgcgatggcgatcggcccgacggccgccgcaagcggcttcaacgcattggcggtcggctcggcctcgattgcgggttcggacgcgtcgaccgcggtcggctcggcggcaggggtagggtcggtgaactccaccgctgtcggtgcgggggcgatggtggtcgctctctcgaataactcggtggcggtcggctacaactcgcggtcagccgcaatgaacaccatatcgctcggctccttcgcgagcgccgcgtcgagcggttccgtggcgatcggctacaactcgttcatcaatccaggcgcgaagggggcggtggtcatcggcgcgaatgcgtcggcgagcggcacgggttcggtcgcattgggctccgattcgatcgccgatcgcgtcaatgtcttatcggtgggcaacctcacgcaaggccgccagatcacctatgtcgcagccggcacgcggcccaccgacgcggccaacgtcggccagctctccggcgtggccgaggcgctgggcggcggcgcgctgatcgatccgaacggcgcagtggtcgcgccggcctacaccgtgggcggcacaacgtaccacgacgtgggcgcggcactcgcggcggttgtttcaggcagcgccgccggcagtgcggacgcgctgcgttacgacaccccggcgcacgacgtcgcgacgctcggcaacaaggtcacgccggtcaagctcaccaacgtcgcggacgccaccttgagcgcggccagttcggacgcggtgacgggcgcgcagctctacggcaccaatcaggcggtcgggaaaaataccgcggacatcaccaacatcaccaacaacgtcaacaacatcagcaacggcaaggcgggcctggttcagcaggacgccgtgacgcacgatctgaccgtggcgaagggtacggacggcaagcacgtcgacttcaccggattgacgggatcgcgcgagctggtcggcgtggcggcgggtacggccgcgggctcggcggtgaacctggcgcagctcagcccggtcgtcgccgcgctcggcggcggcgcgacggtcaatgccaacggttcggtagccggtcccacctatcacgtgcaggccggcacgcagaccacggtcggcaacgcgctcagttcgctcgacacgggcctgtcgtcgttgcaatcgcagatcagcggcggcacggtcgggctcgtcacgcagaatgccgcttctcacgacattcttatcggcgcatccaccaccggcacgcgtatcagcgtggcgggcacgggtggaaatcgcgtgatcggcggcctcacggccggcgcggttggcgcggccagcagcgaagccatcaacggcgcgcaactctatgcgaacaccgccggcacggcagcggcgctgggcggcggttcgaccgtcaatgcggacgggtcgctcaagcggccggcgtacagcatcggcggaagcacttacagcgacgtggggtccgcgctcgcggccgccgtcaccaccagtgtccaggcgggcgccaattcggttcagtacgattcggccgcgcacgacatcatcacgctcggcaacggcgccgcgccggttcggctcaccaacgtgcgcgccgcgaatctcgctgccgacagcacggacgccgtcaacggccagcaactctttgccaccaaccaggccgtcgcgcagaacaccggcagcatcacgaacctcgatcagcgggtaacggacaacaccacgaacatcagcagtctcgatcagcgcgtgacggacaacacgacgaacatcagccatctcgatcagcgcaccaccacgatcgaaggcgacgtgaccaacatcacgaatcagatcaccaacggcgagatcgggctcgttcagcaagatcaggcgtcgcgcaacctcaccgtggcgaagggcacggacggcgcccgcgtcgacttcaccggcaccggcggcgcccgcgagctcaccgggatcgcggccggcaccacggacgcttccgcggtcaatcttgcgcagttcaaaccgatggtggccgcgttgggcggcggcgcgcagatcaatgccgacggttcgctgaccggccccagctatcacatgcagggcggcacgcaaaccacggtaggcgacgcgctcggttcgctcgataacggtctcagcacgttgcagcagaatatggagaacggcggcatcggcatggtgacgcaagatccggtatcccgcgtcatcagtgtcggcgcgacgaccaacggcaatctgatcaacatggcgggtacggcgggcaatcgggtcgtcacgggcgtggcgccgggcgccgtcagttcgacgagcagcgacgcggtcaacggctcgcaactgcatgcgcaggccgcgagcacggcggtggcgctgggcggcggggccacggtcaatgcggacggttcgatgacggcgccgtcgtatagcgtgggcggcacggtggtgaacaacgtcggcagcgcgatcaccaacctggacggccgcgtcacgcggaacagcagcgatatcgccggtttgcagaccaccatcggcaacctcaacggggcggtcgcgaacgcggtgcagtacgacggttcggcgcacgacaggatcacgctcggcggcacggcggccaatgcgccgaaggtgcaactgaccaacctgaaggacgccaatctatcggccaccagcaccgacgcggtgaccggcgcgcaactctggaacacgaaccaggacgtcagcacgctgaaccagttggtccagactgtgcggaacaatcagaccaccggcacgccgtacgtgtccgtcaacagttccggcaacgcggcgcaggcgatcggcaacggctccgtagcgattggcggcggcgcgaaagcatccgcgccgaactcggtggcgattggcgagggttcggtggccgatgtcacgaacacggtttccgtgggttcgtcaggcagtgagcgccgcatcaccaatgtcgcaccgggccaggcaccgacggacgccgtgaacatgcagcagttccagggcggcctgagcgacatggcgcgcaatgcatactctggtacggcgtcggcgctggcgttgaccgcgatccctgaagtcgattccagcaagaacctcgcaatcggggtcggcacggcgggttacaaggggtatcaggcggtggcggtgggactgtcggcgcgagtcacgcagagtctgaaggtgaaactcggcgcgggcatcagctcggccacgaccgcggtcacggcgggtgccgcgtatcagtgg

SEQ ID NO: 13590 - DNA, 1413 bp, Burkholderia fungorum
atgcgaacggcaattcgtcaacccgccggccggaatttcgcggacgtggacagcatgctggctcgtctgctcgacgtgatgctcatcgcgttgggcgcggcgctggcctcgttcgcgcttacgccccacgcagggctgtcgattttcgagggcgctttcgtcgcgttcgacatggccttcgccattttgctgctgccgtggttcggcgtgtacgactcatggcgtggccgctcgaaatggcgtttggctaccaacatcgtattcggctggatcgcggtgcagatttgcggtcttgccatgttgttcctgcttcaccgtgccgcgtcggtgtcccgcctgtggtgcgtgagttggaccgcgatcacggcggtcgggctggtcgcttcgcggcttctggtgcacgcggttctcggccgcctgaggcgtgcgggcgggaatctgcggttggtggcggtggtgggtgccggcgcgcatcgcgaccgggtaatcgccaatatcgtgcgctcgccggacgcgggcttccgggcggttgcgactttcaatacgcggcaggcgcgtgagtgcgattttcccggcttgccgtcgttcgggcgtctgcgggaattcgcggagtgggtgcgccgcgaacagatcgaagaggtctggctcgcgttgccgatgtcagaagaggacaccgtattgcggatcctcgacgaattcagcggcgacctcgtgaatttgcgcttcattcccgacgtgcgcagcctcgcgatgttcgatcgcaacgtgatcgatctggtcggtgcgccggccatcaatctgatggcttcgccaatgacaccgtatgccctgatccagaaggcgctttttgaccggctgtttgcggctgcggcattgcttgcgctgacgcccgtgatgctttcgattgcggttgccgtcaaggtgacttcgaaggggccggtgctgtttacccagcggcgcaagggcgcggacgggcgcgtctttcgcatttacaagtttcgttcgatgcgcgagcacgcgtcgcggcccggtgtggttcgccaggccacgcgaggcgatccgcgtgtcacgcgcgtgggagcgttcctgcgtcgtacgagcctcgatgagttgccgcagtttctgaatgtgctgcgcggagaaatgtcggtagtgggaccacggccgcacgcgatcgaacacgacgaccagtaccggagcatcgtcgacgggtatatccatcgctaccggatcaaacccggcattacaggatgggcgcaggtgaatggctttcgcggtgagacggaccggatcgaaaagatgcaggcgcgcgtggagcacgatctgtactacttgcgcaactggtcgtttggattggatatgcgcatcgtttttgcaacggtggtgagggggttgcggcatcggaatgcgtat

SEQ ID NO: 13591 - DNA, 2208 bp, Burkholderia fungorum
atgaaattacttgatcaggaacgctcgggcgaagcgccaggcgaaaaggaaatcacgctgtccgacgtcattgcattgctgggcgagaatcggcttctgattgtgttgaccactgcggcaatgctgtttctcggcgttgcctatgcattcgtcgccacgccattgtacaaagccgatgtgatgattcaggtcgacagcgatcccggcaaccagaccctcaacgacaagctcggcgatcttgcgtcgttgttccagagcaaggcgtcgaccgacgctgaaatcgagctgatccgttcgcggatggtggtcgaagaaaccgtccggagtttgcatctcgacataaaggcaacgccacgccggtttccgctaattggtgcgctgatcgcacggtatatgtccgcaggcgctcccgcgaatcccgtcttggggatgagtcgtttcgcgtggggcggcgagagtctggaggtcacgcaattcgacgtccccgtcacgctttacgatcagtctttcaaattgacggtggggctgaaccagacgttcgaactccgcgattccgatggccgagcggtgttgcacggcgatgtcggcgtcgcggcgcagggcatgacgcggtatgggctggtgcaactgaaggtgaaccgcatggttgcgcgcgccggtacgtcgttcaatttggcgagggcttcgacgcaactcaccgcagcggacctgcgaagtgcgctcgacatcagcgagaaggcaaaacagtcaggcattatcgcgatctctcttgaaggcgcggacgctgcgaagaccgctgcgaccgtcaaccgtgttgcgagtatttacgttcagcgaaatgtggacagaaagtctgcgcaggcacagcagatgttgcagttcctcggcgaacagcttccccagttgcgcggggatctggacgaagccgaggcgaaatataacgcgttccgtaccgagaacggcactgtcgatctggaggccgaaggcagactccttctgcagtcgatcgtcgatagccagaccaggttggtcgaactgcagcaacaacgttccgcgcttgcgcagcggtacacgacgcaacacccatcagtgcaggccatcgacgcccagatcgcggatctgaaaaaacgccagggtgcgttcaatgaaaaagtcgcagcattgccgaacgtgcagcaacaggcactccgtctcatgcgcgacgtgcgcgtcaatacagacctgtacacgaagctgctggatagcacgcagcaattgcacgtgttgaaggcgggtcaactgggtaacgttcgcaccgtcgactatgcggaggtggccgaaagatccgtcaagccgaagaaaaccctggtgattgtgttgtcgggcgttatcggtttactgctcggatgctctatagcatttgtgcgcagcacgctgaatcgaggcttggagaccccttcggagatagaaggcgcggtgggtgtgccggtgtacgcgatcgtctcgaagagcacgcggcagcgggcgctgcagcaggcggcgcgtggcagcgctcctggattgaacgtgcttgcggcggttcagcccgacgatatcgcggtcgagggcatccgcagtttgagaacggcattgcaattcggcttgctcaaatcgcgcaacaacatcgtgatgttgacgggaccgcggccaggcgtcggcaagtcgtttctctcggtgaacctgtcggcggtgttatcggcaggcggcaggagcgtgctgttgatcgactcggacatgcgtcggggcaacgtgcacagatacttctcgcttcccagtaagccgggcctgtccgatgtgatcggcggagtcgagccctccagcgccgtccaccgccaggttctgccgaacctcgacgtactgatgagcggcagtgtcgcctcaagtccggctgaaatgctgatgagcgattccttcggcagattgctcactcagttcagcaagcagtacgacgtggtgatcgtggattcgccgcctgtgctggccgtgaccgacccggtgctggtcggtaaacacgccggcctgacattgctcgtcgtccgtcacggacgtcactcggccgccgagcttcaggaaagtgcccgtcagctgagtagtgccggtcgtgcggtcgatggcgtcctgttgaacgacgtacccctgcgagccagcacatacggcgcgttctccgagtatggggcgcagaaggccagg

SEQ ID NO: 13592 - DNA, 1407 bp, Burkholderia fungorum
atgagcaaacaggcaatcggcgtggtggggctggcggtcatgggccgcaatctggcgctcaacatcgagagccgcggccatgcggtgtcggtgttcaaccgtagccgcgagaaaaccgacgaactcatcgccgaatatccggacaggaagctggtgccggccttcacgctggaagaattcgtggagtcgctggaaaaaccgcgccgcattctgctgatggtcaaggcgggcgagggcaccgacgccacgatcaaccagttgaaaccgctgctggacaagggcgacattctgatcgacggcggcaacacgcatttcaccgacaccatccggcgcaatcaggatctggctaaatccggcctgcatttcatcggcacgggcgtgtcgggcggcgaggaaggcgcgctgaaaggcccgtcgatcatgccgggcggccagcgcgacgcctacgacctcgtcgctccgatcctcaccgaaatcgccgcgaaggcgccggacggcgagccgtgcgtcgcctacatgggaccggacggcgcgggccacttcgtgaagatggtgcacaacggcatcgaatacggcgacatgcagctgatcgcggaaagctacgcggtgcttaagcaggtggttggactctcgaacgaggaactcggcaaggtctacacggagtggaatcagggcgagctcgacagctatctgatcgaaatcacctcgaagattttcagcaagaaagacgaagaaaccggcaaggatctggtcgacgtgattctcgatcgcgccgcgcagaagggcaccggcaagtggaccagccagaacgcgctcgacctcggcgcgccgctgccgctgattaccgaagccgtgtttgcgcgcgtgctgtcgtcgctgaagacgcagcgcgtggccgcgagcaaggtgctggagggcccggcggccaggccgctcggcgccgagcgcgaggctttcatcgaatcggtgcgccgcgcgttgtatttcagcaaggtgatttcgtacgcgcaaggcttcgcgcaactgcgcgcggcgtcggaagaatacaagtgggatctggactacggcacgatcgcgaagattttccgcgccggctgtatcatccgcgcccgcttcctgcagaagatcacggacgcttatacgaaagacaaggcgatcgccaatctgctgctggacccgtatttccgcgacatcgcgaagaactaccagtcggctctgcgcgaagtcgtgatcgcggcgatcaacgcgggtgtgccggtgccggctttcgcgtcggcgatcgcgtatttcgacgcctaccgttcggaacgcctgccggcgaacctggtgcaggcgcagcgcgatttcttcggcgcgcatacgttcgaacgtatcgacaagccgggcagtttccacgcgaactggagc

SEQ ID NO: 13593 - DNA, 930 bp, Burkholderia fungorum
atggacgtgatggcacgaattccaaagctgacaacgacgctagcctacgatcgctacatggcgggccagaaactggtctcgagcgtgaatcgcccgtggcggcacctcgtgctgcgctcgtacctcgaaccggtcgaacaggaactgctggaagcgcccggcctgcaggagctcacgctgatgacgctcgcgagcggcgccgagcacctcgaacgcaacctgaacgggcgctgggagagcgccgatctgcgggtgggcgacgtctggttcgtgccgcccgcgccgatttcgtggcgctggcgttcgatcagcgatgagccgctgtcgaccgttcatttgcacatcgaacgcagcctgatcgacagcgtcgccgagcagatggagcttggcggctcccgtgaactggtgctcggcgacgcgatgcagtttcgcgacccgctggtcgccgcgatgcttgctgcattgcatcgcgccgccgcggatcccgccgactcgcgtctctttgtcgatgcgctggttcacgcgctggccgcgcatctcctgcagcattattcgcgcggccgctcggcggcggcgggatcgccggccggactgccggcgtgcccggaacgcttcgtgccgcgccggatccgccgtgtgaccgactatatccgcgccaatctcgccggggatctggcgatcagcgaactggccgcacaggcggggctaagcagctttcactttgcgcgcgtgtttcgccgcgagacccgtgagacgccgcatcggttcgtcacgcgtttgcggctcgaagaagcggcgcggctgctgcatgcgaccgatcagaccgtgctgcagatcgcgcttgcggttggtttcgagaatgccagtcatttctccgtgcagttcaagcgtgactacggcgtgacgccgctcgcctaccggctgcgcggc

SEQ ID NO: 13594 - DNA, 702 bp, Burkholderia fungorum
atggatgcagcgacaatggatgaaacggtcgccacgatcatgactcgcgtcgatgcaggccggttcacccagcatgtcgtggtcaatgtggcgaaacttgtgcacatgcaggccgacaaggaactggcaaagtcggtgcaggattgcgatctgatcagtatcgacgggatgggtgtgatctgggcggcgcgaatgcttggtcatgcggtgcccgaacgcgttgccggcgtcgatctattcgaccgcttgctggcggaggcggcgaggcttgggcttccagtatatctgcttggcgcgaccgatgaggtagtcacacgcgtcgccacgatatgcacagcccgctattccggtctgcaagtcgccggataccaccacggttatttcggcgatgatcagcaatccgttgtcgaccggatccgcgagtcaggcgcgcgactgctgttcgtggcgattacctcgcccaccaaggagaattttatcaaccgctggcaggctgcgctcggtgtcgatttcgtaatgggggttggcggaacgttcgatgtcgtggccggtaaagtcagccgcgcccctcgctggatgcaaaggtccggtctggaatggttcttccgtgtcctgcaggaaccacgtcgtatgtggcgccgctatctggtcacgaatagcaagttcgcactaatgctgggtaaggcgctgatcgttcagcgg

SEQ ID NO: 13595 - DNA, 1683 bp, Burkholderia fungorum
atgcttttcatgaaatgggtcacgcaccagcatttcaaaaactggtacgaccacttcccgcaaccgtcgacagcggcgcgcgcagccgcaacaatctctctggcaacacgcccgcgcgcccgcgctcacgggcattccgaccgcttccggcaagctccggcgaagcgcggcttgaggagacaccccatgagttaccaatacgatgaacgcgtcgacggcccgctcgcgacgcacgacaaagccaccgtcgtcgcacaattgcaggcgctgatccccgatctgccactccttcacgaacaggaagacctgcgtccgttcgaatgcgacggcctcgccgcctatcgcgcaacgcccatgatggtcgcgctgcccgacaaggtcgaacaggtcgaggcgctgctgaaattcgccaacgctcacaagattccggtggtcgcgcgcggcgccggcacgggtttgtcgggcggcgcattgccgctggacaaaggcattctgctggtgatggcgcgctttaaccggattctcgaagtcgatcccgaggcctgcgtggcgcgcgtccagcccggcgtgcgcaatcttgcgatctcgcaggccgccgcgccacatggcctgtactacgcgcccgacccgtcgtcgcagattgcctgctcgatcggcggcaatgtcgcggaaaacgcgggcggcgtgcattgcctgaagtacgggctgaccgtcaataacatcctcaagctcgagattctcaccatcgacggcgagcgcatcacgctcggctcggacgcgctcgacgcgccgggtttcgacttgctcgcgctcttcaccggatcggaaggcatgctcggcatcgtcaccgaagtcaccgtgaagctgctcaccaagccacaaagcgcgaaagtactgctggccagtttcgacgacgtcgaaaaagccggcgcggcggtcgcgcagatcatcggcgcgggcgtgattccgggcggcctcgaaatgatggacaacctcgcgatccgcgcggcggaagacttcatccacgcgggctatccggtcgatgccgaagcgatcctgctgtgcgaagtcgacggcgtggaaagcgacgtgcgcgaagacgtggcctgcgtggaagcgctgctgcgcgcagccggcgccaccgacatccgtctcgcgaaagacgaggccgaacggcagcgcttctgggccggccgcaagaatgcgttccccgccgtgggccgtatctcgcccgactactactgcatggacggcacgattccgcgccgcgaattgccgcgcgtgctcaaaggcatcgaagacctctcgaaggaatacggcctgcaggtcgccaacgtgtttcatgccggcgacggcaacatgcatccgctgatcctgttcgacgccaacgcgcccggcgaaaccgaacgcgccgaggcgatcggcgcgcgcattctcgaactgtgcgtggcggtgggcggcagcatcaccggcgaacacggcgtgggccgcgaaaagatcaaccagatgtgcgcgcaattcaatagcgacgaactcaccttcttccacgcactgaaagccgcattcgatccgcaaggtctcctcaaccccggcaagaacgtaccgaccttgcatcgctgcgccgaattcggctcgatgcacgtgcatcacggcgcgctgccctttcccgaactggagcgtttc

SEQ ID NO: 13596 - DNA, 1122 bp, Burkholderia fungorum
atgcgccgcctttcgaacatctaccgtctcggggtcaaggaactgtggagcctgtggcgcgacccgaccatgctggtgttgatcgcctataccttcaccgtggcgatctattccgccgctaccgcgcagcccgacacgctgcatatggcgccgatcgcgatcgtcgacgaagacgcctcgccgttgtccgcccgcattgcgtcggcgtttttcccgccccagttcggcattccgcgcctgatcgcccccgcccaggtcgatcatggtctcgatacgggcgaatacactttcgcgctcgacattccgccgaacttccagcgcgacgtgctggccggaaaacccgcgtcgatccagctgaacgtcgacgcgacccgcatgagccaggcgttcaccggtagcagctacgtgcagcagatcgtgaccgacgagatttcaggcttcgtggcgcgctaccgggacaccgcgccgccgcccgtcgatctcgccgtgcatatgcgcttcaatccgaatctcgaccagacctggttcggcgcgctgatggagatcatcaacaacgtcacgatgctgtcgatcattctcacgggcgcggcactgatccgcgagcgcgaacacggcacgatcgaacatctgctggtcatgccggtcactccagcggagatcatgctggcgaaagtctggtcgatggggctcgtggtcatggtggtggccacggcttcgctgaccttcgtggtgcgcggcgccctgcatgtgccgattgaaggctcggtggccctgttcatggtcggcacggcgctgcatctgttcgccaccacgtcgatgggcatttacatggcgacgctcgcgcgcagcatgccgcagttcggcatgctgctggttctcgtgctattgccgctgcaaatgctctccggaagcatcacgccgcgggagagcatgccgaagatcgttcaggacgtcatgtttttcgcacccactactcacttcgtcgagcttgggcaggccattctgtatcgcggcgccggcctcgatgtcgcgtggcggccgtttctgatcctgatcgcgatcggctcggtgctgtttgcgatggcattgcggcgttttcgcagaaccatcggtcagatggcc

SEQ ID NO: 13597 - DNA, 723 bp, Burkholderia fungorum
atgaaattaaaacaggccgtaacggggatcgcggcgctagcctgcatgacaacggcagctcacgcgcaatcggccggaagcttttacgtcacgacaggctggttccatctcgcacctcaatcgaacagtgaaccgttgaaggtgacaagcattggcggcagcccgaccaacatcacagaagccaacacaggcgcatcactcagttcagccgacaccattggcatcaccgccggctacttcgttactgaccacatcgcggccgaactcgtggtcggctacccgccttcattcgacctggagggctcgggcagcctcgcccaattcggcaagctgggccaggcgaaacagtggagcccgactctgctgttcaagtactacttcaacgcaccgaccgctgctttccgtccgtatctcggcgttggcgtgagccgtatctggttcaccgacgaaaagatcaccaacagcgcattcgaggcaaacgttctgcatggtccgaccagcgtcactacggatagttcgtgggagccggtgtttaatgccggcttcacttacgccttcaaccagcactggttcgcgggcttttcggtgtcgtacctgccgctcagcacgaccgccaagctgagcactgctgcgaacacaccggtcggcacgctgaacgtgcaatcacaaacgaagatcaagctgaacccgatcgttacgtacgtcaacatcggttaccgtttc

SEQ ID NO: 13598 - DNA, 885 bp, Burkholderia fungorum
atggcagttcgcacaacaggccggcatgccggcgatacgaagtcccgcatcctcgacgccgccgaaacgctctttatcgaatgcggctatgaggcgatgtcgctgcgccagattacttcgcgcgccgaagtcaatctggcggcggtgaactaccacttcggcagcaaggagtcgctgattcactcgatgctgtcgcgccgcctcgaccgtctcaaccaggagcggctcaagctgctcgatcgtttcgatgcgatgctcggcgagcgtctgacctgcgagcacgtgctgggcgcgatgttcattcccgcgctgcgcctgtcacgcgatccgcgagtgggcggtaaagcatttctgcgtttgctgggacgcgcttataccgacccgtcgtcgttcattcgcgactttcttaatgggcactacgcttcggtggcggtgcgctttttcgatgcgttccagcgcgcgttgccgcatttgccgcgtgaggaactcggctggcgccttcactttgcgattggcgcgctctcgggcgtgctggccggtaccgatacggacagtctgatttccgagttctcgcagggcaagtcgatgaacgacctgcagctcatagcacgcctcgcctcgctgatggtggccgcgctcaaggcgccgctgcccgacggctcgcaactggccgccttcgccgcagtgctgggcgatgctaccgagggcggctcggaatgcccgatagatggcagcgcgcagggcgcggcaagcacggcacgggcgtcaggcgaatcggcatcggcatcggcatcggcatcggcatcggcgggcatatccgaaggcgaacgccgtggcgacaacatggaagcgggcgcgtttcagcacgcgttgcacggcacggcc

SEQ ID NO: 13599 - DNA, 1218 bp, Burkholderia fungorum
gtgataatcagcgccctctgcccattatcacggccggtgtacagccggtcgatgccatatgcagtcagtcctgatggccgatcttctgttccgctcgcaatcgcgtggtacgtgtcgcacatgtcacacatggcgcacgttcagcgcgttgaacgcgttgcccatttcgaacacgcgctccgccatgttcgggcgagtgcgttcagcgagcccgttgcgcgcggggtgccgctaatggcttccgtatttcgcgccggtaaccggcttgccagcggctcggtcggcttcgtcacgcgccgcactgcgttgacgctggccttgagcgcggccggcggcgcggctgcgctcgcactcggcgcgggctttgcgctcggcacgcactggccggtgcacgccgcccggtccggtgagccagcgacggctcacgtcgagcacgactatgcgatcgatcagctcggcaagctgaatgcctcggtggcgcagatcgagccgcgcatcgcgcgcctgagcgcgcaggtcggcgacttgcgcgatttcgaagcacgtctgaacacgccacggtcggcgccgcgcgcgcctgtcgtctctgccacgccggctgcggcgcccgcatccgacgcggccgccaccgacagcgaagacgaaggcgagggtggcccttcgctgccgccgctccgctgcagtgaactcgcgcccgcgctgagccgccatgccgacgccgggcgcactgcccagcaactggattgcattgccgcgacgctgtcggcgctcgaacagcagaccgccagtcacgcagtcgcgttcgccgcctttcccggccgcatgcccgccgacggcgcgcgcttcggctcgcccttcggcaatcgcatcgatccgttcacgcatcgtttgagctttcatccggggctcgatctggtcgccagaaccggcacgccgattctggcggcggccggtggccgcgtggtcttcgcgggcgaaaaatcgggttatggcaatgcggtcgaaatcgatcacggcaatggcctcatgactcgctatggccatgcgtcgcgcctcgtcgtgcatgtcggcgatctggtgctgccgcgccagtatattgccgacgtcggctcgacaggccgctccacgggtccgcatctgcatttcgaagtgctggtcaacggtgcgccggtcaatccggttgcctacctcgcgcttttctcgcccgcgcctcatggc

SEQ ID NO: 13600 - DNA, 660 bp, Burkholderia fungorum
atgaccagcgcgcccgcactccatacgacgaacgaagcacgcgtgcgcgaagaaatctgcgtgaccggcgcgagcctttatcaacgcggctatacggtgggcaccgcgggcaacatcagtgcgcggctcgacgacggctggctgatcacgccgaccgatgcctgtctcggccggctcgatcccgccgatatcgcaaaggtcgatctcgacggcaatgcggtttccggcgcacgcccgtcgaaaacgctggcgctgcatcgcggcatctatgcgcgcaacggcgaagcgcgcggcatcgtccatacccattcgacgcatcttgtcgcgctgactctcgcgggcgtgtggcgcgagaccgacgttctgccgcccatcacaccgtactacgtgatgaaagtgggtcacgtcccgctgattcggtacagacgtcctggcgatcctcaggttgccgaacagatcgctgcgcttgccgatagcgttcgcgcggtgctgctggagcgtctcggcccggtggtgtgggagcgctcggtggcgcaagccgcgtatgcgctcgaagaactcgaagaaaccgcgcgtttgtggctgacgacgaacccgcggcccgcgccgctcgatgaagccgcactcgaagaactgcgcaccgtgttcggcgcgcgctgg

SEQ ID NO: 13601 - DNA, 270 bp, Burkholderia fungorum
atggacgacacatcgcatcagtccgaccctctccgccgtgcgcgccttcgctggcgcgcacggcggggcctgctggaaaacgatctgatctttgagcgttttttcggccgatatgagcatgacctcagcgatgccgacgtgggcgccctcacacgcctgctcgagctgagcgataacgacctgatggacttgctgctcgcgcgcaaggaaccggaaggcgaccttgccgacccggatgtggtccgggtgctggagttgctgcggaatgcc

SEQ ID NO: 13602 - DNA, 1410 bp, Burkholderia fungorum
atgacagacaacagtaccgcgcatcgcgcagcaccgcttggcgagacactcgatgcgctgcgcgccgcgctcggtgaagacagcgtccgcgtgggcgagcagatcagcgaacgcgcgatgaccgactggacacgccacgagccgacgcggcctgcggcattgctcctgccgcgcaccacggagcaggtctcgcgcgcgctggccatctgtcacgcggcgcatcagccggtggtgccgcaaggcggcatgaccggcctcgcgggcggcgcgattgcgcgtgccacggatattgcgttgtcgctcgaacggctggacggcgtcgaagaagtggacgccgcttccgccaccctgaccgtgcgcgccggcacgaccttgcaagccgcccaggaagccgccgccgaagccggcttcgaactcgcgctcgatctcggcgcgcgcggctcgtgccagatcggcggcaatctcgcgaccaacgcgggcggcaaccgggtgatccagtcgggcaccgcgcgcgaccaggtgctgggtctcgaagtggtactggccaatggcgacgtgctcacgtcgctcggcaagatggtcaagaacaataccggctatgacctcaaacactggttcatcggctcggagggcacgcttggcgtaatcacgcgcgccgtgttgcgcttgcatccgccgcgtgccgcgcgccataccgcgctggttgcgctcgacggctacgatgccgccgtgaacctgctgcgccgcttgtccacgcgattcggcaacgacatcggcgcgttcgaaatcatgtggccggacttctacgacttcggcgtgaagctgaccggcacgcgctcgccatttgccgacgcgcatccgctctatgcattgatcgaacacgccagcttcgattcggacgacgacggcgaacgcttttccgccgcgctgaccgaagcgctggaagccggcgcgatccgcgacgccgtgatcgcgcagtcggtggccgacgtgcgcgcgctatgggcgattcgcgaatgcacggcggagtttccggtgcggctcgacgcgatcaacttcgacgtgagcctgccgatcggcgcgatcggcgccttcgtcgaccgctgccgcgcggcgctcgatcagcgctggccgggcaatgcgtcgtatttcttcgggcatatcggcgattcgaatctgcatgtcaccgtggacggacattcgatccccggcgtcaatcatcatgcggtgtacgcgttcgtctacgacatgctcgggccgctgcacggttcggtgtcggcggaacacgggattggtttgctcaagcgcgagttcctgccgatttcgcgctcgccggcggagttggcggcaatggctgcgatcaaacacgcgctggatccgcacggcattctgaatccgggcaagctgttc

SEQ ID NO: 13603 - DNA, 1167 bp, Burkholderia fungorum
ttgtccgacaggagtgctgagcatctgcgccggggacgctgcacagaccagcacggcaacgcgcgcgtgaccgcgaacggtggcgggcgtaacgccggagacgcagcaaaaccatatcgcatccgcgagcggccttccgcaatcgactggatggtcaatttttcaaggaatttcacgatgaacaagaagtttgcctcttcccgtgtttcgatgatcgtcgcagcctcggtgctggccttcagcaccgtgtcggcgcatgcgcgggtgttccgcgtgtcggacgtgcatggcgacacgtatccgaccaacatggccgtgaaatacatgggagagcagatcaacaaggcaaccggcggcaaggattccgtgaaggtcttcggcaatagcgcgctgggttcggaaaacgacaccatcgatcaggtgcgcatcggcgcattggacatggcgcgcgccaacggcgcggctttcaacgagatcgttcccgaatcgatgattccgtcgctgccgttcctgttccgcgatatcgaccatttccgcaaagtgatgtacggcccggaaggccagaagattctcgacgccttcaaggcgaagggcatgatcgcgctgacgttctacgagagcggcgcgcgttcgatctatacgaagaaaccgattcattcgcccgctgacatgaagggcctcaaggttcgtgtgcagccgtccgacctgatggtcgacgaaatcagggcaatgggcggcacgcccacgccgatgccgttcgccgaggtctacacgggcctgaagacggggctggtggatgccgctgaaaacaacctgccgtcgtacgaagaaaccaagcacttcgaagtcgcgccggtctattccgaaacccagcattcgatgacccccgaagtgctggtgttctccaagaaggtgtgggatacgctgacgccgcaggaacaggacatcatcaagaaggccgccgccgactcggtgccgtactacgaaaagctgtggaccgcgcgcgaagccgacgcgagcaagacggtcacgaagggcggcgcgaccatcgtcgcctcgtcgcagatcgatcgtgctgcgttcgtgaaggccatgcagccggtctgggcgaagtacgaaaagaccccgcagatgaagcagctcgtcgacgagattcaggccgtcaaa

SEQ ID NO: 13604 - DNA, 1566 bp, Burkholderia fungorum
gtgtttcactgctgcttttttctgccggcttttttctgcccttcacccacgccttatccctcacgacgctgcgaccgcgctatgacgacccaccacgcttctgccactcccgacctgccgctcgacatgatcattttcggcggcaccggcgacctgtcgtttcgcaagctgctgcccgcgctctatatggcgcatctgcactgcaacctgccgccggacacccgcattctcacaatcggccgcaagccctggtcgcgtgaggagtacatcaacgaattcatggagcagaaggcaaagcccttcattgaaaagaaagcgttcgatgccgccgcctgggacaagtttctggcgctgttcgaatacgtgcgcatggacgtggattcagtcgaggactatcaacggctgaaggaggcgtcgcgcgagggcgtgcgccgcgtgttctatctcgcgacgtcgccggacctgttcacgaacatctgcgataacctcgcggcggcgggattggtcgacggcaactcgcgggtggtgctcgaaaagccgctgggccacgatctggcgtccgcgcaggaaatcaacacggcggtcggcaagcatttcagcgaagcgcagatctaccggatcgaccactacctcggcaaggaaaccgtgcagaacctgatggtgctgcgtttcggcaatccgattttcggcccgttgtggcaggcgccgtatatcaagagcgtgcagatcacggtggcggagacggtcggcgtgggcagccgcgcgggcttctatgacaagaccggcgcgctgcgcgacatggtgcagaaccacttgctgcaactgctgtgcattgtcgcgatggagccgcccgtgtcgctcgacccggacgcggttcgcgacgaaaagctcaaggtgctgcgctcattgcggcccatgacgccggaagacatcgcgcgcgacaccgtgcgcggccagtacaccgccggcgcggtggacggcgaggcggtgaagggttatctcgaggaagacaacgtgccggcaggcagccgcgccgaaaccttcgtcgcgttgcgcgcgcatatcaacaactggcgctgggcgcatgtgccgttcttcctgcgcaccggcaagcggatgcagaagaaagtatcggagatcgtcatcgagttttccgaactgcctttctcgatcatcccgaacgggaatagcgggcgcaactacggcaaccggctcgtgatccagttgcagcctgaggagtcgatccagttgcaggtgctcgccaaggaaccgggcagcggcatgcatatgctgccggtgaatctgaatctggatttgcagcaggcttttaccgagcgtcgcgcggaagcgtacgagcgtttgctgatcgacgtgattcgcggacgcctcacgcacttcatgcgtcgcgacgaactcgaagcagcatgggcgtgggccgagccgattctggcaggctggagcaagtcgggcgagaagccgcgtggctatacggcgggcacgttcgggccggctgcatccaccgcgctgatggcgcgggaaaatgcagtgtgggcggaagagtcgcaa

SEQ ID NO: 13605 - DNA, 504 bp, Burkholderia fungorum
atgagcggacttgaggacttgacgcatatggatttcagaattgggcaagggtacgacgtgcatgcgctggtgccgggacgtccgttgattatcggcggcgtgacgattccctatgagcgcggtttgctcggccattcggatgcggacgtgctgctgcacgccattaccgacgccctgttcggcgccgccgcgatgggcgacattggccgccatttctcggataccgatgcgaagttcgccggcgcggatagccgggttctgctgcgcgaatgtttcgcgcgcgtgacggcggcgggtttttccatcgccaacgtggatagcagcgtggtggcgcaggcgccgaagctggcgccgcatatcgagggcatgcgggccaatatcgccgccgatcttggtttgccggtcgagcgcgtcaatgtcaaagccaagaccaacgagaagctcggctatctcggccgtggtgaaggtatcgaagctcaggccgcggttctgctgatcaggaac

SEQ ID NO: 13606 - DNA, 810 bp, Burkholderia fungorum
atggacgcacgcagttatctgttcgtgccgggcgaccgccccgagcgctttgccaaggcgctcggcaccggcgccgacgcggtggtgatcgacctcgaagacgcggttgtgccggcggcgaagcttgccgcgcgcgacggcctgcggcgctggctgccgacagtagacccggcgcggctgatcgtacgcgtgaacgcggtcggcacgccgtggcatctcgaagatgtggagatggtgcgcgcttccggcgtttccgtgatgatgctgccgaagtcggacagcgcgcggcaactcgccgaggtcgccgcgcggctgccatcaacggtccggatcgtggcgctcatcgaaaccgtagcgggagtggtggcgatgcgggaaattgccggcgtgccgtcggttgcgcggcttgccttcggcacggtggatttttgcggcgacgccggcattgaagggctcggcgcggaactggattatgtgcgttcgcagatggtgatcgaatcgcgctatgcgggcctcgccgcgccgatcgacggtgtgaccccggagctcgatcatctggagcgtctgacggaacatgtggccggcgcgcggcgtttcggcttcggcggcaagctgtgcattcacccgcggcaggtggagccggtcaaccgcggtttcgcgcccagcgaggacgagcgccggtgggcggcgcgggttctcgcggcctgtagcgagcatccggaaggcgcgttcgcggtggacggcaaactggtcgaccggccggttatcgagcgggcgaagaagatcgcggaattcgacacgctcatccac

SEQ ID NO: 13607 - DNA, 1785 bp, Burkholderia fungorum
atgggacagtacgccgcgccgctgcgcgacatgcaattcgtgttgcacgaactgctcaacgtcgaagccgaaatcaggcagatgccgaagcacgcggatctcgacgccgacacgatcaacgcggtgctcgaagaagccggcaagttctgctccgaagtattgttcccgctcaaccacagcggcgaccaggaaggctgcacgtacgtcggcgacggcgtcgtgaccacgccgaagggcttcaaggaagcctatgcgcagtacgtcgaagccggctggcccgcactgggctgcgatccggagtacggcggccaggggctgcccgcgttcgtcaacaacgcgctgtatgaaatgctgaactcggcgaatcaggcgtggaccatgtacccgggcctctcgcatggcgcgtacgaatgtctgcacgcgcacggcacgccggagttgcaacagcgctatctgccgaaactcgtcgccggtgtctggaccggcacgatgtgtctgaccgagccgcattgcggcacggacctcggcattctgcgcaccaaggccgaaccgaacagcgacggctcgtacgcgatcagcggcacgaagatcttcatctccagcggcgaacacgatctcgcggagaacatcgttcacctcgtgctcgcgcgtctgccggatgcgccgaagggcaccaagggcatttcgcttttcatcgtgccgaagttcgtgccgaacgaggcgggcgagccgggcgagcgcaacggcgtgaagtgcggttccatcgaacacaagatgggcattcacggcaacgcgacctgcgtgatcaatctcgacaacgccaagggttggctggttggcgagccgaacaagggcttgaacgccatgttcgtgatgatgaacgccgcgcgtctcggcgtcggcatgcagagcctgggcctgaccgaagtcgcgtatcagaactcgctggtgtacgcgaaagagcgtctgcagatgcgttcgctgaccggcccgaaggcgccggacaaggccgccgacccgatcatcgtgcatccggacgtgcgccgcatgctgctcacgcaaaaagcctacgccgaaggcgcgcgcgctttctcgtactggtccgcgctgcatatcgacaaggaactgtcgcacgctgacgaatcggtgcgcaaggaagccgcggacctcgtcgcgctgctcacgccgatcctgaaagcgttcctgtcggacaatgcgttcgaaggcaccaatcacgccatgcagatctacggcggccacggtttcatcgccgagtggggcatggagcagtacgtgcgcgacgcgcgcatcaatatgatctacgaaggcaccaacgcgattcaggcgctcgacctgctcggccgcaagatcctcggcgacatgggcgcgaagatgaagaagttcggcaagctggtggccgaattcgtcgaagcggaaggcgtgaagccggaaatgcaggagttcatcaacccgctcgccgacatcggcgaaaaggtgcagaagctgatgatggaaatcggcatgaaggccatgcagaacccggacgaagtcggcgccgccgccgtaccgtatctgcgcaccgtcggccacctggtgttctcgtatttctgggcgcgcatggcacgcatcgcgctggacaaggaagcctcgggcgatccgttctacaaggcgaagctcgccaccgcacgcttctactttgcgaagctgctgccggaaacggccatgacgatccgtcaggcccgcgccggctcgaagtcgatgatggaagtcgacgaagcgctgttc

SEQ ID NO: 13608 - DNA, 2511 bp, Burkholderia fungorum
gtggcgcctgcgtcagccacctgtcgcgaagcgtccaaccaggcttcgcgaccccgcatatctccccggaggaacgacgtgagcaatctgatcattcgcaaggtagccgtgctcggcgccggcgtgatgggcgcgcagatcgccgcgcacctgatcaacgccaaggtgcccgtgctgctgttcgatctgcctgccaaggaaggcccgaagaacgcgatcgcgctgaaggcgatcgagaatctgaagaagctgtcgcccgcgccgttcggcgtgaaggacgacgcgcaatacgtccagccggccaactacgacgacgacatcgggaagctcgccgaatgcgacctcgtgatcgaagcgatcgccgagcgcatggactggaagcacgacctgtacaggaaagtagcgccgcatctcgcgccgaacgcgattttcgcgaccaacacgtcgggcctgtcgatcaccgcgctctcggaaggtttcccggatgaactgaaggcgcgcttctgcggcgtgcacttcttcaatccgccgcgctacatgcacctggtcgaactgatcccgaccgcgaccacacgcccggaaattctcgaccaactcgagtcgttcctgaccagcgtggtcggcaaaggcgtcgtgcgtgcaaaagatacgccgaacttcatcgccaaccgcgtggggattttctcgattctcgctgtcgtgaccgaagccgcgaaatacggcctgcgtttcgacgaagtggacgacctgaccggcgcacgtctgggccgcgcgaagtcggccacgttccgtaccgcggacgtggtcggtctggacacgatggcgcacgtcatcaagacgatgcaggacacgctgaaggacgacccgttctatccggtctacgaaacgccggctgtgctggccgaactggtgaagaagggcgcgctgggccagaaaactggcggcggcttctacaggaaagaaggcaaggcgatcaaggtgctcgacgcgaaaacgggcgagtacgtggacggcggcgcgaaggcggacgaactggtcggccgcatcctgaagcgcccgccggcggagcgtctgaagctgctgcgcgaatcggagcatccgcaggcgcagttcctgtgggcgattttccgcgacgtgtatcactatatcggcgtgcatctggaatcgatcgccgacaacgcgcgcgacgtcgatctggcgatccgctggggcttcggctggaacgaaggcccgttcgaaggctggcagacggccggctggaagcaggtcgccgagtgggtgcaggaagacatcgcagccggcaaggcgctctcgaacgcgccgctgccgtcgtgggtgctggaaggtccggtggccgagaaaggcggcgtgcataccaacgaaggttcgtggtcgccggcttcgaagacgttcgtgccgcgctcgtcgctgtcggtctacgacaaacaggtgttccgtgcgccgctggtcggcgaaaccgccgctgatccgaagacctacggcaagacgctgttcgaaaccgacgccgtgcgcgcctgggtcgacgatcgggccggcgagaacgatgtgctgatcgtgtcgttcaaaagcaagatgaacacgatcggaccgtcggtgatcgacggtctcacgcaggcgatcgaactggccgaaaaggactacaagggtctggtggtgtggcagcccacgtcgctgaaactcggcacgccgggcggcccgttctccgcgggcgccaacctcgaggaagcgatgccggccttcatgatgggcggcgcgaagggcatcgagccgttcgtgaagaaattccagcaaggcatgttgcgcgtgaagtatgcaagcgtgccggtcatttcggccgtgtcgggcatcgcgctcggcggcggttgcgaactggcgctgcatagcgcgaagcgggtcgcgcatatcgagagctatctcgggctggtggaagtcggcgtgggtctcgtgcccgccggcggcggcctgaaggaagcggcgctgcgcgcggcggaagcggcgacgcaagtcggcgcgaccaacgacctgctgaagttcgtgcagaagtcgttcgaaaacgcggcgatggcgaaggtctcggcctccgcgcttgacgcccgcgcgatgggctacctgaagccgtccgatacgatcgtcttcaacgtgttcgagttgctcgacgtcgcgaagaaggaggcgcgcgcgttgtcggcggcgggttatcgtccgccgctgcgggtcacgcaagtgccggtggccggccgctcggcgatcgcgaccatcaaggcgtcgctcgtcaacatgcgcgatggccgttttatcagcgagcacgacttcctgattgcgagtcgcatcgcggaagcggtgtgcggcggcgacgtggaagcgggcagcctggtcgatgaagaatggctgctgcaactcgagcgtcgtgcgttcgtcgatctgctcggcacgcaaaagacgcaggaacggatcatgggcatgctgcaaaccggcaagccggtgcgcaac

SEQ ID NO: 13609 - DNA, 510 bp, Burkholderia fungorum
atggaagaacaggaccgcgtcgccgtcatgcagcaattcggccgcacttaccggacgttcatgtcggccttcgaggcgcacgttggccacccgctgccgcgctggcgcattctgctcgcgttgcacgagcagggtggcgagtcgtcgcagaagcgtctggtggagcgcttgcgcgtcgacccgggcgcgctgacgcggcaactgaaaacgctggagggtatgggctggatcgctcgcagcatggacacgcgcgacaaccgcgtgaccaacgtgcgtctgaccgaagcggggcaatcggccaccgaagccagcttgccgcgccgcaatgcgtttctgcacgacacgatggcggggttgccggacgatgcgctgggcgcgctgtcggcggcgttgaagctgctcgaagcaaggatcggcgaggtggcggcgatggccggcgccgccggagcgggctctatcgatatcacgcagccacccgcggccgtggcgggcgaagctccgcgccagcct

SEQ ID NO: 13610 - DNA, 1029 bp, Burkholderia fungorum
atgccggcacggagtggggcgcttcgaaccgatagattaagcatctccgccgatcaaaaaaagcgacaattaacgacgatttacgtcagaatttcttacatgaaaccgatcccgcctttgaccgcgctgcgctgcttcgaggccgtcgcccgcctgggcggcgtgacgcaggcggcgcgcgaactgcatgtcacgcactcggcggtaagccagcagatcaaggtgctggaagagtcgatgggcgtcgcactgttcatgcgcgcggcgcgcgggctgcggctgaccgaggagggcaggctttacgcgctcgacatccgcatggcgctgcgcgatatcacgcatgccacgcgccgcgcgcaggcccgcccgcacgaaagcgaactggtgatcacgaccttgccgtcgtttgctcagcactggctggtgccgcgtctcgccagttttcgcgacgcgcatccgtattaccggatccgcttgctgacgagtttgcaggtcgaggacttccgccaaggcgtgagcgatatcggcattcgcatgggtcaggggcattggcccgacgtcgcgcaacagaaactgttcgacgacgagatggtggtggtcgcggcgccgcacttcgcgctcgcgccggatggccgctttccggtcactgccgcggacgtgatggcctgcccgctgatctcgagtcccgatacgccgtggcatgagtggtgccaggcggcacaggtgtcggagccggccgaaggtgccgtggtgctgtcggcgaacgattccaatctcgtgatcgccgccgtgctgcagggccagggcgtcgcgctcgaacggcgcagtctcgtcgcgtatgcgctcgcgcggggcgaactgctgcagatcaccgatattcgcgtgccgtacccttatccgtactggctggtgtggcagcaacgcgaaatcctcgatgccgcgcaggcgcatttcgcgcagtggatagaaggtgaggtcgacgcctacctgcgcaacggcagcgcgcctgcggcggcgattcgtgcgggt

SEQ ID NO: 13611 - DNA, 393 bp, Burkholderia fungorum
atgaccaatcttcttcaactcccgcaaaagcactgcgcgctgcgcgtggtgccgcagccctcggatgcgaacgtccacggcgacgtgttcggcggctggatcatggcgcaagtggacattgccggctcgatcccggcaagccgccgtgccaacgggcgggtggccaccatcgcggtcaattcgttcgtgttcaagcagccggtgttcgtcggcgatctgctgagcttttacgcggatatcgtcaagacgggcaatacgtcggtcaccgtcgaggtcgaggtctacgcgcagcgcatgagcctcaccgaagacctcgtgaaagtcaccgaagccacgctgacctatgtcgcgaccgatagcgacaggcgtccgcgcgcgctgccgacgctggat

SEQ ID NO: 13612 - DNA, 729 bp, Burkholderia fungorum
atgagcaaaacccacttcggctttcaatcggtcgacgaacaggacaaggcgcagaaggtggcgggcgtgttccactcggttgccgccaactacgacttgatgaacgacctgatgtcgggcgggttgcaccgggcgtggaagatgttcacgatcgcccaggccaacgtgcggccgggctacaaggtgctcgacatcgcgggcggcacgggcgacctgtcgaaggcgtttgcgaagcaggccggcgaaaccggcgaagtctggcataccgacatcaacgaatcgatgctgcgggtgggccgcgaccgtctgctggacaagggtgtgatcaccccggcgctgctctgcgacgccgagaaaattccctttccggacaattacttcgacgtggtgaccgtggcattcggcttgcgcaacatgacgcacaaggacatcgcgctggcggaaatgcggcgcgtgctgaagccggccgggcgtctgctggtgctggaattttcgaaggtgtgggatccgctcaagaaggtctacgacgtctattctttcaaggtgctgccgtggttgggcgagcactttgcgaaagatgccgggagctatcaatacctcgcggaatcgatccggatgcatccggaccaggaaactttaaaaacaatgatggaacaagcgggcctggacggcgtcaaatattacaatttgtcagctggcgtggtagctttacatgtggggaccaaatac

SEQ ID NO: 13613 - DNA, 1080 bp, Burkholderia fungorum
atgtccatcacctcgacttccttccagccacccaaggtatccatctgcctgccgacttgcgaccgagcggaactgatcgcgacatgcatcgactcatgcctcacgcagagctacggcaacctggaaatcgtgatcggcgacgactcgaaggacacccgcaccgagcagttgatcgcggcgcgctatgcgcatgagccgcgcgtgcgctacaggaaaaaccagcccgcgctcggccaggcgcgcaatgtcgcgagcctgttcgaacgcgcgagcggcgacaagatcctgctgatccacgacgacgatctgctcgccacggacggcgtggagaaactggtgtcgttatggacgcgacatccgcaactggatgcggcgttcggcgaccagtacgaggccgatcacggcggcgccatcgacttcgaggcaagcgcgcgcctgaacatggcgtttcggcgcacgaaggaagcggaaggcctgcaggctctaccaggcagaaccggcctggtccagatgttccccaacaacggctggatggccaacgccgaactcgtcaaacggatcggctacgaggaagcgtatggcgtgtgctgcgacttcgtgttcggcacccagctgtgtctcgcggcgcgcgaggtgttctatctgcacgactatgtgtcggtgtatcgcaagaccgcaagctcgatctcgcatagcacgcgcggcacgacgctcgctgcgacgctcagcgcgtatgcgttcgtcagggcgctgaagttgccggcagaactggagccttcgcgcaggctggcgttgcgccgtctggcgccgatcgtcgtgtcggtccacgcgaagaatcgccaggcgctgcccggcttcaaggtcgccttcacccatctgttcgcgtacaggtatgggctgaacatgcggctctactaccatcttctgatgctcacgcgcagcgcgttgagcgtgcaccggcaggccgtggcggcggccgcggtcgcggcagtgaccactgcgcccgccgttgccgcggatccggccggcgccgtcaaggagttcgtttcggagttcgtcagcgatcgatcggagccggtg

SEQ ID NO: 13614 - DNA, 1797 bp, Burkholderia fungorum
atgtcgatgagatctgaatactgcggtctggtgaccgaagaactgctgggccaatccgtctcgctgtgcggctgggtgagccgccgccgcgaccacggcggcgtcatcttcatcgacctgcgcgatcgcgaaggcctcgttcaggtcgtctgcgacccggaccgcgcggagatgttcaaggcggccgaaggcgtgcgcaacgagttctgcctgcagatcaagggcgtggttcgcgcccgtccggaaggcaccacgaacgctgcgctgaagagcggcaagatcgaagtgctgtgccacgagctgatcgtgctgaacccgtcgatcacgccgccgttccagctcgacgacgacaacctgtcggaaaccacgcgcctcacgcaccgcgtgctggacctgcgccgtccgcagatgcagcacaacctgcgtctgcgttaccgcgtcgcgatcgaagtgcgcaagtacctggacgcgcaaggcttcatcgacatcgaaacgccgatgctcaccaagagcacgccggaaggcgcgcgcgactacctggtgccgtcgcgtacgaacccgggccagttcttcgcgctgccgcaatcgccgcagctgttcaagcagttgctgatggtggcgaacttcgatcgctactaccagatcgtcaagtgcttccgcgacgaagatctgcgcgccgaccgtcagccggaattcacgcagatcgactgcgaaacctcgttcctgtcggaacaggaaatccgcgatctgttcgaagcgatgatccgtcacgtgttcaaggaaacgatcggcgtcacgctggacgagaaattcccggtcatgctgtattcggaagccatgcgccgcttcggttcggacaagccggacctgcgcgtgaagctcgaattcacggacctcacggacgccgttcgcgacgtcgacttcaaggtgttcagcacgccggccaacacgaaagacggccgtgtcgcggcgattcgcgtgccgaagggcggcgagctctcgcgtggcgacatcgacagctacacggaattcgtgcgcatctacggtgcgaagggtctggcgtggatcaaggtcaacgaagtcgcgaagggccgtgacggtctgcaaagcccgatcgtcaagaacctgcacgacgaagcggtgaaggcgatcatcgagcgcaccggcgcgcaggacggcgacatcattttcttcgcggcggatcgcgcgaaagtggtgaacgacagcctcggcgcgctgcgtctgaagatcggtcattcggaattcggcaaggccaatggtctggtggaaagcggctggaagccgctgtgggtgatcgacttccccatgttcgaatacgacgaggaagacaaccgctacgtcgccgcgcatcacccgttcacgagcccgaaagacgagcacctcgagtatctggaaacggatccggcgcgctgcctcgcgaaggcctacgacatggtgctgaacggctgggaaatcggcggcggttcggtgcgtatccaccgtgaagaagtgcagagcaaggtgttccgcgcgctgaagatcaacgcggaagaagcgcaggccaagttcggcttcctgctcgacgcgctgcaatacggcgcgccgccgcacggcggtatcgcatttggtctcgaccgcatcgtcacgatgatggccggcgccgattcgatccgcgacgtgatcgcgttcccgaaaacgcagcgcgcgcagtgtctgctgacgcaggcgccgagcgaagtggacgagcgccagttgcgcgagttgcacattcgtctgcgccagccggaaccgaaggcg

SEQ ID NO: 13615 - DNA, 831 bp, Burkholderia fungorum
atgtccaccagcagacagcaacagggccggcaccaaggtcatatcgcgcgcaagcgtttcggtcagaattttctggtcgacatgggcgtgatcgattcgatcgtcgacgtcatccggccgcagcgcggcgagcgcatggtcgagatcgggccgggtctcggcgcgctcaccgagccgctgatcgagcgtctggcgacgccggaagcgccgttgcacgccgtcgaactggatcgtgatctgatcggccgtctgaagacgaaattcggcgacctgctcgaactgcacgcgggtgacgcgctcgcgttcgacttcggctcgctggccgcgcccggcgacaaggcgtcgctgcgcattgtcggcaatctgccgtacaacatttcgagccccttgctgtttcatctcacggcgttcgcgcattgcgtgatcgatcagcacttcatgctgcagaacgaagtggtcgagcggatggtggcggagccgggcaccaaggcgttcagccgtctctcggtgatgctgcaataccgctacgtgatcgacaagcaactcgacgtgccgcccgaagcgttcaacccgccgccgaaggtcgattcggcgatcgtgcggatgatcccgtacgaactgcatgaactgccgcccgtcgacgagcgcgtgctcggtgaactggtgacggccgcgttctcgcagcgccgcaagatgctgcgcaacacgcttgccgcgtatcgcgattcggtggatttcgaagggctgggcttcgacttgcagcgccgtgccgaagacgtgccggtggcggaatacgtgcgcgtcgcgcagatcgtggcagccagcaaggct

SEQ ID NO: 13616 - DNA, 954 bp, Burkholderia fungorum
atgacagaccgcgccagcaacgcgccggcattggatgcggccataaggtgggcggtacggctcgcggcgggaaatgcgagcgaagccgaattccgcgaatttctggactggaaagcggcggcggtcgaacatcagcttgcgtggggaagcatcgaacagcaattgcatctgttttcatcggcgcgcgaacgcgatggcgggacggcgcatcgggcgttggcggcgacccgtgtgtcacgccgaaaacttctgcgcgatgcgctcgccaccgtcgcggtggtcggcgtagtcggcgccgcggtgcgccgcttcggtctgtttgactcgctgtacgccgatgtcgcgacggacgtcggggcgcggcggcagctcagtctcgcggacaattcgatgctcgtactcgatgcgcgctcggccgtcgacgtcaatttcggtgaacgcgaacgtgcgattcgcctgctagaagggcggctgttcgtgcgtgtcgcgcgcgactccgcacggccgtttgtcgtctatacgcgcgacggttcattttcggctctcggtacggcattcggtgtcggtttatccagcgagggtagccgcctcgccgtcacgcattctgcggtgcgggcgcgttgcgcggcgggtgccacgctcgacgtcgtcgcaagccaggtcgcgacccttcgcgccggcgcgcagccggtcgttgagcgatggcacgccgactccgaagtcacatggatgaaaggctacgtcactatcgtcgatcgaccgttgcatgaagtcgtcgaatcgctgaaccggtacgtgcggggtttcatctcgatgtccgacgacgtcgcggcgctgaagatcagcggtcttttcccgcttgacgacgcgcaaatggcaatccggcagattgcgcagacgttgccggtgatcgtcacttaccacaccgactatttcattcgaataacggcgcgc

SEQ ID NO: 13617 - DNA, 1311 bp, Burkholderia fungorum
atgaacatcatctgggcgcgctccatcgtgtcggtcgtgctgctggctgttctgtgcgtggtggtcggcgcactcgtgaacgtcaaggcagcgctcgtcctcgcgatcgtcatgctgctcgcgcagagcgttttcagcactttccataaacagcgtctgtggcgtctgctcgacgcgccggtctacggcgaagtgccgagcgctcccggcatctggggcgaaatctactaccgtttgcacaagctcgcgaagcgctggcacgcccaggtgcgccaggtcgagcagcagcattcgcgtttcatccaagcgatccaggcttcgccgaacggcgtggcgatgctcgacgatcatgaccagatcgagtggtgcaacgccatctccgaactccatttcgggctggatgcgaagcgcgatctgcgccagcacatcacgcatctggtgcgtcagcccgatttcgtccgttacctgaattcgcatcggtacgaagagatgctgatcatgcgcggcatgggcgacaagcgtcagaacgtgctctcggtgcaggtgtttccgtacggcgaaaaccgcaaactggtgctttcgcaggacatcaccgaactcgaacggaccgacgcgatgcggcgcgacttcgtcgcgaatgtttcgcatgaattgaagacgccgctcacggtgctctccggttttctggagaccatgcgcgagttgccgctgagcgaaggcgaacgttcacgctatctggagttgatggagcagcaggcttcgcgcatgcgccatatcgtcagcgatctgctggtgctcgccaagctggagggcgacaacaagccgccgagcgatcagatgatcgacatgcgtgcggtgttgcggcatctgcgtgacgacgcgcagagcctgtcgagcgatcatcacaagatcgtgttcgatgccgacgaagggctcacggtcaccggcgtcgaaacggaaattctcagcgcattcggcaatctcgtcacgaacgcgatccgctacacgccggacggcggcgcgatccgggtgtcgtggcacgcacagggcggccatgcggtgttttccgtgacggacagcggactgggtattcccgccgcggacattccgcggctgacggagcgcttctatcgcgtcgatcgcagccgttcacgcgataccggcggcacgggcctcggacttgcgatcgtcaaacatgtgctccagcgtcacgacgcacagctcgatgtgaagagcgaagaggggcgcggcagcacgttcacggtgcgctttccggtgtaccgcaccgcgcgtcggcaaccggcgccggtt

SEQ ID NO: 13618 - DNA, 795 bp, Burkholderia fungorum
atgctgccgatcgtcgacaagccgctgattcagtacgcggtcgaagaggccatggcggccggcatcaccgaaatgattttcgtcactggccgcagcaagcgcgcgatcgaggatcacttcgacaagtcctacgagatcgaggccgaactggaagcgcgcggcaaggacaagctgctcgaactggtgcgcagcatcaagccgagccatgtcgattgcttttacgtgcgtcagtcggaggcgctcggcctcggccacgcggtgctgtgcgcagaaaagctggtcggtgacaacccgttcgcggtcattctcgcggacgatcttctgcacggcacaccgccggtcatgaggcagatgatcgaagcgttcgatcactaccatagctcaatgataggcgttgaggaaatcccgtcgcaggataccggctcgtatggcgttatcgatggatcggaatggggggactcgatcatcaggatggcgggcatcgttgaaaagcctgagccgaatgtggcgccttcgaacctgggtgtagtggggcgatacgtgctgaagccgcgaattttcaagcatctgcgcgccatcaaggccggcgccggtggggaacttcagttgacggatgcgatccagtcgctgcttgccgatgaacaggtgctggcatacaagtaccacggcacacgctttgactgcggtagcaagctgggttatctgaaggccacggtggaatttgcgttacggcatcctgaggtacgttccgaattccgtgcgtaccttgagaaacatctatctctcctgcagatg

SEQ ID NO: 13619 - DNA, 1377 bp, Burkholderia fungorum
atgctcgggatacgggggttactggcgcggcttgtcgatgtgtcgctcattgtaggcggagccatggtagcgtcgcaaatccgctttcaggatctggggcagagctggggagacggggcgttcattaccttttccgttgctttcgcgctggtgtcgtttccggtctttggcgtgtacgagtcatggcgcggccgttcgatgctgcgactggcgagccaggtgtcgattgcgtggctggtggtgcaggtgtgcggtctggtactgatgttctcgctgcatcgcacggatttcatctcgcgcctgtgggtcgcctactggaccgcgatcacgggtggtgcattgattgcgtcgcggctgttgttacatgcggtgctgcgtagcgtgcgctatgccggtctgaatttgcgcaacgtggccgtgctcggggtcggtgcccattgccacgaagtggtgggcaaactggtggcatcccctgccagtggttttcgcgcgtccgcagtgtttaacacggagcctggcggtggcgccgcctggaaaggcgtgccgctgttcgacgactttcccacgtttgccgagcatgtccggagccacggcgtacaggaagtctggctggctttgccgttatcggaagcgtcgaccatgctgcacttcgtcaacgagttccgtaacgatctcgtgaacatccgcttcattcctgacgtgcgcagcatggcgttattcgaaggcagcgtgatcgacctgatcggagcgccggcaatcagcctcgtggcctcgcctttgccagcacgcgcgatcgtgcagaaggaaatcttcgatcgcctgtttgcggcgctcgcattactcgtcctgatgccggtgctgacgattatcgcagtggtagtgaagtgttcgtcacgcggtccagtgttttttacgcaatatcggaaaggggccgatggccgcgtgttcaagatctataagttccggaccatgcgtccgcacgctgaaaagaccggtgtgatcacccaggccacgaaaggcgacccccgcatcacccgtgtgggcgcgttgttgcggcgcacgagccttgacgaactgccgcagtttttcaacgtgttgcgtggcgaaatgtcggtggtcggccctcgcccgcatgcgatcgagcacgacgagctttatcagaaagtcatcaacggctatatccatcgctatcggatcaaaccgggtattacggggtgggcgcaggtaaatggattccgcggtgagacggaccggatcgagaagatgcaaatgcgggtcgagcatgacctttactacttgcgcaactggtcgttcgcgctggatatgcgaattgtcatgacaaccgtggccaggggactggttagcagcaacgcgtac

SEQ ID NO: 13620 - DNA, 2202 bp, Burkholderia fungorum
atggcatccgtaaacaaaaatcgattcatcgattcgtcggacggtgacgaaatacatctctccgactatctttccgtcgttgcggagagctggaagctgatcgttgcgatcgcagcgaccgtattgataatcgggactctctatgcgtttatcgcaaggccggtgtatcgcgcggacgcgatgatccaggtcgaggacagcgccaatgctaccaaggacgcgctgggcgaactggcctccatcttcgacaccaagcagaccgccgacgcggagatcgagctgatccgctcgcgactcgtggtcggccagacagtgcaatcactgcacctcgatatcagcgctcagccgcgttatttcccactggtcggcgccatactggcacggcatgccggcgacaaccagttgacgccgccgctattcggcctggtgcgcttcgcgtggggcggcgagaagatcgacgtatcgctattcgatgtgccgcatgaccgatacgacgtgagatacacattggtggcgcgcggcggtgacaaattcgatctgctcgatcctgatggcgacgttgttcttcacggacaggtgggcagcgtcgcccacggcagcgatccagcgggcccggttgaattgcgggtagcgcgtctcgaggcgagaccaggcacacacttcattctcagccgcgcctccacgctcctcacgatcgatcagttgcagaatgcactcgtcatcgccgagaaaaccaagcaatccggcgtgataggtgtctcgctcgatggcgcggacagcaggcgcaccgccgagatcatcaatacgattgccgcaacctatgtccagcagaacatcgaccggaagtccgccgaagcggagcacacgctcagctttctggaccagcaactgccgcaactgcgcacacagctcgatcaggcggaggatcgctataacgcatttcgcaaccagaagggaacagtcgatctgaccgaggaaagccgcctgctgctgcagcagatagtcgacagcaaaaccaaactcgtcgatctgcagcaacagcagatagagatggcgcagcgttttacaccatcgcaccctggggtggtggcattggatgcgcagatcgcctcgctcgaagagcaacagacccagttgaacaagcgcgtgtcgactttgccggacacggagcaatccgccctgcgcctgctgcgtgatgtgcgtgtcaacacggagttgtacacgaatctgttggacagcgcacagcagttgcggatcgtcaaggccggacaggtcgggaacgtccgcgtggttgaccgcgccgtcgcgggcgaggtgccggtcaagcccaaacgggcgctggtggttgtgctggcggcagtgttggggcttattgcggggacagcagcggcgttcgtcaaaaatgcattgttcggcggcgtggaaaacagcgaagaaatcgaacaggcgctgggcttgccggtctacgcggcggtgccgcacagtgaaacgcaggtgcgtctgtatcaagccatgcggcgtggccgctccggtcatcacgtgcttgcctcgattgcctcgcatgacgtcgccattgaagggatccgaagtctgcgcaccgcgctgcagttcggcttgctcgatgctgccaataacataatcgtcattgccggtccgcgtcccgaggtcgggaagtccttcatgtcggtgaatctcgcggccgtgctcgcgagcggcggcaagcgcatcctgttgatcgatgccgatatgcggcgcggcgacttgcacggctatttcggcgtgtccagagagccgggactttcggatgtcatcgcgggattggacatcagcggtgcggtgctgcgtgacgtattgccgaatctggatgttttaccgaagggcctattaccgccgaatcccgccgagctgctgatgagcgagcgctttaaaacggtgcttgagcaggtctcgagtctttacgacatcgtcattgtcgatacaccgccgttgctggcggtgaccgatgcggcgctgatcggtaagaacgcaggtacgaccttactggtggtacgtcatggccgtcatcccatggcggagattctggaatgcaccaaccgtctgcgtaatgtcggcgtcgccctgaagggcgtgctgattaccgatgtgccgcagagacgtcttggctatggcacgtattactacagttacgaaagcaacgcgaaa

SEQ ID NO: 13621 - DNA, 1812 bp, Burkholderia fungorum
gtgagtaccgaatcgatggcgggcgaagcgtgtggcgatgcacgggcactcgcgaagccggtatgtttgccggcgggcacagggcacgattcgccggcgctgcatgcgggcgtgcgcgcttcgttgcgtgcggcagcgcaactcgcacgtccgttctggatgtcggagcgtcgttatcaggcgtgggcgctgctcgccgtgctggccggcgagaccgtcgcgagcgcgtatatgacggtttggctcaacgcctggaacggccgcttcatggacgccctcgcgcgttatgacgcggtcgcgcttgcggacatcatgggcgaatttgcaatccttctcgcgaccttcgtcgtcctcggcgtggttgcgatgctgacgggctcgatgctgcagatcgtctggcggcaatggatgaccgaacgctttctcgatgcgtggcttggcgacagcgcgttctaccggatcgagcgcgaccagcaggtcgataaccctgatcaacggatcgtgcaggatatcgatcagttcgtcacggctagttgcacgttgtcggtggggctgttgagcacgctggtgcggctggtcagtttctcgctgatcctgtggcgcctgtcaggtccgttgaacatgcatgtagcgcatcgtgttgtgtcggttccgggctatatgctatgggccgcgctgatctttgcgtcgctgacgtcatgcgttacgcactggattggtcgtccgctgatgcgcctgaatttcaacaaggagggcgcggaggcgcacttccgtttcatggcggccagcatccgggaatacgcggagcagatcgcgctgtatcggggcgcgagtgccgaagggcggcgcatgcgagcgagtttcgacgccattcgcggcaatttctggcagatcgttcgctttaatctgcgattcaatccgctgactacggccatcatctacatctcaatgatcgtgccgacgttcgtcgtgctgcctcgctatatggcgcatgccgtgacgctgggtggcatgatgcggctgtcggggtccttcgcagcggtgaacggcgcgttgtcgtggttcgtgcagaactatcaggcgttgcagggttaccgggcgatcgttgcgcgcctcgacgggctggagcgggcgattgcatcgcggcaatctcaaggcgctgaggatgccggttcgatcgtctgcagcgtcgatacgcagcgttgcctgtgcgcgaagcaactgacgctgcgcacgcccgacgggcgggtgttgacccgggacgtgaatctcgccgtgcatccggcggagcgctggctgattcgcggaccgtcgggcgtcggcaagagcacgttgattcgcgcgctggccggcatatggccgtacggttccggccaggtgacggtgccggcgggcggcggagtgctgttcctgtcgcagaagaactatgtgccggcgggaacgctgaaggccgcgctgtgctatccgggcaccgacgatgcgttcgacgatgacgtctgttccaatgcgctcaccgcgtgccggctcgagcgttatgccggcagcctgtacgaagtgtctcgctgggggcaccggctttccccgggggagcagcagcgtctcgcattcgctcgtgtgctgttgcagcgccccgattttctgctgctcgacgagtcgacaagtgcgctggacccggagatggaaagtggtctgtaccagacggtgatcgatagattgcctgatatggcgatggtgagtatcgcgcatcatcgcggtctcgacgcattgcatactcactcgctgtggatcgaacaagcccacatggcgtcggta

SEQ ID NO: 13622 - DNA, 1299 bp, Burkholderia fungorum
atgaagaacgcgcttatccagtccggtccggacaccactggccgtcggccttcgaggaaggtcctgatctatggcctcaactacgctcccgagctcaccggtattggaaagtacagtgccgagatggcggaatcactggccgatgtgggatacgaagtacgtgtgatatgtgcgccgccgtactatccggaatggcggatcggcgccggtcactcggcctggcgctatcgcaccgagcaacgtgcggccgtgcgtattcagcgtgcgcccgtgtgggtgccgagtcgtcccagcgggctgaagcgtctcctgcatctcgcaagttttgctgtttcgagcttgccgacggtgtttgcacaattgttctggcggcccgacattgtgatcgcagttgccccgagtctgatgaacattccggctgccttgatgttcggcaagatggcgagggcacgcacgtggcttcacattcaggactatgaagtcgatgctgctttcgaactggggatgctgaagggcaagcggctgagacagttcgccctgggtgtcgaaagttggctgatgcggcgtttcgacgtcgtatcgaccatttccgcgagaatgatcgaacatggccgcaataaaggggtggattcaccgcgactgtttgcattgcccaattgggtcgatgtcaatgtcatctttccgctggaccggccgagtttgtaccggacggcgttgaatattccagacgaggcgattgtcgttctgtattccggcaacatgggtgcgaagcagggtattgaggtgttggcgcaggcggccgcttcgcttgcacacagaagcgacatccatttcgtgctttgcggcgacggtccatacaaggtaaatcttgttgaacaatgcgggcatctggcgaactgcacatttctctccttgcagccgtttgacaagcttaacgatctgctcaatgtggcggacatccatgttttgccgcagcgagcggatgcggccgatctggttatgccttcgaaactgaccggcatgctcgcaagcggtcgctccatcatcgcgatggcgcgcgcagggacggaactcttcgacgtggtgtctccgcgaggcgtgacggttccacctgaggatgttcaggcgttggtggccgccatagaaaatctggccgacgacgtggaccagcgaacccggcttggtgccgctgcacgcgcctacgcagaaacggagttgtcgcgtcgggcggtgatagagcgcctcgacggcagatttcagatgctatgcgatcgggtgagaggaaggtcggtttttact

SEQ ID NO: 13623 - DNA, 1188 bp, Burkholderia fungorum
atgtgtcagcttccgatgtcccgccgcgagtggctcaaactcgcctcgatgttcaccgtagccggtgccgcgccgctactcgccgcattgaacgcgcgcgccgccgagaaccctgacgcgcccgtacgtatcggctatctgccgatcacggacgcggcacctttgctggttgcacacaacaacggctatttcgacgcgtcggggctcgccgtcgaaaaaccgaccctgctgcgcagttgggcgcagctcgtcgaagcgttcctgtcgggtcaggtcaatgtggtgcatctgctcgcgcccatgacgatctgggcacgctacggcagccaggcacccgcgaaagtagtcgcgtggaatcatgtgaacggctccgcgctcacggttgcgccggacatcggcaagctcggcgagctcggcggcaaaaccgtggccgtgccgttctggtattcgattcacaacgtcgtggtgcagcacatgttacgtgcgcaggggctcgtgccggtgctggagaaggacggcgagctcaaggcgaacgaagtgcggctgatcgtgatgtcgccgtcggacatgccgcccgcgctcgcttcgaggcagatcgccgggttcatcgtcgccgaaccgttcaacgcggcggccgaggagttgaaagtcggcaaggtgctgcgctttaccggcgacgtctggaagaatcacgcctgctgcgtcgtgttcatgcatgagcgcgatctgaccgaacgggccgcgtggtcgcagaaggtcgtcgacgcggtggtcaaggcccaggtctggacccgcgcgcatccgcaggaagccgctcagttgttgtcgaagagcggccggaaccactacacgccccattccgccaacgtattgacgaacgtgctagcgccgccgcccggcgacgagggccgctatctggccgatcgcgcgatcacgcatgcggactggcatgcgaagcggatcgattttcagccgtatccgtacccagcctatacggaagaactcgtcaggcggctgaaggcgacgcaggtcgaagggaatgcacagttcctgcatcaactcgatcccgccttcgtggcgcgcgatctggtcgacgaccgtttcgtgaagaagagcatcgagtccgctggcggcatgaaggcgttcggcctcgccgagagtttcacgcgaacggagacgattcttgtc

SEQ ID NO: 13624 - DNA, 573 bp, Burkholderia fungorum
atgaacaggacgcatggcttcaccgccgccaccctcgaatggacggcatggctcgacacggtcgcgctcgataaagcgtcgcccgaacagactgccgtgctcgaagcgagccatccgaaagccagcacgtcggactactacctgctgctcgtgcacgagccggaagtcctggcccagcgttcgggcgcattcaacagcatcatgtatgcgccgggcgggctgtcacgagcggagcgcgagcttgccagcacggtcgtgtcgcgcgtcaacggctgcgtttattgcgcgtcggtgcacgcgcagcgcttcacccagctgacgcgccgcagcgacgtcatcgaacaggtcttcgcggaccccgccaccgccggcaccaacgagcgggagcgcgcgatcgtccgctatgcgatcgatctgaccttgcaccccgaggcggtcgaccgcagatcgctcgacgcgctgcgcgtcgtgggtctcacgccggccgaaatcctcgatttgagccaggcaattgcgattttcgcgtgggccaaccggctcatgctgacgctgggcgagcccgtgttcccgcaa

SEQ ID NO: 13625 - DNA, 696 bp, Burkholderia fungorum
atgatccactctccgcttctcaccacgccgctgttccatgctggtccggttccggtcaccgcgccggtcgtcacgacgtgggcgatcatggccgtcctcgtgagcggcgccgcgctcgctacgcgccgcctgtcgcttagcccgtcgaagtttcagtccgtgctcgaactgctcgtcaccacgatcgacgcacagattctcgacaccatgcaggcagagccgcacaggtaccggtcactgatcggcaccctgttcgtgtttatcctgatcagcaactgttcgtcgctgattcccggtgtcgagccgccgactgcccatctggaaacggatgccgcgctcgcgctcgtcgtcttctgcgcgacggtcttctacggcgttcgcacgcgcggcgtgctccgctatctggccaccttcgccgaacccacctggatcatgattccgctgaacgtggtcgagcagatcacccgcaccttctcgctcaccgtgcggctgttcggcaacgtgatgagcggcgtgttcgtggtaggcatcgtgctgtcgctcgcggggctgctggtgccgattccgctgatggcgctcgatctgctcaccggcgccgtccaggcttatatcttcacggtgctcgcgatggtcttcatcggagcagcgctcgccgatagtccgaacccgaaaaaacccaccgcagaaggaacatca

SEQ ID NO: 13626 - DNA, 1392 bp, Burkholderia fungorum
atgaaacggatgtcgctcacgacgcgcctcgcgctgctgttcgcgtgcctcgcgttcggcgccatggcggtcgtcggctttctgctgtatagcaagcttgaagcgcagctgatcgcgcgcgacgacgcggcgctcgtcacgcgagtcgatcagcttcgcacgctgatgcaggacatggacgtgcgcaatctgattcatgagaagccgcatctgttcgccaacatgctgggcaataccgagtcgctgctggtcgtgcagtcgccgggtgacgcgccgctcatcgtcgtcaatccgggccatcgggccgtgccggacgtgcggcctgtgccggcagatgccgtgctgtcgcccggcgccgtgcgccatgcggtaacggccgacggcacgccgttcatctacgtcgccgccgatgcgcgcggcgtggccgggcagcgcgatctgcagatcatctcggggcgcctgatgaccgagcgcacacggatgctgcacgcctaccgcaaccagatactactgttcgcgtcgacggccgcgctgctggccgccatgctcgcttacgtgctggtgcggcgcggcatggctccgctgcagcggctcgcggcgcaaaccgcgtcgatcggcgtcgccagcttgtcgacgcgcatcgaggggcgcgaggcgccgcccgaactggacgcgctgatcgccgggttgaacggcatgctcgaccggatcgagcggggcttcacgcagttgaagcaggtctccgccgacatggcgcacgatctgcacacaccgatcggcaatctgcttgggcagaccgaagtcggcttgagccacccgcgcgacgtcgcgtattaccagcggctcctcggttccaattacgaggagttgcagcgcctgtcgaagatgattgccaatatgctgttcctggcccgctccgagcaagcggacaatgcgatcgaacacaaggcattgcccgtcgccgatgaattcgagcgggtagcagcctatttcgaaggtcttgccgaagagcgcgacgtccggctggaaaggcgcggcgagggtctcgtatgggccgatcctgttttgtttcgccgcgccctcgccaatctactggcgaatgccgtgcgatatgcgaatcccggcacggcgattctgactgtggcggagcaaagcccggacgggatgatcgtctatgtggagaaccgcggtccgatgatcgagccgcatcacctcgaacggcttttcgatcgcttttatcgcgtggacaagtcgcggcagcggtcgtccgaatcgagcgggctcgggctttcgatcgtacgcagtatcatgctgctgcacggcggaacctggcatgttatgagcaacgaaggcgtgacgcgctttacgctggtatttccagcgcgggaggtc

SEQ ID NO: 13627 - DNA, 654 bp, Burkholderia fungorum
atgaagcaccctgagcataccgggttgaaggacgtgaagggcaacagcctgatcgtgcgctacacgcccaatgaacgcaccaatcactggatcaccgccatcacgttcgtgttgctggcgctctccggccttgccatgtttcatccggcaatgtcgtggctttacgcgatcttcggcggcgggcaatggacgcggattctgcatccgttcgtgggctgcgtgatgtttctgtcgttcctgattcttgcgttgcgcttctggcatcacaactatctgaacaaggccgacattcagtggatgaagcagatcgacgacgtgctcaacaatcgcgaggagaagctccccgcgatcggcaagtacaacgccggtcaaaagctgctatttttcacgatggtgatctgcctgctgctgttgctggcaagcggcatcgtgatctggcggcgctacttctcgttctattttccgatcgggatcatccggctcgcggcgctggtgcatgcggcggcggcgttcgtgctgatcgtcggcatcgtcgtgcatatttatgcggcgttgtggatcaagggatcgatcggcgccatgacgcgcggcacggtgacttacggctgggcgagaaagcatcatcccaactggttcaaggaaatcatcggtaaa

SEQ ID NO: 13628 - DNA, 993 bp, Burkholderia fungorum
gtggttcaacgtattctcgaagccggcgatatcgagtcgctcgaccattcggcgattccgcgcatccgcacgccggagcggcttgcggtgttctccgcgcgcgccgcgcgtctgcgccagctcgcggcgctcaacaatccgatcgccggctatttgcgcctgatggccgtgctcgccgacgcgcagcaagccgtcatggcgggtttcaaggcacggccgccgagccccgagctgatcgcgagtgcccagcaacattccatgccgctgattccggcgctttcgggcgtgcgcgatccggcgtggcgcgacgtgctgcgccaactgctcgacaaggtggccgccgcgggtccgctcacgccgccgctcgaagcgctgatcgaccatctgcgcacgctggataccgcggcgctcgaattccagtccgacgcgatcttcgcgcagcgcttcgaagaggtcgacccggcgagcgcgccgttcatcgtggccgcgctgcaagtggtctggaccgacctcgccgccgatatcgacaagcgcgaagtgccgtacatcgaaaccctcggcctgtgtcccgtgtgcggatcgcatccggtggcgagcatcgtgcgcgtgggcggcgcgtatgataactaccgttacctgcaatgcgggctgtgctcgaccgaatggcacatggttcgggcgaagtgctcgaactgcgattcgaccaagggtattgcctatcacacggtcggttcgccggatgccgacgaggccacgcgcgaaaccgaatcgaagaacgccgcgctgaaagcggaatcgtgtgacgaatgccatacttatcgaaagatcggcattcagtcgaaagactacgatttcgaaccgttcgcggacgatctcgccagtctcacgctggatctcttgatgggcgcggaaggttatcggcgggcttcgccgcatccgtggctgtggcccgaacaggccgccggtgcggacgagctctccggcgagtccgac

SEQ ID NO: 13629 - DNA, 1092 bp, Burkholderia fungorum
atgctggagacacggttccgcaacaccacaccaacacgttccctcgctttcgctgtcgccacgttagccactgccgccacggcgttcgcgctcgccgcgagcacggcatacgccgccgccccaatggcctacgtgaccagcgagaaggccggcgtcggcgtgatcgatctggatcagatgacgctgacaaagacgtttccggtcggcgccgacggcccacgcggcctgagtctgaataccgacggcacacggcttctcgtggccaacaagaacaccggcgacctggcggtgatcgacacggcttcgggtcaggtcgtgcagcgtgtgaagatcggcaagaaccccgaatatgtgcgcgtgcacaatggcttcgcatacgtaacctacgagcccggcgaagacggtggcccacctgccgccaacgcaaagccgggtgccgacgacgatgacgccaacaagccgcccgcgcagatcgcgatcgtcgatatgaaaacctggcgcgtgatccgttcagtgacgagcggccacgaaaccgaaggcatcgaattctcacgcgacggcaacatgatgctcgtcaccaacgagggcgacgacacggtgtccgtttatcacgtccgcacgggcgcgccggtgagaaccgtgaagctcgtcgcaggtggccgtccgcgcggcatccgcctgtctccggatggcaaggattatgtggtcacgctcgaatcgctaagcaagttcgtggtgatcgacgcgcgtacgtaccaggttacgaagactgtcgatacgaagctcgggccttacggggtagcgttcgggccggatggcaagcggctttttgtcgccgcggcgcgcgacaggaccgtgcaggttttcgacggccacagctacgagcatctcgccgacgtgccggtggggcagcgttgctggcacttcagcttcacgccggatggcgcgaagctgctggtggcgtgcgggcgctccgacgcggtgtatgtgctcgacgcgcagagctatcagccgatcaagcagatcggcgaactgccgctggcctggggcatcgtcacttatccgcatagcgacggctcgatcgaatcgcat

SEQ ID NO: 13630 - DNA, 2040 bp, Burkholderia fungorum
atgagtgccgtcgcagaatccgtcgcaatacccgcgacccggctgatggccgacgcgctgcgcatgctcgcgatcgacgcggtcgaagccgcgaagtccggtcatccgggcatgccgctcggcatggccgagattgccgtcgcgctgtgggaccggcatctgaagcacaacccgcgcaatcccgcgtggcccgatcgcgaccgcttcgtgctgtcgaacgggcacggtgcgatgctgttgtatggcctgctgcatctcaccggctacgatctgccgatcgacgaactcaggcgcttcaggcaactgtacagcaggacgccggggcatccggaggtgggcgtgacccctggcgtggaaacgaccaccgggccgctcgggcaggggctcgccaatgctgtcggcatggcgctcgccgaggcgctgctcgcgcgcgaattcaaccggcccggccattcgatcgtcgatcaccgcacgtatgtgttcgtcggcgacggttgcatgatggaaggcatttcgcacgaggcggcttcgctcgccggcacgttgaagctcgacaagctcacggtgctgtatgacgacaacggcatctcgatcgacggccacgtctcgcagtggttcagcgacgacacgcccgcgcgttttgcggcctacggctggcatgtggtacgcgaggtggacggacatgacgtggacgcggtcgatcgggctctctcgcgcgcacgcgcagccggccggccgacgctgatctgctgccgcacggtgatcggcaaaggctcgccctcgaaagcgggcacgcacgacgtgcacggcgcgccgctcggggccgacgaagttgcgaacacgcggcgcgcgctcggctggccgcatgcgccgttcgctatgcctgccgaggttcgcacgctgtgggacgcgagcgagcgtggcgcggccacagaagccgactggaacacgcgtttcgaagcgtatcgcaagcactatccgcatgaagccgccgagttcgagcgaaggacgcaacgcacgctgcccgtgcagtggcgcgacacggtccgcgcgatggtgagcgacgcggaccacgcgggcgaatcgatcgcgacccgcaaggcctcgcaacaggcgattgccgtgctggctcgcgcattgccggaattgctgggcggttcggccgacctgaccggctcgaacctcaccaactggaaaaccgcggtcgatgttcatgccgacgacagcggcctgcaaggcggcaactatctgcacttcggcgtgcgcgaattcggcatgagcgcggtgatgaacggtattgcgctgcatcgcggacatattccgttcggcggcacctttctcacgttctccgactactcacgcagcgcgctgcgcatggccgcgctgatgaagacccgtgcgattttcgtgttcacgcacgactcgatcggcctcggcgaagacgggccgacacatcagtccgtggagcacgcggcgagcttgcggctcattcccgggctcgacgtctggcgtccgtgcgacacggtcgagaccgcgcaggcgtgggcgagcgcggtggaacgcgatgggccgtcgtgcctgctgctgagccgccagaatctgccgttcgccgcgcgcagcgctgaacagatcgacgcgatcgagcgcggcggctatgtgttgcgtgactggcctgcggaacgggcgcaaacgcggatcgtgctgatcgccaccggttcggaagtctcgctcgcgctcgatgccgtcgcgccgctcgcgcaagccggcatcgccgcgcgggtcgtgtcgatgccgtccaccagcgtattcgaccggcagcccgccgcatggcgcgacgcggtgctgccgccgcgggtgccgcgcgtcgcggtggaagcgggcgtgcgcgcgttctggcggcaatacgtgggcctcgaaggcggcgtggtgggcattgatacgttcggcgaatccgcccccgccgcggcgctgttcgagcatttcggtctgaccgcgcgcgcggtggtggacgaagcccgccgtgtcgcgcaactcgcgcgt

SEQ ID NO: 13631 - DNA, 1065 bp, Burkholderia fungorum
atgacccgatccgatttcgaggagtttgcgatggccttcatagcactgcggcaactattggaccacgcggccgagcacggctacggcgtgcccgccttcaacgtcaacaacatggagcagatccacgcgatcatgcaggccgccgaggcgacgtcgagcccggtgatcttgcaggcgtcggcgggcgctcgcaagtatgcgggcgagccgtatctgcgccatctggtgctcgcggcgctcgaagcgcatccggatatcccgctcgtgctgcaccaggatcacggcgcgagcccggcggtgtgtcagcaggcgatccgctcgggcttcacgtcggtgatgatggatggctccttgctgcccgaccagaagacgcccgccgcgtacgagtacaacgtcgatgtgagtcggcgggttgtcgaggcggcgcacgcagtgggcgtttccgtggaaggtgaactgggttgtctcggctcgctcgaaaccggcacggcgggtgacgaggacggcgtcggcgccgaaggccaactctcgcgcgacgatctgctcaccgatccgcgcgaggcgcagattttcgtggaggcgaccggcgtcgacgcgttggcgattgcgatcggcacgtcgcatggcgcgtacaaattcagccgtcagccgaccggcgatattctggccatcgaccggatcgtcgaaattcacgagcggattccgaatacgcatctcgtgatgcacggttcgtcttcggtgccgcaggagtggctcgcggtgatccgcgaatacggcggcgagattcccaccacctacggcgtacccgtcgaggaaatccagcgcggcattgcgcatggcgtgcgcaaggtcaatatcgacaccgacatccggctcgcaatgagcggcgcgatgcgcaagtcgatggcgaatgcgcgcgccgagttcgacccgcgcgcggcattgaaggcggcgacggcggcggccagcgcgatttgcgtcgaacggttcgaagcgttcggctgtgcgggccaggcctcgcgcatcaagccgctgccgctcgatgcgatggcgcgccggtatcac

SEQ ID NO: 13632 - DNA, 4530 bp, Burkholderia fungorum
atggcacgtcacgtccccatctatgcaagcatgacttcggcccccgctctccccgccgctgcccccggcgcggcttccggcaacgcatccggccctgtcgcgacgcccgcgacggggcgatccaccgcacacgcgctggatgatttccatcccgcggtcgcaagctggttcctgaagacgttccccgcgcccaccgacgcccaagccgccgcgtggccgcagattcgccgtggccgctctacgctggtggccgcgccgacggggtcgggcaaaacgctcaccgcgttcctgtccgcgctcgacgatctggttcagcaagggctcgccgccggcggcgcactgcccgacgaaacgctggtggtctacgtttcgccgttaaaggcgctgtccaacgacattcgcctcaatctgcaactgccgttgcaaggcatcgccgcggaactcgaagcgcgcggcttgccggcgctggacatccgcaccgccgtgcgcaccggcgacaccacgcagcaggagcgcaacgcgttgaaaaagcgggcgccgcatattctcgtgaccacgccggaatcgctttacgtgctgctcggttcggactccggccgccgcatgctctcgaccgtgcgcaccgtgatcgtcgacgaaattcacgcgctcgccggcagcaagcgcggcagtcatctcgcgctcagcctggagcggctggacgcgctgtgtcagcggcgcttgccgcgaatcggcttgtccgcgacgcaaaaaccggtgagcgcggtcgcgcgctttctggtgggtggcgcgagcatcgacagcggcattcccgccgattgcgcgattgtcgacgtcggtcatgtgcgcgaacgcgatctcgcgctggaaattccgcccgtgccgctcgaagcggtgatgcccaacgaggtgtgggaacgcgtctacgaccgtctcgccgaactcgtggccatgcaccgcaccaccctgatcttcgtcaacacgcgccgcatggccgagcgcgccgcgcgtcatctgaccgagcggctgggcaaggaggcggttgccgcgcaccacggcagcctcgccagggaacaccggttcgacgccgaacagcgcctgaaacgcggcgaactgcgcgtgctgatcgccaccgcttcgctggaactcggcatcgatatcggcgacgtcgatctggtctgccagatgggttcgccgcgcgcgatcgcaccgttcctgcaacgcgtcggacgctcggggcatcatgtcgggggcatgcccaagggccggctttttccggcttcgcgcgacgatctgatcgaatgcgccgcgctgctcgactgcgtgcggcgcggcgaactcgacgcgctgcgcattccgcgcgcgccgctcgacgtgcttgcccagcagatcgtcgcggaggtgtcgagcgccgagtggagcgaagacgcgctgttcgacatgatgcggcgcgccgcgccatacgcggacctgacgcgcgaacagtacgacgccgtgctgcgcatgctcgttgaaggctatacgagccgcaacggtccgcgcggcgcctatcttcaccgcgacgtgttgagcggcacgctgcgcggccggcgcggcggcaagctggtggccgtcacctcgggcggcaccattcccgagaacgccgactatgccgtggtgctcgaaccgcaggcgatcaatatcggcaccgtgaacgaggatttcgccgtcgaaagtctggccggcgacgtgtttcagctcggcaatgcctcatatcggattctgcggatcgaaagcgggcgcgtgcgggtcgaggacgcgcagggccagccgccgaatattcctttctggctcggagaagcgccgggacgcagcgacgaactgtcgttcggcgtcgcgcgtttgcgcgagcagatcgggcgccttctcgacggcaaggatccggcaatgccggctaccgttgcgaacgcaaccggaaccgaggttcaagccgaggagataacaacgctccccgtccgcctcgaccacgcgacccagtggctcaccgacaacctcggtctcgacgaagccgccgcgcgccagatcgtcgactatctcgcccgcgcgcgtgccgcgctcagcgtgctgcccacgcagaacaccctcgtcatggagcgtttcttcgacgaatccggcggcacgcagctcgtgattcacgcgccgttcggcagccgcgtgaatcgcgcctggggcctcgcgctgcgcaagcggttttgccgcaccttcaacttcgaactgcaagccgccgccaccgaggacgcgatcgtgctgtcgctgaccggcagccactccttcgtgctcgacgaggtgtggcgctatctgcattcgaacagcgcggagcatctcctgattcaggcgctgctcgacgcgccgctgttcggcgtgcgctggcgctggaacgcgaccaccgcgctcggcttgccgcgttacaccggcgggcgcaagaccgcgccgcaattgcagcgcatgcgcagcgaggatctgctggcgagcgtgtttcccgaacaggccgcgtgtctggagaacgtggtcggcgaacgcgagctgccgcatcatccgttagtggaccaaactgtcgacgactgtctgcacgaggcgatggacagcgaacgctggctcgcgctgctgcgtcgtatcgaacagggcgaggtgcaactggtcgcgcgcgatttgccggcgccctcgccgctcgccgccgaaatcctcaatgcaaagccatacgcgtatctcgacgacgcgcccatcgaggaacgccgcacacaagccgtgctgaatcgccgctggacggacccgtcgagtgccgacgatctcggcgcgctggatgcgggcgccattgaaagcgtgcgcgacgacgcatggccgcaggcacgcaatgccgacgaaatgcacgaagcgctgacgggcctcgcctgcatcaccgataccgaagcgcgccaccacgaaggctggccggcatggctcgcttcgctggccgaatccggccgcgccacccgcttgcagattgctgatgacgccggcgtgtggctgcccatcgagcgcctcacctgcttcgagtcgctctatcccgaggcccgattctcacccccgctcgccgcgccaaaaggctacacggatagctggaatgccgacgacgccttgctcgacgtgctccgtgcgcgcctgacgggcttcggcccgctgccggccagcgcgattgcggcggcgctgaaattaccggcggcatcggtcgaacagagtctcatgcgcctcgaagccgaaggctatgtgatgcgcgggcgcttcacgccgcaagccgcggaagaagaatggtgcgaacgccacctgctcgcccgcatacaccgttacacggtgaaacgcttgcgacgcgaaatcgagccggtggaacggcacgacttcatgcgctttctgttcgagtggcaacacttgacgccggacacccgcagcgaagggcgcgacgcactggccgcggtgctcgaacaactcgaaggcttccaggccgcggcgggcgcgtgggaggaagacatcctgcccgcacgcgtgaaggcgtacgcgaatacttcgctcgacgaactatgccgggccggcaagatagtctggacccgtctgaccgagcgagcacgcggcaccgcggggccggtccgcagcacgccgatcgtgctgctgccgcgcgcacgggtacgggtgtggagcgcattgctcgatccgtcgaaacaaccggagttgtcggcgcgcgcgcaaagcgtgtatgacgtgctggcacagcacggcgcgatgttcttcgacgaattgctgaccgaggttcgcgtattgcgtatggagttggagagcgcgctaggcgaactggtggccgcgggtctcgtgaattccgacagtttcgcgggcttgcgtgcgttgctgaaaccggttgcaaagcgcaatgcgttttcgggcagccggcgcgcgcgttcgagtgcgttgatcggcggcatggacgacgcgggacgctgggcactcgtcagccggcccgccactgcggcagccgaagttgcgccggagcgccgccggcaattgccgcccgacgtgctggaacatgtcgcgatgacactcctgcgccgttatggcgtggtgttctggcgtctgctcgaacgcgaggcagattggctgccgccgtggcgagatcttctacgtgtgttccagcgtctcgaagcgcgcggcgtgattcgcggcgggcgctttgtgaacggactcgcgggtgaacagttcgcgctgcccgaagcgattccggtcttgcgagaagtgcggcgacatgcgaacgatggtgcttttgtttgtgtcgccggtactgatccgttgaatctcgccggtactttgctggtcggcgaacgcgtgcccgcggtggccggcaaccgcattctctatcgcgacggcatcgtggttgccacgctcgtagcggggactttctggttcggtcctgctctggaagcggttccttccgcgagagaacaggcacgtgcctggctcgcgcggcggttt

SEQ ID NO: 13633 - DNA, 2193 bp, Burkholderia fungorum
gtgcggactgttggaaaatcgcagcaacttcaatgcaaaaaagcgctaaaggcgacagtcgcgctgaccgttaatctttctaagcccgaacgccagccgcttcgctacaatggggacagtcttaagtatgatgaagactgtttgccgactccgccttcagggggccaacggcacacaccgcccggggatctcatgaacgacgaccaacacgaccaggtgctttttgcgcagttcggcacaagcagcccatgctggcgtctgtcgaacgacagcaacgcgctcgaactcacgcccgtgaccggcgacgtgcccgccaatgtcgccattccgctgaatcctcaacaagcctcgcaaatccgctgcctcaccggcgtcacctcgcatctcgtgctcgacgtgcggctattcggcgaaccgttgcgtctgcacctggtgggtaaaaagctcaccagcaactcctgggccggcaccgcctcggcctatgacgacaccgagtccgtcgcgcgcgatctggtccacggtctttcgttcgccgaacaggttgtctccgaagtgaattcggtcgtcgtgatcctcgaccggcacggccggatacagcgcttcaaccggctcgcggaagaactcaccggcgtcaaggaagagaacatcatcggccgcaacgtgtgggcgctgttcatgtctactgaagatggcgcggcgtccagtcagaacattgcgggcttcttcaatcgcggcgtgtcgtacgaagtcgagcggcgcatcaaaacggtgcacggcgaacggctctttctgtttcgcaacaagttcgttcacagcggcagcggcgtcgaagaacagttcctgatctgctcaggcacggacatcaccgaagaacggctcgcgcaggaacgcctcaccgaactcgcgaacaccgactcgctcaccggcctcgcgaaccgcaacgcgatccaggacaggatccgcgccgccattgaagacgccacgccgggcgaagcggtcggcgtgctgttcctcgacctcgacaacttcaagaaggtcaacgatcactacggccacgtcttcggcgaccgcctgattcgcgacgtatcgtcggccatcagcctctgtctgaacgaaggcgatacgctcgcgcgactcggcggcgacgaattcatcgtgctcgcggccaggggcacggcgcatgaactcgaagtcaccgcgcagcgcattctcgaacgcatgcgcacacccttcagcctcgggctcgtggaggtctacacgggctgctcgatcggcatcgcgcggtatccggaacacggcgacagcctcgaatcgctgatccgttcagcggacaccgccatgtacgtcgccaaagacgaaggcaagcgtacgcaccgcgtgttctcgccggagatgaaccgcaaggtcgccgagtacatgtggctcgacaccaacctgcggcgcggcctcgatgaaggccaactgacactgcattaccagccgaaactgtcgctcgccaccggcgtggtccagggcgccgaggcgctggtgcgctggaattcgccggagcgcgggcagatcatgcccaccaagttcatccgttatgcagaagagtcgggtctgattggcgtgctgggccgctgggtcatggaaacggccgcgaaacaggccgccaaatggaaagcggacggctacaacctgcgcatcgcgatcaacgtgtcggcgcggcaactcgtcgacacggcggtggtccgccatttcagcgaggcgctccagcatgcgaacctcgacccctgtctgatcgatctcgaactgaccgagagttgcctgatcgaagacgaaacggccgcgatcgatctgatcaagcaattccgccagctcggcgctcaggttcatctggatgacttcggcacgggttattcgtcgctgtcgcaactcggccgtattccgctcgacgtgatcaagctcgatcgcagcttcgttcgctcgatcaacgccgaccccaaagcgcaagcgctggtgcgctcaatggtggtcgtcgcgcaggagctgaatttcaaggtggttgccgaagggatcgaaaccgagtcggaagaattgttcatgaggggtctgggcgtcgattacgtgcagggttttctgtacggccaggccatgccggcggctgaattcgagcgctggttgcaggatagacagaagctcagactgattgcc

SEQ ID NO: 13634 - DNA, 600 bp, Burkholderia fungorum
atgatgaagttcggttccccgcccgcgcctgcagcgccgtgcggcaagccccgaaggaaattcccaggggcactcgcgaccgatgccgaaaccgcaaaacatccgggcgggaccgttgcggcgggcatcagatccggtcgcggagcgcgcgaagcagggcacaaacaggagagagcaatgaagcgcaaggcatcagcagtctggcaaggcggcctgcaggacggcaagggctcgatttccaccgacagcggcgtcctcaaggagacccaatactcgttttcgacacgcttcgcggacggcatcggcacgaatccggaagagctgattgcggctgcgcatgcgggatgtttctcgatggcgctgtcggcggagctgggcaaggccggcatcacgcccgagcgtatcggcaccacggcaaccgttacgctcgacaaggacggcggcggttttgccatcaccgcggtccatctcgacgtggccgtgaagattcccggcggcgacaaggcggccttcgagaaggccaccgccgacgccaaagccggttgcccggtgtcgaaagttctgaacgctacgatcacgatggatgcgaagctcgaaacc

SEQ ID NO: 13635 - DNA, 300 bp, Burkholderia fungorum
atggtgctcaaccccggcatgcgcgaggaatacgaacgacgtcacgcgcaaatctggcccgaactggttgatgcattgcacaacgccggcgtgcgcgattaccggattttcttcgacccggactcgcaccatctattcgccatgctgacgcgccataaccatcacaccatgaacgagttgccgcaactcgacgtgatgcgcaaatggtgggattacatggccgacatcatgcagacggcagcggatcacacgccgcttcagcagccgctcgaaccggtctttcatctgaattcgctgagc

SEQ ID NO: 13636 - DNA, 2652 bp, Burkholderia fungorum
atgcgcaaattattccaggcctgctgtttcgttcttctcgctctcggcgtctcgccggtctttgccgcggccgcacccgccgcatctgcctctgcggcctccagtcctggggtgacgctgacccccgaacaggctcgccaggcgctcgccgtcctcaatgaccccaagcgccgggcgcaagtggccgacaccttgcaggccattgccgctgccggcgcgctcagcgcgccgcccgcttccgcgcccacagccgcgtcggcgcccgccgcggcgagtggcgccgccgccctcgtgccggcggcgttcaagtcgaatggtctcgcctcgcagctggcccgtcagggcgcgcattgggccgtgcgcctcggcaagtctctgcgcggctcggtcggcgcgctgctcgacgtctcctcggtgcgcgcctggtggcattggcaatcgaccaacccgcaagcgcgcgccgtgctgggccaggtcgcgtggtcgctgctggccgcgctgatccccgctctcgcgttggaatggctcgcgcgccgcctgctgcgccgtgcctacaaggcggtggccgcgcgccgcgaagccggcgatcaggacagcgcaccgcaagccgatctgccggtggacgtcgcgccccaacccgccgacgcgccgaacgccgcgccgccgctgcccgtgtcgccggcctcgccgctgaccgcggcgcaggcaaaggcggcggctgtgccgcccggcacgagcgcggccacgtcggccagcggcaaggtcatcgaagccaaaggcaagcagaacgcccggcatcactggacgctcctgcagcgcctgccgcgcgcgctcctgagcctcgtgctgcggctgctgccgctcgtggtattcgtcggcgcggcgagcgcgctgatgtcgatcttcaccgacgacggcacgccgcaagaccgcgcactcgactcgctcatcgacatctacgtgctgtgccgggtgatcgtgatcgtcagcggctttttcctgcaaccggccgcgccgcgcctgcgcctgctgcgcatgagcgacgcgtgggccgccttcgtgcagcgctggatggtgcggatcgtcagcgtggtgggcgccggttcggcggtcgcggagatcgcccagtcgctcggtctgagcgacgcggcgcatctcgcgctgatgaaggtggtcgcgctcgccggccacgtcatgatctcgatcctgctgttgcaatgcgcgaacccggtcggcgaactgatccgcaagcgggtggctgcgcgcaaatcgctggagatggccggcaatgtcttcgccgaagtgtgggcatggttcgcggtgttcgtcgtgatggcgctgtggtttgtctgggcgctcgacgtgcgcaacggctatcagacgctgctgcacctcggcggtatttcgctggcggtgctggtgggcgcgcgggtcgtgtcgatcgtgctgttcggcgcgctggcccggctcttccacgtgcaggacgacgtggcgaaatcgctcgtgcatcagcacgcgtaccgctattacccgctggtgcgccgcgtggtggcgtggatcatcggcatcgtgaccgcgctcgcgctgttgcaggtgtggggcgtgcacgtggccgacctgtttcgcgccggcacgatcgggcaccggctcgcgtcggcaatcgtcacgatcggcgtggcggccgtcattgcgctgctggtgtgggaaagcgtgaacgtatcggtcgaacagcggctggaccgctggaccacgagcggcgatctggtgcgcgccgcgcgcttgcgcaccctgctgcccatgctgcgcagcgcgctcttttgcgccatcgcgctggtggtggtgctcaccggcctgagcgagctcggcgtgaatatcgggccgctactggcgggagcgagtatcttcggcgtggcgctcggtttcggctcgcagaagctggtgcaggatttcatcaccggcattttcctgttgatggaaaacgcgatgcaggtgggcgactgggtcacgctcgcgggcgtgtccggcaccgtcgagtatctgtcgatccgcaccgtgcggctgcgcggcggcgacggttcgctctacaccgtgccgttcagttcggtatcgacggtgaacaacacgaaccgtggtatcggcaatgccgcggtgaaggtcaatatcgtgttcggccaggacgtcgatctcgccatcggcacactgaaggaaatcggcgccgccttgcgcgaggacgatagtttcaaggacggcatcctgtcggacttcagcttctggggcgtggatgcgctggacggctcggccattacgctgaccggccagatccagtgccgcgacagcgcgcgctggggcgtgcagcgcgaattcaaccgccgcattctcgaccagttccgcgagcgcggcatcgagatcgcgaacccgcagcgcaatctgttgacgtgggatccgcaaagcgcgccggcgcggatcgaggccgatgaagcgccgggcacggcgcctgaagagccgcccagcgaggagccgcgcgccgatgcgccaccttccgccgcagcccggcaaggcgatgcgccggtggaagaccagttgcctgtcgaccccaagccggccggcggtccaggaacgccggcaaatccgggtgcaacctcgccgcatgag

SEQ ID NO: 13637 - DNA, 738 bp, Burkholderia fungorum
atgcatctcgtgaacttctggctggaccctcgatatctcggctggctcgcgcacggctttctcatcacgctggtcctttcggcgtgcgtgagcgtatgcgcgacgctgctcggattcgggctggcaatggcccagatcgcccagcagcgcagcgttgctgcggcggcaagactctatgtcctcgtgttccgcaattctccgctgctggtgcaattgctgttctggtacttcggcgcggcgacgctgctgccgcagccgtggatgacatggctaaacacgccgcatgtcctcggcgccgcgccctttgcgctgcactggccgagcttcgaactgttcgccggctggcttggcctgacctgctacagcacggcttttatcgcggaagagttccgcgccggaatccgcggtgtgggcatcgcgcaatatcaggcgggcgccgcattggggatgacgcgttacaccaccttgcggcacgtcatcctgccgcaagcggtgcgtatcgccacgccgccgcttgccgggcaatacatgaatatcgtgaagaattcgtcgctgacgatggcgatcggcgtggccgaactgtcctatatgtcgcgccaggtcgatacggaaagcttccggacctttcaggcgttcggcacggctaccgtgctttatatcggcaccatcgcgttgatcgaaatcgcgcaggtgatctggcagaacaccggtgtgcgcgcgttgcagcgggggcaggca

SEQ ID NO: 13638 - DNA, 393 bp, Burkholderia fungorum
atgaagtcgagagtcatcgtaccgtttttgatcgtttcactctttggcacgtcggctgccactttcgcacaatcacaccatgacgaccacggcggccagccttcgcacaacaggccgaaccccggccacggggcgccgcatggaaatggtcacgggccggctttccacgacgcgtcgcgcggaggtccgggcggccccattcctcataacgactggcacaagggcgagcggcttccggcggagtaccgcgatcgtaactacgtcgtcgacgactggcacgggcatggactgcaagcgccgccgcgcggatatcagtgggtgggcgtgaacggggactatgtactcgctgccatcgcgacgggcgttatcgcgaacgtactgctttccgggcat

SEQ ID NO: 13639 - DNA, 1479 bp, Burkholderia fungorum
atgccgtttttattctatcggttcaaattgacgtgcggtgcaataggggcaattccacccaaggcatcgcaacgcacgaggcacgccatgaacgtcagcgtcttcgatctgttcaagatcggcatcggtccttcaagctcgcacacggtcgggccgatgatcgctgcttgccgcttcgcttcgcatatcgaagacgccaatctgctcggcttcgtgcgcagcgtgaaggccgaactgttcggctcgctcggcgcgaccggcaaagggcacggcacggacaaggcggtgctgctcggactcgaaggcaatctgcctgattcgatcgacccggacgtgatcgagccgcgcctcgcggcgatccgcgccatgaagcaactggtgctgctcggcaaacatccggtgaaattcgacgaacgcgagcatctcggctttttccgcaagctgatgccgggcgcaccgggctcgggcatcgtgcatccgaacggcatgcgctttcaggccttcgacgaaaacggccagctgctggtggagaaggagtattactcgatcggcggcggcttcgtggtgaatcgcgaaggcgatcgcgtgaacggcgtgcgcgccggcgcccaggtgccgtacccgtttcgtaccggcgacgatctgatgcgcatctgccgcgaaaccggcctgtcgatcgcacagatcacgctgcgcaacgagtgcgcagcgcgtcccgaacaggacgtgcgcgacggcttgctggcgatctggcgcgtcatgtcggcctgcgtcgaacgcggctgcaaggtgcgcggcgaattgccgggccccatgcatgtgaagcgtcgcgccgccgatctgtgtgcgcaactgcgttcgcgttcggaagaatcgctgcgtgacccgctttccatgctcgactgggtcaacctgtacgcaatggccgtcaacgaggaaaacgcggcgggcggccgcgtcgtcactgcgccgaccaacggcgcggccggcgtgattcccgccgtgctgcactactacgtgaagttcatgcatgcatcgaacgacgaaggtgtcgtcgacttcctgctgacggctgcggcgatcggcatcatctacaaggaaacggcgtcgatctccggcgccgaagtgggctgccagggcgaagtgggcgtggcgtgctcgatggccgccgcggcactcgccgcagtaatgggcggcacgccgacgcaagtcgaaaacgccgccgaaatcggcatggaacacaacctcggcatgacctgcgacccggttggcgggctcgtgcagattccgtgcatcgaacgcaatgcaatgggcgcgatcaaggcgctgaacgccgcacgcatggcgatgaaaggcgacggccagcactacgtgtcgctcgacaacgtgatcaagacgatgcgcgaaaccggcgccgatatgaagacgaaatacaaggagacgtcgcgcggcgggttggccgtgaacgtcatcgagtgt

SEQ ID NO: 13640 - DNA, 417 bp, Burkholderia fungorum
atgaacccatctgccatcccgtcttcgcaacagctgccgcgcgcgacgcacttcgaccgtcttggcggcgagcccgccgtcatccgtctggtcgacgcgttttaccggcgcatggatacgcggcccgacgcgcagcgcattcgcgcgatgcatcacccggacctctcgtcgacgaaggcggttctggtgctgtatctgtgcgaatggctcggcggcgacaagcagtactcggcgcagcgcggccatccacgtttgcgcatgcgtcatgcggccttcgccatcgggctcgcggaacgcgatgcctggctcacctgcatgcgcggcgcgctcgacgagacgggagtcgatccggcactgcgcgacgaactgatgcaggcgtttttcaaaaccgccgactggatgcgcaacacgccgacg

SEQ ID NO: 13641 - DNA, 1914 bp, Burkholderia fungorum
gtgcgaccggctgttacccgacatgcccgcatcctaggagaatcgcaggctggtgggcgagcgccctgcccctgggagcggaccgtccgcggtacgccaccgtaccgacttccgtaccggccgcgcgcaacgtgtcatgcatatgcgatggttctgtccatgcgaacttttctggctcttcgccgacagattgcgccaatttcgcgggaccgaacttttccgaaacgtctcgaccttgccgatcagggtgacaccgcgatgaatatcagttctcttgccggcaagccgcttccgccggcactgctggtcaacgtgccgcgcctcgtcgcgagctactacaccgggacgcccgacccgtcgctcgccgccgagcgcgtcaaattcggtacttcgggacatcgcggatcttcgttgcagcgcagcttcaacgagtggcatgtgctcgcaatcacgcaggctatctgccgataccggaaattacagggaatcgatggaccgctgtttctcggcatcgacacgcatgcgctgtcggagccggcctcggccagtgcgctcgaagtgctggcggccaatggcgtggaggtcatgatcgcgccggatggcgaatacacgcccaccccggccatatcgcacgccatcctcacctataaccgcggccgttcgtcgggcctcgcggacggcatcgtcatcacgccttcgcacaatccgccgggtgacggcggcttcaaatacaacccgcccagcggcggacccgcggacgaaacggtgacgggctggatcgaagtcgcggcgaacagcctgctcgagaaccggctcgacggtgtcatgcgcatgccgctcgccaacgcgctgcgtgcctcgaccacgcactatcacgacttcctcagaatctacgtcgccgatctcgacagcgtcatcgacatgagcgtgctgcgcggtgcgccgatccgccttggcgtcgatccgctcggcggcgcgggcgtgcactattgggccgcgatcgcggaacgctatcggctgaacctcacggtgacagacgaagacgtcgatccgactttccgcttcatgagcgcggattgggacgggcagatacgcatggacccgtcgtcgccgtatgcgatgcagacgttgatcggcaaggccgaccgcttcgataccgcgtttgcatgcgataccgatcacgaccggcatggcatcgtcacgcccacagccgggctattgccgccgaatcactacctcgccgtcatgatcgactatctgtgcgcgcatcgtccggattggcccgcgcatgccgcgatcggcaagacgatggtcagcagccggctgatcgaccatgtggcggcaaagcatggccgcgcgctctacgaagtgccggtgggcttcaaatggttcgtgggcggcctgctcgacgggtcacttggttttgccggcgaggaaagcgcgggcgcgacctgtctgaggctcgacggccgcgcgtggacgaccgacaaggacggcatggtgcccgcgctgctgtcggcggagatcgcgacgcgcaccggccgcgatgtcgcggagcattaccgcgccctcaccgaacgcctcggcgagccgcgcgagcgtcgcgtgcaggcggcggcgagtgcgtcccaacgcgcgctgctcgggcgactgtcgccggcgcagttcgctcacaccgagcttgccggcgaaaaaatcgattccgtgctcgaccgcgcgccggccaatcaggcgccgctgggcggcatcaaggtgagtacgaagagcggctggttcgccgcgcgaccctcgggtaccgagaatatctacaagatttatgccgagagttttctcggcgacgaccacctggcgcgcattgtcggcgaagcgcagagcatggtcgacaacgcgctggcggcgtccggcggcgatgcc

SEQ ID NO: 13642 - DNA, 711 bp, Burkholderia fungorum
atgaagctcaccgatttcaaggtcctgacgttcgacgtcgtcggcacgctcatcgacttcgagcgcggcgtactcggctccgtgcgccgcctgggcggcccggccgcgaaagacctgaccgacgaccagatcttcgagccgtacctgcgcggccgtgcggcctaccccggccgttcgagccatgaaatggcgaacgtctacctgtcgctggcgaaggaactcggtctgcccgacgacccgcaatcggctgccgccttccagcgcgacgtgctcgaatggccggcgttcgccgattcggtcgcggcgctcaagcgtctgcgcaaacacttccgcctggttgccatgaccaatgcggaccgcgtggcgctgtcggcctacgcgcacacgctcggcgacccgttcgacgacaccgtctgctgcgacgaaaccggcgtcgccaagcccgatccgcaattcttcgcgtacaaccgcggccgtcaggcggcgttcggctacaagttcggcgaaatcctgcacaccgcgcagagccagtatcacgacatcggcgtcgccacccggcttggctatgcgacctgctggatcgaacggcgccagggcgtgaaaggcttcggcggtactcccgtgccggaagccgtcaccacgccgaccttcaggtttgcgacgctcggcgcgctcgcggacgccgtcgaagccgaagcacgcctcgccgcc

SEQ ID NO: 13643 - DNA, 192 bp, Burkholderia fungorum
atggccctcaagattattgcgtccacctgtacgggctgctcggcctgcgaaccggaatgtcccaacgtcgcgatcagcgagaaaggcggcatcttcgtgatcgaccccaagaaatgcaccgaatgcgaaggccatttcgacgacccgcagtgcgtcgcggtgtgtcccgtggacggctgcatcgttcaggtc

SEQ ID NO: 13644 - DNA, 1308 bp, Burkholderia fungorum
atgaagaagccttcacagttcgatgcgatcgtggtcggcgccggtccgtccggcaacgccgccgcctatacgatggccagggccggcctgaaagtgctgcagatcgagcgcggcgaatatcccggcagcaagaacgtgcagggcgcgatcctgtacgcgaaggcgctcgaagaaatcatcccggacttccgcgacgacgcgccgctggagcgccacatcatcgaacagcggatatggatgctcgacgacacctcgttcgtcggcacgcacatgcgcagcgaggaatacaacaagccgccctataaccgctacacgatcatccgcgcgcagttcgacaagtggttttcatcgaaagtgcgcgaagccggcgccttgctgatctgcgagaccacggtcaagcaactcatcatggacggcgatcaggtggtgggcgtgcagtgcgatcgcgagcatggcgacgtgtacgcggacgtggtggtgctcgccgacggcgtgaattcgacgctcgcgcgcaaggcgggctttcatggagagatcgaagccggcaacgtcgcgctcgcggtcaaggagattctcttcatgcccgaggagacgatccgccagcgctttaacatcggcgaggacgacggtgtcgtgatcgagatggtcggcaggatcaccgacggcatgacgggcaccggctttctttataccaacaaggaatcgctcaccatcggcgtgggctgcatgctgggcgacttcaagaagaaccccaaccgcacgagcccctacgtgctgctcgaaaagatgaagcagcacccgtcgatcgcaccgctgatcgcgggcggcgagatgaaggaatattgcgcgcatctgattccggaaggcggctttcacgccatcccgcgcgtctacggcaacggctggatgatcgtcggcgactcgggtggtttcgtgaacgccgcgcaccgcgaaggctcgaatctcgcgatgaccaccgggcgcctcgccgccgaaacggtgattcacgcgaaagccgcgggcctcggctatcgcgcggccacgctcaaggcctacaaggccgcgctcgaccagagcttcgtgatgaaagacctgcacaagtaccgcgacatgccggccgtgctgcaccagaatccgcagttcttcacgacctaccccgatctcgtggcacgcgccgcgcgcacgatgctcacggtcgacggcaaggacaagaaaagcaaggagcgcgaaattttttcgagcttccgcaaagcccgttcgcttgccggcatggtgggtgacgcctacaaactcctgagggccttccga

SEQ ID NO: 13645 - DNA, 1272 bp, Burkholderia fungorum
atgtcgaacccgaatcctttcttcgaagaatcgctggccacgcgcgatacggcggtgcgcggcgctattttgaaagagctcgagcgccagcagtcgcaagtcgaactgatcgcgtcggaaaacatcgtgtcgcgcgcggtgctcgaagcgcagggctcggtgttgaccaacaagtatgcggaaggttatccgggcaagcgttactacggcggttgcgaatatgcggacgtgatcgaaacgctggcgctcgatcgcatcaagcagctcttcaacgcgaagtttgccaacgtgcagccgcattccggcgcgcaggcgaatggcgccgtgatgctcgcgctggtcaagccgggcgacacggtgctcggcatgtcgctcgacgcgggcggccacctcacgcacggcgcgaagccggccatgtcgggcaaatggttcaacgcggtgcagtacggcgtcaatcgcgacacgatgctgatcgactatgagcagatcgaggaactcgcgcagcagcataaacccgcgctgctgatcgccggcttctcggcttatccgcgtgcgctggatttcgcgaggctgcgggcgattgccgacagcgtcggcgccaaactgatggtggatatggcgcatatcgccggcgtgatcgcggcggggcgtcatcagaatccggtcgaacatgcgcatgtggtcacgtcgaccacgcacaagacgctgcgcggcccgcgcggcggcttcgtgctgacgaatgacgaggacatcgcgaagaagatcaactcggcggtatttcccggcttgcagggcggcccgctgatgcatgtgattgccggcaaggcggtcgcgttcggcgaggcgctgcaacccggtttcaagacttatatcgatagcgtgctcgccaatgcgcaagcgctcggcgaggtgctgaaggccggcggcgtggatctggtgacgggcggtacggacaaccatctgctgctggtcgatctgcggcctaaaagcctcaagggcaatcaggtcgagcaggcgctggaacgcgcgggcattacctgcaacaagaacggcattccattcgacaccgaaaagcccacaatcacctccggcattcgcctcggcacacccgcgggtacgacgcgcggcttcggcatgagcgaattccgcgaagtcggccggctgatcgtcgaggtgctcgacgcgctgcgcgaccacccggaaggccacgccgccaccgaacaacgcgtgcgccgcgagattttcgcgctgtgcgaacgctttcccatctac

SEQ ID NO: 13646 - DNA, 969 bp, Burkholderia fungorum
atgagtactttgcacgacaacagcatcatcatcgacggtctgaacatttcgaagttcgagcactcggtgttcgaggacatgcgcaagggcggcgtgaccgcggtgaactgcacggtgtcggtctgggagagcttccagaagaccgtcgacaacattgccgagatgaagcagcagatccgcgagcacagcgagattctcacggtcgtgcgcaccactgacgacattttccgcgcaaagaaagagaacaagacgggcatcattttcggtttccagaacgcgcatgctttcgaggacaacctcggctatatcgaggcgttcaaggatctcggcgtgaacgtggtgcagctttgctacaacacgcagaacctcgtgggcaccggctgctatgaacgcgacggcggcctgtcgggctatggccgcgaagtgatccaggagatgaaccgcgtcggcatcatggtcgatctgtcgcacgtgggcggcaagacttcttccgaagcgattgcggcttcgaacaagcccgtttgctactcgcattgctgcccgtcggccctgaaagagcacccgcgcaacaagagcgacgagcaactgaaagagatcgcggacgcaggcggattcgtcggtgtgacgatgttcgcgccgttcctcaagcgcggtcccgacgcgactgtcgaagactatatcgaagcgatcgagtacgtggtgaatctgatcggcgaagaccaggttggtatcggcacggacttcacacaaggctacagcacggagttcttcgactggatcacgcatgacaaaggccgctatcgccagttgacgaacttcggcaaggtcgtgaatccggaaggcatccgcacgatcggcgagtttcccaacctgacggccgcgatggagcgcgccggctggagcgaaacgcgcatcaaaaagatcatgggcgaaaactgggtgcgggtattcggcgaagtgtggaaggtt

SEQ ID NO: 13647 - DNA, 1257 bp, Burkholderia fungorum
atgatgcgcgatcacgcgacgcttcagctcagccccgagccggctccagaccacgccgccagccgcgtcacgcagccgcgtttctgggagacgctgccggcacgctggaacagcgataccgacgacacgctggtgtgctgccaggttcgccaggaaacgcacgacgtaaagagctttttgtttcgcgcaccgtccggacgggcattcgtgttcgagccggggcagttcatcacgctggagctggagatagacggcgagccgatcaatcgctgctatacgatttcttcgccgcccacgcgtccgcatacgatctcgattacggtgaagcgcgtgccgggcggcaaggtttctaactggctgcacgacaatttgcacgcgggcgccgaggttcgtgtgcttgggcccgcgggcgaattcacctgcgcgcgccacccggcgcgcaagtttctcttcctgtcggcgggctccggcatcacaccgctgatgtcgatgagccgcgcgcatcatgaactcggtgaagacagcgacatcgtattcgtgcacagcgctcgcacgccggacgacatcatcttcgcacgcgagctcgatctgatcgcgtcgaatcaggcgcatttccgcaccgcgtttgtttgcgaacgcctcggcgcacgcacgaactggcctggcgtgaccggttttctgacgttgccgctgctcaagctcattgcgccggactttctggagcgcgagattttcatctgcggacccgcgccgtatatgcaggcggtgcgcaagctgctggacgagggcggtttcgatcgccgccactatcacgaggaaagtttttcgttcgggacggtcagcgaagtggctgcgcaattgaccaccgcgcatgtggcggacgcattgcagagcgcgagcgcgccggtgaccgccgggagctttaccgaggcgcgcgaagaagcggcgggcttcacgcccgcgtccgcaccaacacccgctgacgtcgaagccgaaacccgcttcaaggtgagtttcgcgaaaagccatcgcgagatcgaatgcggctccggccagaacgtgctcgacgcggcgaagaaagcgggcgtacggctgcccgcgtcgtgtacccagggcatgtgcggcacctgcaaggtcaagctggtgtcgggcgaagtcgcgatgaaacacgcgggcggcattcgccagcgcgagatcgatcaggggatggtgctgctatgctgcagcaagccgttgaccgatctggtcgtggataag

SEQ ID NO: 13648 - DNA, 1539 bp, Burkholderia fungorum
atgcaactcaatccctctgagatcagcgagctgatcaagagccggatccagggccttgaagcgagcgcagacgttcgcaaccagggcactgtgatctccgtgaccgacggtatcgtgcgtattcacggcctgtcggaagtgatgcagggcgaaatgctcgaatttccgggcaacaccttcggtctcgcactgaacctcgagcgcgactcggtcggcgccgtgattctgggtgagtacgaacacatttcggaaggcgacgtcgtcaagacgaccggccgcattctggaagtgccggtgggcccggaactgctcggccgcgtggtcgacgcactcggcaacccgatcgacggcaagggcccgatcaacgcgaagaagaccgacgcaatcgaaaagattgctccgggcgtgatctggcgtaagtcggtttcggaaccggtccaaaccggtctgaagtcgatcgacgcgatggtgccggttggccgtggccagcgtgagctgatcatcggcgaccgccagtgcggcaagaccgcggtcgcagtcgacacgatcatcaaccagaagggcaagaacctcttctgtatctacgtcgcgatcggccagaaggcttcgtcgatcatgaacgtggtgcgcaagctggaagaaaccggcgcgctggaatacacgatcgtcgtggccgcttcggcttcggaatcggctgccatgcagtacctggcgccgtatgcaggttgcacgatgggtgaatacttccgcgaccgcggtcaggacgcgctgatcgtttacgacgacttgaccaagcaggcttgggcgtaccgtcagatctcgctgctgctgcgccgtccgccgggccgtgaagcgtacccgggcgacgtgttctatctgcactcgcggctgttggaacgcgctgctcgcgtgtcggaagactacgtcgagaagttcacgaatggtgaagtgaagggcaagagcggttcgctgacggcactgccggtcattgaaacgcaagccggcgacgtgaccgccttcgttccgacgaacgtgatctcgattaccgacggccagatcttcctggaaaccgacctcttcaacgcaggtatccgcccggcaattaacgctggcgtgtcggtgtcgcgcgtcggtggtgcggctcagacgaaggttgtgaagaagctgtcgggcggtatccgtaccgacctcgcgcagtaccgtgaactggctgcattcgcgcagttcgcctcggacctcgacgaagcaacccgcaagcagctggaacgcggccgccgcgtgacggaactgctgaagcagccgcaatatcagccgctgcaagtgtgggagctggctgtcgcgctgttcgcagcgaacaacggttacctcgacgatctggaagttgcgcaagtgctgccgttcgaaaagggcctgcgcgactacctgaagtcgaaacacgctgacctgatcaagcgcatcgaagacaccaaggaactctcgaaggacgacgaagccctgttgcacacggcgctcaaagacttcaagaagtccggcgcttat

SEQ ID NO: 13649 - DNA, 1167 bp, Burkholderia fungorum
atgttttcgcaaaccgatttcgtccatatggaacgcgcgctcgcgttggccaggcgcggcatgtataccaccgacccgaatccccgggtcggctgcgtactcgtcaagaatggcgcggtgatcggcgaaggcttcactcagccggccggtcaggatcacgccgagatccgcgccttgaaagatgcgcgctcgcgcggccatgatctgcgcggcgccaccgcctacgtgacgctggagccatgcagccacttcggccgcacgccgccgtgcgtcaacgcgctcatcgaagcccaggtcgcgctcgtggtcgcggcgatggaagatcccaatccgctcgtgtccggacgcggtctcgccatactgcgtgacgcgggcatcgaggtgcgctgcggactgctcgccaacgaagcgcacgaactcaatatcggcttcgtctcgcgcatgacccgcggccgcccgtgggtacgcatgaaagtcgcggcctcgctggatggccgcaccggcttgccttcaggcgtcagccaatggattaccggtgaagcggcgcgcgccgacggccacgcctggcgcgcgcgcgcgtcggcgatcctgaccggtatcggcaccgtcagggaagacgatccgcgcatgacggtgcgcgccgtcgacacgccgcgccagccgcaacgcgtgctgatcgacagccagctcgacgtgcccccggaggcgcagattctggccggcgcgcccacgttgatcttctgcggcaatctcgatcagcgccataccgatcgcgccaatgcgttgcgcgatcgcggcgccgagatcgtccaactggcgaacccggccggcaaggtcgatctgcccgcggtactgaaagtgctcggcgagcgcaacgtgaacgaactgcatgtcgaggcaggctacaagctgaatggctcgctgctgcgcgaaggctgtgtcgacgaactgctcgtgtatctcgcgccaagcctgctcggcatggattcgatgagcatgttcagtctgaccacccctgagacgctcgatgatcgcgtgaaactgcacttccacgcagtggaccggatcggcgacgatctgcggattctcgcgcgctttatggcgccgcccgcgcctcaggccatccccgaacccggcggcgagcccgcgccccaacccgtttcgaat

SEQ ID NO: 13650 - DNA, 1524 bp, Burkholderia fungorum
atggactttagcataaaagcctgtgattggaccaaaggctcgtcaaacggtttcctgactggaaaatccgattgcatcgtaatcggtgtgttcgagtcgcaaaccctctcgggcgcggctctcgagatcgacgcggccaccaagggcctgttgacccgcatcatcaaggccggcgacatggacggcaaggccggcaccacgctgttcctgcacgaagtgtcgggtatcggcgcttcccgcgtgctgctggtcggcctcggcaagcaggacgctttcaaccagaaagcctacggcgacgccgcacgggccgcctggcgcgcactgctgtccaccaagatcgtccaggtcaccttcacgctggcgcaactgccgatcctcgagcgttcggcggattgggcggtgcgcgccgcgatcctcgcgctgcgcgagctgacctacaagttcacgcagatgaagagcaagccggacacgtcggcgcgtgcgttgaagcgcatcgtcttcagcgtcaacacgggcgacgagaaggccgccaagctggccgcgaagcagggcgcggcgctcgccaacggcatggacctcacgcgcgacctcggcaacctgccgagcaacgtctgcacgccaacctacctcgccaacacggcgaagaagctcgccaaagactggaagctgaaggtcgaagtgctgggcgaaaagcagtgtgaagcgctcaagatgggctcgttcctgtcggtcacggccggttcggtcgaaccggcgcagttcatcgtgctgcaataccagggcggcgccgcgaaggccgcgccggtggtgctggtcggcaagggcgtgacgttcgacacgggcggcatctcgctcaagccgggcgaaggcatggacgagatgaaatacgacatgtgcggcgccggttcggtgctgggcacgttgcgcgccgtcgcggaaatgggcttgaaaatcaacgtggtgggcatcattccggcggtggagaacatgccgtcggctacggccaccaagccgggcgacatcgtcaccagcatgaagggcctgacgatcgaagtgctgaacacggacgccgaaggccggctgatcctgtgcgacgcgctcacctatgcggagcgcttcaagccggccgcggtgatcgacatcgccacgctcacgggtgcctgcatcattgcgctcggccaccacaacagcggcctgttctccaaagacgacgcgctggcgggcgagttgctcgacgcatcgcgtgaagcgtcggacccggcctggcgcatgccgctcgacgacgagtatcaggatcagctcaagtcgaacttcgcggatctggccaacatcggcggccgtccggcgggcagcgtgacggcggcgtgcttcctgtcgcgcttcacggaggcttacccgtgggcgcatctggacatcgcgggtacggcgtggaagagcggtgcggcgaagggggcaacgggccgtccggtgccgttgctcgcgcagttcctgatcgatagggccgccgacggtcgcgccacgcaa

SEQ ID NO: 13651 - DNA, 1524 bp, Burkholderia fungorum
atgaacaacgataccaatcaacgcgcggtgcagactcccgccaacagcttcccgaccgaatccttcgaagacgccaccgaggccgtcacccgcctctcggcgatctacgaagcgaacacttcattcctgcgcgacgccttcgcgcgctatcgccgcaacgaactgttccagagccgcgtacgcgcctgctatccgttcgtgcgggtgtgcaccgaggtcaacacgcatatcgactcgcgccggtcgtatggtttcgtcgcgggtccgggcgtgttcgagacgactgtcacgcggccggatctgttcggcaactactatcgcgagcaattgcgcctgctggcgaagaaccatcatgtgcagatcgaagtgggtgtgtcggatcagccgattccgattcatttcgctttcgccgaaggcatccacctcgaaggcgatctggatcgcgagcgcctgttcctgatgcgcgacgtgttcgacacgccggacctcgcgctgctcgacgaccgcatcgtcaacggcacgtatgagccgcagccgggcaagccgcatccgctcgcgctgttcacggcggcgcgggtcgatttctcgctgcatcggctgaagcactatacggcgacctcgcccacgcattgccagaactacgtgctgtacacgaactaccagttctatatcgacgagttcgtcaaactcggccgcaccatgatggcccataccgacgacgaagaactgcgcgcctatcgcagcgaatacacgtcgttcgtcgagcccggagatgtggtcacgtacaacgagaatctcggcgagcaggcgcaggaaggcacggctccgccgcgcctgccgcaaatgcccgcgtatcacctgaaacgcgccgacggcagcggcatcacgatggtcaacatcggcgtcgggccgtcgaatgcgaagaccattacggatcacatcgccgtgctgcgtccgcatgcgtggatcatgctcggccactgcgcgggcctgcgcaatacgcaacgcctcggcgactatgtgctggcgcacggctatgtacgcgaggatcacgtgctcgacgacgacttgccgctgtgggtgccgattccggcgctcgccgaagtgcaggtcgcgctggaacgcgcggtcgcgcaggtcacgcagctggacggcgtcgaattgaagcgcgtgatgcgcacggggacggtagcgagcgtggacaaccgcaactgggaattgcgcgatcatcgcgagccggtgcagcggctgtcgcaaagccgcgcgattgcgctcgacatggaaagcgcgacgatcgccgcgaacggcttccgtttccgcgtgccgtacggcaccttgctgtgcgtgtcggacaagccgctgcatggcgaattgaagttgccgggtatggcggaccagttctatcgcgcgcaggtcgatcagcatctgcagatcggtgtgaaagcaatggaactattgcggatgaacgggctgcatcgcttgcatagccgcaagctgcggagttttgcggaagtggcgttccag

SEQ ID NO: 13652 - DNA, 528 bp, Burkholderia fungorum
atgagactcaccacgaaaggccgtttcgccgtcacggcgatgattgacctggcactgcgccaggagcagggcccggtgacgcttgcgggtatcagccagcgccagcacatttccctgtcgtacctcgagcagctgtttggcaagctgcgtcgtcatgagatcgtcgagtccgtacgcgggccgggcggcggctacaatctggcccgccgcgctgaagacgtgaccgtggccgacatcatcatcgcggtcgacgagccgctcgacgccacccagtgcggcggcaagggctcttgcgaggggaccaaacagcacgacggccactgcatgacgcacgagctgtggtccacgctgaaccagaaaatggtcgaatacctcgattcggtctccctgaaggatctggtcgaccagcagcgctcgcgcgaagggtcgccggcggtgttgcgcgacaggcgcaacgaggcgccggtggtcgaacccgtccgcgtggcgcccaaagggcccaattccgttttcaacatggccggttcc

SEQ ID NO: 13653 - DNA, 1521 bp, Burkholderia fungorum
atgatgaatctgaagcccggccacctgactctcccgcaactgcgccagatcgcgcgcgaacatgtcgcattgcaactcgatcccgccagccatgccgcgatcgacgcctgcgcgcaagccgtcgccgatatcgccgcgaagggcgagccggcctacggcatcaacacgggctttgggcgcctcgccagcacgcatattccgcacgaccaactcgaactgttgcagcgcaatctggtgctctctcacgcggtcggcgtgggtgagccgatgtcgcgtccggtcgtgcgtctgctgatcgcgctgaaactctcgagcctcggccgcggccattcgggcattcgccgtgaagtgatggacgcgctgatcacgctgtacaacgccgacgtgctgccggtgattccggtcaagggttcggtcggtgcatcgggcgacctcgcgccgctcgcgcatatgtcggcggcgctgctcggcgtcggcgaagtgttcgcgaagggcgagcgcatgccggccaccgagggtctcgcgctcgtcggcctcaagccgctcacgctgcaagccaaagaggggctggcgctcctgaacggcacgcaggcttcgacggcgctcgcgctgtacaacatgttcgccatcgaagacctgtaccgcaccgcgctggtgtcgggcgcattgtcggtagatgccgcaatgggctcggtcaagccgttcgacgcgcgcattcacgagttgcgcggccatcaaggtcagatcgacgcggcggcggcataccgctcgctgctggaaggttcggcaatcaacgtttcgcacgccgattgcgacaaggtgcaggacccgtacagcctgcgctgccagccgcaagtcatgggcgcgtgtctggatcagatgcgccacgcggccaacgtgctgctgctcgaagcgaacgcggtctccgacaatccgctgattttccccgacaccggcgaagtgctgtcgggcggtaacttccacgcagagccggtcgccttcgcggccgataacctcgcgctcgccgccgccgaaatcggcgcgctggccgaacgccgcatcgcgctgctgatcgacgcgacgctgtcgggcctgccgccgttcctcgtgcgcgatggcggcgtgaattcgggcttcatgatcgcgcacgtcacggctgcggcgctcgcctcggaaaacaagacgctcgcgcatccggcttcggtcgattcgctgcccacttcggcaaaccaggaagaccacgtgtcgatggcgacgttcgccgcgcgcaagctcggcgacattgctgaaaacaccgcgaacattctgtcgatcgaactgctcgccgccgcgcaaggcgtcgatctgcgcgcgccgcacaagaccagcccgagcctgcagaaagcgatggacacagtgcgcaaggacgtcgcgcattacgagctcgaccattatttcgcaccggatatcgcggctgtcacgcgcctcgtgcagaacggcacgatcgcgaagctgagcccgttctccttcgcgtccgaacag

SEQ ID NO: 13654 - DNA, 1653 bp, Burkholderia fungorum
atgtacaaccggcaactacaccccgacgagcgacagtgggcgaaagataacgccaaacagtttgcccagttctacgaggacaagactggccagtcgatcacggcggatcaggcgcagaacatgttgctggccaacggctatcgtctcgttgatgctgcggcgagcaagggacctggtggtgatgcgactgcggtggcgtttatcagtcagaacgcaggtggcatgttcaccgctacttcagccgagtacaacagtcccttcctttatggtaacaaggatggttcgctgacgccggagcaacgggcattgccgggagccgtcgctaatcctaaactcggcctcgctattgcgggcgcgttggcggcaccggcggtccttcctgcactggcagcgataccgggtgcgccgatcttcgggattgacggggcattgggttcggggacctggacatcatcggtgggaaccggcgcgattagcgcgggcatcaacgcgggctcgcagtattgccagaacgggacggtcaatcccattgacgtggccgttgctgcgatatcgggaggcgttggcgcatccggcgggctgggatggaacgtgttcgtgaatggcgtgggtggttcggcaggcacggcgatcaataacgcgatccagcagtcgcaggcggcgggtagcagtcaggatggacgggccaaggccctgcacacgattgccgcggtcggcaacgccggcagcgcggtcgggtcgctggcgggtggcggcgctccggatatcagcgtgcagttgagctacggcacgagcaggacgaagaacactttcacggaagaccagaccacgcagaccggctcgaccgtcaaggccggtggcatggcatcattcaccgcgaccggtggcggtgatggggcagcgtcgtcgaataatggcaacgtgacggtcgccggttcgagtgtcagtggcaacgatgtcatgctgagcgcgaagaacgatgtgaatctcctgaacacgacgaacaccgattcgacgcgcagcaccaacgaatcgagcagtgcgagcgtgggcgtttcgtacggcaccaaaggttttggtgtgtcggcgtcgatgagcaaggcgcacggcgatgcgaattcggatgcggcgatgcagaacaacacgtatgtgagcgcgaccaataacgtgccgatcagttccggcggcgatacgaacatcgtcggctcgaatgtaaagggcaatcacgttgctgcggatgtgggcgggaacctgaacattgcctcggtgcaggatacgacggtgagtagcgcgcatcagcaaagctcgggcggtggtttcagcatcagccagggcgggggcggcgcgagcttcagcagccagcacggcagcgcgaacggcaactatgccgcagtgaacgggcaggccgggattcaggcaggctccggtggttttgatgtgaacgtgaaaggcaatacggatctgaagggcgcgtacattgccagcgatgcggacccgtcgaagaacacccttgccacgggtacgctgacgtactcggacatgcagaatcattcggactacagcgcgtcgacaagcggcttcagtgcgggcacgcagggcgtcatgccgatgctgggtcagtcggcaagcggcagttccagtgcgacgacgaag

SEQ ID NO: 13655 - DNA, 1956 bp, Burkholderia fungorum
atgagcgcgaggtgtatcagttcaggtggcgatacgaacatcgtgggctcgaatgtaaagggcaatcacgtttctgcggatgtgggcgggaacctgaacattgcctcggtgcaggatacgacggtgagtagcgcgcatcagcaaagctcgggcggtggtttcagcatcagccagggcgggggcggcgcgagcttcagcagccagcacggcagcgcgaacggcaactatgccgcagtgaacgggcaggccgggattcaggcaggctccggtggttttgatgtgaacgtgaaaggcaatacggatctgaagggcgcgtacattgccagcgatgcggacccgtcgaagaacacccttgccacgggtacgctgacgtactcggacatgcagaatcattcggactacagcgcgtcgacaagcggcttcagtgcgggcacgcagggcgtcatgccgatgctgggtcagtcggcaagcggcagttccagtgcgacgacgaagagcggcgtgagcgcgggcacgattaccattaccgattccgcgaatcagaagcaggaagtggcgagcctgaaccgggatacgtcgaacctgaacggtacggtgtcgaagctgcctgacgtgaacacggtgcttggcaatcaggctgatgtgatgaacgcggccaatgcggcaggggaagcggtggcgaaggacatcggcacgtacgcggactacaggcagaaagcggcgcttgacggcgcgaaggcggcgaacgcgctcggagaaaccggtacggcggcgcaatacgggcaggatgcggcggactggggagaagggggcgcggatcgcgtcggtatgcacattgtggcgggcgcggtgcttggcgggctgggtggtggcaactttggcagcgcgctcggcggggcggcaggtgcgggggtttcggctggactcgcgccgaggttgaatgagttgagtaattcgattgccaatggggatccgactggcaatgcgacggctgacaggatgctcgggcaggttgtttcgaatctggtggcgggggcggcgggtgcggctgtagggggtggtgcaggtgcttttgctgcgtcgaatgcggatatgtacaaccggcaactacatcagcccgaaaaaacgaaggcacagcagattgcagcggcggcaaaggatcaagggctgatgaaccctgatggttcgccgatcacggcggcacagatcgaaaacgccatgcgtggggcgaacaatagccaatatggtgagatcgctgcgacgggcgtcgttgtgccgttgaacgcgggtacgcctgcgggtgcggtttatgacacggccgggatgaagctggtggcggacagcacggggagttatctggtgcaagatccgtcgatgttggcgacaccatcaaaagcgctgcaagacttgattacccagaacacgggcggctcaaattcgccgtatagctggaatgcgccatctacccaaaatgcagccgggccaaggatcgatgctactgggccgttcactccggcggcaaatggctgcattacggctgaatgtgcggccggtatgcccaactcagatccacgcagcaatcccgacgttaccgtgcaggcgggctttcacgtgccggtctctccaggaattgctgtcgggccgaatttctcgtacacgccgagcgatggttcggcttcgcttaagccggacgtcacaatcggtagtttgggggatttcggagcgagcatcaatttttcgggcgattcgcgttattcaggtccaacgtcggtcggggtgggcattggcaaatactttggcgtccaagtagtcccgagtaatgtaacggcgtggcaggaaaaatcctggtatgacgcgacgcgctacataaatggtgtttcagtcggtatcggcgcgggcttcagtacacctgtcaacgcttcggtcgatccgacctatcaatctccggtgaagcga

SEQ ID NO: 13656 - DNA, 3183 bp, Burkholderia fungorum
atgaacatatccaaattcttcatcgatcggccgatctttgccggcgtgctatcggtattgatcctgctggcgggcgtgatttcgctcttcaagctgccgatctcggagtatccggaagtcgtgccgccttcggtggtggtgcacgcgcagtatccgggtgcaaatccgaaggtgatcgccgaagcggtcgcttcgccgctcgaagagcagatcaacggcgtcgagaacatgctgtacatgcagtcgcaagcgaatagcgacggcaatctcacgctcacggtgaccttcaagctcggcaccaatccggacctcgcgacgcaactggtgcagaaccgcgtcaaccaggcgctgccgcgtctgccggaagacgtgcagcgtctgggcatcacgacgatcaagagctcgcccacgctgactatggtggtccacctgatctcgccgaacaatcgctacgacatgacgtatctgcgcaactacgcgctgctgaacgtcaaggaccggcttgcgcggattcagggtgtgggcgaagtgcagttgtggggttcgggcgattacgccatgcgcgtctggctcgatccgcagaaagtggcccagcgcggtttgacggcgaccgaagtggtcaacgcgatccgcgagcagaacattcaggtggcggccggtgtgatcggcgcatcgccttcggtgccgggcacgcagttgcagttgtcggtgaatgcgcgcggccgtttgaggaccgagggcgaattcggcgacatcatcgtcaagaccgcgccggatggcggcgtgacctatctgcgcgatattgcacgaatcgaactcgcggcgtcggaatacggcctgcgttcgctgctcgacaacaagccggctgtggcgctcgccatcaaccaggcgccgggcgcgaactcgctcgccatttccgatcaggtgcgctccgcgatgaaggaactcgcggaagacatgccggcaggcgtcgaatacaagatcgtctacgacccgacgcagttcgtgcgctcgagtatcgaggcagtcgtgcatacgctgctcgaagcgatcgcgctggtggtgatcgtcgtgatcgtgttcctgcaaacgtggcgcgcgtcgatcattccgctgatcgccgtgccggtgtcgatcgtggggacgttctcgctgctgctcgcgttcggtttctcgatcaacgcgttgtcgttgttcggcatggtgctcgccatcgggatcgtggtggacgatgcgatcgtggtggtggagaacgttgagcggaacatcgaaaacgggctgagtgcgcgcgacgccacctataaggccatgcaggaagtgagcgggccgattatcgccattgcgctgacactggttgccgtgttcgtgccgctcgcgttcatgaccggtttgacgggccagttctacaagcagtttgcgatgaccatcgcgatttcgacggtgatctcggcgttcaattcgctgacgctgtcgccggcgctgtccgcgatgctgttgcgcagtcatggtgcgaaggaagacttcgtgacgcgcgtgatgaatcgcctgctgggtggtttcttcaggcgtttcaacaaggtgtttcatcgtggctcggcggaatatggccgcggcgtgaccggcgtgttgcgtcgtaagggcgccatgctcgcggtgtacgccatcctgctgggcgcgaccgtgctgatctcgcgcgtggtgccgggcggtttcgtgccggcgcaggacaaggagtacctgattgcgttcgcgcagttgccgaacggcgcgtcgctggatcgcacggagaaagtgattcgcgacatgagctcgatcgcgctgaagcagccgggcgtggagagcgcggtggcgttcccggggttgtcggtgaacggcttcacgaatagctccagcgcgggcatcgtgttcgtcacgctcaagcctttcaaggatcgtggcgacaagaaactctcggccggtgcgattgccggtgcgctgaatcagcaatacggtgcgatcaaggattcgttcgtcgcggtgttcccgccgccacccgtgctcggtctcggcacgctcggcggcttcaagatgcaactggaggatcacggcgcgctcggttacgcggagttgaacaaggcagcggaagcgttcgtgaagaaggcggcacagacgcctgaactcggcccgaccttctccagctatcagatcaacgtgccgcaactgaacgtggatctcgatcgcgtgaaggccaagcagctcggtgtgccggtcacggacgtgttcaatacgatgcagatctatctgggctcgctgtatgtgaacgacttcaaccgttttggccgcgtgtatcaggtgcgggtgcaggcggacgcgccgttccgtcagcgcgccgacgacatcctgcaactgaagacgcgcaatgccgcgggcgacatggtgccgctgtcgtcgctggtgacggtaacgccgacgttcggcccggaaatggtggtgcgttacaacggctatacggctgccgacatcaacggtggaccggcgccgggcttctcgtcgggtcaggcgcaggccgcggccgaacgcgtggcggcggaagtcctgccgcacggtgtgaagctcgaatggaccgacctgacgtatcagcagattctggccggcaatgcaggcttgtgggtgttcccgatcagcgtgctgctcgtgttcctcgtgctcgccgcactgtatgaaagcctgacgctgccgcttgcggtgatcctgatcgtgccgatgagcgtgctgtccgcgctgaccggcgtgtggctcaccggtggcgacaacaacatcttcacgcagatcggtttgatggtgctggtggggttgtcggcgaagaacgcgatcctgatcgtcgaattcgcgcgcgaactggagcacgacggacatacgccgctctcggcggcgatcgaagctagccgcttgcgtctgcggccgatcctgatgacgtcgatcgctttcatcatgggcgtggtgccgctggtgctgtcgagcggagccggttcggagatgcgtcatgcgatgggtatcgcggtgttcttcggcatgctcggcgtcacgctgttcggtctgatgctgacccctgtgttctatgtggtgctgcgtacgctggcgggtggaaccattcacgtcgcgcagaaggattcgccgcactacggcgcgccggtgacggacgcc

SEQ ID NO: 13657 - DNA, 1143 bp, Burkholderia fungorum
atgaatctgctgaaacgttacgctgtgcccgttgcctgtgcgatgaccgtcttcaccctggcggcttgctcatccacgaaagacgagcgccgcgtgcccacgccgctcaccgagttcaaacccgtgctcgacgtgcagcaggcctggaaggcgagcgtcggcaaggcgggccgctacctgttctcgccggtggcggtcggcaatgcggtgtacgcggccggcgccaacggttcggttgcgaagatcgacgcgcaaaccggtcaggacatctggcgcgtcaagctgcatgacgacctctcggcgggtgtcggcagcgacggcacgctcacggcggtcggcggcctgaagggcgacgtctacgtgctcggcgcggacggcaagcaactgtggaccgccaaggccccgggcgaaatcatttcgccgccgctcgtcggcaatggcctcgtggtggtgcgtacggtcgacggccagatcgtggcgttcaatgcgcaaaccggcgagcagcgctggaactaccgcaaccgcgcggtgccgctcaatctgcgcgtgtcgtcgggcatgacattcgcgggcgacgccgccgtgctggccgggttcccgggcggctcgttcgccgcgatcaacctgcagacgggcgacaactactggcaaacgccggtgtcctatccgaagggcgtgacggaagtggagcgtatcaacgacgtgaccggtccgcccacgctggtcggttcggaaacctgcgccgtgacgttccagggccagattggctgtttcgacgcgaactcggggcgcgcggtgtgggaaaaggcgttctcgagcacgagcggcctcgcgcaggatgaccgcgccgtggtcgccgcggacgactggtcggtggtgtcggcgttcgacgtcagcagcggcgcgccgctgtggaagaacgacaagctgaagaaccgcgatctgagcgtgccgttcattctgggtcacgccgcggtgctgggcgactaccagggttacgtgcatttcctgtcgcgcgacgacggtacgctcgtcgcccgcgtgaagaccgacggcagcccgattaccgccgcgccggtgctcgctggcgagacgctggtggtgctgacgcacgacggcgacctgtacggctaccgcccgcgc

SEQ ID NO: 13658 - DNA, 690 bp, Burkholderia fungorum
ttgcgcggatgtttttctgagcgcgctgtcgacacgcggcaagcggcatacgtagcggagcaggtcatgggcatggaacgcgaaatcaaactggcgctgccgcccgcgcaggtggaggcggcgacgcagtggttcgtcgcacgcaccggcgcgcagggtacaccgatcaagctggtgaatatttacttcgacacgtctgacctgacgctggcaggctcgaagagcgccttgcgtttgcgccagacgcccgagggctggctgcaaaccttcaagacggtcggcaaggccgaggatggtttgcacagccggcacgaatgggaaatgccggtggcgggcgaaaggctggagatcgacgcgttgctgcgcgagtgcgacgaaccgtcggctgcggatgccttgcgtcaggccgcgcccgaactcatcgaactcttccgcacgaatttcacccggacgctgtggcagcttcagacggacagtgcccaagtcgaagcggcgatcgatcagggcgacgtgctcgccgaggtggacggccaaacgcgccgcgcgccgatctcggaagtcgaactcgaactgaagtccggcgacgaagccacgctccaggcgctcgccacggaactcggcaagcagattgccgctctggcaccagacaacatcagcaaggcgcagcgcggttaccagttgcgggcgggt

SEQ ID NO: 13659 - DNA, 1503 bp, Burkholderia fungorum
ttgagcgccgcgtcccccttatcaaccgcaccaccgactaacccggccgtcaccttgaagaaaactctggaacaggctctcgcgctcgcgtcgccgcgcatcgtgccgcgtcgcacgacggcgttgagcgcggtgattcatctgagcgtggtcgtgctgtggctgctgctgttcgcgcgcgctttctttctgcagggggcgctggcctggtcgacgggcattgcctacgtggtgtacgacaccttgctgctggcgttcgtcacgtggaaaacgctgccgctgatgcggcgtaccccgccgcttgaacctgagttcgagcggcgcagcctgccgggcatgggcgtgatcgtcgcgtcgcacaacgaggcggccgttctaccggtgacgctcgccgcgctgctgcggcaaacgcacgggccggcgcaaatcgtcattgccgacgacggctccaccgactccacccgcgagctgctcaccgggcgcttcggccttaccgcggccgccgacggcgtgctgagcgcgccgagctcgctgtatccgaacctgttctggctgcgcgtgccgcacggcggcaaggcgcgcgcgctgaacgccgcgatcaccgtgatgaccacggaaaccgtcatgacagtcgacgccgacaccctgctcgacgacgacgccacctacgccatgcgcgccgctttcgcgagcgatccgaagctggtcgccgcggccggcattctggtgccggtgtgcggcaagtcggtgtcggggcgcgtattccagtggtttcagacctacgagtacatgcgcaacttcatcgcccgttttgcgtggatgcgcgccgacagtctgctgctgatttcgggcgccttcgcttcgttcaggcgcgacgcgctggtcgacgtgggcggtttcgatccgcagtgcctggtcgaagactacgagctgattcaccggctgcgccgctattcggtcgaccacgacctcggctgggacgtgcgcgtggttggcgacgcgcatgcccgcaccgacgcgccggacaacctcgccagttttctgcggcaacggcggcgctggttcgcgggcttcctgcagacgcagtactggaaccgcgacatgaccggcaatccgcgctacggcacgctcggtatgctgatgctgccggtcaaggcgatcgacaccatgcagcccatctacggcctgaccgcgtttgcgctgctgctcgcctttctgttcggcggacacggcgcgatcgtcgtgtcgatcttcggcgtgatcggtctgaaaacggcgatcgatctcgcgttctatctgtggagcattcatctgtatcggcgctggaccggcgagcgcaccgccaacagcgtgtggatggcggtgttcgcggcaatcgccgagccattcacgtttcaactggtgcggcatgtgggcgccacgctgggctggctgcatttcctgcgcggcgggcgctcgtggggcgtgcagcgccgctccgggctggtggcgccggacgaaggc

SEQ ID NO: 13660 - DNA, 810 bp, Burkholderia fungorum
gtgaagcgtattgctctaggcgtccagtacgacggctcggtgttctgcggctggcagtcgcaaccgcacggcaacacggtgcaggacgagctcgaacgggcgttgcgcgaattcgcgcaaacgccggtgcaaaccattgtcgcgggccgcacggatacgggggtgcacggtctcggccaggtcgtgcatttcgataccgaactcgatcgcgcggacgtttcgtgggttcgcggcaccaactcgtttttgccgaagacgatctcggtgcagtgggccaagccgatgcccgacgaattccacgcgcgtttttcggcgttcgaacgcacctactactacgtgctgtacgttcatcccgtgcgctcgccgatgctggcggcgcgcgccggctgggtgcatgcggcgctcgacgtcgacgcgatgcaggcggccgccgctcatctgatcggcgagcacgacttttcggcttttcgttcgtcgcaatgccagtcgaaaacgccggtcaaacatctgtatcagatcgacgtgcggcagcagggcgacttcattcatttccgttttcgggcgaacgcgttcctgcaccacatggtgcgcaacctgatgggctgtctggtctacatcggccgtggccgtcgcccggtcgaatggatggccgaggtgctcgcgagccgtgatcgcgagttcgccgcgcccaccttcatgcccgacggcctgtatctggcgcaggtgggctatcctgagcaattcgcggtgcccgcgccgcagacaggcagcgtgccgtggagtaccgtatggaccgagcaggcgcaaaca

SEQ ID NO: 13661 - DNA, 891 bp, Burkholderia fungorum
atgcgcgtctttgttactggagcgtcgggattcgtcggctccgccgtggttgccgaactcatagccgccgggcacaccgtgctcggcctcgcgcgctcggaagcctcggccgggtcgcttgccgaagccggagcggaggtccactacggttcgctcgaggatacgggtagcctcaaggcaggagccgccgcggcggacggcgtcattcacacggccttcaatcacgacttctcccgattcgtggagaactgcgagctggaccggcgcgccatcgaagcgctcggcgccgcgctcgccggctctgagcgtccgctgctggttacgtccggggtcgcgctgctggcgccgggccgcctcgcgaccgaggacgatgcgccggtggcggacgcgtccgcctatccgcgtgtgtccgaagcaaccgcgctgtcgctggcggtgcgtggggtgcgtgcgtcggtggtgcgcttgccgccttcggttcatggcgacggcgatcacggtttcgtgccgcatctgatcggcgtggcgcgagaaaagggcgtttcggcctacgtcggcgagggccagaaccgctggcccgccgtacaccggttcgacgccgcccgcgtctaccggcttgcgctcgaacgtggcgccgccggcagccggtatcacgcgatcgccgaagaaggcgtgccgttccagcagatcgccagtgtgatcggccgacgcctgaacgtgcccgttgtcacgcagtccgtcgaacaggcggccggccacttcggctggttcgcgctgttcgccgggatcgatgccccgacttccagcgtgcagacgcgggcgctgctgaactgggagccggaacagccgggactgattgccgacctcgaccggccgcgttatttccagacc

SEQ ID NO: 13662 - DNA, 1050 bp, Burkholderia fungorum
atgacttccagcgctgagggcagcatgccggtttcgctgctcgacgatttcctcgcttatacgctggccggtacgcggccggccgcgagcgaagcacagggcacgtgtgccggcggcgtgcgctggtcgtggctggacgacggcgtattgctgatggaaccggctgtgcaggaagagggcatgcgcagtgtgctcgtctccgccggcgtgcatggcgacgaaaccgcgccgatcgaactgctcgcgtttctcgtgcgcgacatcgcgcatggcaccgcggcgttgaccggccgcctgctggtgattctcggcaacgtcgacgcaatgcgcgacgcgtgccgttatcgcgacgacgatctgaaccggcttttcagcggccgtcatctgcaactgccgcagagccacgaggcgccgcgtgcggcggcgctggaacgggccgccacgcggtttttcgcggcggcgccagacaatcccggcgcgcgctggcatatcgacatgcacacggccatccgcgcgtccgccttcgagcagttcgcgttactgccgcacaccggcaagccgttttcgcgtgcgatgttcgagtggctcggcgaggcgcgcatcagtgcggtgctgttgcacaccaccaggggcaacacgtattcgcatttcaccgcgcaggcatgtggcgcgctggcttgcacgctggaactcggcaaggtgcgtccgttcgggcagaacgatctgacgcgtttcgccggcgccgatcatgcggtgcggcacctgctggccggcatgcgcggcgaggtgcgcgcgcctatgccgagggcgtttacggtaatcgaccagatcaccaggcagagcgaagcattcgaattgctggtcgcgcccgatgtcgcgaatttcacgccgttcgcaaaagacacggtgctcgcacgcgatggcgactatcgctatgtcgtgcgtcacgacgaggagcgtctcgtgtttccgaacgcgacggtcaagcccggtttgcgcgccggcctgatggtcatcgaaacgacgcaggacacgctctcgaagctcgtg

SEQ ID NO: 13663 - DNA, 1206 bp, Burkholderia fungorum
ttgacgtcataccatccgcttcgcaacttcttcgagcatcacctcggtcgcgccgccgccgatcgactgcacacgggcatcgcgcaccattcgctcgatcggcgcttcacgcatatagccgaagccgccgtgaaactgctggcatgcgtacatcacttcgttgacgagttctccgcacagcgccttgatcatcgagacttccgcgacgaccgtttgcccttgcgcatcgcgccatgcagtgttgtaaaggagttgccgcgccgcttccaccttcgcgagcagcatcgccatcttctgacggatcgcctgtttctcccacagcgtctggccgaaagcggtgcgctgggtaacgtaatcgagcgtgatctcgatggctctggatgcttcgcccagcgcctgcgcgccaagcgtgatgcgctcgttctgcagattcctgaccagcgaataaaaacccttgttctcttcgccaagcaggttttgcacgggcacgcggcattcgtcgaacaccagttccgccgtatcggacgacagccagccctgcttgctcagcggccgcgcgacggagaagcccggcatgcccttctcgacaatgaacatggagatgccgccatgactgcggcccggtccgccggttttggccgcgacgaaatagatgtcgccgtgaacgccgttggtgatgaacatcttcgcgccgttcagcacgtaatggtcaccgtccagacgcgccgtggtgcgcatggacgccagatcggaacccgcgcccgcttccgtcatggcgacggcggcgatcttgcggcccgcgacgagatcgggcatcagccgttcgagttgcgcgggattgcccgcatgctgcagatgcggcgacgccatgtccgtatgaaccagcaccgtgatcgcaaaaccgccgaaggtggagcggcccaattcttcggcaagcaccactgtgccgagcacattcattgccgcaccgccaaatgcttcggactgccggattccgagaaaaccctgctcgcccatcttgcgcagcagctcgcgcggcacatagccattgatctcccactgatccgcgaatggcagcacctctttggcgatgaagcgacgtatcacgtcgcgcaacatgctgtgttcttcgctgaaatagggcgaacgttgctgctgatcagggaaatcctctgcgcccacgagtgcctccgatgcttgactatc

SEQ ID NO: 13664 - DNA, 1467 bp, Burkholderia fungorum
atgatcatgagcgagcttttcatcggcggcgaatgggccgccggcacaggacccgcattcgcgtcgcgcaacccgggcacgggcgcggcggtgtgggaaggcaacagcgcgtcggctgacgacgtggaccgcgcggtgcgcagcgcgcgccgtgcgttcgccgcctggtcggcgtcgagtgtcgacgaacgttgcgccgtggtgcgtcgcttcgccgcgctcgtgaccgaacgcaaggaagcgctggccgaagcgatcggccgcgaaaccggcaagccgttgtgggaagcgcgcacggaagccgcttcgatggcggccaaggtcgagatttcgattcaggcctataacgaacgtactggcgagaagcgctcggcaatggcggacggcacggccgtgttgaggcatcggccgcatggcgtggtggccgtgttcgggccgtataactttcctgggcatctgccgaacggccatatcgtgccggcgctgatcgcgggcaatgcggtcgtgttcaagccgtcggaactcgcgcccggcgtggccgcgctcaccgtgcagatctggcgcgacgccggtttgccggcaggcgtgctgaacctcgtgcagggcgagaaagacacgggcattgcgctggcgaatcaccggcagatcgacggcctcttcttcacaggtagttcggataccggaacattgctgcacaagcagttcggcggccgccccgagatcgtgctggcgctggaaatgggcggcaacaatccgctcgtgatcgggccggtggccgatgtcgatgccgccgtgcatcacacgatccagtcagcgtttctgtcggcggggcagcgttgcacgtgtgcgcgccgcatcttcgtgccgaacgacgcagcgggcgatcgcttcctggagcgcttcaccgaggtcacctcgcgcatcactgtcggcgaatacaacgccgatccgcaaccgttcatgggcgcggtgatttcggtgcgcgcggcgtcgcgtctcgtcgccgcgcaggaacgcttgctggctgacggcgccaaagcattgctgaagatggagcaacgcgatccgaagctcggcttcgtcacgcccgcgattctcgacgtcacgaacgtggcgaatcggccggacgaagaacacttcggtcctttggcgcagatcatccgctacggcagctttaacgaagcgctggaacaggccaacgacaccgagttcggcctctcggcgggcctcctcgccgacgacgaagcgctctgggcgcacttccagcgcaccatccgcgcgggcatcgtcaactggaaccggccgaccaacggcgcctcgtcgggcgcgccgttcggcggtccgggccgctcgggcaatcaccggccgagcgcgtactacgccgccgactactgcgcgttcccgatggcttccgtcgaaagcgcgcaactgcaaatgcccgcgagcgtctcgccgggccttcaattc

SEQ ID NO: 13665 - DNA, 210 bp, Burkholderia fungorum
gtggcttccgtcgaccacgacgccgccaccatcgaacgggcgaatgcgcgccgcagttatgcggtgcgtcctgttcttgcgcagaatttcggcgagcagcaaaagattgcggatacgttttttcaggccggattgttgcctgccagggtggacacggtgcaggcgcaacgctgggacttcggggcgaaacgcgcggagaccgcgggtagc

SEQ ID NO: 13666 - DNA, 963 bp, Burkholderia fungorum
atgagcatgcacaaggtcatctacgacaccgacccgggtgtggacgatgcaatggcgctcgtgtttcaggcgctgcatccggatatcgaactgctcggtctgacgagcgtattcggcaacgcaacgatcgaaacgaccacgcgcaatgcgcgctttctcgccgggcggtttgccgcgggggtgccggtcgcacgaggcgcggcagcgccgctcaggcgcgccgcgcccgaaccgctcgcatggattcacggcgacaacgggctcggcaatatcgcgctggatacaacggagcaggccccgctcgacgcgcgccccgcgcaccgcttcatcatcgacacggtgcgcgcgcatcccggtgaagtgacgctgctggcggtagggccgctcacgaatcttgctcttgcgctcgccggcgatccgcagatcgcgccgctcgtcaaacaggtggtgatcatgggcggcgcgttcggcacggacggtgtgctcggcaacgtcacgcccgctgcggaggccaacattctgggcgacccggatgccgcggacatcgtgttcggcgcggcgtggccggtcgcgatcgtcggtctcgacgttacgcagcgcactatcatgagccacgattatctggcgtcgctgcgtgctcgcggcggcgcggcgggtcggttcgtatgggaagtgtcgcggcactacgaggcgtttcacgagcagagcgcgcagcttgcgggcatctatgtgcatgattcgtcggcggtagcctatgtattggcgccgcatctctatacgacgcgcagcggcccggtgcgcgtgctgaccgacggtatcgcggtgggtcaatccattcagaaaccgtcggccatgcccgtgcccgcgccggactgggacagccgtcccgactgcaaggtatgtatggcggtggatgtgccgggcatgctcgcgctttacgagaacaccatttgcggcacgctt

SEQ ID NO: 13667 - DNA, 951 bp, Burkholderia fungorum
atgacaaccgcactcgatcaactcaagcaatacaccactgtcgtggccgataccggcgacttccagcaactggcccagtacaagccgcaagacgccaccaccaatccgtcgctgatcctgaaagcggtgcagaaagacgactacaagccgttgctggaaaagaccgtcaaggcgcacgcgtcgaaaccggtcggcgcgatcatcgaccagttgctgatcgcattcggcaccgaaattctcaagatcattccgggccgtgtctcgaccgaagtcgatgcgcgcctgtcgttcgacacggaaggctcgatcgccaagggccgcgaactgatcgcgctgtacaaagagcacggcatcggccgggagcgcgtgctaatcaaactcgcttccacgtgggaaggcattcgcgcggcggaagtgctgcaaaaggaaggcattcactgcaacatgacgctgctgttctcgctcgcccaggccgccgcctgcgccgaagcgggtgcgcagttgatctcgccgttcgtcggccggatttacgactggtacaaaaagaacgccggcagcgcgtgggacgaagcgaaagacggcggcgccaacgatccgggcgtcaaatccgtgcgccgcatctacgcgtactacaagaagttcggctacaagaccgaggtgatgggcgcgagcttccgcacgccgggccagattctggaactggccggctgcgatctgctgaccatcagcccggatctgctgcaaaagctgcatgagagcaccgagaaggtggagcgcaagctgtcgccggatatcgccaaagaatcggacatcgaacgtgtgccggtcgacgagtcgtcgttccgtttcctcgtcaacgacgaagcgatggccaccgaaaaactcgccgaaggtatccgcgccttcgccgccgacgcaatcaagctggaaaagctgatcgacgcgctgcgc

SEQ ID NO: 13668 - DNA, 1296 bp, Burkholderia fungorum
atgaactcgaagacacacgcaacgctgagcttttccgacagcgaccagactattgatctgccgatttatcagggcgcgctcggaccggatgtgatcgacatccgcaagctgtacggccagaccggcaagttcacgtacgacccgggcttcatgtccacggcggcatgcaattcggcgatcacctacattgacggcgataagggcgaactgctgtatcgcggttatccgatcgacaacctcgcgcagaacgccgacttcctcgaaacctgctatctgctgctcaagggtgaactgccgaacgcgcagcagaaggaagagttcgtcaaaacggtcacgcaacacacgatggtgcacgaccagatgcacttcttcttccgcggtttccgtcgcgacgcgcacccgatggcgattctggttgccgctgtcggcgcattgtcggccttctatcatgactcgctcgacatcagcaatccggagcaccgcgaaatttccgcgatccgcatgatcgcgaagctgccgacgctggtggcgatggcgtacaagtacaccgtgggtcagccgttcgtttatccgaagaacgacctgtcgtacagcgcgaatttcatgcgcatgatgttcgccaatccggcggaagagtacaaggtcaacgacgtgctggtgcgcgcgctcgaccgtatcctgatcctgcacgccgaccacgaacagaatgcgtcgacctcgaccgtgcgtctcgccggctcgtcgggtgcgaatccgttcgcgtgtatcgcagccggtattgcgtgtctgtggggcccggcgcacggtggcgcgaacgaagccgcgctgaacatgctggaagaaatcggttcggtcgacaacattcccgagttcatcgcgcaggtgaaggacaagaattcgggcgtgaagctgatgggcttcggtcaccgcgtctacaagaactacgatccgcgtgcgaagctgatgcgcgaaacctgccacgaagtgctggaagaactgggcctgcacgacgacccgctgttcaagctggcaatggcgctggaaaagatcgcactggaagacgattatttcgtgtcgcgcaaactgtacccgaacgtcgacttctactcgggtatcgtgcagcgcgcactcggcattccgacggccatgttcacgtgtatcttcgcgatggcgcgtacggtcggctggatcgcacagtggaacgaaatgatcgcggatccggaacagaagattggccgtccgcgtcagctcttcgtgggcgagacgcaacgcgaagcgaagccgctcgcgaagcgg

SEQ ID NO: 13669 - DNA, 1371 bp, Burkholderia fungorum
atgaaagtcactatcgtcggaacaggttatgtcggtcttgtcaccggggcatgcctcgcggaattgggcaatgatgtgctatgtctcgatgtcgatgcagccaagatcgaagagctaaacaacggcggcgtagccatctacgaaccgggactatcggaagtaatcgcgcgcaatcgcgacgccgctcgcctgacgttttccactgatatcgccaaaggagtggcacacggcgacattcagttcatcgcggtcggaactccgcccaacgaggacggttccgcggacctgaagtacgtgcttgctgccgcgcgcagcatcggccagcatatggattcgttcaaggtcgttgtagataagtcgaccgtgccagtaggtacggcggacaaagtgcgtgagacgatctcgcgggaattggcggcacgcggtcatggcgcacagttcgccgtggtctcaaacccggagtttctcaaagaaggagcggctgtagaggacttcatgcgaccggatcgcatcgtattgggatacgatcccgacgtcgcggggctgcgcgcgaaaagcctgatggagcagctttacgcaccgtttaaccgcaatcatcaacgcaccctgtgcatggacgttcggtcggccgagttcaccaaatacgcggctaatgcaatgctcgccacgcggatttcgttcatcaacgaactcgcgaacctggcggatcgcgtcggcgctgatatcgaacatgtccggcgcggcattggctccgatccacgcattggttacagcttcctgtacgccggctgcggatacggtggctcctgctttccgaaggacgtgcaggcgctgatgcataccgcgaacgaaaacggcatggagctgaacattctggcttcggtcgagtatgtgaacacgctgcaaaaaacagtgttattcgacaagatcaaacagcatttcaataatgcgcttaatggcaagcactttgccgtttggggccttgctttcaagccgaacaccgacgatatgcgagccgccacgagtcgccaactgattgcggcattgattcgtggtggagcgtcggtaagcgtgtacgatcctgttgcgcttgaccaggcccggcgtagcctggcagcagacctcggtccggataatttcgagcacgtcacttttgcgaaagagcgcgatatggcactccagaatgccgatgcgctagtgatcctgaccgaatggaaggagttccggagtcccgatttcgagcagatgaacgaagcactcaatgacgcggttatattcgacggacgcaacctgtatgacccgactgcgatgagggatagcggctggaagtactacacgatcgggcgagatgcggcccattctacttcccgg

SEQ ID NO: 13670 - DNA, 7371 bp, Burkholderia fungorum
atgcaggcggcgggcgcgctgacagcaagcgccggatcattcgacaacacggccggacgtgtcgcgtcgctcaatgcggacggcctgaccctcgcaagtacgggcgtgctgaataacggcacgggcggcaacatcggcggcaatggcaacgtcacggtgcaggccgggcagattgtcaacgcgggttcgattacggcagtccagaacctgattgcggcggcggttcaaaccctgttcaacggcggcacgctcgcagcgaacgggaacgtgaacgcatcggccggcacgacgctgaccaacgcgaacacgatcacggccggcaggcaggcagccgtcagcgccgcgacattcgataacagcggcggctcggcaagcgctgaccagttcacgctttccgcgacgaacctcgtcaatcacggcggctcaattacgcagaccggcaacggtgcgaccagcgtcaacgtatccggcatgctcgacaatacgggcggcacgatccagaccaacagtacggatctcgcgctcggccccgccacgctgctgaacgacaacggcaagatcgccagttccggcagcggcacgttgtcagtgaaaaccggaacgctgtcgaacaatggcgggacgattgcgaccaacggcgcactgatgattgacggcggcgcagtttcgaatcgtggcggcacactcgcgggccagtcgtcggccacgctcagactcgtgtcgctcgacaacagcgcgggcggctatatcggcgcgcatcgcgcgagtgtgatcgatacgggtacgctcaacaatgcaggcggaacgatccaggccgacgatgcgctcgcggtatccgcgcagtcggtgacgaatgacggcggcacgattgccaatggtggcacaggcgcaacgacggtcaatgcggccggcgcactgacgaacacgaataacggcctgattggcggcaatggcaacgtgtcggtatcgggtgcgagcatcgacaactcgggcggcacgatcacggcagccggcgccacgaccgtgcagtccggcagcacgctcggcaaccgcgccggcatgatccagggtacgggcaacgtgagcgcatcggcacagggtgcaatcgacaacacgggcggccagatcgaagtggacggcacgaacgccaccatgcagctattggctgcgtcgctcgacaacacgaacggccgcgtcgcgaacaccggcaacggtgcgacgacaataagcgcggccggtatcacaaacagcaacacgggcggcgtagcaggtgcaggtgcgatcggcggtaatggcgacgtgactattaacgcgacgacgctgtcgaacacgaacggcgcgcaactcgtcaccggtcacgacctgacgctgaacattgcgcagtttgcgaacaacacgaacgcgatactctcgggcgcgaataacgtcacgcttaacggtctgaacgcggcggtcatcaatgcgggcggctcgatccacggcaacggcgcgattggcctgaacgtcgcctcgctggacaacacaacaggcaggatcggcaacgatgccgggagcggcggcagcatcgcaattgctacgggctcgcttgccaatcagggcggcgcaatcggtagcgaccagaatctgagcgttacaacgaaccagcttaccggcgacggccggatcatcgccggcaacgacggcgcggtgacggtgaacggcgattacacactcgacggtacgaaccagatccaggcgaatcacgacctcacctttaccacgtcgggtaatttcacgaatcagggtacgctcggcgcggtgaatgcgctcacggtcaacgcggccaatgtcgataaccaggccggcgcagacctgaattcgacgaacacaacggtcaacgcagccggctcaatcagcaacgcgggccgcatcgaaggcgatagcgtcaccacgcacagcgctgcgcttgtgaacgtcgcgaccatcgtcggcaataccgtgacactgaacgccggttccatcgcgaacaccggcgcggcggcagccattgcagcggccacggcagtgaacctgtactcgcctggcgacatttcgaacacaggcggcgcgaacattttcagtcttggcgacattagcatcgcggctgacgccacgcgtgacgccaacgggttacttgcaaaccgctcgaattcagtcacgaacgaccagtcaacgattgaagcacagggcaacattgaagtcgccacgcagacgttgaccaatacgcggccggctcccgctgtcgaaacggtgacaaccgatgttgaaacggaacatcagacgaagcgcgacaaatacatggcttgcacgacagaaaacggcgacaaaggtttctgtacgacggacatgtggaataacggttatctcgcaccgatcaatacgaccttctcgaattcagatgttgtgtcgcagaactccggtcccaatgccaccgacaaggtgctggtcgtcaacgtcaacggccagccgcagacgatctactacaactcgatcacgaccaacgctgacggcacgatcacggctaactattgggacggctacgacccgaacgtcaactacgacccggccacggagtacacctcacgcaacgatgctcataagggctatcagcgcgtcgagatagcacgcgacacgaccaccaccacgcagcaggatcaggtcacgggtccgcaggcacagcaggcccaactactcgcgggcggcagcatgacgctcgccaacgtcgggaccgtgaacaatgcgtatagcgcgattgcagcaggcagcgccatcgcgatcggcagcgacgcctatggcggcacgctcgtgaacaacaccggccagacgctctaccagtaccagaagcaggacatcgtttcgacctatgcgtggaacgagaacatttcgcgcgacgtgggaaccgtggtcgagccgtcgatcgtcctttctccggtcgcgatcggcggcacgggcggcacgatcatcgcgaacaacgcggtgcagatcaatgcgaccgacatcaacaacacaaacgtcgcggcagcgaactcggccacgggtgcaacgggcggcacactcggcgccaatggcatagtcggcggcgtgacaggcggcggcgcgcagaccgtcaatctcgcgaccggtcagacgcagaccattaacgcgccgcagtccatcgccggaccgactggcgcgctgaatatcacgttgccggcgagcgggctgtacacattcaacacctcaccgggcgcgtcgtatctcgtcgtgaccgatccccgtctgaccagttacacaagtttcatttcgagcgactacatgctcggcgcactcgggctcgatccgtcgaagaccatcaaacggctcggcgacggcgcgtatgaagaacagatggtgcgcaaccagatcacccagttgaccgggcgtgtctacctgcaaggctatacgaacaaagaggacgagtatcgcgcgctgatgaacagcggcgtcaacgtcgcgaaggaattcaatcttgagccgggcatggcgctcacggctgcgcagatggatgcgctgaccagcgacatcgtatggatggtcaaccagaccgtcaccctgccggacggttcgacgcagaccgtgcttgcgcccgtcgtgtatctcgcgcacgcaaacgccaatgacctgcaaccgaccggcgcactgattgcggccgacgatgtcgagattcacgccaccggcagcgcgacgaactcgggtgtcatcaagggcggtacgcagaccgttatcagcgcgaccaatatcctgaatcggggcggctcgatcggcagcagcggcgagaacggcacgaccgtgattgcggcgacgaacgacgtggtcaacgcctcgggccggattaccggcaaccgcgtggccgtgctggcgggtcatgacatcgtcaatacgacgctggtggatacagtgggcgtcagttcgagcgcaggcaacagcaaggtcaaccagagccttgtcggtgcgcagggcacgattgcatcgacgggcgacatggtcatcgcagcaggcaatgacctgatggttcacggcgccaacatcgcggccggcggcaacgcgcagatcgcggccgggcacgacattaacgtcgataccgtgcagtctgacacctcgcagtccgtgacgaagaacgaccagcaccattgggaagccagcagtacgctcaaccagacaagcggcatcggcgcgggcggcgacctcgcgatgcagagcggcaacgatatgacgttcaggggggccactgtcgcggcgggcggcggtatggccgttgtcgcgggtggcaatctgacggcgaccaccgtaacaaacactgcgacctataacaacgttgccactgacgacaggacgcgcaagcaggcggaccgcagttatgacgagcaggcagtcggcaccagttttacagccggcggcagcggcacccttgctgcactcggtacggacaccacgaaaggcaatgtcacgttgaccggttcgtcgctttcgacgggaaccggcacggcgaacatcgccgcaaccggcaacgtgaacatcaacgaagcgcgcgaggaacacgacagctatacggcaaccgagtcgaagcgcggcagtgccttccatggttcgaccacgaacaccagccagaccacgcaggcgaatattggcgtcgccagtaccgtttcaggggactcggtcaacgtcagcgccggtcgcgacctgaccgtcaaaggtgcgaccgttgccggcacgaacgatgtgaatctcgcggccggcggcaacgtggcgatcacgacctcgcaggacacacagaatacgtccacctactaccagaaacatgaatccggtttcggcacgggtggcggtatcggaatatcggtcggtagccagacgcagaccaacacgggcagcatgtcacaggtgacgaatactggtagcacgatcgggtcgctgaacggcaacctgaacatcgtcgccggcaacgatctgcatgtgacgggcagtgacctgattgcagcgaagaacgtcacgggtacgggggcgaatgtcaccatcgactcagcgactgacacgtaccgccacgacgagaagcagacggtcagcaagagcggcttcacacttgcgatcaaggcgccggttatcgacgcgatctcgaacacggtcgatcaggctcatgcggcaagccacagccaggacgatcgcgcggcggcactgcacggcatcgcggcggcgagcagtgcagtcgatgctcttggcgcgggtggcgctgctgctggcgcgctcgcaaacggcgctcaacccgaagccaagatagaactcagttacggcagtagtcacagcgagaacacctattcggaagcctcaaccacgaacagaggctccaatgtgacggcgggcggcacggctgcattcgtcgcgaccggcaacggcgaatctggaagcggcaacgtgacgattgccggctcgaacgtgaacgccagtgacgtgattctcgcagcgaagaaccaggttaatctcgtcagcacgaccgacactgattcgacgcgcagcacgaaccagtcgagcagcgcgagcgtgggcatatcgtatggtacgagcggtttcggtgtggatgcgtcgatgtcgaaggcgcacggcaacagtaacggcgacacggccatccagaacaatacacatgtgacggccgcgaataccgcgacgattatctcgggcggcgatacgaacatcatcggcgcgaacgtgagcggcaatcaggtgaacgccgacattggcggcaacctgaacatcgcgagtgtgcaggacaccatgacgacggccgcgcatcaggaaagtacgggcggcggattcgccatcagtcagggcggcggcagcgcgagtttcagccacacgaatgcgaatgcgaacggtagttatgcgggcgtgaacgaacaggctggcatccaggcgggtgacggcggtttcaacatcagcgtgaaggggaacacggatctgcacggcgcggtgattgcgagcgatgcggacgcatcgaagaacacgctttcgacgggcacgctgacctatagcgacatccagaattcgtcaagctacaacgcgcatacgggcggcatcagtggcggcgtgacgaccggcgacggcggtgcgaattacagcacgaccggttcaacgtcaggcaggaatgcaggcggcgtggcgccgatgttgagtcagaacgacagcggcagcgatagcgcgacgacgaaaagcggcgtcagtgcgggctccatcagcgtgaccgatgcggaccaccagacgcaggacatcgcgagcctgaaccgtgacacgtcgaacacaaacggcacggttgccaaattgccggacgtgaacaatctgcttgatcgtcagggggacatgatggccgcagcgggcgcggccggcgaagccgtctcccggcggatcggtgactttgcacagtcgaaatacaaagaggcagaagcaaacggcgatcaggccggaatggatgcatggaaggaaggcggaacggctcgcgcagaaatgcaggcggcgggcgccgcacttgtgaccggactggcaggcggcaacgcaatcggcggcgcagcgggtgcaggtattgcgtcgattgcagcaggcaaactcaacgaactgagcggcacgattgccggctcgaacccgaccggcaacgcttcgatgaatgaagccctcggcaacatcgtggcggatgccattgctacaggcgcgggcggtgcgatcggcggcgacgcgggcgcgttttcgggctacaacgttgaccggttcaatcggcagttgcaccccgacgaatacgcgcgggcgaagaaagacgccaaagtcgtcgcacagcagcttggaatcagcgaacaggaggctgaaggccggatcgtagctgaaatgctacgcaattcggacaaacaaacggcggatgactctggcggcattcacgactatcaggtgcgggccatcatcggatgccagaatctgaactgcgacggctacaagagcgatccgcagtatgccaatcacgactacaacagccagtacattgccagcaaccagagcgcgtacaacgccggacagagtcagcttggcaagggcgtaacttataacgatctggtgaagaacaacgtcaagaacaatccagtcagcacagccatcgctggcgcgggcatgatggcgcttggtggggtagctgctggtggactgccgtcgattggaggcgcgttgatcggtggcgggattggtgggacggtcaacgcaggcgcacagtatatgtacggcgggggtcaggttagcgtggttgacgtagccattgctggactgaccggagcgatcacatatggaaccagtcttttgccgggcctt

SEQ ID NO: 13671 - DNA, 1350 bp, Burkholderia fungorum
atgaagatactgatctacggcatcaactatgcgcctgaactgacgggagtgggcaagtacacggcggaaatggccgtgctgctggctgaccgcgggcatgaagtgcgcgtggtgtgcgcgccgccgtattaccccgagtggcgcgtttcagagggctacgcgtcgtggcggtatcagcacgagacacgcgacggcgtggcggtctggcgcgcgccgctgtgggtgccgtcgcgcccgagcggcctgaagcgcatgctgcatctggccactttcgcggcaacctcgctgccgctgctcgcatggcaggcgctgtggcgtccgcacgcggtgatgctgatcgcaccgaccctgatgtgcgcgccggcttcgctgatgctcgcgcgtatcacacgcgcgagcgcatggctgcatattcaggactacgaggtcgatgcggccttcgatctgggtctgctgaaaagctcgcgcgcggcccgcacggcgcgctggatcgaaagcgcgttgctgaagcgcttcgatgcggtgtcgtcgattacgcggcagatgagcgcgcgcgcgacgaccaagggtgtcgatgcatcgaaggtggtctgcctgccgaactgggtcgatgtgtcgactattttcccgcttgcacggccgagcgaattccgccgtctcctcggcattcccgcggagcagaaagtggtgctgtactccggcaacatgggcgcgaagcagggcattgaaacactcgccgacgcggcggtcgcgctcgccgcgcgtcctgacctcaccttcgtgttctgcggcagcggcgccgcaagagagaatctgctcgaacgctgctccggtttgacgaattgcgtgttcatgccgctgcaaccggtggaacgtctgaacgaactgctcaatctcgccgatattcacgtgctcccgcaacgcggcgacgcggcggatctcgtcatgccgtccaagctcaccggcatgttcgcgagcggccgcgcaaccatcgcgatggcgcgccgtggcacggcactctacgaagccgtggcgccgcgcggcgtggtcgtgccgccggacaacgtgaaagcgctggcggcggcgatcacggtgctggcgggcgacgcggaacggcgcacggcgctcggcaaggcggcacgcaattacgcggagcgcgcgctctcgccggagtcgacgattcgcaccttcgaggagcggctcgcggtgctgttgcgtgagtcggggctagaagatgcggaagatgcgaaacgtgcgaaaggcgcgccaccttctttcggtccgcggccttcaggagccgcgggccggcggcgacgcaaaccggccacggcggaggaagccgcgccggat

SEQ ID NO: 13672 - DNA, 1104 bp, Burkholderia fungorum
atgaagcccaccccgatcatgctggaccgcaagcgtgtcattcaggccatgttgctcgccgcaatcctggtgcttggttacgtcgttctttggccattcgtgatacctgtggcgtgggcgctaatcattgcgtatgtaacgtggccgctgtactgccggctccacgcgctgataagaggccgcgcatggataagcgctctgttgatgacactgctggtcggagtggttgcatttatcccgattgcgtcgctgatttcacccgtctttcgcgagtttctggcgctctaccgcaacgttgccgaatacgccgcgtccggcccgcttcgcgttccggatttcatcgcgcgcattccatggctaggacattcgctgcagcagctcgtcagcgaattcgcggatgaccctcaaaggctgcatgcctacattacgcagtcgggcgaccgctgggtcggcgagctcgcgtcaatggtcggcagcgttgggcgcaatgcggtcaaactgggtttcgccaccctgacgctgttcttcgcgtatcgcgacggacgcgccctgctcctgcaggttcaaggtgtgatgcggccggttctgggcgatcggctcgatggctatctgagtgcgatcggcggtgtcacgcgctcggtcgtctatggactcgccctcactgcagtcgtgcaaggcgcgcttgccggattgggttattgggccgcgggtgtcaaggcgccgctgctcctgacgatcatcacaacgctggcggcgttgattccgttcggtacaccgttcgtctggatacctgtaggcgtcggacttattgcaaacggcaacatgttcgccggcgtgggacttcttttatggggcgcgctggtggtgagctgggtcgacaacctgatccggcctatggtcatcagcaatgccgtgcgcgtgccgtttctgctcattctgttcggcgtactgggcggcattggcgcattcgggtttatcggacttttcgtcgggccggtcgtggttgccatcctgctcgcgttatggagggaatggtgcacgagtgagaccgggacaggctcggtcgatagtacaggtcagccgtcgtcgttcacacgccgaacg

SEQ ID NO: 13673 - DNA, 447 bp, Burkholderia fungorum
atgaataagcaactgttgccgttacaacgaccttccgattgtccctgcggcggcgccgcgcccgatcagcgcagcggcgccagggcgccccgcttcgcgcaatgctgcggccgctatatcgacggcggcgaagccgcgccacgagctcatgaactgatgcgttcgcgctatagcgcgtatgttgtgggtgcaacggattatctgcgcgccacctgggcagctcacacctgccccgccgacctcgacgcggacccggccgcccccgatgcgccgcgttggctcggactgcagatcaaggcgttcgccgaaaccgacgctcatcacgccacggtcgaattcgtcgcgcgctataaggtgggcggccgcgcgcaccggctgcacgaactgagccgcttcgtgcgcggagaagacggccgctggcgctacgtggacggcgacgtcagcgaa

SEQ ID NO: 13674 - DNA, 957 bp, Burkholderia fungorum
gtgttgccgtttgaggccgggccgccccaagttttctcgcccctcgggggcctggcgcgaagcgacaggtctgggagcgcttttaaggaacaccgggtgtccgcaccgaacttgattccccacattcgcagcgcacttgccaatttgcggcccgccgagcgcaaggtcgccgacatggtattgagcgacgtcgacttcgcaatgcgcgcgagcatcaccgaactcgcgcagcgcgcggaggtgtccgagccttccgtcacgcggttttgccgcgcgatcggcgcacatggcctgcgcgacttcaagatgcaactggcgcagagcgtggcgggcggcgtgccctatgcatccacggccgtggcgcgtgacgacgacgtgcagacgctgatggacaaggtgggcgaggcggctatcggaggcattacgcatgctcgcggcgcgctggaccctgcggtggtcgagagtgcgattgcggcgttgtcgagcgcgcggcgggtgtttttcttcggcgtgggttcaggctcggggctggtcgcgcaagatgcggcgttgcggtttctgcggctcgatattgcgtctaccgcattcacggacgggcatctgcagcgtctttacgcgggcctgatggagccgggcgacgtggcctttgcgatttcgcattcgggccgcagtgtggaagtgaacgaaagcatccagattgccaaggaacgcggtgcgaccacgattgcgctgaccaatgtcggctcgcgcctcgcgtggctggtggatattccgctgctgctgcgcgtgccgagtccgatcgatccgaatacgccgggtgtgtcgcgactcgtgcatctttgcatcatggatgcgctggcaattggcgtcgcgctcaaagcggggccgaagacgctggaaaagatgcggcatgcgaaggcgcggctggcgtcgcatgcgccggaggcggcgggggag

SEQ ID NO: 13675 - DNA, 1380 bp, Burkholderia fungorum
gtgaacgattacaacgagcggagtatctggctgcgcatgcgcgccatgctttcattgaacgatccgcgctggggccggggggacggcaatggcgaccggcaacgtccaaacgagcccaaacgtccgccgaccaaggacggtgaagggccgcccgatctcgacgagatgtggcgcgatttcaaccgccgtttgagccgcgtgtttggccgcaagggcggcggcgcgggtggcggccggccggacaacggtcgtggcgcgcgcattggcttgggcatcgtgatcggcgtgctgctggccatttatctcggcagcggggtgttcgtcgtgcaggacggccaggccggcgtcgtgatgcagttcggcaagtatcgctacacggcgggtcagggcgtgcactggcgtctgccgtatccgttcgaagcgcatgagctcgtcaatatcggccaggtccgccaggtggagatcggccgcaataacgtggtgcgtctcgcgaacgtgaaagacgcgtcgatgctcacgcacgacgcggatatcgtcgacgtgcgcttcgccgtgcaataccaggtgaagaagccgaccgactacctgttccgcagcgtcgatcccgatcagggtgtgatgcaggctgctcaggcggcggtgcgcagcatcgtcggcgcgcgcagcaccaatgacatcctctatcaggatcgcgaaacaattcgccagcagctgatggcggcgatccagcaatccctggatgaataccagtccggacttgccgtgaccggtgtgaccatccagggcgtgcaggcgcccgaccaggtgcaggccgcgtttgacgacgccgccaaagtccgtcaggaaaacgagcgcgcgaaacgcgacgccgaggcctacgccgcggatctgttgccgcgcgcgcaagccgacgtggctcgccagatcgacgaagccaaaacgtacagcgacaagacggtggcccaggcgcaaggcgacgccgagcgcttcaagcaggtctacgcgcagtactcgaaagcgcccgctgtgattcgcgagcgcatgtatctggaaaccatgcagcagatctattcgaatacgaccaaggtgtttgtggacagcaagagcggcaacaatgtgctgtatctgccgctcgacaagctggtcgagcagacccgtcagcgggcggccgacgccgcttcgggtgccgtggccgccgccgcgccgcaggcagcgagcggtgccgcgctgccgtcggccgtgccgtctgcctctgcaaccggcgccgcagcttccgcgccggccgcggttgccacgcccgccagccaggccgcagccagcagcgacgcgctgcgctcacgcgactccttccgcagccgtatgcgcgaagacgacgttcaa

SEQ ID NO: 13676 - DNA, 900 bp, Burkholderia fungorum
gtggcgggcgtgctggcgttgccggccgtagcctttgcccagtcgcaggcttacaccaacggcaccgtcaacgtgcgggcgggtccggcctcggattacccggtcgtgacgcaactgccgggcggcgtgccggtgagcgtgatggggtgcatcagcacctatcagtggtgcgatgttgccgcgccgaacctgcgcggctgggtctatgccgggcggctcagctatccctaccagggcagcaacgtgccggtgatgacctacggcacggtgatcggcctgccgatcgtgacgttttcgatcggcacgtattggggcaactattatcgcggccggccgtggtacggccagcaggggcgctgggcgcatcatccgccgccgcctgcgccgcgccctggcgcgggcgggccgccgggtgggccgccaccgggacatggcggcggcagaccgccaggcggccagccgggcaatgtcggcggcagaccgccgggcggccagtcggggaatgtcggcggtagaccacccggcggccagccggggaatgctggcggtagaccgccaggcggccagccggggaatgtcggtggcagaccgccaggcggccagccggggaatgtcggtggcagaccgccaggcggccagccggggaatgtcggcggcagaccaccaggcggccagccggggaatgtcggtggcagaccgccaagcggccagcccgggaacgccggcggtaggcctccgggcggccaaccgggcaatgtcggcggtaggcctccgggcggccaaccgggcaatgccggcggtaggcctccgggcggccagccgccgcaaggcggcggaggcaggccgccaggcggtgaaaacggcggtggtggtggcggacgcccgccggaccagcacggc

SEQ ID NO: 13677 - DNA, 1140 bp, Burkholderia fungorum
gtggcgatggtggccggcgagccgtccggcgacctgctggcggcgtcgctgctcgacggcctcgcgagccgtttgccggccggcacccaatactatgggatcggcggtccgcgcatgatcgccacgggcttcgacgcccactttccgatggaaaagctcacggtgcgcggctatgtcgaagcgctgaagcacattcctgaaatccttggcatccgcaccgaactgaagcgccagttgctggccgagccgccctcggtgttcgtgggcgtggatgcgcccgatttcaacttcgggctcgagcatccgttgcgcgacgcggggattccgaccgttcacttcgtgtgcccgtccatctgggcgtggcgcggcgggcgcatcaagaagatcgccaaggcggtcgaccacatgctgtgcgtgttcccgttcgaaacggcgctgctggaaaaggcgggcgtcgcggcatcgtacgtcggccatccgcttgccgatgagattccgctcgtaccggacacgctcggcgcgcgccgggcgctgggtctcgcggaagagggcccgatcatcgcggtgctgccgggcagccggcgctcggaaatcgatctgatcggcccgacgttcttcgccgcgatcgagatgatgcagcaccaggagcccgctctgcgcttcgtaatgccggcggccacgccggcactgcgcgagatgctgcggccgctggtggattcgcaccccggtctcgcgctgacgattaccgacggtcagtcgcaactcgccatgaccgcggccgacgcgatcctcgtaaagagcggcaccgtgacgctggaagccgcactgctgaaaaagccgatggtgatctcgtacaaggtgccgtggctgaccggccagatcatgcgccgccagggctatctgccctatgtcgggttgccgaatatcctggcggggcgcttcgtggtgcccgagatcctgcagcacttcgccacgccccaggcgctggccgaagccacgctgaaacagttgcgcgacgagaacaaccggcgcacgctgacggaaatcttcacggagatgcatcacgtgctgaagcagaacaccgcgcagcgcgcggcggaagtcgtggcgagcgtcatcgaaaagcggaaggcgcggccg

SEQ ID NO: 13678 - DNA, 492 bp, Burkholderia fungorum
gtggtgccggcgcgccagggtacgtcaggaattgccgcgcttgaattgtgcgtgatattgttcaatgaaagcggaggacggcggctcgccgtcctcaccggaacgcaatttacagcagcgagcgtcgccatgagtgatgtacgccatcatctgagtccacgtgaccgtttggagctgttgtgctggctcacatgcggaagtcttggcgcttattacctgaatgaggattggcccgacgcggcgtttcatgtgcaggccgcgcataaatggctcgaccgccgcgcgcgcgaggccgactggttgagtgttgcgaagctctccgccaccgcggttgagattgcgcggcggcatgcgcagtttatcgaggccgattgggccagagatgcggtcgaggagattctggatacggatgaactcgatcctcaagccaggcttgtgcgacaggtgattgcggattgccagagtgctttggcggataagaggctggcggat

SEQ ID NO: 13679 - DNA, 636 bp, Burkholderia fungorum
gtgaagcaggtcaacggcgcggccgcatccggttcgccgttgaaaaaagtcgtgctggcgtcgaacaacgcgggcaagctgcgcgagttcgcggcgttgctcggcgccgcgggcatcgaactgattgcgcaaggcgagctgaacgtgccggaagccgaagagccgcatcccacgttcgttgaaaacgcactggccaaggcgcgccacgcggcgaagctgaccggcctgcccgcgcttgccgacgactccgggctctgcgtgcgcgcgctgggcggcgcaccgggcgtctattcggcgcgctacgcgcaacttgccggcggcgaaaagagcgacgcggcgaataacgcccatctcatgtcggcgttgcgcggcgaaaccgaccggcgcgcgtattacttctgcgtgctggccctggtgcgtcacgccgacgatcccgagccgctgatcgccgaaggccgttggcacggcgaaatgctcgatgcgccgcgcggcacgcatggtttcggttacgacccgtacttctttttgcccgcgctgaatgcgagcgccgccgaactcgatccagcggtgaaaaacgccggcagccatcgcgcgattgcattgcggcaactgctcgcgcgcctgacggaggaagcg

SEQ ID NO: 13680 - DNA, 1302 bp, Burkholderia fungorum
atggagaatgagtcgaagttggtggaggtagacgaaaagcacctccagttccgggtggcccgggaagcattcgtcagtgagcagatcctgtccggtgagtacgaaaagatcttcgaccggtgctggctgtacgtcgggcacgtgtccgagttcagcaagcccggtgatttcgtcacacgtaccattgcgcgacgcaacctgctcgtaacgatgggaacggacaacaggatcaatgcgttctttaacacctgcccccaccgcggggcgacggtttgtcgggatcgggccggcaattcgaagaacttccagtgcttctatcacggctgggtattcggctgcgacggcaacctcaagagccagccgggcaaggaccggtattgcgccgacttcatcgcgagcggagcgggcaatctcgtatccgtaccgcgattcgacatctatgcgggtttctgcttcgtcagcttcaacgcagaggtcgagccgttacccgactatctggcgggcgcgaaggaatacctcgacctggtgtcgaggtattccgagagtggcatggcgatttccagtggcacgcaggagtacgcgatccgtgcgaactggaaactgctggtggaaaacagcgtcgatggctaccacgcggtgagcacgcatgctacctacctcgattatctgaagaacaccaatggcagcctgtccagtacgaaactcgaggggacgagctacgatctgggcaatggtcacgcggtgctcgaatacacagccccctgggggcgcccgattgcttcgtgggtaccgctctggggtgagcaggggaagaaggaaatcgaccagatatatgcccgccttgtcgagcttcatggcgaggacatggctgatcgtatggcgcacaagaaccggaacctgctgatttttccgaaccttgtcgtcaacgacatcatggccatcacggtccggacgttctacccacaggcaccgaactacatgctggtcaatggctggtcgctcgcacccagagaggagtctgagtgggcgaagaagttccggctcagcaactttctcgagttcctcgggccgggcggattcgccacgcccgatgacgtcgaggcgctggagtcctgccagaacggtttcagcaactatcggctggtgccgtggagcgacatctccaagggcatgggcaaggcgtcgcccaactacgacgacgaactacagatgcgcgcgttctggacacgctggaatcagtacatcagcggctcgccgtctccgcaggcgaccatccgccggctcccgtcagcaaccgcagcc

SEQ ID NO: 13681 - DNA, 1053 bp, Burkholderia fungorum
atgcgccattcttccacccatcccgcgccggtccatccgccggtcgcgaagcgcacggcgggctcgccgggcggctttgccgcaagcatcgcgaagagccgcgaaacaacgctgttcgtcgtactgattctgctgattgtgggcaccgggctcgcgaaaccgcagttcctgaacctgcagaacctgcgcgacgtgctgctgaacgtgtcgatcatcagcttgctgacggccggcatgaccgtggtgatcctgatgcggcatatcgatctgtcggtcggctcgacggtcggcatcagcgcgtatgcggtcggcagcctgtatgtcgcgtttccgcagatgccggtgatcgtcgcgttggccgcggggcttgccatcggtctcgtggcgggcggcatcaatgcgctgctcgtcgcggtgggacgcgtgccgtcgctggtggcgacgctatccacgttgtacatttttcgcggtgcggactatgcgtgggtgcatggcgggcagatcaacgccaccagcctgcccgatgctttctctcgtctcgcgactggaacgttgctcggcattccgacgcttgcgctgatcgcgatcgtcgtgctggccggtctcgccgtgtatctgaagcagtttcgcggtggccgcgaacactacgcgatcggctcgaatccggaggcggcgcgtctcgccggtgtgaacgtggagcgtcgcgtgatggcgggatttctgctctctggcgcgattgccggttttgcgggcgcgttgtggctggcacgcttcggcaccgtggatgccagcaccgcgaagggcatcgaattgcaagtggtggccgccgctgtggtgggtagtgtcgcaatcactggcggcgtcggcacgattctcggcgccacgttgggcgcgctcgtgctcggcgtgatcagcatcgcgctggtcgtgctgcacgtgtcgccattctgggagcaggccatcgagggcgcgctgatcgtcgccgcgattaccgccgataccttgctggcccgctccgtcgcaaaacgcatgatgaggaaacgcgatcatggc

SEQ ID NO: 13682 - DNA, 3078 bp, Burkholderia fungorum
atgaatcggccactggttcggttaccgcttcgcgcaacaggcacggcgcctgtccgcaggtggttcaaatgggcgctggcggcagcatttctgttcgcgctggcattggcggcgcgcttttgccaggtcgagatcgaaacatcgcgattgcaggcgcgctatctctccgaattgactcgcgacgtgggtttctccgtcgccgagggtcccagtcactccatccgttttcccgaagccgacaaaggcccttacgacagccgtctgggctacgcactgctgccgtcgatccagcaacgcctgctgcaacgcgggttcgaaatcagcgcgcaggcgcgcgattccgagcggatgctgtcgctggcggataacggcctctttctgccctacgaagaaaaagatcgggcgggcctgcaactcgtcgacggcaccggcgcgccgctcttcgccgcgcagtttccgggccgcgtatacggcaacttcgaggcgattccgccgctcgtcgtgaattcgctgctttttatcgaagaccgctatctgctcgatccgaatcagccgaaccgcaacccggccatcgactggggacgtttcagccgcgccctggccgatcagggtgtgcgcgtgttcaaccgccatcagtcgcaacccggcggcagcacgcttgccacgcagatcgaaaaattccgccactcggcgggcggacgcacggcgacgccgccggagaagttgcggcagatcgcgtcggcttcggtgcgcgcctatctgaacggcccgcaaaccatgccggcgcgccggcagatcgtcgtccactacctcaactcggtgccgctcgccgcgcagccgggcatcggcgaaatcaacggtatcggcgacgggctcgccgcctggtacggccgcgatttcaacgacgtcaatcgcatcctgaaagcgccgtccaccgaacagaatctgccggagcaaggcgtggcgttcaggcaggtgctctcgctgatgatcgcgcagcgcgcgccgtcgtatttcctgcatcacggctatgccgaactcgaacggctgaccgacagttatctgcgcttgctggcgaacggcggcattgtgtcgattccgttgcgcgatgccgcgctgtccgccgcggtcgatctgcaccgcgcacccgcgagaacggcggccacggattccttcgtgtcgcgcaaggcggtgacgtccatgcgttcgcatctgctcgccgcgctcggggttgcgagtttctacgaactcgatcgtctcgatctgcaggcgaagggcacgctcaacaacgccgttcagcaagccgtgagcgagcggctcgccgctgccgccacgcgcgacggcgcgaaagccgcgggtctcgtcggtttcgaaatgctgcgcgcctcggacgatccgtcgaaaatcgcttatagcttcacgctgttcgagcggcgcgacggcgccaacctcgtgcgggtgcaaaccgatagcgtcaaccagccgttcgacatcaattccggcgcgcgcctgaatctcggttcaacggcgaaactgcggaccgtggtgacgtatttgcagatcgtttccgatctgcacaagcgttatgcaccgctgagcacagcggagctgaaagccgtcaagcccgatccgaacgaccagctcacgcgttgggcgctcgactatctggcgcacactccggaccgttcgctgcaagccatgcttgacgcggcggtggagcgcaaatactcggccaatcccggtgaaacgttctacacgggcggcggcgcgcagaccttcaacaacttcgaatcggatgacaacagccgcattctgaccgtgcatcgcgcgttccagcattcggtgaatctcgtgttcgtgcgtctgatgcgcgacatcgtccattacgaaatggtgcagactaccgggccgtcgtcgcaatggctgggcgatccggcgacccgcaagatgtatctgacgcgcttcgccgatcaggaaagccgcgtgtacatgaatcgtttctacacgaagtatcacggcaagacgcgcgatcaggccctggcgctactgctgctcggcgtgcgcaagtcgccgcctaaagtggcaacggtgttgcgtagcgtcgcgcccagcgagtcgaacgcatggttcaacatgcagatgcgcgcggcgctgaaaaacacgcccgccgcctccgtgctcgacgacgaagacctggtgaacctctacgcgaaatacgcaatcgaccgcttcaatctgaacgaccgtggctacatctccagcgtccatccgctcgaactgtggacgctcaactatctgcgcgagcatcccgatgccacgctcgaccagatccagagtgcgagccgtgacgtgcgtctgtcgacgtactcctggctcttcaagactcgctatcacgcaacgcaggaccgccgcatcaaacggatggtcgaactgcgcgcctacgatgcaatcggcaaatcgtggcaggcgctcggttatccgttcgcgacgctcacgccttcctatgccgcggcaattggcgcctcgggcgaccggcccgccgcgctcgcgcaattgatcggcgtgattgccaacaacggcaacaaggtgccgaccgaaagtctcacgcaactcgacttcgcgaaagacacgccttacgaaacccatttccgccgcgccgcggtggcgccgcaacagcagttgtcgccggagattgccggcgtggtgaaagtgctgttgcgtgacgtggtgacgggcggcacggcgaggcgtcttgcacaaggcatgacgttccccgacggccagacgctcgaggtgtacggcaagaccggcaccggcgatcagcgcttcaacgtgttcgccaaaggcgcccggctgatcgagtcgcgcaaggtcaaccgcagcgcgactttcgtgttcgcgatgggcgaccgcttctacggcaccttgaccgcgtgggtgcatgaaccgtatgccgcgcattacgaattcacgagcgcgctgtcggtgcaattgctgaagtcgatggcgccggtgttgcagccgttgctggacaagccgcctgcaaagacggcttcggtcgcgaaggttgccgtgcaa

SEQ ID NO: 13683 - DNA, 648 bp, Burkholderia fungorum
atgagtacagccatgcaggaaaacgagaggcccgttacgaccggagtgaggcttctcgacgtaatgaaccggatcttgctggcctggtatcggctcaagacccgcttctggtacgcccacgtgttcgagtcgatcggcgcgaagacgacgatcttccgtcccatgctgctcgtcaacgtgcagtacgcgtcgcttggcgagcgtgtgctgatccggcccggcgcgcgcatcgaacttgtcgtgacggacccggccgcgccaccacggctcaccataggcagccgggtcaatatcgagcagaacgttcacatcgtatgcgggtcatcgatcgagatcggcgacggtgtgacgattacgggcaacgtcgccattgtcgacgtcgaacatccctacgaggacgtcaacgaccccacgcgcattggcgaccggattcgcacgcggggcaattacgtgcggatcgggcagggcgcattcatcggctttaacacaatcgttctgccgaacgtgaagatcggccgccacacggtggtgggcgcgcattcagtagtgactcgcgatgttcctgattactgcgtggtctcgggaaatcccgcgcggatcatgaagcgctacaacttcgaaacgcaatgctgggaaagggagaagcaa

SEQ ID NO: 13684 - DNA, 1839 bp, Burkholderia fungorum
atgtctcaaaccgtcggcgatttcatcattgaacgacttcacgcctggggcgtgcgccgcatctatggctaccccggcgacggcatcaacggcgttttcggcgcgctcaaccgcgcgcaaaccgaagccgccaggcaccgcaaaaaaggatccgacgacagcgcgcacgcgatcgaattcgtccaggttcgccacgaggaaatggccgccttcatggcggcggcccatgcaaaattcaccggcgagcttggcgtatgcatcgcgacctccggccccggcgcctcgcatctgctgaccggactgtacgacgctcgcatggaccatatgcccgtgctcgccatagcgggccagcaggcgcgcgccgcgctcggcggtcactatcagcaggagctcgacctcgtctccatgttcaaggacgtggccggagctttcgtcgaacaggctacggtgcccgcgcaagtgcgccatctggtcgaccgcgctgtgcgcacggcactttccgaacgcaaggtcacggcgctgatcctgcccaatgatctgcaagatctgccctacgaagcacccggacgcaagcacggcacgctgcattcgggcgtgggttatcgcgcgccgcgcctcgtgccctaccccgacgatcttcagcaagccgccgatatcctgaacgccggcaagaaagtggcgatcctcgtcggcgcgggcggcctgcacgccaccgacgaactgatcgccgtcgccgaaaagctcggtgcgggggtcgcgaaggcgctgctcggcaaagccgcgctgcccgacgatctgccgtgggtgaccggctcgatcggactgctcggcaccaaacccagctacgacctgatggccgaatgcgatacgctgctgatgatcggctccggttttccgtacgcggaatttctgccgaaggaaggcgcggcgcgcggcgtgcagatcgacatcaaggccgacatgctgagcctgcgttacccgatggaagtgaatctggtcggcgacagtgccgaaaccttgcgcgcgctgctgccgctactcgaagagaagaaggatcgcgcgtggcgcaagcgggtcgaaggctggagcgcagactggtggaaaacgctcgacaagcgtgcgcacgagccgggcaaggacgccgtcaatccgcagctcaccgtgtgggaactgtcgaagcgcattgcgtccaacgcgatcgtcacgagcgactccggttcggtggcgaactggtacgcgcgcgacctgaaagtgcagcgcggcatgatgtgttcgctctcgggcggactggcgtcgatgggcgccgccgtgccatatgcgatcgccgccaaattcgcgtatccggagcgccctgtgattgcgctcgtcggcgacggcgcaatgcagatgaacaatatggccgagctgatcaccgtgtcgaagtactggcgaggctggtccgatccgcgctggatctgcatggtgctgaacaaccaggacctcaaccaggtgacgtgggaacagcgcgcgatggaaggcgatccgaagttcgaagcatcgcaggacattccctgcgtgccgtatcacaagttcgcggaactgatcggcctcaagggcatctacgtcgacgacgcgcagcagatgggcgccgcctgggacgatgcgctcgccgccgaccgcccggtggtcatcgaagtgaaggccgatcccaacatcgcgccgctgccgccgcatatcacgctggcccaggcgaaggcgtttgcatcgacgctgatgaagggcgatcccaacgaaggcaatgtgatagtcgagacggcgaagcaggtgctcgacgcggtgctgccgggccatcacagcaag

SEQ ID NO: 13685 - DNA, 657 bp, Burkholderia fungorum
atgggttgggagcaattcgaacacggctggcggcgcgcaccggcggctgcgcctgccaaaggtctggtagtgctgatgcacggcgtgggcagcaatgcgcgcgatctgatgccgctcgcggacatctggagcgagagcctgccggacgtggcgttcacctcgctcgacggcaccgatgagttcgacggcggtttcggcggacgccagtggttcagcctgcgcgacgtcaacgagggcaatcgcgaggcacgcgtggccgcggcctatccggcgttgcggcgcatgctcgaagccgagctcgcgtactggcaggtgcctttcgggcgccttgcgctggtcggtttctcacaaggttcgatcatggcgctgcaccatgtggcggccagtgcggaaggcgcggccggcgtggtcgcgtactcagggcggcttgcctcggtgatcgtcgcgcagaacggcacgccgctcacgctgatccacggcgaggacgacgaagtgattccggtgcaggaactcgaatacgccgccgacgcgttcagcaacgcgggctataccgtggacgcctacgcattgcccggcattggacacacgatcaacgccgacggcgtcgcgctcggccaggaggcactggaacacgcgctgggcgctttgtcgcgcggc

SEQ ID NO: 13686 - DNA, 945 bp, Burkholderia fungorum
atggcggctgaaggcgggagcccgatgcgccccgttttccgcaacgccggccacccgccggccacctcttaccgctggacacttatgagtatcgtcaacctctcttcgtatcaatttgcaactatcgaagacaccgccgcatggcgcccgttcgtcacggaacgctgcaatgcgctgggcctgaagggcaccgttctgctcgcgccggaaggcatcaacctgttcgtcgccggcacgcgcgagaacaccgacgcgttcatccactacatccgtcacgacgcactgttcgagggcaagttcgccgatctgcagttcaaggaaagcctgtcggacaagcagccgttcacccgcatgctggtcaagctcaagcgcgaaatcatcacgatgaaaaagccggccatccggccggaactcggccgcgcgccgttcgtcgacgcgcccacgctgaaaagctggctggaccgcggtcacgacgacgaaggccgccccgtggtgatgctcgacacgcgcaatgcgttcgaagtcgacgtcggcacgttcgacaatgcgctcgactaccgcattaccaaattcagcgaattccccgaggtgatcgagcagaatcgcgccgatctggaaggcaagacgatcgtgtcgttctgcacgggcggcattcgctgcgagaaggccgcgatccacatgaaggacgtcggcatcgaaaacgtgtaccagctcgagggcggcattctgaagtatttcgaggaagtgggcggcgcgcattatcacggcgactgcttcgtgttcgactaccgcaccgcgctcaatccgcaactggagcctagcaagaccacgcaatgcttcggctgccgggccgtggtcacgccggaagcgcaacaatcgccgctgtacgtggcgggcaagacgtgtccggagtgtcacccggacagcaaggcggcgcgcgccgcg

SEQ ID NO: 13687 - DNA, 732 bp, Burkholderia fungorum
ttgacggatcttgaagccagcgattgccttgcgtgccttcgtgatcaccggcttctggcctgcgatcttcgtcaggtcgccaacggcgttttcgatgatcttcttgtcagcgaccgcttcgccaagacccatattaagggtgatcttggtgatgcgcggcacttccatcacggacttgtaaccgaacttctcgatgaggccgggtacaaccttttctttgtaaaactcttgcaaacgagccatttttttactccgcagcgtcaggcgctcagctcggcaccggtcgttttaaggaaacggattttcttgtctccctcgaccttgatgcctacacgcgacgccttgccattcgcgtcgaccaatgcgacgttcgaaatttgcagcggcatcgtcttggcttccacaccgcccgtcgtacccttcatcggattcggcttgacgtgcttcttgacgaggttgataccctcgacaatcactttgccttcgccaacggacagcacgacgccgcgcttgcctttatctttgccggtgatgacgataacttcgtcacctttgcgaatcttgttcatcgcgactccttacagcacttcaggtgccaacgaaacgatcttcatgaatcgttcgctgcgcaactcgcgcgtgacaggcccgaaaatacgggtgccaataggttcgagcttggcattcaacaacacagcggcgttgccatcgaacttgatcagcgagccgtcc

SEQ ID NO: 13688 - DNA, 432 bp, Burkholderia fungorum
atgaagagcgcacgccgacgctcccgcgaactggccacgcaggggctttaccagtggctgctgtcgggctcgcccggtggcgaaatcgacgcgcaactgcgcggcgcgcaaggcttcgacaaggcagaccacgaacatctggacgccgtcctgcacggcgtgatccgcgactcggaagcactgtccgcggccatcgctccgtgtctcgaccggccgatcgagcagctctcgccggtcgaacgcgccgtgctgctggtcgccgcgttcgaactgaagaatcacctcgatatcccttatcgcgtggtcatcaacgaagcggttgaactcgccaagacgttcggcggcgcggacggctacaagtacgtgaacggcgtgctggacaagctgtcggcccagctgcgggaggatgaaacgcaggcggcccgcaagcgt

SEQ ID NO: 13689 - DNA, 1707 bp, Burkholderia fungorum
gtggaagacaagcgcggttcgcgtggcacgacgttttgcatggacgtcgcccaaggtggtcgggtgcacgccaacggccacggcaccagtgaagccgtcacccgtcggcaacgttcacgttccgctgtttgcgagcgcttcggcgtcgtgctgaaaagtgaaactgtccgcgtacagatgattgatgcttgcccctttctccaggaagtgacgccgggcatcgttaatcatcgtcggagaaccgcacaggtagacggcgtattccgacaggtccgcaaaatcttcgcacaccgcgtgctggacgtagccctgtcgtcccgcccattcgctgccgggacgcgagagcaccggtacgtactggaactcgtagagacgcgcaccccattgctgaatctcgtcgtgcagatacagatccgcctcggtacgtgcgccccagtagagccacactggcggacagtccggatcgtccatgagcgattccagaatcgccttgacgggcgcgagtcccgttcccgtcgccaccatcagaagcggacgatagtcctccacatgaaagcggaaactgcccagcggcaactcgacgttcagcggatcccccggcttcagcgacgccagcatgtgatccgtaaaccggccgcctggaacccgcctgatatgaaaatcgagcacggagccggcggcagccgaagccatcgaaaagctcctgcgttcgccttcgccgagcagaacgttcatgtattggccgggattgaacctgagctccgcctgctcgggcagctcgatcgacagatgccggactccgggccccagcgggctgacggcaaccacacgcgcttcgatctccgcaggcgccgatgcatctccgcccacgtgcgccgcggcaatcaccatgtcgctgcttgcccgcgcctggcaggcaagcataaaaccggcgtcggcttcctcctgcgagatgccgaacggaaattcttcatattcgtgcgtcccgctgattaccttcacgcgacacgttccgcatccgcccagttggcaatcgtgaggaattgcaacccctgcactcgtcgccgcctgcagcagcgattcgtcggcacgggcttcgaatcgctcgccggttcccgccatttctatctgatagaccatcttgcaatctctaacgaaacaatggaccagcctgccaccgggcggcagaccgcattacttcttgatgtcggcttccacgaggacgcgacgtccgctggccgaaagcagatcgtgcaaggcctgcagcgccgcaagtccgcactgcgtgtcctgctcgccgttgccgccgctcagacccacgccgccaatcacctgatcgtcgaccacgatcggaaagcctccgacaaacgcggcaaagcgcccctcgaaactcagctgaatgccaaacgcctcgttgcccggcaatgcgggcccgtgaggcgccttggtaaagagatgggtcgagcgcttatggcccgccgccgtgaacgccttgttccacgcgatctggggtccggtgatgcgcgcgtcgtcggcccgctccagcacgatcggatacccgccgtcatcgacgatgcagaccgactcggccacgttgatcgctttcgctttctccagggcggcgcgcgccatcgcgcgcgcctcggacagctcaagcttgaaaaaactcttcatgatggattttctgaaatgaatggattgtcgtcg

SEQ ID NO: 13690 - DNA, 2259 bp, Burkholderia fungorum
atgtctgaaccgcacggccacgttcacggccacgctcacgcccgctcaccgggtcccgtccccgtcgattccgcgcacgcgtccgggccgcaacgccagggcgaaccgggcgccgtttacacgtgcccgatgcacccgcagatacgggcatcggcaccgggcaactgcccgatctgcggcatgacgctcgaactcgtgactccgctcgcggtcgaggagcgcaacgtcgaactcgaatcgatgacgcaccgcttctggttcgcgctcgcgctgtccataccactactggtgatgacgatggggccgatggtttcgtcgttcgacctcggtgccgccgtgaaccacatcggagcccgcctggcacggccacactggatgtctgcatcgtgggcacagtacgtccaggcggtgctcgccacgccggtcgtcgtgtgggcaggatggccttttctgcagcgcggctggacctccttcacgacgtggcaactgaacatgttcagtcttatcggactgggcgtggccgcggcgtacgggttcagcctgttcgcgctgttctttcccgagacgttgccgcaggcgttccggcgcgggcatgagttgccgctctatttcgaggccgcttctgtcatcgtcacgcttattctgctcgggcaggtgctcgaacttcgcgcgcgttcacgtacgtcgagtgctatcagggatctgctcgaactggcgccgcatacggcgattcgcgtcaggtccgacggaaccgaggaagcggtgccgctggaagacgtcgctgtgggcgacttgctgcgcgtcaaaccgggctccaaagttccggtggatggcgtcgtcacggacggcagttcgagcgtcgacgaatccatgattaccggggaatccattccgtcggaaaagggcgcgggcagcaaggtgacgggcgcgacggtcaatcagaccggcacgttcctgatgcgtgcggagaaggtcggctcggatacgctgctggcccgaatcgttcagatggtcgcgcaggccggccgctcccgtgcccccatccagaagctggccgacaaggtgtcgggctggttcgtgctgacggttctcgcagtcgcggtcgccgcgtttgtggtctgggctgccgtcgggccggctcctgcgcttgcgaacgcgctggtcgtcgccatcagcgtgctcatcattgcgtgcccttgtgcgctgggcctggcgacgcctgtttccatcatcgtgggagtcgggcgcggcgcgaaggaaggcgttctgatcaaggacgcggaagccctcgaactgatggagaaagtcgatacgctggtggtcgacaagaccggcacgctgaccgaaggcaaacctcgcgtgcaaacggtcgtggcgctggcggagcagtcggaatccgtcgtgctgagctatgcggccagccttgaagggccgagcgagcatccgttggcgcaggccattgtggccgaggcgcaaaagaaaaacgcgcagacgaagccggtcgaggcattcaacgcgattgtcggcaagggtgtgagcggccggatcgacggtcacaccgcagtgctgggcaacacggcgctcatggaggacacgaaggtcgattgcgccgccgtacgtacggaagtggaccggctgcgcgaagccggccagaccatcatgtaccttgcaatcgacggcacgctcgcgggctatatcggcgtggccgacccggtcaaggaaacgaccgccgaggcggtccggttgctgagggcctcgggtatccggatcatcatgctgaccggcgacaaccccgtcaccgcgaatgcagtggcgaaaacgctgtcgctcgacggcgtcaaagccggcgtgctgccgcaggacaaatacaagcatgttcaggagctgcagcagcaagggcatatcgttgcaatggcgggcgacggcgtcaacgatgcgccggctctcgctcaggccaacgtgggcattgcaatgggcaccggcaccgacgtggcgatgaacagcgcccgtgtggtgctggtcaagggcgacctgcgcggcattgcgcgagcccgggccttgagcgtcgcgacgatgaaaaacatccgccagaacctgttcttcgcctttgcgtacaacgtgattggcattccggtcgccgccggcgtgctgtatccgtggctaggcgtgctgctgagtccggttctcgcgagcgccgcgatggcgttgagctcggtctcggtgatcggcaacgcgcttcgtttgcgggctgtgcgaacg

SEQ ID NO: 13691 - DNA, 1041 bp, Burkholderia fungorum
atgttcggttttttgcgcagctacttctccaacgatctggccattgacctcggcacggccaacacgctcatctacatgcgtggcaagggcatcgttcttgatgaaccgtcggtggtctcgatccgtcaggaaggcggtcccaacggcaagaaaaccattcaggcagtcggcaaggaagccaagcagatgctcggcaaggtgccgggcaacatcgaggcgatccgccccatgaaagacggcgtgatcgccgacttcaccgtcaccgagcaaatgatcaagcagttcatcaaaactgctcacgaatcgcgcatgttctcgccgtcgccgcgcatcatcatctgcgtgccgtgcggttcgacccaggtcgaacgccgcgcgatcaaggaagccgcgcacggcgcgggcgcttcgcaggtctacctcattgaagaaccgatggcggccgccatcggcgccggcctgccggtgtcggaagcaaccggctcgatggtcgtcgacatcggcggcggcacgaccgaagtcggcgtgatctcgctcggcggcatcgtttataaaggctcggtgcgcgtgggcggcgacaagttcgacgaagccatcgtcaactacatccgccgcaactacggcatgctgatcggcgagcaaacggccgaagccatcaagaaggaaatcggctccgccttcccgggttccgaagtcaaggaaatggaagtgaagggccgcaatctgtcggaaggcattccgcgcagcttcacgatctccagcaacgaaattctcgaagccctcaccgatccgctgaaccagatcgtgtcgtcggtgaagatcgcgctcgaacagacgccgccggaactcggcgcggacatcgccgagcgcggcatgatgctcacgggcggtggcgcgctgttgcgcgatctggaccgcctgctcgccgaagaaaccggcctgccggtgctcgtcgccgaagacccgctgacctgcgttgtgcgcggctcgggcatggcgctcgaacgcatggacaagctgggcagcatcttctcgtacgag

SEQ ID NO: 13692 - DNA, 1335 bp, Burkholderia fungorum
atgctctggggcgaaaaggtgtgggcaaccgatgcattcaatctgattggccacggtccggtgtcgatcggcatgggcggaaccgctgcggcttacgatatcggtccggcgggcatgatgtccaacccggccacgttgacgttcatgccggacggaacctacttccttattggcgctgatatggtctcggctgacctcaaagtaaccagcacggcgactggcgagacggcaaactcgtacagtcgcgggagaaacaacggtccgtatttcgggccggagttcgcctttgtctggcgaaaggatcgcattgcgctgggcgtcggggcctatgcaaccgacggtgtcggcacgcagtatggcacggacagtttcctgtctcgcacggctaccaacaacgtcgacactgggctggatgtattctccagactgcttgtcatggacattccgttctcggtcgcctacaaggtcactgacaagctcaccatcggcggatcgatcgatgcggtatggacttcggtgaacctaggcttgctgctcgataccacgcagatcggtgcgctcgctgcgcaaggccgtctttccggtggacttgtgccggcactgcttggaataccccagctctcggggggctacctcaatttcaataacgggaagattgcgggtggggcggcctcggcctggggcgtaggaggaaggcttggtctgacctacgcagtcaatccgacgacaagggtgggtcttgcttaccagttcaagacatcggtgggcgacctctccgggcgctccacgctgactgcggtgagtgcagtggccggcaatatcccgttaagcggtacagtcaggctgcatgatttccagatgccggccacgttcacggccggtatcagtcacgactttacagaccggttcacggttgcagtcgactatcagcgtgtcttctggtccggtgcaatgaaagacattcaggtcggattcacgcaggacggaaccgggcagacgctgaagctcgcgctgccgttcaactaccgggacatcaacgtcttttcgatcggcggtcaataccggtacaacgaaagctggacgtttcgcgcgggcttccactatgcgcaggaagcaacgccagatgcagggttgatggcgatcctgcctgcgacgccgacgaccaatgtgaccgcaggcacttcatattcgtttaaccagaatatgaaggtggacattgccctggcatacgcttttcccaagacccttaccaacggcagtcttccggataccagtgtgccgatcaaagtcaggcactcgcagattgcggcgtcgctcgcatttacaaagcggttc

SEQ ID NO: 13693 - DNA, 1680 bp, Burkholderia fungorum
atgacgaagttgttaaaaagagggcgttacgcgttgggggccggcgcgcttgcccttgccgcgtttggtgcggtgatttttccatccatcaacgcaccggcccaaacccaaccggcggccaaacccgccgccacgagcgcgccacaaccggccgcgaagtcttcggcgaaaccgaacatcctcgtgattttcggcgacgatatcgggcaggcgaatatcagcgcctacacgcgcggcgtggtcggctacaggacaccgaatatcgaccgtattgcgaatgaaggcatgatcttcacggactattacgccgagaacagttgtacggcaggccgctcttccttcatcaccggccagtcgccgttgcgcaccgggctgtccaaggtcggcgcacccggcgcgccggttggtctgcaaaagggcgacatgacaatcgcccaggcgctcaagccgctcggctatgcaaccggccagttcggcaagaatcacctcggcgacaagaacgagtacctgcccaccaatcacggcttcgacgagttctacggcaacctgtatcacctgaatgccgaagaagaaccggagcgcccttattggccgaaggacaagaacgatccttacgtgaagaacttctcgccgcgcggcgtgattcatagcacgtcggacggcaaggttcaggacaccggcccgctcacggccaaacgcatggaaaccatcgacgacgaaaccggcgcgcacgcggaggaattcatccgcaagcaggtcaagaatggcacgcccttcttcgtctggatgaacttcacgcgaatgcacgtcttcacccacgtgcgcccggagttcaggggcaagagcggcatgcccggcaacgaatatgccgacggcatgtgggagcacgaccaggatgtcggcaaactgcttaagttgctggatgacctgaacatctccaaaaacaccatcgtcatttacacgacggacaacgggccgaaccagttctcgtggcccgacgcggcaaccacgccgttccgcagcgagaaggactccaactgggaaggcgcgttccgggtgccggccatggtgcgatggccggggcatatcaaggccggcgagacgtccaacggcatgttctcgggactcgactggttccccacgctgctcgccgcggcgggagacaccggtgtaaaggaccggctcctgaagggctgggcgcccaaggcgggtagcacgagtttcaggaatcacctcgacggctacaaccagttgccgttcctgaccggacagaccaccaaggatccacgcacggagttctattatttcgacgacgacgggcagctggtcgccatgcgctgggaccaggacggcaacgcgtggaaagcggtgttttgcgagcagcgcgccaaaggcaacctgaacatctggcaggacccgttcgtctgcctgcgagtgcccaagctgttcaacctgcgcatggacccttatgaacgcgcggacatcacctcggatcagtacaacgactgggtgacgaagaacgtctatctgaacggcattgcgacactgaaagcgtctgcattcctgcagaccttcgtcgactacccgccgagccagcggcccgcgagtttcagcgtcgaccaggtacgccggcaggtcgacaagaagatcgacgagtcgttcaagaagcgcggactcgag

SEQ ID NO: 13694 - DNA, 783 bp, Burkholderia fungorum
atgaacggatcgcagtggtccgactcgcgcgcgcggggcgcgctccgcttcctgcggtgttattcttcgctcgccatgaatctcgaaagcattctcttcactcaaggtttcggctcgcgccgtcaatgccgcgcgctgatcgccgacgcgcgcgtgagcatcggcggcgctgtctgcaccgatgccgacgccgatttccccaccggcgacaccacgttctccttcaccgtggacggtgtcgactggccgtatcgcgaacacgcctatctgcttctgaacaagccggcgggctacgaatgttcgcgcgatccgcagcatcatctgagcgtgttcagcctgttgccgccgcagttcgccgggcgcggcgtgcaatgcgtgggccggctggatcaggacacgaccggcctgctgctgctctctgacgacggcaagttcgttcacctgttcacctcgccaaaacgcaaggtgcccaaggtgtatgtcgccaccacgcgccatccgatcgacgacgcgcaattgagcgcactgcgcgacggcgtgttgctgaatggcgaggccagaccgattgccgcagtcgacgtggaggcgcgcggcgaccacacgctcgcgctcaccgtgatggaaggcaagtatcaccaggtcaagcggatgatcgcggcagccggcaatcgctgcgaagcgctgcatcgcgagcggataggcgggctcgctttacccgaagcacttgcgcgaggcgcgtggcaatggctcgacgaaaccgacctcggatctctacggagcggg

SEQ ID NO: 13695 - DNA, 2397 bp, Burkholderia fungorum
atgcaatccacgtctcctacgtccccgccgcccgcgccgcagaagcgcaaacgcccgttgtggctgaagctcatcatcggcttcgtgggtctcatcgtcgcaggcattctgtgcgtgctgctggtgctcggttatgcgctcgtcgtcgccacgcccaatctgccgtcgctcgatgcattgaccgattaccggcccaaggtgccgctgcgcatctatacggccgaccacgtgctgatcggcgagttcggcgaggaacggcgcgacatcgtccacattcaggacgtgcccgatagtctgaagaaggccatcctcgccattgaagacgcgcgcttctacgaccacggcggcgtcgacctcaccggcattgcgcgcgcgggtatcgtcgcgctgaccaatggccacgccacgcagggcgcgagcacgatcaccatgcaggtggcgcgcaacttcttcctctccagcgagaagacttacacgcgcaagatctacgagatgctgctcgcctacaagatcgaatcgaagctgtcgaaagatcagattctcgaggtgtacatgaatcagatctatctcggtcaacgcgcgtacggattcgcaagcgcggcgcgcgtttacttcggcaaagacctgaaggatctgacgctggccgagtccgccatgctggccggactgcccaaggcgccgtccgcctataacccggtggtcaacccgaagcgcgcaaaggtgcgccaggagtacatcctgcagcgcatgtacgagttgcactacatcacccaggaacaatacgacgaagcgagcaagcagccgctggtggtcaagggcgcgggcaaggagttcagcgtgcacgcggaatacgtcgcggaaatggtgcgtcagatgatgtacgcgcaatatcgcgaggaagcctatacgcgcggcctgaacgtggtgaccacgatcgattcggccgaccaggacgtcgcttaccgggcgctgcgcaaaggtctgacggactacgaacggcgccacggttatcgcggtccggaggcgttcatcgatttgccgtccgacgccgacgaccgcgaacaggccatcgacgacgcgctgctcgaacacccggacaacggcgaaatcattgccgccgtggtcaccgcggcgagtccgaagcaggtgcaggccgctttcatcgacggcaatgtcgcgacgatccagggcgacggcttgcgcttcgcgcagttcgcgctcggtccgcgcgctcagccgaatcaacgtgtgcggcccggcgcgatcatccggctcgtcaagaacgacgacggcgactggtcgatcacgcaattgccgcaagtggaaggcgcgttcgtttcggtgattccgcaagatggcgcgatccgtgcgctggtcggcggtttcgacttcaacaagaacaagttcaatcacgtgactcaggcgtggcgtcagccgggttcgagcttcaagccgttcatctattcggcgtcgctcgaaaagggactcgggccggcaaccgtcatcaacgacgcgccgctctttttcagcgcggctgaaaccggcggccaggcgtgggagccgaagaactatggcggcggcttcgacggcccgatgaccatgcgcacggcgttgcagcgctcaaaaaacctggtgtcgattcgcatcctgaaccagatcggcacgaagtacgcgcagcagtacatcacgcgcttcggcttcgacgcggatcgtcacccggcttatctgccaatggcgctgggcgccggtctcgtcacaccgttgcagatggcgggcgcgtactcggtgttcgccaacggcggctatcggatcaacccgtatctgatcgccgaagttaccgaccagcgcggcatcgtggttgcgcacgcgcagccgctggtggcggcgcaaagcgcgccgcacgcaatcgaaccgcgtaatgcgtacgtgatgaacagcctgctgcaaagcgtggcgcaacgcggcacgggcgccaagaccaatgtcctcaagcgcaccgatctcgccggcaagacgggcacgaccaatgattcgcgcgacgcgtggttcgccggttatcagcacacgctcacggccatcgcgtggatcggctacgacaatccgcgcagcctcggcgacaaggaaaccggcggcggtctgtcattgcccgtgtgggtcgaatacatggggcgcgcgctcaagggtgtgccggagtacaagatgccgatgcccgacggcctgaccgaactcggctcggagttgtacttcgacgacttcacgccggggcacggtttcgtcgccacggtcggcatcagtcaggcggcgctggatgccgaggcgagcggcgcgtcggcggccgcgcccgagcaggtcggcgaacaggagaagcaggacatcatgaacctgttccgcggccac

SEQ ID NO: 13696 - DNA, 1752 bp, Burkholderia fungorum
gtgctcgacgatcaactgcacgcgggagacgccgttccacgtgtcgctcgcgaggcggtaggcgaccgtggtgcgggcgggcagcgtgtcggtgtgattgaaccagatcgcgttgaagcgctggcggccgcgcacgagttgcagcttcaggtgtttgtccttcaccagcgcctgcgagacgatgtcgaattcgcccgaaaacaccggcgccggaaagccctgaccccacacggccgcgtccagcatttcgacgaattgcggcgtgaagtaggcgtcttcgagttcgccgtcggtttccaccgtgcgcgagagcgcttcttcggacagccattcgcggccgaccgcttcgaacgcggcggtgaagcgcggcacgtcggcggcggcgagcgtgaggcccgcggccattgcgtgaccgccgaacttgacgatcaggcccggctcgcgcttcgagatcaggtcgagcgcgtcgcgcagatggaagcccgcgatcgagcggcccgatcctttgacggtccggccgctgtcgtcggcgagcgcgaaggtgaacgagggccggtggaatttctctttcagccgtcccgcgacgatgccgatcacgccctggtgccagtcgggattgaacagcgtgatggtggtggtgccgtcggggtcgatcgccgagaggtcttcgagcgcctgctgctgcatgccggcttcgatttcgcggcgttcgcggttcatcgcgtcgagttgctgcgcgaggtcccaggcgcggccgatgtcgtcagtagtcagacattcgatgccgagcgacatgtccgacagtcggcccgccgcgttcagccgcggtccgagcgcgaagccgagatcgaagcccgacgcgctgcgggcgtcgcgcgcggcggcgcgaaacagcgcggcgatgcccggctgcatcttgcctttgcggatgcgctgcagaccctgcgcgaccagcacgcggttgttgccgtcgagcttgaccacgtccgcgaccgtgccgagcgcgaccagatcgagcaggccgtcgaggcgcggttcgggaaagttatcgttgaacgcgccacggcggcgcaattccgcgcgcaacgcgagcagcacgtaaaacatcacgccgacgcccgcgatacatttgctcgggaacgtgcagcccggctggttcggattgacgatcgcgcgggcgggcggcagttcgtcgccgggcaggtggtgatcggtaaccagcacgtcgatgccgagcgcgttagccgcttgcacgccgtccacgctggcaatgccgttatccacggtaatcagcagatccggcttgcccgccgcgttgcgggcggccagcgcgacgatctccggtgtcagaccatagccgtactcgaaacggttcggcaccagatactcgatccggccgccgaacatgcgcaggccgcgcacggcgaccgcgcaggcggtggcgccgtcgcaatcgtagtcggcgaccaccagcatgcggcgttggctctggatggcgtcggcgagcagggcggcggcgtcttcgcaacccttgagcgcgacgggcggtacgagccgcgcgaggccggtttcgatttcgtcgggcatgcacacgccgcgcgccgcgtagaggcgcgcgagcaccggatgcagaccgtggcgggtgaggatttcggcgtcgacgggggacgcggcgcgcgtaacgattcgggtcatgcggaaaggccgtggttcattcgttgcattcgttgggtcattcagtcattcattcga

SEQ ID NO: 13697 - DNA, 561 bp, Burkholderia fungorum
atgaccgaccatcgactcatcgagatcacacacgccacgcacggcgtcgacatcgacctcgtctatgccacggcgcgcaatctcaccggcaaaccgatctaccgggccgcgcattgtcttctgctcgaaccggcggaggtggcgttgcgccgcgcggtggaactggcgcgacagatcggcacgacgctgcgcattttcgacgcgtaccggccgccgcaagcgcagcaggtgctgtgggattttctgcccgacccgacttacgtggcggatctgaaacgcggctcgaaccatagtcgtggaacggcgctcgacctgacactgctcgacgcgcacggcgaggaactcgacatgggcaccggcttcgacgccatgacgatcgaatcggagcactttcatcccggtctgcgagcagatgtgcagcgcaatcgcatgttgttgctgggcgtgatgcatggcgcgggcttcacgcacatcaaaagcgaatggtggcactacgagttgcccggttcgcacgcattgccgctgatcgacaacaacgcaagcggaccgctgcggctgatg

SEQ ID NO: 13698 - DNA, 1578 bp, Burkholderia fungorum
atgaaccttcgagcttttttctccacgtttcagcgcgacctgcttgcgggcacggtcgtttttctggtggcgctgccgctttgtctgggcatcgccaatgcatcgggcgtcgaaccttttgccgggctcgtctcgggcattgtcggcgggctggtggtggccgtgctgagcggctcgcgcctgagcgtgagcggtccggctgcgggcctcgtcgtgatcgtgatcgacgggatcgcgcaactcggcagcttctccgccttcctgctggcggtgctgctgtccggcgcgatccagttcggtttcggcatgctcaaagccggccgcttcgccgcctacgtgccctcgccggtgatcaagggcatgctcgcggcgatcggcgtgctgctgatcgtcaagcagttcccgctggcgctcgggctgtccggcgcggacgcagcgtccgccgcgcaaccggttgcgcaggccgccggctcgattggcacgccgttcggttcggtttcgctggcggcctgcgtgatcacgttgctgtcgctggcgattctggtcggctgggaaacgcgcgcgctgcgccgcttcgcgctggtgcgtcgcgtgccggcaccgcttgcggtggtcctgctcgggatcggcgcgacgttgctgctcagcgtgctggcgccgtcgcttgcgccgcccgccgaacatcgggttgccctgcctccgctcgaatcgttcgccgcgttgcaactcgcgctcgagtgggccgatttcgggccgcacttcgcacaactcgtcaatcccgatgtctggcgcgtggccatcacgctggcgatcgtcgccagcctcgaaacgctgctgagcctggaagcggtcgagcagatcgatcccgaacgacgccccgcgccgccggatcgcgaactgaaggcgcaaggcgtgggcaatctgattgccggtgcgatcggcggactgccgatcacgtcggtgatcgtgcgcagttcggccaacgtgcatgccggcgcacaaagccggctctcggcgatcattcacggcgtgctgctgctcgtcagcgtgttcgcgctcaccagcgtcatcaacctgattccgcttgcctgcctcgcggcgatcctgatcttcacggggctgaagctcgccaagccgtcgctgttcgccgccgtggcgaagcagggctttgcgccgttcgcaccgtttatcgtgactctcgtcggtgtgctcgcaaccgatctgctgatcggcatcgtgctcggcattctgtgcagcgtgctgctcgcgctgtatgcgaatctgcgcagcccgatcgtgctcgcgcaacacggcgatcactatctgctgtcgtttcgcaaggacgtgtcgtttctcggcaaagtgccgctcaagcactatctgcagcagattcccgacggcgccaccgtgattgtcgatgcgacgcgcgctgactttgtcgaccacgacgtgcgcgaactgctcgacacattcgtggccgacgcgccgaaccgcggcattgccgtcgaagtgcggcatcaggttcgggcccaggcgcgcgccgcgcgaggctggtcgatgcggcgcacggcaacagag

SEQ ID NO: 13699 - DNA, 645 bp, Burkholderia fungorum
atgaaacgtacttaccaaccttccgttacccgtcgcaagcgcacccacgggctttcgcgttcgcatgaagaccgccggtggccgcaaggtcatcaacgcacgtcgcgcgaagggccgcaagcgcctcgccatctaaggcaggcgagcggattgcgcgcactgtgtgtgccaagcgaagccagcggtaacgcgggaacggctggggcgcagcaacagggctcggttccgttgcgagcgcaagccgccttccccaaagccgcaaggctgctgaaaacggatgaattttcatccgtttttcgtttgcgcccgtggcgccgtaccgcgcacttcgtggtgtacggccggcccaccggcaacgaagctcgcttaggcctcgtgatcggcaagaagtacgcgccgcgtgcggccacgcgtaatctggtgcgtcgaatcgcgcgtgaagccttccggctgcgtcgcgcggaattcggcggttgggatgtgctgctgcgtttgcacacgcgcttcgacaagaaagctttgccgagcgcttcgtcgccgccgttgagggcgttgtgccgcagcgaaatcgaggcgctgctcgacaaggcagcgcgcgaagtgacccgtcgcgaggcgccgcccgcggaagcgcccaagacggaa

SEQ ID NO: 13700 - DNA, 1686 bp, Burkholderia fungorum
atgaacaacccgaaacacatcgacccgcgtctcgatccgacccgcacgatccgcgcaccgcgcggcgcggaaaagacctgcaagacctggatcgcggaagccgcgtaccggatgatccagaacaatctggacccggaagtcgccgagcatccgcatgcgctggtcgtgtacggtggcattggccgtgcggcgcgcaactgggactgcttcgatcagattctcaagtcgctgaaggatctcgaggaaaacgaaacgctgttgattcaatccggcaagccggtcggcgtgttccacacgcatgccgacgcgccgcgcgtgctgctggcgaattcgaatctggtgccgcattgggcgacgtgggaacacttccacgaactcgaccgcaagggcctgatgatgtacggccagatgacggcgggcagctggatttacatcggcagccagggcatcgtgcagggcacctacgagacgttcttctcggtggcgaaccagcatttcaacggcgagccgaagggccgctggatcctgaccggcggcctcggcggcatgggcggcgcgcagccgctcgcggccacgatggccggtttctcgatgatcgcggtggaatgcgacgagacgcgcatcgacttccgcctgaagacgcgctacgtcgacaggaaagcgcagacgctcgatgaggcgctcgccatgctcgacgaagcgaagctggccggcaagccggtttcgatcggcctgctgggcaatgccgccgacgtgttcgccgagtgcgtgacgcgtggcatcacgccggattgcgtgaccgatcagaccagcgcgcacgatccgattcacggctacctcccgcaaggctggaatgtcgaagactggcgtgagcgtatgaagaccgcgccggattcgatcatcacgccggccaaacagtcgatggccaaccaggtgcaagccatgctgacgctgcaggaacgcggcgcggccacgctcgactacggcaacaacatccgtcagatggcgctggaaatgggcgtgaaaaacgcgttcgatttcccgggtttcgtgccggcgtatatccgcccgctgttctgcgaaggcaagggcccgttccgctgggtcgcgctgtcgggcgatcctgaggatatctacaagaccgatgcgaaggtcaaggaactgatccccgacgatccgcatctgcacaactggctcgacatggcgcgcgaacgcatcgcgttccagggcttgcccgcgcggatctgctgggtcggcgtgaaggaccgctatcgtctgggccaggcgttcaacgaaatggtcaggaacggcgaactgaaggcgccgatcgtgatcggccgcgatcacctcgacaccggttcggtggcgagcccgaatcgcgaaaccgaatcgatgaaggacggctcggacgcggtcagcgactggccgctgctcaacgcgctgctgaatacggcgggcggcgcctcgtgggtgtcgctgcatcacggcggcggagtcggcatgggctttagccagcacgcgggcgtcgtgatcgtcgccgatggcacggatgccgcaaaagagcgcctcggccgcgtactgttcaacgatccggctaccggcgtgatgcgtcacgcggatgcgggctatgaactcgcgcagcaaaccgcgcgcgaggctggtctcaatctgccgatgctgggccgc

SEQ ID NO: 13701 - DNA, 1383 bp, Burkholderia fungorum
atgcgcaagtttcaggatttgctcgcgcgagttttcgatgttgcattggtgttggcgggggcggcggtggcgtcgcagatccgttttgattacctcgctcaatccgggttctattgggcgctcgtgatgttttccgccgcgttcgcgctggccatctttccggcgttcggcgtgtacgaatcatggcgcggccgctccaagctggtactggccggccaggtgtcgctcgcatggctgatggtgcagggcagcgccctcgtgctgatgtattcgctgcatcgcatcgacttcgtgtcgcgcctatggttctcgtactggacggcggtgaccggcggcctgctgatcgcgtaccggctgatgacgcacgcggtattggcgagcgcgcgcagcgccgggatgaatctgcaccaggtcgccattgtcggcagcggctcgcagtgcgacgcgatcatccgccggatcaatgcggcgccgaccaccggttttcgcgccacggccgtgtacaacgcgcgtcctgacgtgtcgcaggtcatcagccagggcgtgccggtgttcgagtcggtcgaagcgctcgccggctacatgcggaccaacgacgtgcacgaactgtggctgatgctgtcgctttccgaggagccgctgatctgctcgctggtcagcgaattccgtgacgacctcgtgaacatccgcttcatgccggacgtgcgcagcctcgcgctgttcgagggcagcggggtgatcgatctgctcggcgtgccggcgatcaacctggtggcctcgccgctgtccgcgagctcgatgctgaagaaggaaatcttcgaccgcctgttcgcgttgaccgcgctgatcgcccttgcaccgctcatgctcgccattgcgatcgcggtgaagctgtcctcgcgcggtccggttctgttcaggcagaaacgcaaaggcgcggacggccacgtattcaccatctacaaattccgctcgatgcgtctgcacaccgagcagaaaggcaccgtcaggcaggccacgcgcaacgatccgcgcgtcaccagggtgggcgcgttcctgcgccgcacgagcctcgacgaactgccgcaattcttcaacgtgttgcgtggcgacatgtcggtcgttggaccgcgtccccatgcactcgagcacgacgacctctatcagaaagtagtcgcgggctatatcaatcgctaccggatcaaaccggggatcacggggtgggcacagatcaacggctttcgtggcgagaccgaccgcatcgagaagatggaacgtcgggtggaacatgacttgtattacctgggacattggtcgttcgcactcgacatgcggattatcggcgcgacgatagtcgccggactggtgcatcgaaacgcttac

SEQ ID NO: 13702 - DNA, 1533 bp, Burkholderia fungorum
gtgctggacctcaatcctcacgcgggcgcgtacatcgcgagtacggccgatgcctcgaagaacggtttgaccactggcacgctgacggtgagcgatatccagaaccactccgattacagcgcctcgagcggcggcttcagtgcgggcgcggggatcggttcaacgggcaaggcggtggggccgggttcggtcagcggtgcgggtggcgtgacgccgatgatgtcgcaacacgatagcggcagcagcagtgcgacgacgaaaagtgcgatcagtgccggcacgatcagcgtcacggacgcggcgaaccaggcgcaggatgtggcgggtatcaatcgcgatacgacggacctgaacggcagggtgtcgaagctgccggatgtcaataatctgctgtcggcgcaggcggatacgatgaatgcggcgcaggcggcggggcaggttgtggcgcagggaattggtgcgtatgcagacgggaagaaagcgcaggccgggcagcaggagaaggcggatgagctggcgggaaatactgccgctgctgcagccgacaaggccgaagctgcgtcgtgggatgagggtgggacgaaccgcgttgtggcgcacacgatcggcggcgcactggttgccgggctgggaggtggcagtgcgcctgggggcgcgctcggtgcaggcggatcggcagcgctggcgggcaagctgaacggtcttgcggacgagattggcaggcacactggatcgatgacgctgggcaacgtagcatcgaatgtgctggctggtgcgggtggaacgttgcttggcggcaactcgggagcgttcgctgcgtcaaacgaggacttgtacaatcggagttcaggcaacggtgaaggcaagggcgggacggggaacgaatttatagaccgtttcgccgcatggtcagacgatccgctgggtacgttgaaccggcagatgtcgtcgctgggcgacgagtttggcgcacttatgaggcacggtgcgcagaccaagatgtccgaatcgccggcaagcctgatggctcagggtgctgcgaacggagtcagtgctgtcactggtgtgggaggaggcaggccgccggctgcaagtcccggaatggtagttgtgaattcgtcgacggggcaggtcgcgaacgctgcagttggtacgccgggtaatgcgactctcaatagtggcaacgatgatcagcagtcagcgaacaatggcgccagtgataacagtccctactcgaacctttcagactctccaagtgtcggaccaggcaagaacttcacggcagcccagaagcaaaagatttatcagcaaaatatggagagcaacggtggggtgttgcgatcggatcaggatggaactgaattggtcatgccaagcaagagcgagaaaggggttacgccgccttcgaatgaggcacagattgaccatattgttccgcggaatccggctgatccggacgcatcgaaaggtacgaatagttatggcaacgcccaagtactatcacgggatcaaaatcggcagaagtcaaacaaa

SEQ ID NO: 13703 - DNA, 1626 bp, Burkholderia fungorum
atgaagcaaaacaatctgttgcgcgccgcgcgtgtcacgacgctcgtcgcagctgcagcggcatcgatggtgggcgcaagtgtcgcgcgcgccgagattccgaataaaaccctggtttactgctcagaaggcagtcctgcgggtttcgatcctgcccaatacaccacgggcaccgatttcacggctaatacgttcaccgtctacaaccgcctcgtcgaattcgaacgcggcggcaccaaggtcgaaccgggcctcgccgaaaagtgggaagtctcggcggacggcaaaacctacacgttccacctgcgtcatggcgtgaagttccagaccacgtcgttcttcaagccgacgcgcgaattcaatgcggacgacgtcgtgttcacgttccagcgcatgctggacccgaactcggccttccataaggcttacccggtccagttcccgtacttcacggacatgggcctcgacaagctgatcaccagcgtcgaaaaggtcgatccgtacacggtcaagttcacgctgaaggaagtcaacgcgccgttcatccagaatctggcgatggaatacgcgtcgatcctctcgggcgaatacggcgaccagttgctgaaggccggcaaggcggccgacatcaaccagttcccggtcggcacgggcccgttcattttccgcagctacacgaaagacgcgacgatccgcttcgacggcaatccggattactggaagccgaacacggtgaagatctccaagctgatcttctcgatcacgccggacgccggcgtgcgcgtgcagaagatcaagcgcgacgaatgccaggtgatgagctatccgcgtccggccgacatcgcgccgctgaaggccgaagcgaacatcgccatgccgtcgcaaccgggcttcaatctcggctacctcgcgtacaacgtgacgcacaagccggtcgacaaggtcgaagtgcgtcaggcgctcgacatggcgatcaacaagaaggcgatcatcgagtcggtgtaccagggcgcgggccaggcggccacgaacccgatgccgccgacccaatggtcgtacgacaagaacctgaagggcgcgtcttacgatgcggacaaggccaaggccttgctggcgaaagcgggctatccgaacggcttcgacatcaccctctgggcgatgccggtgcagcgcgcgtacaacccgaacgcccgcctgatggcggaaatgatccaggccgactgggccaggatcggcgtgaaggcgaagatcgtcacgtatgaatggggcgagtacatcaagcgcgctcacgcaggtgaggacgacacgatgctgatcggctggaccggcgacaacggcgatccggacaactggctcggcacgctgctcggctgcgaagcggtgaacggcaacaacttctcgaagtggtgctacaagccgttcgacgacctgatccagaagggccgcgtcacgtccgaccagggcgcgcgcaccacggcttacatgcaggcgcagcagatcttcgcgcagcaactgccgttctcgccgatcgctcactccacggtgtaccagcctgtcagcaagaaggtggtggacatgcgcatcgaaccgctaggctatgcgcgctttgacggcgtcagcgtcaag

SEQ ID NO: 13704 - DNA, 228 bp, Burkholderia fungorum
atgggttcggaaatcagggagacggccgtgctgtacgtgcgtgccgatcgcagccgctgctgcggatacgggctgtgcgcgcaactatgccctcaggtatacaagctcgacgaaaacggcatcgtctatctcgagtccgacacggtgccgcgggaactcgaaagcgatgcgcgggagggcgccgccgcctgtccggcggaggcgctcacgatcgaagcggccggcgcg

SEQ ID NO: 13705 - DNA, 846 bp, Burkholderia fungorum
atgaatatggcagaaactcaactcaatccgatcgcgcgtcccaccgcgcccgccggtttcgaccccgcccagagcggtcaatcgcaagcgccgtcgcgcccgaagatcgagatcaacgacctgaatttcttctacggcaagtatcacgcgctgaagaacatcaacctgcagattcccgaaggcaaggtgaccgcctttatcggtccgtcgggttgcggcaagtccacgctgttgcgcacgctcaacaagatgtacgcgctctatccggagcagcgcgccgagggcgagatcctgatggacggcgaaaatctgctgaccaccaagcgcgatatttcgctgctgcgcgcacggatcggcatggtgttccagaagccgacgccgtttccaatgtcgatctacgacaacattgcgttcggcgtgaagatgttcgagacgctgccgcgctcggaaatggacgaccgcgtggaatgggcgctgaccaaggccgcgctgtggaacgaagtgaaggacaagctcgggcagagcggctacggtctgtcgggcggccagcagcagcgtctgtgcattgcgcgcggaatcgcgatccgtccggaagtgctgctgctcgacgagccgtgttcggcgctcgacccgatttccacgggccgtatcgaagaactgatcgccgaattgaagagcgattacacggtggtgatcgtcacgcacaacatgcaacaggcggcccgctgttcggactacactgcctacatgtacctcggcgagttgatcgaattcggcgacaccgaaaagatcttcatcaagccggtccgcaaggaaaccgaggattacatcactggccgcttcggc

SEQ ID NO: 13706 - DNA, 4896 bp, Burkholderia fungorum
atggaaagactcccgctggcagccgctcgacggcaatccgaatttcgtcggcgtgtttcgtttggactttctgacaccatgacccgaatgatttccgtcacgccgtcgagcaactggttgggcaacgcgcgccgtcgcgcggcaggcacgttcgcggcgctgctgactgtcttgctcgcggcgatgacgctcgccgtctcaccggctgcttacgcggacgacgacgcagcgagcgccgctgccgcagccgatgccaacatcgccggcaatccaacgctgcagacagcgccatcgagtaacttcagttcgcagaaggtcgacggacagccgttcttcctgctttcggacgcgagcttcggcagcgatcaactggcacaggtgcggctcgaagcgcccggccgcgatttcaaggacgcgttgcaggcatatggcggcgcggacatcgtcgtgtatcgcgtgccgaggccgctagactttctgaaggcgcagaagaatctgcaccggctgaatgtcgcgccgaattatcagggcgaagggctcgcgaatacgcttacctatctgtgggaccggtggtttaccgaagcgcgccgcgcatggcagcgcgtgctgtcgttcgcgacccgcagcaaggcgaccgaagcggcgccgcaattcaagctcggcgaacagaccggcaagcagacgcaattcgagccgagttcgcaattcgcgccactcaaaggctacgacatggtcgcgcgtttccgctatccgatctgggacgcgaaagtgatccagccgcccaagggcgtgaatctggcgggcagcagcagtaactttatcgaagccagtgcgggcaacgtaatgattccggtcggcaagctgccgccggggctgtatatcgtcgaagcggtgatcggcaactatcgtgcgcatacgctgctgttcgtgtcggacacggtggcggtcgtgaaagccgcgtcgagcggcatgctggtatggaccacacggcgcgataacggcaagccggtcgcgaatacggaagtgagctggaccgacggcgtgggcgttctgcaaagcggcgcgaccggcggcgacggcgcgctggtgctgcaacacgtgagccccgagcgcagctacgtgctcggcaccgatccgcaaggcggcgtgttcgtctccgagaatttctattacgacagcgagatctacaacacgaagatctacgcggtgaccgaccggcccatgtaccggccgggcgatccggtgcatgtgaagttcatcggccgcacgttccagagcgcgacgcaatcgtccgcgcccgccgaggccgatatcaggctcgacgtgctcgatccgaacggcgcgccggtggcgagcagcaaggtgcatttcgcgtcgggcacaggcgcggataccgcgttcacgctgcccgccgacgccaccgccggcggctatacgctgcgcttcgactacaacggcgatgtatacggcagtgcatttcgcgtcgccgaatatgtgaaaccgcacttcgacgtgaatctctcgatggataaagccgactacgcgaccggcgaggcgctgaagggcaagatccagttgcgctatccggacggcaagccggtgcgcgacagcaagatttcggtcacgctgcgcgcgcagaaagtgacgatcgtcgacggcgaattgcgttatgcgggactgttcccggtcaagctcgaccagcaggaactgaagacggatagcgacggcaacgcgagccttacgctgccggccgcgaaagaaccgagccgctatgcgttgacgctgttcgcgcaggacggcgccgcatacaaggtgcgcgtgacgcgcgaagtgctgatcgcgcgcggcgcgacgccgtatcgtttgaacacggccaagtcgttctcgcaaccgaaggacgtggtgagcttcgacttacaggcgctcggcgcaatcgatcctgcgtcgcacgcgccgtcgaagtacgaatggacgcgcctcgaatcgcaaacgcatggcgaaggcgcattgaaaagcgcgagcgcgggcggcaagctgtcgttcccggtgcaattcgacgaaccgggttcgtacatgctgtcggtcaaagatgatttgggcaatctgctcgccgccactagccattgggttgcgggcgatggcctgaaggcgattccgggcagcgtcgagatcgtgttcgatcgcgacagatacaaaatcggcgacaccgctgaagcgctgatcaccttccccatgccggtcgacgacgcgctgctcacgctcgaacgcgacaacgtcgaacgtcgcgctctgctgacggctggcggcgactggttgcaactgcaacgggtggcgccgtcgcaatggaaagcgcggatcaaggtgggtgaagacttcgcgccgaacatgacgttctcggtgttgtacgtacacgccggcgaatacgtgttccagaacgcgggcatcgtggtcgctcaaccgcagatcgaactgaaagtgaagagcgacaagccggtgtacggaccgggcgacacggtcacgctgaatttagacagcacgctgaacggcaagccggaagcggcgaatctgacggtgagtgtggtcgacgagatggtctacgtgttgcagccggaaatcgcgccgaatatcgtcgacttcttctatcacccgcgccgcaacaacgtgcggacttcgtcgagcctgtcgttcattacctacgacctcgcacgctcgccgctgaaaggcgcgccgggcggaccgcagcgcgcgaactacaacgagcgtggcgtgaaggtgctcgaacggccacgccgcgacgatcaggacacggcagcgtgggaagccaacctgaaaaccgacgcgaacggccacgccaccatgacgttcaagatgccggattcgctggcgcgctggcgcattaccgtgcgcgctgcggcgccggatggcatggttggccaacgcaccgcttacgtgcgctcggacaaggcgctgtatctgaagtggagcgggccatcgcatttccgcgtcaacgatcagcccgccatcgacatgatcgcgttcaatcagaccgacgcggatatggacgcgcagtgggtggtggacggcggcgggttgtcgctcaatcagaaggtcacgctcaagcgcggcgcgaactatctgcgtctgccgagcggcgcgctgaaggacggcgtgatcaacgcgtcgctgcgcagcgcgggtaaggacgtcgatcgtctgcaaaccacgattcatctcgacgcgagcggctggctcgatctgcatcagaacacggtggcgctcgacggctcgaacaagccgctcagtctgccgcaagacgcgcaggacgtcagcgtgcgtttcatcggcagcgcggcgagccagttcatgcgtgtcgccgacgatctgatcgcctatccgtacggttgcgccgagcagacgtcgagccgcctgattccgctggcgctcgcgcatgatgcgatcggccgcggcgtctccggtgacggcggcgcgagttcggcgcaaggcctcgaagcgctgctgcgcaatcagcggcagcgtctggccatgctggcgggtgtcggcggcacgttcggctggtggggcgataccacgggcggcagcgcactgattacggcctacgcgtattacgcggactggctcgcgagccgcagcctcggcatcagcctgcccgccgacaactggcagcatgcaatggacgtctatcgcgacgccggcgcgaaagagccgctgctgcatcgcgcgctggccttgtggctgatgcagcagatgggcctgccggttgcgacgccggtctcgggcgtggccgcggacctgatgagcgacgcggcggccacggccagcgtgcccgcacgcaacggcacgtatggcgcgtcggacagcatcgtctttgcgcaagccgattcgccgcgcggcaagcagatggcgacgctgctgatcgccggcatggcgcgcagcacgagtgctcaattgcccgatgggttcgatgcggcggcgagcgccgcgcgcgcggcattgagcaacgatcctgcgccgctcgtgcaaagcctgctggtcatgtcgggtggcgacggcggcgcggcagccgatccatcggccttgctcgcgaagagcagcgccgattacccgacgctcgatcgcgcgctcacgctcctgtggttacgcaaggcgctgggcggcgatgtggcggccacgtcgttgccgtcgctgcaaggcgcgggctggacacgcgccgcgacgcccaccggcacgccgctttacaggtggaccggcgccacgctgccggccgcgctcgacgtcggcgccgcccgcgccgacgtcaacgcgctggtctcgttccgcagtcatacgagcgaggacagccgtctgaatatcagcgtcgagcgccgcctctacaagctcgaaccggtcgaggtcgcggccgatccgaagaaaaaggatgcctcggccgagagccaggtggggcgcgccgcgttcaccgcgcgtctggtgaagcagggcgatgcgatcgacagcaacgcgctttacgtcgacgaagtcacgctcacgccgcgctcgggcaacgcttaccactatggcttgctcgacgtgccgctgccgccgggcggcgatgtcgaggcgacgagctggggcgtgtcgatcgacggtctgccgggcgcgaaagagggcgccagcggtccgcagccgttccagcgcgttgcgtcgtacgagatgggtgagctggcgtatcaccagcccgtgccgttgctcgaccggccggtcacgctgcggcaactggtgcgcttcgcgttgccgggcacgttcgcgttgccgcccgcgcgctacttccgcatgtatcagccggacgcgaaggcgttcgaaggcggcaagagcgatcacctgacgacgttgcgcatccag

SEQ ID NO: 13707 - DNA, 843 bp, Burkholderia fungorum
atgggtcagattctgttcgtcgtgtggcgggaaagtgtcgaggcgctgctggtcgtcggcattctgtacgcatggctgaaaaatggcgacgacgatgcgcgccgcggtttgccgtacctgtggggcggcgtggcagccggattgatcgcggcagtggcgctcggcgcggcgctggtcggcttcaccgaagtgctctccggcgacgcgcaggattatttccagaccgcgatggtgctgatcgcctgcgtgctgatcgtgcaaatggtgctgtggatgaagcagcatggccgctcgctcaagcgtgacatggaacagtcgctgcaaaaaagccagcgcgattcgaactggtggggcgtcgcgctgctggtggcactggcgatcgcgcgtgaaggcagcgaaacggtgatcttcctgtacggcctcggctttggccagtccgggcacgtggacggcagccagatgcttgcggtcgtgatcggtctcggcctcgcgttcctgaccttctacgtgctgcaactgggcggcaaattcttctcgtggcggctctttttccgcgtcacggagatcatgctgctgttcctcggtgcgggcctgttccagaccggtgtcgacaagctgatcgacaaggaaatcctgccgacgctcgtcgaccagatgtggaattcgtcggcgatcctcgacgactcgagcacctttggctcgctggtctcgacgctgaccggttatcgcgcgcatccggcgctgatgaatctgctggcgtacgcgctgtactgggcggtggtttatctgctggtgcgccgcgcgaatcgcaagccggtgcagcaagccgccgggcgtgcggca

SEQ ID NO: 13708 - DNA, 1299 bp, Burkholderia fungorum
atgtccaacccgccgccagccgtacgccgcgtcgccataatcgggggcaaccggattccgtttgcccgctcgaacaccgcctacgcgaccgcgtcgaatcaggacatgctgaccttcacactgcaaggcctgatcgaccgctacaacctgcacggcgaacggctgggcgaagtcgcggcaggcgctgtcatcaaacattcacgcgacttcaatctgacgcgcgaatccgtgctgtccaccacgctggccaaagagacgcccgcgtacgacgtgcagcaggcctgcggcaccggactcgaagctgccatcctcgtcgccaacaagatcgcgctggggcagatcgaagtgggcattgcgggcggcgtcgatacgacttccgatgcgccgatcggcgtcaacgagcggatgcgcaagatcctgctcgaagcgaatcgcggcaggagcaccgggcaacgcgtcggcgcgctgagcaaactgcggcccggcatgtttttcaagccgctgctgccgcgcaacggcgagccgcgcacgggcctttcgatgggcgagcattgcgagctgatggcgaaacgctggaacatctcgcgcgaggcgcaggacgtgctcgcctacgacagccaccgcaagctgacggcggcgtacgcgcgcggcttcgtcaacgatctgatgacaccgtaccggggtcttgcgcaggacaacaatctgcgcgccgacctcacgctcgaaaaactcgcgagcctgaagcccgtgttcgaccgcgacgccggcacgctgaccgccggcaattcgacgccgctcaccgacggcgcctccgcggtgctgctcgcgagcgaggactgggccgcgcggcatggactgcccgtgctcgcgtatctgagctggtccgaaaccgccgccgtcgatttcttcgacaggaaagaaggcctgctgatggcgccggtgtacgctgtgccgcgcatgctggcgcgcgccggactcacgctgcaggacttcgatctgtacgaaattcacgaagcgtttgccgcacaggtgttgtgcacgctcgcggcatggcaggatgacgaatattgccgcacgcaactcggtttgccgggcgcgcctggtgcgatcgaccgggcgaaactgaacgtgaatggcagctcgcttgccacgggtcatccattcgcggcaacgggtgggcgcatcgtcgccggtctcgcgaaaatgctcgcgcaactcgacaagccggccggcaccgcgcgcgggctgatttcgatctgcgcggcgggcggccagggggtggtcgcgattctggagcgc

SEQ ID NO: 13709 - DNA, 810 bp, Burkholderia fungorum
atgggcattctgaacgtcacacctgattctttttccgacggcggccaatacgcgatgcgcggcgatgcgttgcgccaggccgagcgtatgatgctcgacggcgcggacatcatcgacatcggcggcgaatcgacgcggccgggcgcgccgccggtgccgctcaacgaagaactggagcgggtgattccgctcgtcgagcaattgcgcggcgcgaatgtgccgctgtcggtcgacacctacaagcccgaagtgatgcgccacgcattggccgccggcgccgatctgatcaacgacatctggggcttccggatgcccggcgcaatcgacgccgtgcgcgacagcgaatgtggtctgtgcgtcatgcatatgcttggcgagccgcaaaccatgcagctcggcgagcctgtctatgacgacgtggtgagcgcggtgcgggattttctcgaggagcgggtcgccgcgcttcagcaggcgggcgtcgcgcgcgcccgtattagcgtggatccgggtttcggcttcggcaaggccgtggtcgaacataattacgcgctgcttgcgaacctgccggatacggcaccgcgagccgagccgccgtatccgattcttgctggcatgtcgcgcaagtcgatgatcggcgcagtggtgggacgcgcggcgccggaacgcgttgcgggcagtattgcggcggcggtgtgcgccgctgaacggggcgctgcgattctgcgcgtgcacgatgtcgcgcaaacagtagatgcattgaaagtctgggcagccatgcgcgaagcggcgaatcacagccgcgcgcgcggt

SEQ ID NO: 13710 - DNA, 909 bp, Burkholderia fungorum
atgcgcattctgatagcgctgggcggcaacgcgctgctgcgccgcggcgaaccgatgacgatggcgcgccagctcgacaatatccgccgtgccgcgaagcagatcgcgctgctggccgacggcaaccagctggtggtcgcgcacggcaacggtcctcaggtcggactgctcgccttgcaggcggccgccgccggcggcgcggaaaacaccgcaccgctcgacgtgctcgacgccgaatcggaaggcatgatcggctatctgctcgaacaggaactggccaacgcattgcccgccactcgccacgtcgcgaccttgctcacgcgtgtcgaggtggacgcacacgaccccgccttcgcgcacccgaccaaaccgatcggccccgtctatacgaaggcgcaggccgaagcgctggcgcagcgcaacggctggagcattgcgccggacgggacggacttcaggcgcgtcgttgcttcgccgaagccacagcgcattgcggcgctgaaaccggttgaatggctcgtggagcacgacgtgatcgtgatcgcggccggcggcggaggcattccggtcacgctggcggcggacggccaaacccgcacgggtatcgaggccgtaatcgacaaggatctgtgcagcgcgctgctcgccgccgatgtcggcgccgatctgctgctgatcgcgaccgacgtggatgcggtctatgcggactggcattcgccgacgcagcgtgcgctgcgggagatatcggtagcggaattgaggtcgcttgcatttcccgccggctcgatgggtcccaaggtcgaagcggcgtgcgacttcgttacacgcaccggcaaacgcgcggtgatcggctcgctcgagaatatcgaggcgatggcggccggcacggcgggcacgcagatcagcccg

SEQ ID NO: 13711 - DNA, 897 bp, Burkholderia fungorum
atgtctgctgccattgtcgttgccgtcctgttcggggccgagcggccctgtgtgtgttcgctgtgtttgctgtgttcgccgaattcgcaccggttgagcacatgcctcgcgcatgcgcgcgagcccgtgtcgggtgacgcatcccgcgatcatagcaaggtacgcgacgccgtacctggcattcgctgcgcctcgcctgagcgccgcgccgccgtcgcttcgcggggcgcgacgcgttgcgcgcggcagcgcggcggatcggcgggcgcggcacgctacaatatcggcatgacacgcaaaacccgcattcaaaccatcgaatccgccgagccggaagtcgacgaaaacggctacgaccgtcccagcaagtcccagctcaagcgcgaaatgcacgagttgcaggaactgggcgcggcgctgatcgcgctgcccaaagacgcgctcaagcgcatgcccatgcccgaaaagctcgacgacgccgtgcgcgaagcgcgccgcatcaccgatcacgaaggcaagcgccgccaggtgcagtatgtgggccgcgtgatgcgctcgctgctggacgaagaaaccgccgcgctgcgcaccgcgctcgacacctacaacggcgtcaacaaggcggaaacggccaaacttcactggatcgagcgcactcgcgaaaagctgctcgccgacgacgccgcgctgaccgatttcatccgccagcacccgaacgccgacccgcagcagggccgcacgctgatccgcaacgcgcgcaaggaagcgcagcagagcaagccgccgcgctacttccgcgaactgttccagtggatcaagaacgcggacggcccgcccgcgcagaccgattccgaagccgacgacgcccaggacgacgaagatgacgaccgcgacgcc

SEQ ID NO: 13712 - DNA, 2934 bp, Burkholderia fungorum
atgaagctcgaacacccggatcgtctgatgaaccgcactcctctctcgctcgccgcgctcgaagtgcatgacgccttcgccgaacggcacatcggcccggattcggccgaccagcaagcgatgctcgaagccctcggcttcgcgtcgcgcgccgcgctgatcgacgccgtcattccgaagacgatccgccgcaccgaaccgctgccgctcggccccttcgcgcaaccgaaaagcgaagccgaagcgctcgccacgctgcgcgagctcgcggacaggaaccaggtgttccgctcgtacatcggccagggctattacaacgcgcacacgccgacggtgatcctgcgtaacgtgctggaaaatccggcgtggtacaccgcgtacacgccgtaccagccagaaatttcgcaaggccgtctggaagcgctactgaacttccagcagatgatcgtcgacctgacgggtctggcgatctcgaatgcgtcgctgctcgacgaagccacggccgcggccgaggcgatgacgctgctgcaacgcatcggcaagccgaagtcgaacgtgttctatgtggccgacgacgtgctgccgcaaaccatcgaagtggtgaagacgcgcgccacgccggtgggcattgaagtgaaagtgggcccggctgcggacgcggcgaacgcgaacgcgttcggcgtactgctgcaatacccgggcgtgaacggcgacgtgcgcgactaccgcgccctggccgaagcgatccacgccgcgggcggccacgtggtggtcgccgccgacctgctcgcgctgaccgtcctcacgccgccgggcgaatggggcgcggacgtggccgtcggcaacacgcagcgcttcggcgtgccggtcggcttcggcggcccgcatgcggcttacctcgccgtgcgcgacgaattcaagcgccagatgccgggccgcctcgtcggcgtgaccgtcgacgcgcaaggcaaccccgcgctgcgtctcgcgctgcaaacgcgcgaacagcatatccgccgcgagaaggccacctcgaacgtatgtaccgcgcaagcattgctcgcgatcatggccagcatgtacgccgtgtatcacggcccgcacggcctgaaaacgatcgcgctgcgcgtgaaccggatcgccgcgctgctggcagaaggtgcgaagcaactcggctacacgctcgtcaacgaaacgttcttcgacacgctcacattcgaaaccggcgcgcgcacgcaagcgctgcatgacgccgcgcttgcgaagcgcatcaacctgcgccgcgtgagcgacacgcaagtgggcctgtcggtcgacgaaaccaccacgcgccgcgatctggccgatctgctcgaagtgttcgcacaagccgcgggcgccaaaatcgtgccgcaagtggacgcgctcgactcgaccatcgccgcatcggatacggcatcggtgccgcccgcgctcgagcgcaccagcgcgtatctcacgcaccacgtattcaaccgccatcattcggaaacggaaatgctgcgctatctgcgcagcctgtcggacaaagacctcgcgctcgaccgctcgatgatcccgctcggctcgtgcacgatgaagctgaacgcgacctcggaaatgctgccggtcacgtggcctgaattcggccagatccatccgttcgcgccggccgagcaaaccgtcggctatcgcgaaatgatcgatcagctcgaagcgatgctggtcgcggccaccggctacgctgccgtgtcgctgcaaccgaatgccggctcgcaaggcgagtacgcgggcctgttgatcattcacgcgtatcacgcgtcgcgtggcgaagcgcatcgcaatgtctgcctgattcccgcttcggcgcacggcacgaacccggcctcggcacacatggccggcatgcaggtgatcgtggtggcgtgcgacgcgcaaggcaacgtcgatatcgaagacctgaagaaaaaggccgaacagcacgccgacaaactcgcggcgatcatgatcacgtatccttccacgcacggcgtgttcgagcagaacgtgcgcgaaatctgcgagatcgtgcatgcgcacggcggtcaggtctacgtggacggcgcgaacatgaacgcgatggtcggcctcactgcgccgggccagttcggcggcgacgtgtcgcacctgaatctgcacaagacgttctgcattccgcacggcggcggcggaccgggcgtcggtccggtcgcggtcggcgcgcatctcgcgcagttcctgccgaatcagatctcgtcgggctacgaacgcgcgccgaacggtatcggcgccgtgtcgggcgcaccgtacggctcggcgtctatcctgccgatctcgtggatgtatatcgcgatgatgggcgcgaagaacctcaccgccgcgaccgaaaccgcgatcctcaacgcgaactacgtcgcgaagaaactcgcgccgcactatccggtgctgtattcgggcccgggcggactggtcgcgcacgagtgcattctcgacctgcgcccgatcaaggaaaccagcggcattaccgtcgacgacgtcgccaagcgtctcgccgactacggcttccatgcgccgaccatgagcttcccggtgccgggcacgctgatggtcgagccgaccgaatcggaatcgaaggaagaactcgaccgtttcatcgaagcgatgatcgcgatccgcgaggaaatccgcgcagtcgaagaaggccgctcggaccgcgaggacaatccgctgaagcatgcaccgcatacggcggcggtggtcatcgcgaatgactggaagcatgcgtatgcgcgcgaaaccgcggcgtatccgctgcccacgctgatcgcgaaaaaatactggccgccggtcggccgcgcggacaacgtgtacggcgaccgcaatctgttctgctcctgcgtgccgatcgccgattacgag

SEQ ID NO: 13713 - DNA, 1338 bp, Burkholderia fungorum
atgactgaacagaagaaaaagctcgaaaagctgtccggcgtgaagggcatgaacgacatccttccgcaggaagccgggctgtgggaattttttgaaaccaccgtcaagtctatgctgcgttcgtacggataccagaatatccgtacgccgatcatcgagcatacgcagctgttcaagcgcggtatcggtgaggtgaccgatatcgtcgagaaagagatgtacagctttaccgacgcgctcaatggtgaaaatctgaccatgcggccggaaaatacggcagcggtggtgcgcgcggcgatcgaacacaacatgctgtacgacggcccgaagcgcctgtggtacatcggtccgatgttccgtcacgagcgtccgcagcgcggccgctatcgccagttccatcaggtcggtgtggaagcgctgggctttgccggtccggacgccgacgctgaaatcatcatgatgtgccagcgcctgtgggacgatctcgggctgatgggcatcaagctcgaactcaattcgctgggtctcgcgcacgaacgcgcggcgcatcgtgtcgaactgatcgcgtacctcgaaaagcacatggacgtgctcgacgaagaagcgaagcgtcgtctctacacgaacccgctgcgcgtgctcgatacgaagaatccggccatgcaggaagtcgcgcagaacgcgccgaagctgatcgattttctcggcgaagaatcgcgcgcgcacttcgaaggtttgcagcgcattctgaaggcgaacaatattccgttcacgatcaatcagcgtctcgtgcgcggtctcgattattacaatctgaccgtgttcgaatgggtgaccgacaagctcggcgcgcaaggcaccgttgcggccggcggccgttacgatccgctgatcgaacagctcggcggcaagcccacggcggcatgcggctgggcaatgggcatcgagcggatcctcgaattgctgaaagaagagcaactcgtgccggaagacgaaggttgcgacgtgtacgtggtccatcagggcgaggcggcgcgcgaacaggccttcatcattgccgagcgtttgcgcgacacgggcctcgacgtcatcctgcattgcagtgccgacggtcagacggccagcttcaaatcgcagatgaagcgtgcggatgcaagcggcgcggcctttgcggtggtgctcggtgaagacgagatcgccaacggcacggtcggcgtgaaaccgttgcgcgatacgaatgctgacggcggtaaaaacgagcaacacaacgtgcccgccgaagacttgaccgaatttctaatcaatgcgatggttgcaaccgccgaagacggcgacgac

SEQ ID NO: 13714 - DNA, 1752 bp, Burkholderia fungorum
atgtctgtcccgacacacggcgcgcttcgcgcgcctttcacttcgcttcgtttcgcccggatcctgacggtgtcggcaatgcttgccgcgttcaccggcggcgcgctcgcgcccacggccgcgctcgcgaaaacgccgctgcccaaggccgtattcgacgcgtcggcggtggccgtgccggaccgctacagcgcggacacggcgcagcagattttcgcggccggcggcaacgcagtcgatgccgcggtcgcgatcgccttcacgctggccgtgacctgtccggacgcgggcaacctcggcggtggcgggttcatgaccatgttcgtggacggcaaaccgtacttcctcgactatcgcgagcgcgcgccgcagcaggcgacccgcgacatgtacctcgacgacaagggcaatctgctgccgggcatgagcgccgtcggccatcgcgcggtagccgtgccgggaacggtggagggcatgtgggaggcgcagcggcgtttcggcaagctgaagtggaagcaggtgctggcgcccgcgatccgctatgcgaccgagggcttccaggtcgagccgtggttgcagcagcgccgcgacgcagcggcgaagagcttcgccggcaagaccaatttcgacgcctatttttcgggcctgaaggcgggcgtgacataccgccagccggaactcgcacagacgctgtctcgtattgcgagcgacggcgggcgcgaattctacgagggccgcaccgcggacctgatcgcccagcagatgtacggccacggcctcgtcacgaagcaggacctgatccagtacaaggccgtgtggcgccagccgctcaccgccgactggaacggctatcgggtcgtcaccgcgccgccgccgagttcgggcggcatcgggctgatccagatgctgaagatgaaagcggatctgaagcaggcgttcgacggactcgacctcaattccgtgccgtatatccatctgatcgcccagatcgaggaccgcgtgttcggtgaccggcagcaatacctggccgatccggattcgttcaaggtgccggtcgacaaactgatcgacgacgcctacctcgcgcaacgcgccgacgaagtcaaacccgacgaagtaccgggcgcggcgccggttacgccgggcctcggcgacgccgcaccggagaaagcgcaaaccacccatttttcggtggtcgacaagtggggtaatgccgtgtcgaacacgtacacgttaaatggagacttcggttcaggcgtggtggtggacggcggcggtttcctgttgaacgatgcgatggacgacttcgtcaccaaaccggccggtgcgagcccgtcgggtgcgggcagcgccgaagtcaacacggtggcgcccggccgccgcccgctatcctcgatgacgccgaccattctgttgaaggacgacaaggtgtcgctcgtgatcggcacgccaggcggctcgcgcatcctgacgtcgattttccaggtgatgaccgacctgtacgacttcaatctgccgcccgccgacgcgctcgccgcaatgcgctttcaccatcagttgttgccgcagaagacgatctatttcgagccgtatcgtccgatcacgggggaactggccgagcagttgcaagcgaagggctacacgctcgaagggcagtcgttcaacggtgacgtgcagatgatccgcatcgagggcgcgacgcccgaaccggcggcggaccctcgcggcgtgggcgtggcgcgcgtgatgcat

SEQ ID NO: 13715 - DNA, 3516 bp, Burkholderia fungorum
gtgcgtctgacctcgatcaaactcgctggcttcaagtcattcgtcgatcccacgcatttccaggttccgggccagctagtcggcgtggtcggaccgaacgggtgcggcaagtccaacatcatcgacgccgtgcgctgggtgctcggcgaatcgcgcgcctccgaactgcgcggcgagtcgatgcaggacgtgatcttcaatggctcgaccgcgcgcaagcccggcagccgcgccagcgtcgaactggtgttcgacaacgccgacggccgggccgcgggccagtggggccagtatgccgaaatcgccgtcaagcgcgtgctcacgcgcgacggcacctcgagctactacatcaacaatttgccggcgcgtcgccgcgacattcaggacatcttcctcggcaccggtctcgggccgcgcgcatacgcgatcatcgggcagggcatgatcgcgcgcctgatcgaggcgaagccggaagagctgcgcgtgttcctcgaagaagccgcgggtgtgtcgaagtacaaggaacgccgccgcgaaaccgaaaaccgtctgcacgacacgcgcgaaaatctgacacgggtcgaggacatcgtccgtgaactgggcgcgaacctcgagaagctggaagcgcaggccgtggtcgccacgcgttacaaggaactgcaggccgacggcgaagagaagcagcggctcttgtggctattgcgcaagaacgaagccggtggcgagcaggaacgccagcagcgcgcgatcgaacaggcccagatcgacctcgaagcgcacaccgcgaagctgcgcgaagtcgaagcgcaactcgaaacgctgcgcgtcgcgcattattccgcgagcgacgcaatgcagggcgcgcaaggcgcgctctacgaggcgaattcggaagtcagccggctcgaagccgagatcaagttcatcgtcgaatcgcgcaatcgggtgcaggcgcagatcgccgcgctgaacgcgcagcgtgagcaatggcagtcgcaggcgcaaaaagcgcaagacgatctcgcggacgccgaagaacaactggcggtggccgaagaaaaagccacactggtcgaagacgaagccgctgccaaacacgacgcgatgcccgcgctcgaagctcgctggcgcgacgcgcaaaccgaactgaacgccgagcgtggcgggatcgctcagaccgaacaggcgctcaagctcgaagccgcgcatcagcgcaatgccgatcagcaattgcagcaactgcaggcgcgtcacgagcggttgaagtcggaagcgggcggtctcgacgcacccgacgaagcgcagctcgaagacctgcgcatgcagcttgccgagcacgaggaaatcctgcacgacgcgcaaacgcgtctggccgacgcgcaggaaacgctgccgcgcctcgacggcgagcgccgcgcagcgcaggagcgcgtgcaggcggaaagctcgcagattcatcagctcgacgcgcgccttgccgcgctcaagcagttgcaggaaaacgtccagaccgaaggcaagatccagccgtggctcgaaaagcacgagctgaacggcctgccgcgtctgtggaagaaactgcatgtcgaagccggttgggaagccgcgctcgaagccgtgctgcgcgagcggctcgccgcgctcgaagtgtcgaacctcgactgggtcaaggccttcgccaccgacgcgccgcccgccaagctcgctttttacgcgccgcctgtcgccggtcagcctgccgccacgccgcctgcgctgcggccgctgctgtcgctggtgcggatcgacgacgcgggcatccgcgcggtgctgaacgactggctcggcctttcgttcgtcgccgacgatctgcagcaggcgctcgccatgcgctcgcaattgccggaaggcggctcgttcgtcgtcaaggcggggcatgtggtgacgcgcgtcggcgtccagctgtatgccgccgactccgagcaggccggcatgctggcccgtcagcaggaaatcgaaaatctcgcgcgtcaggttcgcgcccaggcgttgctcgcggacgaagcgaaagccgccgcgatccgcgccgaagccgcacacacgcaggccgcgcaggcattgaccgacgtgcgccagcaggcggagcgcgccacgcagcgcgtgcacgcgttgcaaatggacgtgctcaaactcacccaggcgcacgagcgttacacccagcgcagcacgcagattcgcgaggaacttgcagagatcaccgcgcagatcgaagagcagcgcgccatgcgcgcggagtcggaagcgaacttcgagcgtcatgacggtgagctcgccgaactgcaggcgcgtttcgaagatcatcaactggcgttcgaagcgctcgacgaagaactcaccgccgcgcgcggccaggcgcgcgatctggaccgtgccgctaccgacgcgcgctttgccgcgcgcaacatggcgaaccgcatcgacgaactgaagcgcagcattcaggtcgcgcacgagcagagcgagcgtgtcgcggcgtcgctggaagacgcgcgcgccgagctggaaaccatcaacgagcagaccgcgcacaccggcttgcaggacgcgctcgatattcgcgccgtcaaggaagaagcgctgcacgccgcgcgcctcgaactggacgatctcaccgccaagctgcgtgccgccgacgaaacgcgtctgacggccgagcgcgcgttgcagccgctgcgcgaccgcatcaatgaactgcagttgaaggaacaggcggcgcgcctgaacggcgagcagttcatcgagcaacttgccgcggccggcgtcgatgaggcgcagttgcaggccaagctcacgccggacatgaagccgtcgtatttgcagggcgaagtcacgcgcatcaacaacgccatcaccgcgctcggcccggtcaacatggccgcgctcgacgaactgaaggcggcgaccgagcgcaagtcgttcctcgacgcgcagtccaccgatctgaacagcgcgatcgaaacgctcgaagacgccatccgcaagatcgacgcggaaacgcgcacgctgctgcaaggcaccttcgatcaggtgaaccagcatttcggcgaactgttcccgcgtctgttcggcggcggccaggcgaagctgatcatgaccggcgacgaaattctcgacgccggcgtgcaggtgatggcgcagccgccgggcaagaagaattcgacgattcacctgctctcgggcggcgaaaaagcgctgaccgccaccgcgctggtgttcgcgatgttccagctgaaccccgcgccgttctgtctgctcgacgaagtggacgcgccgctcgacgacgccaacacggaacgtttcgcgaacctcgtgcgggcgatgtcggacaaaacccagttcctgttcatctcgcacaacaagatcgcgatggaaatggcgcagcaattgatcggcgtgaccatgcaggagcagggcgtgtcgcgcatcgtggccgtcgacatggaaacggccgcgggtttcgcccagaatatcgtt

SEQ ID NO: 13716 - DNA, 3147 bp, Burkholderia fungorum
atgttgcataaggggcggctgtcgacaaaactgaagccacactacgtcgttgagggcagcctcatgatgccgggcaaaactgcgtcgaaggtcgacggttatctcttccagcaaggcgtcgtatgcgcattgcgtacgttggcgggtgcctggttcgtgatggctgtcagcgtttcccccgctcaagccgcctgtgcgcccgatggccagggcggcatcaccaatagcggcggcacctgttcggtcgccccgcccgtcaaccgcatcactgcaaccggcagtggcaccaccaccgcacccggtgtcacgctcgccgtgccgtatggcatcgccgtgacagcatcgggaggggcgtcggtcagccttggccgaagcgacgccggcggcgcgccggcgatttcagctctgaacggcggcggcctcacgggcctgtttgcgaccggggtgtccagtacgatcacggcggacagtctcgccatcgggcttccttcggggggcggcaacgcggcggcgagagcaaccgccggcggccacatcacgttcctgaatagcgcaaacatcaccttcgtacctggcggcggtggcggcacgggcctgctggccgatggcgcaggcagccagattaccggcaccaacgtcaccgtggcaggcgcgggcggcggcggggattatgtcgcacacagcaacaacggcggggatatcgccttgaccggcggcgcactcagcctgaattcccccggcggtggcggagtggcggtgctgtcggaaaacggcagcaccttcaccggcgacggcgtcgccatcagcgtgtccgcttcagggggagatgccgcggtgaagtcggtcggcaacagtcatgtttccctgagcggcggctccgtcacgctgaacggaacaagcggtgagaccggcttgctggcacaaggcgcgacgcttaccgccgtcggcgtgcctgtcagcgtgacggccagccagtcgtccgccggcaccgtgcagggcggcggcacgctcgcgattaccggcggttcggtgacggcgtcgggcagcggcacggtcgggatgctcgtcaacggagcggcgggcgcggccaatacgctcgcgctcaacgatacgaccgtcacatcgacagccgactcgctgcatgtcgtgggcgcgaatgcgaacatcacggcggcgggatccaccatcaccgacaacaacggtgtgctgctcagcacaaccggatctccatcgacgaccacattcgacgcgggcgcgtcgacacttggcggagcgatcacgaccggtgccggcaccacgacgaccgtcacgctgcacgacgataccgactggaccgtcacgggcaattccacggcgaccaacctgaccaacagcgcgagcaatatccacttcacggcgccggccgacccgagccaggccgccagctacaagacgctccaggtgcagaactacactggcgcagacggcaacctccatctcaacacgtttctcggcagcgacgacgccccgtcggacaaactgatcgtgagcggcggcaccgcgaccggcacgacaaatctcacgatccacaacacgaccggcccaggcgacatgacggtggccgacggcatccaggtcgtgcaaaccctcaacggcggaacgacggcatccgatgccttcacgctgaccggcagattacgcgccggagcgttcgactacctgctgttccatggcggcatcggcggcagccgtcccaatgactggtttctccgctcgagcttcgtcgtccccgagtcgatcacaccgacggtgccattgtcgccggcgacaccttcgtcgccacctggagagccgggtacaccttcgtcgccgcccggagagccgggaacgccttcgtcgccgcccggacaaccgggtacaccttcgtcgccaccaggacaaccgggtacaccttcgtcgccaccaggacagccaggtacaccttcgtcgccaccaggacagccgggtacaccttcgtcgccaccaggacagccaggtgcaccttcgtcgccaccaggacagccggaaaccccttcgtcgcccggacagcccggcggccagacgacgctggacgtatcccggccttttccggccgacccgccagccagcccgctacagccgggcgtgacctatccggtcatcgggcctgaactcgccacctatggcgtggtccagccggttgcccggcagatgggcttcacgatgctcggcacgctgcacgagcgcatcggcgacacgttgacggccgacaacgccggccctgacagcgaaggctggggacattccggctgggcacgcttcttcggccagcagatcgacaaccgctaccaggcgttcgccagtccccgtgccaccggccaactgctcggcgtgcaggccggggtggacgtctggcgcggcagcctgatgcccggccaccgcgatgtcgccggcgtctacttcgcctacggcaacagcaacctggatgtggacggactcgtcacgaacgccacggccactgcctatctcctgggccgcaccggcaagctgaatctcgacgcctattccggcggcgcctactggacccattacggccccggcggctggtatctggacctggtgctgcaaggcacgtcctaccagggcgaggcgacgacgcagtcggccaggctgccgaccacgggcgacggtttcgtcacctcgctggaggccggctatccggtgccgctgccactcggcccccgcttcgtgctggagccgcagatccaggtgctgtggcagcgggtcagcttcgaccaggaaaacgatggtctgggcccggtcgacctcggctcaaccaccggcaccaccggacggctcggcttgcggggccagtggaccatcgacggtgaccacggccaggtgtggcaaccgtatggccgcgtcaatctgtggcacgactggggcgggcgcgcgacaaccctgtttggcgtcgatcaggtgccgctgcgggacgcagcaacgcggctggagttcgcagccggcgttaccgcgaaggcaactcttcgtctgagtctctatgctcaggccgggtatcagttcgctgtgggagccggtgaaaatagccggcggcagggggtgcagggcaatctcgggctccggtacacctgg

SEQ ID NO: 13717 - DNA, 963 bp, Burkholderia fungorum
atgattcgccatttccaaccggcgcggcgtcgcgccatcgtagccggcgcggccttcctcgccgcgtcgattctgccggtgcccgcggcattcgcccaggctgcccataaaccgaaagtcgcgctggtcatgaagtcgctggcgaacgaatttttcctgaccatggaaacgggcgccaaggattatcagaagcagaatccggcgaaattcgacctggtgacgaacggcatcaaggacgagaccgacaccgcgaaccagatccgcattgtcgagcagatgatcgtctcgaaggtcgatgccctggtgatcgcaccggccgactccaaggcactggtgccggtcctgaagaaagcggtcgacgccggcatcatcgtggtcaatatcgacaacaagctggacgacgaggtcctcaagtcgaaaagcctgaatatcccgttcgtcgggccggataacgcgaaaggcgcgcagaaggtcggcgactacctggccaaacacctgaagtcgggcgacaacgtcggcattatcgaaggtgtcaccaccacgaccaacgcgcagcaacgcacggcgggcttcaggcaggccatgcagtcgagcggcatgaaggtcgtcgcgctgcaatcgggcgagtgggaaatcgacaagggcaacgccgtggccagccagatcctcaacgcgaacccggacgtcaaggccttgctgtgcggcaacgacaacatggcgatcggcgccgtgtcggcggtgcgcgcggcgggcaagcagggcaaggtgcaggtggtgggctacgacgatatcaacgcgatcaagcccatgctcgccgacggccgcgtgctcgccaccgcgaatcagtatgccgcgaagcaggcggtgttcggcatcgacaccgctttgaaggcgctctccgaacacaagaagcagtctgaattgtccggcgtcgtcgaaacaccagtcgatctggtcaccagg

SEQ ID NO: 13718 - DNA, 1146 bp, Burkholderia fungorum
gtgaacatctcggcgctgttcatccgacgcccggtggcgaccgcgctgctggcgatcgcgatcctgatttcgggcgcgctcgcgtatttccggctgccggttgcgccgctgccgaacatcgcgtttccggtgatcgcgctgcaggcgaacatggcgggcgcgagcccggaaacgatggccgcgaccgtcgccgagccgctggaacggcggctcgccaccatcgccgacgtgaaccagctcacctcgatcagctacgtgggctcctcgatgatcatcgtcgtgttcggcctgaaccgcgacatcaacggcgcggcgcgcgacgtgcaggccgccatccaggccgcgcgcgccgatctgccgaccacgctgcgcagcaacccgacgtatcgccagtacaacccggccggcgcgccgatcatggtgctcgcgctgacctccgacacgctgaccaaagcccagctctacgactcggccgattcggtgatccagcagcagttgtcgcaggtcgacggcgtcgggcagatcacgctgggcggcggcgcgttgccctcggtgcgcgtcgagctggaaccgggcaagctgaacagctacggcatcggcctggaagacgtgcgcgccgcgatcggcgcggcgaacgcgaatagcgcgaaaggccacatcgaccagggcgagcagcgctatgtggtcacgtcgaacgatcagatcagcaaggccgcgccgtatcgcgacgtggtgatcgcctatcgcgacggcgcaccggtcctgctgcgcgatgtcgcccaggtgcgcgattcgaacgagaacatccgcaacgccggactctacaacggcaagtcggcggtgctcgtgatcgtctatccgacgcctggcagcaacgtggtgcagacggtcgagcagatccgctcgcgcctgccgatcatcgaagccgcattgccgagcgcgatccacgtgaatgtcgcgatcgaccgctccggagtcggtgcgcgcttcggtggccgacaccgagcgcacgctgttcatcgcggtgctgctggtggtgggcgtggtgttcgtgttcctgctgtcgccgcgcgccacgctgattccggcggtcgcgctgccgctctcgatcgtcggctcgttcggaccgatgtatctgctcggcta

SEQ ID NO: 13719 - DNA, 720 bp, Burkholderia fungorum
atgcgagtcggattgttcgttacctgcctgatcgacctgatgcgtcccgagatcgggttttcggtcatcaagctgatcgaagccgccggtttcgaggtggtggtgccgcccgcccaaacctgttgcgggcagcctgcgtataactcgggcgaacggcgcattgcgcgcgatctggccgagaagactctgcgcgagttcgaacagttcgattacgtcgtggtgccgtccggttcgtgcggcggcatgatccgcgcgcattacggcgatctttttgccgacgacccggaattgatgaaccgcttcggccggctgcgcgccaaggtgttcgagttgaccgatttcctcgtcaacgtggccagggtgcagttgcaaccgggcgagttcgcgggtgaggtgacgtatcacgattcctgctccggactgcgtgagctcggcgtgaaagcgcagccgcgcgccttgctggcacagatcggcgtgacggtgaacgagatgaaggattgcgagcattgctgcggcttcggcggcacgttcgcgctcaaatacggcgatatctccacggcgatcgtcgacgagaaatgcgcgaatatcagcgcgagcggcaccggcgcggtggtgctcggcgacctcggctgcatgctgaatatcgaaggccgtttgcggcgtaccggcgacacgaccacgcgggtgctgcacatcgcacaggtgctggccggcgacgtg

SEQ ID NO: 13720 - DNA, 417 bp, Burkholderia fungorum
atgacgacgaaacgactcttgaccgaagccgaaatcctgaagatgagcgacaaggattacatgaatgaggatcagctcgccttcttcaagaacaagctcgaacagctgcaagcggacattctccgcaatgccggccagacgaccgagaatctgcgcgagacggtcatcgtgccggacccggccgaccgcgcaacgatcgaggaagagcatgcgctcgaactgcgcacgcgcgaccgcgagcgcaagctgctgaagaaggtgcagcaatcaatcgcgcgcatcgattcgggcgaatacggctggtgcgaagaaaccggtgagccgatcggcattccgcgtctgctcgcacggcccacggccaccctgtcgctcgaagcgcaggagcgccgcgaattgcgccagaagctgttcggcgac

SEQ ID NO: 13721 - DNA, 5025 bp, Burkholderia fungorum
atgaccacagccaaaccggatctgctttccctcgcgtcgcgcttcgcactgttgccggatgcgcagcgcaaagcttttctcacgaagctcgacgccgctggcatcgactttcgcgtgctgccgattccgccgcgcgccgagcggaccgcgagcgtgccggcttcgttcgcgcagacgcgtttgtggctgcatgcgcggatgatcgacgaaccggccgcgtaccacatcaccgaacgcctgcggctcgacggcgcgctcgatgccaacgcgctgcggctttcgtgcgatgcgttgatcgcccgccacgaagcgctgcggacgaccttcaccgaaagtgcggacggcgtgttgcagacggtccatgcgccgtcgcgctgcccgtggcgcgcgagcgacgtgagcgcattgcccgccgatcagcgcgaagcacgtgccgccgagattgcacgcaccgacgaagcgaagtccttcgatctgtccgtcgggccgctgctgcgcgctcacctgattcgcctcgacgcgacgactcactggctcgcgctcacaacgcatcacattgtctccgacggctggtccgccgacgtgatgctggcggaactcgcttcgttctatcgcgcctatgcgaaaagcgaagcggtgtcgcttgcgccgttgccgatccagtacgccgatttcgcgttgtggcagcgccgctggctcgacgcgggcgagcgtgaacgtcagttggcattctggcgcgagcggctggacgcgaatcgcgacgtgctgatgctgcctggtgcggcaccgcgtccggctcagcgtagtgcgcgtggcgcgcggcatcgtttcgttctcgatgccgcgctcgttcagcaggtgaagacgctcgccaatgcgcagcgtgccacgccattcgccgtcttgctcgcggcactgagcgcgttgctcgcgcgctcttcgggtgacacgcagatccagatcggcgtgcccgcggcgaatcgcgagcgcggcgaagtgggcggtctcgtgggctttttcgtgaatacgctcacgcttgccacgccggtgccgccggcgcagccgtttgccgcgctggtcggcgcgacgcagcaaacgctgatcgacgcgcagtcgcatcaggacgtgccgttcgaacaggtagtcgaagcgctcggcgtggtgcgcagcgcaagtcatcatccgttgtttcaggtgatggccgcttatggcgcgcgccgccgtctgccttcgctcgcagaggtgcggatgacggagttgccatcgggcgcaccgtttgccaagttcgatctgacgctgagtttcgaggagcgcgacgacggttcgatcgacgcgtatttcatctacccgctcgacctgttcgacgccgatgcgatagcacgcctagccgcgcgattcagcgagttgctgtcgaacgcgacggcgacacccggcgccgcggtgggagatttgcaatggttgcccgaatcagagcgcgcgcaactcgacgcatggaatagcacgaagctgccgcgcgacacggcgttcaggccggtgcatcaacgtgtggccgatcacgcccgtgcgcagccggaagcccgcggcgtggccgatgtgaatcgcgcgctcacgcgcggcgaagtggacgcgcaggcgacgcgtttggcacaacgtctcgtcgcggcgggagtgagtgcggaaatgcgggttggcgtggcgctgagccgctcggtcgatctgctggtcggcctgattgccgcgctgaaatcgggcggcgcgttcgtgccgctcgacccgagccacccgcgtgagcgtctcgcacagattctcgacgacgcgcagatcacgcacgtcatcacggaacgcgcaagtctcgcggcgttaccgcaatcggaccgcttacgcctgtggctggtcgatgaggaaccgcaacccgaggagcactccgcagcgaatatagcgttgccgtccgtgtcgccgcatcaggccgcgtatgtcatctatacgtcgggctcgaccggcaagccgaagggcgtagtggtcgatcacggctcgttcgcactgcattgcgcggcgattgccgagcgctacggtgcgggcgagcgtgacgtgttcctgctgttccagtcggtcaatttcgacggcgcgcatgaaggctggttctcgcagtacatgtccggtgcagcggtcgcgatcacggcggacacgttgtggccgcccgcgcaaacctgccgcatgatggtccgcgaaggcgtgaccatgacctatgtgccgcctggttgtgcaacgcaactcgccgagtgggcgctcgcgcatggtgcgccgcccagcttgcgttcgttgacggtgggcggagaggccacgtcgcgcgaagcgttcgcgctcatgcgccgggcgtttccggaagcgcgcatcgtcaacggctacgggccgactgaaaccgtcatcacgccgatgctgtggatgttctatccgaccgacagcaccgcgaaactcgcggacagcgcctatctgccgatcggcacgctggtcggcgcgcgttcggcgcatgtgctcgatgcacgcctgaatccgctgccggtcggcgtgatcggcgagctgtatctgggcggcgagggcgtgggtgtcgcgcgcgggtatctcgaccggccggcgctcacggcggagcgtttcgtgcccgatccgttcggcgcgtcgggcgctcggctctatcgcacgggcgacctcgtcaaacggcgcgcggacggtgtgttcgactttatcggccgcgtcgatcatcaggtgaagctgcgcggcttgcggatcgaactcggtgagatcgaagcacaactcgccgcgcacgacgatgtgcgcgaagccgtggcggtcgtgcatggcaagggtacgcacgcggtactagtggcctatgtggaactgagcgccgaagcgcgcgagcgcagcacgcgcgcggacgcagccgagctcgacgcgcatctgcgtcatacgttgccggactatatggtgcccgcgcatatcgtggtgctcgacgcattgccgcgcaatgccaacagcaaggtggaccgcgcggcgttgccggaaccgcagcgtgtcgagcgagcctatcaggagccggcggctggactcgaaaccgcgctggcgcagattttccgtgaggtgctggatgtggagcgtgttggccgcgcggatcacttctttgaactcggtgggcattcactcgcggcggttcgcgtggcgacgcgcgtcgccgaacggctggcgcgcgaagtgccggtgcgcacgctcttcgaagcgccgacgcttgcgcaatacgcgcagcgggtcatggcctccgcacgcagcgaaacggtcgcggatatgggcgatgaaccgtcgaatagcgtttcatcgcattcacgtattgcgccggacgcgaacggtgtgctgccgctctcttccgcgcaattgagcttgtggttcctgtggcgctcgcaaccggagagcgcggcctacaacattcctgtcgcgttgcgtctgcgtggaccgctcgatgtggttgcattgcgtgaagcgtttgctcaagccgccgcgcgacatcccgcgctacgggtgcggctcgtcgagcgcgatgggcaattaccgggccaaagagtcgccgggccggggccggttgaattgcctgtggtcgatctttccggcgatcctttgcgtaccgaacgcgaacgcgccgctatcgcgctcaccgatcaggacgcactcacgccgttccgcctgctcgacgatgcgccgctatggcgcgtgcgtttgttgcgcgttgccgagcaggatcacgtgttgtcgctggtggtgcaccacatcgtatcggacgggcagtcgatcgatctgtggctcgaagacgtacgcaccacgtatgtcgcgatcgtgcacggcgcttcgcccgcggccttcgcgacggtagcgccttcacatcaggagctggtcttgccggttgccgcgccgcgagcgcgcctgtcgttctggcgcgatgcgttggccgatgcgccatcgcaagtgttgccttcgccgccatcgggccgggccgcgtcgccgggttggagcgccggccgtcatgcgttcgaattcaacccggccctcgtgcgccgcgctcgttcgctggcgctggaagtccacgccacgctgcccatgttgctgcatgcggcgctgaacgtcgctttttatcgggcgacgggagccacggatcagcccgtgggcgttctcgcttcgacgcgtgaactgaccggcgaagccgcgcgccgcgcgctcggactcttcatcaatgcagtcgtcgtgcgtacgcggctcgccagaacggatacgcccgtcacgctgcttgccgaagtccgcgacgccgcgcttgccgcttatgcgcatgcggacacgccgttcgccgacgtggtggcggcattgcgcgccacacgcaccgaagccggcaatccgctcttttcggtgatgttcaactacctgcggcctgcggggacagcgcaacgcgactgggccggtctcacgctcgacgatttcaacgacgtgcggcaccgggtcgtgttcgagttggaactggatgtggtcgagcatgccgacggacgcattacaggtgcgttttcgtatgcgaacgaactggtggacggcgttttcgtcgaggcgctgagcgacgattatctgaatgtcgtgcagcagttcgtcgatgcgccacacgaacaactgggcgttgcatcagcgcgctttccgttggagccgggaagcgctgcaacaaacgcgcggcggaacccgacatctcacgacgaagcaacgcagcgcgcccaggcgctcgaacgcatctggagcgctctcttcgaaggcaacacgcccgcgcatcacgacgatctgttcgaagcgggcgccagttcgttcgacgtggtgcgctttgtggatgcggcgcaagccaccggtcacgcgctggagattgccgacgtgttcgccgcgccgacctttgcgcaactgggagcgcggctcgttgcgcgcgcatcgaacgtcgccgagttgcgcgacggcgcc

SEQ ID NO: 13722 - DNA, 1020 bp, Burkholderia fungorum
atgaaagccgtcggtctctatcgttatttgccgatcgatcaagccgaagccttggtcgatgtggatatccccaaacccgaagccagcggtcgtgatctgctggtgaaggtggaggccatttccgtcaatccggtcgacaccaaagtgcgcgccccgaaagacacggtcgaaaaatcgccgcgcatactcggctgggatgtcgccggcaccgtggcggcggtcgggccggaggtcacgctgttcaaggtcggcgatccggtgttctacgcgggcagcatcacgcggcccggcgccaacagcgagttccatctggtggacgagcggatcgtcgggcgcaagccggcgtcgctcgacttcacccacgcggccgcgctgccgctgaccgcgatcaccgcctgggaagccctgttcgaccggctcggcgtatcgccgcaaggcgcggacgaaggccgcacggtgttgatcatcggtggagcgggcggggtcggctcgatcgggattcaactggcaaagcagcttgcgaagctgaaggtgatcgcaaccgcatcgcggcccgcatcggcgaagtgggccacggagctgggcgcggatcacatcgtcgatcatttcggcgacatgcccgcgcaattgaaaaagctcgggatcgacgaggtcgattacgtgctgatgttcaatgataccgacaggaacttcccggcggcagccgaagtcatcaagccgcaaggcggcatctgcacgatcgtggaaaacagccagccggtgccggtcgaactgttgaaggcgaagagcgccgcgttccactgggaattcatgttcacgcgttccatgttcggcacgcctgacatgatcgagcagcacaagctgctgaccgaagtggcgcgtctggtcgactcgggcacgttgcgcaccaccgtcggccaggatctcggcaccatcaacgccgcgaatctgcgccgcgcgcatcaactgctcgaagaaggacgggcaatcggcaagctggtgctgaccggcttcgaggcc

SEQ ID NO: 13723 - DNA, 876 bp, Burkholderia fungorum
atggcatcaagatccctgttgttcataccgggtgacagcgagaagaagctggccaaaggagagtcaactgccgctgacgccttgattctcgatctcgaggattcggtttcagcctcgcgcctgcagatggcgcgcgggctcgtacatgagtatcttgccgcgcgccgtaaggatcgtcgtcagaagctatgggtgcggattaatccactgtcgtccccgctcgcgctgcaggatctcgcgcaggtaatcccgggcagacccgatggcatcatgctccccaagctgaagtcggcaaaagaggtggtgacgctggacaactacctgtccgcgttcgaggccgcttccggccaggagccgggacagacgcagatcattcccgtggcgaccgagactgccgcaagcatattccggctcggggagtactcggggatcagctcacgaatcgccggcctcacgtggggggcggaagatctcgcgactgcattgggagcccgcgaaaaccggcagcccgacggcacatatgaccttacctatcagctcgcgcgctcactttgtctgcttggaagcgccgctgcctcggtgccggcaatcgacacgatcacggcggattttcgtaacgagtccctcctgcgaagcgagtgtgatgacgcgaggcgggccggattcaaggcaaagatggcgatacatcctgatcaggttcccgtcatcaatgagctctttctcccgggtgaagcggaagtcgtccaggcaaggcggatcatcgaggctttcgaacaggccgacggcgcggggacggtacaactggacggcagcatgcttgacatgcctcacctgaaacgtgcgcgtgacgtcatcgggatggtcaacggcttgtca

SEQ ID NO: 13724 - DNA, 468 bp, Burkholderia fungorum
atgttcaatgtcgttctcgtagaaccggaaatcccgccgaacaccggcaacgtgatccgtctgtgcgccaacaccggcgcccggctgcatctgatcgaaccgctcggctttccgctcgacgacgccagaatgcgccgcgccggcctcgactatcacgagtacgcgcaaatgaacgtgcatgccgactgggcggcgttcatcgccaaagaatcgccggacccggcgcgcatgttcgcgttcactacgcgcggctcgggccgctttcacgagcgcgcgtttcaatccggcgactggttcgtgttcggcgccgaaacgcgcggcctgcccgacccggtgctcggccagttcgccgacgaacagcgcgtgcgcctgcccatgcggccgggcaaccgcagcctgaacctgtcgaataccgtcgctgtcgtggtgttcgaggcctggcgtcagaccggcttcgaaggcggcgcc

SEQ ID NO: 13725 - DNA, 2139 bp, Burkholderia fungorum
atggctagccttgcgcgtgtgattcacgactttcagaacggcgagctgtcccgtgacgagttcgtggctcaactcgacagcacgttgaccaccgaaggactcggccccacgcagctgctggacatgcttggcgcagcacatcgcaaagcgccgctacccgacgatctctatgtggaagtgcggcggcgcatcgagcagttgcgcgtctcgaacgtggcggcgggcggcgaggaaaccggcatccagaccacgctcgacattccgtcgcggcgtgaggcgagcgcaggcagcgcacccaatgccaatgcggcgggatccgaccagatcaaaggcaccggcgatacattgaacaaccgtttcgtgctcgaagaatgccttggcgtcggcggtatgggcacggtgtacaaggcgctcgacctgcgcaagctcgaagcctcggatcgcaagccatacctagcgatcaaggtgctcaacgtccagttccgcggcaacccgaattcgctcgtcgcattacagcgcgaggcacgcaaggcgcaggtgctcgcgcatcgcaacatcatcacggtgtacgacttcgaccgcgacgggccgatcgtttatctgactatggagtacctgtccggcaagccgctcagccagttgctgcgcacgccgggctatcagggcatgccggtgcgcgcggcactgccgatcgtgcgcggcatgagcagcgcgcttgcttatgcccacgaacgcggcttcgtgcattgcgacttcaagcccgccaatgtgtttctcacaacgaatgccgaagtgaaggtgatcgatttcggcattgctcgcgtgtttcagcgtccggaagaggagagcgacgcgaccgtcttcgatcccggcagcctcggcgcgttgacgcccgcctacgccagcccggaaatgatcgagcaccgcgagccggacccgcgcgacgatatctatgcacttggctgcattacgtatgagctgctgacgggacatcatccgttcgaccggttgtcggcgacgcaggcccgcaatgccgatttcaagccgcagcggcccgccaatcttgacgcgaaacaatggcgtgcgctgcgtgccgcgttgtcgttcgatcgcaatacgcgcatgccgagcgtggagcgcttcatcgccgagttcgataacgaagctcgcgcggaaaagtccggcacgctggcgaaggtggggctcgcgagtttcgcggtggtgtgtgccgcggcagtcggcgtattcgcgttccgctcggcgccgaaccggcagcacgggccacaggctgaggcgggcgcttcgcagagtctggcggagcaggcggcatcttcgtcttcgtcgctgtcgtcttcgggtgacgcggtgtcggcgccggttgccgcgcagcctgcgacacctccggcaagtcctgttgcggcggcgtccgctatgccacctgcgccgccgcccgtacccaagccggcgctgaccctcgccgccgtcatgcctgcgctaatgcaggtgccctgctccgctttggccgcttcggtacaggatcactcgctgacggtgcgcggttacgtctcgcagcgctacggcgcggcgcatctgaaggacacgctggccgcgctgcccggtgtcgatacgctgacgctggcagtcgaaccgctcgccgacgacaagtgcgacaccatcaaaacgctcgcgccgtactgggttgacaacatgcaggccggccacgttgcggccttgcacgtgaggccgcctggcggtcaattgagcgacggcgacccgctggtcgtcgacgtcgccacgccgggctatgactcgtatgtgaatttggactactaccagctcgacggcagcgtcgtgcacatggtgccgagcccgcgcgcgaaggacaatcaggcgccgccgcattacaccgccaccatcggcagtgccggcgactggatcatttcaaagccgttcggatcggagatggtcgtgctgctgattacgcctgccccgctattcgacaagccgcggcccgaaagcgaatcgcgcgccgattatctgcacgcgctggacacacggctcgcgcagatcggcagcaaatatggccgcgatcatatcgtcgccgatttcgcgccgattacgacgaagcctcgcttgcct

SEQ ID NO: 13726 - DNA, 1098 bp, Burkholderia fungorum
atgagccaacccgcgagccaacccacgagcccacaagcgagcccacaagcgacccgccaccccggcccgatacccgcgacgctgcgcgtgatgagcgcgaagcgcgcggccgcgatctggctcgcgctcgctgtcatcgcgctggccgtgctgatggcgtcgctcgcgctgggcagcgtatcgctcgcgccgctgcgcgtgctggcggcgctggtgccagcgcatgggccgtctgccggctcctctgatctgactgccgagatcgtgcgcacgctgcgtttgccgcgcgcggtggccggctttgcgtgcggcgcgttgctcgcattggcgggcgcgctgctgcaggtgctgttgcgcaatccgctcgccgaaccctacgtgctgggtgtgtcgggcggcgcggccagcttcgcgctcgtcgcgatgatcgccggctgcgcctggtggatggtcgacgcgagcgccttcgccggcgccttcgcgtcgatcctgctggtgctcggcctcgcgcgccgcgagttgtggcgcggcgagccgcaggacacgtcgccacgtctgctgctgacgggcgcggtgatcgccgcgggctggggcgcgctcatcaccttgctgctcaacctcgcgccggacaaccgtctgcgcggcatgctgttctggctgaccggcgacctcaacggcggcgcgatgccgtggacggcgctcgccgcgctggtcgtcgcgctggcggcgatcgtgccggccgcgccgcgtctgaacgtgctgctgcgtggcgacgccgccgcgcaggcgttgggcgtggcggtgatgccgttgcgcttgcgcgtgtatctggtggcttcgctggcggcggccgcggcggtgacgacggcgggcaccatcggctttgtcgggctggtcgtgccgcatatgctgcggctcgcgttcggcaacgatcagcgcatgctgctgccggccgccgcgctcggcggcggcgtcgccgtgatgggcgcggacctgatcgcgcgcaccgtgatcgcgccggcgcagttgccggtcggcgtgatcacgtcgatcatcggcgtgccggtgtttctgtggatgctcttgcgcagacgccga

SEQ ID NO: 13727 - DNA, 807 bp, Burkholderia fungorum
atgccgaaatttgcagcgaatctcaccatgctgttcaacgaagtcccgtttctcgaccgctttgcggccgccgcggacgcgggctttcacgccgtcgagttcctgtttccgtacccgtaccagatcgtcgagttgagcgaacgtctgcagcagaaccgcctgaaactggtgctgcacaacctgcccgcgggcaactgggaagccggcgagcgcggcatcgcgtgtctgccggatcgggtgggcgagttccaggaaggcgtcggccgcgcgatcgaatacgcgagcgcgctgaaggtgccgcaactgaactgcctcgtcggcattccgacggccggcgtcgatgcggacaaggcgcgctcgaccatcgtcgagaacctgcgcttcgccgcgggcgagttgcaaaaagccggcatcaggctgctggtcgaaccgtgcaattcctacgacattccgggcttcgcgctcaatcgttctgctgaaggcctcgacgtgatccgcgcagtcggttcggacaatctgttcctgcagtacgacatctatcacatgcaacggatggaaggcgaactcgcggcgaccatcacgaagaacctgccgcggatcgcgcacatccagctcgccgacaatccgggccgcaacgaaccgggcacgggcgaaatcaactacccgttcctgttcgagctgctcgactcgcttggctacgacggctacgtcggttgcgaatacaaaccgcgcacgaccacggccgccggtctcggctggattcagagcgtggccgggcaaacccgcggcgcagcccacgccgccgcc

SEQ ID NO: 13728 - DNA, 3252 bp, Burkholderia fungorum
atgcccaagcggacagacatcaagagcatcctcatcatcggcgcgggtccgatcatcatcggccaggcgtgcgagttcgactactcgggcgcgcaggcatgcaaggcgctgcgtgaggaaggctacaaggtcattctcgtcaacagcaatccggcgacgatcatgaccgacccgaacacggccgacgtgacctacatcgagccgatcacgtgggaagtggtcgagcgcatcatcgcgaaggagcgcccggacgcgatcctgccgacgatgggcggccagaccgcgctgaactgcgcgctcgatctgcacgcgcacggcgtgctggagaagtacaaggtcgagctgatcggcgcctcgccggaagcgatcgacaaggcggaagaccgtcagaagttcaaggacgcgatgaccaggatcggcctcggttcggccaaatcgggcaccgcgcattccatggaagaggcgctcgccgtgcaagcggacatcgcttcgcaaacgggcagcggcggctatccggtcgtgattcgtccgtcgttcacgctgggcggctcgggcggcggcatcgcgtataaccgcgacgagttcgaagagatctgcaagcgcggtctcgacctgtcgcccacgcgcgagctgctgatcgaagagtcgctgctcggctggaaagagtacgagatggaagtggtccgcgacaaaaaggacaactgcatcatcgtctgctcgatcgaaaacctggatccgatgggcatccacacgggcgactcgatcaccgtcgcgccggcgcaaacgctcaccgacaaggaatatcaggttctgcgtaacgcatcgctcgcggtgctgcgcgagatcggtgtcgacaccggcggctcgaacgtgcagttctcgatcaatccgaaagacggccggatgatcgtgatcgaaatgaatccgcgtgtgtcgcgttcgtcggctttggcttcgaaggcaaccggcttcccgatcgccaaggtcgcggccaagcttgcggtcggctacacgctggacgagctgaagaacgaaatcaccggcggtcagaccccggcgtctttcgaaccgaccatcgactatgtcgtcaccaagattccgcgtttcgcgttcgaaaaattccgcgaagccgattcgcgtctgaccacgcagatgaagtcggtcggcgaagtgatggcgattggccgcaccttccaggagtcgttccagaaggcgctgcgcggtctggaagtcggcgtggacggtctggacgaaaagaccgataaccgcgacgagatcatccgcgagatcggcgaagccggtccggatcgcatctggtacgtgggcgacgcgttccgtgtcggcatgacggccgaagagattttcgaagaaacctcgatcgacccgtggttcctcgcgcagatcgaacagatcatcctgaaggaaaaggcgctggctggccgcacgctcgcgagcctttcgaaggaagagctgaagtatctgaagcagagcggcttctcggatcggcgtctcgcgaagttgcttggcgcgaagccggcgcaagtgcgccaacgccgtatcgagctgaacgtgcgtccggtgtacaagcgcgtcgacacctgcgcggccgagttcgccacgaaaaccgcctacatgtactcgacctacgaggaagagtgcgaagcgaacccgacgaacaacaaaaagatcatggtgctcggcggcggcccgaaccggatcggccagggcatcgagttcgactactgctgcgtgcacgccgcgctcgccatgcgcgaagacggctacgaaacgatcatggtcaactgcaaccctgaaaccgtttcgaccgactacgacacgtccgatcgtctgtacttcgaatcgctgacgctcgaagacgtgctcgaaatcgtcgacaaggaaaagccggtcggcgtgatcgtgcaatacggcggtcagacgccgctgaagctcgcgctcgatctcgaagcgaacggcgtgccgatcgtcggcacgtcgccggacatgatcgatgccgcggaagaccgcgagcgtttccagaagctgctgcaggacctcggcttgcgtcagccgccgaaccgcaccgcgcgcgccgaagacgaagcgctcaagctcgccgacgaaatcggctatccgctggtggtgcgtccgtcgtacgtgctgggcggccgcgcaatggagatcgtccacgagccgcgcgacctcgagcgctatatgcgcgaggccgtgaaggtgtcgaacgactcgccggtgctgcttgaccgcttcctgaacgacgcgatcgaatgcgacgtggattgcatctccgacggtgaagccgtgttcatcggcggcgtgatggaacacatcgaacaggccggcgtgcactcgggcgactcggcgtgctcgctgccgccgtattcgctgtcgaaggaaaccgtggctgagttgaagcgtcaaaccggcgcgatggcgaaggcgctgaacgtgatcggactgatgaacgtgcagtttgcgatccagcaggtgccgcaggcggacggttcgaaagaagacgtcatttacgtgctcgaagtgaacccgcgcgcctcgcgtacggtgccgtacgtgtcgaaggcgaccagcctgccgctcgcgaagatcgcggcgcgcgcgatggtcggccagacgctcgcgcagcaaggcgtgacgaaggaaatcgatccgccgtacttcagcgtgaaggaagccgtgttcccgttcgtcaagttcccggcagtcgatccggtgctcggaccggaaatgcgttcgaccggcgaggtgatgggcgtgggtcaaacctttggcgaagcgttgttcaaatcgcagctcgccgcgggttcgcgtttgccggagtcgggcacggtgctgctgaccgtgatggacgccgacaagccgaaggccgtcgaagtcgcgcgtatgctgcacgaactcggttatccgctcgtcgcgaccaagggcacggccgccgccatcgaagcggccggcgtgccggtcaaggtcgtcaacaaggtgaaggacggccgtccgcacatcgtcgacatgatcaagaacggggaaatcgcgctggtcttcacgaccgtcgacgaaacccgcgccgcgatcgccgactcgcgttcgatccgcatgagcgcgcaggcgaacaaggtcacgtattacacgaccatgtccggcgcgcgtgccgctgttgaaggtttgcgctatttgaaagacctggaagtctatgatttacaaggcctgcacgctcgcctaaac

SEQ ID NO: 13729 - DNA, 1518 bp, Burkholderia fungorum
atggacaacacagtcaccgccgcggccgcagcgccggcagcggacgccgcaaaacgcggcaagtatctgagcgtgacggcgatcggtctgatgacggccgccgccgtggtcacgagtctgcgcggacttcctttactggcgaaggaggagatgacgatgttcgtctatctcgccttcacggtcgttttctacctgatcccagcgtcgctgatttccgccgaactgggcggcgcgttcgccgaccggcccggcggcatctacacgtgggtcgcggaggcgttcggcacgcgctggggttttctcgcgatctggctgcaatggatccagaacgtcgtgtggtatccggtcgcgctgaccttcggcgcggcggcgctcgcctatacgatcggccggccggaactggcgaagaacggcgtgtatgtcggcatcttctgcatcgtcgcgtattggctcgcgacgtgggtcgtgctgcaaggcgtcgaagtcttcgcgaggatcgccaactggaccttcgtgatcggcaccatcgtgccgggcctcgtgctgcttgcgctgctgggctactggatcagcagcggacacccgctcggctggcaacacctgaacgatgcggctctctcgcaagacggtcacgcgcgcttctggcccgcgattcacggcttcggcacgatctcgtttctggccggcatcatgttgctgtttgccggtgtggaggtgcaggcggttcatgtgatcgacatgcgcagcccgagtcgcggttatcccgcggcgatcggactgggtgcgctgatttcggtgctgattttcgcgctcggcgcgttgccgattgcagcgatcttgccgtacgagaagatatcgctgcaatccggcgtgttcgacgcattcagcgcggtgctggtggacatctggcacatgaactgggctgtgtcggcgttgtcgctgctggtcggcgtcggggcgatcagtggggtgctggcctggctcggcagtccgtcgcgcggcctgcttgaaaccgcgcacgaaggcgaattgccgccgatccttcaggctaagaatcgcaagggcatgcccactcatattctgctggtgcaaggcctgatcgtgacggtcatctcgtgcttctacttcgtgatccgtgatgtgtcggtcgcgttctttctgatctccgccatgacgatcgcgctctacctgatcgcctacatgctgatgtacgcggcggcgatccggctgcgctactcggcaccggccttgccgcgtccgttcacggtgcccggcggctttgccggcatgtggctgaccgccggcatcggctttgccggggtgctgttcagcttcgtcgtgtcgttctttccgccggatcagttgccggtcggttcgccttggctttatacgggactcgtcgttatcggcattgtggtgttcgcggggattcccctgatcatccaccacgtgcgccgcagcgactgggcgagcgtgcacgacacgccgcgcgttcctccggccgtgatcccggtggag

SEQ ID NO: 13730 - DNA, 939 bp, Burkholderia fungorum
atggcggcgcagcgagcgcaatcggaacgcggcttgccggcagaggccaccatgacctaccgcggacgcttcgcgccatcacccaccggtccgctgcatttcggctcgctggtcagcgcgctcgcaagctggctggacgcgcgtgcgcatcggggcgcatggctcgttcgcatcgaggacatcgaccgcccgcgtacagtgccgggcgccgccgaagacattctcgccaccctcgaacgcttcggcatgcgcgcggatgaaccgcctgtctggcaaagcacgcgcctcgcgcgttacgagcaggcgctggagcaattgaaggccgccggcctgatctatccatgcggctgcacgcgcaaggagattgccgactcgctgctgcatgcgcatgcgcgcaacaccaccctcgcctatcccggcacctgccgcgccggcctgcacggcaagccggcacgcgcatggcgcctgcgcgtgcccgatggcgacgccgcgatcatcacgttcgaggaccgctggcaaggcaggcagacgcaaaacctggcaacggaagtcggcgatttcgtgctgaagcgcgcggacgaccagtgggcgtatcaactggcggtggtcgtcgacgacgcggacgcgggcatcacgcacatcgtgcgcggcgcggatctgatggattcgacggcacggcagatctatctgcagcgctgcctgggcgtgccgacgcccgagtatctgcatgtgcccgtggtcacgaacgaccacggcgaaaaactcagcaagcagaatggcgccacggcgctggacaaggataagccgctagaggcgcttagcgcggcggcacggcatctcgggctcgacttgcagagcgccgcggcccatacgacgctcgccggcttttatgctgccgccacggtggcatgggcaaaacgaatgggattagcagcggat

SEQ ID NO: 13731 - DNA, 2622 bp, Burkholderia fungorum
atgaaagccgccgaaatccgcgagaaattcctcaagttcttcgaatcgaagggccatacgatcgttcgctcgtcgagccttgtgcccggcaacgacccgacactgctcttcaccaattcgggaatggtgcagttcaaagatgtgttcctcggcgcggagtcgcgtccgtattcgcgcgccacgaccgcgcagcgcagcgtgcgcgccggcggcaagcacaacgacctggaaaacgtcggctacaccgcgcgtcaccacacgttcttcgaaatgctgggcaacttctcgttcggcgactacttcaagcgcgacgcgatccactacgcgtgggaactgctcacgggcgtgtaccagttgccgaaagacaagctctgggtcaccgtctatcacgaagacgacgaagcgcacgacatctgggcgaaagaagtgggcgtgccggtcgagcgcatcatccgcatcggcgacaacaagggcgcgcgctacgcgtcggacaacttctggcagatggccgacaccggcccgtgcggcccgtgctcggaaatcttctacgaccacggcccggacgtgtggggcggccccccggggtctcctgaagaagacggcgaccgctacatcgagatctggaatctcgtgttcatgcagttcaatcgcgacgcgcaaggcaacatgacgccgctgcccaagcagtgcgtcgacaccggcatgggtctggagcgtatcgccgcggtgctgcagcacgtgcacagcaactatgagatcgacctgttccaggcgctcatcaaggcggccgcgcgtgaaaccggcgtgagcgatctgaccaacaactcgctgaaggtgattgccgaccacatccgcgcgtgctcgttcctgatcgtcgacggtgtgattccgggcaacgaaggccgcggctacgtgctgcgccgtatcgtgcgccgcgcaatccgtcacggctacaagctgggcaagaagggctcgttcttccaccgcatggtggccgacctcgtcgcgcaaatgggcgccgcgtatccggaactgaaggaagctgaacaacgcgtgaccgacgtgctgcgtcaggaagaagagcgcttctttgaaaccatcgaacacggcatgtcgatcctcgaaggcgcgctcgccgagctcgaagccgggagcagcaagacgctcgacggcgaactcgcattcaagctgcacgacacatatggcttcccgctggacctgacggcagacgtgtgccgcgagcgcgaagtgacggtcgacgaagccgccttcgacgaggccatgacgcgtcagcgcgaacaggctcgcgcggcaggcaagttcaagatggcgcaagggctcgaatactcgggcgagaagaccacgttccacggttacgacgaagtcgttttcgacgacgcgaaggtgatcgcgttgtatgtggagggcgcttcggtgcagcaggcaagccaggggcagcaggccgtcgtcgtgctggatcacacgccgttctatgcggagtcgggcggccaggtcggcgaccagggcgtgctggccaacgcgagcgtgcgcttcgcggtgagcgatacgctgaaggtgcaggccgacgtggtcggtcatcacggcacgctcgaacagggcacgctgaaagtgggcgacgtcgtcaaggcggaaatcgacgcggtgcgccgcgcccgcacggctcgcaaccactcggccacgcacctgatgcacaaggcgttgcgcgaagtgctcggcacccacgtgcagcagaagggatcgctcgtggacgcggacaagacccgtttcgacttcgcgcacaacgcgccgttgaccgacgagcagatccgccgtgtcgaggaaatcgtcaacgccgaggtgctggcgaacgcgccgggcatcgtgcgcgtcatgtcgttcgacgaggcagtgaagggcggcgcaatggcgctgttcggcgagaagtacggcgacgaagtccgcgtgctcgatctgggcttttcacgcgaattgtgcggcggtacgcacgtgcatcgcaccggcgacatcggcctcttcaagatcgtgatggaaggcggcgtggcggcgggcatccggcgcgtggaagcgattacgggcgacaacgccgtgcgcttcgtgcaggatctcgacgcgcgcatcaacgcggctgccgctgtgttgaaggcgcagccttcggagctgacgcagcgcatcgtgcaggtgcaggaccaggtgaagtcgctggaaaaggaactgagcgcgctgaagtcgaaaatggcgtcgagccagggcgacgaactggccggtcaggcgatcgaagtcggcggcgtgcacgtgctggcggccacgctcgaaggcgcggacgtgaagacgctgcgtgaaaccgtcgacaagctgaaggacaagctcaagagtgcggcgatcgtgctggcttcggtcgaaggcggcaaggtgagcctgattgccggcgtcacggcggacgcaagcaggaaggtcaaggcgggcgagctggttaacttcgtggcgcagcaagttggcggcaagggcggtggccgtccggatatggcgcaggctggcggcaccgagccggcgaatctgccggcggcactggccggcgtcaagggctgggtcgaaagccagctt

SEQ ID NO: 13732 - DNA, 981 bp, Burkholderia fungorum
atgtcggtttcaacagagttgagcaaggacgaactgctgaaggcgtatcgcatgatgcgcacgatccgtgagttcgaggagcgcctgcacgtcgaattcgcgaccggcgaaatacccggcttcgtgcacctgtatgcgggcgaggaagcgtcggcggtcggcacgatgctgcatctgaacgacgcggactacgtggcgaccacgcaccgcggccacggccactgcatcgccaaaggcgtcgacgtgcgcggcatgatggccgaaatctacggccgcaagaccggcgtctgccacggcaagggcggctcgatgcatatcgccgacctgtcgaagggcatgctcggcgcgaacggcattgtcggcgcgggtggtccgctgatttgcggcgcggcgttggcggcgaagtacaagaagtcgggtggcgtgggcgtgtgtttcttcggcgacggagcctcgaatcagggcgtgattttcgaatcgatgaacctggcttcggtgtggcggctgcctgcgattttcgtggcggagaacaacggctacgccgaagcgacttcttcgacgtggtccgtcgcgaccgacaacatcgcggatcgcgcgagcggcttcggcatgccgggtgtgatcgtggacggtttcgatttcttcgcggtgcacgaagcgctcggcgaggcgatcgagcgggcgcgtcacggcggcgggccgacgctcgtcgaagtgaaattctcgcgctatttcggccacttcgaaggcgatgcgcaaacctatcgcgcgccgggagaagtgcagaaactgcgcgacgagaaagattgcctgaagcgtttcgaagagcgcgtggtgcgggcgggcatgctcagcgcggatcaattgcgcggcgtggatgcggaagtaaagaccttgatcgacacagccgtgaccgaagccaaggccgctccgctgccgactgccgaagacctgctgagcgacgtctacgtgtcctatccg

SEQ ID NO: 13733 - DNA, 2349 bp, Burkholderia fungorum
atgcccgacctgctagccaatctcaaccccgaacaacacgccgccgtcacgctccccaacgagccggcgctcattctcgccggcgcgggcagcggcaagacccgcgttctgatcacgcgtattgcctggctgatccagcatgggctggcctcgcccgccacgattctggcggtgactttcaccaacaaggccgcccgcgaaatgatgtcgcgcctctcggcgctcctgccgatcgacacgcgcggcatgtggatcggcaccttccacggtctgtgcaaccgcatgctgcgcgcgcatcaccgcgacgcgggcctgccggccaccttccagattctcgacaccgcggaccagctttccgcgatcaagcgtctgatgaagggcctcaatatcgacgacgaaaagtacccggcgaaaaatctccagtacttcatcaacaacgcgaaagaacaaggcctgcggccgaaagacgtcgacgccacggacaacttcaaccgcaaattcgtcgaactctacgaagcctacgaccagcaatgccagcgcgaaggcgtggtcgactttccggaactgctgctgcgctgctacgagctgctcgcgcacaatccgccgctgcgcgcgcactaccaggcgcgcttcaggcacattctggtcgacgagttccaggacaccaacaagctgcaatatgcgtggctcaagctgctggcgggcgaggccaactcgatcttcgcggtcggcgacgacgaccagtcgatctacgcgtttcgcggcgcgaacgtcggcaacatgcgcgacttcgaacacgagttcaacgttcgccacctgatcaagctcgaacagaactaccgctcgcacggccatattctcgacgccgccaatcagctgatcgccaacaactcgcggcgtctgggcaagaatctgcgtaccgacgcgggtcacggcgaaccggtgcgcgtgtatgaatccgccaccgactcgcaggaagccggctggatcgtcgaggaaatcaaggcgctgatcagcaccggcacgtcgcgcagcgaaatcgcgattctttatcgcagcaacgcgcagtcgcgcacgatcgaacacacgctggtcaatgcgggtatcgcgtaccgcgtgtacggcggcttgcgctttttcgagcgtcaggaagtcaagcacgcgctcgcctatctgcgcctgatcgacaatccgaacgacgacaccgcgttcgcgcgcgtcgtcaatttcccgacgcgcggcatcggcgctcgctcgatcgagcaactcgcggacgcggcgcgtcagtacaactgctcgatggccgcggcgattccgtacgtggcgggcaaggcggggtcgagcctcgcgggcttcgcgaacctgatcggcaagatgcgcgccgaaacgcagcagatgagcctgccggaaaccgtcgaatacgtggtgcgcgcaagtggtctgtcggagttctatcagaacgaacgcgaaggccaggaccgcctggagaacttgcaggaactggtcaacgcggccgcggcgttcgtcagcgaagagggctacggcatggacacgccggcgcgctccattccgctgcgtccgggtgcgaccgccgcgcccgaactggcggtcgccaccgacgatccgaataccatcgtgttcgacgcgcccggcatcgccgatccggcgcaaaacccggacacgatgacaccgctcgccggcttcctgtcgcacgcgtcgctggaggcgggcgacaaccaggcgcaagcgggccaggaagccgtgcaactgatgacggtgcacgcggccaagggccttgagttcacggcggtgttcatcaccggtctcgaagaagggctgttcccgcacgagaacagcgcgatggaatcggacggtctggaagaagagcgccgcctgatgtacgtggcgatcacgcgggccaaggagcggctgtatctgtcgttcgcccagagccgcatgctgcacggccagacgcgttacaacatccgctcgcgtttcttcgacgaactgccgcaggaaacgctcaagtggctcacgccgaagatcgagccgggcgcgcgctggggtggccgttcggacaacgcgggttatgggcgcgactggttcgcgcggccgggttacacgggcgccgcgtcgtcgacgcccgcgccgctgccagcgttcgcgaacgaacagcgtgcagcggaaacgggtttccgcgtgggccagcaggtgttccacaccaaattcggcgaaggcacgatcaccgcgctcgaaggcggcggcaccgacgcaaaggcgcaggtcaaattcaagcggcacggcgagaagtggctggcgctcgcggtcgccaaactgcaggcggtggaa

SEQ ID NO: 13734 - DNA, 612 bp, Burkholderia fungorum
atgttcacaggaatcgtcgcggccgtgggccgcattgaatcagtcaagccgctcggcacgaacggcgacgcgggcgtgcgcctgaacgtcgaagccggtggcctcgatctcggcgacgtgcagctcggcgacagcatcacgatccagggcgcctgcatgaccgtggtcgccaggaccgaccattcgttcgaagtcgacgtgtcgcgcgagagcctgaactgcacggcaggcctcggcgagattggcgaagtcaacctggagaaagcgctgcgcgcgcacgaccggctcggcggccatatcgtttccggtcacgtggacggcctcggcacggtcacgcatttcgcgccggttggtgaatcgcacgaactgcgcgtgctggcgccgcgcgagatcggccgctatctggcgtacaaaggctctatcactgtcaacggcgtgagcctgaccgtcaactcggttaaagatcgcgacgatggctgcgaattctcgatcaacctgattccgcacacggtcgaagtgacctcgctcaaacatctgcgtgaaggcacgcgggtgaatctggagattgatctgattgcgcggtatgtggagcggatgctgaacgcaccgaaa

SEQ ID NO: 13735 - DNA, 918 bp, Burkholderia fungorum
atgaaaatcaaggtactcggctcatcggcgggcggcggtttcccgcaatggaactgcaattgccgcaattgcgacggcgtgcggcgcggcacgatcaaggcgacgcgccgcacgcaatcgtcgatcgcggtgagcgcgaatggcgaggactggctgctcgtcaacgcatcgcccgatctgctcgcacagatcgccgccaatccggaattgcagccggcccgccgcgcgcgcgacagcggcattgccgcggtgctggtcatcgacgcgcagatcgatcacgtgaccggcctgctgatgctgcgcgaacgcgacacgccgctgccgctctatgcgactaatgcggtatggcaggacctgtgcagcggttttccggttgcgccgatcctctcgcactattgcggcgtcgagcatcggcgtatcgcgctcgacggcgcgccgttagcgatagatgcgctcggcggcgtgcagatcgacgcgctgccgctgtcgagcaaggcgccgccctattcgccgcaccgcaacgcacccgagcgcggcgacaacatcggactcgtcatcacgaaccggcagaccggcaagcgcgtgttctatgcgcccggactcggcgcgatcgaagcgcacgtactcgcggcgatgcgcgaggccgatctgctgctcgtcgacggcacgctgtggaccgccgatgaaatgatccgcctggaactttcgaagaagactgcggccgacatgggccatctgcagcagtccggccccggcggcatgatcgaggtgctggactcgctcggcgcgcacaatgctcgcaaggtgctcattcacatcaacaacaccaacccgattctcgtggaggacggccccgagcgccgcatcctgaccgagcacggcattgaagtggcgtatgacggaatgacgttcgagatc

SEQ ID NO: 13736 - DNA, 1110 bp, Burkholderia fungorum
atggcatttacgctcgaggacatcgtccaacggttcggcggtgaagtagtcggaaacggttcgcagcgcgtcggcagtcttgcgccgctcgaccaggcaggcccggaccagctggcgttcctcgccaatccgaagtacctgtcgcaggtcgaaacgacccgtgcgggcgccgtgttgatcaacgccgaagacctcgccaggctcgcttcccgcgagagtcgtaacttcatcgtcacgccgaatccgtacgcttacttcgcgcgcgtcgcgcaaacctttatcgacctcgctgcgcccaaggcggtgcccggcgtgcacccgagcgcaaccatcgacccgtcggcgcagattgccgcgagcgcggtgatcggcccgcatgtcacggtggaggcgggcgcggtgatcggcgaaaacgtgcggctcgacgccaatgtcgtgatcggccgtggaacgcgcatcggcgcggactcgcacctttatcccaatgtcgcggtgtactacggttgcaagctgggcgagcgcgtgatcgtgcacgcgggcgcggtgatcggctcggacggtttcggcttcgcgccggatttcgtcggcgagggtgacgcgcgtaccggcagctgggtgaagattccgcaggtgggcggcgtgtcgatcgcggcagacgtggaaatcggcgcgaacaccaccatcgaccgtggcgcaatggccgataccatcatcgaagagtgcgtgaagatcgacaatctcgtacagatcggccacaactgcaaggtcggagcctatacggtgattgccggctgcgcgggcatcgcgggcagcaccacgatcggccggcattgcatgatcggcggcgccgtcgggattgccggccacgtcacgctggccgattacgtgatcgtcacggcaaagtcgggcgtgtcgaagtcgctgttgaagcctggtatgtacacgagtgccttcccggccgtgaaccatgcagactggaacaaaagtgcagcgttgctgcgcaatatcgacaaactgcgcgatcgtatcaaggcgctcgaaaacgccgcggccggacggcaagacggcccggcggccaatgcagcaagcagttctgcaggcgacaaggcc

SEQ ID NO: 13737 - DNA, 858 bp, Burkholderia fungorum
atgacccaccaggatccggccgcacgccaggcgagcatttctgaagaaatgcatatcggcgccacattcgatgcggaatatgaaatcgaacgccgggtaacttttctcgtgagttatctgcgcggcagcggcctgaaaacgtatgtgctcgggattagtggcggcgtggattcgaccactgccggccggcttgcgcaactcgcggtcgagcagttgcgcgccgaacattacgaagcgcaattcgttgcaatacgtctgccttacggtgaacagaaagacgaagccgacgcgcaacaggcattacgtttcattcgcgcggatcagaatctcgccatcgacatcaaacccgcggccgatgccatgctcgccgcgctggacaggagcggcgtgctattcaacgacgaatctcaccaggattttgtgcacggcaatatcaaggcgcgccagcgcatgatcgcgcaatacgcggtggccggtgcgcgggccggcgtggtgatcggcacggatcacgcggccgaatcggtgatgggcttcttcacgaagttcggcgatggcggcgcggatgtgctgccgctcgccggactcaacaagcgtcgcgtgcgcgcggtggcgaaggcgctcggcgcaccggaagagctggcgcacaaggttccgacagccgacctcgaaatgttgcgtccgcaacggcccgacgaggatgcctacggcattccgtacgatgctatcgatgattttctggaaggcaaagccgtgagcgatgcggcgcgcgcgactatcctgcgctattacgacgtcacgcgtcacaagcgggcgttgccgtacacgccgttcgattggccgatgcaggcaagcgaagat

SEQ ID NO: 13738 - DNA, 906 bp, Burkholderia fungorum
atgctgcgcgccggcctgtccgaactcactgctttcgtcgcgattgcccaccagcgcagcttcagcgcggcggcgcgcacgctgggcgtttcgccatcggcgctcagccatgccatgcgtggactcgaggcgcgtctcgacgtgcggctcttcaaccgcacgacccgctcggtggcattgaccgaagcgggcgaacagcttctgcggcgcgtcggcccggcgatcgccgatctcgaagacgccgtgaacgaagcagcttccgcgcgcaatcgcccgtcgggctcgatccgcatcagcgcgtccgaatctgcggcgagaccgctggttcagcacgtgctgcccggtttcctcgcgacctatcctgacattcacgtggaattcgtcgtggatacgcggctcgtggatatcgtggccgacggtttcgacgcgggcatccgggtcttgcaggacgtgccgcgcgacatgatcgccacgcgattcggcccggacatgcggtttatcgcggtggcttcaccggattacgtggcgcgcaacggaaagccgaaggcgccgcacgatctcgcgcggcaccgctgtatccgcttccgtttcgagagcggcgcgctctaccgttgggacctcgaatatcgcggcaaaggcgccagcgtcgacgtcgacggtcccatgacgctcggcaatctgaacctgatggtcgaggcggcgctggccggcatcggcattgcctgggtgtcggaccagttggcggcggagtatctggcttcgggccggctcgtgcagttgcttgccgaatggagtccttcgtttcctggactgtgcctctattaccccgccaatcgccatccgccgacggcgctccggctgttcgcgcagtcagtgcgggagtgggcgaaaggcgaggctcgcgat

SEQ ID NO: 13739 - DNA, 531 bp, Burkholderia fungorum
atgcgcggtgtcagaagattgttctggcggaaactgctcaggctcaacgacgtccaccccacggtgctattcggcggatatggcgatatcagccgggatttccacgcgggcgaatatgtctacgttggaccgggctgccggatcaatccaggcgttcgcgtcggcagttattcgctgctggggcctaacgtgcagatcgtgggcaacgaccacgtcttcgacctcccgggcgtcccgatcatctttagcggccgacctgcatttcgtcccacccagatcggcaaggacgtgtggattggcgccggcgcgaccattctttgcggaacaaccattggtgacggcgcggtcatcgcttccggggcggtcgtcacccgtgatattgagccgttcacggtggtcggcggcgttccggcgcgtctgatcaggcgacgcttcccgattttgagggatgaattgatacaccggaaaatgctcgaagcacctgctgtcccgggcggatattgtgcacccatggcggctcggcaagaggct

SEQ ID NO: 13740 - DNA, 9723 bp, Burkholderia fungorum
atgcccatgacgagcttcccgattgcattgcaccagcagatccgcgctatggcgcgcatcgatcccgatgcgcccgcgctggcgtcattcacgccgtctaccgtgcggctgacgcgcggcgaactggatagccgcgcggcgcggctcgcggcacggctgcgcgcggcaggtgtgacgactgaagtgcgtgtgggcgtatgcgttgcacggtcgtgcgatctgttcgtcgcgttgcttgccgtattgaaggcgggcggcgtgttcgtcgcactcgatccgcgccatccgccagcgcgcctcgattggatcgcgcgggatgcgggactcatgcacggcattgtcgacgattccgccgatgcggcgatgcgtgcgcgcttcagagaatgctttcacgtggaaagcgctgccaccacagacgcggcagcaccctgtttcgacgacgaagacacgccggttcatccgcgagcggcggcatacatgatctacacgtctggctcgaccggcacgcccaaagcggtggctgtcgaacacggaccgcttgccgcgcatggcgaggcgcttgccgggtcgttgccgatcgcggccgccgaccgtgtgctgcattttgcgtcggtcaatttcgatgtatcgatcgaagcatggttagtaccgcttgccgtcggcggcagtgtggtgatcagcgatccgccgccgttcgcgcctgaaaccacgcatgccttcatgctgcgcgaaggcatcaccaatacgacgctgccgcccgcttatgtgcgcgagttcgcgaacgtttgcgagcgcctcggcgtgccgccttcgctgcgcacgctgttgttcggcggtgaagcgatgtcgcaggacagtttcgatgaaatccgccgcgtgttcccgtcggtgcgtctcgttaacggctatgggccgaccgaggccgtgatctcgccgatgctgtggcccgtcgatccgggaatgacgccggcgctcgaagaaggcaacggctttgcatcgctgccgatcggctggccgatcgggcggcgcgtggcgcgcatcgacggcgcggcgcaacagggcgaagccggcgaactgctgctcggcggcgtgtgcctcgcgcgcggctatcacggccgcgcggcgctgacggctgaacgtttcctgccggacccgaccggcgagccgggcgagcggatctaccgcaccggcgacctcgcgcgcgaacgcgcggacggctcgttcgattatctcggccgcatcgacgatcaggtccaggtgcgtggcgtacgcgtcgaacccggcgaaatcgcggcttgtctgctgacccacccggccgtggccgatgcgggtgtgctggccgaagcggcgggaggccgcacgcaactgatcgcctgcgtcgtgccgcaagatgcgctcgaacccgatgatgccgcgctgcaagcgcatctcgccgcgcatttgccgcaggcctggatgccgcatcgcttcgtgcgcttcgagcgcctgccttatacgttgaacggcaagctcgatcgcacggcactgcgcgacttcgttgctacgctgccggccgtgatcgattcgaatcatgtcgcgcctcggaccctcaccgaaacgcgccttgcggcgctttggcaaaagctgttgaacgatccggcgccgatcggctgcaacgatcgctttttcgcacgcggcggtgactcgctcgcggcgatgcaattgcaggcggcgattcggatcgaatggcgcgtgaatctgcggctcgacacgctattcgacgatcaaccgctcgaagcgttggcgcgtgtgatcgatgccagcgagactgaaacgtcggcaggttcgcattcaatcacggttgtgcgtaccgctgacgcgccgttcgtcgatcgtgcggcctcgttcgcgcaacagcggttctgggtgctcgcgcaaacacaggacgccggcgcggcctaccacgttgcggtgcaatgggacgtgcagggcacactcgagatcggcacgttgcaacgcgcgctcgattgtctgatcgcgcgtcatcaggcgtggcgaaccacgctggtcgagtccgacgacggcattgtcgtgcaacggatccacgcccgtttgccggtgccgatcgcgcaaatcgatctgcgcgcgtgctgcgaggatgagcgcgcatcgcgactggcggcgttgacggaacagcaggttggcgcggctttcgatctgtcgcaagggccgctggtgcgtgccgcgctcgtcacgcttactgacgacacgcagcgttgcctcctcaccacgcatcattcggtcagcgacggctggagttcgcgctgcgccttcgacgaactgcgaaccgcttacgctgcctttgcgatgggacacgagccgcagttgcccgcactgaccgtccagtatgccgactacgcacaatggcaacgcgactggctcgccgcaggcgagggcgaaaggcaactggcgtactggcgcgacgcgttgcgcgatgcacccgaagcacttgccttgccgctcgaccggccacgctcactggagcacgactatcgcggcggccgcctcgcgctgcgtttgcccgtagcgctctccgaggcggtgcgcgaaacggcgcgacgcgcgcaggcgtcgccgttcacggtgctgcttgccgccttcgacgcctggctctaccgattgacgggcgcgaccgatgttgtcgtggctgcgccgattgcccatcggcagcgggcggagaccacgccgctggtgggcctcttcctgaatacgctggcgctgcgcgcgcgcgttgcgccggatcaatcgttcgccgcgttgctcgacggcgtgcgccggtccacgttcgatgcgttcgcgcaccaggatgtgccgttcgatcaggtgctcgacgccgtcaagccgcctgtacggcgtggcgacgcgtggctcaaggtcaagttcgcgcagcagttcgatctggaactgacggctgaattgccgggcgcctcggtgcgcatgtcgccgggcctcgaccttgcggcccgcttcgattacgcgctcgatttcaccgacgatccacgcggcatcgaactggtggccgcatatgcactcgacggtatcgacgaagcgaccgcgcacgcctggctgcatagctacgccgcgctcgtcgccgatgcagtgcgcgatccacaacgcgccgttaccgaactggattgtgctgatagcgccgaatatcgatccgcgcgacgtggccgcgaatttcaaccgatggctgacaacgtgctcgcgcgattcgcgcggcatgcgcgtgaaacgccgcatcgcgtggcgcttgcggatgccgatacgcagcttacgtacggcgaactcgatgcggcgtcggaccgtatcgcgcttgccttgcggcggcgcggagcgggagcggcggtagccgtaggcgcggaacagccggtggctgtgtgcatcgagcgttcggtgcgttttgccgttgcgctgatcggtgtgatgaaatctggtgcgtacgtggtgccgctcgatcctgccgcgccgcatgaacgcctggctgcttccatcgatgcctgtggcgcgcgctggattctgacggcggatcaggcacaaccgctcgtcacggcaggtggtgcgacctcgatcgacctggacacgctcacgcaagaaccatcgtctgcgaatgccgaagacctggacgcagccgcatcgcgtacgtcaccgttggccgatcaagccgcctatctgatcttcacctcgggatcgaccggcacgcccaaaggcgtcatcagctcgcatgccgcgctggccgattatgtcgaaggcatgctggatgaactggcgtttgccccggacgcttcaatggcaatggtctccaccgttgccgccgacctcggccataccacgctattcggcgcgctctgctcgggccgtacgctgcatctgctaccggcgcaatgcgcgttcgatcccgatcgattcgctcacgagatgcgcatgcgcaacgtcggcattctgaagatcgtgccgagccacctgcacgcgctgctcgacgcgcagtatcccgccgacgtgcttcccgcgcacgccctggtgacgggcggcgaaacgctgccgtggtcgctggtcgagcggatcgccgcgctcaagccagcctgccgcgtgatcaatcactatggcccgactgaagcaacggtcggcgcattgacgtgcgacacgtccgcgccggcgcaagcggcattgcgtgcgctcagcatgcgaactgcgtacgccgtgccgctcggtatgccgctgccgaacgcgtacgcgtgcgtactcgacagctacggcgcgagtgtgccgccgggcgcgatcggcgagttgtatctcggcggaccgggtttggcgcgcggttatctgaatcgcgccgccgcaactgccgagcgtttcgtaccgcatccattcgcggcgggcgagcgactctatcgaaccggcgaccgcgtgagactgcgcgccgatcgtcggctggattttctgggccggctcgacgatcaggtcaagattcgcggctaccgtgtcgaaccgggcgaggtcagcgccgcactgcgcgcgttcgatggcatcgctcaggccgaaacgcttgccgttgagcatgaagggcgtttgcgtctcgcgtcgttcgttacgttgagtagcggtgcgcgtttcgacgaggccgcattgcgcgcggcgttgagcgcgcgcctgccggattacatggtgccggccgtgttgcagcacgttgccgcgttgcccgtgaccgccaacggcaaggtggatcgcgcggcattgcgggcgctcgcggttgcgccggcagcgaccacggcagcaggcgacgcgccgcaaggcgccaccgaagaagcgctcgccgctgtctggaaagacgtgctcaaagccgaacgcgtgggccgcgacgacaacttcttcgagttgggcggcgattcgatcctcgtgttgcaggtgatcgcccgttcacgcaaacgcggtgtgcgcttcacaccgaagcaactgttcgacgcgccgacgctcgcgcaactcgcgcgtgtcgccacgactgtggatctcgccgcgccggcggcagagggcgcagcgaaggcgcatgccgcgccgtccccgatcgagcaggccgttacgctcacgcccgcacagctgcgtttcttcgcgctggatattccgcaacgcggccactggaatcagtccatcgaactcgacacgcaggcaccgttcgacttcgacgctttcgcgcgcgctttcgaaacgctgctgacgcaccacgaaatattccgccagcgcttcgcgccgcttggttcgcaaggcgaatggcgactcacgctcgctgcgcgcgcattcgaaacgctgccgctcgcggccctctccgcacgcgacgaagccgacgcgctcgcccagttcgatgcattgcaaagcacgctcgatctgacgcatggcccgctcgtttgtgcgcttgccgccctgctgcccgacggcgcgacgaaactctatctggcgatccatcacgtcatcgtcgacggcgtgtcgtggcgtgtgctgctggacgatctcgacgccgcctatcgcgccgcttgcgagcgccgcagcgtgcgtctcgcgccgacgggaacgagcgcgcaggaatgggcggcacggctcgcacgcgccgcactcgacatagccaactcgccgtttgccgccgaaataccgtattggaccgcgctcgccgcgccatacgacgatctgccgctcgaccgtccgcaagcccgcgcgaccaacgccgacgcgcaatccgtgatccagaccatcggcgccgatctgacgcgcgccgcgttgacggaagcgaatgccgcctaccgcacgcagatgatcgaactgctgattgcggcgctggcgcagtcgctaggcttgcctgtgtgccgcctcgaactggaaggccacggccgcgaggcattattcgacgacgtggatgtgagccgcacgcccggctggctcaccagccactatccggtgcaattcgcgctcgaaagcacgccggcggccacgctcggcgcggtcaaggacacgctgcgcggcgtgccgaacaaaggtctcggtttcggcgtgctgcgccactacggcgacacggcaacgcgtgcggcgctcgccgccgtgccgcgtccgcatgtgaccttcaactatctcggccagttcgatgcgccgcgtgaagcggcgctcgtgccgcgtttcggcggcgcgggccgcgaacgcgatccggcaggtccgctcggcaacgcattggcgattcacgcctatatcgacggcgacgccacgcgcacgctcaaagtccactgggtctacggcgcgacgcaattcgagcgcgccaccgtggaagccatcgcgcagcgcttcgaaagcgcgctcgcggaattgattgccgcctgcaccgagcgtctcgcgcaacacggcggcggagcgacacccggcgactatccgctcgcgcgtgcaggcggcctgacgcaagccgcgctggaccgtttgccgctcgacttgcgtaccgtcgacgacatctatccgctttcgccgatgcagcacggcattctgtttcactcgctgttcgcgcccgagcaatccacttatgtgaatcaactggtcgcgacgttgatcgagccggacgtggagcgcttgcgcgcggcattcgaagccgccatgccgcgccacgacattttgcgcaccagcttcacgccgcaagaggcgacaccgatgcagatcgtgcaccgccaggcgcgcatgccggtcgaggttctcgattggcgtgagcgcggcgctgacgcgaatgatgccttcgaaacctggctcaatgccgaccgcgctcgcggtttcgatctcacgtcgccaccgttgatgcgcgtcgcgctgatccgcatcacggacgacacgtggcgtcttgtctggacgcgtcatcatttgctgctcgacggttggagcaccgcgcgtttcttcgccgacgtgttgcgcgactacatcgagccgccgcgtccgcagccgttcgccgcgcccgcgaagacgcgttatcgcgacttcatcgcgtggctggccgcacgcgacgccgaaagcgagcgcgctttctttctgcaacgcctcgcgctgctcgacgaaccgacgctggttgcggagcgcacgccggtgaaccgcggccgcgagccgcgccatctcacgcggcgtgaaacgatcggcgcggccacgacggcgcgtctcaccgacgccgcgcgccgcctgaaggtcacgctcaatacgatggtgcagggcgcatgggcgctcgcgctgcaacgaatgacgcatcacacggcaatcgcgttcggtgcgaccgtcgccggccggcccgactcgctgcctgatgtcgacaccgtattgggtctcttcatcaacacgctgccggtgattactgcgccgttgccgcagcgccgcgcgtcggcatggctgcacgatttgcagcgcgacaacgccgcggccgcggagcatgcgcacacgccgctctacgaaatccagcagtgggcgggacagggcggcggcgcgttgttcgacacgctggtcgtgttcgaaaactatcctgtggacgaggcatggcaggggcgcgacgagcgtgcgctcaagctgcgtgaactacgcaatatcgaagctaccgatttcgctcttacgctggtgatcgaagcgggcacgacgctgaccatcgattacggctacgacgccgcgagactcgacgaatcacgcattgcggcgttgcatcgcgcgttcgaaacgtgtcttgtcgctttgattgcaaatccggacgcaccgctcggcacgatttcgattgccagtgcggacgatctgaccaaactggcgcgcttcaactcgactgcgcaaacctggccgcctgcgcagcagcaggcgctgcatcggcagttcgaactgagggcgcaggcgtcgccggaagcaatcgctctggaattcgcggacgagcaagcacgcacgcggcagatgacctatggtgagctggatgcgaatgccgatcgcgtcgccgccgcgctcatcgaagcgggcgtgcgcgcggatacggcggtggcgctatgcgtcgagcgttcgttcgacatggtggtggcgctgatcggcgtgctcaaagcgggcgcggcctatctgccggtcgatcccgactatccggcggaccgcatcgcgtatctgctgaacgacgcgaaaccggcggtggtgctgacgcagccgcatctgctggagcgcgtcacgcaagccgtcgatagcgctaacgtgaaaatcctcaccatcgacgcattgcgcggcgccgacttcacgctcagcgcgcctgtggcagtcgcgcccgatcagctcgcttacctgatctatacgtccggttcgacgggcaagccgaagggcgcgggcaatacgcatcgcgcactggcgaaccggattgcgtggatgcaggacgcgtatcgcctcgacgcgagcgatgtcgtgctgcacaagacgccgttcggtttcgacgtttcagtgtgggagttcgtgtggccgctcgctgtcggcgcgaagctcgcgattgcggcgcccggcgatcaccgcgaccccgcgcggcttgtcgcgagcgttgaaacgcaccgcgtcacgacgctgcatttcgtgccgtcgatgctcgcggccttcgtcgcccacctggaagacttccatgcggcggcgcgctgcgcgagcatcgagcgaatcgtcgccagcggcgaagcgcttgcgccggaactggtggcgcgcgtcgcgcagcaattgcctcatgcgcggctttacaacctctatggcccgaccgaagccgctatcgacgtttcgcactggacgtgcgatgcgcgtgatgccggcgcggcttccgtgccgatcggccatccgatcgcaaatctgcaactgcacgtgctcgatgcggcgttgcaaccgctgccgcaaggcgcgatcggcgaactgtacctgggcggcgcgggacttgcgcgcggctacctcggccgggccgcgctgacggcggagcgcttcattcccgatccgtttgcgcacggtgcgcggctttatcgaaccggcgacctggcatgccgtcgcgcggacggggcgctcgattatctcggccgcatggatacgcaggtgaaactgcgtggccagcgcatcgaactgggcgaaatcgaagccctgttgcgggcggcaccgggcgtgcacgatgcggtggtgatcgtgcgtgacgagcagttgatcggctacgtggcgcgcggcgcggataacgcgctcgacacacaaacgctgctcaatggcctgcatgcgcagttgccgtcgtacatggtgccttcgcatctgatccagatggatgtgctgccggtcacgccgaacggcaaatgcgatcgtcacgcgttgccggctcccgtgcgcggcggcgccgacgaacaggccgtcgcgttgccggccaccgggacggagcgcgaactcgccgcgatctggaaacgcgtgctgcgcgtcgacacgattggccgcgacgacgacttcttcgcgctgggtggccactcgctgctcgcgacgcaagccaacgcgcaggcgaacctgcactggacgttgattctgccgctacgcaccttattcgacgaacgcacgttgcagcgctgcgccgccgcgatcgatcgcgcgctagccgggcgcgatgcgcacggcgcaggcgataccgcgagcgcgatcgatgcactgctcgacgaattcgaactgcaa

SEQ ID NO: 13741 - DNA, 411 bp, Burkholderia fungorum
atggcttatagcgacaaggttctggaccactacgaaaacccgcgcaacgtcggttccttcgcgaaggacgacgatgcggtcggcaccggcatggtcggcgcgccggcctgcggcgacgtgatgaagctgcagatccgcgtgggcgcggacggcatcatcgaggacgcgaagttcaagacgtatggctgcggctcggcgatcgcgtcgagctcgctcgtcaccgaatgggtgaagggcaagacgctcgatcaggccatgtcgatcaagaacacgcagatcgccgaagaactggcactgccgccggtcaagatccactgctcgatcctcgcggaagacgcgatcaaggcagcggtcgccgactacaagcaacgccacggtgaagcggtcgtcgcagacgaaaagcagcacgcc

SEQ ID NO: 13742 - DNA, 1878 bp, Burkholderia fungorum
atgtccgccgtcccgccgattctcggcctgcatcacttcgcatggcgctgccgcaatgccgaagagacgcgccacttttacgaagacatcctcggcctgccgctcgtccatctgatccgcctcgaccgcgtgccgagcaccggtgaatactgtccctacgtacacctgttcttcgaaatggcggacggcgcaaacatcgcgttcttcgatctcggcgacgacaccgccgccgaaccctcgcccaatacgccgccgtgggtcaaccacatcgcgctgcggctcgcgacactggagcagctcgaagccatgaaacagcggctcgtcgagcacggcgtcgacgtgctcggcgtgaccgaccatcacttcgtgcgctccatctacttcttcgatccaaacggcttccggctcgaactgacggtgccggtcgcacctgccgaaacactcgagtgctataaaatgcaggctcgccctgcccctggatgcgtgggccgaagagcgaaaaaaagctgtatcggagacacccgtcgcatgacagccctgaatttcacccacgatccagtccggcgtagctggatcgaatcggctaacctgcccgacgcggactttccaatccagaacttgccgttcggcgctttcgagcgcaacggcgaagcacgtacgggcgtggcgatcggcgagcatgtcgtcgatctgcgtgcgctgcgcgacagcggcctcgtcgaggccggcagcgatgcggcgctcgcctgcgaagcggccagtggcgccacgctgaaccgtctgatggcaatgggcccccgttattccggcgcgctgcgcgccgcgctctccgagctgctgaagagcgacgcgccgcaacgcgcaaatgtgcagcggcaggctgaagcgcttttgccgcgcatcgacgagatcgcgctgcgtttgccttgcgaggtcggcgactactcggatttcctcacatctctgcatcacaccgaacggcacggccgctataaagggctcgccgacccgctgccgccggctttcaaatcgctgccgatcgcctatcacggccgcgcgtcgtcgctgcgcgcgagcggcggcgaagtgcggcgcccgcacggtcagtaccgcgacgcgagcggccagatcgtgttcggtccggcgcccgcgctcgacttcgaactggaactcgccgcgtggatcgggcacggcaatgcgttcacgcagcccattccgatcgacgccgcacacgaacacatcttcggctattcgttgctgaacgactggtccgcgaagagcattcaatggtttgagcaggtgctgggcccgtttctcggcaagagcttccattcgagcgtgtcgccgtggatcgtgacagccgaagcactcgcgccgttccgcaaggcccccgtgccgcgcgcgcaagacgatccgccgttgatgccgcatctgcgcggcgcattcgaccagcagcagggcggactgcatctggcgttatacgcggacctgtcgacgagccggttgcgtgacgccggcgccggcccggtgcgaatcacccgcacgcatctcgacaacctgtactggaccttcgcgcagatggtcgcgcatcacaccagcaacggctgcgatctgcgcaccggcgacctgctcggcagcggcacgatctcgggcgcggacgacgcagcgcgcgcctgcatcaccgagctgacgaatgccggcaaggacccgctgcgcctgccgaacggcgaaacgcgcacggcgctggaagacggcgatgaaatcgtgttgagtgcacgcgcaacgaagtcgggcgcggtgtcgattggcttcggcgaatgccgcggccgtatcgcgccggcactcgccgtcgcgggccgccgcgaggagatcgcggca

SEQ ID NO: 13743 - DNA, 870 bp, Burkholderia fungorum
atgagctggctcgataaactgctgccgccgaaaatcaaacaaaccgacccgaagaaccgcaagggaattccggaaggcctgtggatcaagtgcccgtcgtgcgaagccgtgctgtaccgcaatgacgtcgaggccaatctgcatgtttgcccgaaatgcgaccaccacatgcgcatcggcgcgcgtgagcggctcgacggcctgctggatccggaaggtcgctacgaaatcggccaggaaatcgtcccggtcgacgcgctcaagttcaaagacagccgcaagtaccccgaccgtctgaaagaagcgatggacgacaccgacgaaaccgacgcaatggtcgtcatgggcggcgcgatccatacgctgccggtggtggtggcctgcttcgagttctcgttcatgggcggctcgatgggctccgtggtcggcgagcgcttcgtgcgcggcgcgcagaacgcgctcgaacagaaagtgccgttcatctgttttaccgcttcgggcggcgcgcggatgcaggaaagcttgctttcgctgatgcaaatggcgaagaccacggccatgctgacgaagctcgccgaagccaggctgccgttcatctccgtgctgaccgacccgactatgggcggcgtatcggccagtttcgcgttcctcggcgacgtggtgatcgcggaaccgaaggcgctgatcggctttgccggcccgcgcgtgatcgagcaaaccgtgcgcgagaaattgccggaaggcttccagcgcgccgagttcctgctgacgaagggcgcgatcgacatgatcgtcgaccgtcgcaagctgcgtgaagagatcgctcaactgatggcgcttctgagccatcaaccggcagacgcggtggcg

SEQ ID NO: 13744 - DNA, 4839 bp, Burkholderia fungorum
atgcaagcaaagaacgaagaagctgtcacgcacttgctgaacgatgtcgtcgaatttgcacgggggcgcctgcccgagcccaccttcaaggttgtcgaaccgtttctgcggcactactacgatttcgtcgacgccgacgatctgcaaagccgctcgatcgccgatctctacggcgcggcgctcgcgcactggcaaacggcgcagcgtttcgtagccggcgccgaacggctgcgcgtctataacccgattctcgaacagcacggctggcactcggatcacaccgtgatcgaaatcgtcaatgacgacatgccgtttctggtcgattcggtctcaatggcggtcaaccggcatggtctcgcgctgcattccgtcgtgcacccggtgtttcgcatctggcgcgcgcccgacagcacgatcgcgcgggtgagtcagggcgccgaagaagccaccgacacgcgttcgcacctgacctcgttcatccacttcgaagtcgaccgttgcggcgatgccgcaaaactcgacgcgctgcgcgacgacatcgcgagagtattgcgcgacgtgcgggcggcggttgaagactggccgaagatcgtcgaactcgcgcgtggcacgatcaaaggcatgaaagccggcgaggcgggaccggaaggtctggaagcacgcgcgtttctcgaatggatggtggccgatcatttcacctttctcggtcagcgcgattacgaactggtgcagcacgatgccggttacggtctgcgcgcggtgccgggctcgggcctgggcatcctgcgtgatgcgctgcggccggtaggcgcggccgaggtcacgcccttgccgccggccgcggtcgagatcgtttccgcttcgtcgccgatctttctcaccaaggccaattcgcgggccaccgtgcaccggccgggctatctggactacgtgggcatcaagctgaccgatgcggacggcaaggtcaccggcgagcgccggttcattggtctctatacgtccacggcgtatttcgtgtcggcctcggagattccgatcgtgcggcgcaaatgcgcgaacatcgtgcggcgtgccggatttctggccaaaggtcatctggcgaaatcgctcgtgaccgtgctcgaaacctatccgcgcgacgagctttttcaggccgaagaagatcagctctacgacatcgcgctaggcgtgctgcgtttgcaggagcatcagcgcacccgtctgttcgtgcggcgagaccgcttcgaccgtttcgtgtcgtgcctcgtgttcgtgccgcgcgacaagtacaacaccgatctgcgccagcgtatcgcgaatctgctggccgacgcgttcaacggcgagagcgtcgaattcacgccgctgctttcggagtcgacgctcgcgcgcattcactttgtcgtgcatgcgaaaccgggcggcatgcccaacgtcgatacgcgcgagctggaagcgcggctcgtgcaggttgcgcgccgctggcaggacgatctcgccgatgcgttgctcgacgcctttggcgaagagcagggcaaccgtctgctgcaacactacgcggattcgtttcccgccggctatcgcgacgattatccggcccgtacggcggtgcgcgatatcgaactgatcgaacgcgtgcaaggcagcgagcggctcgccatgaacctgtaccgtccgatcgaatcgggcccgcgtgcgtttcgcttcaaggtgtatcgcgcgggtttgccgatcgccttgtcgcgcagcttgccgatgctcgaacatctcggcgtgcgtgtcgatgaagagcggccctatctgatcgaagcgctgggtgcgacgccggcatggattcacgatttcggcctcgaactggcggacgacgcggagttcgatatcgaacgtgtcaaggatctcttcgaagaagcgttcgagcaggtctggaccggagcgatcgaaagcgacgacttcaatcgcctcgtgttgcgcgcgcaactggatgcgcgcgaggtgacgatactgcgtgcctacgccaagtatttgcggcaggtgggctcgaccttcagcgacgcgtatatcgagcgcgcggtgactggcaatccggcgattgcgcgcatgctggtcgagctgttcgtggcccgcttcgacccggtgctgggcgagacgcgcgaggcgcgcgtggacggctggctgcgcacgatcgacagcgcgctcgaccaggtgccgaatctcgacgaagaccggatactgcggcaatttctcggcgtgatcaaagccacgcaacgcaccaactattatcgtttcgacgccgaaggtcatcccaagccgtatctgtccttcaagttcaatcccgcgctggtgcccggcctgcccgaaccgaaaccgatgttcgaaatctgggtctactcgccgcgcgtggaaggtgtgcatttgcgcggcggacgcgtggcgcgcggcggtttgcgctggtcggaccggcgcgaggatttccgcacggaagtgctcggcctgatgaaagcgcagatggtcaagaacgtagtgatcgtgccggtcggttccaagggcggcttcgtcgtgaagaatccgccgccgcaaaccgaacgcgacgcgtggatgcgtgagggcattgcgtgctatcagaccttcctgcgcggcctgctcgatctgaccgacaacctcgcgggcacggccgtggtgccgccgcccgacgtagtgcgccacgatcccgacgacccctacctggtggtggccgccgacaaaggcacggccacgttctccgactacgcgaacgcgatttcgcaggaatatggcttctggctggacgacgcgtttgcgtcgggcggctcggtcggttacgaccacaagaaaatggccatcaccgcgcgcggcgcatgggagtcggtcaaacggcacttccgcgaaatgggcgtggatacgcagaccacggatttcacggtggtgggcgtgggcgatatgtcgggcgacgtgttcggcaacggcatgctgctgtcgccgcatatcaggctggtggccgcgttcgatcatcggcatatctttctcgatccgaatcccgatccggcggtcagtcttgccgaacgcgggcgactgttcgtgctcgaccgatcgagttgggccgactacgacccttcgctgatctcggcgggcggcggcgtatttccgcgcagcgccaagacgattccgctttcgcaggcggtgcagtcggtgctcggcatcagcgcaccggcgctcgcgcccgctgaattgatgcgcgcaattttgcaggcgccggtcgatctgctctacaacggcggcatcggcacgtatgtgaaggcgagccgcgaaacgcatctgcaggtcggcgatcgtgccaacgacgcgatccgtgtcaatggcgcggatttacgctgcaaggtcgtggccgaaggcggcaatctcggtctgacgcaactcgggcgcatcgagttcgcgcagcgcggcggccgtatcaataccgatgcgatcgacaattccgcgggcgtcgactgctcggatcacgaggtcaacatcaagattctgctggggctggtcgttgccgagggcgagatgacggagaagcagcgcaacgcgctgctcgccgaaatgaccgacgaggtcggtttgctcgtattgcaggacaattactaccagacgcaggcgctgtcgatcgccggccgctacggcgtcgaattgctcgatgcggaagcgcgcctgatgcgctacctcgaacggaccgggcgcctgaatcgcgtgatcgagtttctgccgaccgatgaagaggtcgctgaacggcaggccgcgaagcaggggctcaccacgccggagcgcgcggtgctgctcgcgtacagcaagatgtggctgtatgacgcactgctcgaatcgtcgatgccggaagacccgctggtcgccgacatgctggtcgaatatttcccgaagccgttgcggcagcgctttagcgcgccgatgcaacgccacccgctgcgccgcgaaattctcgcgacacatctgaccaacgcgctggtgaaccgggtgggctgcgagttcgtacaccggttgatggaggaaaccgacgcgcagcccggcgatatcgtgcgggcctgcatcatggcgcgcgacgtgttcgatctcgaccacgtctggcgcagtatcgacgcgctcgacaatcgcgtcgccgacgacgtccaggcgcgcatgttcgtcgaagtcgcgcgactcgtcgagcgttctgcgctgtggttcctgcggcaattgcaatcgggcgcggtcagcgacggcgaggtggccggcctgctcgcacgctgccgcgacgcagcgcaacggctggcgtcgcaatggcccgcgctgctgccgggcgccgacctcgaagcgctctccgagcggcaacgcgtattcgcggacgccggcgtggatagcgaactggcggtacgggtcgcgagcggcgagatctcggccgcgctgctcgatatcgccgaagtggcgtcgacctgcgggcgcagtctcgaactggtggcgggtgtctactttgcgctcggcacgctgctcaattccagctggatcagcgagcgtgccaccgctttgccggtgcccacgcattgggacatgctggcgcgcgccacggcactggccgagctcgcgcgtctgaagcgcgcgttgaccaccagtgcattggccggcgccaacgaagcatccacaccggatgcgctcgtggaggcatggcgtcagaagcgcaccgcgcaactggaacgctatggccggctgctgaccgatctgcgggccacgggcggcgcgagcctgtccatgctgctggtgatcgtgcgggagatggcggcgctcgaaagggct

SEQ ID NO: 13745 - DNA, 765 bp, Burkholderia fungorum
gtgcagccttgttcgcacgcgaaagccgccgaggtccaggctagcgggagcctcgcgaaactcgcggcgctggaggctgaactggagcaagcgcgcgctgcgctcgcagcggagcgcgaagcggccgccgcgcgggccgaccaaatgtcggttcatctcaacgacctgcagcgcgttactcaggaactggaagagacgcgtcagcagatcgcgaccatgaacgaggcgaaggcggccgcgagcgccgatctggctcgggtgtcgcaggacgcgtcggcggcgaaggagcgcgcggaggccgccgaacagcaggttgtgcagttggaacagcgtctcgcggcgcaagccgcagccatcgcgcagcagaatcagcgtgctcagcaggccagcgttcgagccgacgaggctgagcgcgcggaggaagtcgccgcgttgcaacggcagatagcggcacaagccagggccaacgcaaaagccctcagcgagcttcgcgctactgccgaacagtgggtcgcgcatgccaaggacctcaagcagcggctcggtctggcaagcgagcggatcctgttcatcgacgcacgcagcaccggcgaggtggcgctcgtcaggcggctttcatccgaactggagcggctcaagccggatcacgagctgatcgccagagagacacagcaaaaactgatcggcgcgacgatgagccaccagctcgcgcagaaaggctatcgctatgatccggctacggcggtgatgtcgaaggtcacggcc

SEQ ID NO: 13746 - DNA, 414 bp, Burkholderia fungorum
atgacgagaatcgactttcactcgaacgtcggcgattcgctgctgtatgcgtgccgcctgatccgcaaagcgtatcaggcgggccagccgaccatcgtgctggccgagccggcgcgcctgaaggccttcgacgaacagttgtggaccttctcgccgctcgacttcgtgccgcactgcatggcgggcacgccgctcgccgcgcaaacgccgatcgtgctggcttccaccctcgaggatgtgccgcatcatcaggtgctgctcaatctcggcgccacggtgccggcgcaattcgcgcgcttcgaaagattgctggaagtggtcggtaacgcacacgaggaactcgctgcgggccgcgagcgctatcgcttctatcgcgatcgcggctatgctttgaacaactacaagcaaggcagc

SEQ ID NO: 13747 - DNA, 1275 bp, Burkholderia fungorum
gtgcaaggctcggtggccgtcacgcaaggcgcgcctttctggaagaggattctgcaattcgcggggcccggcctgctggtctcgatcggctatatggacccgggcaactgggcgaccgacatcgaagcgggctcgcgctatgggtacagcctgctgttcgtcgtcatgctgtcgagtctcgcggcgatggcgctgcaatgtctgagcatgcgcctcggcattgctaccgggcgcgacctcgccgaattgtcgagaacacgctattcaccggccgtggcgcgctttcagtggctgttggcggaactctcgatcgtggcctgcgatctggccgaagtgctcggcggcgcactcgctttccatctgctcttcaaatgctcgctgaccaccggcgtgctgctgaccgcgttcgatacgctgatcgtgctcggcctgaagggcaagaatttccgcgacctcgaagcgatcatgctcgggctgatcgcgaccatcggcgtcgggtacatcatcgaactggcgctggtgcagccgcactggccatcggtcgcgcaggggctgattccgtcgtggcaggctttgagttcgcgcgagcccatgtatctggcaatcggcattctcggcgcgacggtcatgccgcataacctctatctgcattcgtcgatcgtgcagacgcgcgcggtgaagcgcgatcccgccagcatcaggtcggcgatcggcatgtcgcgcatcgacacgatcgtgtcgctcgtgctcgcgctgctgatcaacatggcgatcctgattctggccgccgccgcgttccatgccaccggccacaatcaggtcaccgaaatcgaggacgcctacaagctgctcgcgcccatcgtcggcaccggtttcgcagcggtgctgttcgccgtgaccttgctcgcctcgggacaaagctcgacctttaccggcacggtggcggggcaggtcatcatggaaggtttcctgaaactgaagattccgtgctggcaacggcgcttcatcacgcgggctctggcgttgattcccgcgctcatcggcgtgcagatgatgggcaacggcgctgtcggcaagctgctggtcgcaagccaggtcgtgctgagcctgcagttgccgttcgcgctttatccgctgatccgcatgaccaacgaccgttcgctgatgggcgaattcgccaatacgctgctgacgcggtgcgtcgcgtggacgctgttcgtggtgatcagcgcggcgaacctctggctggtggtgcaaacggccggattggccgga

SEQ ID NO: 13748 - DNA, 1638 bp, Burkholderia fungorum
atggcagctaaagacgtcgtattcggtgattccgcccgtgccaagatggttgaaggcgtgaacatcctcgcgaacgctgtgaaggtcacgctgggcccgaagggtcgcaacgttgtcctggaacgcagcttcggcggccccacggtcacgaaagacggtgtgtcggtcgcgaaagagatcgaactgaaagacaagctccagaacatgggcgcgcaaatggtcaaggaagtggcttccaagaccagcgacaacgcaggtgacggcaccacgaccgcaacggtcctggcacagtccatcgttcgcgaaggcatgaagtacgttgcatcgggcatgaacccgatggacctgaagcgcggtatcgacaaggctgtgttcgcagcgatcgaagaactgcgcaagatcagcaagccgtgcacgaccaacaaggaaattgcacaagtcggcgcgatctcggcaaacagcgactcgtcgatcggcgatcgtatcgctgaagcaatggacaaggtcggcaaggaaggcgtcatcaccgtcgaagacggcaagtcgctgcaagacgagttggacgttgtcgaaggtatgcagttcgaccgcggctacctgtcgccgtacttcatcaacaacccggacaagcaggttgccgtgttggagaacccgttcgtgctgctgcacgacaagaaggtgtcgaacatccgtgatctgctgccgattctggaacaggtcgccaaggctggccgtccgctgctgatcatcgcggaagacgttgaaggcgaagcactggctacgctggtggtgaacaacatccgcggcattctgaagaccgttgctgtcaaggctccgggcttcggcgatcgtcgtaaggccatgctggaagacatcgcgatcctgaccggtggtcaggtcatcgctgaagaaaccggcctgacgctcgaaaaggcaacgctggccgaactgggtcaggcgaagcgtatcgaagtggcgaaggaaaacaccacgatcatcgacggcgcaggcgaagcggccaacatcgaagcacgtgtgaagcaggttcgcacgcaaatcgaagaagctacgtcggactacgaccgtgaaaagctgcaggaacgcgttgccaagctggcaggcggcgttgcagtaatcaaggtcggcgctgcgaccgaagtcgaaatgaaggaaaagaaggcacgtgtcgaagacgcactgcacgcaacgcgcgcagctgtggaagaaggcatcgtcgctggcggcggcgtcgcgctgatccgcgcacgtacggctatcgctggcctgaagggcgctaacgccgatcaggacgcaggtatcaagatcgtgctgcgcgcgatggaagagccgctgcgtcagatcgtcacgaacggtggcgaagaagccagcgtcgtggtggcggcagttgctgctggcacgggcaactacggctacaacgctgcaaccggcgagtacgtcgacctggtcgacgctggtgttgtcgacccgacgaaggtaacgcgcacggcgctgcagaacgcagcttcggtggcaggtctcctgctgaccaccgacgcagctgtttgcgaactgccgaaggaagatgcaccgatggccggcggcatgcccggcggcatgggcggcatgggcatggacatg

SEQ ID NO: 13749 - DNA, 699 bp, Burkholderia fungorum
atggagacacgcgtgttcctatatggctttggtccggtgctgctggccggcacgatccagacgatcgagctgtccgtcctgtcgctcgtggccgccgtgctgctcggcctcgcgggcgcggcggcgaaactctcgttcagtcgcccgctgcgcgcaatcgccaccggctacacgacgctgatccgctcggtgcccgacctcgtgctaatgctgctgctgttctacagcatccagatcgcggtgaacgatctcaccgacgcgctgaatctgccgcagttcgatatcgatccgttcgtggccggcgtgctgacgctcggcttcatttacggcgcgtacttcaccgagacgttccgcggcgcgtttctggccgtgccgcgtggccagctcgaagcgggcagcgcgtacggcatgagcggcgcgcgcgtgttcacgcgcatcctgtttccgcagatgatgcgcttcgcgctgccgggcatcggcaacaactggcaggtgctggtgaaggccaccgcgctggtgtcgatcatcggtctcgccgacgtggtcaaagccgcgcaggacgccggcaaaagcaccttcaacatgttcttcttcatcctgatcgccgcgctgatctatctggctatcaccaccgtgtcgaatctcgtgctgatctggctggaaaagcgctattcgaccggcgtgcggcacgcggagctc

SEQ ID NO: 13750 - DNA, 1365 bp, Burkholderia fungorum
atgctcgacaatctgactcaacggatggcgcgcgtcgtcaagacgctgcgcggcgaagcccggcttaccgaggcgaacacccaggaaatgctgcgcgaagtgcgtctcgcactgctcgaggccgacgtggcgctgcccgtcgtgcgcgagttcatcgccaaggtcaaggaaaaggcgctcggcgaggaagtcatcagcagcctctcgccgggccaggcgctggtcggcgtggtgcagcgcgagctgaccgcgatcatcggcggcgactacgaaggcaaggcggtcgaactcaacctcgccgtcacgccgccggccgtcatcctgatggcgggcctgcagggcgcgggtaaaacgaccacggtcggcaagctcgccaagctgctgcgtgagaagtacaagaagaaagtactgaccgtgtcgtgcgacgtctaccgccccgccgctatcgcgcagttgaagacggtgaccgagcaggtcggtgcggatttcttcccgtcggaaccggaccagaagccggtggacatcgcgcgcgccgccgtggattgggccaggcgccactatcacgacgtgctgctggtcgacacggccggccgtctcggtatcgacgaagcgatgatgaaggaaatcaccgcgctgcacgccgagctgaaaccggcggaaacgctgttcgtggtcgacgcgatgctcggccaggacgcggtgaacaccgccaaggcctttagcgacgcgctgccgctcaccggcgtggtcctcaccaagctcgacggcgactcgcgcggcggtgcggcgctctccgtgcgccatgtcacgggcaagccgatcaagttcgtcggcgtcgcggaaaagctcgacggcctcgaagtcttccacccggatcgcatggcgaaccggattctcggcatgggcgacattcttgccctcgtcgaagaagcgcaacgcggtgtggacgttcaggctgcgcagaagctcgccgacaaggtcaagaaaggcggcgacttcgatctgaacgatttccgcgcccagctgacgcaaatgaagggcatgggcggcctgtcgtcgctgatggacaaattgcccgcgcaatttcagcaggccgccgccggcgccgacatgggccaggccgaaaagcagatgcgccgcatggaaggcatcatcaattccatgacgccgctggaacgcgccaagcccgacctgatcaaggccacgcgcaagcgccgcatcgccgcgggtgcgggcgtgcaggtccaggaagtcaaccgcatgctgaatcagtacgaccagatgcgcaccatgatgaaaaagctcaagggcggcaacctgcagaagatgatgcgcggcatgaagggcatgttgcccggcatgcgc

SEQ ID NO: 13751 - DNA, 1905 bp, Burkholderia fungorum
atgcgtttgcgccgcccccttcctgtcgcgaaggtggcttacaacccggttgcgtccgcgcagatcgctctgcaatgcatcggccggctgggctattccgtggagaatgcaatgagtcaaaccgtgggtgactttattatcgatcggctgcatgcgtggggtgtgcggcgaatttacggctatccgggcgacggcatcaacggcgtcttcggcgcgctgaatcgcgcccacggcaagatcgaattcgtgcaggtgcgccatgaagaaatggctgcattcatggcctcggcgcacgcgaaattcaccggcgagctcggcgtttgcatcgcaacctcagggccgggcgcatcgcatctgctcaccggcctctacgatgcccggctcgatcacatgccggtactcgccattgccggacaacaggcccgcgcggcgctcggcggccattaccagcaggagctggatctggtgtcgatgttcaaggacgtagccggcgcgttcgtggagcaggctagcgtgccctcccaggtccgtcatctggtcgaccgcgcggtgcgcacggcgctcgccgaacgcaaggtcacggctctcgtgttgcccaacgatctgcaggatcttgcgtacgaagcaccggcgcgcaagcacggcacgctgcattcgggggtcggctaccggcggccccgcctcgtgccctatccggacgatctgcaacaggccgcggaagtgctcaacgccggcaagcgggtcgcgattctggtcggcgcgggcgcgctgcatgccaccgacgaagtgatcgccgtcgccgacaagctcggcgcgggcgctgccaaggccttgctcggaaaagcggcgttgccggacgatttgccgtgggtgaccgggtcgatcgggctgctcggcaccaaacccagttacgacctgatgaccgagtgcgacaccctgctggtgatcggctcgggtttcccgtacgccgaattcctgcccaaggagggcgccgctcgcggcgtgcagatcgacctcaaggccgacatgctcagcctgcgctatccgatggaagtcaacctggtgggcgacagcgtcgagacgctacgcgcgctgctgccgttgctcgaacagaagcaggaccgcggatggcgtgaaaagatcgaaggttggactgccgactggtggaagacactcgacaaacgcgcccacgaagcaggcaggaaggggatgaatccccagcgcagcgtatgggaactgtcgcctcgcctgcctgccaatgccatcgttacaagcgattccggatcatgcgcgaactggtacgcgcgcgacctgaaagtgcagcgcgggatgatgtgctcgctgtccggcggtctcgcctcgatgggggcggcggtgccgtacgcgatagccgcgaaattctcccaccccgagcgcccggtgatcgcgctggtgggcgacggcgcgatgcagatgaacaacatggcggagctgatcaccgtggccaagtactggaagcagtgggccagtccacgctggatctgcatggtgctcaacaatagcgacctgaaccaggtgacgtgggagcaacgggtaatggaaggcgatccgaagttcgaggcatcgcaggacattccgtccgtgccctatcaccgttttgcggagctgatcggcctgaagggcatctacgtcgaggacccggagcgcatgggagcggcctgggacgaagcgctcgcggcagaccgtcccgtggtcattgaagtgaaggccgatccggacattccgccactgccgccgcatatcacgttggcgcaagccaaagccttcgcgtcgacgctgatcaagcgcgatccgaacgaaggcagcgtgatcatcgaaaccgccaaacaggtgctcggcgcggtgctgccggggcatcgcgacaaa

SEQ ID NO: 13752 - DNA, 1077 bp, Burkholderia fungorum
atgaaccagcccgctcaaaccgccacgccagtccgtcccgacgccgcctacacgcgcggcgcggcgctgcccgcgctgctcaagtcgcgcatcctgattctggacggcgcaatgggcacgatgatccagcgctacaagctcgacgaagcccgttatcgcggcgagcgcttcaaggactacgggcgcgacatcaaaggcaacaacgagttgctgtccatcacgcagccgcagatcatcagcgagatccatgagcagtatctggcggcgggcgcggacatcgtcgaaaccaatacgttcggtgcgaccacggtcgctcaggcggactacggtatggaagcgctcgcggtcgagatgaatctcgagtccgcaaaactggcgcgtgccgcgtgcgacaagtattcgacgcccgacaagccgcgctttgtcgccggcgcgatcggaccgacgccgaagaccgcgagcatttcccccgacgtgaacgatccgggcgcccgcaacgtgactttcgacgaactgcgcgcggcctactacgagcaggccagggcgttgctcgacggcggcgtcgatctgttcctcgtggagaccattttcgacacgctcaatgcgaaggcagcgctgttcgcactggacgaactgttcgaagataccggcgagcggctgccgatcatgatctccggcaccgtcaccgacgcctcgggacgcattctctcgggccagacagtcgaagccttctggaactcgctgcggcacgccaaaccgctcaccttcggtttgaactgcgcgctgggggcggctttgatgcgcccgtatatcgccgagctggccaagctgtgcgacacgtatgtgtcgtgctatccgaacgccggcttgccgaatccgatgagcgatacgggctttgacgaattgcccgcggatacctctggtttgctgaaggaattcgcacaggccgggctcgtgaatattgccggcggctgctgtgggacgacgccggagcatattgcggcgattgcgcaggcgctggctggcgtgaagccgcgcgtgtgggcaaactatcgggaaaccgatactgaaacagtt

SEQ ID NO: 13753 - DNA, 1641 bp, Burkholderia fungorum
atgacggtatccaagttgctgtttgcagttcgccaaacctgccttccagcgctgagcgcctgtgccgtgctgactgcgagccttgcgcccgccgcagccgatgcggccacgctgcccgacaagaccctcgtgttctgctctgaaggcagtccggcgggcttcgacagcgcgcagtacaccaccagcgtcgaattcagcgcgggctcgtacacggtctacaaccgcctgatcgagttcgcgcacggcagcacggatatcgaaccgagtctcgccgaaaagtgggatgtgtcgcccgacgggctgacctatacgtttcatttgcgccacggtgtgaaattccagaccacctcgtttttcaagccgacgcgcgaattcaacgcggacgacgtcgtcttcacctatcagcggatgctcgatccggatcagccgttccgcaaggcatacgccgtaccgttcccgtatttcaccgatctcgggctcgccaagaacattgcgaagatcgaaaaactcgatccgtacacggtgcgtttcacgctgaaggaagtcgatgcgccgtttttgcaacagatcgcgatgccgttcgcatcgatcctctcggcggaatatggcgaccagttattgaaagcgggtaaagcgtcggatatcaatcaatatccggtcggcactggtccgttcatttttcgcagctatacgaaagacgacacgattcgcttcgacggcaatcccgattactggaagccgggtgtcgtcaaagtcagcaagctgatattcgcgattaccgtcgatccggccgtgcgtctgcaaaaactcaagcgcggcgaatgccaggtgatggcgtatccgcgtcccgccgatattccggcggtcaaagccgatgcatcgctggccatgccgaaccaggtgggtttcaacctcggctatatcgcctacaacaccactaagaagccgctcgacaatgtgctggtgcgccgtgcgctcgatatgtcgatcaataagaaagcgattatcgactcggtgtatcagggggcgggccaggctgccacgaaccccatgccgccgacccagtggggctatgacaagaatctgaaagacgcgccctacgacacggaaaaagccaaggcgctgctgaaacaggcgggttatcccgatggcttcgatctgacgctgtgggccatgccggttcaacggccatataacccgaacgcgcgtctgatggcggaaatgctgcaatccgattgggcgaagatcggcgtcaaggtgaagatcgccacttacgaatggggcgaatacattcgccgcggccatgccggcgaacatgaagcgatgctgatcggctggaccggcgattacggcgacccggataactggctcggcgtattgctgggttgcgacgcggtcaatggcagtaacttttccaaatggtgctacaaaccttacgacgacttgatcagaaagggccgcggcaccactgacctggctgagcgcaccaaggcttacacggaagctcaggaaatattcaaagatcaggttccatttacgccgatcgcccactccacggtctatcagccgatcagcaagaacgtgacgggcttcaagatcgacccgttcggcccgacgcaattcatgaatgtggggctgaaa

SEQ ID NO: 13754 - DNA, 954 bp, Burkholderia fungorum
atgcgccgtcgcgtgttgtttgccggcgcgctggtcgccgccggcattggcattggcggcacggcaggcgccgtgcccgtgcagggcggcaagctcaaaatcgcgctcgtgctgaagtcgcagaccgatccgttcaccgtggcgatggcgaacgccgcgcgcgattaccagcagcatttcgcgtcgcagttcggtttgacggtgcgtgcaacggccaccgaaagcgataccgctggccagatccgcatggtcgaagagatgatcaaggcgaagatgaacgcgatcgtcatcgcgccgactgattcgaaggcgttgaccgcggtggtcgcgcgcgggatcaaggcgggcatcgtcatgatcgccatcgacaacccgctcgacgaggccgcccaggatgcggccgggatttccgtgccgttcgtcgggccgaacaatcgcaagggcgcgcagcaagtcggcagttatctggcggggcgactcaatgcgggcgatcaggtgggcgtcatcgaaggcagtccggccgatcgcaatgcacagcagcgcacggaaggttgcagggacgcgatgaatgccgcaggcatcaacatcgtcgccgttcagtccggagagtgggaatacggcaaggggcgcgacattgccacgaagatgctcaacgatcatccgcagatacgcggcctgctgtgcggcaacgacaacatggcaatgggcgcggtggatgcgattcgcgacgcgggccgaacgggcggcgtctatgtcaccggctataacgatatcgaggcgatcaagccgttgatcgccgatggccgcgtgctcgccacgatcaatcagttccccgcgcggcaagccatattcggtgtggacgtggcgttgaaggcggtgatggagcagaagaagcagagcgaactgtcgagggtgatcgaaacgccgctgcaactggttacggccgcggatcgc

SEQ ID NO: 13755 - DNA, 585 bp, Burkholderia fungorum
atgaccaccacacgacaggccgcccgcacgcgagccttgtcccaattcgaacagacatcaggagtttcgatgaaaaaagcactggtaatgctggccaccgcggtcgccatgagcggcgcgttcgcacaaacttccgcgccggcgtcggcaccggtgaacgccgcttcggcacccgccgccagagccggccacgagcgcaatgtcgaagaccgcatcgcctacctgcattcgcaactgaagatcacttcggcacaggaatcgcagtggaacgcgttcgccgacgtcatgcgcagcaacggccagacgatgggcgagttgttccagcaacgccgcgccgcgaccaacgtgtcggcactcgacgacatgaagcaatacgcaacgatcgcgcaagcacatgcggacggcatgaagaaactggtcgatgcgttcgatccgctgtacaacagcttctcgccggagcagaagaagctggcggatgcgacgttccgtcagccgggcgggatggaaggccacggtcatcatggcagaggcaagggtaaaggcggcaagcccgccgcgcccgccagcgacgccattgtgaagccg

SEQ ID NO: 13756 - DNA, 1011 bp, Burkholderia fungorum
atggatctggaccagattgtcgccgacgcgcaaaaagccttcgcagaagccaccgacgtcaccaccctcgagaacgagaaagctcgctttctcggcaaatcgggtgcgctgaccgagctgttgaagggccttggcaaactcgatcccgaaacgcgcaagaccgaaggcgctcggatcaacctcgtcaagcaacaagtggaagccgcgttgacggcccgccgtcaggcgttggccgaggcgttgctgaaccagcgcctcgccgctgaagccatcgacgtcacgctgcccggccgcggcaccggcgcaggcagcctgcacccggtaatgcgcacgtgggagcgcgtcgaacagattttccgtacgatcggattcgacgtggccgacggccccgaaatcgaaaccgactggtacaacttcacctcgttgaacagcccggagaatcatccggcgcggtccatgcaggacactttttacgtcgacggcaaagatgccgacggccgccagctgctgctgcgcacgcacaccagcccgatgcaggttcgctacgcgcgcaccaacacgccgcccatcaaggtgatcgtgccgggccgcacgtaccgtgtggacagcgacgcaactcactcgcccatgttcaaccaggtcgaaggcctgtggatcgacgagaacatcagcttcgcggacctgaagggcgtctacaccgacttcctcgagaaattcttcgagcgcgacgatattcaggtgcgcttccgtccgtcgtactttccgttcaccgaaccgtcggcggagatcgacatgttgttcgaaacgggcaagaacgccggcaagtggctcgaaatttcgggctcgggccaggttcaccccacggtgatccgcaatatgggcctcgacccggagcgttacatcggctttgctttcggcagtggcctcgagcggctcaccatgttgcgttacggcgtgcaggacctgcgtctgttcttcgaaaacgacctgcgtttcctgcgtcaattcgcg

SEQ ID NO: 13757 - DNA, 1041 bp, Burkholderia fungorum
atgatccgcaagaattccgaatacccgctccagccaccgcgtgaacgcggcaccgggcgagcctttgtgttcgctctcgtgatgcacgcgctgctcgggttcttcctgtatcacggcattcagtggcaaaacagtacgcccgaaggcgcggaagcggagctgtggaccgaagtgccggatacgtcgatcccgcgcccggttccgccgccggtaccggtgccggtggctcctgctccgccgatgcgggacgaacaggccgacatcgcgctgcaggaaaagaagcgtcagcaacaggaagcggctcgcgaggctcagttggccgaacagcagcgtcagcagaaactgcaggcccagcaggaagccgaggcgaagcgtcagcagcaactggccgcggaccaggccgcgcagaaggccgcggcggccagacagaaacagctacagctacagcagcagcaacagcaacagcaacagcagcaggaggccagcaagctgaagcaacagcaattggccgagcagcaaaagcagcagcagttgaaagaacagcagcaggaacagcaacagaagcaggccgaggctgaggcgcagaagaaggccgacgcgcagaaagccgcgaaggccaaggcgcaggcggacgccgcggcgcaagcgaagaaactggatgcggagcgccgcgcgcggctcgcgcagatgcagggtctcgccgccaccggcaccggctcgaccacgagcgatgggctcggaaagagcggcacgggcagcggctcgggtggcacggcgacgtcgccgggttactccgacaaggtgcgtcgtgcggtgcgcccgaatatcacctggggcggtgaaacgagcggcctggagacagtggtctccgtgcgttgctcgccgaccggcaccttgcttggcgcaacgatttcgcgcagcagcggcaacccggcgtgggacgacgcggcgctgcgggccgtccagcgtaccgatccgatgcctcaggacatcaatggcaagaccccgaccagcttcctgattacgttgcgcccggccggt

SEQ ID NO: 13758 - DNA, 1104 bp, Burkholderia fungorum
atggtgcaagccacacagaccggcgaaccggaacaccagccggactattcggacttcgagggcacgcgcccggtcagcgagcggcaacgcttcgacagcgacgcgctcgccgcgtggctgacccggcacgtcgacggattcgccggcccgctcacgctggagcaattcgccggcggccagtccaatccgaccttcaagctgctcacgccgtcccgctcgtatgtgatgcgcgccaaacccgggccggctgcgaaactgctgccgtccgcgcacgccgtcgaacgtgaatatcgcgtgatgcacgcgcttgccggcaccgatgtgccggtcgcgaaaatgctcgccttgtgcgagaacgaaagcgtgatcggccgcgcgttctatgtgatggagttcgtcgaaggccgcgtgctgtgggaccagtcgttgcccggcatgacagccgccgaacgcgcggccatttacgacgagatgaaccgcgtgatcgcggcgctgcacagcgtcgacgtgacggcggtgggcctcgccgattatggcaagccgggcaattacttcgcgcgccagatcggtcgctggagcaagcagtacatcgcgtccgagaccgaaccgatcgatgccatgcagcgcctgatcgaatggctgccgcagcatatgccggccgaaacgggcgagcgcgcttcgatcgtgcatggcgactaccggctcgacaatctgatctttcatcccgaggaaccgcgcgtgctcgccgtgctcgactgggagttgtcgacgctcggcgatccgctcgccgacttcgcctatcactgcatggcgtggcacgtcgacccaacgcagttccgcgggatcgggggcctcgactgggcggccttgggcattcccgacgaaagccagtatgtcgcgcgctattgccaacgcaccggcttcgagattcacggcgactggaatttctacctggcgtacaacatgtttcgcatcgccgcgatcctgcaagggatcatgaagcgtgtcgtcgacggcaccgcggccagcgcgcaggcgctcgatgccggccgccgcgcgaagccgatggccgaactcgcctggcgctacgcgcagaaagtgcgc

SEQ ID NO: 13759 - DNA, 936 bp, Burkholderia fungorum
atggacacattggagaacatgcggatgttcgttcgagtcgtggaagcaggcagcttcacgaaggccgcatctcttttgtcggtggcgacacctcaggtatcgcgtgccataacagaactggagtcgcgattgcgtacccgtctgcttaaccggacgacgcgacacatgtcactaaccgaagcgggcgaacgttacctgcaacgttgcgaacagattcttgaatacgtcggtctggccgaagcggaagccgcaggagcggcggcgcagccgtccggaaagctgcggattcacggcaccaccagtttcgggcaacattatctggcgccactcatcgcgcgctataaccagcgattcccggacgtcctcattgatcttgtactcgcacaacgagtgccggacatgatcgaggaagggtttgatgtatcggtggtcgtggctagagaattggccgattcggcactcgtctcacaacgcatcggtaccacgtgcactgttctctgtgcttcgccccagtacctgtcgaagcgaggtatgcctgtctcactagaagatctgaacacgcatacgtgcctgcaactcgttctcccggatgtaccctcgggacaatggatttttgatggtccggacgcgcaggtgttccgtcatacacgatcgacaccgcttacagtcaacgtcgccgaagcgctggccgaagcgattcgcgaaggcatgggcatcggcccgctgccattatcattggcattgcagggttttcgcgacggaagcctcgtgcgcgtgctggatggacaccgactgcaatccaacaacatctacgccctttacgcgtccagacaatatctcgatgcgaaaatcaggaccttcgtcgaattccttcgggaaaacgtaccgatccaacttgccgaacaggaacgcgagcttttccatcgattggtcaat

SEQ ID NO: 13760 - DNA, 2346 bp, Burkholderia fungorum
atgaattcgcccctgttcgatgggctcgactcgaactggtcagtcaggtgggtggaatccgtctccgattacgcgatctttgcactctcaccggacggccggatccagagctggaatcccggcggagaagccatttacggataccggcgtgacgaggtcctgggccagccgctggacatcctctatacagaggaagagcggtcaaagggtctacccgcggcaggtctggagaccgcgcggcggacccaccgctacgacaccgaagggtggagagtgcgcaaggacggcaccgtcttctgggcgagcgtggtgacgaccaccttgcgcgcggaagacggtcagattaccggcttcgcgaagatcgtgcgggacatgaccgacaagaagaccgcgcacgacgcggttctcgaaagtgaacggcgttttcgcatgctggttcatggcgtgaccgactacgcgatctatatgctctcgccggagggcatcattaccaactggaacccgggcgcgcgacggatcaagggttacacggcggaagaagtcattggttcgcatttttcgcgcttctacacgcccgaagacgccgcggccgggttgccccagcacggcctcgcggtcgcggcgcgcgagggccgtttcgaggccgaaggctggcgcgtcaagcgcaatggcgagcggtttctggcgcacgtcgtgatcgacgcgatccgcgacgacgacggcatgctggcgggatttgccaagattacccgcgacatcaccgagcgctcggaagccgcccggcttctggaagaaacccgcgcggcactcttccagtcgcagaaaatggaggcgatcggcaagctcaccggcggcgtcgcgcatgatttcaacaacgtcctgcaggtgctgcggggcaatctcgaactgctggaacaccggcacggccgcgacgcatggacccgtgagcggctcgaaaaggcgatcgacgccgtggaacgcggcgcgaagctggcgtcgcaactcctttcgttcggccgccagcagccgctgcaaccggtcgtgatcaatctggcgcccgccatacggggcatggacgacctgctgcgccgcgcgctcggcgagaccgtggaggtcgagaccgtcgtggccggcggcttgtggaacacgctcatcgacattcatcagctggagaacgtgctgctgaacctggcgatcaacgcgcgcgacgcgatgccggacggcggcaagctgaccatcgaactatcgaacgcgatgctcgacgatcattacgtcgcgggactgcccgacgtgccgccgggccagtacgtgctgcttgcggtaactgataccggtacgggtatggccgccgacgtattgcagcgcgccttcgatccattttttaccaccaagccggaaggccggggcactggcctcggactgagcaccgcgtacggcttcgtgaagcagagcggcggccacatccgcctgtacagcgaggtcgggcacggtacgaccgtcaagatttatcttgcccggtcgatgggaaccgcggttgaaccgccgcagaggagcagcgtcacgctgctgaggggcgccgagaccgtccttgtcgtcgaagacgaccgcaaggtccagtcgacggtagtcgacacgttgtcgggtctcggctatagcgtgctgaaggcggacgacgcggagcaggcaatggccgtaatccgcagcggagtccatatcgatctgctgtttaccgacgtcgtcatgccggggccgctgcgcagtccggacatggctgcgcaggcgcttcagttcctgccgcgcctgaaggtgctgtttacctcgggctacacgcaaaatgcgatagttcacggcggccggctcgacccgggggtggaactgctgagcaagccctactcgcgtgaacagctggcttacaagatccggcaactgctggggccgttcaccgggcagacccacgtcgacgcgcaggaagagcccgccgcgcgcagtgatgtcaccgccgtcctgcgcattcttctggtggacgatgatcccgaatccaccgaggccatcggcgcgctgctgaagatgctgggccacgagcctgcgatgaccgattcgccgggagaggcgctgaactggctgaaaaccagatcgttcgatatcctgattgcggaccttgcgatgcccggcatgtcgggcattgaactggcccaaaaggcggtgcaacggcggcccgagctgcgagtggtgttcgcgtccggccgtgagatgccggacgtaccggggttggacttcgtctggaaggcgctgcgaaagccttacgcgctggaggatctcagcgcggtgctggaggaattgcgtcaa

SEQ ID NO: 13761 - DNA, 432 bp, Burkholderia fungorum
gtgcaaacacacgagttgacgatttcgagcaacaaggccgatcttgagatggagacggtctacaccttcctgtcgcaagagaccgcgtgggccaagggcatgccgcgcgagacgttcgagcgggccgtcgcgggctcgctatgtttcggcggctatatcgaaggccggcaggtcgcgttcgcgcgcctgatcacggacggcgcgaccttcgcgtacctgtgcgatgtattcgtgctgccggattatcgcggcaagggatacgcgtccaggttgatgaagcacgtgttcgccagtccgtcgctccagggtttgcgaagaatcgtgctggtgacgacagacgcgcatcacgtgtacgagccgcacggcttcacggggctcgcgaatccggagcgttatatggagttgcataacccggacgtctacaaggcggcc

SEQ ID NO: 13762 - DNA, 789 bp, Burkholderia fungorum
atgatcgatatcgatctgaccgccaccgtgtcggatagcacgcgccgcttcacgctggcgacgcgcttcgcatccgaagcgccggtcgtggcgctctatggcgcttcgggtgccggcaagtcgctcacgctgcaggcgatcgccgggctgttgcggcccgagcgcgggcacgtgcgggtcggcgggcgcgtgctgttcgattcggcgcgcggtgtcgatctgccgccggaccggcgcggcgtgggctatctgttccagcactacgcgttgtttccgcatctgtcggtgcgcgagaacgtggccttcggattgacccgctggtggtggcgcggattgtccggcgctcgcgccgcgcgggtcgatgcgctgctgcacggttttgatctcaccgagctggcgcgcagccgtccggcgggattgtcgggcggacagcagcagcgcgtggcgctggcccgcgcgcttgcctgcgggccggagctgttgctgctggatgagccgtttgccgcgctgaacccgctgctgcgccatgaactgcgcggacaactcgccgacgtggtcaggcgctggcagatgcccgtcgtcatgatcacgcacgacgtcgacgacgtgctcgcgctcgctgacgttgcgttcgtggtcgagcacggtgaggtggtccgcgaggtggatctgcgcagcggcgaagggcgcgacgtcacgcgccgggcgctggtgccggacctcgacatcgcgccgcttacggcgcgcgaacggcgtgtgcgtgcgctactccacgttcccgtggatggc

SEQ ID NO: 13763 - DNA, 999 bp, Burkholderia fungorum
atgacttccatcacgctcctcggtgaaaccgaactccgcgcgctcgtgccgctcgatcttgccgcgatcgatcaggtggaagcggcttttctcgcgctcgcgaccgaagccgtcgcgatgccgccgatcctgcgtctcgatctgcctgagcacaacggcgaaatcgacgtcaagaccgcgtggctgccacgctttgacagcctcgcgatcaaggtcagccccggcttcttcggcaatccgtcgctcggcttgccgagcctgaacggcttgatgctggtgttgtcggccaggaccggcctgaccgaagcagtgctgctcgacaacggttatctgaccgcggtgcgcaccgcggccgccggcgcggtcgcggcgcgttggctggcgaagccgcacacgccgcgagtcgcggtgctgggcgcgggcgagcaggcacgcctgcaattgcaggcgctgacgctggtgcggcgcatcgagcacgtgcgcgtgtgggcgcgcgacgctgccagtgcgcggcgtttcgcacaggagatgagtgtctctctcggcgtgcaatgcgatgccgcgcgcgacgtccagcatgcgctggccgacgcggatgtcgcgatcaccgccacgccaagccgttcgccgctgatcgaggccgccgacctgcatcccggtctgcacatcacggcgatgggttcggacacggagcacaagaacgaaatcgcgccggcggcattggcggcggcgcgctacatatgcgaccgcgcgcagcagacgcgcgtgctgggcgaactgcatcacgcgctgaatgccggtgcggtgcgcgcggacgccgcgataacggagctgggccaggtgattgcgcgccaggccgtcggccgcgccgacgaagccgacgtgacgatctgcgatctgaccggaaccggtgcgcaggacaccgcgattgcggcgctcgcattgcagcgggcgcgtgccgcgggtgccggcacgattttccgcaatgacgtgaaacgc

SEQ ID NO: 13764 - DNA, 747 bp, Burkholderia fungorum
atgcgctttgtccgttcccttgccgtcgtgctgctcgcggcgctgccgctgctcgcttcggcccagcaacttaccgtctccgcggccgcgagcctgaccgatgcgttcaacgagatcggcgcgaagttcgcggcggttcatcccggcgtgaccgtgcgcttcaatttcgccgcgtcgggggtattgcttcagcagatcaggcaaggcgcacccgtcgatgtgttcgccagtgcggaccaggaaaccgtcgcgcgcggtatcgatgcccaactgctcgacgcgggcacgaagcaggactttgccgccaactcggtggtgctgatcgtaccggcggagggcgcgccgctcgtgaagacgctggccgatctgtcgaatcccgcggtgaagcgcatcgcgcttggcaaagcggccaccgtgcccgttgggcgctacacgcagcaggctctggaaagtgccgggcagtgggacgcgctgcagccgaagttcgtgcaggcggagagcgtacgccaggtgctcgactacgtggcgcgcggcgaggccgaggccggcttcgtctatcgcacggacgccatgctggcgcccggcaaggtgcgcatcgcgctgaccgtggaaggccacgagccggtgacctatccggtgatcgcggtcagcgcgagccgtgagcaagcgctcgcgagagacttcatcgcctatctgtcgacaccggcagcgcagaacgtgctggcgcgctacggcttcgtcaaatcc

SEQ ID NO: 13765 - DNA, 3816 bp, Burkholderia fungorum
atgaccgatctgtccacgccgcagcgcgccggcagccacaagctgcccgcgggccggcgactgcgctttgtcaccgcggctgcgttgttcgacggccacgatgcgtcgatcaatatcatgcggcgcattcttcaggcgagcggcgtcgaggtgattcacctcggccacaaccgctccgtcgatgaagtcgccaccgccgcgctgcacgaggacgccgacggcgtcgccgtgtccagctaccagggcggtcacaacgaatatttccgctatctggtcgacttgctgcgcgcgcgcggcggcgagcgcatcaaggtgttcggcggcggcggcggggtgatcgtccccgaagagatcgccgggctcgaacgctatggcgtcgagaagatctattcgccgcaggacggccagcggcttggtctgcaaggcatgatcgacgatatgatcgcgcgctgcgccgaaggtgcgcgcgcggcggcggccacaggggagagtcaggtcggcgcgtgggcggcggagttttcggagcatgggctgccgcgttttgattcgcgcgacgacgtgggtgttgaccggcagggggccgtcgcgcgcaatccgtcgagcgaggcgagtcgcgtggccgcggcggggcgcggcgatcatttggacagaggcgtccgcgcggccagcacggccgacacggccgacacggccaacacggccaacacggccaacacggccaacactggcagcgtagcggacgcagcggacgcagcggacgcagcggacgcagcggacgcagccgacgcagccagcacagccagcacagccagcacagccagcacagctagcacagctagcacagccggcatccccgacccggcatccctggttttccgccgactcgcgcaactcatcagcgcgttcgaaacggccgccatcgacgtcaacacgcgggacaagctgtccgctctagcagaagtaaccgcgatccccctcctcggcattaccggaaccggcggcgccggcaaatcgtcgctcaccgacgaattgattcgtcgctttcgcctcgactacggcgacgccctcaccatcgccgtgctcgccatcgacccttcgcgccgcaagtccggcggcgcgctgctgggcgaccgcatccgcatgaacgcgatcggcgactggggcggcggcgcgcgcgtgtacatgcgctcgatggcgacgcgcgaagcatcgagcgaaatctccgactcgctgcccgacgcgctgatgctctgcaaggcggcgggcttcgatctgatcgtcgtggaaacatccggcatcggccagggcaatgcggcgatcgtgccgttcgtcgacgaatcgctgtatgtcatgacgccggaattcggcgcggccagccagctggagaagatcgacatgctcgactttgccagcttcgtcgcgatcaacaagttcgatcgcaaaggcgcgcgggacgcgttgcgcgatgtcgccaagcaggtgcagcgcaatcgcgccgacttcgcgaagtcgccggaagcgatgccggtgttcggaacgatcgcctcgcgctttaacgacgacggcgtgaccgcgctgtatcggcacgttgccgaagcgttgcgcaagcatggtttgcgttcgggcggcggccgtcttgccgcgcccgaagatctgcgtttttcgagcgggcgcaacgccatcgtgccgcccgcccgcgtgcgttatctggcggatattgcgcagacgatccacgcttatcgcgagcgagccgatgcgcaagcgcgccttgcgcgcgagcgctggcagctgatcgaggcgcgcaggatgctcgttgagacgggtgaggccgcaaggtccactgttgccacaagtgcaagcccaggagcaagcgcaagctcgaaagcaaacgcatgtacaagcacaagctcgaaagcaaacgcaagcccaggagcaaacacaaccgcgaactcaaacgcttccgcaaccagcggcacagccaccccaaccgacgcgctcaacccaaccctctcgcaactcgacacgctgatcacccaacgcaccgcctcgctcggcgaacgcgagcgcatcctcctcgacacctggccggaaatcgtcgccgcttactcgggcactgaacacatcgtccgcgtccgcgaccgtgaaatccgcaccgcgctgaccgtcgcgacgctttccggctccgaagtccgcaaagtctccctgccgaaattcgtcgatcacggcgagattctgcgctggctgatgctcgacaatctgcccggctacttccccttcaccgccggcgtgttcccgttccgccgcgaaaacgaagacccgacccgcatgttcgccggcgaaggcgatccgcaacgcaccaatcgccgcttcaaactgctctcggaaggcatgccggccaaacgtctgtcgactgcgttcgattcggtcacgctgtacggtgaagagccgcacgagcgtcccgacatctacggcaaagtgggcaattccggcgtctccgtcgcgacgctcgacgacatgaagacgctctacgacggtttcgacctctgcgcgccggaaacctcggtctcgatgacgatcaacggccccgcgccgaccatcctggcgatgttcttcaacgtcgcgatcgatcagcaaatcgcgcgtacgacacagcggcaaggccgcccgctcaccgaagacgaactcgccgcgacgcgccgcaccgcgctggaaaacgtgcgcggcaccgtgcaggccgatatcctgaaggaagaccaaggccagaacacctgcattttctcgaccgaattcagcctgaaggtgatgggcgatattcaggcgtacttcgtcgagcatggcgtgcgcaatttctattcggtctcgatctccggctatcacatcgccgaagccggcgcgaatccgatttcgcaactcgcgtacacgctcgcgaacggcttcacgtatgtggaggcctatctcgcccgcggcatgtcgatcgacgacttcgcgccgaatctgtcgttcttcttttcaaacggcatggacccggagtacacggtgctgggccgcgtcgcgcgacgcatctgggccgtcgccatgcgcgagcgctacggcgcgaacgaacgcagccagaagctcaagtatcacgtgcagacgtcgggccgcagcctgcacgcgcaggagatcgacttcaacgatatccgcaccacgctgcaggcgctgatcgcgatctacgacaattgcaattcgctccatacgaatgcgttcgacgaagcgatcaccacgcccaccgaggaatccgtgcgccgcgcggtggcgatccagttgattatcaaccgtgaatggggactcgcgaagaatcagaatccgaatcagggcagcttcgtgatcgaggagctgaccgacctggtggaagaagcggttctggccgaattcgaccggctgaccgagcgaggcggcgtactgggtgcgatggaaaccggctatcagcgcgggcgcatccaggacgagtcgatgctgtatgagcaccgcaagcacgacgggtcttatccgatcgtcggcgtgaacacgttcttgagcgcgcatccgcatgaagcgccgcagccgatcgcgctagcccgttccaccgacgatgagaaacaaagccagttgcaacgcctgcgtgctttccaggcgcagcatcgcgacgcggcgccggccgcgctcgaacgcctgaagcgcgccgtgatcgacgatgaaaatgtgttcgcggtgctgatggatgtcgtgcgtgtctgctcgctcggacagatcacgcacgcgctgtttgaagtgggcgggcagtaccgccgcaatatg

SEQ ID NO: 13766 - DNA, 1365 bp, Burkholderia fungorum
atgtttgaaaaaatcctcattgccaatcgtggcgagatcgcgcttcgtatccagcgcgcctgccgcgagcttggcgtcaagaccgtcgtcgtctattcggaagccgacaaggaagccaaatacgtgaagctcgccgacgaggcggtctgtatcggcccggcgccttcgaacctgagctacctgaacatgcccgcgctgatcagcgcggcggaagtgaccgacgccgaagcgatccaccccggctacggcttcctctcggaaaacgccgacttcgccgaacgtgtcgaacagtccggcttcaccttcatcggcccgcgcccggaaaccatccggatgatgggcgacaaggtcacggccaagcagaccatgatcaagaccggcgtgccgtgcgtgccgggctcggaaggcgcgttgccggaagatccgaaagagatcgtgaagattgcccgccaggtcggctatccggtcatcatcaaggccgcgggcggcggcggcggccgcggcatgcgcgtggttcacacggaagccgcgctcgtcaacgcagtcaacatgacgcgcgaagaagccggccgcgcgttcggcaacccgcaggtctacatggagaaattcttggagaacccgcggcacatcgaaattcaggtgctggccgactcgttcaagaacgcagtctggctgggcgagcgtgactgctcgatgcagcgccgtcaccagaaagtgatcgaagaagcgccggcgccgggtatcgcgcgccgcctgatcgaccgcatcggcgatcgttgcgcggacgcctgcaagaagatgggctatctcggcgcgggcacgttcgagttcctgtatgagaacggcgagttctacttcatcgagatgaacacgcgcgtgcaggtcgagcacccggtgaccgaactgatcacgggcgtcgacatcgtgcaggaacagatccgcatcgcggccggcgaaaaactcgccttccgtcagcgcgatatcgtgttcaagggtcacgcgatcgaatgccggatcaacgcggaagatccgttcaagttcattccgtcgccgggacgcctgacgtcgtggcatatgccgggcggccccggcatccgcgtcgactcgcatgcctacaatggctacttcgtgccgccgaactacgattcgatgatcggcaagctgatcgcctacggcgcgacgcgcgagcaggcgatcaagcgcatgcgcatcgcgctgtcggaaatggtggtggaaggcattcagaccaacatcccgttgcaccgcgagctgatgctggacgcgaagttcgtcgaaggcggcaccagcattcactacctcgaaaaccggttggccgcgaagcagcaggccgcgccggaagaagcg

SEQ ID NO: 13767 - DNA, 1341 bp, Burkholderia fungorum
gtgctcccgctgaattttctgcttgggctgagcgcgctcttcgccgcactgggcgctcagatctaccccgtcctgggaatcgtgtcattagcgatcattgtgtgttcgttgttacaggcgacgaagaagaacctggcaggaccgccattcgtcatgctcatcgtgttcgctctctacgttctcccccgggcggcaatggtgatattgggattaatcgatacattttcgggattcaatcttggcaacgacaatcaatggatcattggaacggttctcttcgtctatgcttttttgttggggatagatttaagcggcaccaacaaggtgcccctcgcagccccggccacggggtcaaaattcgcggtaatggtaggtctgtttttgatttgctgctccatgctgttcttcctgagctatttgaattcggttggcggcgtaggaggtctgatcgaaaactacaacgcagaaacctatttcgcaaccgttcaggacgaagttgcatccgccagcaagaacggatcgatctataccttgattgcgggatttaccatcatcagcgccgcatctttttcaattaaaaaatcaccaaaactggcatttttttatctcatcctgtgcggaattgcgttggtaatggctattggcttcatcaagcgcgaatacgcgttcgaagtcctgatggccattatcgttgctctggttgcaaagaagtcgctggtcaagctgaaaaaactcgccgccataagtctcggggccgccgcggggctcttcatgctgttcctcgtcagatcgggatttcagctcgacaatctggccgaggtcccgttgcttttgctcgataccgcggaattctgggtgctggatcaaatcattaacgtgtatcagaatggcgtcgctttaacgggctacgattacggatggcttcatgtcatggccctggtttcgccgttcgtaccctatagctcatatatgcctctggatcacatactcattgagcgttcaatgggcatcacaggctggggaattcctccgacgatattcggatacgcatttctcgttttcggctggatcgggctgatcccgtacggcatcgcccttggattcgtcattgggcgcgtggatcgctggcttaaacaacgaacacaaaaagcgtggttcttcttgagcgcctatatgattttcatcatgtattgctggtttttgtttagaaatggagatcccgctttagccggcttctctaccaatcgatttttacttgtcgtaattttcgtcgcgataattgaacatatatttgatcggggcgtgagaaaaatggacattcagaagagagtacgcgtggcg

SEQ ID NO: 13768 - DNA, 2694 bp, Burkholderia fungorum
atggccgataccgcaacgcccaatgtgattcgccgcgccgactacgcgccgcccgccttcctgatcgacaccgtcgcgctggagttcgatctggttcctgaacgcacggtggtccgcaacacgatgcgcgtgcgccgcaatccggaagccgcgcgcgccgcgcatctggaactgatgggcgaacagctggagttcgtcagcgccgcgatcgacggcaagccgttcgccaatgctcatgcgcacgaccacggcctgctgctcgacaacgtgccggaccagttcgaactgacgctcacgagcatctgcaatccggctgcgaacaccacgctgtcgggcctgtacgtgtcgggcggcaacttcttcacgcagtgcgaggccgagggctttcgccgtatcacttacttcctcgaccgcccggacgtgatggcgaccttcacggtcacgctgcgcgccagcaaggccgattatccggtgctgctgtcgaacggcaatctgctcgaagaaggcgatttgccggacggccgccacttcgcgcgctgggaagatccgttccgcaagccgagctacctgttcgcgctggtcgccggcaagctggtcgcgctggaagaacgcgtgaagagcggctcgggcaaggaaaagctgctgcaggtgtgggtcgagccgcacgatctggacaagacccgtcacgcaatggattcgctgatccattcgatccgctgggacgaggaacgcttcgggctcgaactcgatctggaccgcttcatgatcgtcgcggtgagcgacttcaacatgggcgcgatggagaacaaggggctcaacatcttcaacacgaagtacgtgctggcgaatcccgaaacggcaacggacaccgacttcgcgaacatcgaggccgtggtcggccacgaatatttccacaactggaccggcaatcgcgtgacgtgccgcgactggttccagttgagcctgaaagaaggcctgacggtattccgcgaccaggagttctcggccgacatggccggcggcgcgactgacgaagccgcgcgcgccaccaagcgcatcgaggacgtgcgcgtgctgcgccagatgcagttcgccgaagacgcggggccgatggcgcacccggtgcgcccggaaagctacgtcgagatcaacaacttctacacgatgaccgtctacgagaaaggctcggaagtcgtgcggatgtatcagacgctgttcggccgcgacggcttccgcaagggcatggacctgtacttcaggcgccacgacggccaggccgtgacctgcgacgatttccgtcacgcgctcgccgacgcgaacggccgcgatctcgcgcagttcgagcgctggtatagccaggccggcacgccgcgggtgtccgtgcgcacgcaatacgacgccgcgcagcaacgctacagcgtgacgctcacgcaaggctacggcgaagccgcgccggccgcgcgcgaaacgcagaagggtccactgctgattccgttcgcgatcggtttgatcggcaaggacggccgtgacctgccgctgcaactggaaggcgaagcgcaggccggcaaggcgaccacgcgcgtgctcgaattcacgcagaccgaacagaccttcacattcgtcaacgtggcgcaggaaccgctgccttcgctgctgcgcaatttttcggcgccggtgatcgtcgaatacgactactcggcgcaacagctggcattcctgcttgcccacgacagcgacccgttcaaccgctgggaagccggccagcggctcgccacgcgcgaactgctcacgctcgccgggcgcgccgccacgggtgtgccgctgcaactcgacgattccgtggtcgccgcgttcgcacgcgtgctgaccgacgaaacgctctcgcctgcgttccgcgaactcgcgttgatgttaccttcggaagcgtatctggccgagcagatggccgaatcgaatccggcggccgtgcacgccgcgcggcagttcgtgcgcaagcgtcttgccaatgcgctcagaagcgactggctcaacgtgtacgagcagcatcgcacgccgggggcgtacgaggccacgcctgaagcgtccggtcatcgcgcgctgaagaatctcgcgctgtcgtatctcgccgaactggacgatccagcagaggccgtgcgtctcgcgtccgcgcaatacgatgcggcgaacaacatgaccgaccgctcggcggcactgtccgtgctgctcaatgcgtcggcggccaacggcggcagcgccgaggcgcagcaggcgctggacgacttctaccggcgcttcgaaaaggaaccgctcgtgatcgacaagtggtttgccttgcaggccacgcagcgcggcagcgcgcaacgtccggtgatcgacgtcgtgcgcaggctgatgactcacccggctttcaacctgaagaacccgaatcgcgcgcgctcgctgattttcagcttctgcgcggcgaacccggcgcagttccatgccgaagacggctcgggctatgcgttctgggccgatcaggtgatcgcgctcgacgccatcaatccgcaagtggccgcccgcctcgcccgctcgctggaattgtggcgccgcttcacgccggcgctgcgcgacggcatgcgcgcggcactggagaaagtggccgcgcaggtcaaatcgcgcgacgtgcgcgagatcgtggagaaagcgttggcg

SEQ ID NO: 13769 - DNA, 996 bp, Burkholderia fungorum
atggctttcaatctacgcaatcgcagtctgctcaacatgcaggacttcgcgccgcgcgacatccgctttctgctcgacctcgcctccgagctgaagcgcgccaagtacgccggcaacgaagtcccgcggctcaacggcaagaacgtcgcattgattttcgaaaagacctcgacgcgcacgcgttgcgcattcgaggtcgccgtgcacgaccagggcggccacgtcacctacatcgactccgcgagttcgcagctcggccgcaaggagtcgctcaaggacaccgcgcgggtactcggacggctctatgacggtatcgaataccgcgggtttcatcagagcgtggtcgaggatctcgcgacctattcgcatgttccggtctggaacggactcaccgacgaattccaccccacccaggtactcgccgacctgctcaccatgcaggaattcggcgagaaaccgttgcacgagctatcgttctgctacctcggcgacgcccgcttcaacatgggcaattcgctgctgatcggcggggtgcaaatgggcatggacgtgcgcatcgcggcgccgcgcgaattgtggccgcacgacgaactggtagcgcaaatgcggcttctcgccgagcgcaccggcgccagcgtgacgatcgtcgaggatccgcatgaggcggtgagcggcgtcgacttcgtctacacggatgtctgggtgtcgatgggcgagcccgtcgaagcgtggggcccgcgaatcgatctcctgcgcccctatcaggtcaacgccgcgctgatgaaagcgaccggcaacccgcgcacccgcttcatgcactgcctgcccgcctatcacaatctcgacaccgacaccggccggatggtccacgagcatttcggcatgtccgaactcgaagtcagcgacgaggtgttcgaatcggatgcgtcgatcgtcttttcccaggctgagaaccgcatgcacacgatcaaggccgtgcttgtggcaaccctcgct

SEQ ID NO: 13770 - DNA, 720 bp, Burkholderia fungorum
ttgaccaccaacaccaccatcggcagcaacggcacgaatgtgtcgcaaacgctgctcgatacgatgaacggtacgaacagtgcctcgagctccaccagctcgacgggcagcacttcgggcacgtcggcgaccgatctgcagaacaccttcctgcaactgctcgtcgcacagttgaagaaccaggatccgaccaatccgatggacagctcgcagatgacctcgcagctggcgcagatcaacacggtctcgggcatcagtcagctgaacacgacgctcacctcgctcgccacgcagatgtcggcgggccagcagtcgcaggccgcgctgctgatcggctcgaccgtgctggcgccgggcagttcggtttcggtcgcgagcggcaaggccggcgcgttcggcgtgcagctcgccaacccggtgggcgacctgcaggtggtggtgaagaactcgtcgggccagatcgtcagcacgctcgacctcggcaagcagtcggcgggcacgattccggtgggctggacgccgaccgattcggccggcaacgcgctgcccgacggcacgtacacgatcagcgcggtcggcacgatcaacggtcagcaggccacggccaccacgctcacgggcgcaacggtgcaaagcgtcgtcatgcaggccaacggcacgccgggcctcgtgctgtcgaacggctcgacggtcggcttgaccagcgtcgccgccatcctc

SEQ ID NO: 13771 - DNA, 1356 bp, Burkholderia fungorum
gtgtacatctgtagtgaatgcggcgggcaatcgccgaaatgggccggtcagtgcccttcgtgcaatgcgtggaacacgctggtcgagtcggtggcggaagcgccgtccacgcaccgcttccagtcgctcgcaaagagcgcgccggtgcgccgactcgccgatatcgaagcgtccgacgtgccgcgcttcaccaccggcgtgagcgaattcgaccgcgtgctgggcggcggtctggtgccgggcggcgtggtgctgatcggcggtgatccgggcatcggcaaatcgacgctgctgctgcaatcgctcgcggaaatcgccgccgacaaacgcgcgctctatatcagcggcgaagaatccgccgcgcagattgcgttgcgcgcgcaacgactttcactgctggaaccgggttcgagggcgagcgagctgcaactgctggcggaaatccagctcgaaaaaattcaggcgacgatcgccgagcagcgaccggacgtcgcggtgatcgactcgatccagacggtctattccgacgcgctgacttccgcgccgggctcggtcgcccaggtgcgcgagtgcgcggcgcaactcacgcggatcgccaagcagtcgggcaccaccatcatcatggtcgggcacgtgaccaaggaaggtgcgctggcggggccgcgcgtgcttgaacacatcgtcgacacggtgttgtacttcgagggcgatacgcattcgtcgtaccgtctggtgcgcgcgatcaagaaccgcttcggcgcggtcaacgaactcggcgtgttcgccatgaccgagcgcggcttgcgcggcgtggccaatccgtcggcgctgtttctgtcgcagcacgagcagtcggtggcgggttcgtgcgtgctggtgacgcaggagggcacgcggccgctgctggtcgaagtgcaggcgctcgtggacgccgccaacgcgccgaatccgcggcgccttgcggtcggtctcgaacagaaccggctcgcgatgctgctggcggtgctgcaccgtcacgccggtattgcctgtttcgatcaggacgtgttcctgaacgccgtgggcggagtgaagatcaccgaacccgccgccgacctcgccgtgctgctcgcgatccattcgtccatgcgcaacaagccgctgcccaagggcctggtggtgttcggagaggtgggtctcgccggcgaaatccggccgtcgccgcgcggtcaggagcgtctgaaagaagccgccaaactgggcttttccgtcgcggtgattcccagggccaatgcgccgaagcagccgatagaaggcttacaggtcgttgcggtcgagcggatcgaacaggcgatcgaccgggtccgcacgctcgaa

SEQ ID NO: 13772 - DNA, 564 bp, Burkholderia fungorum
atgctcggggcgatgcttgcggggatgcctgagacgttcagcgagggtttcccgtatcccgttcgcggcattttgactacggttaaaatacgcgttttaccggtgggccatgtcgcgcgtcaacgctggcccgggtatggctcatgcaagccagcgagcaaggagcggatgaaaaatagggctactgttctgtgcgttcgggacaaccgtatcctgctggttgccagggaaaggtcgagatggtcgctgccgggcggaagaattcgccgggacgaagcgccccatgaagccgcgttgcgtgagctggaagaagagaccacgctggtcgcggatcagctcatgtatcttttcgagtttaacggcttcagcacgcaacaccacgtgttcttcgccgaggtggggccccatctgagcgcggaaccccgcaacgaaatcgcgaagtgcaagtggtttgcgccagtcaaaatcgcgacgctttccgccagtgtgcccactcgcgggatcgtggagctttttttccggcacatcggcgtttctgtagcccgacgacggccggtcgcgccg

SEQ ID NO: 13773 - DNA, 1173 bp, Burkholderia fungorum
atgtcccgccgcgagtggctcaagctcgcttcgatgttcaccgtcgccggcgccgggccgttgcttggcgcgctcaacgcgcgagccgccacggacccgaacgcgcccgtgcgcatcggctatctgccaatcaccgacgccacgcctttgctggtcgcccataacaacggctatttcgaagcggcgggcctcgccgtcgagaaaccgacgctgctgcgcagttgggcgcaactggtcgaagcgtttctgtcgggtcaggtcaacgtggtacacctgctcgcgccgatgacgatctgggcacgctacggcagccaggccccggcgaaggtagtcgcctggaatcacgtcaatggctcggcgctgaccgtgtcgcccgacatcggcaaggtcgcggacctcggcggaaaaacggtggcggtgccgttctggtactcgatccataacgtcgtcgtgcaggacatgttgcgcacgcaaggactcgtgccggttctgaagaaagacggcgagctcaagccgaacgaagtcagactcatcgtcatggcgccgtcggacatgccgccggcgctggcgtcgagacagatcgccgggttcatcgtcgccgagccgttcaatgcggcggccgaagggctgaaaatcggcaaggtgctgcgctttaccggcgatgtctggaagaaccatgcatgctgcgtcgtgttcatgcacgagcgggatctgaccgaacgcgccgcgtggtcgcagaaggtggtcgattcggtggtgaaggcgcagttgtggacgcgcgctcatccgcaagaggccgcgcagctattgtcgaaaaccggccagaaccattacacgccgcacacagccgccgtattgaccgaggtgctggcccctgcccccggcgatcagggccgctatctggccgatcgcgcgatcatccatgcggactggcacgcaaagcggatcgatttccagccttatccctatcccgcctatacggaagaactggttcgccgcctgaaaacgactcagctcgaaggcaatgcgccgttcctgggccaactcgatccggcattcgtcgcgcgcgacctggtggacgaccgtttcgtgaaaaacagcatcaagtcggctggcgggatgcaggcatttggcttgccggaaggtttttcgcgcacggagacgatcgttgtc

SEQ ID NO: 13774 - DNA, 945 bp, Burkholderia fungorum
gtgagcaattttcgcggagttatctacgacagcatcgtcgacacgatcggcgccacaccgctggtgcggttgagcaaactggcggccgcctgcgactgccgggccgatgtggtcggcaagctcgagtttttcaatccacttgcctcggtgaaggaccggatcggcatcgctttgatcgagacggccgagcgggccggcaggatcaagccaggcaccttgctgatcgagccgacctccgggaacacgggcatcgggctcgcattcgtcgccgcggctaagggatatccgctcgtgctgtgcatgccggagtccgcgtcgatcgagcgccgcaagatggtgggcttgctcggcgccaaagtggagctgacgccggcttccgaagggatgggcggcgcgatccgtcgcgcggaggcactgaagcggaatcacccggattcgctgattctccagcagttcgacaatccggcgaatcccgatgcgcaccgccacacgaccgccgaggaaatctggaacgataccgccggacgcgtcgatattatcgtgtcgggcatcggcaccggcggcacgatcaccggaatcggccagacgctgaaggcgcgcaaaccggagttgcagatgatcggcgtggagccttcgggcagcgcggtactctcggggggcaagccggggccgcacaagcagcaggggatcggctccggtttcctgtccagcatcctcgatctcagtgtggtcgacgagattgtcaccgcgaccgatgaggacgcgatccagacagcccggcaggctgctgcgctggaaggcgtacccatcggcatcagttcgggggcggcgctatcggtcgcgttgcgggtcgggcggcgcccgggtaacgcgggcaagctgatcgtcgtgatcgtgcccagtttcgcggagcgttatctgtcgaccgaactgttcgccgacgtc

SEQ ID NO: 13775 - DNA, 621 bp, Burkholderia mallei
gtggcacgttatatcggccccaaagccaagctgtcccgccgtgaaggcaccgatctgttcctgaagagcgcacgccgctcgctcgccgacaagtgcaagctcgacagcaagccgggtcagcacggccgcatctccggtgcgcgcacgtcggactacggcacgcagctgcgcgagaaacagaaggtcaagcgcatttacggtgtgctggagcgccagttccgccgctacttcgctgaagccgaccgccgcaagggcaacacgggtgaaaccctgctgcaattgctcgagtcgcgtctcgacaacgtcgtgtaccgcatgggcttcggctcgacccgcgctgaagcgcgtcagctcgtgagccacaaggcgatcaccgtcaacggcatcgtcgcgaacattccgtcgcagcaagtgaaggccggcgacgtggttgcgatccgtgaaaaggcgaagaagcaagcgcgtatcgtcgaagcgctgtcgctggccgagcaaggcggcatgccgagctgggttgcggtcgatgcgaagaagttcgaaggcaccttcaagcaagtgccggagcgcgccgacatcgcgggcgacatcaacgaaagcctgatcgtcgaattgtattcgcgt

SEQ ID NO: 13776 - DNA, 1353 bp, Burkholderia mallei
atggcgaaccgcctgcaagtgatctacatcgaagacgacgagctcgtgcgccgcgcgagcgtgcaaagcctgcagctcgcggggttcgacgtcgtcgggttcggttcggtcgaggcggccgagaaggcgatcgtcggcgacgcgaccggcgtgatcgtatcggacattcgcctgcccggcgcgagcggcctcgagctgctcgcgcaatgccgcgagcgtacgcccgacgtgcccgtcgtgctcgtcaccgggcacggcgacatttcgatggccgtgcaggcgatgcgcgacggcgcctacgacttcatcgaaaagccgttcgccgccgagcggctgaccgaaacggtgcggcgcgcgctggagcggcgcgcgctcgtgctcgagaatcacgcgctgcgacgcgaactcgccgggcagggcgtcgtcgcgccgcggatcatcggccgcagcccggcgatcgagcaggtgcggcggctgatcgcgaatgtcgcgcccaccgacgcgtcggtgctgatcaacggcgacaccggcgccggcaaggaactgatcgcgcgcagcctgcacgagttgtcgccgcgccgcgacaagccgttcatcgcggtcaactgcggcgcgctgccggagccgatgttcgaatccgagatgttcggctacgagccgggcgcgttcaccggcgcggcgaagcgccgtatcggcaagctcgaatatgcgtcaggcggtacgctgttcctcgacgagatcgaaagcatgccgcttgcgctgcaggtcaagctgctgcgcgtgctgcaggacggcgtgctcgagcggctcggctcgaatcagccgattcgcgtgaattgccgcgtggtcgcggcggcgaagggcgacatgagcgagcacgtcgcggccggcacgttccggcgcgacctgctgtatcggctgaacgtcgtgacgatcgcgctgccgccgctcgccgagcgccgcgaggacatcgtgccgctcttcgagcatttcatgctcgacgcggcggttcgctacgggcgccccgcgccgctgctcaccgatcgccagcgcgcgagcctgatgcagcgcgactggccgggcaacgtgcgtgagctgcgcaacgcggccgaccgcttcgtgctcggcgtgacggagggcatcgtcggcgacgcgggcccggagacggacgagcacgccgagcagtcgctcaaggagcgcgtcgagcaattcgagcgcgcggtgattgccgagacgctgaaccgcacgggcggcgcggtcgcgacgacggccgacaagctgcacgtcggcaaggcgacgctctacgagaagatgaagcgctacgggctgagcgcgaaaggagaaacggaccgc

SEQ ID NO: 13777 - DNA, 1530 bp, Burkholderia mallei
atggcaggaaacggaggcgacgtggctgcggcactgcgttttgacaatatcggcaaggtctttcccggcgtgcgtgcgctcgacggcatttcgttcgacgtgcaggcgggacaggtgcacgggctgatgggcgagaacggggcgggcaagtcgacgctgctcaagattctcggcggcgaatatcagctcgattcgggcagcgtgctcgtcgacgggcgggcgatgcgctttccgagcgcggccgcgtcgatcgcggcgggcgtcgcggtgatccatcaggagctgcaatacgtgcccgatctgacggtggccgagaacctgctgctcggccggctgccgagcgcgctcggctgggtccgcaagcgcgacgcgcagcgcttcgtgcgcgagcggctcgccgcgatgggcgtcgatctcgatgcgcaggcgaagctgcggcggctgtcgatcgcgcagcggcagatggtcgagatctgcaaggcgctgctgcgcaacgcgcgggtgatcgcgctcgacgagccgacgagctcgctgtcgcatcgcgagaccgaggtgctcttcaagctcgtcgacgatctgcgccgcgacggccgcgcgctcatctacatctcgcaccggatggacgagatctaccggctctgcgacgcgtgcacgatctttcgcgacggccgacaggtggcgtcgcacgcgtcgctcgccaacgtgccgcgcgagacgctcgtgcggcagatggtcggccgcgagatcagcgacatctatcactacgcgccgcgcgcgctcggcgacgtgcgcctgtcggcgcgcgcgctcgagggcgatgcgctgcgcgcgggggcgagcttcgacgtgcgcgcgggcgagatcgtcggctttttcgggctcgtcggcgcggggcgcagcgaactgatgcgcgtgatctacggcgcgcagcgcaggacgggcggcgcgctcatgctggacggcgagccgctcgacatccgctcgacgcgcgacgcgatccgccgcgggatcgtgctgtgccccgaggatcgcaaggaagagggaatcgtcgcgcatgcgtcggtcgccgagaacatcaacatcagttgccgccgccacgggctgcgcgcggggctttttctcgaccgcaagcgcgaggccgagacggccgatcgcttcatcaagctgctgaagatcaagacgcccaaccgccggcagaagatccgcttcctgtcgggcggcaatcagcagaaggcgattctcgcgcgctggctcgccgagccggatctgaaggtcgtgatcctcgacgagccgacgcgcggcatcgatgtcggcgcgaagcacgagatctacggcgtgatctacgagctcgcgaagcgcggctgcgcgatcgtgatggtgtcgtccgagctgccggaagtgctcggcgtatcggatcgcatcgtcgtgatgcgcgaagggcggatcgcgggcgagctcgcgcgcggcgaagcgaacgaagaggcggtgctcaatctcgcgctgccgcagggcgcgaccgcgcacgccgcg

SEQ ID NO: 13778 - DNA, 378 bp, Burkholderia mallei
atgccaaccatcaatcaactggttcgcaaaggccgtgcgtcggaaacgacgaagagcaagagcccggccttgcaggactgcccccagcgtcgcggcgtgtgcacccgtgtgtacacgacgacgccgaagaagccgaactcggcactccgtaaggtcgccaaggttcgtctgacgaatggcttcgaagtgatttcgtacatcggcggtgaaggccacaacctgcaggagcactcggttgtgctgatccgcggcggccgtgtgaaggacttgccgggtgtgcgttaccacatggttcgcggctcgctggatacgcagggcgtcaaggaccgtaggcaggctcgctcgaagtacggcgcgaagcgtgcgaaggcggcgaag

SEQ ID NO: 13779 - DNA, 975 bp, Burkholderia mallei
atgcaaaccagtttgttgaaacccaagatcatcgccgtggaatcgctgggcgagaaccacgcgaaggtggtgatggagccgttcgaacgcggttacggccacaccttgggcaatgcgcttcgccgtgtgctgctgtcgtcgatggtcggttacgcgccgaccgaagtgacgatcgccggcgtcgtgcacgagtattcgacgctcgatggtgtgcaagaggacgtcgtcaacctgctgctgaacctgaagggcgtggtgttcaagctgcataaccgcgacgaagtcacggtgacgctgcgcaaggaaggcgaaggcgtcgtgacggccggcgatatcgaactggcccacgattgcgaagtcatcaacccgaatcacgtgatcgcgcatctgtcgaagggcggcaagctcgacgtgcagatcaaggtggaaaagggccggggctacgtaccgggcaacgtgcgccgctacggcgacgaaacggccaagatcatcggccgcatcgtcctcgacgcatcgttctcgccggttcgccgcgtgagctacacggtcgagagcgcgcgcgtcgagcagcgtaccgacctcgacaagctcgtgatgaacatcgaaacgagcggcgtcatcacgccggaagaagcgatccgccagtcggcacgcatcctcgtcgaccagctgtccgtattcgcggcgctggaaggcacggaaacggccgcggaagccccgtcgcgcgcgccgcagatcgatccgatcctgctgcgcccggtcgacgacctcgagttgaccgtgcgttcggcgaactgcctgaaggccgagaacatctactacatcggcgatctgatccagcgcacggaaaacgagctgctgaagacgccgaacctcggccgcaagtcgctcaacgagatcaaggaagtgctcgcttcacgcggtctcacgctgggcatgaagctcgagaactggccgccggccggcctcgacaag

SEQ ID NO: 13780 - DNA, 954 bp, Burkholderia mallei
atgagcagccatgacggcctgatggtttttactggcaacgccaatcccgcgcttgctcaggaagtcgtcaaaattctgggtattcccctcggcaaagcaatggtcagccgtttctccgacggcgagatccaagtcgaaatccaggaaaacgtgcgcggcaaggacgtcttcgtcctgcaatcgacgtgcgcgccgacgaacgacaacctgatggaactgatgatcatggtcgatgcgctcaagcgcgcatccgccggccggatcaccgccgccatcccctacttcggctatgcgcgccaggatcgccgcccgcgttcggcgcgcgtcgcgatctccgcgaaggtcgtcgcgaacatgctggaaatcgccggcgtcgagcggatcatcacgatggatctgcacgccgaccagattcaaggcttcttcgacatccccgtcgacaacatctacgcgacgccgatcctgctgggcgacctgcgcaagcagaactacccggatctgctcgtcgtgtcgccggacgtcggcggcgtcgtgcgcgcccgcgcgctcgcgaagcagctgaactgcgatctcgcgatcatcgacaagcgccgtccgaaggcgaatgtcgccgaagtgatgaacatcatcggtgaagtcgaaggccgcacctgcgtgatcatggacgacatggtcgacacggcgggcacgctctgcaaggccgcgcaagtgctcaaggagcgcggcgcgaagcaggtgttcgcgtatgcgacgcacccggtgctctcgggcggcgcggccgaccggatcgccgcttcggcgctcgacgaacttgtcgtcaccgacacgattccgctgtccgccgaatcgctcgcgtgcccgaagatccgcgcgctgtcgagcgcgggcctcctcgccgagacgttctcgcggatccgccgcggcgattcggtgatgtcgctgttcgcggaatcg

SEQ ID NO: 13781 - DNA, 935 bp, Burkholderia mallei
acacgctgctctgggcgcgcgacgcggcgctcgtcgccgagcttgccgcgcggcgcgagaacgcccgctatctgggcggcgtcgcgctgccgcccgggctgcgctacgaggccgatctcgcgacggcgctgtcgcacgcgcaagcggacgacgcgctctgcgtgatcgcggcgcccgtggccgggctgcgcgcgctgtgccgcgcgatgcgcgacgcacgccgcgtgcccgctcacttcgtctgggtctgcaagggcttcgaggccgacacgcggcggctgccgcatcagatggtcgccgaggaattgccggatcacgcgagctacggcgtgctgtcgggcccgagcttcgcgcgtgaggtcgcgcaggggctgcccgtcgcgctgacggtcgcgagcgcgtcggccgcgtgccgcgagcgtacgctcgcggcgtttcatcatggcgcgatgcggatctatacaggcgacgacgtcgtcggcgtcgaggtcggcggcgcggtgaagaacgtgctcgcgatcgcgacggggatcgccgacggcctgggcctcggcctcaatgcgcgtgcggcgctcgtcacgcgcgggctcgcggagatgtcgcgcctgggcgtcgcgctcggcggccgcgcggagacgttcacgggcctcacgggcctgggtgacctgatcctcacggcgacgggcgatctgtcgcgcaaccggagcgtcggcctgcaactcgcggccggccgctcgctcgacgatatcctcgccgcgctcggccacgtggccgaaggcgtgcgctgcgcgcgcgcggtgctgtcgatcgcgcgcgagcgcggcgtcgacatgccgatcacggaggcggtgtgcgcggtgctgttcgacggcgtcgcgccgcgcgacgcggtgagcggcctgctgcggcgggacgcgaaagccgaataggtccgg

SEQ ID NO: 13782 - DNA, 945 bp, Burkholderia mallei
atgacgacaccggttttcgacgcggctcagacggcgcgcgtcacgcctttcgccgaactcgtcgacgcgctgcgcacggcggcgctcgatgccgacgcgggccgtatcgagagcccggcgcggctcgtcgtgccgctcaacgaaggcggggtcatgctgtcgatgcccgcgtcggcggccgatctggcgatccacaagctcgtgaccgtatgcccgcgcaaccgcggcggcgatttgccgacgatccaggggcaggtgagcgtcgtcgatccggccacgggcgcgccgctcttcgcgctcgacgggccgaccgtcaccggccgccggacggccgccgtcacgctgctcgcgctgcgcacgtttgtcgccgccgcgccgcgcgacgtgctgctgatcggcaccggcacgcaggcggcgcatcacgtcgaggcgctcgccgcgctgtttcccggcgtgcgcgtgaaggcgcgtgcgcccgcgcaggcggcggcgttttgcgcgcgtctgcgggcggtgctgccgacgctcgagccgctcggcggcgacacgctgcccgagacgctcgacgcggtcatcacggcgacgacgagcgcgacgcccgtctacgacgacgcggcgcgagccgggcggctcgtcgtcggtgtcggcgcgtttacgcccggcgcggccgaagtcggcgcgcggacgatcgcgggcagcgcgctctacgtcgacgatccggcgggcgcacgccacgaggcgggcgacctgatcgtcgcgggcgtcgactgggcgcgcgtgcgctcgcttgccgacgcgctgcgcgccaccgtgtcgacacccgcctccaacgcgtcgcccgcaccgggcgcgcccgtgttcttcaagagcgtcggctgcgcggcatgggatctcgccgcgtgccgcgtcgcgcgcgcagtcacttcacgcactcgagcgtgtact

SEQ ID NO: 13783 - DNA, 930 bp, Burkholderia mallei
atgaaattcgcattcgtttttccgggccagggctcgcaatcggtcggcatgctcaatgcattcgccgacgtcgccgtcgtgcgcgagacgctcgacgaagcgtccgatgcgcttggccaggatatcggcaagctgatcgccgacggcccggccgacgaactcaatctgacgacgaatacgcaacccgtgatgctgacggccgcgtacgcgtgctatcgcgcgtggcagcaggcgggcggcgcgcagccgtcgatcgtcgcgggccacagcctcggcgaatacacggcgctcgtcgccgcgggcgcgatcgcgtttcgcgacgcgctgccgctcgtgcgctttcgcgcgcaggcgatgcagacggccgtgcccgtcggcgtgggcggcatggcggcgattctcgggctcgacgacgacacggtgcgcgcggtgtgcgccgaggcgtcggcgacgggcgtcgtcgaagcggtgaacttcaacgcgcccgcgcaggtcgtgatcgcgggcacgaaggcgggcatcgagaaggcgtgcgagatcgcgaaggagaagggcgcgaagcgcgcgctgccgctgccggtgtcggcgccgttccattcgtcgctgctcaagcccgcgtcggacaagctgcgcgaatatctcgcgggcgtcgacgtgaaggcgccgaagatttccgtcgtcaacaacatcgacgtcgcggtggtgtccgatcccgcggcgatcaaggatgcgctcgtgcgccaggcggcgggccccgtgcgctgggtcgagtgcgtgcagcacatcgcccgcgagggcgtgacgcacgtgatcgagtgcggtccgggcaaggtgctcgccggcctcacgaagcgcatcgacggcaatctggtcggcgcgtcggtgttcgatccggcgtcgctcgacgaagcgctcaagctcgccgccgcc

SEQ ID NO: 13784 - DNA, 3366 bp, Burkholderia mallei
atgcacgccactcccgcccgccctgccgccggcgcgctcgacgcgttccaccccgtcgtcgccgcctggttctccgacacgttcgccgcgcccaccggcgcgcaagcgctcgcgtggccgcacatcaaggccggccgctcgacgctcgtcgccgcgccgacgggctccggcaagacgctcaccgcattcctgtccgcgctcgacgatctcgtgcgcgacgcgctcgcgcatgatggcgcgctgcccgacgagacgctcgtcgtctacgtgtcgccgctgaaagcgctgtcgaacgacattcacgtgaacctcgaagcgccgctcgccggcatcgccgccgaaatcgcgcggcgcgggctgccggtgccgcaaatccgcaccgccgtgcgcaccggcgacacgacccaggccgagcgcgtcgcgcatcgcaagcacgcgccgcacattctcgtcacgaccccggaatcgctgtacgtgctgctgtcgtccgaatcgggccggcgcatgctcgcgagcacgcgcaccgtgatcgtcgacgaaatccacgcgctcgcgaacgccaagcgcggcagccatctcgcgctgtcgctcgagcggctcgacgcgctcgtcggccgcaagctgccgcgcatcgggctgtccgcgacgcaaaagccggtcgaggcggtcgcgcgctttctcgtcggcggccgcgacgacgcaccgctcgattgcgcgatcgtcgacaccggccacacgcgcacgcgcgatctcgcgctggaattgccgcccgtgccgctcgagcccgtgatggcgaacgacgtgtgggagcgcctctacgatcgcatcgcggagctggccgccgcgcaccgcacgacgctcgtgttcgtcaacacgcgccggatggccgagcgcgcggcccgccatctggcggacaggctcggcgcggacgcgatcgccgcgcaccacggcagcctcgcgaaggaacatcgcttcgacgccgagcagcgcctgaagcacggcaaactcaagctgctcgtcgccacggcctcgctcgagctcggcatcgacatcggcgacgtcgagctcgtctgccagctcggctcgccgcgcggcatcgcgccgttcctgcagcgcgtcgggcgctccgggcaccatatcggcggcgtgccgaaggggcggctctttccgctgtcgcgcgacgaactcgtcgaatgcgcggcgctcctcgattgcgtgcggctcggcgaactcgacgtgctgcgcattccgcgcgcgccgctcgacgtgctcgcgcagcagctcgtcgccgaagtcgcctgccgcgaatgggacgagcacgcgctctatcgctgcgtgacgcaggccgcgccctacgcgacgctcgcgcgcgagacgttcgacgaggtgctgaagatgctcgccgagggcttcacgagccggcgcggcgcgcgcgccgcgtacctgcaccgcgacgtcgtcgcgcacacggtgcgcgggcggcgcggcgcgcggctcgcggccgtcacctcgggcggcacgattcccgataacgccgactacgcggtgctgctcgagccgcagggcgtgaacatcggcaccgtcaacgaggatttcgcggtcgaaagcctcgcgggcgacgtgttccagctcggcaaccagtcgtaccggatcatccggatcgagacggggcgcgtgcgcgtcgaggatgcgcacgggcaggcgccgaacatcccgttctggctcggcgaggcgcccgcgcgcagcgacgagctgtcggcgggcgtcgcgcggctgcgcgcgcggctcgacgcgctgctcgcgcacggcgatgcggccggcgcgggtgcggccttgccggtgaacgccgcatccgcgccggcgcccgagcgcgaagcggccgcggccggccaaggcgcgcgtgcgcgcgccgccgcgccgcacggcacgtccgccctcgcgcgccgcgctttgcccgctgcgctgcccgccgcaccgcccgccgtctgcgcgcgcgccgccccatccgccgccgccccgtctaccgccatcccgtccgccgccgcgccgaccgtcgccgcgatgccggtcccccccgaggcggaactccgcaccgagccgcgtcgcctcgcgcccgcgctcgcgtggctcacgggcgagctcggcctcgatgccgaagccgcgcggcagatcgccgattacctcgcgcgcgcccgcgcggcgctcggcgcgctgccgacgcaggacacgctcgtgatggagcgcttcttcgacgaatcgggcggcatgcagctcgtgatccattcgccgtatggctcccggatcaaccgcgcgtggggcctcgcgctgcgcaagcgcttctgccgcagcttcaacttcgagctgcaggcggccgcgaccgacgacgcgctgatcctgtcgctgtcgcacgcgcacagcttcgcgctcgacgaggtgtggcgctacctgcgcgcgtcgagcgccgagcacgtgctgatccaggcgctgctcgacgcgccgctgttcgccgcgcgctggcgctggaacgcgacgacgtcgctcgcgttgccgcgcttcgccggcggccgcaaggtcgcgccgcaactgcagcggatgaagagcgaggatctgctcgcgacggtgttccccgatcaggtcgcgtgcgcggagaacatcgtcggcgagcgcgaggtgccgaagcacccgctcgtcgaccagacgctcgacgactgcctgcacgacgcgatggacaccgagggctggctcgcgctgctgcggcggatcgaggcgggcgacgtcgcgctcgtcgcgcgcgatctgcccgcgccttcgccgctcgccgccgagatcctgaacgcgaagccgtacgcgttcctcgacgatgcgccgctcgaggagcgccgcacgcaggcggtgctcgcgcggcgctggagcgacccggaatcggccgacgatctcggcgcgctcgacgcgggcgcgatcgaagcggtgcgcgacgaggcgtggccgctcgtgcgcgagcccgacgagatgcacgatgcgctcgtcgggctcgcgtgcatcgccgacgacgaaatcgcgtcgcacgacggctggcgcgcgtgcgtcgcgcagctcgcggcgggcgggcgcgcggcgcggctcgcgctcgcgggcggccgcgggctgtggatcgcagccgagcgcgtcgcgtgcatgcgcgcgctgtacggcgcggacgtcgcgctcgacccgccgctcgccccgccgcccggcttcgatgcgccgtgggagcccgaggccgcgctcgtcgacgtgatccgcgcgcgcctcacgggtttcgggccggtcacggccgccgcgctcgccgcgccgctcgcgctgcccgccgcgtcggtcgcgatcgcg

SEQ ID NO: 13785 - DNA, 1542 bp, Burkholderia mallei
atgagcgccgcgcgcagttctcatccggcgcaccaacagatcgcagccgcgctcgcgtggctgcgcgcgcatgtcgcgcccggcgcgcagttacacgccgacacgcgcagcctgcgggcgggcgacgtgttcgtcgcctatgcggtcgacggcgcggacaatcgtccgttcatcgccgatgcgctcgcgcgcggcgcggccgccgtgctgtatcagcccgaagggttcccggccgaagggctcgactccgcgacgtcgctcgccgtgcccgcgctcgacgcgctcgcgggcgacatcgcgagcggctggtacggcgacccgagcgatgcgatgttctcggtcggcgtgaccggcacgaacggcaagacgtcgtgcacgcaatggatcgccgccgcgctcaccgcgctgcgcgagccgtgcgcggtgatcggcacgctcggcagcgggatgcccggccagctcgtgcacaccggcttcacgacgcccgacgcgccgcaactgcagcgcagcctcgcgcaactgcgcgatgcgggcgcgcgggcggtcgcgatggaagtttcgtcgcacgcgctgcatcaagggcgcgtgaacggcaccgcgttcgacgtcgcggtgttcacgaacctcacgcaggatcacctcgattaccaccgcacgttcgaagcctacgaggcggcgaaggcgaagctcttcgcctggcgcgggctgcgctgcgcggtcgtcaaccgcgacgatccggccggccgccgcctgctcgcgaatctcgccgggcgcgtgcgaacgatcgcgtacggcatcgattcgccgacgcaggcggccgacgcggatcgcgagctcgtcgcgacgaacgttcgcgcgaccgcgacgggcaccgcgtttcgcgtgacgtcagcgtggggcgaagcggacgtcgaggtcggcacgctcggcgcgttcaacgtgagcaatctgctcgcggtgctcggcacgctgctcgcggccgacgtgccgttcgacgcggcgctcgccgaaatcggcaagctcgaatcggtcaacggccggatgcagcgattgggtgggcggctgcagaacgacgagccgctcgtcgtcgtcgattacgcgcacacgccggacgcgctcgagaagacgctcgacgcgctgcgcccgatcgcgcaggcgcgcggcggcgagctcatctgtatgttcggctgcggcggcgaccgcgatgcgaccaagcgcccgctgatgggcgcgatcgccgagcggctcgcggacaaggtcgtcgtgacgagcgacaacccgcgcagcgaggatccgcagaagatcatcgaccagatcgtcgccggcatgcgggatgcctcgggcgcgcgccgtgtcgaggatcgcgcgagcgcgatcctgcaggcggtgcgcggtgcggcgcgcgaagacgtcgtgctgctcgccggcaagggccatgaggcgacgcaggaaatcatgggcaagaaacgcgcgttctccgatcaggaccacgcgcgcctcgcgctcgccgcgcgcacgacgcagactcgcggaggcggcgaa

SEQ ID NO: 13786 - DNA, 303 bp, Burkholderia mallei
gtgagctgggggctcgccgcgttcggcatcgtgcaggagctcacgctcgggcggcgcacccgcatcgtatcgatggcgctgtacgtgctgatgggctggctcgcgctcgtcgcgatccgcccgctcgtccatgcgctgccggcggcgggaacggcgtggctcgtcgcgggcggcgtcatctatagcgccggcatctactttttcgtcaacgatgagcgcatccgccacgggcatggcatctggcacctgttcgtgctggcgggcagcctgtgccagttcgtcagcgtcgccggctacgtcgcg

SEQ ID NO: 13787 - DNA, 1542 bp, Burkholderia mallei
atgttgatcaaaccgttccgctcgatcgaatcggcggccaccgcgacccataactggcggcgccggcagatcctgcgcgccggcgcgtcgacgctcgtgctcgggctcgcgctgccgcgtctcgcgcacgcgagctcggtgctcggcgtgcgcgtgtggcccgcgcgcgactacacgcgcgtgacgatcgaatcggatcagccgctgcagaacacccagcaactgctgcaggggccggaccggctcgtcgtcgatctgaacggcctcgagctcgaccaggcgctgcgcgacctcgtctcgaagatcgcgccgaacgatccgcagatccagtcggtgcgcgtcggccagtatcagccgcacgtggtgcggatggtgttcgacctgaagggctcggtgaagccgcaggtgttcacgctgccgcccgtcggcacctacaagtaccggctcgtgttcgacctgtatccggccgtcgcccccgatccgctgtccgatctgatcgcgcagacggagcgcaaggaacagcagttgaatgacacgctgcgcgcgcagcaggcgcagccgcccacggccgcgctcaacggcccgaccgccgcgccgcccgccgcgacggacaacagcgatgcgttcttccagcgcttcgcgcagaacaacccgccggccgcgcattcggcgcggccggcgcccgccaatccgcccgtcgcgcaagcgagcccgcccgccgcaccgccgcggcccgcggtcaagccgccgcccgtcatcgcgcgcaggaacgacgacgattcgggcgacaccgacacctacgcgttcaccgcgccgaaatccggccgcggcaccgtgcgcctgctgacggtggcgatcgatccgggccacggcggcgaggatccgggcgcgatcggcggcggcggcacgtacgaaaagcacatcgcgctcgacatcgcgaagaagctgcgcgcgaagatcgacgccgcgccgaacatgcgcgcgatgatgacgcgcgacgccgatttcttcgtgccgctgaacgtgcgcgtgcagaaggcgcggcgcgtcggcgcggatctgttcgtgtcgatccacgcggatgcgttcacgacgccgtcggcgcgcggctcgtcggtgttcgcgctgtcggaccacggcgcgtcgagcgcggccgcgcgctggctcgcgaacaaggagaactcctccgatctgatcggcgggatcaacatcaagacgcaggacgtcgcggtgaaccgcgcgctgttcgatatgtcgacgaccgcgcagatccgcgattcgctgcgctacggcaactacgtgctgcgcgaagtcggcggcatcaacaagctgcacaagggctcggtcgagcaggcggggttcgcggtgctcaaggcgcccgatattccgtcgatcctcgtcgagaccgcgttcatcagcaatccggacgaagagcggcgcctgaacgacgacgcgtatcgcgaccagatggccgatgcgatcttccgcggaatcaagcgctatttctcggcgaacccgccgctcgcgaagagccggatgacg

SEQ ID NO: 13788 - DNA, 687 bp, Burkholderia mallei
atggcgggtcacgattccggtaatgcaaagcgcgggcggtcgccgtcgttcggcgtgttcgtccgcaagccggtcgagcgcgcgcccgcgaaaggggcgagcgacggcgcggttgattcgcaagcaattcgcatcgatgcggcgcagtcgtggccggacgatgcggtcgaggtcggcgcggtggtcgatgcgtacggcctgaagggctgggtcaagctcgcggcccacgccggtgcggggcgaggcggcgatgcgctgctcaaggcccgcgactggtggctgcaaaagggcgcggagcgaaagttcgcgcgcgtcacgcaggcgaagctgcacggcgacacggtcgtcgcacatccggacggctcggtcgatcgcgatacggcgctcgcgctgcgcggcgctcgcgtgttcgtgcgccgcggcgatttcccggcgctcgccgccgacgaattctactgggtcgatctgatcggcctcgatgtcgtcaacgaggcgggtgtcgcgctcggcaagatcgccgacatgatcgacaacggcgtgcattcgatcatgcgcgtcgaatatccggcgacgggcaaggatggtcggccgaaaaccggcgagcggctgattccgttcgtcggcgtgtacgtgaaggcggtcgagcaggcggcggggcgcgtcgtcgtcgactgggaagccgattac

SEQ ID NO: 13789 - DNA, 1722 bp, Burkholderia mallei
atggttttttctccagcttgttcctcttacgaaagctcaagtaatatccgcctacgccggcctaggccggccttgaaccggagacctggaggaaacatggaacataaccgtctgttgcgcgcactgcgtgctaccgccatcgcgggcgttgcagcggcatcgttcggcatcgcgggttctgcattcgcacagatcctgaacaaaacgctcgtctactgctcagaaggcagcccggcgggcttcgattccgcgcaattcacgacgagcgtcgatttcaccgcgtcgacgttcccgatctacaaccgcctcgtcgaattcgagcgcggcggcacgaaggtcgagcccggcctcgccgagaagtgggacatctcggccgacggcaaggtctacacgttccatctgcgccacggcgtcaagttccatacgaccgatttcttcaagcccacgcgcgaattcaacgcggacgacgtcgcgttcacgttcgagcggatgctcgatccgaatcaggcgtttcgcaaggcgtacccggtgtcgttcccgtacttcaccgacatgggcctcgacaagctgatcgtgaagatcgagaagctcgatccgtacacgatccgcttcacgctgaaggagccgaacgcgccgttcatccagaacctcgcgatggaattcgcgtcgatcctctcggccgaatacgcggaccaactgatgaaggcgggcaaggcggccgacatcaaccagaagccgatcggcacgggcccgttcatcttccgcagctacacgaaggacgcgacgatccgcttcgacggcaatcctgattattggaagaagggcgcggtgaagatctcgaagctgatcttctcgatcacgcccgacccgggcgtgcgcgtgcagaagatcaagcgcaacgagtgccaggtgatgagctatccgcggcccgcggacatcgcgacgctgaaggccgattcgaacgtcgacatgccgtcgctgccgggcttcaacctcggctacctcgcgtacaacgtgcagcacaagcccgtcgacaagctcgaagtgcgccaggcgctcgacatggcgatcaacaagaaggcgattctcgaatccgtctatcagggcgcgggccaggcggcgagcgcgccgatgccgccgacccaatggtcgtacgacaagaacctgaaggccgccgcctacgatccggcgaaggcgaaggcgctgctcgcgaaggcgggctacccgaacggcttcccgatcacgctgtgggcgatgcccgtgcagcgcccgtacaacccgaacgcgaagctgatggccgagatgatccaggccgattgggcgaagatcggcgtgcaggcgaagatcgtcacgtacgagtggggcgagtacatcaagcgcgcgcatgcgggcgagcacgatacgatgctgatcggctggaacggcgacaacggcgatcccgacaactggctcggcacgctgctcggctgcgaggcggtcaagggcaacaacttctccgagtggtgctacaagccgttcgacgagctgatccagaagggccgcgtgacgacgtcgcaggacggccgcacgaagatctacatgcaggcgcagcagatcttcgcgcagcaactgccgttctcgccgatcgcgaactcgaccgtctatcagccggtgcgcaagaacatcgtcgacatgcggatcgagccgctcggctatgcgcgcttcgacggcgtcagcgtgaaa

SEQ ID NO: 13790 - DNA, 514 bp, Burkholderia mallei
atgaagcgcgcgcacgcggtatcttcgggcgatccgccggggcgttctccgatgggtttgcgcgatcttgtttttcgattccaccgattccaccgattcccgtatgatcgatgtcaccgatgacgcgccgtcgccaccgacggcgttcgaactcgtgggcggcgaggcgcgcgtgcgcgagctcgtcgaccgtttctacgacctgatggacctcgagcccgaattcgccggcattcgcgcgctgcatccgccgacgctcgaaggctcgcgcgacaagctgttctggtttctgtgcggctggctcggcgggcccgaccactacatcgagcgcttcggccatccgcggctgcgcgcgcggcatctgccgtttccgatcgcgtcgtccgagcgcgaccagtggctgcgctgcatcgcgtgggcgatgcaggacgtgggcctcgacgagccgctgcgcgagcggctgatgcattcgttccacgacacggccgactggatgcgaaaccgtcccggttga

SEQ ID NO: 13791 - DNA, 591 bp, Burkholderia mallei
atggagaatcgcgaattgacgtacatcacgaacagcatcgccgaggcccagcgggtaatggccgcgatgctggcagacgaacggttgcttgcgacggttcagaaagttgccgatgcctgcattgcgtccatcgctcaaggcggcaaggtgttgctcgccggtaacggcggaagcgcggctgatgcgcagcatatcgcaggggagttcgtcagccggtttgctttcgatcggcccgggctgccggcagtggcgttgacgacggacacgtccattctcacggcgatcggaaacgattacggctacgagaaactgttttcccgtcaggttcaggcgctcggcaacaagggcgacgtgctgatcggttattcgacttccggaaagtccccgaacatactggcggcttttcgcgaagccaaggcaaaggggatgacgtgcgtcggcttcaccggcaatcgcggcggagaaatgcgcgagctgtgcgacttgctgctcgaagtcccgtcggccgacaccccgaagatccaggaggggcacctggttctcggacatatcgtttgcgggctggtcgagcactccattttcgggaagcag

SEQ ID NO: 13792 - DNA, 748 bp, Burkholderia mallei
atcatccagcgcacgttagccctgaacgtgatgcaaaagccgttcaaccaacccaaaggttcgccaggcgctgaactacccggtcaacaaggaggcgctcgcgaagttcgcgttcgccggcaacgcgacgcccgccaccggcatcgtgccgcagggcgtcgattacgcggtgaagctcggcccgtggccgtacgatccggcgaaggcgcgcgcgctgctcaaggaggcgggctacccgagcggcttcgagacgacgctctggtccgcgtacaacaactcgacgtcgcagaaggcgatccagttcgtccagcagcagctcgcgcaggtcggcgtgaaggcgcaggtgcaggcgctcgaggcgggcgagcgggtcgcgaaggtcgagagcgcgcaggacccggcgaaggcgcccgtgcggatgtactacatcggctggtccgcgtcgacgggcgagtcggactgggcgatctcgccgctgctcgcgtcgtcgtcgattccgccgaagctcgtgaataccgcgtactaccggaacgatgccgtcgacgccgatctcgcgaaggcgctcgagacgaccgatcgcgcgaagaaggccgagctgtacgcggacgcgcaaaggcgcatctgggccgacgcgccgtggattgcgctcgtgcaggagaagatcgtctacgcgcgcagcaagcgcctgcagggcgcgtacgtgatgccggacggctcgttcaacttcgacgagatcgcgatcaagtga

SEQ ID NO: 13793 - DNA, 909 bp, Burkholderia mallei
gcacgcgcggcgttcgccgcgagccgcgcgacggcggcggggcacgtatgcgtcgcgctgcgcgcgctcgcgcagcgcgacgacgagccgtacgacgacgtacgcgcggcgctcgccgcgagcggcgtgaccgcgttcgacggcatcgtgcgcggcggcgagtgcccactcgtcgtcgatcgcgatggtcggctgtatctcgcgcgctacttcgaatacgagacgcggctcgcgaacgcgctcgtcgagcggagccgatgcggcggcgcgccggcgggcggcgccgatgcgctctcgcccgacgcgctcggcgagcggctcgtccgctatttcgggccgcagaaggagcggggcgtcgattggcagcgcgttgcggccctcatcgcgctcacgggccgcgtgacgatcgtgagcggcgggccgggcaccggcaagacgacgacggtcgtcggcgtgatcgcgtgcctgctcgatgcgcatccggacttgcggatcgcgcttgccgcgcccaccggcaaggccgcgcagcggatgcaggaggcgctgcacgcgcgcgccggcagcctgccggcggaactcgcggcgcgcctgccgcgcacgtcctgcacgctgcaccggctgctgggcggtggcccgggcgggcgcttcgcgcaccaccgcgacaatccgctgccgtacgatctcgtcgtcgtcgacgaggcttcgatgatcgacgtcgcgctcgccgcgcatttgctcgacgcgctcgcgccgaacgcgcgcctcgtgctgctcggcgacaaggatcagctcgcggccgtcgaggcgggcgcggtgttcgccgagctgagcgcgcgtcccgcgttcagcccggcgacgtgcgcgacgatcgcgcgcacgctcggcgtcggcgaggccgagttcgtggcg

SEQ ID NO: 13794 - DNA, 969 bp, Burkholderia mallei
atgagcacgctgcaccaggacagcatcatcatcgatggcctgaacatttcgaagttcgaacgctcggtgttcgaagacatgcaaaagggcggcgtgacggccgcgaactgcacggtgtccgtgtgggagaacttcacgaagacggtcgacaacatcgcgctgatgaaaaagcagattcgcgagaacggcgaactgctgacgctcgtgcgcacgacggacgacatcctccgcgcgaagcgggaaggccgcacgggcgtgatcctcggcttccagaacgcgcacgcgttcgaggacaacctgggctatgtcgaggcgttcgccgacatgggcgtgcgcgtcgtgcagctttgctacaacacgcagaacctcgtcggcaccggctgctacgagcgcgacggcgggctgtcggatttcggccgcgaggtgatcaccgagatgaaccgcgtcgggatcatggtcgacctgtcgcacgtcggcggcaacacgtcgtcggaggcgatcgcgttctcgaagaaacccgtgtgctactcgcactgcctgccgtcgggtctcaaggagcatccgcgcaacaagagcgacgcgcaactgaaggagatcgcggacgcgggcggcttcgtcggggtgacgatgttcgcgccgttcctgaagcgcgggatcgacgcgacgatcgacgattacatcgaggcgatcggctacgtcgtgaacctgatcggcgaggacgcggtcggcatcggcaccgatttcacgcagggctacagcgtcgatttcttcgattggctcacgcacgacaagggccgctaccgccggctcacgaatttcggcaaggtcgtgaatcctgaaggcatccgaacgatcggcgaattcccgaacctgacggccgcgatggagcgcgcgggatggaaggcgtcgcgcatccgcaagatcatgggcgaaaactgggtgcgcgtgttcaaggaggtctggggcgcg

SEQ ID NO: 13795 - DNA, 387 bp, Burkholderia mallei
atgaatctgatcgcaaaacttgagcaggaagagatcgagcgcgcgctcgcaggcaagacgattcccgaattcgccccgggcgacacggtgatcgtgaacgtgaacgtggtggaaggtaaccgcaagcgcgttcaggcttacgaaggcgtcgtgatcgcgaagcgtaaccgtggcctgaactcgtcgttcatcgtccgcaagatctcgtcgggcgaaggcgtcgagcgtacgttccagacgtactcgccgctgctcgcgagcatcgtcgtgaagcgccgcggcgacgtgcgccgtgcgaagctgtactacctgcgcgaacgctcgggcaagtcggctcgcatcaaggaaaagctggtgtcgaaggatcgcgccgcggctgcgcagcag

SEQ ID NO: 13796 - DNA, 1602 bp, Burkholderia mallei
atgccgggcggccgcgtgtgcggacgcctcgccagggcggcatcgggcgatcccgttcgagccgcgatttcaatgacgatcgcgcggctcgtccgcggcaggcaaggagatgtcatggctcagttcagtgtggcgcggcaaagcgcctcgtatcggccgaacgaggatcgcgccggcggcccggatggcggcgctcagatgcccgccggctacagcagtcgtctgtacaacgaagatctcgcgccgctcgcgagccagcgctggggcgcatacaacatcttcgcgttctggatgtcggacgtgcacagcgtcggcggctacgtgtttgcgggcagcctgttcgcgctcggtctgacgagctggcaggtgctcgtcgcgctgatcgtcggcatttcgatcgtcaacgtgctgtgcaacctgatcgcgaggccgagccagcagctaggcgtgccgtatccggtggcatgccgcgcgacgttcggcgtgctcggcgcgaacgtgcccgcggtgatccgcggcctcatcgcgatcgcatggtacggcatccaaacttatctggcgtcgagcgcgctcgtgatcgtcgtgctcaagttctttccgcactggatgccgtacgcggacgtgcatcgctacggctttctcgggctgtcggcgctcggctgggcgggcttcatgctgctgtgggtgctgcaggcgttcgtgttctggaacggcatggagacgatcaagaagttcatcgatttcgccggccccgccgtctacgtggtgatgttcgccctcgcgggctacatggtatggcgcgcgggctggcgcaatatcggcctgaatctcggcggcgtccggtatcacggcgccgaagtgattccggtgatggtgacggcgatctcgctcgtcgtgtcgtatttctcggggccgatgctcaacttcggcgatttctcgcgttattgcagcagctacggcggcgtgaagcgcggcaatttctgggggctgcccgtcaatttcctcgcgttctcgctcgtcaccgtgatcacgacggccgcgacgctgccggtgttcggagaactgatcaccgatcccgtcgagacggtcgggcgcatcgatcatccgagcgccgtgatacttggggcgctaaccttcacgatcgcgacgatcggcatcaacatcgtcgcgaatttcgtgtcgcccgcgttcgatttctcgaacgtcgcgccgcgcctgatcagttggcgcgcgggcgggatgctcgcggcggtcgcatcggtgttcatcacgccgtggaatctcttcaacaatcccgcggtgatccattacacgctcgacgtgctcggcggcttcatcgggccgctgtacggcgtgctgatcgtcgatttctatctcgtgaagcgcggcgcgctgcggcgcgacgatctgtacacgacgtcggccgacggcgcgtactggtatcgcgacggcgtgaaccggcgcgcgatcgccgcgctgttgcccgcggccgcgatcgccgtcgcatgcgtgatggcgcccgcgctgtccgggctcgcgaatttctcgtggttcatcggcgcggcgctcggcggcgcgttctatcgcgcgctcgcgaaagca

SEQ ID NO: 13797 - DNA, 675 bp, Burkholderia mallei
gtgctatgcgacgatccccgcgcgcctcggcgtgatcgacaatctcggcgacggcgcgccgggcgccgcgccgcccgcggcatagcgcgggtgccgccgccggccggatcagatgccgaacagcgtgagcgacaccgccgcgcgcgtgacgatcatgatcagcacctgaacgatcacgaacagcaggatcggcgacagatcgatgccgcccagattcgggatcagccggcgcagcgggttcagcaacggcgccgtcagctgatacaggatcgccatcgcgggcgagcgcgggttcagccacgacagcagcgccatcaagatcgtgagccacagcaccagattgagcgcccacttgacgacggtcagcagcgcgacgacgaggatcgtcgggatgatcgacagcgcgtcgacgcccgccatcgtcaccatcagcgcgacgtagacgagcgacgtgacgacggccgcgacgacgcttgcccaatcgatgccgcgcacgcccgggacgatgtgccgcagcggcagcacgagccagttggtcgcctgcagcacggcctgcgtgacggggttgtacggcggcacgcgcacggcctgcagccagacgcgcagaagcaatgcggcgccgaacagcgtgaacacggtattgagcagaaaacgggcgatctcgccgaacatctt

SEQ ID NO: 13798 - DNA, 3252 bp, Burkholderia mallei
atgccaaaacgcacagacatcaacagcatcctcatcatcggcgccggcccgatcatcatcggccaggcgtgcgagttcgactactcgggcgcgcaggcatgcaaggcgttgcgtgaggagggctacaaggtcatcctcgtcaacagcaacccggcgacgatcatgaccgatccgaacacggcggacgtcacgtacatcgagccgatcacgtgggaagtcgtcgagcgcatcatcgcgaaggagcgccccgacgcgatcctgccgacgatgggcggccagaccgcgctgaactgcgcgctcgacctgttccaccacggcgtgctcgagaagtacggcgtcgagctgatcggcgcgtcgccggaggcgatcgacaaggccgaagaccgccagaagttcaaggacgcgatgacgaagatcggcctcggctcggcgaagtccggcatcgcgcactcgatggaagaggcgctgaaggtgcacgcggacatcgcggcggcgacgggcggcagcggctacccggtcgtgatccgcccgtcgttcacgctcggcggctcgggcggcggcatcgcgtacaaccgcgaggagttcgaggagatctgcaagcgcggcctcgatctgtcgccgacgcgcgagctgctgatcgaggaatcgctgctcggctggaaggagtacgagatggaggtcgtgcgcgatcgcgccgacaactgcatcatcgtctgctcgatcgagaacctcgacccgatgggcgtgcacaccggcgattcgatcaccgtcgcgcccgcgcagacgctcaccgacaaggaataccagatcctgcgcaacgcgtcgctcgcggtgctgcgcgagatcggcgtcgacacgggcggctcgaacgtgcagttctcgatcaacccgaaggacggccgcatggtcgtcatcgaaatgaacccgcgcgtgtcgcgctcgtcggcgctcgcgtcgaaggcgaccggctttccgatcgcgaaggtcgcggcgaagctcgccgtcggctacacgctcgacgagctgaagaacgagatcacgggcggcgcgacgccggcgtcgttcgagccgacgatcgactacgtcgtcacgaagattccgcgcttcgcgttcgagaagttccgcgaggccgattcgcgtctcacgacgcagatgaaatcggtcggcgaagtgatggcgatcggccgcacgttccaggaatcgttccagaaggcgctgcgcggcctcgaagtcggcgtcgacggcctcgacgagaagacgacgagccgcgacgagatcatccgcgagatcggcgagccgggcccggaccggatctggtatgtgggcgacgcgtttcgcgtgggcatgtcgcgcgagcagatcttcgaggagaccgcgatcgatccgtggttccttgcgcagatcgagcagatcgtgctgaaggagaaggcgctcgccggccgcacgctcgcgagcctgacgaaggacgagctgcactatctgaagcaaagcggcttctccgaccggcgcctggcgaagctgctcggcgcgacgcccgccgacgtgcgcgcgcgccgcctcgagctgaacgtgcgcccggtctacaagcgcgtcgacacctgcgcggccgagttcgcgacgaaaaccgcctacatgtactcgacctacgaggaggagtgcgaggcgcagccgaccggcaacaggaagatcatggtgctgggcggcggcccgaaccggatcggccagggcatcgagttcgactactgctgcgtgcacgcggcgctcgcgatgcgcgaggacggttacgaaacgatcatggtcaactgcaacccggagacggtgtcgaccgactacgacacgtccgatcgtctgtatttcgagccgctcacgctcgaggacgtgctcgagatcgtcgacaaggaaaagcccgtcggcgtgatcgtccagtacggcggccagacgccgctgaagctcgcgctcgatctggaggcgcacggcgtgccgatcatcggcacgtcgccggacatgatcgacgcggccgaagatcgcgagcgcttccagaagctgttgcaggacctcggcctgcgccagccgccgaaccgcaccgcgcgcgctgaggacgaagcgctcgcgctcgccgacgagatcggctatccgctcgtcgtgcgtccgtcgtacgtgctcggcggccgcgcgatggagatcgtccacgagccgcgcgacctcgagcgctacatgcgcgaggcggtgaaggtgtcgaacgattcgccggtgctgctcgaccgcttcctgaacgacgcgatcgagtgcgacgtcgattgcatctgcgacggcgacgccgtgttcatcggcggcgtgatggagcacatcgagcaggcgggggtccactcgggcgattcggcgtgctcgctgccgccgtactcgctgtcgacgcagacggtcgccgagctcaagcgccagacgggcgcgatggcgaaggcgctgaacgtggtcggcctgatgaacgtgcagttcgcgatccagcaggtgccgcggccggacggctcgaaggaagacatcatctacgtgctcgaggtgaacccgcgcgcgtcgcgcacggtgccgtacgtgtcgaaggcgacgagcctgccgctcgcgaagatcgccgcgcgcgcgatggtcggccagaagctcgcgcagcagggcgtgacgaaggaagtcgagccgccgtacttcagcgtgaaggaagcggtgttcccgttcatcaagttcccgaccgtcgatccggtgctcgggcccgagatgcgttcgacgggcgaggtgatgggcgtcggcgcgacgttcggcgaggcgctcttcaagtcgcagctcgcggcgggttcgcgcctgccggagtcgggcacggtgctgctcacggtgatggacgcggacaagccgaaggcggtcgaggtcgcgaagatgctgcacgatctcggctatccgctcgtcgcgacgcgcggcaccgccgccgcgatcgaggcggccggcgtgccggtgaaggtcgtgaacaaggtgaaggacggccgtccgcacatcgtcgacatgatcaagaacggcgagatcgcgctcgtgttcacgacggtcgacgagacgcgcgcggcgatcgccgattcgcgctcgatccggatgagcgcgcaggcgcacaaggtcacctattacacgacgatgtcgggcgcgcgcgcggcggtggaggggctgcgctacctgaaggacttggaagtctatgatttacaaggtctgcacgctcgcctaaac

SEQ ID NO: 13799 - DNA, 1413 bp, Burkholderia mallei
atgagtaaaaccgtcgccgacgtcatgcagctcgcgaaggacgaggacgtcaagtttgtcgatttccgcttcacggacacgcgcggcaaggagcaacacgtgtcggtgccggtgtcggccttcggcgaggacaagttcgaaagcggccacgcgttcgacggctcgtcgatcgcgggctggaagggcatcgaggcgtcggacatgctgctcatgccggatccgaacgcggccttcatcgacccgttctacgaagagtcgaccctcgtgctgacctgcgatgtcgtcgagccggcggacggcaagggctacgagcgcgatccgcgctcgctcgcgaagcgcgccgaggcctacctgaagagcacgggcatcggcgacaccgcgtacttcggtccggagccggaattcttcattttcgactcggtgcagtggaacacggacatgtccggctgcttcgtgaagatcaactcggaagaagcgccgtggtcgtcggcgaaggaattcgaaggcggcaacacgggccaccgtccgggcgtgaagggcggctacttcccggttgcgccggtcgaccagttccaggacatgcgctcggaaatgtgtctgctgctcgagcagatcggcattccggtcgaagtgcaccaccacgaggtggcgggccagggccagaacgaaatcggcacgaagttctcgacgctcgtcgagcgcgcggactggacgcaatgggcgaagtacatcatccataacgtcgcgcactcgtacggcaagacggcgacgttcatgccgaagcccgtcgtcggcgacaacggctcgggcatgcacgtgcaccagtcgatctggaaggacggccagaacctgttcgcgggcaacggctacgcgggcctgtcggagacggcgctcttctacatcggcggcatcatcaagcacgcgcgcgcgctgaacgcgatcacgaacccgacgacgaactcgtacaagcgtctcgtgccgcacttcgaagcgcccgtgaagctcgcctactcggcgcgcaaccgctcggcgtcgatccgcattccgcacgtgtcgaacccgaagggccgccgcatcgaaacgcgcttcccggacccgatggcgaacccgtacctgtgcttctcggcgctgatgatggcgggtctcgacggcatccagaacaagatccatccgggcgaggccgcggacaagaacctgtacgacctgccgccggaagaggatgcgaagatcccgaccgtgtgcgccggcctcgaccaggcgctcgaagcgctcgacaaggaccgcgagttcctgacgcgcggcggcgtgttcacggacgcgatgatcgacgcgtacctgggcctgaaggagcaggagctcgcgaagttccgcatgacgacgcacccgatcgagttcgagatgtactactcgctg

SEQ ID NO: 13800 - DNA, 561 bp, Burkholderia mallei
atgatcgcggcgggcgcgctcgccgccgccctgtcgttctcggcgcacgcggcgcccgcgacgtaccagttcgacccgagccatacgtatccgagcttcgaggcggaccacttcggcggcctgtcggtgtggcgcggcaagttcgaccggtcgagcggcaccgtgacgctcgaccgcgcggcgaagacgggcaccgtcgacgtgacgacgaaggtcgcgtcgatcgcgaccggcagccagaagctcgacgagcacctgcagacggcggacttcttcgattcggcgaagtacccggacgcgacctacaaaggcacgatcaagttcgagggcgacaggccggccgaggtcgtcggcaacctgacgctgcacggcgtgaccaagcccgtgacgctgaagatcgattcgttcaagtgcatgccgcatccgatgctgaagaaggaagtgtgcggcgtcgacgcggtcggcgagttcaaccgcgacgacttcggtctcgactacggcaagcagtacggcttcaagatgaagacgaagctgctcatcacggccgaagcggtcaagcag

SEQ ID NO: 13801 - DNA, 726 bp, Burkholderia mallei
gtgaacgagccgattgatgtggcggttgccggcgcgaatgccggcgaacgccttgccgacgccgccgatctggcgagcgaccgtattctcgcgcgcatcggccagctgacgcgcacgctgcgcgattcgatgcgcgagctggggctcgacaagcacgtcgaaaaggcggcggaggtcgtgccggacgcccgcgaccggctgcgctacgttgtcgcgatgaccgagcaggcggccgagcgcgtgctgaccgcgatcgaggtcgcgaagcccgtgcaggagcgcctgcagcaggaggccgccgcgctcgacgcgcgctgggcgaaatggtacgagacgccgatcgagcgcgcggaagtgcgcggcctgatggacgacacgcgcgcgttcctgcgcgcactgccggacgcgacgggcgccaccaacgcgcagttgctcgagatcatgctcgcgcaggacttccaggatctgacgggccaggtgatcaagaagatcatggacatggtctatctgatcgagcagcagctgttgaacgtgctggtcgagaatatcgcgcccgagcgccgcgaacagttcgccgcgacggccgccgcgctcgccgccgagcaggcgggcggcgcaatgacgccggaatcgctgctcaatgggccgcagatcaatccggaaggaaagacggacgttgtgcaggatcaggcgcaagttgacgatctgttagcgagtctgggtttt

SEQ ID NO: 13802 - DNA, 1695 bp, Burkholderia mallei
atgacgacacgcgaattcgactacatcatctgcggcgccggctccgcgggcaacgtgctcgcgacgcgcctcaccgaggatccgggcgtcaccgtgctgctcctcgaggcgggcggccccgactaccgtttcgacttccgcacgcagatgccggcggcgctcgcctacccgctgcaaggccgccgctacaactgggcgtacgaaaccgatcccgagccgcacatgaaccaccgccggatggaatgcgggcgcggcaaggggctcggcggctcgtcgctgatcaatgggatgtgctacatccgcggcaatgcgctcgattacgacaactgggcgacgcacaaggggctcgaggactgggcgtatctcgattgcctgccgtacttcaggaaggccgagacgcgcgacgtcggcccgaacgactatcacggcggtgacggcccggtctccgtgacgacgagcaagcccggcgtgaatccgctgttcgaggcgatggtcgaggccggcgtgcaggccggctatccgcgcaccgacgatctcaacggctatcagcaggaaggcttcggcccgatggaccgcacggtcacgccgcgcggccgccgggcctcgaccgcgcgcggctatctcgaccaggcgcgcgcgcggccgaatctcgaaatcgtcacgcacgcgcttgccgatcgcatcctgttctccggcaagcgcgcaacgggcgtcacgttcctgcacggcagcgcgcgcgtcaccgcgcacgcgcgccgcgaagtgctcgtgtgcagcggcgcgatcgcatcgccgcaactgctgcagcgctcgggcgtcggccccggcgaatggctgcgcgagctcgacattccggtcgtgctcgacctgcccggcgtcggccgcaatctgcaggatcacctggagatgtacatccagttcgaatgcaaggagccggtatcgctatatccggcgctcaagtggtggaaccagccgaagatcggcctcgaatggatgctcaacggcaccgggctcggcgcgagcaaccacttcgaggcgggcggcttcattcgcacccgcgacgacgatccgtggccgaacatccaatatcacttcctgcccgtcgcgatcaattacaacggctcgaacgcgatcgagatgcacggcttccaggcgcacgtcggctcgatgcgctcgccgagctgcgggcgcgtgaagctgaagtcgcgcgacccgcacgcgcatccgagcatcctgttcaattacatggccgaggcgctcgactggcgcgagttccgcgacgcgatccgcgcgacgcgcgagatcatgcggcagcccgcgctcgaccgcttccgcggccgcgagctgaacccgggcgcggatctgaaaagcgacaacgagctcgatacgttcgtacgcgcgcgcgcagaaacggcattccatccgtcatgctcgtgcaagatgggctacgacgacatggcggtggtcgacaacgaaggccgcgtgcacgggatcgacggattgcgggtcgtcgacgcgtcgatcatgccgatcatcacgaccggcaatctgaacgcaccgacgatcatgatcgccgagaagatcgccgaccggatccgcaagcacaagccgctcgaacgctcgaacgcgcaatactacgtcgcgaacggcgcgcccgcgcgcggcggcaagcccgcgcgggcgcccgccgtcgta

SEQ ID NO: 13803 - DNA, 174 bp, Burkholderia mallei
atgcgcaacctgatgccttgggtgcgcgataacgctgccgagatcgccgatgcgtttttgagggagggcatgtcggagggcggcgcgatacgtatcgcgatcgcgcaggcgaaacactggctgcgctcaggcacggtgcgggcgcgaatgcggccagcggacgagcgggcatcg

SEQ ID NO: 13804 - DNA, 573 bp, Burkholderia mallei
gtgctcctcattctcattaccgatccgctcggcaacatcccgctcgtcatcgcggcgctgcgggatgtaccgcgcgagcggcgcgtgaaggtgatcctgcgcgaagtcgcgatcgcgttcgtgatcctgctgttcttcatggtcgtcggcgaccgcttcttgcggatgatgagcctcaccgatctttcactgcggatcggcggcgggatcgtgctgttcctgatcgcgctgcggatgatctttccgcacccggacggcgcgctcggcagcgatccgcgcgcgggcggcgagccgttcatcgtgccgctcgcgattccggcgctcgccgggccgtcggcgctcgcgacggtgatgctgctcacgtcgcaggcgcccggcaagacgctcgagtgggcgggcgcgcttacggtgacgatgctcgtctgcgcagtcacgctcgtgcttgccgaacggattcagcagtggctcggcgagcgtaccgtgatcgcgttcgagcggctgatggggctcgtgctcgtcgcgatttccgtcgagatgatgatggcgggcattcgcgcgttcgttcaccagttg

SEQ ID NO: 13805 - DNA, 273 bp, Burkholderia mallei
atggcacgttctgttaaaaaaggtccgttctgcgacgcccatttgctgaagaaagttgaggcggctgcagcttcgcgcgacaagaagccgatcaagacctggtcgcgtcgttcgacgatccttccggacttcatcggtctgacgatcgccgtgcacaacggccgtcaacacgttccggtgtacatctcggaaaacatggtcggccacaagcttggcgagttcgcactgacccgcacgttcaagggtcacgcggccgacaagaaggccaagaaa

SEQ ID NO: 13806 - DNA, 1121 bp, Burkholderia mallei
gacgatttgcgcgcgctcggacgaacgccgttgcaggcgcttcgactcgcgcgccgtatccgcgacgcgctgggcgtgaccgtaccggtcgagtcgatcctcgcgagtccgaccatcgtcgagcttgccggatacgtcgagcaattgcgctcgcgggacgtccgcgacggcgctgcgcccgtgtcgatcggcgaaacaccggcggacgcggatgctcgagctcaggcgcaggcggatacggtgcacaccgattgcctgatcgtcattcaagcaggcggcgccgaacaagcgccggtgttctgcatcccgggcgcggggggcagcgtcgcgtcgttcgttgcgcttgcgagcatgctgcgcgccgacataccggtatacggcttgcagcctcgcgggctggacggcctggggccgccggaccgatccgtcgaagcggctgcgcgccggtacgcgcgggccattctggatgccaccccgcccgggccgccgcgcatcgtcggccactcgttcggcggctggatcgcgctcgagacagcgcggctgctggacggcatgggaacgcgctgcgccccgctcgtcctgctcgattcgaatccaccgcccgcgtcgcaggcctggcgcgcgccttccgaggcagacatgctgcgcacgctcgtcggcctgctcgagcaggccgcgggcggcgcaccatccgggatcggcgacgaagaaatcgcccgttgcgcggcagcgggcgaggatgcgcgggatgcgctcgtgcacgcctgcatggtgaggaccgccctgctgccgccgcgcgcgccggtcgaaacggtgcggcacctgcggcgggtattcgaagcccattcgagcacccgctacgcgccgggcagccgatacgcgggcgacgcaacggtgatcgtcgccaacggcgatcgcgacgcgggcgagatggtgccggcgttcggatgggccgcgctgatcgagcgagtcgaggtggccgtgacgccgggcaatcacatgagcatgctcgcggcgccgtatgttcgtcacgtcgcgctgacgatgaaggcggtatggcgcatgatctgaatcaacacagccgccgccgcgctgcgatggccgttcgttgcgccccgtgc

SEQ ID NO: 13807 - DNA, 921 bp, Burkholderia mallei
gtgacagcgcgctcccgattcgcggggcgcaccaccatgaacgattcgtatcccagtcgaaaatcctccgacaaaccgcatgaaaaacgctcgctgctcgagcgtctgaccgacatcatctcgcctgagcccgactcgcgggccgagcttctcgaaatcctgcaggatgcgcacgaacgcaacctgatcgacgccgattcgctgtcgatgatcgagggcgtgttccaggtatccgacctgtgcgcacgcgacatcatggtgccccgtgcgcagatggacgcgctcaacatcgccgacaagcccgaggatttcatcccgttcgtgctcgaaaaggcacactcgcggtacccggtatacgaagacaaccgcgacaacgtgatcggcgtgctgctcgcgaaggatctgctgcgcttctacgcggaagaggaattcgacgtgcgcggcatgctgcgccccgccgtcttcatccccgaatcgaagcggctgaacgtgctgctgcacgacttccgcgtgaaccgcaaccatctcgcgatcgtcgtcgacgagtacggcggcgtcgccggcctcatcacgatcgaggacgtgctcgagcagatcgtcggcgacatcgaggacgaatacgacttcgacgaggaagccggcaacatcatcgccgcgcccgacggccgctaccgcgtgcgcgcgctgaccgagatcgagcagttcaacgaaacgttcggcaccgatttctccgacgacgaagtcgacacgatcggcggcctcatcacgcaccatttcggccgcgtcccgcatcgcggcgagaaggtgcgcctgggcgagctgctgttcgagatccagcgcggcgacgcccgccagattcacgtgctgctcgtgcgccgcgcgccgctcgccggccggcgcagcggctcggcgggcgaagac

SEQ ID NO: 13808 - DNA, 699 bp, Burkholderia mallei
atgcccagcaacattctcgtcatcgaagatgaacccgcgatttccgaattgatttcggtgaatcttcagcacgcgggtcactgcccgattcgcgcttacaacgcggagcaggcgcagagcctgatcagcgacgtgctgcccgatctggtgctgctcgactggatgctgccgggcaaatcgggcatcgcgttcgcgcgcgacctgcgcaacaacgagcgcacgaagcacattccgatcatcatgctgaccgcgcgcggcgacgagcaggacaaggtcctcggcctcgagatcggcgcggacgattacgtgacgaagccgttctcgccgaaggaactgatggcgcggatcaaggcggtgctgcgccgccgcgcgccgcaactgaccgaggacgtcgtgtcgatcaacgggctgcggctcgatccggcgacgcatcgcgtcgccgcgcagtcggacggcagcgagatcaagctcgatctcggcccaaccgagttccgcctgctgcacttcttcatgacccatccggagcgcgtgcacagccgcacgcaactgctcgatcaggtctggggcgaccatgtgttcgtcgaggagcgcacggtcgacgtgcacatcaagcggctgcgcgccgcgctcaagcccgccggctgcgatgctatgatcgaaaccgtgcgcggcagcggctaccggctcgcgaaacacgcg

SEQ ID NO: 13809 - DNA, 1035 bp, Burkholderia mallei
atgatagtcagtcacagcgccgctgcggtgcgcatcggcatcgcggggctcggccggctcggccggcgccacgcggagaacctcgcgcggcgcgtcgcgggcgcgcggctcgcggccgcgtgcagcccgcttgccgacgagtgcgcgtgggcgcgcgagacgctcgccgtgccgcgcgtctacgaggatttcgacgcgctcgcggccgatcccgagctcgacgcgctctggctcgtcacgccgtcggcgctgcacgcggaccagatcgtcgccgcgttgcgcgcgggcaagcacgtgttctgcgagaaaccgctgtcgctcgatctcggcgaatgcgagcgggtgctcgccgaggcgcgcgcgcggccgcatctcgtcgcgacgatcggtttcatgcgccgcttcgatccgagctatcgcgacgcgtacgcgcgcgtcgcggcgggcgagatcggccggccgttcctcgtgcgctcgcagacctgcgaccggaacgatcccgagggctttttcgtgcgcttcgtgccgagctcgggcggcatcttcctcgattgcaccgtgcacgacatcgacgtcgcacgatggctgctcggcgcgccgcgcgcgacgcgcgtgtacgcggcgggcgcggtcgcgctgcacgaggggctgcgcgcgtgcggcgacgtcgacaacggcgtcgcgatctgcgagttcgaaggcggccggctcgcgatgttctatgcgtcgcgcacgatggcgcacggcaacgacacgcactccgaagtgatcggcacggcgggcgcgctcgcgatcggccgcaacccgcgcgcgaaccgcgtcgagatctatgatgcggcgggcatccgcaacacctgcacgccgacgttcttcgaccgcttcgaggatgcgttcctgatcgaggcgcaggcgttcgtcgcggcggtgcgcggcgagggcgccgccggcggcgcgacgctcgcggacgcgctcgaggcgacgaggatcggccatgcgctgcgcgaatcgttgcagaccgggcgggcgatcgagctg

SEQ ID NO: 13810 - DNA, 2463 bp, Burkholderia mallei
cccgcgtggcgcgcattcttcacgcagctcggcagtgtcggcttcgccgatctcgaccgccgcgccgacgcgctgcagcgccggatgcgcgagaacgggctcgcctatcatccgcacgagcgcgcggcgggcggcggcgcggtgcggccctggtcgctcgacctgctgccgctcatcatcgcgcccgacgactgggcggcgatcgagcggggcgtgctgcagcgcgtgcgcctgagcaatgcgatcctcgccgatctctacggagaacagacgatcctgcgccgcgggctgttgccgcccgcgctcgtcaccgggcatccgggctatctgcggccgatgtgcggcgcgcaagcgccgggcggcacgtggctgcacgtcgccgcgttcgatctcgcgcgcgggccggacggcgcgtggcggctgatggcgcagcacacgcagggcccggcggggctcggctatctgctggagaaccggctgatcgtgtcgaggctctttccgcgcgcgtttcgcggcctgcacgtgcagcggctcgcggcgagctatcgcgcgctgctgcagagcatgcaggcgctgagccccgcgcggaagaactcgcgcatcgtgctgctgacgccgggcccgcatgcggcgacctatttcgagcatgcatacctcgcgcgctacctgggcctcacgctcgtcgaaggcggcgacctgaccgcgcgcgaccagcgcgtctatctgaagacgctgcgcgggctcgaaccggtgcatggaatcctgcggcgcgtcgacgacgaatggctcgatccgctcgagctgcgcccggattcgctgctcggcgtgccggggctgatgcaggcggtgcgcgcgggcaacgtgctgctcgcgaacctgccgggctcgggctttctcgaatcgcccggcattctcggcttcttgccgcgcctcgcgcaggccctgctcgacgagacgctgacgctgcccgcggtgcattcgtggtggtgcggcgagcaggcggcgtgcgacgaggcgctgccgctgctcgcgcgcggcatcgtgaagccgacgttccccgcgagcgtgcaggcgggcggcgcgttcgagccggtgatcggcgcgcggctttcgccccggcagctcgccgattggcgcgcgcggatcgccgcgcagcccgcgcattacacgattcaggcggacctgccgctatcgcaggcgcctacctgggcggccggcgcgggcatgggtgacggcggcgcgcggatcgtgccgcggccgttgctgcttcgcgtgttcgcgctcgcggacggcgcgcgctcatggcgcgtgctgccgggcggccttgcgcgggtcggcacgcgcgacgagctgttcaacgcgccgatgccgcacggcggcagcagcgtcgacacctgggtgatgaccgaaggcgcggtcgatccgaccacgctgttgcagacgcacctgggcccggacgacttgcaggagcgatcgcgcgcgatcgcgagccgcgcggccgagaacctgttctggcttggccgctacacggagcgtgcgacgaacctgacgcggctcgcgcgcgcggcgctcgagcggctgcgcggcgaggacgatgtcgagacgcctgtccatctgcatgtgctcgacgcgctgtgccgcgacaacggcctgctgcccgccgacgcgccgccggccgtcgacgcgccgcgcgcgttccagcaggcgctgacgcgctcgctcacgcctcgcgcggaccgctcgacgggaatcgcatcgtgcctgttcgggatgcgtggcgcggcggcggcgatacgcgagcggttgtcgcgcgagcagtggcgcctgatcgacgaggcgacgcaactgttcgacgaaggcggcgacgatgccgagcccgaggagcaactcggcaacgacgcgctgcagcgcctcgagcggctgaatctgctgctgtcggcgatcaccggcgcacagaccgacaacatgacgcgcgacgacggctggcgtctgctgtcgatcggccgccagatcgatcggctcgagttcctgtgcggcgtgctcggccatgcgttcgacggcggcgcgatccacaagcaggaaggcttcgagctcgtgctcgaactgttcgacagcggcatcacgttccgctcgcgtttccagcgctgcttcgacgttgcgccgctgctgtcgctcgtcgtgctcgacaccgataatccgcgttcgctcgcgtgggtcgcgcaggcgttgcggggccggctgtcgaaggtcgagcgcagcgagggctacgcgctgtcggaactcgccgacgggattccggacatcgccggctggccgctgcacgtgctgtgcgagacggacggcgacggccggcatgcggcgctgctcgcgcgcctgcaagcgtgcggcaaggcggcgtgggacgtgtcgaaccggatcggcgagcgctatttcagccacgtgcgcgatgcgggcaggtcgcta

SEQ ID NO: 13811 - DNA, 1392 bp, Burkholderia mallei
atgatcagacgcctgctgccccgcacgctgcgcgcgcgcctgacggcgctcatcatcctgtcgaccgcggcgacgctcgcgctgagcggcgtcgcgctctacagcgcgctgcacaaccggctcgtcggcatgtcgtcgtacgagatgtcggcgacgctcgcggcgatgcgcacgcatctcgcgaacgtcgcgaacgtcgacgatatcccgcgcaaatcggatctgtggatcgatcaactgcacggccatcagaatctggatctcgcgatctacgacaccgacggccgcctgcgcttcgccacgcgcggcttcgtcgcgccgcggcccgcgctcggcgcgccgcaaacgcgcgtgccggcgagcgccgcgcccgccggcgcgacgttcagctatctcgcggacgacgcgccgctgcgcggcgggaacccgcgcaccgcgcgcatcgtcgtgcagtacgacggcaagaacgatcatgcgctgctgcgcgcatacgcgtacacggtcgtcgtgatcgaggtgctcgcggtcgtgctgacggcggcgctcgcctacggcatcgcgatgctcggcctgagcccgctgcggcggctcgtcgcgcgcgccgagcagatgtcgtcgagccggctcgcgcagccgctgccggagctcgacacgtcgggcgagctcaaggaaatggagcacgcgttcaacgccatgctcaagcgcctcgacgaatcgttcgtccggctgagccagttctcgtcgaatctcgcgcacgacatgcgcacgccgctcacgaacctgctcgccgaggcgcaggtcgcgctatcgaagccgcgcacggccgacgaatatcgcgacgtgatcgaatcgagcatcgacgagtatcagcgtctgtcgcgcatgatcgaggacatgctgttcctcgcgcgctccgacaacgcgcagagccatctggcgatccgcacgctcgacgcggcggcacaagccgagcgcgtcgccggctattacgagccgatggccgaggatgccgaagtgagcatcgtcgtgcgcggcaaggccgaggttcgggcggacgcgctgctctatcaccgcgcgctcagcaacctgatcagcaacgcgctcaatcacgcgccgcgcggctcgacgatcacgatcgaatgcgcgcaagccgccgacgcggcgacgatcagcgtatcggacacgggccgcggcatcgaggcgccgcaccgcgaacggatcttcgagcggttctaccgcgtcgatccggcgcggcacaattcggcgtccggcacggggctcggcctggcgatcgtgcgctcgatcatggaaaaccacggcggcacgtgcggcgtcgacagcgagccgcacgtgcgcacgacgttctggctgaagtttcccgcgcacgcggcc

SEQ ID NO: 13812 - DNA, 2358 bp, Burkholderia mallei
atgagttcgtctcggtcacacgccgcccgcgccgcgcggccggtgcgcgcgacacgcaagtcgcgccgccgccgcgcgctgttcgcgattccgctcctcggcacgctggcgctcgcgctgctgtgggtggccatcatcgcgcgcctgtccgtcgagaaggacagcgcgttccgcgatgcgggcgcgtcggccgcgatcctgtcgacggcgctcgagcagcacacggtcaaggcgatccatcaggtcgaccagatcacccgcttcgtcaaatacgaattcgagaagtcgcccacccgcttcaaccttgcgagcacggtggagaaaggcgtggtgccgagcgacacgctgatccaggtgtccatcctcgatgcgcgcggccggctcgtcgcgaacacggccgaggcgcatccgaagccgatcgatctgtccgaccgcgagcacttcaaggtgcacatgcagcgcaacgacgacgatctctacatcagcaagccggtgttcggccgcgtgtcgcgccactggacgctgcagatgacgcggcgcctgaaccatccggacggctcgttcgccggcgtggtcgtcgtgtccgaggatccggcctacttcacgaacgacttctacaacaacgcgacgctcggcaaggacggcgtgatcgcggtgatctcggatacgggcgccgtgctcgcgcgcagcacgggctccacgcagaagacgcccggcacgttctcggcatcgggcgtctacccggtgtcggagcgcgcctcgggcacctatgtcgatccgatcgacggcatcgtgcgcatcgtgtcgtatcgccatctcgacggctatccgctcggcgtgatggtgggcctgtcgcaggctgaagaattcgccgactaccaccacacgcgcaatgtctatctgctgatgacgggcttcatcacgctcgcgatgctcgcgttcttcggcgtcgcgacgggcctgatcggcaagctgctcggccgcgagcgcgaaatgacgcagctcgccgagttcgatctgctgacggggcttgcgaaccgctatgcgacgctgcgcagcctgcgcaacgacgtcgcgctgccgtcgaatctgtcgcgcctcgcgatcctgttcatcgatctcgacaatttcaagaccgtcaacgacacgctcggccacaacgcgggcgacatcgtgctgcagatgacggccgcgcgcctgtccgatgcggtggcgaacgaaggcgcgctcgcgcgcatcggcggcgacgagttcgtcgtcgtcgtgaagggcgagaacgtcgagcggcgcgccgagcggctcgcggaggcgatcgtgcgaatgttcgccgagccgttcgacgtgcgcggcagctcgttcgtgctgcacgcgagcatcggcatcgcgctgcattcggtggagaacgaaagcgagatcgacttgctgaagaaggccgatctcgcgatgtacagcgccaaggacgccggcaagaactgctaccagttctatgcgccgcacttgtcgcaccgcgccgatcacctgatgcgctgggagcagcagttgcgcgtcgcgctgtcggacgggcaactgttcctcgcctaccagccgaagatcgatctcacgtaccgctgcatcaccggcttcgaggcgctcgtgcgctgggaccatccggagcacggcgtgatctccgcgaacgaattcatttcgatcgccgaatcgaccgggctcatcgtgccgatcggcgacttcgtgatccgcaccgcgtgcgagcagctcgcgcgctggcgcaacgagggccacgacaagctcacgctcgccgtcaatatctcgcccgtgcagttctggcgcggcgacctgatcgacacgatctcgcgcgcgctcgccgagaccggaatcgaggcgcgccgcctcgagctcgagatcaccgagaccgcgatgatggaataccctgagctcgtatcggagaagatcgtcgcgctgaaaaggctcgggatccgcgtcgcgctcgacgatttcggcaccggctattcgtcgctgtcctacctgcaccgcttcgcggtcgacaccctgaaggtcgaccgctcgttcatccaggcgattccggccgaccgcagcgtgtgtgtgatggtgtcgtcgatcgtgcacctcgcgcgctcgctcgggctcacggtcgtcgtcgaggggacggagacggaggagcagatcgcgtggctcgccgcgctcgggcgcatcgaggcgcaaggcttcctgttctcgcggccggtgccctccgacggcattgcggccctgctcgcgcgcttcggcgtctgcggcggcgacagcgcgcgcgcggcgggccgcgacatcgcgaacgccgctaaacagtcgttcggcagcgac

SEQ ID NO: 13813 - DNA, 906 bp, Burkholderia mallei
atgaacgcgactgtttcctcccccccttccgcacccgcttcggccggcgcgccagccgcgatccgcacgccgtggagcgagttctggcgcaagttccgcaagcagcgcgtcgcgctcgcggcgggggcgttcgtgctgctgctcgtcgccgtggcgatcgtcggcccgcacgtcgtgccgtacgatccggaaaactatttcgactacgacgcgctgaacgcggggccgtcggccgcgcactggttcggcgtcgattcgctcggccgcgacatcttcagccggatcgtcgccggcgcgcggatctcgctcgccgcgggcttcttctcggtcgcgctcggcgcggcgatcggcacgttcttcgggctgctcgccggctactacgaaggctggtgggaccgcgcgacgatgcgcgtcgccgacgtgctgttcgcgttcccaggcatcctgctcgcgatcggcgtggtcgcgatcctcggcaacgggatgatcaacgtgatctgcgcggtcgcggtgttcagcgtgcccgcgttcgcgcggctcgtgcgcggcaacacgctcgcgctcaagcagatgacctacgtcgaggccgcgcgcagcatcggcgcgtccgaccggacgatcatcatgcggcacatcctgcccggcaccgtgtcgtcggtcgtcgtctacttcacgatgcgcatcggcacctcgatcatcacggcggcgagcctgtcgttcctcggcctcggcgcgcagccgccgacgcccgagtggggcgcgatgctcaacgaggcgcgcgcggacatggtcaacgcgccgcacgtcgcgctctttccgagcgtcgcgatctttctgaccgtgctcgcgttcaacctgctcggcgacgggctgcgcgacgcgctcgatccgaaactggagcggcgc

SEQ ID NO: 13814 - DNA, 1062 bp, Burkholderia mallei
atgcgcgtgcgcgcggcgcgggcactgcgtcggaggtcttgcgtcccgcgacaggcctctcgcgccgtgcatcgtgcatcgtgcatcgtgcatcgtgcgaccggcgaccggcgaccggcgaccggcgaccggcgaccggcgacacatgatgcgcgaaggcgatgcgcggcgcacgccgccgacgccccgaaccaaacgagacacgacccgaaccccatacaatcacaacgaggaacgatgatgctgcttgcccacatcagcgatctgcatatcaagcggccgggcgcgctcgcgtatcggcgcgtcgataccgccgcgcatctcgcgcgctgcgtcgcgcggctgaacgcgctcgagccgcgcccggacgcggtgctcgtcacgggcgacctgaccgacttcggcgacgacgacgaatacgcacacctgaaagcgctgctcgcgccgctcgcgatgccgtactacctgctcgtcggcaaccatgacgaccgcgcggcgctgcggcgcgccttccccgcgcgcgtcgagctgcaatcgggcgagttcgtccagtacgcgctcgatctcgggccgctgcgcgtgatcgcgctcgattcgcagattccgggcgcgagcggcggcacgctgtgcgacgcgcggctcgcatggctcgccgatcagctcgacgccgcgcgcgatcgccccgtgatcgtcgcgctccatcatccgccgttcgcgtgcggcatcggccacatggacgcgatgcggctcgccccggacgcgtcgagccggctcgacgcgctgctgcgccgccatccgaacgtcgagcgcgtgctgtgcggccacgtgcatcggacgatgttcgcgcgcttcggcggcacgatcgcgtcggccgtgcccgcgcccgcgcatcaggtcacgttcgatctgcgcgacggcgggccttcgtcgttctcgatggagccgcccgcgttcgccgtgcaccgccatgcgccgggcgccgggctcgcgtcgcatcacgtgtacgtcgacgcgagcgatgggccgcatccgttcttcgagccgacgggaacgttgatcgat

SEQ ID NO: 13815 - DNA, 1308 bp, Burkholderia mallei
atgaacatcatctgggcgcgctttctggtgtcgctcgtgctgctcgcgctcgtgagcgtgatcatcggcgcaatcgcgggccccgtgccgggtctcgtcttcgcgctcgcgatgctcgtcgtgcagggtttcgtcagcaccttccacacgcagcgcctctggcgcctgctcgatgcgcccgtctacggcgaagtgccgagcgcgccgggcatctggggcgagatctactatcggctgcacaaactcgcgaagcagtggcacgcgcaggtgcgccaggtcgagcagcagcactcgcgtttcatccaggcgatccaggcgtcgccgaacggcgtcgcgatgctcgacgatcgcgatcagatcgagtggtgcaacgcgatcgccgaggtgcacttcgggctcgacgcgaagcgcgacctgcgccagcacgtcacgcatctcgtgcgccatccggatttcgtccgctatctgaacggccagcattacgacgaaacgctcgtgatgcgcggcatgggcggcaatcggcagaacgtgcttgccgtgcaggtgtttccgtacggcgagaaccgcaagctgctgctcacgcaggatatcaccgagctcgagcgcaccgatgcgatgcggcgcgacttcgtcgcgaacgtgtcgcacgaactgaagacgccgcttaccgtgctgtcgggctttctcgagacgatgcgcgagttgccgctgtcggacgacgagcgcgcgcgctacctcgaactgatggagcagcaggcgtcgcggatgcggcacatcgtcaccgatctgctcgtgctcgcgaagctcgagggcgaaagcaagccgcccgccgatcgcgcggtcgacatgcgcacggtgctcgaccatctgcgggacgatgcgcagacgctatcgggcggccatcacgagatcacgttcaaggttgacgagacgctcgcggtgacgggcgcgcagaccgagatcttcagcgcgctcggcaacctcgtgacgaatgcgatccgctatacgccggagggcgggacgatccgcgtcgaatggcggcgcgacggcgcgcaggcggtgttctcggtcaccgatagcgggctcggcattccggccgccgaactgccgcggctcaccgagcggttctatcgcgtcgaccgcagccgctcgcgcgacacgggcggcacggggctcgggctcgcgatcgtcaagcatgtgttgcaacggcacgatgcgcaactgtcgatccagagcgaggaggggcgcggcagcacgtttaccgcgcgttttcccgcgcatcggacgatcagccggaggcacgcggcg

SEQ ID NO: 13816 - DNA, 621 bp, Burkholderia mallei
atgaatgccacagcctgcgcggcgcccgccggcgccgccgttgccgacgacccgcgcggcctgctgcggggactgctgtcgcgccgctcccgctggccgctgaccgaaccggcgcccggcccgcgcgaactcgacgccatcttcgacgccgccttgcgcgcgcccgatcacggcaacctgcgtccgtggcgcttcgtcgtgatccgcggcgccgcgcgtcacgcattcggcgatctgctggtcgagctggccgacgcgcgcgcacccgacgccccgcccggctcgcacgcgcaccgccgcgcgaaggcgctcgccgcgccgctcatcgtcgcgctcggcgcggcgctgaaccgcgcctcgaaagtacccgaggtcgagcagttgctcgccgtcggcgcggccgcgatgaacatgctgaacgcggtccaccagctcggctacggcggcttctgggcaacgggcgccgattcgtacgagccggcgatgcgcgacgcgctcggcttcggcgccgacgaacggctcatcggcttgctgtacatcggcacgccgtccgcacccgcgagcgacgcgcgccgcccggatcgcgccgcacacgtgcgcgaatggctcggccccgcacgc

SEQ ID NO: 13817 - DNA, 1974 bp, Burkholderia mallei
atgcgtgcgcggcgtgggccgcgcgtcggccgaatggacgacgtgcgaccttcgtccacctttcgcggcggcgacgttggtaaaattcacgccaccgccccttttcgcagcccatccatctccagatccatgtcccgttcgctcgaaattctcaacgaagtcttcggctatcccgccttccgaggtcaacagggcgagatcgtcgagcacgttgcggcgggcggcgactgtctcgtgctgatgcccacgggcggcggcaagtcgctctgctaccagattccggcgctcgtgcgcagcgaagcgggccgcggcgcgggcatcgtcgtgtcgccgctcatcgcgctgatgcaggatcaggtcgccgcattgtccgaggtcggcgtgcgcgccgcgtatctgaactcgacgctgtcgggggccgaggcggccgcgaccgaacgcgcgctgcgcgacggcgacatcgatctgctctacgtcgcgcccgagcggctgatgacgccgcgcttcctcgatctgctcgagcgcgcgcgcatcgggcttttcgcgatcgacgaggcgcactgcgtatcgcagtgggggcacgatttccggcccgagtacattcagctgtcggtgctgcacgagcgctttccggacgtgccgcggatcgcgctgaccgcgaccgccgatgcgatcacccgcgacgagatcgtgcagcgtctggcgctcgacgacgcgcgaatcttcgtgtcgagcttcgaccggccgaacatccgctaccggatcgtcgaaaaggacaacgcgcgctcgcagttgctcgacttcattcgcgccgagcatacgaacgccgacggtacgaccgacgccggcgtcgtgtactgcctgtcgcgccgcaaggtcgaggagacggccgaatggctgaaggcgcaaggggttcgtgcgctgccgtatcacgcgggaatggagttcgagatccggcagaagcaccaggagatgttccagcgcgaggaaggggtcgtgatgtgcgcgacgatcgcgttcggcatgggcatcgacaagccggacgtgcgcttcgtcgcacacctggatctgccgaagagcgtcgaaggctattaccaggagaccggacgcgcggggcgcgacggcctgccggcgaacgcatggatggcgtacgggctcggcgacgtcgttcagcagcgcaagatgatcgacgaatcggaagccgacgacacgcacaagcgtgtccagacgtcgaagctcgacgcgctgctcgggctgtgcgagacggcatcgtgccgccgcgtgcggctcctcgcgtatttcggcgagacgagcggcccgtgcggcaactgcgacacctgcctcgagccgccggcgacatgggacgcgacgcgcgaagcgcagatggcgctgtcgtgcgtattccgcgcgcagcgcgcaagcggcttcaatttcggcgcgagccatctgatcgaagtgctgcgcggtgcgcggaccgagaaggtccagcaacgcggccacgacagtctcagcacgttcggcatcggcgccgagttgtccgaagccgaatggcgcgcgatcttccggcagctcgtcgcgttcggctatctcgccgtcgaccacggcggcttcggcgcgctcgtgctgacggaggcgagcaagccggtgctcaagggcgaggagaaggtcacgctgcgccgctacgtgaagccggcgcgcacacggcagtcctccggccgcagcggcgcgcgcgtcgatccgacggccggcatgagcgcgcgcgagcgcgcgtgctgggagcgcctgcgcgcgtggcgcgcggaaacggcgaagagcgacggcgtgcctgcgtacgtgatcttccacgacgcgacgctcgcggagatcgcgcgcaacgcgcccgaatcgatcgacgatctgcgccatatccccggaatcggcgcgcgcaagctcgatcgcttcggcgacgagattctcgaggtcgtcgagtcggcc

SEQ ID NO: 13818 - DNA, 1539 bp, Burkholderia mallei
gtggttcctgtggcggcggagcatgctcggcacgatcgtcgtcgggatgctggtgttcaccgcgttgcggatcctgttctgagcgccggcgggcccggccgcccggcatgccgcgcgggccgccgcggcatgcgcgacgcaacggcgcactgcgccgcgaaatggcggggattcgccgcgcggcagggtagcgcgccgggcggatcggctagaatggccctttccggaattttttcgcgcgcgcgccgcgcgggcctcgccgcgcaaagccggcgggccgcgcgaggcgcccggcgcggcagcccgcgcgcgtcgaaccgccttccttcatcaaccttcatcagtcccatgagccaagtaaagcgtcttaccgacctgatcgccgaaggcaagctgtccggcaaacgcgtgttcatccgcgccgatctgaacgtgccgcaggacgatcacggcaacatcaccgaagacacgcgcgtgcgcgcgtcggtgcccgcgatccaggcggcgctcgacgcgggcgcggccgtgatggtcacgtcgcacctcggccgcccgacggaaggcgagttcaagcccgaggattcgctcgcgcccgtcgcgaagcgcctggccgagctgctcggccgcgatgtgccgctcgtcgcgaactgggtcgagaacggggtcgaggtcgcgcccgggcaggtcgtgctgctcgagaactgccgcgtgaacaagggcgagaagaagaactcggacgagctcgcgcagaagatggcgaagctctgcgacgtctacgtgaacgacgcgttcggcaccgcgcaccgcgcggaggcgaccacccacggcatcgcgaagtacgcccccgtcgcgtgcgcgggtccgctgctcgcggccgagctcgacgcgctcggcaaggcgctcggcaacccgaagcgcccgctggtggcgatcgtcgcgggctcgaaggtgtcgacgaagctgacgatcctgaagtcgctcgcggagaaggtcgatcaattgatcgtcggcggcggcatcgcgaacacgttcatgctcgcggcggggcttgcgatcggcaagtcgctcgccgaggccgatctcgtcggcgaggcgaaggcgatcatcgacgaagcccgcaagcgcggcgcgtcggtgccgatcccgaccgacgtcgtcgtcgcgaaggaattctcgccgacggccgccgccaccgtgaagaaggtcgccgacatcgaagccgacgacatgatcctcgacatcggcccggacaccgcgaaggcgctcgccggccagctcgagaaggcgggcacgatcgtctggaacggcccggtcggcgtgttcgagttcgaccagttcggcaacggcacgaagacgctcgccgacgcgatcgcgagctcggccgcgttctcgatcgcgggcggcggcgacacgcttgccgcgatcgcgaagtacggcatccacgacaaggtcagctacatctcgacgggcggcggcgcgttcctcgaattcctcgagggcaagaagctgcccgccgtcgaagtgctggaaacgcgcgcg

SEQ ID NO: 13819 - DNA, 915 bp, Burkholderia mallei
atgttgaagcagcgcaccatcaaatcgatcgtcaagaccgtcggcatcggcgtgcattcgggccgcaaggtcgaactgacgcttcgccccgcggcgcccgatacgggcatcgtgttctcgcgcgtcgatctgccgacgcccgtcgacattcccgcttcggcgctgtcgatcggcgacacgcggctcgcgtccgtgctgcagaaggacggcgtgcgcgtgtcgacggtcgagcacctgatgtcggcgtgcgcgggcctcggcatcgacaacctctacgtcgacgtgacggccgaggaaattccgatcatggacggcagcgcggcgacgttcgtgtttctgatccagtcggccggcatcgaagagcagaacgcggcgaagaagttcatcaaggtgacgaagcccgtcgagatccgcgacggcgataaattcgcgcgtctcgatccgtacttcggtttcaagctgaagttcacgatcgatttccgccatccggccgtcgacaagacgggccaggagctcgaggtcgatttcgcgaacacgtcgtacgtgcgcgagatcgcgcgcgcgcgcacgttcggcttcgcgcacgaggtcgagatgatgcgcgagctggggctcgcgcgcggcggcagcatggacaacgcgatcgtgctcgacgagtaccggatcctcaacaacgacggccttcgctacgacgacgagttcgtcaagcacaagatgctcgacgcgatcggtgatctgtacgtgatcggccacccgctgctcgcgtcttacacggcgtacaagtcgggccacgggctgaacaacgcgttgctgcgcgaattgctcgcgcatgagcaagcgtatgagatcgtcacgttcgacgatccgaagacggcgccgacggggttcggcttcgacgcgcagacggcgttcgcg

SEQ ID NO: 13820 - DNA, 3513 bp, Burkholderia mallei
gtgcgtctgagctcgatcaaactcgctggcttcaaatctttcgtcgatcccacgcacttccaggttccaggtcaactggtcggcgtggtgggcccgaacgggtgcggcaagtccaacatcatcgacgccgtgcgctgggtgctcggcgagtcgcgcgcctccgagctgcgcggcgagtcgatgcaggacgtgatcttcaacggctcgacgacgcgcaagcccggcagccgggcgagcgtcgagctgatcttcgacaactccgacggccgcgcggccggccagtggggccagtacggcgagatcgccgtgaagcgcgtgctcacgcgcgacggcacgtcgagctattacatcaacaatctgcccgcgcggcgccgcgacatccaggacatcttcctcggcacgggcctcggcccgcgtgcgtacgcgatcatcgggcaggggatgatcgcgcggatcatcgaggcgaagcccgaagagctgcgcgtgttcctcgaagaggcggcgggcgtgtcgaagtacaaggagcgccgccgcgagaccgagaaccggctgcacgacacgcgcgagaatctgacgcgcgtcgaggacatcgtccgcgagctcggcgcgaatctcgagaagctcgaggcgcaggcggtggtcgcgacgaagtacaaagagctcgtcgccgacggcgaggagaagcagcgcctgctgtggctgctgcgcaagaacgaggcggccgccgagcaggacaggcagcgccgtgcgatcggcgacgcgcagatcgagctcgacgcgcagaccgcgaagctgcgcgaagtcgaggcgcagctcgagacgctgcgcgtcgcgcactattcggcgagcgacgcgatgcagggcgcgcagggcgcgctctacgaggcgaacgccgaggtgagccggctcgaggcgcagatcaagttcatcgtcgagtcgcgcaaccgcgtgcaggcgcagatcgccgcgctcgtcgcgcagcaggagcagtggcgcgcgcaggcggacaaggcgcagggcgatctcgaagcggccgaagaggcgcgcgcggtcgccgacgaaaaggcggcgatcgccgaggacgacgcggccgcgaagcacgacgcgctgcccgcgctcgaggcgcgctggcgcgatgcgcagacgggcctgaacgacgagcgcggccggatcgcgcagaccgaacaggcgctgaacctcgaagccgcgcaccagcgcaacgccgatcagcaattgcagcagttgcagcagcgccacgagcgcctgaaggtcgaggcgggcggcctcgacgcgccggacgaggcgcagctcgaggagttgcggatgcagctcgccgagcacgaggcgatgctggccgacgcgcaggcgcgcctcgccgacgcgcaggaagcgctgccgcgcctcgacgcgcagcgccgcgcggcgcacgagcgcgtgcaggccgagagcgcgcagatccatcagctcgaagcgcgtctcgccgcgctcaagcagttgcaggaaaacgtgcagacgcagggcaagatccagccgtggctcgacaagcacgagctcggcgcgctgccgcgtctgtggaagaagctgcacgtcgaggccggctgggaaaccgcgctcgaagcggtgctgcgcgagcggctcgccgcgctcgaagtgtcgaatctcgactgggtgaaggcgttcgccaccgacgcgccgcccgcgaagctcgcgttctacgcgccgcccgccgcgggcgagccgctcgccgcgccgggcgcgttgcgcccgctcctgccgctcgtgcgcatcgacgacgcgggcttgcgcgcggtgctcaacgattggctcggcacggtgttcgtcgccgacgacctcgcgcaggcgctcgccgcgcgcatgcaattgccgcagggcggcgcgttcgtcgtgaaggcgggccacgtcgtcacgcgctcgggcgtgcagctctatgcggccgactccgagcaggcgggcatgctcgcgcgcgcgcaggaaatcgagaacctgacgcgccaggtgcgcgcgcaggcgctcctgtccgacgaggcgaaggcggcggcgatccgcgcggaagccgcgcacacgcaggcgtcgcaggcgctgaccgaagtgcgcgcgcaggccgagcgtgcgacgcagcgcgtgcacgcgctgcagatggacgtgctcaagctcacgcaggcgcacgagcgctatacgcagcgcagcacgcagatccgcgaggaactcgaggagatcggcgcgcagatcgaggagcagcgtgcgctgcgcgcggagtcggaggcgaatttcgagcgccacgacgccgagctcgccgaattgcaggcgcgcttcgaggacaatcagctcgcgttcgaatcgctcgacgagacgctgacgaacgcgcgccaggaggcgcgcgagcgcgagcgcgcggccaccgacgcgcgcttcgccgcgcgccagtccgcgaaccgcatcgacgagctgaagcgctcgatccaggtcgcgcacgagcaggccgagcgcgtcgcggcgtcgctcgaggatgcgcgcgcggagctcgagacgatcaacgagcagaccgcgcacaccggcctgcaggacgcgctcgaagtgcgcgcggcgaaggagcaggcgctcggcgccgcgcgcgcggagctcgacgatctcacggcgaagctgcgcgcggccgacgaggcgcggctcgccgccgagcgctcgctgcagccgctgcgcgatcgcatcaccgagctgcaactgaaggagcaggcggcgcgtatgacgggcgagcagttcgccgagcagctcgcgacggccgaggtcgacgaggccgcgctgaaggaaaagctcatgccggacatgaagccgtcgtacctgcagggcgaggtcacgcggatcaacaacgcgatcaacgcgctcggcccggtcaacatggcggcgctcgacgagctcgcggccgcgagcgagcgcaaggtgttcctcgatgcgcaatcggccgatctgacgaacgcgatcgagacgctcgaggacgcgatccgcaagatcgaccaggaaacgcgcgcgctcctgcaggcgaccttcgacgaagtgaaccgccatttcagcgatctgttcccgcgcctgttcggcggcgggcaggcgaagctcatcatgacgggcgacgagattctcgacgccggcgtgcaggtgatggcgcagccgcccggcaagaagaacgcgacgattcacctgctgtcgggcggcgagaaggcgctgacggcgaccgcgctcgtgttcgcgatgttccagctgaatccggcgccgttctgcctgctcgacgaggtcgacgcgccgctcgacgacgcgaacaccgagcgcttcgcgaatctcgtgcgcgcgatgtccgacaagacgcagttccttttcatctcgcacaacaagatcgcgatggagatggcgcagcaactgatcggcgtgacgatgcaggagcagggcgtatcgcggatcgtcgcggtcgacatggaaacggccgcgggttttgcccagaattga

SEQ ID NO: 13821 - DNA, 1800 bp, Burkholderia mallei
atgtcgatgcgaactgaatactgcggtctcgtgaccgaacacctgctgggccagacggtgtcgctgtgcggctgggtccatcgtcgccgcgatcacggcggcgtgatcttcatcgatctgcgcgatcgcgagggcctcgtacaggtggtgtgcgatccggatcgcgccgagatgttcgcggccgccgaaggcgtgcgcaacgagttttgcatccaggtgaagggcctcgtgcgcggccgtccggaaggcacgatcaacgcgggcctgaagagcggcaggatcgaggtgctgtgccacgagctcaacgtgctgaacgcgtcggtcacgccgccgttccagctcgacgacgacaacctgtcggagacgacgcgcctcacgcaccgcgtgctcgacctgcgccgcccgcagatgcagcacaacctgcggctgcgctaccgcgtcgcgatcgaggcgcgcaagtatctcgacgagcagggcttcatcgacatcgaaacgccgatgctcacgaagagcacgccggaaggtgcgcgcgactacctcgtgccgtcgcgcgtgaacgcgggccagttcttcgcgctgccgcagtcgccgcagctgttcaagcagctcttgatggtggcgaacttcgatcgctactaccagatcacgaagtgcttccgcgacgaagacctgcgcgcggatcgccagcccgaattcacgcagatcgactgcgagacgtcgttcctcggcgagcaggaaatccgcgatctgttcgaggacatgatccgccacatcttcaagacgacgatcggcgtcgaactggacgcgaccttcccggtgatgccgtactcggaggcgatggcgcgcttcggctcggacaagccggacctgcgcgtgaagctcgagttcaccgagctcaccgatgcgatgaaggacgtcgatttcaaggtgttcagcacgccggccaacacgaaggacggccgcgtcgcggcactgcgcgtgccgaagggcggcgagctcacgcgcggcgacatcgacggctacaccgaattcgtgcgcatctacggcgcgaagggcctcgcgtggatcaaggtcaacgagcgcgcgaagggccgcgacggcctgcagagcccgatcgtgaagaacctgcacgacgcgtcgatcgcggcgatcctcgagcgcacgggcgcgcaggacggcgacatcatcttcttcgcggccgaccgcgcgaaggtcgtcaatgacagcctcggcgcgctgcgcctgaagatcggccactcggaattcggcaaggcgaacggccttgtcgaagcgggctggaagccgctgtgggtcgtcgatttcccgatgttcgaatacgacgacgaggaagcgcgctatgtcgccgcgcaccatccgttcacgagcccgaaggacgagcatctcgaatacctcgagaccgatccgggccgctgcctcgcgaaggcgtacgacatggtgctcaacggctgggagatcggcggcggctcggtgcgtatccaccgcgaggaagtgcagagcaaggtgttccgcgcgctgaagatcggcccggaagaggcgcaggcgaagttcggcttcctgctcgacgcgctgcagtacggcgcgccgccgcacggcgggatcgcgttcggcctcgatcgcatcgtcacgatgatggcgggcgccgattcgatccgcgacgtgatcgcgttcccgaagacgcagcgcgcgcagtgcctgctcacgcaggcgccgagccccgtcgacgagcgccagttgcgcgagctgcacatccgcctgcgccagccggagcagccgaaggcg

SEQ ID NO: 13822 - DNA, 1434 bp, Burkholderia mallei
atgacatccgagatttccggcaaacggcgctggtatgcgctcgtggttctgtgtctgggcgtgctgatgatcgtgctcgacacgaccatcgtgaacgtcgcgctgccgtcgatcgcggccgagctgcgtttttccgagaacgcgctcgtctgggtcgtcaacgcctacatgctgacgttcggcggctgcctgctgctcggcggcaggctcggcgacctgtacgggcaccggcgcctcttcctggccggcgtgacggtgttcacggccgcgtcgctcgcctgcggactcgcgcagacgcagctcatgctgatcgccgcgcgcgccgcgcagggcatcggcggcgcggtcgtctcctcggtcgcgctgtcgctcatcatgacgctgttcgtcgagccgggcgactgggcgaaggcgatgggcgtctacggcttcgtctatgcgggcggcggcagcctcggcgtgctgctcggcgggctcctgacgagcgcgttgagctggcactgggtctttctcgtcaacctgccgctcggcgccgtggtctatctgctgtcgtcggcgctgctgccgaaggcgcgcgcgcaggcaacgcgcgcgccgctcgacatcgccggcgccgtgaccaccgcgctgatgttggccgtctacgcggtggtgaacggcaacgcggccggctggctgtccgcgcgcacgctgagctggctcggcggcgcggcggcgctgttcgccgcgttcgtcgcgatcgaggcgcgcgtcgcgcatccgctgatgccgctcgcgctctgcatgaagcgcaacgtcgcgatcgcgaacctgatcggcatcctgtgggccgccgcgatgttcgcgtggttcttcctcgccgcgctgtatctgcagcgcgtgctcggctacgggccgttgcagatcggcctcgcgttcctgccggcgaacctgatcatgggcgtgttctcgctcatcgtctccgcgctgctcgtggtgcgcttcgggatccgcgtgccgatcgcggccggactgctcgcggcggcggccggcctgatgctgttcgcgcgggcgcccgtcggcggggacttcgtcgccgacgtgctgccgggcatgatcctgctgggcaccggcgcgggcatcgcgttcaacccggtcctgctcgcggcgatgagcggcgtcgatccggcggactcggggctcgcctcgggcatcgtcaacacgtcgttcatgatgggcggcgcgctcggcctcgcggtgctcgcgagcgtcgcgacggcgcgcaccgatgcgctgctcgccgcgcgcacggccgtgcccgccgcgatggcgggcggctaccatgcggcgttcatgctcggcgcggcgttcgcgatcgtcgccgcgctgatcgggatgcggctgcgggccgccccgaatccggcggcgatgcaggggctgcaaggcgcgacgcag

SEQ ID NO: 13823 - DNA, 1299 bp, Burkholderia mallei
atgaccccgtctgatgttaaagccacgctatcgttcagcgataattcgccgagcgtcgaactgccgatctacaagggtacgatgggccccgacgtgatcgatatccgcaagctgtacggccagaccggcaagttcacgtacgacccgggcttcatgtcgacggcgtcgtgcaactcggcgatcacgtacatcgacggcgacaagggcgaactgctgtaccgcggctacccgatcgacaatctcgcgcaaaacgcggacttcctcgaatcctgctatctgctgctcaagggcgaactgccgaacgcggcgcagaagaaggagttcgtggccaccgtcacgaagcacacgatggtgcacgagcagatgcagttcttcttccggggtttccgccgcgacgcgcacccgatggcgattctcgtcgccgcggtcggcgcgctgtccgcgttctaccacgattcgctcgacatcaatgatccgcgtcaccgcgaagtgtcggcgatccgcatgatcgcgaagctgccgacgctcgtcgcgatggcgtacaagtacagcatcggccagccgttcgtgtatccgcgcaacgatctgtcgtacagcgcgaacttcatgcgcatgatgttcgcgaacccgtgcgaggaatatcaggtcaacgacgtgctcgtccgcgcgctcgaccgtatcctgatcctgcatgccgaccacgagcagaacgcgtcgacgtcgacggtccgcctcgccggctcgtcgggcgcgaacccgttcgcgtgtatcgcggccggcatcgcgtgcttgtggggcccggcgcacggcggcgcgaacgaagccgcgctgaacatgctcgagcagatcggcacgccggagaacattcccgagttcatcaagcaggtgaaggacaagaactcgggcgtgaagctgatgggcttcggccaccgcgtgtacaagaactacgatccgcgcgcgaagctgatgcgcgaaacgtgctacgaagtgctcaacgagctgggcctgcacgacgatccgctgttcaagctcgcgatgcagcttgagaagatcgcgctcgaagacgaatacttcgtgtcgcgcaagctgtacccgaacgtcgacttctactcgggcatcgtccagcgcgcgctcggcatcccgacgtcgatgttcacctgcatcttcgcgatggcgcgcacggtcggctggatcgcgcagtggaacgagatgatcgccgatccggagcagaagatcggccgtccgcggcagctcttcatcggcgaaacgccgcgcacggcgaagccgatcgagcagcgc

SEQ ID NO: 13824 - DNA, 1782 bp, Burkholderia mallei
atgctgcctgctcaaaaacatactctcgaaaccctgctcgaaaacagcgtgaagcaggtcgtccaggcgtcgaagggcgacgccgacgccgcgttcgtcctccccgcgatcgcgctcgagcgcccgaaggtcgccgcgcacggcgacgtcgcgtgcaacgtcgcgctgcagctcgcgaagccgctcggcgcgaatccgcgccagctcgccgaacagatcgtcgccgcgctcaccgcgcagcccgaggcggcgggcctcgtcgacgcggccgagatcgccgggcccggcttcatcaacctgcgcctcacgcccgcgtcgaagcaggcggtgatcggcgcggtgctcgcgcaaggccgcgcgttcggcgcgtccgagcgcgaccacgacaagcgcgtgctgctcgaattcgtgtccgcgaacccgacgggcccgctgcacgtcggccacggccggcaggccgcgctcggcgacgcgctcgcgaacgtgctcgcgagccagggctacgcggtgcaccgcgagttctactacaacgacgccggcgtgcaaatcggcaatctcgcgatctcgacgcaggcgcgcgcccgcggcctgaagcccggcgacgccggctggccggaggccgcgtacaacggcgagtacatcgccgacatcgcgcgcgactacctgaacggcgagaccgtcgccgcgagcgacggcgagccggtgacgggcaagcgcgacgtcgaggatctcgaggcgatccgcaagttcgcggtcacgtacctgcgccgcgagcaggacatggatctgaaggcgttcggcgtgaaattcgaccagtactacctggaatcgtcgctctacacggaaggccgcgtcgagaaaaccgtcgacgcgctgatcgcggccggcatgacctacgagcaggaaggcgcgctgtggctgcgcacgaccgacgaaggcgacgacaaggaccgcgtgatgcgcaagacggacggcacgtacacgtacttcgtgccggatgtcgcgtaccacgtgacgaagtgggagcgcggcttcacgaaggtcatcaacatccagggctcggaccaccacggcacgatcgcgcgcgtgcgcgcgggcctgcaggggctgcacatcgggattccgaagggctacccggactacgtgctgcacaagatggtcacggtgatgcgcgacggccaggaagtgaaaatctccaagcgcgcgggcagctacgtgacggtgcgcgacctgatcgaatggtcgggcggcgcgacgccgggctcggaaggctcgcccgagctgctcgacgaggcgacgatcacgcgcgggcgcgacgcggtgcgcttcttcctgatttcccgcaaggcggacaccgaattcgtgttcgacatcgatctcgcgctgaaacagaacgacgaaaacccggtctactacgtgcagtacgcgcacgcgcggatctgctcggtgatcaacgaatggaagtcgcgctacggcgcgaccgacgcgctgctgccgggcgccgatctctcgccgctcgacagcaagcaggcgatggcgctgatgcaaaagctcgccgaatatccggacgtgctcgcgcacgcggccggcgagctcgcgccgcatgcggtcgcgttctacctgcgcgagctcgcgagcgagtttcactcgttctacaatgcggagcgcgttctcgtcgacgaacaagcgccgcgcaccgcgcgcgtcgcgctcctcgcggcgacgcgccaggtgctcgaaaacggtctcgcgatgctcggcgtatccgcgcccagcaagatg

SEQ ID NO: 13825 - DNA, 654 bp, Burkholderia mallei
atgagcgcaccgctgacgctggcgttgtcgaaagggcgtatcttcgaggaaaccgtgccgcttctcgcggcggcgggcgtgacggtcgccgaggacccggagacttcgcgcaagctgatcttgccgaccaccgatccgaacctgcgtgtgatcgtcgtgcgcgcgaccgacgtgccgacctacgtcgagtacggcgcggcggatttcggcgtcgccggcaaggacgtgctgctcgagcacggcggcggcgggctgtatcagccgatcgatctgaacatcgcgcgctgccggatgtcggttgccgtgccggcgggcttcgattacgcaaacgcggtgcgccagggcgcgcggctgcgcgtcgcgacgaagtacgtcgaaacggcgcgcgagcacttcgccgcgaagggcgtgcacgtcgatctgatcaagctgtacggctcgatggagctcgcgccgctcgtcggcctcgccgacgcgatcgtcgacctcgtcagctcgggcggcacgctgaaggcgaacaatctggtcgaggtcgaggagatcatgccgatctcctcgcgcctcgtcgtgaaccaggccgcgctgaaactgaagcgcgccgcgctgaagccgttcctcgacgcgttcgaacgcgcgtcgctggggagcggcgcc

SEQ ID NO: 13826 - DNA, 1065 bp, Burkholderia mallei
gtgtcggccgcccggcgcgataaaatccgtcctttcggtctgtgccggccaccgccggccctttttttcagcgtgcaaaaaattctgatcgtgcgcgtgtcgtcgctcggcgatgtcgtgcataacatgccggtgatcgccgatatccgccggcgtcaccccgatgcgcagatcgactggctcgtcgaggaaggcttcgccgatctcgtgcggctcgtcgacggtgtgcgcgacgtgctgccgttctcgctgcggcgctggcgcaagcgcttgagcgcgtcgcaaacgtggcgcgagatccgcgcgttccggcggcgcctcgccgaggagcgctacgacctcgtgatcgactgccaggggctcatcaagaccgcgtgggtcgcgagctgggcgcgcgggccgcttgtcggcctcggcaaccgcaccgacggcgccggctacgagtggccggtgcgtttcttctacgacaggcgggtgccgatcgcgccgcgcacgcacgtcgtcgagcgctcgcggcagctcgtcgcggcggcgctgggagaccccgcgccggcgcccggcgatccgatcgatttcggcctcgacacgcatggcgcggcgcgcgcgctcgcggcgctcgatttgaatctgccggtgccctacgtggtattcgtgcacgcgacctcgcgcgccgacaagcagtggcccgacgaagcgtggaccggcctcggcgaggcgctcgtgcggcgcggcgcgtcgctcgtgctgccgtggggcagcgacgccgagcgcgcgacgagcgagcgcctcgcgaaggcgttcggcgcggcggcgatcgtgccgccgaagctgtcgctgcccgtggtcgtcggcctcgtcgacggcgcggcggcgacggtcggcgtcgataccggcctcgtccacatcgcggcggcgcttaagcgtccgaccgtcgaactgtacaatttcgcgacagcctggcgcacgggcggctactggtcgcccaacgtcgtcaatctcggcaccgccggcgcgccgccgtccctttcgcaggcgaaggacgcactcgcgtcgttcggcctcttg

SEQ ID NO: 13827 - DNA, 1197 bp, Burkholderia mallei
atgcgtgatgcctatctcgctcatctacgcggcaccctcgagcagattcgcgcggacggtttctacaagaccgaacgcgagatcgcgagccctcaggcggccgacatccggctggccggcggcacgcacgtgctgaatttttgcgcgaacaactacctggggctcgcggacgattcgcgcctcatcgccgccgcacaggcggcgctcgagcaggacgggttcgggatggcctcggtgcgcttcatctgcggcacgcagaccgtgcacaagcagctcgaggcagcgttgtccgcgttcctgaagaccgacgattgcattctgtattcgagctgcttcgacgcgaacggcggcctgttcgagacgctgctcgacgaaaacgacgcgatcatcagcgacgagctgaatcacgcgagcatcatcgacggcattcgtctgtcgaaggccaggcgctttcgctacaagaacaacgacctcgccgatctcgaggcgaagctgcgcgaagccgacgcggcgggcgcgcgcttcaagctgatcgcgaccgacggcgtattctcgatggacggcatcatcgcgaacctgaagggcgtgtgcgatctggccgaccgctacggcgcgctcgtgatggtcgacgattcgcacgccgtcggcttcatcggcgagcacgggcgcggcaccccggagtattgcggcgtcgagggccgcgtcgacatcgtcacgggcacgctcggcaaggcgctgggcggcgcgtcgggcggttacgtggccgcgcggcgcgagatcgtcgagctgctgcggcagcgctcgcgcccctatctgttctcgaacacgctgacgccgagcatcgcggccgcatcgctgaaagtgctcgaactgctcgcgagcgacgagggcgcgtgcctgcgcgagcgcgtgcgcgcgaacggcgcgcatttccgcgagaagatgagcgcggcgggcttcgcgctcgtgccgggcgagcatccgatcattccggtgatgctcggcgacgcgcaggtcgcatcgaagatggccgatgcgctgctcgccgagggcgtctatgtgatcggcttttcgtttccggtcgtgccgcgcggccgcgcgcgcatccgcacgcagatgagcgccgcgcatacgcgcgagcagatcgatcgcgcggtcgacgcgttcgtgcgcgtcggcaagacgctcggcgtcatt

SEQ ID NO: 13828 - DNA, 1023 bp, Burkholderia mallei
atggcgcaatacatgaaggccgcggtggtgcatgcattcggcgaaccgcttcggatcgaggaggtgcccgtgccgacgcccggcgcggggcagattctcgtgaacgtcaaggcatcgggcgtgtgccataccgatctgcacgcggccgacggcgactggcccgtcaagccgacgctgccgttcattccggggcacgagggcgtcggcttcgtcgcggcggtgggcgaaggcgtgaggcacgtgaaggagggcgatcgcgtcggcgtgccttggctctataccgcgtgcggccattgcgagtattgccagaccggctgggagacgctgtgccacgagcagcagaacaccggctattcggtgaacggcagctacgcggaatacgtgctcgccgatccgaactacgtcggccatctgccgagcaacgtcgcgttcgacgagatcgcgccgatcctgtgcgcgggcgtgaccgtctacaagggcattcgggtgaccgacacgcgcccggggcaatggatcgcgatctcggggatcggcgggctcgggcacgtcgcggtgcagtacgcgaaggcgatggggctgcacgtggtcgcggtggacgtcgcgccgcagaagctcgagcttgcgcgcaagctgggcgcgacgttcgtcgtcgatgcgtcgaaggacgatccggcggcggtgatccagaaggagatcggcggcgtgcacggcgtgctcgtgacggccgtgtcgcgcggcgcgttcgcgcaggcgctcggcatggtgaggcgcggcgggacggtctcgctgaacgggctgccgccgggcgattttccgctgccgatcttctcgacggtgctcaacgggatcacggtgcgaggctcgatcgtcggcacgcggcgcgatctccaggaatcgctcgatttcgcggccgaagggctcgtgcgcgcgcatatccatcgcgacaagctcgagcacatcaacggcgtgttctcggcgctgcgtgaagggaaggtcgacgggcggatcgtgttgaccgggcaa

SEQ ID NO: 13829 - DNA, 1167 bp, Burkholderia mallei
atgctgctggcgttggcgcaatggctgcaaggtgacgcaagctttttgcgcttgttcacgtacctgacgttccgggcggtgatggccaccatcacggcgctcgtgatcggtctcgtctgcggcccgtgggtgatccgcaagctcacgcagatgaaggtcggccaggcggtgcgcaaggacggcccgcagacgcacctcgtgaaatcgggcacgccgacgatgggcggcgtgctgatcctgatcggcatcgcggtcgcgacgctgctctggggcgatctgacgaaccgcttcatctggatcgtgatgctcgtcacgttcggcttcggcgtgatcggctgggtcgacgactatcgcaaggtcgtctacaaggacccgcgcggcatgtcgtcgcgcgaaaagtatttctggcaatcggtgatcggcctgttcgcggccgtctatctcgcgttcagcgtgtccgaggcgaacaacgtccgcgtgttcgacctgttcatggcctgggtgcgaagcgggctgtcgatggggctgccggcgcgcgcggacctgatgctgccgttcctgaagtcgatcagctatccgctcggcgtctggggcttcatcgcgctcacgtatttcgtgatcgtcggcgcgagcaacgcggtgaacctcaccgacgggctcgacggcctcgtgatcatgccggtcgtgctcgtgggcgcgtcgctcggcgtgttcgcgtacgtgatgggcagcgccgtctattcgaaatatctgctgttcccgcacattccgggcgcgggcgagctgctgatcttctgctcggcgatgggcggcgcggggctcgcgttcctctggtacaacacgcaccccgcgcaggtattcatgggcgacgtcggcgcgctcgcgctgggcggcgcgctcggcacggtcgccgtgatcgtgcgtcaggaaatcgtgctgttcatcatgggcggcatcttcgtcgcggagacgctgtcggtgatgctgcaggtcacgtggttcaagtacacgaaaaagcgttacggcgaagggcggcgcatcttcaagatggcgccgctgcatcaccatttcgaattgtcgggctggaaggaaacgcaggtggtggtgcgtttctggatcatcacgttgatgctgtgcctgttcggtttgtccaccctcaagctgcgg

SEQ ID NO: 13830 - DNA, 1566 bp, Burkholderia mallei
ttggctttggctttggcttcggcttcggcttcgcgttcgtgccgcatgcgaaaagccggcgaatccatcggcgatgcgcgtcctgcggtcgggagccggcggatgcgcgagcggccggcaggacatccgtccatattcatggctcggcgaatcgttgtcgcaaaacgcgtgctgcggcggggcgacacgcatgcgccgcatcgcggcgcgcgggcaatgatgccagtctatgcgagtgccgccgcgcatactgtcgagccatgtgtctttttgcgaccggacgtcgaatcgcgcgacctcgcgtaccggctgcctcgttcgcgacaagcccgcaaaagcgagccggtattcggaagcggagcagcggatgcgaagccgtcggctgccatcgttccaacgcgtcctttcaacaagcgaaaggcgattcaaacggcccggcgccccatcgatgcgccgggcgccgtgcaggcgcggccacgccggccgacggctgcttgccgagaatttcgcgtgcgggccgatcttggggcgtgttcacgccgccgcacccgaatccgcgagcgcggcgtggacctcgatacgcgcccgtcgccgcatccgcccattcgcccattcgcccattcgcattgcgcacggcgcatggcgcatggcgcatggcgcacggccgacgacgcatggcgcggccgcttgcctgcgttcggccggcgagccgcggccgatagcgtttccgcaccctcgtcacgcaacgcggcccgacaggcgcgccgtctcatcgcgcggcgcatgccgcgctcgacggcggcgccatccggcgagcgactcgccgcgcgcttttttcttttcggcgcgacaatatggccatatccattccgagcagagcttgacttgatccgtcgccccatcatcgaccctgaagtgctgccgatcgagacgaccggcgccgacctgccagtcgtccggccgtcgtcgatgacgccggacggcctgcgcgagcgtttcgccgagccgcccgaatggacgcaggagcccgccgaggcgcagcttgcccacggcgtcgatccgcgcagcgcggccgtgctcgtgccgctcgtcgtgcgtgaacgcggcctgacggtgctgctcacgcagcgtgcggaccacctgaacgatcatgccggccagatcagctttccgggcggacgccgcgagcccgatgaccgcgacgcgaacgccaccgcgctgcgcgaggcgcgcgaggaaatcgcgcttgcgcacgagcgcgtcgagctgctgggcgcgctgcccgactatctgacgggcacgggcttttgcgtgacgcccgtcgtcgggctcgtccatccgccattcacggtgcagccggatacgctcgaagtggccgagatcttcgaggtgccgctcgatttcctgatgaatcccgcgcatcaccagatcagggtgttgcgctgggagggcggcgagcggcgctttttcgcgatgccgtatccgcgcgggccggtcggcggccagtatttcatctggggcgcgacggccggcatgctgcgcaacctgtatcgctttctgtcggcc

SEQ ID NO: 13831 - DNA, 714 bp, Burkholderia mallei
atgtcaccatacatcgcggagttcatcggcacggcgctgctcgtgctgctcggcaacggcgccgttgcgaacgtgctgctcgcgaaaaccaaaggcaagggcgcggacctcatcgtcatcgtgatgggttgggcgatggcggtattcgtcgcggtctacgtaaccgcatcgttctccggcgcgcacctgaatccgatcgtcacgatcagcctcgcgctcgcgggcaagttcgcatgggcgaaggtgggcggctacgtcgcatcgcagatgctcggcggcatggcgggcgcgttcctcgtgtggctcgcgtatcgccagcacttcgcgaaggaggccgatcccgatctgaagctcgccgtgttctgcaccgcgcccgcgatccgcagcgtcacgcacaacgtgttgacggaggcgatctgcactttcgtgctgatcctcggcgtgctgtatctcgcgtcgccgcaagtcggcctgggcgcgctcgacgcgctgcccgtcggcctgctcgtgctcggcatcggcatctcgctcggcggcccgacgggctacgcgatgagccccgcgcgcgacctgtcgccgcgcatcatgcacgcgctgctgccgattcccggcaagcgcgacagcgactggcgctatgcatgggtgccggtgctcgggccgctcgtcggcggcgtgctcgcggcgaacctgtacctgtatctgcatacgacgcac

SEQ ID NO: 13832 - DNA, 1134 bp, Burkholderia mallei
gtgaacggaatcctcaggctcgcgttcaagctgctcgtcaacgacagcgcgaagttcaccgcgctgctcgtcgggatcacgttcgccgtgttcctgatggtcgagatgacctcgctgttcgccgggatcctcgacaaatcgtcgtcgaccgtcatcaacgtcggcgcgaagatgtgggtgatggacccgggcgtgcagacgatcgcgagcagcatcgggatgcccgcctacgtgctcgacgcggtgcgcagcgtcgacggcgtcaagtacgcggtgccgatctactcgggcggcgcgctcgtgaagctcgccgacggcacctatcaggcggtcacggtgatcggcctggacgatgcgagcctgctcggccgcccgacgatgaaggcgggccgcatcgaggacatctacgcggaaaacggcttcatcgcgatcgacgacgccgagttcccgaagctgaagaatcccgcgctcggcacgacgttcgagctgaacgaccaccgcggcgtgatcgtcggcatcgcgaaggtcgcgagcagcggcctgttcggcacgccgacgctctataccacctatgcacgcgcgacgcgctacattccgtcgacgcgctacacgacgtcgtacattctcgtcgagccgaagtcgcagcgcgacatcgcgcgcatcaagcgggaggtcgccgcgctcggctatcgcgcgtacacgaaggaagaattcatgcggcgcatctcggacttctacaagtacgagacgggcgtcggcacgaacatcctgctgatgacggcgatcagcttcatcgtcgggctgtcgatctcgggccagaccttctatgcgttcatcatcgagaacctcgagaaattcggcgcgctgaaggcgatcggcgcgaagaaccgcgagctcgtcgcgatgatcctgtttcaggcgacattcaccgcgctcaccggctatggcctgggcgtcggcctctgcagcgcgctcatcagcgtcgcgcggctgcgcctgccgagctacgcggcgctcatcacgtacggcaatctcgcgctcgcgttcggcatggtcgtcgtgatcgcggggctgtcgagctatctgggcgtgcgccgcgtgctgcgcatcgagccgttcgacattttcagggga

SEQ ID NO: 13833 - DNA, 1650 bp, Burkholderia mallei
atggcagctaaagacgtcgtattcggcgattccgcacgcgcgaagatggtcgaaggcgtgaacattctcgccaacgctgtgaaggtcacgctgggtccgaagggccgcaacgtggtgctcgagcgcagcttcggcggcccgacggtcacgaaggacggtgtgtcggtcgcgaaggaaatcgagctgaaggacaagctccagaacatgggcgcgcagatggtcaaggaagtcgcttccaagaccagcgacaacgccggcgacggcacgacgacggccaccgtcctcgcgcaatcgatcgtccgcgaaggcatgaagtacgtcgcatcgggcatgaacccgatggacctgaagcgcggcatcgacaaggcagtcgccgcggcagtcgaagagctgaagaagatcagcaagccgtgcacgacgaacaaggaaatcgcgcaagtcggcgcgatctcggcgaacagcgattcgtcgatcggcgatcgcatcgctgaagcgatggacaaggtcggcaaggaaggcgtgatcaccgtcgaagacggcaagtcgctcgccgacgagctcgacgtcgtcgaaggcatgcagttcgaccgcggctacctgtcgccgtacttcatcaacaacccggacaagcaagtcgccgtcctcgagaacccgttcgtgctgctgcacgacaagaaggtgtcgaacatccgcgacctgctgccggtgctcgagcaagtcgcgaaggctggccgtccgctgctgatcatcgccgaagacgtcgaaggcgaagcgctcgcaacgctggtcgtcaacaacatccgcggcatcctgaagaccgttgcggtcaaggcaccgggcttcggcgatcgtcgcaaggcgatgctggaagacatcgcgatcctgacgggcggccaggtcatcgcggaagaaaccggcctcacgctcgagaaggcaacgctggcagaactgggccaggcgaagcgcatcgaagtgggcaaggaaaacacgacgatcatcgacggcgcgggcgaagccgtgaacatcgaagcgcgcgtcaagcaaatccgcacgcaaatcgaagaagcgacgtcggactacgaccgtgaaaagctgcaagagcgcgtggccaagctggcaggcggcgtggcggtgatcaaggtcggcgctgcgaccgaagtcgaaatgaaggaaaagaaggcacgtgtcgaggacgcgctgcacgccacccgcgctgccgttgaagaaggcatcgtcccgggcggcggcgtcgcgctgatccgcgcacgcaccgcgatcgcgagcctgaccggcgtgaacgccgaccagaacgccggcatcaagatcgtgctgcgcgcgatggaagagccgctgcgccagatcgtcacgaacggcggcgaagaagcgagcgtcgtggtggcggcagttgctgcgggcaagggcaactacggctacaacgcggcgacgggcgagtacgtcgacatggtcgaagccggcgtcgtcgatccgacgaaggtcacccgtaccgcgctgcagaacgcggcttcggtcgccggcctgctgctgacgacggacgcagccgttgccgaactgccgaaggaagacgctccgatgccgggcggcatgccgggcggcatgggcggcatgggcatgggcatgggcatggacatg

SEQ ID NO: 13834 - DNA, 1104 bp, Burkholderia mallei
atgctcagcttcgccgtcggcttcatcgtctcgcttctcgtcacgctgctcatcgtccgctatgcgcacctgcacgaacgattctcgatcgacaacgatcttgccggcgtgcagaaattccatgcgcggccggtgccgcgcgtgggcggcaccggcatcctgatcgggctcgtcgtcgcgacggcgctgctgtcgcggcgatacccggcgatcgcgggcggcatcctcgggctcgccgcgtgcgggctgcccgccttcgcctccgggctgatcgaagacctgacgaagaaggtgacgcccgcggtgcggctcgtctgcacgatggcggccgcggcgctcgcgttcgcgctgatgggcatcgcgatcacgcgcatcagcgtgccgcccctcgacttcctgctcggctatacggcgatctcggccgcggtcacggtgctcgccgtcgccgcgctcgcgaacgcggtcaacatcatcgacggcttcaacggcctcgcgtcgatggtcgcgttcatgatgttcgcgtcgctcgcgtacgtcgcgttccaggtcggcgacccggtcgtgatgtccggctcgatcgtgatgatgggcgcgatcatgggctttttcatctggaacttcccggcgggcctcatcttcctcggcgacggcggcgcgtacttcatcggcttcatgctcgccgagctcgcgatctcgctcgtgatgcggcaccgcgaagtgtccgcgtggtatccggtgctgctgttcatgtacccgatcttcgagacctgcttctcgatctaccggaagaaattcgttcgcggcatgtcgccgggcatcccggacggcgtgcatctgcacatgctcgtctacaagcggctgatgcgctgggcggtgggcacgcgcgccgcgcacgagctcacgcgccggaactcgctgacctcgccctatctatggctgctctgcctcgtcgcggtgatccccgccaccctgttctggcagcacacgatccacctgttcgcgttcgtgatcgtgttcgcgctcacttacgtgtggctctacgtaagcatcgtccggttcaagtcgccgagatggatggtgatccgcaagcggctgccgaaacgg

SEQ ID NO: 13835 - DNA, 1824 bp, Burkholderia mallei
atgacccgcgcccttcgcaacatcgccatcatcgcccacgtcgaccacggcaagacgacgctcgtcgaccaactgcttcgccagtccggcaccttccgcgagaaccagcaggtcgccgagcgggtgatggactcgaacgacatcgaaaaggagcgcgggatcacgatcctcgcgaagaactgcgcggtcgaatacgagggcacgcacatcaacatcgtcgacacgcccgggcacgcggacttcggcggcgaagtggagcgcgtgctgtcgatggtcgactcggtgctgctgctcgtcgacgcggtcgagggcccgatgccgcagacccgcttcgtgacgaagaaggcgctcgcgctcggcctgaagccgatcgtcgtgatcaacaagatcgaccgcccgggcgcacgcatcgactgggtgatcaaccagaccttcgacctgttcgacaagctcggcgcgaccgaggagcagctcgatttcccgatcgtctacgcgtcgggcctgaacggctacgcgtcgctcgatccggccgcgcgcgacggcgacatgcgtccgctcttcgaggcgatcctccagcacgtgccggttcgcccggccgacccggacgcgccgctgcaactgcagatcacctcgctcgactattcgacgtacgtcggccgcatcggcgtgggccgcatcacgcgcgggcgcatcaagccgggccagccggtcgtgatgcgcttcggtccggaaggcgacgtgctcaaccgcaagatcaaccaggtgctgtcgttccaggggctcgagcgcgtgcaggtggactcggccgaggcgggcgacatcgtcctcatcaacggcatcgaagacgtcggcatcggcgcgacgatctgcgcggtggaggcgcccgaagcgctgccgatgatcaccgtcgacgagccgacgctgacgatgaacttcctcgtcaattcgtcgccgctcgccggccgcgaaggcaagttcgtgacgagccgccagatccgcgatcgcctgatgaaggagctgaaccacaacgtcgcgctgcgcgtgaaggataccggcgacgaaacggtgttcgaggtgtcgggccgcggcgagctgcacctgacgatcctggtcgagaacatgcgccgcgagggctacgagctcgccgtgtcgcgtccgcgcgtcgtgatgcaggagatcgacggcgtgaaacacgagccgtacgagctgctgacggtcgacctcgaggacgagcaccagggcggcgtgatggaggagctcggccgccgcaagggcgaaatgctcgacatggtgtccgacgggcgcggccgcacgcgtctcgagtaccggattccggcgcgcggcctgatcggcttccagagcgagttcctgacgctcacgcgcggcacgggcctgatgagccacatcttcgattcgtacgcgcccgtcaaggaaggctcggtcggcgagcgccgcaacggcgtgctgatctcgcaggacgacggcgctgcggtggcatacgcgctgtggaagctgcaggatcgcggccgcatgttcgtgaagccgggcgatgcgctttacgagggcatgatcatcggcattcacagccgcgacaacgacctcgtcgtgaacccgatcaagggcaagcaactgaccaacgtgcgcgcgtcgggcaccgacgaagcggtgcgcctcgtgccgccgatccagatgtcgctcgaatacgcggtcgaattcatcgatgacgacgagctcgtcgaagtgacgccgcagtcgatccgcctgcgcaagcgccacctgaaggagcacgagcgccgccgcgcgagccgcgaggccgaggccggc

SEQ ID NO: 13836 - DNA, 1434 bp, Burkholderia mallei
atgcaccgcgccaccaagatagtcgccacgatcggtccggcatccagctcgccggaagtcctgtcgcagatgatgcacgcgggtctcgacgtcgtgcggctcaatttctcgcacggctccgccgacgatcaccgcgagcgcgccgagatggtccgcgaggccgcgcggcgggtcggccgggaaatcgcaatcatggcggacctgcaggggccgaagatccgggtcggcaagttcgaggcgggcaagacgacgctcacgcccggccagccgttcatcctcgacgcgacgtgcgagctcggcaacgacgagcgggtcggcctcgactacaaggatctgccgcgcgacctgaagccgggcgacgtgctgctgctcaacgacggcctgatcgtgctgaaggtcgatcgcgtgctcggcgacgagatccacacgaccgtcaaggtgggcggcgatctgtcgaacaacaaggggatcaaccggcagggcggcgggctgtcggcgcccgcgctgaccgcgaaggacatggaggacatccgcaccgcgatgtcgctcggcgcggatctcgtcgcggtgtcgttcccgaagaacgcgaccgacatggagatggcgcgccagctcgcgaacatcgcgggcgcgccttacggcatcaagccgaagatgatcgcgaagatcgagcgcgcggaggcgattccggcgctgcaggagattctcgatgcgtcggacggcatcatggtcgcgcgcggggacctcgccgtcgaggtcggcaacgcggccgtgcccgcgctgcagaagcggatgatccggatggcgcgcgagtcgaacaagctcgtgatcaccgcgacgcagatgatggaatcgatgatccacgcgccggtgccgacgcgcgcggaagtgtcggacgtcgcgaacgcggtgctcgacggcaccgacgcggtgatgctgtcggccgagacggcgacgggcaagtacccggccgtcacgatcgaggcgatggcggccgtctgcgtcgaggcggagaaatccgagcacgtcgagctcgacaaggattttctcgaccgcacgttcacgcggatcgaccagtcgatcgcgatgggcgcgcttttcaccgcgtaccacctgggcgcgaaggcgatcgtcgcgctgaccgaatcgggcgcgaccgcgctgtggatgtcgcgccactacacgcacgtgccgatcttcgcgctcacgccgcgggtcggcagcgagcgtgcgatggcgctgtttcgcaacgtgacgccgctgcacgtggacttcaacagcgaccgcgattccgcgctgcagcaggcgctcgaactgatcgtgcggcgcggctatgtcgcgcacggcgacatggtcgtgctgacggtgggcgagccgatggggcaggcgggcggcacgaacacgctgaagatcgtgcgcgtgggcgagcactac

SEQ ID NO: 13837 - DNA, 390 bp, Burkholderia mallei
atgcctcacatcatcgtcgaatacaccgcgaacattcgcgacgacgcgcggatacccgtgctgctcaagtcgatcaacgagacgctgatcgcgcagggcggcgtgtttccgacgggcggcatccgctcgcgcgcgatcgagctgcaggactactgcgtcgcggacggcaccgccgacgacgcgttcgtgcacgtgacgctgaagatcggcgcgggccgcgacgacgcgacgaaaaaggccgcgtgcgacgcgctgttcgatgcgatcaaggcgcacttcgaggcgctctatgcgcggcgctatctcgcgctgtcgatggagctcgccgagttcagcgagacgggctcgtacaagcacaacaacatccacgcacgctacaagcgcggcgcg

SEQ ID NO: 13838 - DNA, 261 bp, Burkholderia mallei
atgaaacaaggcattcacccggattaccgcgaagtcgtcttccaagacatgtcgaacggcttcaagttcatcacgcgctcgacgatccagacgcgcgaaaccatcgaattcgaaggcaagacctacccgctcgcgaagatcgaagtgtcgtcggaatcgcactcgttctacaccggccagcaaaagatcatggatacggcgggccgcgtcgagaagttcaagaacaagttcggcgcacgcgccagcggcaaggccgcgaag

SEQ ID NO: 13839 - DNA, 951 bp, Burkholderia mallei
atgtcggatgactacttccagccgcaaagcggcaacgcgatgccgcgcttcgccggcatcgcgacgatgatgcggctgccgcaggcggcgagcgccgcggggctcgacgcgtgctttgtcggcgtgccgttcgatctcggcacgtcgaaccgcaccggcgcgcggttcggcccgcgccagatccgcagcgaatccgtgctgctgcgcccgtacaacatggccacgcgcgcggcgccgttcgattcgctgcgcgtcgccgatctcggcgacgtcgcgacgaacccgtacaacctcgccgattcgatcgcgcggatcgaggccgcgtaccacgcgatcctcgcgcacggctgccgcccggtcacgctcggcggcgaccacacgatcacgctgccgatcctgcgtgcgatgcatcgccggcacgggcgcgtcgggctcatccacgtcgacgcgcacgcggacgtcaacgacacgatgttcggcgagaagatcgcgcacggcacgccgtttcgccgcgcgctcgaggaagggctgctcgacggcgaccgcgtcgtgcagatcggcttgcgcggcaccggctatgcggccgaggatttcgactggtgccgcgatcagggctttcgcgtcgtccaagccgaggcgtgctggaaccgctcgctcgcgccgctgatggacgaagtgcgcgcgcgcgtgcaaggcggcccggtctatctgagcttcgacatcgacggcatcgatccggcgtacgcgccgggcaccggcacgccggagatcgccggcctcacggtgccgcagggcctcgagatcgtgcgcggcgcgtgggggctcgacatcgtcggcgccgatctcgtcgaggtcgcgccgccgtacgatccgttcggcaccaccgcgctgctcggcgcgaacctcgcttacgagatgctctgcgtgctgcccggcgtggcgcggcgcgcg

SEQ ID NO: 13840 - DNA, 2157 bp, Burkholderia mallei
ttgagcgcgcatcacgacacgagaggactcgcgcaacgccggccggccggcgttgcgtatctgaggattgcaatgactcaacattccgctacgcgatcgatgttcgacccggcgctcgtgcgcccggcgatcgtcgattcgttcaagaaactcacgccgcgcacgcagttgcgcaacccggtgatgttctgcgtgtacgtcggcagcatcctggcgacgatcctttggatcgccgcgctgacggggcaggccgaggcgcgcgcgggcttcattctcgcggtcgcgctgtggctgtggttcacggtgctgttcgcgaacttcgccgaggcgatcgccgaggggcgctcgaaggcgcaggccgcgtcgcttcgcagcgcgaagaaggacgtgatggccaagaagctcaacgagccgcatccgaagtcgcccgtgcgcatcatgacggcgtccgatctgcgccgcggcgacgtcgtgctcgtcgaggcgggcgatacgattccggccgacggcgaggtgatcgagggcgtcgcgtcggtcgacgaatcggcgatcaccggcgaatccgcgccggtgatccgcgaatcgggcggcgatttttcgtcggtgacgggcggcacgcgcgtgctgtcggactggatcgtcgtcaaggtgacggcgaaccccggcgaggcgttcctcgaccggatgatcgcgatggtcgaaggcgcgaagcgcaagaagacgcccaacgagatcgcgctcacgatcctgctcgtcgcgctgacgatcgtgatgctgctcgccaccgcgacgctgctgccgttctcgatgttctcggtcgacgcgatgcactcgggccacgtcgtgacgatcaccgcgctcgtcgcgctgctcgtgtgcctgatcccgacgacgatcggcggcctgctgtccgcgatcggcgtggccggcatgagccggatgatgcaggcgaacgtgatcgcgacatcgggccgcgcggtggaggccgcgggcgacgtcgacgtgctgctgctcgacaagacgggcacgatcacgctcggcaaccggcaggcgtcggcgttcctgcccgcgcccgaggtgaccgaggcgacgctcgccgacgccgcgcaactgtcgtcgctcgccgacgaaacgccggggggccgcagcatcgtcgtgctcgcgaaggagcgcttcaacattcgccagcgcgacatgggcgcgctgcacgcggtgttcctgtcgttctccgcgcacacgcgcatgagcggcgtcgacctctcgcccgagcgcgagatcagaaagggcgcggccgacgcggtgaagaagtacgtcgagagccacggcggacgctttccggccgaggtgacgaacgcggtgacggacgtcgcgcggcgcggcagcacgccgctcgtggtcgccgagaagcggggggcgctcgcgcgcgtgctcggcgtgatcgagctgaaggacatcgtgaagggcggcatcaaggagcgtttcgcggagctgcgcaagatgggcatcaagaccgtgatggtgacgggcgacaaccggctcacggccgcggcgatcgcggcggaagcgggcgtcgacgatttcctcgcggaagcgacgcccgagacgaagctctcgacgattcgcgagcaccaggcggcgggccggctcgtcgcgatgacgggcgacggcaccaacgacgcgccggcgctcgcgcaggcggatgtggccgtcgcgatgaacaccggcacgcaggccgcgaaggaggcgggcaacatggtcgacctcgattcgaatccgaccaagctgatcgagatcgtcgagatcggcaagcagatgctgatgacgcgcggctcgctcacgacgttctcgatcgcgaacgacatcgcgaagtacttcgcgatcattccggccgcgttcgcgaccacctatccgcagctgaacgcgctgaacgtgatgcatctggccacgcccgcctccgcgatcatgtcggccgtgatcttcaatgcgctcatcatcgtgctgctgattccgctcgcgctcaagggcgtgaagtatcgtccgctcggcgccgcgacgctgctgcgccgcaatctgctcgtctacggcctgggcggcattctcgtgccgttcgtcggcatcaagctgatcgacgtcgtgctcgccgcgctcggctgggtt

SEQ ID NO: 13841 - DNA, 1341 bp, Burkholderia mallei
atgcgtgccgttgcggcgtgcgatgcgttgggaggtgccgagcgccgcgcgatacgccaatacaccaatacgcgatacgccaatacgcgatacgcggcgatgtcccgcgaacgggacgcgatcgaaggctcgccgaaatgccgcgccggccttgggaagccggacgtgaatcgagcgggggccagtgagtcggtggggttcgtcgaatcctgcgaaccccgagaaccccgagaaccccgagaaccccgagaacccccgagaacccccgagaaccccacgaattcaccgatccccacgaattcagcgatccgaaccatccgggcggaggcgccggacggtccggaccacgctactgcgtcacgcgccgtccgccgcgttcgtcgcgcccttctcgtcgcgcgacgcgtcttgtgccgcgcggcggtatgtggcttcgagcgtctgcaccgtctgccggaactcgacgagcgtgttcgaacgctcggccggcaacgcgttcgcgacgagatcgatcgcctgctgccgcgcatacggctgaagctcgcgatactccgggcgcgcggccagctcggcgcccatcagcgtatcggcgcgcagccggatctcggtgtagagcggattcgtgccggcgccgctcggcgtgaacacgccttgcttgtcggcgccgggcagccccgtcgcacgcgccgcgtcgccgagcgcctcgatgaacgccggccgcacgttgcccgcgcgcgtggccgggtccatgcagaaccggtccttcgcttcgctgaagatcgcgcagagcgtcgcttcgtagacttgccggccgaattcggcatcctgccggatctccggggtacgcgtgtgggcgacctgcttgaccgcttcgtcgacgaaatgccggatcgcctgtttcgcgtcgcccgtgggccgatagctgccgacgtagcgcacgccctgcagcctgacccggccgggcgcgctgtccggcgcgcggtggcggaacagttgcccgagcgtttcgccgatcttgctgaagatgcgcttgatctgttgtgcgaacgacgtgcgcggctgcgcttcgccgcgcttgacgtgaacgtcgaacgacgcctgcttgacgtgcgtgaatccgccgattctcgggttgtaagtcatgtcttgctctcggttgaagggaaggaggtccggcgcgcctgccgcgtcgcgtgtcgtgcgtcgcggtggcgggcgcggctgtccggaccgatttcattctatgaagcgagccgtcggctccgattccataaattgctcatgcgcggtaggcggctcaggcacgcgccgcatgcgcccgcccgtgatcgcatgcgccga

SEQ ID NO: 13842 - DNA, 1521 bp, Burkholderia mallei
atgatcacgctgaccccaggccgtctgactctcccgcaactgcgccggatcgcccgcgagaacgtgcagatcgcgctcgatcccgcgagcttcgccgcgatcgaccggggcgcgcaggccgtcgccgacatcgccgcgaagggcgagccggcgtacggcatcaacacgggcttcgggcgcctcgcgagcacgcacattccgcacgaccagctcgagctgctgcagaagaacctcgtgctgtcgcacgcggtgggcgtcggcgagccgatggcgcgccccgtcgtgcgcctgttgatggcgctcaagctctcgagcctcggccgcggccactcgggcattcgtcgcgtcgtgatggacgcgctcgtcacgctgttcaacgcggacgtgctgccgctcattccggtcaagggctcggtgggcgcgtcgggcgaccttgcgccgctcgcgcacatgtcggccgtgctgctcggcatcggcgacgtgttcatccgcggcgagcgcgcgagcgcggccgaagggctgcgtgtcgcgggcctcgcgccgctcacgctcgaagcgaaggagggcctcgcgctgctgaacggcacgcaggcgtcgaccgcgctcgcgctcgacaacctgttcgcgatcgaggacctgtaccgcacggcgctcgtgtcgggcgcgctgtcggtcgacgcggcggcgggctcggtgaagccgttcgacgcgcgcatccacgagctgcgcggccatcgcggccagatcgacgcggccgccgcgtaccggtcgctgctcgacggctcggcgatcaacgtgtcgcaccgcgattgcgacaaggtgcaggacccgtacagcctgcgctgccagccgcaggtgatgggcgcgtgtctcgaccagatccgccacgcggccggcgtgctgctcatcgaggcgaacgcggtgtcggacaacccgctgatcttcccggacacgggcgaggtgctgtcgggcggcaatttccacgcggagcccgtcgcgttcgcggccgacaatctcgcgatcgccgcggccgagatcggcgcgctcgccgagcgccgcatcgcgctgttgatcgacgcgacgctctccggcctgccgcctttcctcgtgaaggacggcggcgtgaactcgggcttcatgatcgcgcacgtgacggccgccgcgctcgcgtcggaaaacaagacgctcgcgcatccggcgtcggtcgattcgctgccgacgtcggcgaaccaggaagaccacgtgtcgatggcgacgttcgccgcgcgcaagctcacggacatcgcggagaacgtcgcgaacatcctcgcgatcgagctgctcgccgcggcgcaaggcgtcgacctgcgcgcgccgcacgcaacgagcccggcgctgcagcacgcgatgaagacgattcgcgcggacgtcgcgcactacgatctcgaccactacttcgcgcccgacatcgcggtggtcgcgcggcgcgtgcgcgagcgcgcgttcgcgacgctgagcccgctgtcgttcgaatcggaacaa

SEQ ID NO: 13843 - DNA, 1299 bp, Burkholderia mallei
atgctcgacatccagttgctgcgcaaagacctcgacggcgtcgcgaaacgcctcgccgatcgcggctaccccctcgacgtcgccgcgttctccgcgctcgaagcggaacgccgggcgatccagacccgcaccgaagaactgcaggcgcgccgcaacagcctgtcgaagcagatcggcgcgatgaaggggcggggcgaggacacgtcggcggtgatggccgaggtgggcggcatcggcgatgagatgaaggcctcggcggtgaagctcgacgagattcaggcgcgcctgtccgagctgatgctggaaatgccgaacgtgccgcacgagagcgtgcccgtcggccgcgacgagacggagaacgtcgaagtgcgccgctggggcgcgccgcgccagttcgatttcgacgtgaaggaccacgtcgatgtgggcacgccgctcggcctcgatttcgagacgggcgcgaagctctccggcgcgcgcttcacggtgctgcgcgggccgatcgcgcgcctgcaccgcgcgctcgcgcagttcatgctggacacgcacacgcagcagcacggctacagcgagacgtacacgccttacatcgtgaatccggacgtgctgtacggcacgggccagttgccgaagttcgcggaggacatgttccgcgtcgagaagggcggcgcggagaacacggtcacgcaatacctgatctcgacctcggagatttcgctgacgaacacggtgcgcgattcgatcgtcgaagcgtccgcgctgccgatcaagctgaccgcgcattcgccgtgcttccgctcggaggcgggctcgtacggccgcgacacgcgcgggatgatccgccagcaccagttcgacaaggtcgagatggtgcagatcgtcgcgccggaagcatcgtacgcggcgctcgacgagatggtcggccacgcggaggcaatcctgcagaagctcgaactgccgtaccgcgtggtcgcgctatgcacgggcgacatgggtttctcggcggcgaagacgttcgacctcgaggtgtggctgcccgcgcagaacacgtatcgggagatctcgagctgctcgaataccgaatcgttccaggcgcgccgcatgcaggcgcggttccgcaacgcgcagggcaagcccgagctcgtgcatacgctgaacggctcgggcctcgcggtcggccgcacgctcgtcgcggtgctggagaactaccagaacgccgacggctcggtgacggtgcccgtcgcgttgcggccttacatgggcggcgtcgagcggatcgacgcgccttcgagcgcggcc

SEQ ID NO: 13844 - DNA, 1077 bp, Burkholderia mallei
atgtccgagcccacgccgatcgcgcctttcgcctcatccgccacccccgccgcgccgtacacgcgcggcgcggcgctgccgcaactgctccggcagcgcatcctgatcctcgacggcgcgatgggcacgatgatccagcgctacaagctcgacgaggccgcgtatcgcggcgagcgcttcaaggatttcccgcgcgacgtgaagggcaacaacgagctgctgtcgatcacgcagccgcggatcatccgcgagattcacgaccagtacttcgccgcgggcgcggacatcgtcgagacgaacacgttcggcgcgacggccgtcgcgcaggccgattacgggatggaagcgctcgtcgtcgagatgaacgtcgcgtcggcggcgctcgcgcgggaatcggccgccaaatacgcgacgccggaaaaaccgcgcttcgtcgcgggcgcgatcgggccgacgccgaagacggcgagcatctcgcccgacgtgaacgaccccggcgcgcgcaacgtcacgttcgacgagctgcgcgatgcgtattaccagcaggcgaaggcgctgctcgacggcggcgtcgacctgttcctcgtcgagacgatcttcgacacgctgaacgcgaaggccgcgctcttcgcgctcgaccagctgttcgacgacaccggcgagcgactgccgatcatgatctcgggcaccgtcaccgacgcgtccggccgcatcctgtccggccagacggtcgaggcgttctggaattcgctgcgccacgcgaagccgctcacgttcggcctgaactgcgcgctcggcgcggcgctgatgcgcccgtacatcgccgagctcgcgaagctgtgcgacacctacgtgtcgtgctacccgaacgcgggcctgccgaacccgatgagcgacaccggcttcgacgagacgcccgacgtcacgtccggcctcctgaaggaattcgcgcaggcgggcctcgtcaacctcgcgggcggctgctgcggcacgacgcccgagcacatcgcggcgatcgcgaaggcgctcgccgaagtgaagccgcgccgctggccgagccagtacagcgaagccgcc

SEQ ID NO: 13845 - DNA, 1365 bp, Burkholderia mallei
atgctcgacaatctcacccaacggatggcgcgcgtcgtcaagacgctgcgcggcgaggcccggctcaccgaggcgaacacccaggagatgctccgcgaagtgcggctcgcgctcctcgaagccgacgtcgccctgcccgtcgtccgcgacttcatcgcgaaggtcaaggagaaggcgctcggcgaggacgtgatcggcagcctgtcgcccggccaggcgctcgtcggcgtggtccagaaggagttgaccgccgtgatcggcggcgactacgaaggcaaggcggccgagctgaacctcgccgtggcgccgcccgcgatcatcctgatggcgggcctgcagggcgccggcaagaccaccaccgtcggcaagctcgcgaagctcctgcgcgagaagtacaagaagaaggtgctcacggtgtcgtgcgacgtctatcgtcccgccgcgatcgcgcagttgaagacggtgagcgagcaggtcggcgccgacttcttcccgtcgacgcccgaccagaagcccgtcgatatcgcgaacgcggccgtcgactgggcgaagcgccactatcacgacgtgctgctcgtcgacaccgcgggccgtctcggcatcgacgaagcgatgatgcaggagatcgccgcgctgcacgcggcgctcaagccggtggagacactcttcgtcgtcgacgcgatgctcggccaggacgccgtcaacaccgcgaaggcgttcaacgacgcgctgccgctcacgggcgtcgtgctgacgaagctcgacggcgactcgcgcggcggcgccgcgctgtcggtgcggcacgtgacgggcaagccgatcaagttcgtcggcgtggccgaaaagctcgacggcctcgaaatcttccatccggaccggatggccaaccggatcctcgggatgggcgacatcctcgcgctcgtcgaggaggcgcagcgcggcgtcgacatccaggccgcggagaagctcgccaacaaggtgaagaaaggcggcgatttcgacctgaacgatttccgcgcgcagatctcgcagatgaagaacatgggcgggctgtcgtcgctgatggacaagctgcccgcgcaattccagcaggccgccgccggcgccgacatgagccaggccgaaaagcagatccgccggatggaaggcatcatcaattcgatgacgcccgccgagcgcgcgaagcccgagatcatcaaggcgacgcgcaagcgccggatcgcggcgggcgcgggcgtgccggtgcaggaggtcaaccggatgctcaatcagtacgaccagatgcgcacgatgatgaagaagctcaagggcggcaacctgcagaagatgatgcgcggcataaagggcatgatgcccggcatgcgt

SEQ ID NO: 13846 - DNA, 1689 bp, Burkholderia mallei
atgtcttcagcatcgacgtcgatgccgagcggtaccgacgcgcggttcgccgggcgcgcccggcgggcgacggcctgctcggcagccacgcgcggcggccttgcgcggccgccgcgccgtatcgggatgtctggaagtcgatgggaggagtggatgatcaatgtcggtgcattcgtcgcaagcgcgcgatccggcgcgcgtgtcgtcgtcggcggcgacgcgcgcggcccggtggtgtcggccgcgaggttggggatgaaggagcggttgttcgcgtttctcgcgcacgtgccgctgctcaagcactgcgatgcggtgcggcgctatgcggagcaggttcgcatggaaaaccgccgctcgctcgaggtgttcgtgctcgcgctgtcgaagcgatatggcccggaaggcgcgaaggcggcgttcgactacggcgcgcggcgcgacggcgcgccgctcgatcagcggcgcgtgcgcaacatggtgtcgatcgccgagcacttccacggcacgggcgacgcgaagccgctcgcccggcaaatggtatttcggtcgtgggaatgccgggggctcgatcatccggggcacgcgtcgctgacgatcaagaatcaggcggacgccgatgccggccggcacgtgtacgagcacgtcagttggtggccgaatcaacgactgggtagtaaggagcatttcgatcgcatcgaaccgaagacgctggacggctatcggatcgacaagcgctcggagatttcgagcgcgacggaacagaggcttcgcgaaggcgacgcggcgaggagaaagatcctcgcggacggcttcaaatacgcgaatcaggacgagcgtcacgacgcgcttttttttccgagagccggccagaagttggacaaggatgccgaatgggggctgagcgcgcgcaaggtctattttccggcgatcggattcaaccacgacaggcgcgatacggaccgcccgcgcgcgttcgtgctgttcgggctgaacgaggcggcgatgttgcgcgatgcgcgcaccgtgaaggaaggcgcgaagtcaggcgagctcaagtatcgaatgatcagcaagaaggaaaactgcgcgtcgatggcgctgcgcgtgctgcgcgccggcggcgccgagcatttcgtgccgtatacggccgcatggatctccgaggatccgaatcacgcgcacgcctatgcgctggccgtgcaggcgaggatcgacgcgctgaaccagcggcgtgccgacgtcgagcgccgctgcgagcggttgcgcgacagcgcatcggtgcggcaggcgtggcgcgcgttctccgaggccggcggtgcctcggcaagcccgctcgcggaggacgccggccgcgggcgagcatcggcgcacatgcggcaggcgcggctcgacgagcatgcgcgcgaggtcgagcgaatcggcgcgtatttcgccgagctgtccgccgggcgatccggcaagcatcgcgatcgggcggatgcggatctggccgatgcgatgaagcgttgcgcgccttcggctcgcgacgacgtcgcggcgctgacgcgcaaggcgagcgtgctcgtcgagacgctcggccggcatctcgacgcgccgccgccgagcgattcgtccgcgctgaggaggctggccgcgcacgcgatgatcggccggatcgaggcgttcatggcggctgcgatcgccgcc

SEQ ID NO: 13847 - DNA, 1029 bp, Burkholderia mallei
atgacgatcactccccaggaagcgctgcagcgcacgatcgagcaccgcgagatcttccacgacgagatgctgcacctgatgcggctcatcatgcgcggcgacatgtcgcccgtgatggcggccgcgatcatcaccggcctgcgcgtgaagaaggagacgatcggcgagatcgccgccgccgcgacggtgatgcgcgagttcgcgcgccgcgtcgaggtggaggacaacgcgaatttcgtcgacatcgtcggcacgggcggcgacggctcgcacacgttcaacatctcgaccgcgacgatgttcgtcgcggcggcggcgggcgcgaaggtcgcgaagcacggcaaccgcggcgtgtcgagcaaatcgggcagcgccgacgtgctcgaggcgctcggcgtgaacatcgacctgcagcccgagcaggtggccgcgtcgatcgccgaaacggggatgggcttcatgttcgcgccgaaccatcatccggcgatgcgcaacatcgcgcccgtgcgccgcgagctcggcgtgcggacgatcttcaacatcctcggcccgctcaccaacccggcggacgcgccgaaccagttgatgggcgtgttccaccccgatctcgtcggcatccaggtgcgcgtgatgcagcggctcggcgcgcagcacgtgctcgtcgtctacggcaaggacgggatggacgaggtgtcgctcggcgcggcgacgctcgtcggcgagctgcgcgacggcgaagtgcgcgagtacgagatccacccggaggacttcgggatgcagatggtgtcgaaccgcacgctgaaggtcgagagcgccgacgaatcccgcgtgatgctgctcgaggcgctcggcaacaagccgggcgtcgcgcgcgagatcgtcacgctgaacgcgggcaccgcgctttattcggcggacgtcgcgggctcgatcgccgacggcatccagctcgcgcgcgacgcgatcgcaagcgggcgcgcacgcgaaaaagtcgacgagctcgtgcgcttcacgcagcagttcaagcgc

SEQ ID NO: 13848 - DNA, 624 bp, Burkholderia mallei
atgaaacatgacgacccgaacctgatcgtccgctacacggcgaacgagcgctcgaaccactggatcaccgcgatctcgttcgtgctgctcgcgctgtccgggctcgcgctgtttcatccttcgatgttctggatgacggcgctgttcggcggcgggcagtggacgcggatcctgcatccgttcgtcggcctcgtgatgttcgcgtcgttcgcggtgatggtcgtgcgctactggcgccacaacctgctcgacgcgggcgaccgccagtggctgcggcaaatggacgacgtgctcgcgaaccgggaggacaagctgccggaagtcggccgctataacgccggacagaagctgctattcttcgtgatggtggcgtgtctgctgttgctgctcgtctccgggatcgtgatctggcggcgctatttctcgctctacttcccgatcggcgtgattcgcgcggcggccgtcgtccatgcggcagcggcgttcgcgctgatcgtcggcatcgtcgtgcacgtgtacgcggcgctgtgggtgaagggctcgatcggcgcgatggtgcgcggcaccgtgaccgtcggctgggccagaaagcaccacccgaagtggtttcgcgagagcgtgaag

SEQ ID NO: 13849 - DNA, 297 bp, Burkholderia mallei
gtgaacaggctgcaactgacggcgagcgtcgtcgaacgtgaaccggtgcggtacacccccgccggcgttccgatcgcaagcgccacgttgcagcatcgcacggaagtcgtcgaggcaggcatcgcccggcaggtcgaattgacgatcccggccgtggcggcaggcgaggcgagcggcaggctggaagcgtgcgagatgggcgtcgagacgctcttcaccggcttcctggcgaaaaagcaccgcaacgcgagaaccctggtgtttcacatcacagcattgcaggacattggaaaggac

SEQ ID NO: 13850 - DNA, 1355 bp, Burkholderia mallei
tactcgcactacgtcggcgacattttcggcgtgccgctcgccgtcgaagggctgatggcgttcttcctcgaatcgacgttcgtcggcctgtcttcttcggctggaaccggctgtcgaaggtccagcatctggtcgtcacgttcctcgtcgcgctcggctcgaacctgtccgcgctgtggatcctcgtcgcgaacggctggatgaacaatccggtcggcgccgagttcaactaccagacgatgcgcatggagctcgcgaacctgttcgacgtgctcttcaacccggtcgcgcaggtgaagttcgtgcacacggtatcggcgggctacgtgacggccgcgatgttcgtgctcggcgtgtccgcgtggtatctgctgaagaagcgcgacgtcgatttcgcgctgcgctcgttcgcgatcgccgcgggcttcggcctcgcgtcgacgctctgcgtgatcgtgctcggcgacgaatcgggctacacgacgggcgaagtgcagaagatgaagctcgccgcgatcgaatccgaatgggaaacgcagcccgcgcccgcgtcgttcacgctgatcgggctgccgaaccaggaggcggagcgcaccgattacgcgatcaagatcccgtacgcgctcggcctcatcgcgacgcgctcggtcagcgagccggtgatcggcctgcgcgaactcgccaagcgcagcgaggagcacatccagagcggcatgatcgcgtacggcgcgctgcagaagctgaaggcgggcgacacgagcgccgagacgaaggcgacgttcgatcagcacaagcagtatctcggctacggcctgatgctcaagcagttcacgcagaacgtgaccgacgcgacgccggaccagatcaaggccgcggcgaagcagacgattccgcccgtcgcgcccgtgttcttctcgttccggatcatggtgttcctcggcttcctgttcctcgcgaccttcatcgccgcgttctggttctgcgcgcgccgccagttgctgcaggacaaccgccgctggttcctgcgctatgcggtgtgggcgattccgctgccgtggctcgccgccgagttcggctgggtcgtcgccgaagtgggccgccagccgtggacgatcgcgggcatcctgccgacgcacctgtccgcgtcgagcctcacggcaaccgatctgtacctgagcctcgcgggcttcatcgtgttctacacggcgctcttcatcatcgagatcacgctgatgttcaagtacgcgcgtctcggcccgtcgtcgctgcacaccggccgctatcaccacgaacaggcagggcggccgctcgagaaggccgtcgcgggcacggccgcgtgacggccccggccccct

SEQ ID NO: 13851 - DNA, 795 bp, Burkholderia mallei
atgatccagatcgacttgagcgggcaggtcgccgtggtgacgggcggctcgtccggcatcggctacgcgagcgccgagctcttcctgcgcgcgggcgcgtcggtcgcgatatgcggccgcggcgatgagcggctcgcgagcgcgcacgcgcggctcgtgcggcagttcccgcgcgagcgcgtgcttgccgtgcgttgcgacgtgctcgacgaagccgacgtgaccgcgttcgcgcaggccgttgccgagcgcttcggcggcgcggacatgctcgtcaacaacgcgggccagggccgcgtgtcgacgttcgcggacacgacggacgacgcgtggcgcgacgaactcgaactgaaatacttcagcatcatccgcccgacgcgcgcgttcctgccgctgctgcgcgcgtcgagtgcgccgagcatcacctgcgtgaattcgctgctcgcgctgcagcccgagccgcacatggtcgcgacttcgtcggcgcgcgccggcacgctgagcctcgtcaaatcgctcgcgaccgagctcgcgcccgagcgcgtccgcgtcaattcgatcctgatcggcatcgtcgaatcgggtcaatggcggcggcgctacgacgcgcaggccgcgccgggcgaatcgtgggaagcgtggacagccgcgctcgccgcgaagaaaaacattccgcttgcgcgcttcggccggcccgacgaggccgcgtgggcgctcttttatctcgcaacgaatctgtcgtcttacacgacgggcagccatatcgacgtatcaggaggctttgcacgccatgtc

SEQ ID NO: 13852 - DNA, 852 bp, Burkholderia mallei
atgtcccgtcccgatcaggccgcccgccggcgtgcgatcgccgccgaactgcacgtgtcgcccacgttcgatgcgcgcgacgaagccgagcgccgcatcgggttcgtcgccgattatctgcgcacggccggattgcgggcctgcgtgctgggcatcagcggcggcatcgattcgtcgacggcgggccggctcgcgcaactggccgtcgagcggctgcgcgcatcgggctacgacgcgcgcttcgtcgcgatgcggctgccgtacggcgcgcagcacgacgaagcggacgcgcggcgcgcgctcgccttcgtgcgcgcggacgagacgctcacggtcgacgtgaagccggccgccgatgcgatgctcgccgcgctcgcggcgggcggcctggcgtatctcgaccacgcacagcaggatttcgtgctcggcaacatcaaggcgcgcgagcggatgatcgcgcaatacgcggtggcgggcgcgcggaacggcgtcgtgatcggcaccgatcatgcggcggaatcggtgatgggcttcttcacgaagttcggcgacggcggcgcggacgtgctgccgctcgcgggcctcacgaaacgccgcgtgcgcgcactcgcgcgcatgctgggcgccgacgagccgcttgtgctgaaaacgccgaccgccgatctcgaaacgttgcgtccgcaacggcccgacgagcacgcgtacggcatcacgtacgagcagatcgacgattttctcgaaggcaagccgatggacgacgcggtcgccgagacggtgctgcgcttctatgacgcgacacaccacaagcgcgcgctgccctatacgatgttcgactggccgggccacccggca

SEQ ID NO: 13853 - DNA, 2389 bp, Burkholderia mallei
  misc_feature (178)..(178): n=g, a, t or c
ggcgttcggtccggcgttcggtccggcgttcggtccggcgttcggtccggcgttcggttcggcgttcggttcggcgttcggttcggtgttcggttcggcgttcggttcggcgttcgcggcgttcggtctcgcgctcgcccccctgctcgccgcgccgcccgttcggccgcgcgcccgncggaacccgcgcccgtgcggctcgccrcggcgcgcggcgctcccgcgcgcgcgaacgacggcgagccgcacgctcgccgtcgcgatgctcgccgcgccgctcgccgcgcacgcgctgccggcctacgacgacgtgcggcgcgactggcgcagcaccgactggttgctgctcgcacgcgacggcacgccgcttcagcgcacgcgcgtggagctcaccgagcggcgcggcgactggatcgcgctcgccgacgtatcgcccgcgtttcgagaggcgatcgtcgtatcggaggacaagcgcttctacgcgcacagcggcgtcgactggcgcggcatcgcgggcgccgcatggggcaatctgtggaacgagcgcacgcgcggcgcgtcgacggtgacgatgcagctcgccggcctgctgagcgacacgccgcgccgctcgggccagcgctcgctgccgcagaaggccgcgcaggcgatgaacgcgctgcggctcgaacgcggctggcgcaaggatcagatcctcgaggcgtatctgaatctcgtgccgtttcgcggcgagacggtcgggctcgacgcgatgtcgcacgcgctgttcggcaaggcgccgtcggggctcgacgtgcgcgaatcggcggtggccgccgcgctcgtgcgcgcgccgaacgcgtccgccgcgaaagtggccgaacgcgcgtgccggatcctgcgcgacctgcgcgccgcgcaaccgtgcgaatcgctcgacggctacgtgcgcttcgtgacgtccgccccgccgggcgccgcgcgcgacggcggcgaagcgctcgcgccgcacttcgcgcggcgcgtcgcggccgaggtgaagcccggcgcgggcgcgcgcgtgcgctccacgctcgacgcgccgctgcagcgcttcgcgcgcgacacgctcacgcgcgcgctcgccgagctcaacgcgcccgcccatcggcgccacgtgcaggacggcgcggtcgtcgtgatcgacaacgcgacgggcgagatccgcgcatgggtcggctcgtcgggcgcgctgtcggccgcgcgcgacgtcgacgcggtgctcgcgccgcgccaggccggctcgacgctcaagccgttcctctacgcgcaggcgctcgacgaacggcgcctcaccgccgcttcgctgctcgacgacgcgccgatcgatctcgccgcgggcggcggcctgtacatcccgcagaactacgacaagcacttcaagggctgggtcagcgtgcgcaccgcgctcggcggatcgctgaacgtgccggccgtgcgcacgctcgtgctcgtcacgccgcaccgcttcgcgcgcacgctcaccgcgctcgggctgccgctcgccgaagaaggcgattactacggtttcagcctcgcgctcggcagcgccgacgtcacgctgctgtcgctcgcgaacgcgtaccgcgcgctcgccaacggcggcgtcgcgcgggcgacgctcgacgtgccgggcggaagcggaagccggaacggaaacggaaacggaaacggaaatgacgccgtcacgtcggccccgttcgcgccgaccgtttcgaaatcaaaggttggcgcgtcagcggttttcccgcgggccgtctcgacgaaggccgagcccgcgaagccagtgcccacggcggccctttcccccacgagcgcttcgacatcgaccgccggcaagccggcggcgcacgccgcagcgggcacgcgcgtattcagcgaagccgcggcgtacatcgtcaccgacatcctcgccgacaacaacgcgcgcgtgcgcacgttcggcttcgacagcccgctcgcgacgcgcttcttctccgccgtcaagacgggcacgagcaaggacatgcgcgacaactgggcgctcggctacacgtcgcgctacacggtgggcgtgtgggtgggcaacgcggacggctcgccgatgtgggacgtatcgggcgtcacgggcgcggcgcccgtgtgggccgcgatcgtcggctatctgcaccgcgatctcgcgagccgcgcgccgcgcccgcccgccggcgtcgagcagcgccgcgtcgcgttcgaacgcgacgtcgagcccgcgcgccccgagtggttcatcgccggcaccgcgctcgacacggtgcgcctcgccgcgcccgcgaccgccgccgcgggcggcgcagaccggccgcgcgcgccgctttcgatcggcgcgccgaccgacggcacgatcttcgcg

SEQ ID NO: 13854 - DNA, 828 bp, Burkholderia mallei
atgtccgccatgtataaagccatcgccaccgatctcgacggaaccctgctcaatagcgaccaccagctcgatccttatacgatcgacactgtgcggcggctcgcgggcagcggcgtgcccttcgtgatcgcgacggggcgccactatgcggatgtcgcgggtattcgcgacctgctcggcatccgtccttacctgatcacgtcgaacggcgcgcgcgtgcacgggccggacgacacgcggatccacgcgcaggacgtgcccgccgacgcggtgcggcaactggtgcggcccgaactcgtcggcacgcatggccgggtgatcgtcaatctgttcacgaacgacggctggctgatcgatcgcgatgcgccgcaactgctcgcattccatcaggattccggatttcgctacgaaatcgtcgatatgctggcgcacgacggcgcggacattgcgaaagtgctgtacatcggcgagcccgaggatctggccgtcgtctcgggcaatctcgcgcgccggttcggcgacgcgctgtacgtcacgtattcgctgcccgattgcctcgaggtgatgacggcgaatgtatcgaaggggcgcgcgctgcgcgtcgtgctcgagcggctcggcgtcgatcccgcccactgcgtggcgttcggcgacaacatgaacgatatcgacctgctcgagacggccgggtatccgttcatgatgaacaacgcgaatcccgacctcgccttgcgcctgccgaaggtgccgcggatcggcaacaacttcgaagcgggcgtcgcgcgccatctgcgcgcgctgttcgcgctcgaggattccatcgcgcac

SEQ ID NO: 13855 - DNA, 888 bp, Burkholderia mallei
gtgtccagttccgattccgtttttcccgttcccgcgccgctgcaatgcggccgtttcaccttgaccttcgagcgccccctcgtgatggggatcctcaacgtcacccccgattcgttctccgacggcggccgttacgtcgcccgtgacgccgcgctcgcgcaggcggagcggatgcttgccgaaggcgcggacatcctcgacatcggcggcgaatcgacgcgccccggcgcgccgcccgtgccgcttaacgaggagctcgagcgcgtgattccgctcgtcgaggcgctgcgcggccggaacgtgccgctgtcgatcgacacgtacaagcccgccgtgatgcgcgcgtcgctcgccgcgggcgccgatctgatcaacgatatctgggggctgcggcagccgggcgcgatcgacgcggtgcgcgacagcgcgtgcggcctctgcgtgatgcacatgctcggcgagccgcggacgatgcaggtgcatgcgcccgagtatcgcgacgtgatcgacgacgtgcgcgcgtttctcgccgagcgcgccgatgcgctcgtccaggcgggcgtcgatgcccggcgtatcagcgtcgatccggggttcggtttcggcaagtcggtgatagaacacaactatgcgctgcttgcgcatttgccgaggaccgcgcccgcgcggcccgacgggcgcgcgtatccgatcctcgccggcatgtcgcgcaagtcgatgctgggcgcggtgatcggcagacccgcgcccgagcgcatcgcggcgagcgtcgcggcggcggtctgcgcggccgagcggggggcggcgatcgtgcgcgtgcacgacgtcgcggcgaccgtcgacgcattgaaagtatggagcgccgtgcgcgatgccgcgcggcgagca

SEQ ID NO: 13856 - DNA, 2707 bp, Burkholderia mallei
agcacgattgcattcacgctgtgcttcgccgtatggatgatgttcgcgatcctcggcattccgctgaagaaaaccctcggcctgaacgacaccgaattcggcctcatcgccgcgatgcccgtgctcaccggctcgctgatccgcgtgccgctcggcatctggaccgaccgctacggcggacgcatcgtgttcttcatcctgatgctcgtcaccgtcgtgccgatctggctgatctcgtacgcgaccgagctctggcagttcctcctgctcggcctgttcgtcgggctcgcgggcggctcgttctcggtcggcacgccctacgtcgcgcgctggttcccgaaagcgcgccagggtctcgcgatgggcgtgttcggcgccggcaactcgggcgcggccgtcaacaagttcgtcgcgcccgcgctgatcgccgcggcgggcacatggaccatcgtgccgcgcgtctacgcggtcgcgatgctcgcgatggcgctcctcttctggctgttctccgccaccgatcccgcgcaccgctcgacgaacgcgacatcgctgcgcgcgcaactgcgcgtgctgaagaacccgcgcgtatggcgctactcgcagtactactcggtcgtgttcggcggctacgtcgggctgtcgctgtggctcacgcagtactacgtcggcgaatacggcttcggcatccagtcggccgcgttcctcgccgcgtgcttctcgctgccgggcggcgtgctgcgcgcgatcggcgggtggctttccgaccgctacggcgcgtatcgcacgacgtggtgggtgatgtgggtctgctgggtgatgttcttcctgctcagctatccgccgaccgatttcacgatccgcgccgcgcacggcccgctcggcttccatctgtcgctcacgcccgtcgcgttcaccgcgctgctgttcgcggtcggcatcgcgatggcggtcggcaaggcgtcggtcttcaagttcatcgccgacgagttcccgaacgacatcggcgcggtgtcgggcgtcgtcggcctcgcgggcggcctggccggcttcgcgctgccgattctgttcggcgcgctcgtcgacctcacgggcgtgcgctcgacctgcttcatgctgctctacggcgccgtcagcgtgagcctcgtctggatgtacttcagcttccgcgccgagcgtgccgcgcacgaccagcgcgtgctcgccacccgctccgcgtgagccttgcttcctcgtcatcttcgttcactcaacggattcgatcatgtccacttctctactcgtgcgctgggatcccgaaaacccggccttctggcaagccaaggggcgccccgtcgcgtggcgcaatctcgcgatctcgattcccgcgctgatgctcgcgttcgtcgtctggtcgctctggagcgtcgtcgtcgtcaacctcgatcgcgcgagctttcacttcagcaagaaccagctgttctggctcaccgcgctgcctgcgctttccggcgcgacgctgcgcatcttctattcgttcctcgtgccgatcttcggcggccgccgcttcaccgcgatctcgaccgcgacgctgctgattcccgcgctcggaatgggcttcgcgctgcgcgaccccggcacgggctacccgacgctcctcatcctcgcgctgctctgcgggttcggcggcgcgaacttcagctcgtcgatggcgaacatcagcttcttcttcccgaaggcgaagaaagggctcgcgaccggcctgaacgcgggcatcggcaacctcggcgtgtcggtcgtgcagttcgtcacgccgctcgtgatctcggcgggcctgttcggcgcgctcgcgggcgatccgcagagcgtcgtcgcgcacggcgcgacgacgaacctgtggttgcagaacgcgggcttcgtgtgggtgccgttcatcgtcgtcgcgacgctcgccgcgtggttcgggatgaatgacatcgccgacgcgaaggcgtcgttcgccgagcaggcggtgatcttccgccgactgcacaactggctgatgtgctggctgtacgtcggcaccttcggttcgttcatcggcttctcggcgggcttcgcgctcctcacgaaggcgctcttcccgaacgtgaacccgaccgcgtacgcgttcatcggcccgctcgcgggcgcgctgatgcgccccgtcggcggatgggtgtccgaccgcatcggcggcgcgcgcgtgacgttctggaccttcgccgcgatgatcgcggccgtcggcggcgtgatcgcgacgctgccctcgggcggcgccgcgggcagcttcgcgggcttcctcgcgatgttcatcgtgctgttcgcgctcacgggcatcggcaacggctcgacgttccggatgatcccggtgatcttcctcaccgagcggcagcgcgccgcgcaaggccaggacgaggccgcgcgcaagcaggcggtgctcgacgccggcaaggaatcggccgcggtgctcggcttttcgggcgcgatcggcgcgtacggcggcttcttcatcccgaagagtttcggcacgtcgctcgacatgacgggctcggccgtgccggcgctcgtgtgcttcatcgcgttctacgtgtcgtgcgtcgcgatcacctggtggttctacgcgcgccgcaacgcgtcgatgccgtgctgacgatagcgcgctgacgcctcccgcctctttgccggatgcggcgcgctgcgaccagcggcc

SEQ ID NO: 13857 - DNA, 963 bp, Burkholderia mallei
ttgaaacgcgaacggcgtgcgcggcgcccccgcctgcacgcggcggcaggcggcctgtggcttgtcgttgccgcgctgccgcccggcgcacgggcagcgacttgcgaaggcgacaagacactcgtcacgcttccggccatcgcggtcgcggccgatgcgccggtgggaacggtgctgtggcgtcagaaggggatcgctttcagcacctattgcacgttgggatggttcgacaccagcaacatttatgtctggcgcgccgacctgcactcggcgctgcagccatatgggctgacgttctggctgacttacggagggcagggcggcaacaccgcgctgcaaatcaaggagccgatggtcgtcgatctcggcggaaaggccggctatgcgagcggctccgtcgacctggaactgaggaagacgggcgtgacgccggcgcaaggcgtcgtcggcgcggcggacatccccgcgttctatctcgatagcaatacgaactacaacaaaggctcgcactacatccgcgggctgaccaacatttcgttcgtctcctatacctgcgacatcgatacggggtcgcgcagcatgaatgtgccgctcggcgacgtgcgcgtcgatcgcttcagcggcatcggctccaccttcgcggatcggaatttcggcatcggcatgacgtgcacgcagccggccggcacgtacgatatcgcgctgacgttttccgcgacggcggacagctccggcgcaccgggcgtgctcgcgatcacgcagggggcgtcttccgcgtccggagtcggcattcagttgctgatgaacggctcgccggtgactttcggcgccgtcctcgacgcgggcagcgcgaccgcgggcgcgacgctgacgatcccgatgacggcacgctattatcagactggccgtgtcgtgacgccgggcgcggcgaacgggatcgcaacattcgccgtcagctacaaa

SEQ ID NO: 13858 - DNA, 444 bp, Burkholderia mallei
atgagtctgagagaccagatcagtgaagacatgaaggccgcgatgcgcgcgaaggaaagcgagcggctcgcgacgatccgcctgctgctcgccgcgatcaagcagcgcgaggtcgacgagcgcgtgacgctcgacgacgcgggcgtcaccgcggtggtcgacaagatgatcaagcagcgcaaggattcgatcagccagttcgaggccgccgggcgcaccgatctcgtcgagaaggagcaggcggaagtcgcggtgctgagcgcgtacttgccggcgcagctctcggatgccgaggtcgcggccgaagtgcaggccgccgtcgcgcaaacgggcgcggcgggcccgcaggacatgggcaaggtgatgggcgtgctcaagggcaagctcgccggccgcgccgacatgacggccgtgtccgcgctcgtcaaggcggcgctctcgaag

SEQ ID NO: 13859 - DNA, 1839 bp, Burkholderia mallei
atgcggtttgatatatccgtcgtggtgtatcgagagacggaggaaaccctcgacgatcttctcgacagcctcgccgctcaagcatcatgcccggatacggtggttcgtgtctggttgcgcaacaacgatcccgccgatgccgatcggtgggatcggttcgtgcacgatcggtcatggtatccattcgaaatttcgatctcgcattctccgcagaacgtgggcttcgggcgcgcgcacaatgcgacgttcgaaatggccgacgccccgtttttctttgtcttgaatccggatactcgactgcattcgactgccgtctcggcattgcggaaggcgatagacacgtctgccggcgacgtgggcgcctgggagttgcggcaactgccgtacgagcatccgaaactgtacgatcccgtttcgctcagcacggactgggtgacaggtgccgccgtcgtgttccggcgtgccgcgtttgcgcaggtgcgcggtttcgagccgcgtatcttcatgtatggggaagatgtcgacctatcgtggcgaatgcgcgccgcgggctgggtattgcattatgtgccgcatgctgtcgtcgtacaccccacgtattcgaaaccgatggaggccaaaccgctccagatcgcaggcggcgtggtcgcatcgttgcaattgcgtacgaggttcgggtcctggctcgatatcgctcgcggtctaggttgctgggttgccgaactcgcgaggccggcgcgcttcccgcatgcgcggcgcacgcatctgatggcactggctcgatatcttcggagcgcagcctacttcaggcgcacgggggcacggtatcgcaaaggcggttttcgccccggttttcgtttttggggatatggtgaccgacgcgacggcgcattttttgccttcgcggtcgaggaactcgacgcgcgcacggtgccgcttgtctcgatcatcgtgcgaacgcatcgccgaccggcattgttgcgggaggcgctgatgtcgctgtcgcatcaaacctatccgcgtgtcgaagtcattgtcgtcgaggacggcgagccgaatagccgcgcgatgatcgagcgcgaatttgcagggcgccttgatatccgctatgaggcgacgggcatgccggtaggcaggagtgccgccgggaatctggggctttcgctcgccgccggggaatggctgggatttcttgacgacgacgaccagttctacgcagaccacgtcgaggcaataatgcaggtcgcgcgaagcggtacgaaccgggcagtctatggtgcgtcgcacgagattccgaccgaatttgcacaattgacggacgaggccgcgacatatcgcgaagagcccgcgtcgctcaagtatcggccatattcccgcctggcgatgtggcaggagaaccttgcgccgattcaagcagtcctcttccatcgaagcttgtatgacgaattgggcggatttgacgaggacctcgatcaactcgaagactgggtgctgtgggtacgctattcgtgtgcgactgacttctcttcgttcctgcgggtgacatcacgctaccgggtgcccatggcggccaaggttgccgttgagcgtcaggccaagctgcatgaagcctatgccgtcgccctggagcgacagcgagcgatgcgagtgacgcttagcccgttcgacgttgtcgccatggcggaagagcaggcccgtcggcatgctatcgtccacgtttcgaggcaaaccgcgcgaaagctgatcgtgcgagtgccgttcatgcgaacgttgttatcgagccaggcgggatggcgacggcgcatgagagcgctatatcgtcgaatgtcgccgcgctcc

SEQ ID NO: 13860 - DNA, 600 bp, Burkholderia mallei
atgagcatcaagccgccgtccgcgctgtccgagctcgtcgaggcgctgcgcgcgctgccgggcgtcgggccgaaatccgcgcaacgcatcgcgtatcacctgatgcagcacgatcgggagggcgccgagcggctcggccggtcgctgctgttcgcgaccgagcacctgcggcattgcgagaagtgcaacacgttcacggaggcgcaaatctgcgaggtgtgcagcgatccggagcgcgatccggcgctgctgtgcgtcgtcgagacgcccgccgatcagatcatgctcgagcagacgatgacctatcgcgggctgtacttcgtgctgatggggcgcctgagcccgctcgacggcatcgggccgaaggaaatccatttcgaccggctcgtgcgccgcgcgtccgacggcatcgtgaaggaggtcgtgctcgcgacgaacttcacgaacgagggcgaggcgaccgcgcactacctcggccagacgctgaaggcgcgcggcctggccgtcacgcggctcgcgcgcggcgtaccggtgggcggcgagctcgaatacgtcgatgcgggcacgatcgcgcgcgcgatgctcgaccggcgcacgctt

SEQ ID NO: 13861 - DNA, 1248 bp, Burkholderia mallei
atggcactcatcgtacataaatacggcggcacttcgatgggctcggtcgagcgcatcaagaacgtcgcgaaacgcgtcgcaaaatggcatcaggccgggcaccagatggtggtcgtgccgtccgcgatgtccggcgaaacgaaccgcctgctcggtctcgcgaaagagatctcgagccagccgagcccgcgcgagctcgacatgatcgcgtcgacgggcgagcaggtcagcgtgggcctgctgtcgatcgcgctgcaggacatcggcgtcgaggcggtgagctatgccggctggcaggtgcccatcaagaccgacagcgcgtacacgaaggcgcgcatccactcgatcgacgacgagcgcgtgcgccgcgatctcgatgcgggcaaggtcgtcatcatcacgggttttcagggcgtcgatccggacggccacatcacgacgctcggccgcggcggctcggacacgtcggcggtcgcggtcgcggcggcgctcgaagcggacgaatgcctgatctacacggacgtcgacggcgtatacacgaccgatccgcgggtcgtcgaagaggcgcgccggctcgatagcgtgacgttcgaggaaatgctggaaatggcgagcctcggctcgaaggtgctgcagatccgctcggtcgagttcgcgggcaagtaccgcgtgaagacgcgcgtgctgtcgagcctcaccgatccgcagattccgctcgacgaagagatgcgctcgggcaccctgattacttttgaagaagacgagaccatggaaaaggcagtcatttccggcattgcgttccagcgcgacgaagcgcgcattgcggtgatgggcgtgcccgacaagccgggcatcgcatatcagatcctcggccctgtcgcggatgcgaacatcgacgtcgacatgatcatccagaaccagagcgtcgaagggaagaccgacttcacgttcacggtcggccgcggcgattaccagaaggcgatggacatcctgacgaatcaggtgaagggccatgtgaacgccgagcaggtgctgggcgatccgaaggtgtcgaaggtgtcggtggtcggcgtcgggatgcgctcgcacgtcggtgtcgcgagcacgatgttccgcacgctgtcggaagagggcatcaacatccagatgatctcgacgtccgaaatcaagatttcggtgctgatcgacgagaaatacatggaattggcggtgcgcgcgctgcacaaggcattcgagctcgatcaggcg

SEQ ID NO: 13862 - DNA, 2076 bp, Burkholderia mallei
tccctgctcgtcgaactgctgaccgaagagctgccgccgaaagcgctcgcgcgcctcggcgacgcgttcgccgaaggcatcgcgcaacgcctcgccgcgcgcgacctgatcgagggcgagctcgcattcgagcgctacgcgacgccgcgccgcctcgccgtcgtcgtccagaacgtgcgcgccgtcgcgcccgaacggcaggttcgcgaaaaagtgctgccggtgtcggtcgcgctcgacgcgcaaggcgcgccgagcgcgccgctcgcgaagaagctcgcggcgctcggccatccgaacctgtcgatcgccgatctcgagcgcgcgcacgacggcaaggccgaagcgttcttcgtcaactacgcggcgcccggcgcgacgctcgccgacggcctgcaggccgcgctcgacgaaacgctcgcgaagctgccgatcccgaaggtgatgacctatcagcgcccggacggcaccgatgtgcaattcgtgcgccccgtgcaccggctgacggtgctgcacggcgatcgcatcgtgcccgtcgccgcattcggcatcgacgcgggcgacacgacgctcggccaccgcttcctgtccgacggcctcgtcgcgatccggcatgcgaacgcctacgcggatacgctgcgcgagaaaggccgcgtgctcgcgcacttcgcgcaacgccgggaaacgatccgcacgcagctcgaggcgaacgcaaacggcgatcgggtcgtgatgcccgaggcgcttctcgacgaagtgacgtcgctcgtcgaatggccggtcgtctacccgtgccgcttcgaggacgagttcctgcaagtgccgcaggaatgcctgatcctcacgatgcagaccaaccagaagtacttcgcgctcaccgacgcggcgggcaagctgcgctcgcgcttcctgatcgtgtcgaacatcgagacgaagacgccgggcgagatcgtcgagggcaacgagcgcgtcgtgcgcccgcgcctggccgacgcgaagttcttcttcgagcaggacaagaagaagccgctcgccgagcgcgtgccgctcctcgcgaacgtcgtctatcacaacaagctcggctcgcagctcgcgcgcgtcgagcgcctcgaaacgctcgcgggcgagatcgcgcccgcgatcggcgccgacgcgacggtcgcgattcgtgccgcccgcctcgcgaaggccgatctgctgaccgacatggtcggcgagttccccgagctgcaaggcacgatgggcacgtactacgcgcgccacgacggcgagcccgaagacgtcgcgatcgcgtgcagcgagcactaccagccgcgcttctccggcgacgcgctgccgacgacgcccgtgtcgaccgcggtcgcgctcgccgacaagctcgagacgatcgtcggcatctggggcatcggccttgcgccgacgggcgagaaggacccgttcgcgctgcgccggcacgcgctcggcgtgctgcgcctgctgctcgaaaagcagttgccgctcgatctcgtctggctgctgcgcaccgcgtacgagcgcttcgcggcggtgccgggcgtcgccgaatcgaccgacgcgatccatgcgttcttcatcgaccgcctgcgcggcctgctgcgcgagcgcggctacacggcgggcgaaatcgacgcggtgctgagcctgaacccgacgcgcctcgacgacatcgtcgcgcgccttaacgcggtgcgcgagttcacgcgcctcgccgaagccgaggcgctcgcggccgcgaacaagcggatctcgaacatcctgaagaaatcggaaagcggcgcgaacggcgcggtgcagccggcgctcttcgtcgaagcggccgagaaggcgcttgccgagcagctcgccgacgtgacgccgcgcgtgcagtcgcagctcgaggcgcgcgcgtacaccggcgcgctcaccgcgctcgccgcgctgcgcgcgcccgtcgacgcgttcttcgacggcgtgatggtcaacgccgacgatcccgcgctgcgggcgaaccggctcgcgctcctgtccgcgctgcaccagcaaatgaactgcgtcgcggacatctcgaagctcgccgcc

SEQ ID NO: 13863 - DNA, 1365 bp, Burkholderia mallei
atcgcgtatagcggcggcctcgattcgaccgtgctgttgcacgcggccgcgcgcatcgcgggcgccggacgttgcatcgcgttgcatgttcaccacggcctgagcgcgaacgccgacgcatggctcgcgcattgcgcggaaacggcgcaagcgctcggcgcgcgcttcgacgcggcgcgcgtcgacgtgccgcgcgcgagtgggcagggcatcgaggcgagcgcgcgcgatgcgcgctatcgcgcgctcgagacgatgtgcgcgcgatacggcgcacgcacgctgtggctcgcgcagcatgcggacgatcaggcggagaccgtgctgctgcaactgctgcgcggcgcgggcatcgcggggttggcggcgatggcgccgcagtaccggccggcgcttgccgacgtcgtgcgcatgcgtccgctcctgcatctgttgcgcgcgcagctcgagcgctacgcgcagcagcatgcgctgcgctggatcgacgacgaatcgaacacggatacgcgctatgcgcgcaatgcgctgcgcgtcgacgtgcttcccgcgcttgcgccgcactttcccggctttcgcgatgcgctcgcccgcaccgcgcagcatgcggcggcggcccagcgtctgctcgacgatctcgccgcgatcgatctgcgcgcggtcgcgcgcgcggacgtgcgcgtgttgtcgcgcgatgcgttcgtcgcgctcgacgacgagcgcggggcgaacttgctgcgttactggatgcgctcgctcgggctgccgggcgcgtcggccgcgcgccttgccgagatggtgaagcagttgcgcgcggcgcgcgatgcgcatgcgttgcgcgtcgatcatgcgggttggcgcctgcgtctttatcgcgacgacgtccagtgggaggcgggcgacggtgccgcatcggaggcggcgcgcgccgatgtggctgacgatgatgcggccgatgcgcgcgacgacagggccgatgcatcggccgccgcgcggcttccggcatgcgcgctcgcctggcgggggcacgaggtgtggcgcctgcccggctggcgcggcagcttcgtgttcagtccggtcgcggcgcacgagcacgatgcggtgccggaggcgctgctctcgtcagccgcgctgcgcgcctgcgcgcgcgcgggcggcgagcgcatgcgcacctggcagggcggccccgggcgcacgctgaagaatctgttccaggagcgcggcgtgcccgcctggcagcgcgatgtgccgctgttgtacgtcggcgagcggttgctgttcgtgccgcgcatcggcgtgaatcgggcgacgcacgacggcgccgatgcgccgggcggctggcggcgcatcgaatggcggcccgacatg

SEQ ID NO: 13864 - DNA, 783 bp, Burkholderia mallei
atgagcacagaatttcaggccaaacccggcgactcctatgtccagtcgttcgcgcgcggactcgcggtgattcgcgcgttcgacgcggagcaccccgagcagacgctcaccgaggtcgcctccgcgaccggcctgacccgcgcgggcgcgcggcgcatcctgctgacgctgcagacgctcggctacgtcgaggccgacggccgcctgttccggctcacgccgaagatcctcgatctcggcttcgcgtatctgacatcgatgccgttctggaacctcgccgagccggtgatggagcaattgtccgcgcgcatccacgaaagctgctcggcggccgtgctcgatcgcaccgaaatcgtgtacgtgctgcgcgtgccgacgcacaagatcatgacgatcaatctgtcgatcggcagccggctgcccgcgtactgcacgtcgatgggccgcgtgctgctgtcgtcgctcgacgccgccgcgctcgacgacacgctcgcgcgaagcacgctgcgcgcgtacacgccgcgcacgctcaccgatcccgccgcgctgaaggacgagatcgcgaccgtgcgcagccagggctgggcgatcgtcgatcaggaactggaagccggattgatttcattgtcggcgccgatccgcaaccggcgcgggcaggtgatcgccgcgatgaacatcagcggcaacgcgcagcggcacaccgcgaagcaaatggtgaaggcattcctcgatccgctgctggaagcgtcgcaaaccgtgtcgcagctcgtcgcgcggcgcggc

SEQ ID NO: 13865 - DNA, 2100 bp, Burkholderia mallei
atgtccgcaggcctgaattccgctcaaagcgaagcggtgcgctatctcgacggtccctgcctcgtgctcgccggcgcgggcagcggcaagacccgcgtcatcacgcagaagatcgcgcacctgatcgaggcaaaaggcttcgagccgcgccacatcgccgccgtcacgttcacgaacaaggcggccgccgaaatgcgcgagcgcgtgggcaagctcctcgagggcaagacgctcacgacgcccggcaaggaaggccgcaaggtgcccgtcaatcagttgacggtgtgcacgttccattcgctcggcgtgcagattttgcggcaggaagccgagcacgtcggcctgaagccgcagttctcgatcatggattcggacgactgcttcgggatgatccaggagcagatcggcacgaccgacaagggcctgatccgcaagatccagacgatcatttcgctgtggaagaacggcctcgtcgcgcccgaggaggcgatgacgatcgccgcgaacgaggacgagcaccaggcggcgctcgtctaccggaactacgtcgcgacgctgcacgcgtatcaggcggtcgacttcgacgacctgatccgcctgccgaccgaactgttcgcgagaaacgagcctgtgcgcgaccgctggcagaacaggctgcgttatctgctgatcgacgaatatcaggacaccaatgcgtgccagtacgagctgctgaagctgctcgcggggccgcgcgcggcgttcacggccgtgggcgacgacgatcaggcgatctacggctggcgcggcgcgacgctcgagaatctcgcgcagctcggcaaggacttcccgaaactgcacgtgatcaagctcgagcagaattaccggtcgacggtgcgcattctgaccgccgcgaacaacgtgatcgcgaacaacccgaagctgttcgagaagaagctgtggtccgaacacggcatgggcgattcgatcaccgtcacgccgtgcaacgacgaagagcacgaggccgaatccgtcgtgtttcgcttgtccgcgcacaagttcgagcggcgcacgcagtttcgcgactacgcgatcctgtaccgcggcaacttccaggcgcgcgtcttcgagcaggtgctgcggcgcgagcggattccctacgtgctgtcgggcggccagtcgttcttcgacaaggccgagatcaaggatttgtgcgcgtacttgcggttgatcgcgaacgccgacgacgatcccgcgttcatccgcgcggtcaccacgccgcgccgcgggatcggcaacacgacgctcgaggcgctcggcgcgttcgcggggcaggcgaaggtgtcgctgttcgaggcggtctacatgggcgggatcgaagcgcggctgtccgcgcggcaggtcgagccgctgcggatcttctgcgatttcatccagcgcctgaccgatcgcgcggacaaggagcccgcgaccgtcgtcctcgacgacatgatggaggcgatccactacgaagcgtacctgtacgacgcatacgacgaacggcaagcgcagacgaagtggcagaacgtgctcgaattccttgaatggctgaagcgcaagggaacgaagccggaggccgagcaggcggtggacggcgaggccgaagggttccacaacgcggacggcctcgccgataccggcaagaacctgctcgggctgatccagacggtcgcgctgatgtcgatgctcgagggcaaggaagaggatccggacgcggtgcggctgtcgaccgtgcatgcgtcgaaggggctcgagtatccgcacgtgttcctggtcggcgtcgaggaagggatcatgccgcacagcggcggcagcgacgacggcccgatcgacgacgagcggatcgaggaagagcggatcgaggaagagcgccggctgatgtacgtcgcgatcacgcgcgcgcagcgcagcctgcatctgaactggtgcaagaagcgcaagcgggcgcgcgagacgatcgtctgcgaacagtcgcgcttcatcgcggagatggggctcgacgaggcgccgccgcctacgccggaagaggcgccgatgacgccgaaggatcgcctcgcgagcctgaaggcgctgctgcagaag

SEQ ID NO: 13866 - DNA, 1365 bp, Burkholderia mallei
atgtttgaaaaaatcctcattgccaaccgcggggaaatcgcgctgcgcatccagcgcgcgtgccgcgagctcggcgtcaagacggtggtcgtctattccgaggccgacaaggaagccaagtacgtgaagttagccgacgaagcggtctgtatcggccccgctccgtcgaacctgagctacctgaacatgccggcgctgatcagcgcggccgaagtcaccgacgccgaagcgatccaccccggctacggcttcctgtccgagaacgccgatttcgccgagcgcgtcgagcagtcgggcttcacgttcatcggcccgcgcccggacacgatccgcatgatgggcgacaaagtcaccgcgaagcagacgatgatccgcaccggcgtgccttgcgtgccgggctcggacggcgcgttgccggaagatccgaaggagatcgtgaaaattgcgcgcacggtcggctatccggtgatcatcaaggcggcaggcggcggcggcgggcgcgggatgcgcgtcgtccataccgaggcggcgctcgtgaacgcggtcaacatgacgcgcgaggaagcgggccgcgcgttcggcaatccgcaggtctacatggagaagttccttgaaaatccgcgccacatcgagattcaggtgctctccgattcgcacaagaacgcggtgtggctcggcgagcgcgactgctcgatgcaacgccgccaccagaaggtaatcgaggaagcgcccgcgcccggcatcgcgcgccgcctgatcgaccggatcggcgaccgctgcgcggacgcgtgcaagaagatgggctacctcggcgcgggcacgttcgagttcctgtacgagaacaacgagttctacttcatcgaaatgaacacgcgcgtgcaggtcgagcatccggtgacggagctgatcacgggcgtcgacatcgttcaggagcagatcaagatcgcggcgggcgagaagctgtcgttccggcagcgcgacatccagttccgcggccacgcgatcgagtgccgaatcaacgccgaagatccgttcaagttcacgccgtcgccgggccggatcacgtcgtggcacaccccgggcggccccggcatccgcgtcgattcgcacgcgtacaatggctatttcgtcccgcccaactacgattcgatgatcggcaagctgatcgcctacggcgccacgcgcgagcaggcgatcaaccggatgcgcatcgcgctgtcggaaatggtggtcgaaggcatcctgaccaacatcccgctgcatcgcgagctgatgctcgactcgaagttcgtcgaaggcggcccgagcatccactacctcgagaaccggctcgcgcagaagccgcaggccgcgccggaagaagcg

SEQ ID NO: 13867 - DNA, 1239 bp, Burkholderia mallei
atgaagatctacgcggtgggcggcgcgatccgcgatgcactgctcggcctgccggtgcgcgaccgcgattacgtcgtcgtcggcgcgacgcccgagcagatggccgcgcagcgcttcaggccggtcggcaaggattttccggtgttcctgcatccggatacgcacgaggaatacgcgctcgcgcgcaccgaacgcaagacggcggccggctatcacggcttccagttctattacgcgcccgacgtcacgctcgagcaggatctcgtgcggcgcgacctgacgatcaacgcgatggcgcgcgaagtgagcccggacggcgcgctcgtcgggccggtcgtcgatccgttcggcgggcaggcggatttgcgcgcgaagctgttccggcacgtcggcgacgcgttcgtcgaggatccggtgcgcatcctgcgcgtcgcgcgcttcgccgcgcgcttcgccgagttcgccgtcgcgcccgacacggccgcgctgatgcgcgcgatggtcgacgcgggcgaggtcgacgcgctcgtgcccgagcgcgtgtggcaggagctcgcgcgcgggctgatggaggcgaagccgtcgcggatgttcgcggtgctgcgcgagtgcggcgcgctcgcacggatcctgcccgagatcgacgcgctcttcggcgtgccgcagcgcgccgactatcacccggaggtcgacacgggcgtgcacgtgatgatggtgatcgatcacgcggcgaagcagggctactcgctgccggtgcgtttcgcggcgctcacgcacgacctcggcaaggcgacgacgcccgccgacgtgctgccgcgtcacatcggccacgaggggcgcagcgtcgatctgctgaagccgctgtgcgagcggctgcgggtgccgaacgagtgccgcgatctggcgctcgtcgtcgcgcgcgagcacggcaatctgcatcgcgtgatggagatgggcgcggccgcgctggtgcgcctgctcgagcgcgcggatgcgctgcgcaagccggcgcgcttcgccgaggcgctgcaggcgagcgaggccgacgcgcgcggccggctcggcctcgagacgaagccctatccgcaggccgaacggctgcggcaggcgctcgtcgccgcgcgcgcggtcgatgcgggcgcgatcgcgcaggggctcgcgggcgagcccgcgaagatcaaggatgcggtgcaccgggcgcgcgtgcgcgcggtcgcgcaggcggttggcgtggccgat

SEQ ID NO: 13868 - DNA, 366 bp, Burkholderia mallei
atgatccagaccgaatctcggcttgaagtggccgacaacacgggtgcgcgtgaagtcatgtgcatcaaggtgctcggcggctcgaagcgtcgttatgccagcattggcgacatcatcaaggtgagcgtcaaagaggcaacgccgcgcgggcgcgtgaagaaaggcgaaatctacaacgccgtggtggtccgcaccgccaagggcgttcgtcgtcaagacggctcgctgatcaagttcgacggcaacgccgctgtgcttttgaataacaagctcgagccgatcggcacccgtatcttcgggccggtgacgcgtgagctgcgtagcgaacgattcatgaagatcgtgtcgctggcgccggaagtgctg

SEQ ID NO: 13869 - DNA, 2556 bp, Burkholderia mallei
gtgctcgaggcgcgcctcgtgcgccgcccatccgacatgcctattatcaaacgaccgccttcctcccgcgccacgaacgagcaccattattcgctgcgacgctcgccggccggcgcctattacaccgatgacgacgatgatgacgagcgcgcgccgcgccgcacgggccgcgacggcggctcgcgcacgttcggctcgcgcgtcgcgctgtggttcgccgggctcttcgcgacgctgctcgtcgtcggcgcgctgatcgtaggctatgcgctggtggtgatggggccgcaactgccgtcgctcgacgcgctcacgaattaccagccgaaggtgccgctgcgcgtgtacagcgcggaccacgtgctgctcggcgaattcggcgaggagcgccgcagcctcgtgcgcttcgcggacatccccgacgtgatgaagaaggcggtgctcgcgatcgaggattatcgcttctacgagcacggcggcgtggatttcgtcggcatcctgcgcgcgggtgtggccgatctgctgcatggcggcgcgcggcagggcgcgagcacgatcacgatgcaggtcgcgcgcaacttcttcctgtcgagcgagaagacgtacacgcgcaagatctacgagatgctgctcgcgtacaagatcgaaaaggcgctgacgaaggaccagatcctcgagctgtacatgaaccagatctatctgggccagcgcgcgtacggcttcgcggccgccgcgcgcgtgtatttcggcaaggacctgaaggacgtcacgctcgccgaggccgcgatgctcgcggggctgccgaaggcgccgtccgcgtacaacccggtcgtcaacccgaagcgcgcgaaggtgcgtcaggagtacatcctgaagcggatgctggagatcggctacatcacgcagcagcagtacgatcaggcggtgaaggaggaaatccacgtgcgcacgccgggtaaccagtacgcggtgcacggcgagtacgtcgccgaaatggtgcggcagatgatgtatgcgcagtacaaggacgaaacctacacgcgcggcctgaccgtcacgacgacgatcaacgcggccgaccaggaagccgcgtaccaggcggtgcgccgcgggatcatggattacgagcgccgccacggctatcgcgggccggaaggcttcgtcgcgctgccgcccgccggcgacgagcgcgacgaggcgatcgacgacgcgttcgcggatcatcccgacaacggcgatctgcagtcggccgtcgtgctcgccgtctcgccgacggcggtcgacgtgcagttcgtcggcggcgcgacggcgacgatcaacggcgccgggctgcgtttcgcggccggtgcgttgagcgcgcgcgcgtcggctacgctgaagatcaagccgggttcgatcgtgcgcgtgatgaaggacgcgaggagcgcatggcagatcgtgcagttgccgcaggtcgagggcgcgctcgtcgcggtcgcgccgcaggacggcgcgatccgctcgctcgtcggcggcttcgatttcaacaagagcaagttcaaccacgtgacgcaggcatggcggcagccgggctcgtcgttcaagccgttcatctattcggcgtcgctcgaaaagggcctcgggcccgcgacgatcatcaacgacgcgccgctctatttcccgccgagcgtgccgggcggccagccgtgggagccgaaggacgacgatcagccggacggcccgatgccgatgcgcaccgcgctgcagcgctcgaagaacctcgtgtcgatccggattctggcgtcgatcggcacgtcgtatgcgcaggactacgtgacgcagcgcttcggcttcgatcccgcgaagacgccgccgtatctgccgatggcgctcggcgcgggcctcgtcacgccgctgcagctcgcggcgggctacgcggtgttcgccaacggcggcttcaaggtcgatccgtatctgatcgccgaagtcgacgacgcgcgcgggcaggcgctgcaaaaggcgcagccggtggtcgcgggcgcgagcgcgacgcgcacgatcgacgcgcgcaacgcctacgtgatgaacagcctgctgcacaccgtcgcgacggcgggcacgggcgccggcacgaacgcgctcggccgcggcgacctgcagggcaagaccggcacgacgaacgaggcgaaggacggctggttcgccggctatcagcagtcgctcgtcgccgttgcatggatgggcttcgatcagccgaagagtctcggcagccgtgaattcggcgcgcagctcgcgttgccgatctgggtgaattacatgcgcaccgcgctcaacggcgtgccggagcagcagatggcgatgccggacgggctgacaacgatcgacggcgagctgtattacgcggatcgcacgccgggcgcgggcttcgtcgcgagcgtcgatttcaatccggccgcgagcccgaccgtgagcgcgaacgacgcgctcggctcggcgggcgcggcgggcctgacgccgccgcccgtgacgccggaggagaagcggcagatcatcgacatgttcgaaggcaacaagcct

SEQ ID NO: 13870 - DNA, 636 bp, Burkholderia mallei
ttgtctccgcttgacgcggtagaccgcaagactaccacgccagttcactccccatcgaatcggttgcccttcgtgcagcaccactcggtcgagaatcgccacgccgacttcgggcgcgagcgcttcgaaatccttgattgtcagcacccgcacgttcggcgtgttgtgccactgatagggcagcgatttcgataccggcatccggcctcgcagcaccgacagccggtgcgcccaatagccgaagttcgggaacgacacgatgcattcgcgcccgacgcgcgcggtttcgcgcaggatcgcggccgtctggtggatcgtctgcagcgtttgcgacaggatcgcgaaatcgaagctgtgatcctcgaacaggcgcaggccgtcctccagattctgctggatcacgttgatgccgttcttcacgctcgcgagcacgcccgcatcgttgatctcgacgccgtagccggacacttcgagctcctcggtcaacagcgacagcagcgagccgtcgccgcaaccgagatcgagcaccgtcgagcgcggctcgacccagcgcgcgatcgcgcgaaagtccgcgcgcgcggacagcgtgttcagcgcctgttggttcatgcgcccacctcctcggcaatccgttcg

SEQ ID NO: 13871 - DNA, 1788 bp, Burkholderia mallei
atgacggtcgtccgtcaggtagaattgacgtattcgggcggcgcgccatgcgccccctccccttttcttcccctgttccgcatgagcaccgaacgcaacgacgccaccgcgccttccaatttcatccgcaacatcatcgacgacgacaaccgcacgggcaaatggagcgggcgcgtcgaaacgcgctttccgcccgagccgaacggctatctgcacatcggtcatgcgaagagcatttgcctgaacttcagcgtcgcgcgcgactacggcggcgtgtgccatctgcgcttcgacgatacgaatccggaaaaggaaagcgtcgagtacgtgaactcgatcgtcgacgcggtgcgctggctcggcttcgactggcagaaggccggcgtcgaccatcaatacttcgcgagcgactactacgacaagctctacgaattcgccgagctgctgatccagcgcggctgcgcgtacgtcgacagccagagcgccgacgaaatgcgcacgaaccgcggctcgctcaccgagccgggcacgccgtcgccgttccgcgaccgctcgcccgacgaaaacctcgcgctgtttcgccggatgaaggcgggcgagttcgccgaaggcgagcacgtgctgcgcgcgaagatcgacatgagctcgccgaacatgaacatgcgcgacccggtgatctaccggatccgctacgcgcatcactaccggacgggcgacaagtggtgcgtgtacccgatgtacgactacacgcactgcatctcggatgcgctcgaaggcatcacgcactcgctgtgcacgctcgaattcgaggatcaccgcccgctctacgactgggtgctcaaccagctcgccgacgccggcgtgttcgcgcggccgctgccgcagcaaatcgaattctcgcgtctgaacctcacctatgcgatcacgagcaagcgcaaattgctgcagctcgtgacggaaggccacgtcgacgactgggacgatccgcggatgccgacgatcgtcggcgtgcgccgccgcggcttcacgccggagagcatccagctgttctgcgagcggatcggcgtgacgaaggtcgattcgtggatcgacatgagcgtgttcgaaggcgcgctgcgcgacgatctcgacgacaaggcgccgcgcacggtcgccgtgctcgatccgctcaagctcgtcatcgacaactacccgcaaggccagagcgaggaatgcacggcgcccgtgcacccgcaccacccggagcgcggccagcgcacgttcccgatctcgcgcgagctgtggatcgagcgcgaggatttcagcgagcatccgccgaagggctatttccggctattcccgggcaacaaggtgcggctgcgctacggctacgtgatcgaatgcacgggcgcggacaaggacgagcacggcaacgtgaccgccgtgcactgcaactactatccggacagcaagtcgggcaccgaaggcgcgaacaactacaaggtgaagggcaacatccactgggtgagcgccgcgcacgcgtgccccgccgaagtgcggatctacgatcgcctgttcaaggaaccgcatccggacgcgggcgggcgcaacttcctcgaggcgctgaatccggattcgaagaagatcgttcaggcgtacctcgagccgggcgcgcgcgacgcgctgccggaggcgcgctatcagttcgagcggcacggctacttcgtcgccgatcgcgtcgattcgaagcccggccagccggtgttcaaccggatcgtcggcctgcgcgacagctggggcaagccggcc

SEQ ID NO: 13872 - DNA, 921 bp, Burkholderia mallei
atgatctacagcatgacgggctacgcgagcgcgacgcgcgatctcgcgacggcctccggcaatggcggcacgagcgtatcggttgagttgcggaccgtgaattcgcggttcctcgacctgaatttccggatgccggacgatgtgcgcgcgtgcgagccggcgctgcgcgagatgctgatgaacaagctgtcgcgcggcaaggtggacgtgcgcatcaacctgcagcgcggcgatcagagcgtgaacgccggcgcgctgaaccatgcggcgctcggccagctcgccgagctcgagcgcgcggtgctcgacgcgtttccgggcgtgggccgcctgcgcgcgggcgagatcctgcgctggcccggcgtgctcgccgagagcggcgtgtcggccgacgcgctgcgcgaagcggtgctcgcgtgcggcaaggaagcggtcgccgagctcgtcgtcgtgcgctcgcgcgagggcgcgcagctcgcgacgatgctgctcgggaacgtcgccgagatggaggcgatcgtcgcgcgcatcgcgccgctcgtgccggagctgatcgccaagcatcagcagaagatcgtcgagcggctgcaggaggcgctcggcgtcgcggcgccggaaggcggcgcgcccctcgtgtcgcgcgaggaggcggccgagcgcatccgtcaggaagtgacgatgtacggcatccgcatcgacatcgcggaagagctgtcgcgcctcaccgcgcatctgaacgagacgcgccacgtgatcgagaagggcggccgcgtcggcaagcgtctcgacttcatgatgcaggagctgaaccgcgaggcgaacacgctcggctcgaaggcggcggcgaaggagctcgccgacgcgtcgatggcgctcaagctgctgatcgagcagatgcgcgagcaagtgcaaaacctggag

SEQ ID NO: 13873 - DNA, 630 bp, Burkholderia mallei
atgacgatgtcgcacgcatcgcccgacgccgcgcgctcgcgcatcgtcctcgcctcgaacaatcccggcaagctgcgcgagttcgccgcgctcttctcgacggcgggcatcgacatcgtgccgcaaggcgagctcggcgtatcggaagccgacgaaccgcacgcgaccttcgtcgagaacgcgctcgcgaaggcacgccatgcgtcgcgcgcgacgggcctgcccgccgtcgccgacgattccggcctgtgcgtgcccgcgctgctcggcgcgccgggcgtctactcggcgcgctacgcgcagcgcgccggccgcgagaagagcgatgcggcgaacaacgcgtatctcgtcgagcagttgcgcgaggtcgcggatcggcgcgcgtattactactgcgtgctcgcgctcgtgcggcacgcggacgatccggagccgctcatcgccgaagggcgctgggcgggcgagatcgtcgacgcaccacgcggcgcgcacggcttcggctacgatccgcacttcttcgtgccggcgctcggcgcgacggcggccgagctcgatccggccgcgaaaaacgcggcgagccatcgcgcgctcgcgctgaaggcgctcgtcgcgcggctcggagaaattcga

SEQ ID NO: 13874 - DNA, 393 bp, Burkholderia mallei
atgagcatgagtgatcctatcgccgatatgctgactcgcatccgcaacgcgcagatggtcgagaaggtttcggtgtcgatgccctcgtcgaaggtgaaggttgcgatcgcgcaggtcctgaaggacgaaggctatatcgacgatttcgccgtgaaggcggatggcgcgaaggccgagctgaacatcgcgctgaagtactacgctggccgtccggtcatcgagcgcctcgagcgcgtgtcgaagccgggcctgcgcgtgtaccgcggccgtaacgagattccgcaggtcatgaacggcctcggtgtggctatcgtgtcgacgccgaagggcgtgatgaccgaccgcaaggcgcgcgctaccggcgtcggcggcgaagtcatctgctacgtcgct

SEQ ID NO: 13875 - DNA, 957 bp, Burkholderia mallei
tacgcgaacaacgcgaagatcgacgcgttcatcgccgacatggtcgcgcgccacgacttcgatgcgaacgcgctgcatgcgctgttcgcgcgcgtgagctactcggcgaccgccgcgaagctcgtgatgcccgcgccgtcgccagccgtcaagaactggcgcgtctaccagtcgcgctttctcgacgcggtgcgcgtgaacgccggcgtgaaattctggcgcgcgaaccaaggcacgctgcaacgcgcgtccacggaattcggcgtgccgcccgaggtgatcgtcggcatcatcggcgtcgagacgatctacggccgctacatgggcaacttccgcacgctcgacgcgctgacgacgctcgcgttcgactatccgaacacgccgaatcgcgacgcgcggcaggcgacgttccgcaagaatctcgaagatttcctcgtctggacgcgcgacagccagctcgacccgacgggcgtgctcggctcgtacacgggcgcggtcggcatcccgcagttcctgccgagcagcatccgcgattacgcggtcgactacgacggcaatggtcacatcgatctgcgcgcgagccaggccgatgcgatcggcagcgtcgcgaactatctgaagcagcacggctgggaaaccggtcggccggtagtatggaacatcgcgcccgatacgggcagccagggcgtcgcgcaagcggcggcggacggtcgccccgagccgcactgggtgctgtcgcagttgctgcgcgcggggctcgtgctcgacgagccgtccgtgaacatcgcatcggaggcgagcacgcccgtcaccgtggtcgatttgccgacgcccggccgcgcaaccgaatacaagctcggactgcagaatttctacgtgctgacccgctacaaccgcagcttcttctatgcgctcgccgtctatcagctgggtgagcgtgtgaaggcgcagatggaa

SEQ ID NO: 13876 - DNA, 1171 bp, Burkholderia mallei
gcaggccgccgccgcgcgccgcgacgcatggtggcgccgcctgcgcgccgcgccgcacggctacgacctgtttcatgcgctgcgttggctcgatgcgctgtcgcccgagcacgcgccgtccggctacgcgtcgcggccgcgcgacgagccggtgcgcttcggccaggcgccgtcgctcgcgttcgcggccgcgatgctcgccgacgtgcgtgacgacggcccgcgcccgcgcgtcgcgattcacggcttcgggctgttcgggccgaacgggccgctgccgtcgcatctgaccgagtacgcatacgagcgcgcgacgcagcatgacgatccgaccttcgccgcgttcgccgacctgtttcatcatcggctgatcctgctgttctatcgcgcatgggccgatgcgcagccgaccgtcagcctcgatcggccggcgcgcgcgcggttcgaccgctacgtggccagcctgatcgggccgtgcgacgcgttgcttgccgattcaccgcgcggctcacggcccgattcgtccttcgcttcgtcgtccgattcactgcctgattcactgcctgattcactgcctgattcaccgcctgattcatcgcctgattcgccgcctgattcgcggtccgattcgccgtccgatgcgcgcctcgatccgcatcccgactcgccgcgcggcgctggcgcgctcgcgccgcacgcgaagtatcaccaggccggccatctggtgcggcacacgcgcaacccggaggggctcgtgcagatcctgcggcgctatttcggtgtgcgggtacgcatcgtcgagcacgtgccgcactgggtgatgctcgatcgcgcgcagcgctgcgcgatccgcgcgacgcggccgacgcagccgctcggcggcgccgtgctcggccgtgcggtgcgcgacgcgcagtcgcgcttccggatcgtgctcggcccgctgacgctcgacgaataccggcggttcctgccgggcggcgtccatgcgcggcagctcgcgcaatgggtgcgcgaatacgtcggcatcgaattcgactgggacgtgcagctcgagctcgcgcgcggcgaagtgccgacgctcgcgctcggtagccgtcacgggctcggccgcaccgcatggctcggcgagcggctcgaccccggccccgcgcgcgacctcgtgctcggc

SEQ ID NO: 13877 - DNA, 3126 bp, Burkholderia mallei
atgtcgaatcgagcgtatcgcgcgggcccgaccggcgccgccgccccttcttccacgtcttaccgcccgcgcaccttgtggcgcaccgttcgttttaatccgcggtcccttccgcatcacccaacaccaggagttttgcccatgcaaaccaccgacaacgcgacgtcccaattcgaaagcgcggcgagccgccctttcgccgggggcgcacaaggcgcgccggcacttgcgtcgcagacgacgtacgccgactacaaggtgatccgccgcaacggcagcgtggtgtcgttcgaaccgtcgaagatcgcgatcgcggtgacgaaggcgttcctcgccgtcaacggcggccagggcgcggcgtcggcgcgtgtgcgcgaactcgtcgagcaactgacgcaaaccgtcgtgcgcgcgctcgtgcgcagccgcccgaacggcggcacgttccatattgaagacattcaggatcaggtcgagctcgcgctgatgcgcggcggcgagcacaacgtcgcgcgcgcgtacgtgctgtatcgcgagaagcgccatctcgagcgcgttcacgcgggcgaggcggaggctgccgaggcgtcgcccgcgggcggcatcaacgtgacggacaacggcgtcacgcgagcgctcgacctgaacgcgctgcgcgcgctgatcgtgtcggcgtgcgaaggcctgggcgatgcggtgagccccgagccgatcgtcgcggaaacggtcaagaacctgtacgacggcgtgccgatgacgcaggtctacgactcgtcgatcctcgccgcacgcacgatgatcgaaaaggatccggcgtacagccaggtcacggcacgcatcctgctgcacacgattcgccgcgagatcctcggcgaggaagtgacgcaggcggaaatgacgacgcgctacgccgagtacttcccgcagttcctgaagcgcggcgtcgaagccgagctgctcgacgacaagctgctgcagttcgacctgaagcgcctgggcgacgcgctcgacgcgagccgcgacctgcagttcggctacctcggcctgcagacgctgtacgaccgctacttcctgcacgtcgacggcacccgcatcgaaatgcctcaggcgttcttcatgcgcgtcgcgatgggcctcgcgctgaacgagatcgaccgcgaggcgcgggcgatcgagttttacaacgtgctgtcgagcttcgacttcatgagctcgacgccgacgctgttcaactcgggcacgcgccgctcgcagctgtcgtcgtgctacctgacgacggtcgcggacgatctcgacggcatctacgaggcgctgaaggacaacgcgctgctgtcgaaattcgcgggcggcctcggcaacgactggacgcgcgtgcgcgcgctcggctcgcatatcaagggcacgaacggcaagtcgcaaggcgtggttccgttcctgaaggtcgtcaacgacacggcggtcgcggtgaaccagggcggcaagcgcaagggcgcggtgtgcgcgtacctggagtcgtggcacctcgacatcgaggaattcctcgagctgcgcaagaacacgggcgacgatcgccgccgcacgcacgacatgaacacggcgaactggattcccgacctgttcatgaagcgcgtgatggaaggcgccgactggacgctgttctcgccgtcgacctgcccggacctgcacgacaagttcggcgccgagttcgaggcggcctacgtcggctatgaagagaaggtcgcgcgcggcgagatcaagctgttcaagaagatcccggcgcagcagctctggcgcaagatgctcgggatgctgttcgagacgggccacccgtggatcacgttcaaggatccgtgcaacgtgcgctcgccgcagcagcacgtcggcgtcgtccattcgtcgaacctgtgcacggaaatcacgctgaacacgagcgacaccgagatcgccgtctgcaatctcggctcggtgaatctcgtcgcgcacctcgcgaagcaggccgacggcagctatgcgctcgacgaggaaaagctcaagcgcacggtcagtgtcgcgatgcgcatgctcgacaacgtcatcgacatcaactattacgcggtcgcgaaggcgcgcaactcgaacctgaagcaccgcccggtcggcctaggcatcatgggcttccaggactgcctgcacctgctgcgcacgccgtatgcttccgacgaggcggtcgagttcgccgatcgctcgatggaagcggtctgctactacgcatactgggcgtcgaccgagctcgccgaggagcgcggccgctactcgagctaccgcggctcgctgtgggatcgcggcatcctcccgcaggacacgctgaagctgctgaccgaggcccgcggcggctacgtcgaagtcgacacgagcgcgacgctcgactggccggcgctgcgcgcgcggatcgactcgttcggcatgcgcaactcgaactgcgtcgcgatcgcgccgacggcgacgatctcgaacatcatcggcgtgtcggcgtgcatcgagccgaccttccagaacctgtacgtgaagtcgaacctgtcgggcgagttcacggtcgtcaacgagtacctggtgcgcgacctgaaggagcgcggcctgtgggacgaggtgatggtcgccgacctgaagtacttcgacggcatgctgtcgcgcatcgaccgcatcccggcggacctgcgcgcgatctacgcgaccgcgttcgaagtcgatccgaagtggctcgtcgaggcggcgtcgcgccgtcagaagtggatcgaccaggcgcagtcgctgaacatctacatggcgggcgcgtcgggcaagaagctcgacgaggtctacaagctcgcgtggctgcgcggcctgaagacgacgtactacctgcgcacgatggcggcgacgcacgtcgagaaatcgacggtcgcgcacggcgcgctgaacgcggtgccgacttcgggcggcacgagcggcggggcggcgggcggcgcgcaaggcgcggcgggcggtttcggcgcggcgggcggcgacgcgccgtcgggtgcgatgaacgcggcgccggtcgaggcggacggtccggtgtgcacgatgcgtccgggcgatccgggcttcgaagagtgcgaagcgtgccag

SEQ ID NO: 13878 - DNA, 369 bp, Burkholderia mallei
atgaaccccgtctccctcttttgcatcgtcacgggcgtgatgctgaacgcctgcgcgcaactgctgctgaaagccggcgtgcgcgccgttggacacttcgaattcacccgtgcgaacattgtgcccatcggcttcaagatcgcgacccaattgccgatcatcggcggcctcggctgctacgtgctctcggtggtcgtgtggatcgtcgggctgtcgcgggtcgacgtgtcggtcgcgtatccgatgctctcgctcggctacgtcgtcaacgcgttcgccgcgtggtacctgttcggcgaggtgctgtcggtgcaacgcctcgtcggcatcggcatcatcctgatcggcgtgttcgtgctcgcgcgcagt

SEQ ID NO: 13879 - DNA, 2817 bp, Burkholderia mallei
atgggccgcaaagccatcgacaacgggcttgacacgtgcgaatcgcgaccgaatcgacacattggccgtccggccagcttcgcgcgccgtcccgacaaggtaaactctcacccaattccgtatacgcagacagatatccgcacgatggccacccaaatcgacgcctcctccgaagcagcagcggctacggccgccgcgcagcacacgccgatgatgcagcagtacctacgcatcaagtcggagcaccccgacacgctcgtgttctaccggatgggcgacttctacgagctcttcttcgaagacgcggaaaaagccgcgcgtctgctcgacctgacgctcacgcaacgcggcgcatccgccggcacgccgatcaagatggcgggcgtgccgcatcacgcggtcgagcaatacctcgcgaagctcgtgaaattcggcgaatcggcggcgatctgcgaacagatcggcgaccccgcgacgtcgaaaggccccgtcgagcgcaaggtcgtgcgcgtcgtgacgccgggcacgctgaccgacgccgcgctgctgtccgacaagagcgacgtgtttctgctcgcgctgtgcgtcggccacaacaaacgcggcgtcgcgtcgaacatcggcctcgcctggctcaatctcgcgagcggcgcgctgcggctcgccgagctcgcgccggatcagctcggcgcggcgctcgagcgcatccggcccgccgagattctcgcggccgacggcacgatcgaatcggtgccggccggcatgggcgcgatcacgcgcgtgcccgcgtggcacttcgatatcgcgtcgggcacgcagcgcctctgcgatcagctcgaagtcgcgagcctcgacggcttcggcgcgcaagcactcacgagcgcgaacggcgcggcgggcgcgctgctgatctacgcagcggccacgcagggccagcagcttcgccacgtgcgcagcctcaaggtcgaaaacgaatccgaatacatcgggctcgatccgtcgacgcggcgcaatctcgagctcaccgagacgctgcgcggcaccgaatcgccgacgctctattcgctgctcgacacctgctgcaccgcgatgggcagccgcctgttgcgccattggctgcatcatccgccgcgcgcgtcggtcgccgcgcaggcgcgccatcaggcaatcggcgcgctgctcgacgcccccccgaacgccggcctcgacagcctgcgctcggcgctgcggcaaatcgccgacgtcgagcggatcaccggccgcctcgcgctgctatccgcgcggccacgcgatctgtccagcctgcgcgacacgttcgccgccctgcccgcgctgcgcgagcgcgttgccgagatcgcatcgaacgcggccgcgctcggccgcctcgaagccgcgctcgagccgccgcccggttgcctcgatctgctcacgcgcgccatcgcggccgagccggcggcgatggtgcgcgacggcggcgtgatcgcccgaggctacgacgccgagctcgacgagttgcgcgacatttcggagaactgcggccagttcctgatcgatctcgaaacgcgcgagcgcgcacgcaccggcatttcgaacctgcgcgtcgagtacaacaaggtccacggtttctatatcgaagtcacgcgcggccagaccgacaaggtgcccgacgactaccgccgccgccagacgctcaagaacgccgagcgctacatcacgcccgagctgaagacgttcgaggacaaggcgctgtccgcgcaggaacgcgcgctcgctcgcgaacgcgcgctgtacgacggcgtgctgcaagcgctcctgccccatatcgagggttgccagcgcgtcgcaagcggcctcgccgaactcgatctgctcgcggcgttcgccgagcgcgcccgcacgctcgactgggtggcgccggaattcaccgacgagatcggcatcgaaatcgatcagggccgccatccggtcgtcgaggcacaggtcgagcaattcatcgcgaacgattgcgccctgaaccccgagcgaaagctgctcctcatcaccggcccgaacatgggcggtaaatcgacgttcatgcgtcagaccgcgctcatcgcgctgatggcgtacgtcggcagctacgtgccggcgaaagccgcgcgcttcggccccatcgaccgcatcttcacgcgcatcggcgcggcggacgacctcgcgggcggccgctcgacgttcatggtcgaaatgacggaggccgccgcgatcctgaacgacgcaacgccgcacagcctcgtgctgatggacgaaatcggccgcggcacatcgacgttcgacggcctcgcgctcgcctgggcgatcgcacgccatctgctgtcgcacaaccgctgctacacgctgttcgcgacgcactacttcgagctcacgcaactgccggcggaattcccgcaggcggcgaacgtgcatctgtccgccgtcgagcacggtcacggcatcgtattcctgcatgcggtcgaggaagggccggcgaatcagagctacggcctgcaggtcgcgcagttggcgggggttcccgcgccggtgattcgcgccgcgcgcaagcatctcgcgcacctcgaacagcagtccgccgcccaggcgacgccgcagctcgatctcttcgccgcaccaccggtcgtcgacgagccggaatgcaacgagccccccgccgccgcgacgccgcaccccgcgctcgagcgcctgctcgagctcgatccggacgacttgaaaccgcgcgacgcgctcgatctgctttacgaacttcacacactcgcccgctcgggcccggcggatgcgcaacgc

SEQ ID NO: 13880 - DNA, 1191 bp, Burkholderia mallei
atgacgaccgaaggtccatcgcacgatacgcacgatacctccgcgggcattcgcccgcacggcggcctgaaatkcgagctgctgacgaccgacggccgcgcgcggcgcggccgcgtgacgctcaatcacggcgtcgtcgagacgccgatcttcatgccggtcggcacgtacggcaccgtgaaggccgtgcagccgcgcgaactcgacgaaatgcgcgcgcagatcatcctcggcaacacgttccacctgtggctgcgccccggcctcgagacgatcggcgcgcacggcgggctgcaccgcttcatgggctggaacaagccgatcctcaccgattcgggcggcttccaggtattctcgctcggcgatctgcgcaagatcaccgaggaaggcgtcacgttcgcgtcgccgatcaacggcgatcggctgttcctgtcgccggaagtgtcgatgcagatccagaagacgctgaactccgacatcgtgatgcagttcgacgaatgcacgccgtacgcgacgaacggcgtgccgacgacgcaccgggaagcggccgaatcgatgcggatgtcgctgcgctgggcgaagcgctcgctcgacgaattcgagcgcctcggcaacccgaacgcgctgttcggcatcgtgcagggcgggatgtacgaggacctgcgcgacgaatcgctcgccgggctctcggcgcttggcttccacggcctcgcgatcggcgggctgtcggtcggcgagccgaaggaggacatgatgcgcgtgctcgagcacgtcgcgccgcgcctgcccgccgacaagccgcactacctgatgggcgtgggcacgccggaggatctcgtcgcgggcgtcgcggcgggcgtcgacatgttcgactgcgtgatgccgacccgcaacgcgcgcaacggctggctcttcacgcgcttcggcgacgtgaagatccgcaacgcgacgcacaagaattcgctcaagccgctcgacgagacctgcggctgctatacgtgccggaatttctcgcgcggctacctgcatcatctgcaccgcgtcggcgagattctcggcgcgcagttgaacacgatccacaacctgcactactacctcgatctgatgcgcgagatccgcgaggcgattgagacgcacacgttcgaggcgttccaaaagcgcttcgcgcaggaccgcgcgcgcggcgtcgac

SEQ ID NO: 13881 - DNA, 2181 bp, Burkholderia mallei
ttgcggcaggctgcggcgcaggaagcgcgcgagcatcgcgcgcagcgcgtgctggacgagcagcacgggcggcagccccatgttctgttggcgcagcatcgcgtcttgcgtgccgatgagcagcgagtgcgcgaggcccggttcgaggcccggattcgcgccggtggcgagcgcctgcgacagcacgcgctcgaggttcgcgtcgagccccatcacctgcatctcgcccgcgcccggataccactgctgcgtgatcgcgcggccgagcgaaagacgcacggcggccgtgagatcgtaaggatcggtgatgcggcccgcctgctcggacacggcttcgatgatcgtgcgcatgtcgcggatcggcacgccttcgtcgagcaggttctgcagcactttctgcagcgtcgtgagcgagatcgtcttcggcaccagatcctcgacgagcgacggcgcgtccttgccggtccgctcgatgagcgcctgcacttcctgccggccgagcagctcggccgcgtgctggacgacgagatggttcaggtgcgtcgcgacgacggtgctcgcgtcgacgaccgtgtagccgtacacctgcgcctgctcgcgcagcgccgtgtcgatccacacggcgggcagcccgaacgccgggtcctgcgtcggcgcgccgggcagcgcggccgtcacctggcccggattgatcgcgagccactggcccggatacgcttcgcccgtgccgacttcgacgcccttgagcgcgatccggtaagcgttcgggcgcagctcgaggttgtcgcggatgtgaatgacgggcggcaggaagccgatttcctgcgcgaacttcttgcggatgctcttgatccgcttgagcagttcgccgtcggcgttcttgtcgacgagcggaatcagccggtagccgacttcgaggccgagcggatcgatcagcgtcacgtcttcccacgtcgcctcgtggctgtcggccggcagcgcggcgggcggcgcgatctccgcgaccatgcccgccgccttcttcgcggcctcgcgcttggtcatcgtgcgcgacagccagatcgcgccgccgccgagcagcagaaacgcgaagtgcggcatgttcgggatgagccccatcagcacgatgatcgagcctgtgatcatcagcacgcgcgggttcgtgaagagctgcgtggtgagctgcgtgccgatgtcctcgtcggtcgccacgcgcgagacgatcacgccggccgcggtcgagatcacgagcgacgggatctgcgcgacgaggccgtcgccgatcgtgagcagcgtgtagttcttgcccgccgcggcgaagctcatgtcgtgctgggccatcccgacgatgaggccgccgatcacgttgatcgccatgatgatcaggcccgcgatcgcgtcgccgcgcacgaacttcgacgcgccgtccatcgagccgtagaactccgcttcctgcgcgaccgactggcggcgcttcttcgcctgctcttcgttgatgaggccggcgttcagatcggcgtcgatcgccatctgcttgccgggcatcgcgtcgagcgtgaagcgcgcggacacttcggcgatccggcccgcgcccttcgtgatcaccatgaagttgatgatcatcaggatcacgaacacgacgatgccgaccgcgaagttgccgccgacgaggaagtggccgaacgcctcgatcacctggccggccgcgtccgggcccgtgtgaccttcgagcagcacgacgcgggtggacgcgacgttcagcgacaggcgcaaaagcgtcgagaacagcagcacgctcgggaacgcggcgaaatcgagcggcttcatcgtgtacatgctgacgagcagcaccatcaccgacagcgcgatgttgaacgtgaagaacagatcgagcagcagcggcggcagcggcaggatcatcatccccagaatcatgcagatgaggatcggacccgcgagcgcgcgcaggttcgtgcccgcgaacagttgcgcgcgcttgccgaggagtccggccggcatgttcatgcggcacctccggcggcgcggccgccgagcgcgtcttcggcctcttcgcgttcgtcttgcggcgcgacgtgcgcgcccttgtcgagttcggccggcacgtcgagatcgacgggcgtctcgggcgcgatcccaccttcggcgcggaagcgcttgagc

SEQ ID NO: 13882 - DNA, 939 bp, Burkholderia mallei
atgatgcgtatcgtcatcgcattgggcggcaacgcgctcttgcagcgcaatcagccgatgaccgaagtccagcagcgcgagaacgtgaagatcgcggtcgcgcagatcgcgcagatcgcgccgggcaacgagctcgtgatcgcgcacggcaacgggccgcaggtcggcctgctcgcgctgcaaggcgcggcgtaccccgcggtcgcgccctacccgctcgacgtgctcggcgcgcagacggaagggatgatcggctatctgatcgaacaggaaatgggcaacctgctgccgcccgacgcgccgttcgcgacgctgctcacgcaagtcgaggtggatccggccgatccggcgttcgagcatccgaccaagccgatcggccccgtctactcgcgcgacgaggccgagcggctcgcgctggaaaaaggctggcacatcgcgcccgacggcgacaagttccgccgcgtcgtgccgagcccgcggccgcggcgcatcttcgagatccggccggtgaagtggctgctcgagaaaggcacgatcgtgatctgcgcgggcggcggcggcattccgacgcgctacgacgcgaacggcaagctctcgggcgtcgaggcggtgatcgacaaggatctgtgcgcgtcgctgctcgcgcgcgaattgagcgcggacctgctcgtgatcgcgaccgacgtcgacggcgcgtacctcgactggggcaagccgacgcaagcgctgatcgaggccgcgcatccggacgaactcgagcggctcggcttcgcggccggctcgatggggccgaaggtgcaggcggcgatcgaattcgcgcggcagaccggccatgacgcggtgatcggctcgctcgccgacatcgtcgcgatcgccgaggggcgcgccggcacgcgggtcagcgtgaaggtcgacgggattcgctaccgccggccgcgg

SEQ ID NO: 13883 - DNA, 849 bp, Burkholderia mallei
atggcagctagcgaaggcacgcgtgctcgggatccgtccgagtacattgcgcaccacttgcagaatttctccacctcgcatcagacgtcgattttcgatattcacgtctggaatctcgacacgctgttctggtcgatcgtgtgtggcctgatcaccatcctgctgctgcgtcttgccgcccgcaaggcgacgtccggcgtgccgggccgcttccagtgcgcggtcgagatgctcgtcgagatggtcgaagaccaatcgaaggcgatcgtccacggcaatcgcgcattcatcgcgccgctcgcgcttacggtgttcgtgtgggtcgcgctgatgaactccctcgatttccttcccgtcgacctgccgggccgcgtgatcggctggctgggcctgtcgggcatcatttcccatcaccgcatcgttccgaccgccgatctgaacggcacgctcggcatcgcgctcggcgtgttcgtcctgatgctctactacagcatcaagatcaagggcgcgggcggctttgctcacgagttggtgtcggcgccgttcggctcgcacccgctgctgtggatcccgaacctcgcgctcaacatcgtcgaattcgtcgccaagaccgtgtcgctcggcatgcggctgttcggcaacatgtacgcgggtgagctggtgttcctgctgatcgccctcctcggcagcatgtggagcttcggcggcgacgcaacgttcctcggcttcgtcggtcacgtgatcgcgggcagcgtctgggcaatcttccacatcctgattgttctgttgcaggcattcatcttcatgatgctgacgctggtgtatctcggccaggcgcacgacgcgcac

SEQ ID NO: 13884 - DNA, 4236 bp, Burkholderia mallei
atgaaagctttgctcgatctattcaagcaagtccaacaagaagaaatttttgacgcgatcaagatcggtctggcctcgccggacaagatccgctcgtggtcgttcggcgaagtgaagaagccggaaacgatcaactaccgcacgttcaagcccgagcgcgacggtttgttctgcgcgaagatcttcggcccgatcaaggactacgagtgcctgtgcggcaagtacaagcgcctgaagcaccgcggcgtgatctgcgagaagtgcggcgtcgaagtgacgctcgcgaaggtgcgccgtgagcgaatgggccacatcgagctcgcgtcgccggtcgcgcacatctggttcctgaagtcgctgccgtcgcgtctgggcatggtgctcgacatgacgctgcgcgacatcgagcgcgtgctgtacttcgaagcatacgtggtgatcgacccgggcatgacgccgctgaaggcgcgtcagatcatgaccgaagaggattactacaacaaggtcgaggaatacggcgacgaattccgcgccgagatgggcgcggaaggcgtgcgcgagctgctgcgctcgatcaacatcgacgagcaggtcgagacgctgcgcaccgagctgaagaacaccggctcggaagcgaagatcaagaagtacgcgaagcgcctgaaggtgctcgaggcgttccagcgttcgggcatcaagcccgactggatgatcctcgaagtgctgccggtgctgccgccggagctgcgtccgctcgtgccgctcgacggcggccgtttcgcgacgtcggatctgaacgacctgtaccgccgcgtgatcaaccggaacaaccgtctgaagcgtctgctcgagctgaaggcgccggagatcatcgtgcgcaacgagaagcgcatgctgcaggaagccgtcgactcgctgctcgacaacggccgccgcggcaaggcgatgacgggtgcgaacaagcgtccgctgaagtcgctcgccgacatgatcaagggcaagggcggccgcttccgtcagaacctgctcggcaagcgcgtcgactattcgggccgttcggtgatcgtggtcggcccgacgctgaagctgcaccagtgcggtttgccgaagctgatggcgctcgagctgttcaagccgttcatcttcaacaagctcgaagtgatgggcgtcgcgacgaccatcaaggcggcgaagaaggaggtcgagaaccagacgccggtggtgtgggacatcctcgaagaggtgatccgcgagcatccggtgatgctcaaccgtgcgccgacgctgcaccgtctcggcatccaggcgttcgagccggtgctgatcgaaggcaaggcgatccagctgcacccgctcgtctgcgcggcgttcaacgccgacttcgacggtgaccagatggccgttcacgtgccgctgtcgctcgaagcgcagatggaagcacgcacgctgatgctcgcgtcgaacaacgtgctgttcccggcgaacggcgatccgtcgatcgtgccgtcgcaggatatcgtgctgggtctgtactacgcgacccgcgaagcgatcaacggcaagggcgaaggcctttcgttcaccggcgtgtcggaagtgatccgcgcgtacgagaacaaggaggtcgagctcgcgtcgcgcgtgaatgtgcggatcaccgaaatggtccgcaacgaggatacgtccgaaggcgcgccgcagttcgtgccgaagatctcgctgtacgcgacgaccgtcggccgcgcgatcctgtcggagatcctgccgccgggcctgccgttctcggtgctgaacaagccgctgaagaagaaggaaatctcgcgcctcatcaacaccgcgttccgcaagtgcggcctgcgcgcgaccgtcgtgttcgccgatcagctgatgcagtcgggcttccgtctcgcgacgcgtgccggcatctcgatctgcgtcgacgacatgctcgtgccgacgcagaaggaaacgatcgtcggcgacgccgcgaagaaggtgaaggagtacgaccgccagtacatgtcgggtctcgtcaccgcgcaggaacgctacaacaacgtggtcgacatctggtcggcgacgtcggaagcggtcggcaaggcgatgatggagcagctgtcgaccgagccggtgatcgatcgcggcggcaacgagacgcgccaggaatcgttcaactcgatctacatgatggccgactcgggcgcccggggttcggcggtgcagattcgtcagctggccggcatgcgcggcctgatggcgaagccggacggctcgattatcgagacgccgattaccgcgaacttccgcgaaggcctgaacgtgttgcagtacttcatctcgacccacggcgcacgtaagggcctggcggatacggcactgaagaccgcgaactcgggctacctgacgcgtcgtctcgtcgacgtgacgcaggatctcgtcgtcgtcgaggacgattgcggcacgtcgaacggcgtcgcgatgaaggcgctcgtcgaaggcggtgaagtcgtcgaagcgctgcgcgaccgtattctcggccgcgtcgcggcatcggacgtcgtcaacccggaaacgcaggaaaccctgtacgaagccggcgcgcttctcgacgaaaccgcggtggaggacatcgagcgcctcggtatcgacgaagtgcgcgtgcgcacggcgcttacctgcgagacgcgctacggtctgtgcgcgtcgtgctacggccgcgatctcggccgcggctcgctcgtgaacgtcggcgaagcggtcggcgtgatcgcggcgcagtcgatcggcgagccgggcacgcagctgacgatgcgtacgttccacatcggcggcgcggcgtcgcgggcggcggtggcttcgtcggtcgaggcgaagagcaacggcacggtgcgcttcacggcgtcgatgcgctacgtgacgaacgcgaagggcgagcagatcgtcatctcgcgttcgggcgaggcgctcatcaccgacgatatcggccgcgagcgcgaacgtcacaagatcccgtacggcgcgacgctgctgcagctcgacggtgcggcgatcaaggccggcacgcaactcgcgacgtgggatccgctcacgcgcccgatcatcaccgagtacggcggtacggtgaagttcgagaacgtcgaggaaggcgtgacggtcgccaagcagatcgacgacgtgacgggcctgtcgacgctcgtcgtgatcgacgtgaagcgccgcggttcgcaggcggcgaagagcgtgcgtccgcaggtgaagctgctcgacgcgaacggcgacgaagtgaagatcccgggcacggagcacgcggtgcagatcggcttccaggtcggcgcgctgatcaccgtgaaggacggccagcaggtgcaggtgggtgaagtgctcgcacgtatcccgaccgaatcgcagaagacccgcgacattaccggcggtctgccgcgcgtggccgagctgttcgaagcgcgttcgccgaaggatgcgggcattctcgcggaagtcacgggcacggtgtcgttcggcaaggacacgaagggcaagcagcgtctcgtcatcacggatctcgagggcaaccagcacgagttcctgatcgcgaaggaaaagcaggtgctcgtccacgacggtcaggtcgtcaacaagggcgaaatgatcgtggacggcccggccgatccgcacgacatcctgcgtctgcaggggatcgaggcgctgtcgcgctacatcgtcgacgaagtgcaggacgtgtaccgtctgcagggcgtgaagatcaacgacaagcacatcgaagtgatcgtgcgtcagatgctgcgccgtgtgcagatcgtcgacaatggcgatacgcgcttcattccgggcgagcaggtcgagcgttcggacatgctggacgagaacgaccgcatgatcgcggaagacaagcgtccggcgacgtacgacaacatcctgctgggtatcacgaaggcgtcgctgtcgaccgattcgttcatctccgcggcatcgttccaggaaacgacccgcgtgttgaccgaagcggcgatcatgggcaagcgcgacgatctgcgcggcctgaaggaaaacgtgatcgtcggccgtctgatcccggccggtacgggtctcgcgttccacaaggcgcgcaaggcgaaggagcaatccgatcgcgagcgcttcgaccagatcgcagcggaagaagcgttcgagttcggcacgccgagcgcgcccgccgaagagccgcagcacccggcggag

SEQ ID NO: 13885 - DNA, 399 bp, Burkholderia mallei
atgaaactgcttgacgctctagtcgaacaacgtatcgccgccgccgccgcgcggggggcgttcgacgatttgccgggcgccggcgcgccgatggagctggacgacgatctgctcgttccggaagaggtgcgcgtcgcgaatcggatcctgaagaacgcgggcttcgtgccgcccgcggtcgagcagttgcgggcgctgcgcaatctgcaggacgagctgcgcgcggtcagcgatcgcgcgacccgttgccgtctgcaggcgaagatgctcgcgctcgatatggcactggaatcgttgcgcggcggcccgatggtcgtgccgcgcgaatactgccgtcgcatcgccgagcggctgtccgagcgtgtgctcggcgacgcgcagggcgaagcgggggcgatg

SEQ ID NO: 13886 - DNA, 684 bp, Burkholderia mallei
atggattatctgaatacgttcgtctacggcatctatccgtacatcgccgccgccatcttcctgttcggcagcctcgcgcgcttcgagcgcgagcagtacacatggaagtccgacagctcgcagttgctgcaccgcggcgcgctgcgcacgggcaacatcctttttcacgtcggcgtgctcggcctgttcttcgggcatctggtcggtctgctcacgccggtggccgtctgggacgcgctcggcgtcacgcaccagttcaagcagctcgtcgcgatgtccgcgggcggcgtgatgggctcgctcgcgctcgcgggcctcgcgatcctgctgcaccggcgcctgacgaacgcgcgcctcgcggccgtcacgcgccgcggcgacaaggtgctgctcgcgtggctgctcgtcacgctggtgctcgggctgtcgacgatcttcgaatcggcgagccacaccgacggccacctgatggtgcaactgatgacgtgggcgcagcacatcgtcacgttccgcggcgacgcggcgagctacgtcgccgatgcgccgtggctcttcaaggcgcacctgttcatggggctctcgctcttcgcgatcttcccgttcacgcggctcgttcacgtatggagcggcttcgcgtcggtcacctacgtcggccgcgcgtggcagctcgtgcgcgcgcgccgc

SEQ ID NO: 13887 - DNA, 1685 bp, Burkholderia mallei
tccccgagtcgcccgccacggcgccaagcgttgcgctcacggcaaacggcaccgaagcgccgggcgcaccgcaagccttcgctccgtcgcccgttcccgcgatgccggcggcccccgccgcggccgacccggcgagcgccgcccccgccgccgagccggtccgcccgagccgcccgcccgcgccgaacgcgttcgagttccacgcgcccgccgcgtcgaacgtggagctgccgacgctcgacctgctcgagcccgcgtccgacacgatcgaggcgatctccgacgagcacctcgcgcaaaccggccagatcatcgagcagcgcctgcaggagttcaaggtgccggtgacggtcgtcggcgcgtcggcgggcccggtgatcacgcgcttcgagatcgagcccgcgctcggcgtgcgcggcagccagatcgtcggcctgatgaaggatctgtcgcgcggcctcggcctcacgtcgatccgcgtcgtcgagacgatccccggcaagacctgcatgggcctcgagctgccgaacgcgaagcgccagatgatccgcctgtcggaaatcctcgcgtcgcgccagtaccagcattccgcgtcgcaactcacgatcgcgatgggcaaggacatcaccggcaacccggtcgtcaccgatctcgcgaaggcgccgcacatgctcgtcgccggcacgacgggctcgggcaagtcggtcgcgatcaacgcgatgatcctgtcgctgttgtacaaggcgacgcccgaggacgtgcggctcatcatgatcgatccgaagatgctcgagctgtcggtctacgagggcatcccgcatctgctcgcgcccgtcgtcaccgacatgaagctcgccgcgaacgcgctcaactggtgcgtcggcgagatggagaaacgctaccggctgatgtccgcgctcggcgtgcgcaatctcgcgagcttcaaccagaagatccgcgacgccgccgcgaaggaaaagaagctcggcaacccgttctcgctcacgccggaagaccccgagccgctgtcgacgctgcccctcatcgtcgtcgtgatcgacgagctggccgatctgatgatggtcgccggcaagaagatcgaggagctgatcgcgcggctcgcgcagaaggcgcgcgccgcgggcattcacctgatcctcgcgacgcagcgcccgtccgtcgacgtgatcacgggcctcatcaaggcgaacatcccgacgcgcgtcgcgttccaggtgtcgtcgaagatcgattcgcgcacgattctcgaccagatgggcgccgaatcgctgctcggccagggcgacatgctgttcctgccgcccggcaccggttatccgcagcgcgtgcacggcgcgttcgtcgccgacgaggaagtgcaccggatcgtcgaatacctgaagcagttcggcgagccgcagtacgaggaaggcattctggacggcccgagcgcggaaggcggcacgcaggatctgttcggcgaagcgccggatgcggaagccgatccgctctacgacgaggcggtcgcgttcgtcgtgcgcacgcggcgcgcgtcgatctcgtcggtgcagcggcagttgcgcatcggctacaaccgcgcggcgcggctcgtcgagcagatggaggcggccggcctggtgtcgccgatgggcatcaacggcagccgcgaagtgctcgcgccgccg

SEQ ID NO: 13888 - DNA, 2466 bp, Burkholderia mallei
atgactgaacagcataattcgcagcccgaaaatagctacggcgcgtcgtcgatccagatcctcgaaggcctggaagcggtgcgcaagcgacccgggatgtacatcggcgacacgtcggacggcaccggtctgcatcacctcgtgttcgaggtgctcgacaactcgatcgacgaggcgctcgccggctactgcaacgacatccatgtgaccatacacgcggacaattcgatctccgtgaccgacaacggccgcggcatcccgaccgacgtcaagctcaacgacaagcacgagccgaagcgctcggccgccgaaatcgtgatgaccgagctgcatgcgggcggcaagttcgaccagaacagctacaaggtgtcgggcggcctgcacggcgtcggcgtgtcgtgcgtgaacgcgctctcgagctggctgcgcctcatcgtgcgccgcgatggcaagaagcacttcatggaattccatcgcggcatcgcgcagaaccgcgtgctcgaggagcgcgacggcgagcaggtctcgccgatgcaggtgatcggcgagaccgagaaccgcggcaccgaagtgcacttcatggccgatccgacgatcttcggcaccgtcgaataccactacgacattctcgcgaagcgcatccgcgagctctcgttcctgaacaacggcgtgcgcatccggctgaccgacctgcgctccggcaaggaagacgatttcgcgttcgcgggcggcgtgaagggcttcgtcgagtacatcaacaagacgaagagcgtgctgcacccgacgatcttccacatcaacggcgagaaggatagcgtgggcgtggaagtagcgatgcagtggaacgacagctacaacgaaaacgtgctgtgcttcacgaacaacatcccgcagcgcgacggcggcacgcacttgaccggcctgcgcgcggcgatgacgcgcgtgatcaacaagtacatcgccgacaacgagatcgcgaagaaggcgaaggtcgagacgaccggcgacgacatgcgcgaagggctttcgtgcgtgctctccgtgaaggtgccggagccgaagttcagctcgcagacgaaggacaagctggtttcgtccgaagtgcgcgcgccggtggaggaagtggtggcgaaggcgctcgaggagtttctgctcgaaacgccgaacgacgcgaagatcatctgcggcaagatcgtcgaagcggcgcgcgcgcgcgatgccgcgcgcaaggcgcgcgagatgacgcgccgcaagggcgtgctcgacggcgtgggcctgccgggcaagctcgcggactgccaggagaaggacccggcgaagtcggaaatctacattgtcgagggcgactcggcgggcggctcagccaagcaggggcgcgaccgcaagttccaggcgatcctgccgctgcgcggcaaggtgctgaacgtcgagaaggcgcgctacgacaagctgctgtcgtccgagcagatcgtcacgctcgtgaccgcgctcggctgcgggatcggcaaggacgactacaacctcgacaagctgcgctaccaccggatcatcatcatgaccgatgcggacgtggacggcgcgcacatccgcacgctgctgctgacgttcttctaccggcagatgccggagatgatcgagcgcggctacgtgtacatcgcgcagccgccgctttacaaggtgaaggcgggccgcgacgagcgctacctgaaggacgataccgagctgaacgcgcacatgctgcgcctcgcgctgcagggctcggagctcgtgccgaccgagaacggcacgccgatctcgggcgacgcgctcggcgagctcgcgcgctcgtatctgctcgcgcggggcgtggtggagcggttgagccgcctgtacgacccggccgcgctcgaggcggtcatggacggtgtcgcgatcgatctgtcgagcgaggcatcgacggaggcgtcggcgaaggcgctggccgccatgctatccgacgattcgaagaccgaagtgcgcgtcgtgccggcttacgatgcggtacgcgagcagcgctcgctgcgcgtggagcgcacgcatcacggcaacgtgcgcgtatcggtgatcgacgaggaattccagcacacggccgattatcagcagctcgtgaacaccgcgaatacgttcaagggcttgatcggcgcgggggcggcgatcaagcgcggcgagcggagctcgaacgtgacggacttcaaggaagcgatgaagtggctgatggccgacgctgagcggaacctgtctaagcagcggtataaggggttgggcgagatgaaccccgagcagctgtgggaaacgacgatggacccggcggtgcggcggttgctgcgcgtgcagatcgaggatgcgattgcggccgatgggatctttaccaccctcatgggggatgaggtcgagccgcgtagggcgtttatcgagaataatgcgctaagggcggggaatattgatgtt

SEQ ID NO: 13889 - DNA, 900 bp, Burkholderia mallei
atggcttacaaaactatcgaagacacgatcggcaatacgccgctcgtgcaactcgtccgcttgccggacgacgagattcgcgcccgcaacaacgtgattctcgcgaagctggaaggcaacaatccggcgggctcggtgaaggaccgtcccgcgctgtcgatgatccgcaaggcggaagagcgcggcacgatcaagccgggcgacacgctgatcgaggcgacgagcggcaataccggcatcgcgcttgcgatggcggcggcgatccgcggctacaagatggtgctgatcatgccggaggatctgtccatcgagcgtcgccagagcatggccgcgtatggcgcggaaatcgtgctgacgccggtgaagggcggcatggaattcgcgcgcgatctcgccgaccagatgcagcgcgaaggcaagggcgtgatcctcgatcagttcgcgaatccggacaatccgctcgcgcattacgagggcacgggccctgaaatctggcgcgagaccgagggccgcgtcacgcacttcgtgtccgcgatgggcacgacgggcacgatcatgggcacgtcgcagtatttgaaggaaaggaatccgaccgtcgagatcgtcggcgcgcagcccgaggagggttcgcggattcccggcatccgcaagtggccggaagcgtatttgccaaagattttcgatcgcagccgcatcgaccgcgtcgagaacgtgagccaggccgcgtccgaagcgatggcgcgcaagctcgcggccgtcgaaggcattttctgcggcatctcgtcgggcggcgcatgcgaagtcgcgttgcgcgtcgcgcggcaggtggagaatgcgacgatcgtgttcgtcgtctgcgaccgcggcgaccgctatctgtcgacgggcgtgttccccgcg

SEQ ID NO: 13890 - DNA, 912 bp, Burkholderia mallei
atgaaacgcgatccgctcggcggcctgcacgtattcatgagcgtcgtcacgcacggcaatttcacgcgtgcggcggcggcgctcggcttgacgccggccgcggtgagcctggcgatcgggcaactcgaaagcgagctgaaagtgaagctcttcagccgcagcacgcgcggcgtgagcctgacggaagccggccagcgctattacgacgcaacggcgcagccctaccggcaggtcgtcgacgcgcgcgacgcgctgaacgacgcgcgcgacgaacccgagggcctgttgcggatcagcgcgctgcacctcgcgaaatcggtcgtgacggccgacgtgctcgccgagttcttccgccgctacccgaaggtgagcgtcgagatccgctacgaggatcatctcgtcgacatcgtcaaggaacgcctcgacgccggaatccgcctcgcggaccggctgcagcccgggatggtgggcgtgaagatcgcgcccgcgctcacgtgcgcgctcgtcgcgacgcccggctatctcgcgcagcacggcgtgccggcgaagctcgccgatctcgcgcggcacatgtgcatccgctttcgctttccgaagagcggccgcctgcacaaatggccgctgcgcgacggccgccgcgacgtcgagctcgacgtcgccggccgcttcgtcagcaccgatacgggcgcggtgatcgacgccgcgcgcgcgggcgcgggcatcgcgttcgtgttcatgcgcgagcgcatcgaggacgacctgcgccgcggcacgctgcgcgaggtgctgccgggcgcgtgccggacgctgccgccgatgtggctctactacgcgaaccgcaagcacgtgccgccgaagctgcgcgcgttcatcgcggtgctgcgcgagcacgcggcggccgacgcgcggcgc

SEQ ID NO: 13891 - DNA, 789 bp, Burkholderia mallei
atgtcggaaaacgacaggaaaaagcgcgagaacgacatcgcgcgaatcgatcgcgcatcgctgctgatcgacgtgcgcaagtcgctcgcgctgccgtcgcggcgcctgttcggcaagcgcatgctgacgcttggcggcctcgcgatgctcaccggctgcacgctgcgcgacgacgcatcggtcgacgactttctcgagaaggtgtcgcgcgcgaacgatcgcgtgcaggcgtggctgttcggcccgacgcggctcgcgcccacgtatgcgaaggcggacatcacgcgcccgtttccgttcaacgcgttctacggcatcgacgacgtgccgcgcgtcgatgcggacggcttccggctcgccgtgtcgggtctcgtcaccggccagcgaagctggagcttgccggcgctgtatgcgctgccgcatgcggagcagatcacgcggcacatttgcgtcgagggctggagcgcgatcggccgctggggcggcacgccgtttcgcgaattcctgcgccgcgtcggcgcggacacgagcgcgaaatacgtcggcttcaaatgcgcggacgactattacgagagcatcgacatggccaccgcgctgcacccgcagacgctgctcgcattcgaatacgacggcaagcggctgccgcccgaatacggattcccgatgaagctgcggatgccgacgaagctcggctacaagaatccgaagcacatcgtggagatattcgtgaccaacgcgtatccgggcggatattgggtcgaccaggggtacaactggttcggcggttcg

SEQ ID NO: 13892 - DNA, 1194 bp, Burkholderia mallei
ttgaccgcgtgggcgcggcgcgcggcgcgattcgcccggttgccgatcggcggccggacggcggtgctcgttcgggcgatgcgggcggcggatgcggagccggcgacgttttggacgcctgcggcgccggtgacgcgcgcggggcgcttgccgtcgccgagccgcccgatgcgcggcgcgcgcgcggcgcgcccgcttgccgccgtcgcggcgttcgcggcgctcgtcgccggcacgctggcgttcgcgcctgccgcccatgccggcgagccgtccgccgtctgccggccgctcgccgacgatccgaccgtatcgcagttcagccgcacgctgcccgcgcggccggcgcgcatcgtcgtgctcgaattcatgttcgccgaggatctcgcggcgctcgacatcacgccggtcggcatggccgatcccgcgtattacccgatctggatcggctacgacgatgcgcggttcgcgcgcgtgtccgacgtcggcacgcgacaggagccgagcctcgaggcgatcgcggccgcgaagccggatctgatcctcggcgtcgggctgcgccacgcgccgatcttcgacgcgctgtcgcggatcgcgccgaccgtgctgttcaagtacagcccgaactacatcgaggatggccggcaggtcacgcagtacgactgggcgtgcgcgatcctgcgcacgatcggttgcctcaccgggcgcgcgcgcgacgcgcgggcggttcaggcgcgcgtcgacgcggggctcgcccgcgatgcgcggcggatcgcggcggccgggcgcgcgggcgagcgcgtcgcatggctgcaggagctcggcctgcccgatcgctactgggcgttcacgggcaacagcgcgtcggcgggcatcgcgcgcgcgctcggcctcgagccgtggccgggcgagccgacgcgcgaaggcaccgcgtacgtgacgtcggaggatctgctgaagcagccggatctcgcggtgctgttcgtgagcgcgaccgagccgggcgtgccgctcgacgcgaagctcgattcgagcatctggcgattcgtgccggcgcgccgggcggggcgggtcgcgctcgtcgagcgcaacatctgggggttcggcggcccgatgtcggcgttgcggctcgccgacgagatgacgcagcgggtgctggcattgccgaagcccgcggccggcgcgccgccgcgg

SEQ ID NO: 13893 - DNA, 686 bp, Burkholderia mallei
atgaaactgactccccgagaaaaagacaagctgctgatcttcacggcggcgctcctcgccgagcgccgccgtgcacgcgggctcaagctcaactatccggagacggtcgcgttcatcaccgccgcgctgatggaagcggcgcgcgacggcaggaccgtcgccgaagtgatgcattacggcacgacgctgctcacgcgcgacgacgtgatggaaggcgtgcccgagatgattcccgacatccaggtcgaagcgacgtttcccgacggcacgaagctcgtgaccgtccaccacccgattccgtgaaggcgcgtcatgattcaccgcatggttcatttcctcccgccgtccggcagcaggctccgcacccttcgcacgccacgccggagggccgcatgattcccggcgaactcgtcatcgacgacggcgagcacacgctgaacgccggccgccacacgatcgcgctcgtcgtcgcgaacacgggcgatcgcccggtgcaggtcggctcgcactatcacttccacgaagtcaacgatgcgctgtcgttcgatcgcgcggccgcgcgcggctttcggctgaacatcgcggcgggcaccgcggtgcgcttcgagccgggccagacacgcacggtcgagctcgtcgagctcggcggcgcccgcgccgtctacggcttccagggcaaggtgatg

SEQ ID NO: 13894 - DNA, 366 bp, Burkholderia mallei
atgctttcagcggttatctcttccgaacatagctacccggcgatgcgactggcgtcacaaccggtacaccagaggttcgtccactccggtcctctcgtactaggagcagcccccttcaaacttccaacgcccacggcagatagggaccaaactgtctcacgacgttttaaacccagctcacgtacctctttaaatggcgaacagccatacccttgggaccggctacagccccaggatgagatgagccgacatcgaggtgccaaacaccgccgtcgatatgaactcttgggcggtatcagcctgttatccccagagtaccttttatccgttgagcgatggcccttccatacagaaccaccggatcac

SEQ ID NO: 13895 - DNA, 267 bp, Burkholderia mallei
atgcttcaacaagaaacgaccatcgtgaacaaattggggctccatgcgcgcgcgtcggccaagctcacgcagctcgcgggcaatttccaggcggaagtctggatgacgcgcaacggccgccggatcaatgcgaagagcatcatgggcgtcatgatgctggcggcgggcatcggcagcacggtgacgatcgagaccgaggggccggacgagcgggaagcgatggacgcgctcctgaagttgatcgccgacaaattcggcgaaggacag

SEQ ID NO: 13896 - DNA, 189 bp, Burkholderia mallei
gtgcgggcggtcccgagcgcgtgcgcatcgaccccggttgcgctcgcgattccgtgccatcgcgtcgtgcagaaaggcggctcgctcgccggctaccggtggggctgcccgcgcaaggcggcgctcctcgatgccgaggcgcagcgcgcggcgggcgaatccgtcgaatccgccgtggaccacgcagct

SEQ ID NO: 13897 - DNA, 507 bp, Burkholderia mallei
atgcaagcgaaagttcaggctgacgagcgcgacgacggccttcgcgaaaaaatgatttcggtcaatcgcgtgaccaaggtcgtgaagggtggccgtattctcggcttcgccgcactgaccgtggtcggcgatggcgacggccgcgtcggcatgggcaagggcaaggcgaaggaagtgccggtcgccgttcagaaggcgatggagcaggcccgccgcaacatgttcaaggtgccgctgaagaacggtacgctgcagcacgaagtgcacggcaagcacggcgcgtcgacggttctcctcgcgccggcgaaggacggtaccggcgtgatcgccggcggcccgatgcgcgcggtgtttgacgtgatgggcgtgcagaacgtcgtcgcgaagagccacggctcgacgaacccgtacaacctcgttcgcgcgacgctggacggcctgcgcaagcagtcgaccccggccgacatcgcggcgaagcgcggcaagtccgtcgaagaaattttgggc

SEQ ID NO: 13898 - DNA, 1413 bp, Burkholderia mallei
atgggcaaacaagcaatcggtgtggtcggtctcgcggtgatggggcgcaatctggccttgaatatcgaaagccgtggctatgcggtgtcggtctacaaccgcagccgcgagaagaccgacgaactgatcgccgaatttcccgatcgcaagctcgtgccggcccatacgctcgaggcgttcgtcgcgtcgctcgagacgccgcggcgcatcctcctgatggtgaaggcgggcgaagcgaccgacgcgacgatcgcggcgctcaagccgctgctcgacaagggcgacgtgctgatcgacggcggcaacacgcatttcaccgacacgattcgccgcaaccaggagctcgcgcaggcggggctgcatttcatcggcacgggcgtgtcggggggcgaggagggcgcactgcgcgggccgtcgatcatgccgggcggccagcgcgacgcctacgatctcgtcgagccgatcctcgagcagatcgccgcgaaggcgccggcggacggggagccgtgcgtcgcgtacatggggccggacggcgcgggccattacgtgaagatggtccacaacgggatcgagtacggcgacatgcaactgatcgccgagagctacgcggtgctcaagcaggtcgcgggcctgacgaacgacgagctgggcgcggtctacgccgaatggaaccagggcgaactcgacagctacctgatcgagatcaccgcgaagatcttcggcaagaaggacgacgaaacgggcgagcatctcgtcgacgtgatcctcgaccgcgccgcgcagaagggcaccggcaagtggacgagccagaacgcgctcgacctcggcgtgccgttgccgctcatcaccgaatcggtgttcgcgcgcgtgctgtcgtcgctgaaggcgcagcgcgtcgcggcgagcgaggtgttgagcgggccgtcgcccgcgccgctcgaaggcgatcgcgccgcgttcgtcgagtcggtgcgccgcgcgctgtatctgtcgaaggtgatctcgtacgcgcagggcttcgcgcagctcgatacggcgtcgaaggaatacggctggaacctcgatctcggcacgatcgcgaagatcttccgcgcgggctgcattatccgcgcgcgtttcctgcagaagatcaccgatgcgtatgcgaagaacgccgcgctcgcgaacctgctgctcgacccgtatttccaggacatcgcggcgaactatcagtccgcgctgcgcgacgtcgtgatcgccgcggtgaaggcgggcgtgcccgtgccggcgttcgcgtcggcggtcgcgtacttcgacagctaccggtccgcgcgcctgcccgcgaacctcgtgcaggcgcagcgcgatttcttcggcgcgcatacgttcgagcgcacggacaagccgggcagtttccacgcgagttgggccgag

SEQ ID NO: 13899 - DNA, 1038 bp, Burkholderia mallei
gtgtgcggtgcaggcgggcggcgcaggccgcccgccattgagaaacaggctcccatgtctgacatccccttcgcgtcgacgcgatccggcggccaggcgcccatgcgcgcgccgagccgttacggcgacatcgtgttcggcggcctcacgcgcgtcgcggcgatcgtgacgctactcctgctcggtggcatcatcgtgtcgctcatcgtcgcatcgatgccgaccatcgaaaaattcggtctctcgttcctgtggcacgccgaatgggaccccaattcggatacgtacggcgcgctcgtgccgatctacgggaccatcgtcacgtcgatcatcgcgctcgtcatcgcggtgcccgtgagcttcggcatcgcgctctttctcaccgagctgtcgcccgtctggctgcgccggccgctcggcgtcgcgatcgagctgctcgccgcgatcccgtcgatcgtctacgggatgtggggcctgctcgtgttcgcgccgatcttcgcgacgtatttccagaagcccgtcggcgcgctgctcggcccgattccggtcatcggcgcgctgttccaggggccgccgatcggcatcggtatcctgtccgccggcgtgattctcgcgatcatgatcattccgtacatcgcctcggtgatgcgcgacgtgttcgaggtgacgcccgtgctgctgaaggagtccgcgtacggcatcggctgcacgacctgggaagtgatgtggaagatcgtgctgccctatacgaagacgggcgtgatcggcggcgtgatgctcggcctcggccgcgcgctcggcgagacgatggccgtcacgttcgtcatcggcaatacgaacctgctcgataacgtgtcgctgtactcgcccggcaacagcatcacgtcggcgctcgcgaacgagttcgccgaagcggcgccggggctgcacacgtccgcgctgatggagctcggcctcatcctgttcgtgatcacgttcgtcgtgctcgcggtctcgaagctgatgctgctgcgcctcgagcgcggggagggccgcaaa

SEQ ID NO: 13900 - DNA, 977 bp, Burkholderia mallei
actggaggccgccgcccgtcgtgtcgatcgtcgtgccgacgtaccggcggccggagctgctcgaacgctgcctcggcgcgctcgcgtcgcaggtgttcgatccgggcacctacgagatcgtcgtcgtcgacgacgatgcggccggcagcgcgcgccccgtcgtcgatgcgctgaccgtgcgcatgggcgggctgcccgcgatccgttacgtgagcgcgccgcgcacgcagggcccggccggcgcacgcaacgcgggctggcgcgaagcggcgggcccggtgatcgcgttcaccgacgacgacacgatcgccgatccgctatggctgcgcaacggctgctcggcgctgctcgcgcagcccaacgcgtcggccgcggccgggcgcatcgaggtgccgctcgcgccgtgcccgaccgattacgagcgcgacgcgggcgggctcgcccacgcggagttcgcgaccgcgaactgtttcgtgcggcgcgcggcgctcgagcgcgtcggcggcttcgacgagcgcttcacgcgcgcgtggcgcgaggacgcggacctgatgttcgcactgcgcgagcgcgcggggccgatcgtcgacgcgcgcacggcgacgatcgtgcatccggtgcggcccgcgcgctggggcgtgagcatcgcgcagcagtcgaaagtgtttttcgacgcgctgctgtacaagaagcatcgcgacgtctaccgtcggcacatccgctccgtgccgccgtggcattactacgcggcggtgctcgcgctgctcggcgcgtgcgtcgcgctcgcgctcggcctgcatgcggccgcggccgcgtgcgcggcggcctgggccggcatcacggcggcgttctgctggcggcgcctgcgcggcaccgcgcacacgccgtcgcacgtcgcggagatgatcgtcacgtcgatcgcgattccgcccgtgtcgctgtactggcggctgcgcggcgcgctccacttccgggtg

SEQ ID NO: 13901 - DNA, 891 bp, Burkholderia mallei
atgcgcattgtcctcatcaccggcatctccggctccggcaagtccgtcgcgctgaacgcgctcgaggacgcgggctactattgcgtcgacaacctgccgccgcacgtgctgcccgagctcgcccgctacctcgcgcacgaaggccagaaccggctcgccgtcgcgatcgacgcgcgctcgagcgcatcgctcgacgaaatgccgggcctcatccgcgcgctgtcgcacgagcacgacgtgcgcgtgctgttcctgaacgcgagcacgcaggcgttgatccagcgcttctccgagacgcgccgccgccatccgctgtcgggctcgccgtcgcacgacgcggacgtcggccttctcgtgtcgctcgaggaagcaatcgagcgcgagcgcgagctcgtcgcgccgctcgccgagttcggccatcagatcgacacgagcaacctgcgcgcgaacgtgctgcgcacgtgggtcaagcgcttcatcgagcagaagaacgacgatctcgtgctgatgttcgaatcgttcggcttcaagcgcggcgtgccgctcgacgccgatttcatgttcgacgtgcgcgcgctgccgaacccgtactacgaccacgagctgcgcccgctcaccgggctcgaccagccggtcgtcgcgttcctcgacgcgctgcccgtcgtccatcagatgctcgacgacatcgagacgtttctcgtcaagtggctgccgcatttccgcgaggacaatcgcagctacctgaccgtcgcgatcggctgcacgggcggccagcatcgatcggtgtttctcgcggagacgcttgccgcgcgtctgtcgcggcaggccagcgtgatcgtgcggcatcgtgacgcgcccgtcgccgtggacgcgtcgtcgcggctcgtgacc

SEQ ID NO: 13902 - DNA, 273 bp, Burkholderia mallei
gtgatcatgcaagctttcatcgccaacatccaaggtctgaccgccatcggtatcggcatcatcatcggcctgggtgcaatcggcgcctgtatcggtatcgcgctgatgggcggcaagtacatcgaagcctgcgcgcgtcagccggaactcatcaacccgctgcaaacgaagatgttcctgctggctggtctgatcgacgcggcgttcctgatcggcgtcggtgtggccatgctgtttgcattcgcgaacccgctcctgtcgaagctcgcaggc

SEQ ID NO: 13903 - DNA, 986 bp, Burkholderia mallei
atgcataaccggatcgccgacggccgggtcaagttccggcacctgcagtgctttctcgccgttgcgcagttcggcagcgtgcagaaggccgcgcacagcctgtcgatcacgcagcccgccgtgtcgaagacgatcgccgagctcgaatcgatcctcggcgtgcggctgttcgagcgcggccggcagggcgcgcggcccacgcgcgagggccagcttttcatgccgcacgcgagcgcgtgcgtgctcgcgctgcggcagggcgtggggctgctcgcgcgcgagggcggcggcgcggcggccactctcgagatcggcatgctgccgaccgtcgccgcgtcgctcgcgcccgccgtgctgaaaacgctcgcggccgaatggccgcgcgcggttgtgcggatcacgaccgtcgcgaacgccgagctgctcgagcggctgaaggcgggggcaatcgaatgcgcgatcgggcggctgtcggagcccgagcggatggtggggctgtcgttcgagcatctgtacaacgagccgctcgtcgcggtcgtgcgcgcgggccatccgcttgcggcgagcgcttcgcccgccgcgcagctcgcgcgctatccggtcgtgctgccgccttacggcacgattatccggcaagcggccgagcaattgttgagcgcgtgcggcgcgccgccgctcgaatcgttcgtcgaggtgctgtcggtgtcggtcgcgcgcgcgctcgcgctcgagaacgacgcggtgtggttcgtgccgcgctacgcggccgaattcgatctcgcggccggcacgctcacgcggctcgcgctgcccgtcgacggcgcggacgagccggtcgggctgatcctgcgcaccgacgcgcagccgtcacccgtcgcgcgcgcgctgatcgacgcggtgcgcgcgattgcgcggcggcggcttgccggagcgggcacgacgagcgggcgcgcgcgcggcgcgcgaggcgcgacgggcaaggggcg

SEQ ID NO: 13904 - DNA, 951 bp, Burkholderia mallei
atgactaccgcactcgaccagctcaagcagtacacgaccgtcgtcgccgacacgggcgacttccagcaactcgcgcaatacaagccgcaggatgcgacgacgaatccgtcgctgatcctgaaggccgtccagaaggacgcgtatcggccgatcctcgagaaaacggtccgcgaccatgcgggcgaatcggtcggcttcatcatcgatcgcctgctgatcgcattcggcaccgagatcctgaagctgatcccgggccgcgtatcgaccgaggtcgacgcgcgcctgtcgttcgacacgcagcgctcgatcgacaagggccgcgaaatcatcaagctctacgaagcagccggcgtcggccgcgagcgcgtgctgatcaagctcgcgtcgacgtgggaaggcatccgcgcggccgaggtgctgcagcgcgaaggcatccgctgcaacatgacgctgctgttctcgctcgtgcaggccgccgcatgcgcggaagcgggcgcgcaactgatctcgccgttcgtcggccggatctacgattggtacaggaagcagaaaggcgccgactgggacgaggcgcaggacggcggcgcgaacgatccgggcgtgcagtcggtgcgccgcatctacacgtactacaagcacttcggctaccggaccgaagtgatgggcgcgagcttccgcacgacgagccagatcaccgagctcgccggctgcgacctgctgacgatcagccccgagctgctgcagaagcttcacgacagcaccgaggcggtcgcgcgcaagctgtctccggacgaagcgagggatgcgaggctcgagcgcgtcgcgatcgacgaatcgtcgttccgcttccagctgaacgacgacgcgatggcgaccgaaaagctcgccgaaggcattcgcctcttctcggcggatgcggtgaagctcgagaagatgatcgaggcgctgcgc

SEQ ID NO: 13905 - DNA, 624 bp, Burkholderia mallei
atggtgtttgacgagttgatcactgaatttgaccgtgggctgcgctcgatcgcgggtgtgagccggatgagccgcccggtgcccaagcccgcagccgcggcgcctgccgagctttccgcggccgagcgcaagcatgcggcggggttgatgcgggtgaatcacgtcggcgaagtctgcgcgcaggcgctctatcaggcgcagaagctcacgacgtcttcggccggactgaaggagatgttcgagcatgcggcgcgcgaggaagaggaccatctcgcgtggaccgcgcatcgattgaaagacctcgattcgcggccgagcctgctgaatccgctgtggtatgcgggcgcgctcgcgatcggcgtcgtcgccgggcgtctcggcgacaaggtgagcctcggcttcatggccgagacggagcggcaggtggagagccaccttgacggccatctgtcggagctgccggcggccgatgccgagtcgcgcgcgatcgtcgagcagatgcgcgccgacgaggtcaagcacggcaagtcggcgaccgacgccggcggcatcgagctgccgatgccggcgcgcatgctgatgcgcgcggcatccaaggtcatgacaagcactgcatactatctg

SEQ ID NO: 13906 - DNA, 432 bp, Burkholderia mallei
atggaattgaataacctgaagccggcggaaggcgcgaagcatgcgaagcgtcgcgttggccgcggcatcggttccggcctcggtaagacggccggccgtggtcacaaggggcagaaatcgcgttcgggcggctttcacaaggtcggcttcgaaggcggtcagatgccgctgcaacgtcgtctgcccaagcgcggcttcacatcgctgacgaaggaattcgtcggtgaagtgcgcctcggcgacctcgagaagctgccggtcgacgaaatcgatctgctcgctctgaagcaagccggcctcgtcggcgagctgatcaagagcgcgaagatcatcgcgacgggcgagctcaagcgcaagatcgtcgtcaagggtctcggcgcgacgaagggtgcgcgcgccgcgatcgaagcggccggcggttcgtttgccgag

SEQ ID NO: 13907 - DNA, 816 bp, Burkholderia mallei
atgccagagttgccggaagtcgaggttacgcgccggggcatcgagccgttcgtcgccgggcggcgcgtcgagcgcgtcgacgtgcgcaccgccatgctgcgctggcccgtgcccgccggcttcgccgagatgctccgatcgcgcgaggtgctgcgcgtcgagcggcgcggcaagtatctgctgttcgaagtcgacgccggctggttcatcgtccatctcggcatgacgggcacgctgcgcgtgctgccgaacgacgcgccgccgcccgcgccggcgaagcacgatcacgtcgactggattttcgacgaattcgtgctgcgctttcgcgatccgcgccgtttcggcgcggtgctctggcatccgcgcgacgcgggcgacgtgcacgcgcatccgctgctcgcgagcctcggtgtcgagccgttctcggccgcgctcctcttcggccgcacgcgcgggcgcacggtgtccgtcaagcaggcgctgctcgcgggcgacatcgtcgtcggcgtcggcaacatctatgcgtccgagagcctctttcgcgcgggcatccggccgaccacggcggcggggcgcgtatcgctgccgcgctacgagcggctcgccgacgcggtgcgcgcgacgctcgccgacgcgatcgagcgcggcggcagcacgctgcgcgacttcgtcggcagcaacggcgagagcggctatttccagctcgactgcttcgtctacgatcgcgcgggcgagccgtgccgcgtctgcggcgcgccgatccgccagatcgtccaggggcagcgatccacctatttctgtccgaattgtcagcgt

SEQ ID NO: 13908 - DNA, 1494 bp, Burkholderia mallei
atggtacaaacgggtcgcttcctcgtcatgccgcttctttcatccgaccattgccgcgcattgccgcccgaggtgtcccgtccgcgctacgaccggcgcgcgctgcgcacgggcatcgtccatctcgggctcggtgcgttccaccgtgcgcaccaggcgtgctataccgagacgctcgtcgagcggggcgacctgcgctggggcatcgccggcgtcgaattgcggcggcggcacacggtcgaacggctcgccgcgcaggaccatctctattcggtgaccgagcgcgcgggcgacgcggcgcgcacgcgcgtcgtcggcgcggtgcatcgcacgctgttcgcgccgcaggcgctcgcgacgctgctcgggctgatcgccgatccgtccgtgtcgatcgtcagcctgaccgtcaccgagaagggttattaccggcggcccggcggcggggggctcgacctcgacgatcccgcgatccgccgcgacctcgcgcaaccgcacgcgccgtcgacgacgctcggcgtgctcgcggcgggcatccggctgcgtgcggcgcacgcgccgctatcggttctcagttgcgacaacatgccgtcgaacggcgacacgctgcgcgcgctgctcgcgcaatacgcggagcagaccgacggcgcgctcgcgcggcggattcggtgcgacgtcgcgtttccgaacacgatggtcgaccggatcgtgcccgccgcgacgcccgaatcgctcgactgggtgcagtcgcgtatcggcgtgcgcgacgaggcggcgatcgtctgcgagccgttcgcgcaatgggtgttcgaggaccgcttcgcgggcgcacggccgcgctgggaggacgcgggcgcgctcgtcgcggccgacgtgcggccgtacgagaagatgaagctgcgcctgctgaacggctcgcactcggcgatcgcctatgccgggcagttgcgtgggcggcgcacggtgtccgacgcgatggccgatccgctgatcgacgcgctcgcgcgcggcgtgatgacgcgcgagctgctcgcgacgctcgacgtgccggccggctacgacgtgcgtgcgtattgcgcgtcgctgatcgagcgttttcgcaacccggcgctcgcgcaccgcaccgcgcaaatcgcgacggacggcacgcagaaggtgccgctgcgctggctgccggcgctggccgagagcgcggcggcgggcgtcgagcggccgtttctcgagcgctcgctcgcgatgtggctgcattacgtggaagtcgcgcgcgacgagagcggccggccgctcgtgctcgaggatccgggcgcgcaggcgctggcggcacgtctgcacggcgcgccgggcgcgaccgatgcggtgcgcgcggcgctcgggctgatcgcgtcgcgcgatgcggcgcgatggcccgaggcgctgacggcgcgcgtcggcgcgcatctggagacggtgcgcacgcgcggcaccgacgcgctgctgcggccgttgctcgacgct

SEQ ID NO: 13909 - DNA, 1362 bp, Burkholderia mallei
atgaagaacttgcagcgccatctgagcgcgcggcacatccgctttctcgcgctcggctcggcgatcggcacgggcctcttctacggctcggcgtccgcgatccggctggcgggccccgccgtcatcctcgcttacatcgtcggcggcgcggccgtctacatggtgatgcgcgcgctcggcgaaatggcggtgcgcgagcccgtgccgggctcgttcggccactacgcgaccgagaacctcggcccgttcgcgggcttcgtcaccggctggacctacacgctcgagatggtgatcgtcgcgatcgccgacatcaccgcgttcggcatctacatgggcttctggtttccgcacgtcccgcagtggatctgggtgctcgcgatcgtcgcgatcatctgcgggctgaacctctgccacgtgaaggtgttcggcgagctggagttctggctgtcgatcgtcaaggtcggcgcgatcgtggcgatgatcggcggcggcgcggcgatcctcttcaccgggatgaggctcggcagcggcggcgcgccgtcgctcgcgaacctgtggtcgcacggcggcttcctgccgaacggcgtgggcggcctcgtcgcgtcgctgtcggtcgtgatcttcgcgtacggcggcatcgaagtgatcggcatgagcgccggcgaggcgaaggagcccgagcgcgtgatcccgcgcgcgatcaacgcggtgccgatgcgcatcctgctcttctacgtgctgacgatgatcgtgctgatgtcgatctttccgtggacgggcgtcggcgcgaacggcagcccgttcgtgcagatcttctcggcgctcggcgtgcgctccgcggccgagatcctgaacctcgtcgtgatcagcgccgcgatctccgcgatcaacagcgacatcttcggcgcgggccgaatgatgtacgcaatggcgctgcagggccaggcgccgcgcgcgctcgccgcgatgtccgcgcgcggcgtgccgtgggtcacggtgctcgtgatggcgggcgcgctgctcgtcggcgtcgtgctcaactatctgatgccgaaggacgtgttcctgatggtcgccgcgagcgcgacgttcgcgaccgtgtgggtctggctgatgatcctgctgtcgcaggtcgcgatgcgccgccggctcggcgcggccgaggtcgccgcgctgaagttcaaggtgccgttctggcccgtcggccccgcgctcacgatcgcgttcatggcgttcgtgatcgcgatgctcggctacttcgacgatacgcgcgtcgcgctcttcgtcggcgccgcgtggctcgcgatcctcgcgctcgtgttctacacgcggatccggccgcggctcgccgccgtcgcgcgc

SEQ ID NO: 13910 - DNA, 1407 bp, Burkholderia mallei
atgacccagactcgcccttcccgttcccgcgcatccggcgcgcccgctcgtgcgccgcgcctgtcggcgctgcatctcgttcccgattcgctaggcttcgcgctcgacggcgccgcgcaggcggtcgacgcggtcgatcgcggcgccgcgctgcccgcggcgctcgccgccgttcacgcagcgctgccttcgaacgcgcaggcggcgtcgcgcggcgcgatccaggacatcgggtatcgcgcgatgcgccgccgcggcacggcggactggctgatcgcgcaactcgtcgcgaaggcgccgccggcgcacgtgcatgcgcttctcgtctgcgcgttcgcgctcctcgtcgacgacgagcacgccgcttatgcgcccttcaccgtcgtcgatcaggccgtgaccgcgatcggcgcgcgccgcgagtgctcgtttgcgaaggggctcgtcaacgcggtgctgcgccggtttctgcgcgagcgggccgcgtggctcgagcggctgcaggccgatcggcgcgcgctttggaactacgagccgtggtggatcgatgccgtcgagcgcgcgtggcccgatgcatggcagcgcattctcgccgcgggcgatgcgcccggcccgctcacgctgcgcgtgaatgcgcgccggatgacggcggacgcgtatctcgacacgttgcgcgccgagcggatcgacgccgagaagatcggccttcacgcgatacggcttgcatcggcgcggcccgtcgagcgcattccgggcttcgcggacggcatcgtgtcggtgcaggacgccggcgcgcagctctcggccgaatggctcggcgcgcgcgacggcatgcgcgtgctcgacgcgtgcgcggcgcccggcggcaagacgggccacattctcgagctcgcgcacgccgaggtggtcgcgctcgaaagcgatccggcgcgcgcgccgcgcatcggcgaaaatctcgcgcggctgtcgctcacggccgacgtgcgcgtcggcgacgcggcagaccccgcgcaatggcacgacggacgtccgttcgaccgggtcctcgccgatgtgccgtgctccgcgtcgggcatcgtgcgccgccatccggacatccgctggctgcgccgcgcggccgacattcccgcgctcgtcgccgagcagcggcgcatcctgagcgcgctctggccgctcgtgaaacccggcggagagttgctgtacgtgacctgctcgatctttccggaagagggcgagctgcaggcgcgctggtttggagacgcctgtcaagatgcggtacgattggacgcgcccgggcagttgctgccgcagggcgcgacaggcggggcgccggccgtcgggggatcgggcgagtccggccggcatgtcgatcacgacggatttttctacgcgcgctttcagaaacgg

SEQ ID NO: 13911 - DNA, 726 bp, Burkholderia mallei
atgcgccaaatgctggaagccggtgtccacttcggtcaccagacgcgcttctggaacccgaagatggctcctttcatcttcggtcaccgcaacaagattcacatcatcaacctcgaaaagacgctgccgatgtacaacgacgcgctgaagtacgtgcgtcagctcgcagcgaatcggggcacgatcctcttcgtcggcacgaagcgccagtcgcgcgacacgatcgcgcaggaagcgctgcgcgcgggcatgccgtacgtgaacgcacgctggctcggcggcatgctgaccaacttcaagacgctgaaggtatcgatcaagcgcctgaaggacatggaagcggcggtcgaggcgggcgagctcgagaagatgagcaagaaggaagcgctgctgttcgaacgcgaaatcgcgaagctgcagaagtcgatcggcggcgtgaaggacatgggcggcattccggacgcgatcttcgtcgtcgacgtcggctatcacaagatcgccgtcaccgaagcgaacaagctgggcgtgcccgtcatcgcggtggtcgacacgaaccactcgccggaaggcgtggactacgtgatcccgggtaacgacgattcgagcaaggcggtcgcgctgtacgcgcaaggcgtcgccgacgcgatcctcgaaggccgtgcgaacgcggtcaacgaagtggtccaggcggtgcgcggcgacgacgaatacgtcgaggaaaacgcg

SEQ ID NO: 13912 - DNA, 1269 bp, Burkholderia mallei
atggcggacaagaaaggttcgaacagcgagaagctgttgtattgctcgttttgcggcaaaagccagcatgaggtgaagaagctcatcgcggggccgtcggtattcatctgcgatgaatgtatcgacttgtgcaacgagatcatccgcgacgaagcggccgcggcgggcgtcgaagccagcctgtccaaatccgacctgccgagcccgcaggagattcgcgacatcctcgatcagtacgtgatcggccaggagcgcgcgaagaagatcctcgccgtcgccgtctacaatcactacaagcgcctgaagcatctcgacaagaaggacgatgtcgagttgtcgaagagcaacatcctgttgatcggcccgacgggctccggcaagacgctgctcgcgcagactctcgcgcgcctgctgaacgtgccgttcgtgatcgccgacgcgaccacgctgacggaggccggttatgtcggcgaggacgtcgagaacatcatccagaagctgctgcagaactgcaactacgaggtcgagaaggcgcagcgcgggatcgtctacatcgacgaaatcgacaagatcagctgcaagtcggacaacccgtcgatcacccgcgacgtgtcgggcgagggcgtccagcaggcgctgctcaagctcgtcgagggcacgatggcgtcggtgccgccgcagggcggccgcaagcacccgaaccaggatttcatccaggtcgacaccaccaacatcctgttcatttgcggcggcgcgttcgacggcctcgagaaggtgatcaccgaccgcaccgaaaagaccggcatcggtttcggcgcgacggtcaagagcaagcaggagcgggacgcgggcgaagtgctgcgcgaggtcgagccggaagacctgatcaaattcgggttgatccccgagctgatcggtcgtctgccggtggtcgcgacgctcggcaagctcgatgaagccgcgctgatgaagattctcgtcgagccgaagaacgcgctcgtcaagcagtatcagaagctgttcgcgatggagcgggtcgaactcgagattcgtccggacgcgctgcaagccgtcgcccgcaaggcgatccgccgcaagacgggcgcgcgcgggctgcgttcgatcatcgagcaggcgctcctcgacgtgatgtacgaactgccgacgctcaagggcgtcagcaaggtgatcatcgacgacaatgtcatcgaaggagacggcaagccgttactgatctatgaggacacgccgaaagtggcgggttcgaat

SEQ ID NO: 13913 - DNA, 261 bp, Burkholderia mallei
atggcacacaaaaaagcaggcggctcttcccggaacggccgcgactccgagtcgaagcgtctcggcgtcaaggtgtatggcggccaggcgatcaacgcgggcggcatcatcgtgcgtcaacgcggcacgcgcatgcatgcgggcgaaaacgtcggcatgggcaaggaccacacgctgttcgcgctggtcgacggccacgtgaagttcacgacgaagggcgcggccaagaagcatacggtcgtcgtcgtcccggccgctgcc

SEQ ID NO: 13914 - DNA, 1347 bp, Burkholderia mallei
gtgaacgactacaacgagcggagtacctggcggcgaatgcgcgccttgctgtcgatcaacgatccccgctggggacgcggcggcaacggcgacaagccgcgcgcgaacgagtcgaagcgcccgaacgggcgcgacgacggccccccggatctcgacgaaatgtggcggaacttcaaccgtcgcctgagcggctggttcggcggcaagggcggcggcaacaacggctttcgtcccgacaacgggcgcgacgcgcgcgtcggcgtcggcatcgtcgcgggcgtgctgatcgcgatctatctcggcagcggcatcttcatcgtccaggacggccagacgggcgtcgtgctgcgcttgggccaatacaagggctcggtcggcgacggcgtccattggcgtctgccgtatccgttcgaatcgcacgagatcgtcgacaccgcgcaggtgcgctcgatcgagatcggccgcaacaacgtggtgcggctcgcgaacgtgaaggacgcgtcgatgctcacgcgcgacgccgatatcgtcgacgtgcgcttcgccgttcaatatcgggtcgggtcgcccaccgactatctgtttcacgccgtcgatcccgagcgcagcgtatcgcaggccgcgcaggcggcggtgcgcgagatcgtcggtgcgaggcgcgcggacgaggtgctcgcgcaggatcgcgacgcattgcgcgacgcgctttcgaaagcgatccagcgcgacctcgaccgctaccgcacgggcctcgtcgtgacgggcgtgaccgtgcaaagcgtttcgccgcccgagcaggtgcaggccgccgtcgacgacatcgcgaaagcgcgtcaggacagcgaggccgcgaagaacgccgcgcaggcgtatgcaagcgaattgctgccgcgcgcgcagggcgacgcggcgaagatggtcgacgacgcgaagtcgtacgccgagcgcgtcgtcgcgcaggccgagggcgacgcggaacgcttcaagcaggtctacgcgcagtactcgaaggcgcccgcggtgatccgcgagcggatgtatctcgagacgatgcaggagatctattcgaacacgacgaaggtgtacgtcggcaacaaggcgggcaacagcgtgctgtatctgccgctcgacaagatcgtcgaggcgggccgccagcgtgccgccgaggccgcgagcgccggcgtcgcgccgcccgcgagcggcgcgcaagcgcccgcgccggcgtcggccgcagccgccgcgagcgcgccgcgcgtggcggcgcccgcggcggcgagcccggcgtccggcagcgattcgcgctcgcgcgaggcgttgcgcagccggtcgcgcaccgacgatctgcag

SEQ ID NO: 13915 - DNA, 3522 bp, Burkholderia mallei
atgtcagatccccgtttcgttcacctccgcgtccactccgaattctcgattgccgacggcatcgtgcgtctcgacgatatcgtcaagtcggcggccgaagacggtcagggcgcgcttgcactgaccgacctcggcaacgcgttcggtctcgtccgtttctacaaggaagcccgcgatgcgggcatcaagccgatcgccggctgcgatgtctggatcaccaaccacgacgatcgcgacaagccgtcgcggctgctgctgctcgtcaaggacaagcgcggctacctgaacctctgcgagctgctgtcgaaggcgtggctcacgaaccaataccgcggccgcgcggagctcgacgcgagctggctcgaaggcgagctcgccgaagggctgctcgcgctgtcaggcgcgcagcagggcgacatcggcctcgcgctcgcggcgggcaacgaggcggccgcgcgccgccacgcgcagcgctgggcgcgggtgttcccgggcggtttctatatcgaattgcagcgctacggccagccgggcgcggaagcgtacatccagcaggcggtgacgatcgcggcggagctgaagctgcccgtcgtcgcgacacatccgctgcagtacatgacggccgacgatttcaccgcgcacgaggcgcgcgtgtgcatctcggaaggcgacatcctcgcgaatccgcgccgccagaaacgcttcacgaccgagcagttcttccgcacgcagggcgacatggccgcgctgttcgccgatctgccctcggcgctcgcgaacacggtcgagatcgccaagcgctgcaacctgacgctcgagctcggcaagccgaagctgccgcggttcccgacgcccgacggcatgtcgctcgacgactacctcgtgcagttgtcgcaggaagggctcgacaaacgcctcgtgcagctctacccggacgaggccgagcgcgaagcgcaacgcgggaagtacaaccagcgtctcgatttcgagtgcggcacgatcaagaagatgggctttccgggctacttcctgatcgtcgcggacttcatcaactgggcgaagaacaacggcgtgccggtgggccccgggcggggctcgggcgcgggctcgctcgtcgcgtattcgctcggcatcaccgacctcgatccgctgcgctacaacctgctgttcgagcgcttcctgaacccggagcgggtgtcgatgcccgacttcgacatcgacttctgccagcacggccgcgaccgcgtgatccagtacgtgaaggagaagtacggcgcggacgcggtgtcgcagatcgccaccttcggcacgatggccgcgaaggcggccgtgcgggatatcggccgggtgctcgatctcggctacatgttcaccgacggcgtcgcgaagctgatcccgttcaagccgggcaagcacgtgacgatcgccgacgcgatgaaggaagagccgctcctgcaggagcgctacgacaacgaggacgaagtccatcagttgctcgatctcgcgcagcgcgtggagggcctcacgcgcaacgtcgggatgcacgcgggcggcgtgctgatcgcgcccggcaagctgaccgatttctgccccctctacacgcagggcgacgaaggcggcgtcgtcagccagtacgacaaggacgacgtcgaagccgtcggcctcgtgaagttcgactttctcggcctcacgacgctcacgattctcgactgggccgagcgctacattcgccgtctcgatccgagcaaggagaactggtcgctcgcgcaggtgccgctcgacgatccgacgtcgttccagatcctcaagaaggccaacacggtcgccgtgttccagctggaaagccgcggcatgcaggggatgctgaaggacgcgcagcccgaccgcttcgaggacatcatcgcgctcgtgtcgttgtaccggccgggcccgatggacctgattccgagcttctgcgcgcgcaagcacgggcgcgagaaggtcgactatccggatccgcgcgtcgagcctgtcctgaaagagacctacgggatcatggtctatcaggagcaggtgatgcagatggcgcagatcatcggcggctattcgctcggcggcgcggacttgctgcgtcgcgcgatgggcaagaagaagcccgaggagatggccaagcatcgcgagatcttcgccgagggcgccgcgaagaacggcctcacgcgcgagaagtccgacgagatcttcgacctgatggagaagttcgcgggctacggcttcaacaagtcgcacgcggccgcgtacgcgctgctcgcgtattacaccgcgtggctgaaggcgcaccatccggccgaattcatggcggccaacatgacgctcgcgatggacgacaccgacaaggtgaagatcctgttcgacgattgcctcgtcaacggcctcgccgtgctgccgcccgacatcaaccgttcgaacgatcgcttcgagcccgtcgccgaggccgacggcaaacgctcgcgcacgatccgctacggcctcggcgcgatcaagggcagcggccagaacgcgatcgaggagatcctgcgcgcacgcgaggaaaagccgttcgccgatctgttcgatttttgcgagcggatcgaccgccgcgtcgtgaaccgccgcacgatcgaagcgatgattcgcgcgggcgcattcgattcgctgcacgagaatcgcgcgcagttgctcgcatcggtgccgctcgcgatggaggccgccgagcaggcggccgcgaacgcgctgcaggcgggcctgttcgacatcggcggcgtgcccgcgcaccagcatgcgctcgtcgacgagccggcgtgggacgacaagcgtcgcctgcaggaagagaagggcgcgctcggcttctacctgtccggccacctgttcgacgcgtatcgcgacgaggtgcgccgtttcgtgcgccagaagctcggcgagctgaaggaagggcgcgacaaggtggtggccggcgtgatcgcgtcgttgcgcacgcagatgacgcagcgcggcaagatggtgatcgcgttgctcgacgacggcaccggccagtgcgaagtcaccgtgttcaacgagcagttcgacgcgaaccgcgcgctcttcaaggaggacgagctgctgatcgtccaggggcaggcgcgcaacgacgcgttcacgggcggaattcgcttcaccgccgagtcggtgatggacctcgagcgtgcgcgcagccgctacgcgcaggcggtgcggatgacgatgaacggcaacgcggacgcggcggcgctgcgccgcgtgctggaagcgcacgtcgcgaaacccgacgagacgccgcccgccgcggcgccggcgccgcgcggcggtcgcgacggcgggcggcgggcgcaggcggcgataccgaatggtctcgccgtgcggatcgcatacagcaacgcgcgtgcgcaaggcgagatgcgcctgggcgacgcatggcgcgtgaagccgagcgacgcgttgctcgccgatctgcgcgcggcgttcggcggcagcgtcgtcgagatcgtctac

SEQ ID NO: 13916 - DNA, 2925 bp, Burkholderia mallei
atgaagctcgaacacccggaccgcctgatgaaccgcacgcccctctcgctcgccgcgctcgaaacgcacgacgcgttcgccgaacgccatatcggccccgacgccgccagccagcaggccatgctcgacacgctcggcttcgcgacgcgcgccgcactgatcgacgccgtgatccccgcgtcgatccgccgcgccgaaacgctgccgctcggcccgttcgcgcagccgaagagcgaagccgaagcgctcgccgcgctgcgcgcgctcgcggacaagaaccaggtgttccgctcgtacatcggccaaggctactacgacacccacaccccggcggtgatcctgcgcaacgtgctcgaaaacccggcgtggtacaccgcgtacacgccgtaccaacccgaaatctcgcagggccgcctcgaggcgctgctgaacttccagcagatggtcgccgacctgacgggcctcgagatctccaacgcgtcgctgctcgacgaagccacggccgcagccgaagcgatgacgctgctgcaacgcgtcggcaagccgcagtcgaacgtgttctacgtcgccgacgacgtgctgccgcaaacgctcgaagtgatcaagacgcgcgcgaagccgatcggcatcgaagtgaagtcgggcccggccgccgacgccgccgccgcgaacgcgttcggcgtgctgctgcaatatccgggcgcgaacggcgacgtgcgcgactaccgcgcgctcgccgacgcgatccacgccgcgggcggccacgtcgtcgtcgcggccgacatcctcgcgctcaccgtgctcatgccgcccggcgaatggggcgcggacgtcgccgtcggcaacacgcagcgcttcggcgtgccgatgggcttcggcggcccgcacgccgcatacatggcggtgcgcgacgaattcaagcggcagatgccgggccgcctcgtcggcgtgaccgtcgacgcgcagggcaagcccgcgctgcgcctcgcgctgcaaacgcgcgagcaacacatccgccgcgagaaggcaacgtcgaacgtctgcaccgcgcaggcgctgctcgcgatcatggcgagcatgtacgcggtctaccacggcccgcgcggcctgaagacgatcgcgctgcgcgtgaaccgcatcgcggcgctcctcgccgcgggcatcaggcatctcggctacgcaaccgtcaacgacacgttcttcgacacgctgacgatcgacaccggcgcgcgcaccgcgcaactccatgcgttcgcgcaagcgaagcgcatcaacctgcgccgcgcgggcgacacgcgagtcggcgtgtcggtcgacgaaacgacgacgcgcgccgatctcgccgatctgctcacgatcttcgcgcaggccgcgggcgcgacggcgcccgacatcgacgcgctcgacgccgggctcctccccgcgcccgcgctgccgccgagcctcgagcgcacgagcgcgtacctgacgcaccacgtgttcaaccgccaccattcggaaacggaaatgctgcgctacctgcgcagcctgtcggacaaggatctcgcgctcgaccgctcgatgatcccgctcggctcgtgcacgatgaagctgaacgcgacctccgaaatgctgcccgtcacgtggcccgaattcggccggatccacccgttcgcgcccgccgagcagaccgtcggctatcgcgagatgatcgaccagctcgagcagatgctcgtcgcggcaacgggctacgcggccgtgtcgctgcagccgaacgccggctcgcagggcgagtacgcgggcctgctcatcatccatgcgtatcacgaatcgcgcggcgaaagccaccgcgatgtctgcctgattccggcgtccgcgcacggcacgaacccggcgtcggcgcacatggccggcatgaaggtcgtggtggtcgcgtgcgacgcgcaaggcaacgtcgacatcgccgacctgaaggcgaaggccgacgcgcattcgcacgacctcgcggcgatcatgatcacgtatccgtcgacgcacggcgtgttcgagcagaacgtgcgcgagatctgcgagatcgtccacgcgcacggcggccaggtgtacgtcgacggcgcgaacatgaacgcgatggtcggcctcaccgcgcccggccagttcggcggcgacgtgtcgcacttgaacctgcacaagaccttctgcatcccgcacggcggcggcggcccgggcgtcggcccggtcgcggtcggcccgcacctcgcgaaattcctgccgaaccagcgctcgacgggctacgcgcgcggcgaagacggcatcggcgcggtgtcggcggcgccttacggctcggcgtcgatcctgccgatctcgtggatgtacatcgcgatgatgggcgcgaagaatttgaccgcggcgaccgaaaccgcgatcctcaacgcgaactacatcgcgaagcgcctcgcgccgcactatccggtgctgtattcgggcccgggcgggctcgtcgcgcacgaatgcattctcgatctgcgcccgatcaaggattcgagcggcatcaccgtcgacgacgtcgccaagcgcctgatggactacggctttcacgcaccgacgatgagcttcccggtgccgggcacgctgatggtcgagccgaccgaatcggaatcgcaggaggaactggaccgcttcatcgcggcgatgatcgcgatccgcgacgaaatccgcgcagtcgaggaaggccgcgccgaccgcgaggacaacccgctgcgtcacgcgccgcacacggcagccgtcgtcaccgcgaacgaatggccgcacgcgtactcgcgcgagcaggccgcgttcccggtcgcgtcgctcgtcgcgaacaagtactggccgcccgtcggccgcgcggacaacgcatatggcgaccgcaatctgttctgctcctgcgtgccggtatcggattacgcc

SEQ ID NO: 13917 - DNA, 1604 bp, Burkholderia mallei
tgctgctgctcgcgctcgtcgcggccgccggcgccgcgcacgcgcaaagccgctcgggcggcaatccgctggaagccctcccgcagatcaacacgccgcaaaagccgagcgtcaccgtgcaggtcgcgccgcaggaagtccaggtgcaggcgctgctcgcgcgccatctgacgccgagctcgttccaggtcgaaggcgtcaagtcgattccgttcgaagagatctcgcaacgcttcacgccgctcgtcggcaaggacatcacgatcggccagttgatcgagacggcgaacggcgtgaccaagctgtaccaggagcgcggctacgcgctgtcgttcgcgttcgttcccgcgcagacgttcgaaggcggcgtcgtgcgcgtgacggtcgtcgagggctatgtcgcgaacctgaagatcacgggccgccccggcgcgatggagccgaaggtgcgcgcgatcgccgcgcacatcatggccgaccgcccgctgcgccgcgcgacgttcgagcgctacgtcaacacgttcggcctgctgcccggcgtgacggtgaaggcgaacgtgccgccgccgcagaataccgacggcgcgacgacgctcgaactcaacgtcgatcgcaagccgttcaacgtgagcgcgagcctgaacacgaacaatccgggcctgcaggggctgttcacggtgacggagaacggactcacgtcgctcggcgagcagatgagcatctccgcgctgttcccgaaagggccgaacaatcagacgtacgtgtcgttcaacggcgccgtgccgatcggcagcaacggcctcgtcacgcgtctggacgcgagccactaccgcggcaatccgtccgtcgatcagaccgtgctgccgaacgtgcagcgcaccgtgatcaacgacaagctcggcctgtcggcgtcgtatccgctgatgctgagcaaccagcgcagcctgctcggcacggtgtcgggctatgcgtcgcacagcgaggatcgctaccagaaccagagcacgggcgcgacgatcggcatgcgctcgcaggtgcgcgtgctgcagatgcagttcgactacacgagcgtgcagccgaagcaggtgcagaagctgagcttcaacgtcgccaaggcgttcgacatcctgggcgcgtcgaaatcgggcttcacgaacctgccgggcgtcatcgcgacgaaccccgcgtcgacgacgttcgtgcgcacgggcgccacgttcgtgcagacgaacgagtggccgttcaagatcggctcgaccgtgcagctcaccggccagtacagccccgattcgctgccgagcaccgagcagatctcgttcggcgcgcagcgtttcgcgctcggctatcagccgggcgagacgtcgggcgattcgggctggggcgcgtcgctcgagctcaatcgcgcgttcgcgccgggcttcacgtacctgaagaacatcacgccgtacatcgtgtacgacatggcgcgcgtctatctgcattcgggcacgccggtgccgcgccgcctgtcgtcggccgggttcggcgtgcggctgaccgacagccgcttctacaatctcgacgtgtcgatcgcgaagcccgtcggcgacgcgccgatcgaaagc

SEQ ID NO: 13918 - DNA, 3129 bp, Burkholderia mallei
gtggatgtccgtgtgaaagcccgggaagcgctcgttgaaatcgcgcgcgaaccgcaggtagttgacgatcgtcttgttgaagcgctcgcccgggatcaacagcggaatgcccggcggatacggcgtgagcaggatgctcgtcacgcgtccttcgagctcgtcgagcggcacgcggtcgatctcgcggtgcgcgagcttcgcgaacgcgtcggacggcttcatcgccggctccatgttcgacaggtacatctcggtcgtgagccgcgcgatgtcgttcgcgcggtacacgtcgtggatctgcgtgcagagatcgcgcaggccgacgcgctcgtagagcggatactgcgcgacgaactcgggcagcacgcgccagagcggctggttgttgtcgtagtcgtccttgaactgctgcagctcggtgaccatcgagttccagcggcccttcgtgatgccgatcgtgaacatgatgaagaacgagtacaggcccgtcttctcgacgatgatcccgtgctcggccagatacttggtgacgatcgcggccggaatgcccgtttcgccgaactcgccgtcgacgtcgagccccggcgtgatgatcgtcgccttgatcgggtcgagcatgttgaagcccggcgcgagcgggccgaagccgtgccagcggtcgttcggcttgagcagccagtcggcgcgcgagccgattccctcctccgacaggttgtccgggccccacacgctgaagaaccagtcgtcgccgtactcggcgtccaccttgcgcatcgcgcggcgaaagtcgatcgcctcggcgatcgattcctcgacgagcgcggtgccgcccggcggctccatcatcgcggccgcgacatcgcacgacgcgatgatcgcgtattgcgggctcgtcgacgtgtgcatcaggtacgcctcgttgaagcgatgcttgtcgaacgtgcggttctccgaatcctgcaccacgatctgcgaggcctgcgagatgcccgcgagcagcttgtgcgtcgagtgcgtcgcgaacacgagcgcgcccgtgcgcgggcggcccgcgccgatcgcgtgcatgtcctggtagaacggatggaactcggcgtgcggcagccacgcttcgtcgaagtgcagcgtgtcgacgagatcgccgagcagatccttgatctgctcgacgttgtagacgacgccgtcgtacgtgctctgcgtgatcgtgaggatccgcggcttcgcgttcggattcttcctgagcgcctcgcgcgcgaacgggttcgcctcgatcttcttgcggatgttctccggcttgaactcgtcgcgcggaatcggcccgatgatgccgaagtggttgcgcgtcggcgtgaggaacaccggaatcgcgtgcgtcatcgtgatcgcgtgcaggatcgacttgtggcagttgcgatcgacgagcacgatgtcgcccggcgcgaccgtcgcgtgccagacgatcttgttcgacgtcgacgtgccgttcgtcacgaagaacaggtgatcggcgctgaagatccgcgcggcgttgcgctcggacgcggccacgggccccgtgtggtcgagcaactggccaagctcgtcgaccgcgttgcacacgtccgcgcgcagcatgttctcgccgaagaactggtggaacatctggccgagcgggttcttcaggaacgcgacgccgccggagtgccccgggcagtgccacgagtacgagccttcgtccgcgtacttgacgagctccttgaagaacggcggtgcgagcgaatcgaggtagaccttcgcctcgcggatgatgtggcgcgcaacgaactccggcgtgtcctcgaacatgtggatgaagccgtgcagctcgcgcaggatgtcgttcggcagatggcgcgacgtgcgcgtctcgccgtacaggaagatcgggatatccgcgttgcggcggcgcacttcggcgacgaacgcgcgcagctcgatgatcgcggtcgcgagctcgggcagctcgccgtccgcgccgagctcgccgagcatcagttcgtcgtcgtcgatcgacaggatgaagcacgacgcgcggctcgactgctgcgcgaacgacgtgagatcgccgtagctcgtcaggccgagcacctcgacgccttctttctcgatcgcctccgccaacgcccggatgccggagcccgagatgttctcggagcggaaatcttcgtcgatgatgacgacgggaaaacgaaacttcatgggcgattctccaaaaagaacgaccgcggcgcggggggctgttcatgccccggcgcagcggtcacccggactggcgataggtcagaccgatatgcaagcagatcaggttttcggcagcgtgacaccgcgctgtccctgatacttgccgccgcggtcggcataggacacgtcgcagacttcgtcgctctcgaagaagagcacctgcgcgacgccctcgttcgcgtagatcttcgcgggcagcggcgtcgtgttcgagaattcgagcgtcacgtagccttcccactcgggctcgaacggcgtcacgttgacgatgatgccgcagcgcgcgtacgtcgacttgccgaggcacacggtgagtacggtgcgcggaatgcggaaatattcgacggtgcgcgcgagcgcgaacgagttcggcgggatgatgcacacgtcgcccttgaaatcgacgaacgagccttcgtcgaagttcttcggatcgacgatcgtcgaattgatgttcgtgaagatcttgaattcgtccgcgcagcggatgtcgtagccgtagctcgacgtgccgtagctgacgatcttgcggccgtcctcggcggcgcgaacctgatcgggcacgaacggctcgatcatcttgtgctcttcggccatgcgccgaatccacttgtcggacttgatgctcataaaaaggcgccggaaaacgctgctatcgggaaggaagccgccgaacggtccggcggccacgaaaggcgcacattttacgcgatcgtgaacgcaccgactcgcgtcattgccgcacgacgccgcacgcaagcgcgggccccgcgccgtgctgcgggaacgccgggtctgccgggtcgcgatggacgagcaccgagcggccgagcaccgagcgcacgccgtcgagcgcgaggtccggcgcgg

SEQ ID NO: 13919 - DNA, 4116 bp, Burkholderia mallei
atgacgaaggacgtatccgaaccgactcctccccacgcgccggacggcggcgcgcccggcggcccgcgcgagcccgcgccgaagccgcgccgctcgcccggcgcgcgcgcgctcgtcgcgctcgcgtggacggccctcgcgctcgtcgtgctcgtcgcggcgacggcgggcgcgctgctcgccgccgcgacgaccgagcgcggcacgcagctcgcatggcatgccgccgtcaagctgctcggcgggcggctcgcgggcacgctcgaaggcggcgcgctcgcgaccggcgtgcgcatcaggcagcttgcgtggacgagcccggacggttcgggcaccgaagtcaggatcgaccgtctcgccgggcgctgggcgctcacgcgcgcgccatggcgcctgtcgatcgcgtcgctgcgcgcgggcacgatcgacgtgcgcgtcgcgccgtcgccgccttcgccgacggtgatgccgaaggatctgcgattgccgctgcagctcgccgtcgacgatctgcgcttcgacaggttgcggatccacgaagccggctcgacgaccgagctcgacaatctgatcttccacggcgcgagcgacggccgccggcacgatgcgacgctcgagcgcctcgacacgccgttcggcgcgctcaccgcgaacgcgcggctcgacggtgtgcgcccgttcgcgatcgacggcagcgcgacctacgcgggcaagctctcgggcgagagcgtggacgcgcgcgcgcgggtgtcgggctcgctcgaggcgctcgtcgcggagctcgatgcgtcggggatgaagctcgcgggccgcgcgcacatcgaggccgcgccgttcgcggccgtgccgctcacgcgcgcgtcgctcgcgttcgaccacgtgaacccgcgcgcgctgttgcccggcgcgcccgtcgccgatctcgcggtgcgtgcgcagctcgagcccgccgcgcccgagccgaacgcgccgaaggcgttcgtcgtcacggggccggtgtcgatcgtcaacgcgaagcccggcgcgctcggcgacgcgttgctgccgctcgtcgacgcgcacgcgaacgtgcggctcgacgcgcacgcgcagcgcatcgacgcgctcgccgtgcgcacgatccgcgacggcagcgtgacgggtggcggcgcgctcgtgaacggcckcggccggttcgacctgaaggtcgcgaatctcgatctgaacgcgttcgtcgccgcgctgcggccgatgcggctcgcggggcctgtcggcgtcgcgctcgagccgggcgcgcagacgatcgacttcgatctcgccgacgcgaagctcgcgctcggcgcgaaggcgaagatcaagctcgacgcgaagcagacgacgatcgccgacgcgcgcgtgagcgcgggcaacgggcgcatcgaactcgcgggtgcgctcaggcacgatgcgcgctcgacgtatgacctgaaggcgaagctcgtcgatttcgatccgctcgcgctcgccgcggccggcacgccgtcgggcgcgagggcgggctcggcggcgggcggcggcaagggcgcgggcgcggcgaaaggcgcgaagctcgcgcagaccgcggcgggcagccagcgcgccggcgcgaacgccgcgcgggcgggcggcccgcgtgcgggcacggcgcgcgtgaacggcacgctcgccgccacgggcgcgctcgcgcccggcttttcgacgaaggcgcagttcaagctcggcgacagcgtctacgacggcctgccgatgacgggcgaaggtaccgtgcagatggcgggcgcgcggatcctgccgagcaacgcgaacctgtcggtcgcgggcaaccaggtcgcgctgcgcggcagcttcggcgcgcccggcgatcggctgcgctttaacgtcgacgcgccgcagctcgagcgcctcggcttcggcctcgcgggcctcgtgcgcgcgaacggcgaactcacgggatcgttcgcccacccgaacgtcgtcgccgactatacggcgacgggcgtcgtgttcggctcgaaccggatcggctccgcgcaaggccgcgccgacattcgcgacggcgcgaagggcgcgctcgtgttcaccgcggacgcgaacgacatcgcgctcggcgcgatcagcctgaagacgctgtccgcgcacctgaacggcacgcgcgcgaagcatgcgttcgacgcgagcgcggtcggcgtcgccgaagggcgcgtgatcaatctcgcggtcgcggcgaacggcggcgtcgtcgagacgcgcggcgcaatgcgctgggacggcaccgtcacgcgcctgtcgaaccgcggcacgccgtcgatctcgctcgacacgccgcttgcgatctcggcgggcgcgcagcgcgtcacgctgggcgcggcgaagctctccgtcgaaggcgcgacgctcgatttgaaatcgttcacgctcgaacgcggcaagctgcgcactgctggctcgatcacgaacctgtcggtcgcgcgcgcgcttgagatccgcgcggagctcacgggcaagcgctcgccgctgcgcaccgatctgatcctcgacggcgactgggacgtgacgctcggcgacacggccgcgggccatgcgcagatcaagcgccgcagcggtgacgtgacgatcgagaccggtcgcggcgtggccgcgctcgggatcaccgagctgtcggcgcgcgcggcgttcgcgcccggcaatcggctggacgcgaccgtgcgcgcgcgggcgacgcgcatcggcacgctcgacgcgaacgtcgcggtgccgttcgcgttacgcgacggcgtgttcggtgtcgccgaggacgggccgctcacgggccgcatcgacgccgacgtgcccgcgctgaaatcgacgggcggcctgttcgggccgagctatctgctcgacgggcgcgcggcgctcaagctgacggtcgcgggcacgcccgcgaagccgaagctctcgggcacgctcacgggcgatgacctgtcggcgacgctcgtcgaccagggcgtgcagctgaaggacgggatcgtgcgcgtgcgcctgaccgagaatctcgtcgagttccagcaagtcgagttccacggcggcgacggcacgctgcgcgcgatcggccgcgtgcggctcgacggcagcgagccggatctgacggcgagcatcgtcgccgacaagctcgagctcttcgcggcgccggaccgcaagctgtcgctgtcgggcaaggcggtcgtcgagaacgacgcgccgcgcggcgggatcgcgatcaacggcaagttcaccgtcgatcgcgcgctgttcgacctgccggaggaggcggcgccgcacctgtcggacgacgtcgtgatcgtgcgcccgggcagcctcgagcgcggcgcgacgaagacgggcaccgcgatcgcgaagccggcgcccgcgaccgaaaaacccgcgccgtcgctcgcgccgcgcgcgaacatcgacatcggcctcggccgcgatttccgcttcaagggccacggcgcggacctgcggctcgcgggcacggtgaccgtgatgagtgcgcccggcgtgccgctgcgcgcggtcggcaacgtgcgcgtgacggaaggctcgacgtacacgtcgttcggccgcaagctcgcgatcgagaacggtttcttcacgttcaacgggccggtgtcgaatccgggcatcaacatcctcgcgatgcggcgcaaccaggaagtcgaggcgggcgtgcaggtgacgggcaccgtgcagtcgccgagcgtgaagctcgtgtccgagccgaacgtgaacgacaacgagaagctgtcgtggctgctgttcggccacggtaccgatcagggcaacaatctcggccagcagaacgcgatgacgacggcgctcgcgctgcttggcagcgcgaccggcaagcgcgtcgcgcagacggtcgggctcgacgaagtgtcggtcggccgcagcgacgtcgggctgaccgacccgcaggtggtgctcgtgtcgaaggcgatcaatgagcgtttcgtgctcggctacgagcaggggctgcaatcggcgagcaatgcgttcaaggcgacgatcaacctcacgcggttctgggcgatctccgcttacggcggcacgttccagggcgtcgacctcaactacacgcggcgcttcgatcgctgg

SEQ ID NO: 13920 - DNA, 834 bp, Burkholderia mallei
gtgacgccgcgcgccgcatcggcggcgcccgccggcacgtgcgcacgaaggggatcgatgcgaatgggtaaggtgtatctgatcggcgcggggccgggtgcggcggacctcatcacggtgcgcggcgcgcggctgctcgagcaggccgacgtcgtgctgcacgacgcgctcgtcgagcccgcgatgctcgactatgcgccgcgcgcgcgcaggatcgcggtcggcaagcgctgcgggcagcgctcgagcgcgcagcacttcatcaacaagcaactcgtcgacgcggcgcgcgagcacgcggtcgtcgtgcggctgaagggcggcgatccgatgctgttcggccgcgcggacgaggaaatgcgcgcgctcgaagcggcgggtatcgattacgaggtggtgccgggcatcacggcggcgctcgcgagcgccgccgcgctcaagcgctcgctgacgctgcgcggcgtcgcgcgcagcgtcgcgttcgcgacgaagagccgcgcgcccggcagcgacgagattcgcgagcaggtgagcgcggattcgctcgtttattacatggggcgcgacaatgcgcccggcatcgcgcggcaactgatcgacgccgggcgggcgggcgcgacgccggtcgcgatcgtcgaggcgtgcagcacgccgcgcgagcgcatgctgacgctcacgctggccgacatggcggcgggcgccgcgcaggcgtggctcgatccggcgcagccgagcctgctgatgatcggcgacgcgttcgccgaacgcgcgccgcggctcgcggacgagccgccgggcgacgcaggcggcaagcgcgggatgcgcgacgcggct

SEQ ID NO: 13921 - DNA, 1617 bp, Burkholderia mallei
atgcacgacaaaatcctgattctcgacttcggttcgcaagtcactcaactgatcgcgcggcgcgtccgcgaagcgcacgtctactgcgagatccatccgaacgacgtttccgacgacttcgttcgcgagttcgcaccgaagggcgtgattctgtccggcagccacgcgagcacctacgaggaccaccagttgcgcgcgccgcaggcggtatgggatctcggcgtgcccgtgctcggcatttgctacgggatgcagacgatggccgtacagctgggcggcaaggtcgagtggagcgaccaccgcgagttcggctatgcggaagtgcgcgcgcatggccgcacgcgcctgctcgacggcatccaggatttcgcgacgcccgaaggccacgggatgctgaaggtctggatgagccacggcgacaaggtcggcgagatgccgccgggcttcgcgctgatggcgtcgacgccgagctgcccgatcgccggcatggccgacgaggcgcgcggctactacgcggtgcagttccacccggaagtcacgcacacggtgcagggccgcaagctgctcgagcgcttcgtgctcgacatcgccggcgcgaaacccgactggatcatgcgcgaccacatcgaggaggcggtcgcgcggattcgcgagcaggtcggcgacgaggaagtgatcctcggcctgtcgggcggcgtggattcgagcgtcgcggcggcgctcatccaccgtgcgatcggcgatcaattgacttgcgtgttcgtcgaccacggcctgctgcgcctgaacgaaggcaagatggtgctcgacatgttcgaaggccggctgcatgcgaaggtcgtccacgtcgacgcgtccgagcagttcctcggccatcttgcgggcgtcgccgatccggagcacaagcgcaagatcatcggccgcgagttcgtcgaagtgttccaggcggaagcgaagaagctgacgaacgcgaagtggctcgcgcaggggacgatctacccggacgtgatcgaatcgggcggcgcgaagacgaagaaggcgacgacgatcaagagccatcacaacgtgggcggcttgccggagacgctcggcctgaagctgctcgagccgctgcgcgatctgttcaaggacgaagtgcgcgagcttggcgtcgcgctcggcttgccggcggagatggtgtatcgccatccgttcccgggcccgggcctcggcgtgcggattctgggcgaagtgaagcgcgactacgcggagctgctgcgccgcgcggatgcgatcttcatcgaagagctccgcgggacgctcgcgaccgagcaggatgcggcggcgggcctgtgcgagccgtcgcaggtcggcaagagctggtacgacctgacgagccaggcgttcgcggtgttcctgccggtgaagtcggtcggcgtgatgggcgacggccgcacgtacgactacgtggccgcgctgcgcgcggtgcagacgaccgatttcatgacggcgcactgggcgcatctgccgtatgcgctgctcggccgcgcgtcgaaccggatcatcaacgaagtgcgcgggatcaatcgggtggtgtacgacgtgtcgggtaagccgccggcgacaatcgagtgggag

SEQ ID NO: 13922 - DNA, 385 bp, Burkholderia mallei
ggtgcaggaatattgacctgcttcccatcagctacgcatttctgcctcgccttaggggccgactcaccctacgccgatgaacgttgcgtaggaaaccttgggcttacggcgagggggcctttcaccccctttatcgctactcatgtcagcattcgcacttccgatacctccagcacgcttttcaacgcaccttcgcaggcttacggaacgctctcctaccatgcgagactagctcgcatccgcagcttcggtatatggcttagccccgttacatcttccgcgcaggacgactcgatcagtgagctattacgctttctttaaagggtggctgcttctaagccaacctcctgactgttttagccttcccacttcgtttcccacttag

SEQ ID NO: 13923 - DNA, 1575 bp, Burkholderia mallei
atgacgcgacaaagcgcacgcattccattgttcatcgttcatggagtcgcgaaagcgcgagctgacgacaaacgcgccgccaattcgccggatgcgtcgagtccgccgccgcgacgcgccgcttgcgaggcggtgcgtcgctccatcataccccgacgcgcgcggccgccatccgatgattcattcggcattcggaaatgcggccaaaagccaacgcgtcgtctgacgaaacgacgccgaacgggcaaccggcgtatcgttgaggcttgcctcgcatggagaatcagcgtgactgtaccacccggcgcgccgcggcccgccgccgccggccgagcgaactcggcgcatgccgcgcaaggcgcgtcgcccgtcggcgccgccccgtatctcgagcgcggctcacgcggttactggcacgcgagcgtcgcgctgctgttcgccggttacgcgacgttctcgctgctctattacgtgcagccgctgttgccggaattctcgaaggcattcggcgtgagccccgcgcagagcagtctcgcgctgtcgttcgcgacggccgcgctcgccgccgccgtgttcgtcgccggcttcgtctccgaagcgttgagccgccaccggctgatgacggcttcgctcaccgcttcgtcgctgctcacgctcgccgccgcattcgcgccgcactggcatcaactgctgatcctgcgcgcgctcacggggctcgcgctcggcggcgtgcccgccgtcgcgatggcgtatctcgccgaagaagtgcacccggacgggctcggactcgcgatggggctctatgtcggcggcaccgcgatcggcgggatggcggggcgcgtgatcaccggcattctcaccgacctgttctcgtggcgcatcgcggtgggcgcgatcggcgtgctcggcctcgcgtcgatgctcgcgttccgcatgctgctgccgccgtcgcgccatttcgtgccgcgccgcggcctgaacctcgcgcatcaccgcacgtcgctcgcccatcatctccgcggccagcgcgagctgcccgtgctgttcgcgatggcgttcgtgctgatgggcagcttcgtcacgctctacaactacatcggctatcggctgctcgcgccgccgtattcgatggggcaggcgacgatcggcgcgatcttcgtcgtctatctggtgggcgtcgtcgcatccccgctgtcgggacggctcgccgatacgctcggccgcggccgcgtgctgatcgcgagcctcgcggtgatgctcgggggcgtcgcgctgacgctgctgcatccggttgccgcgatcgtcgcgggcgtcgcatgcgtgacgttcggcttcttcgcgggccacgcggtcgcgagcggctgggtcggccggctcgcgcagcacggcaaaggccaggcggccgcgctctatctactcgcttactatcttggctcgagcgtcgtcggctcgctcggcggacgcttctggagcacgctcggctggccgggcgtcgcggcgctcgtcggcgcgctgctcgcgctcggcgtggtcgcggccgcctggctgcgcgcgcgcgagcgcggcggcgccgcg

SEQ ID NO: 13924 - DNA, 276 bp, Burkholderia mallei
atgaacaaacaggaactgatcgacgccgtcgccgcccagacgggcgccagcaaggctcaaaccggcgaaacgctggacacgctcctcgaagtgatcaagaaggctgtgtcgaaaggcgactcagttcaactgatcggcttcggcagcttcggctcgggcaagcgcgcagcgcgcaccggccgcaaccccaagacgggcgagaccatcaagatcccggcagccaagacggtcaagttcacggctggcaaggcgttcaaggacgcagtgaacaagcgc

SEQ ID NO: 13925 - DNA, 1080 bp, Burkholderia mallei
atgagcacgcgcgcggatcgattgcgcgacgcgatccggcatggccgcgcgattcgcgacaccgcgatcgacgcgggcgacttcgacgggcacgactggtcgggcggggtgttcgagcgcgtccggttcatcggcgtatcgatgaagcgcgtgcgactcgacgaggccgtattcatcgattgtctgtttcgcgacgtcgacatgcggcaagcgggctgcgcgcgatgcacgttcgatcgatgccggttcgaacgcgtcgatctttcggcaagcgagcttcgcgactgcatgatgaacgggacgcatgcggccggcgtgtatttttccggtgcgcgggcgagcggtttgcattgcgtgaagagcgacctcggcgattgcgggttcgacgacgcgcggatcgaatcggcggtgttcagcgacacgcggctcgtgcgcgcggccttcacgcgggccgcggtgcgcaaggcggttttctatcggctcgatctgacatcggccgttttcgccgatgcggcgttcgacgataccgtttttgccgaagcgaacctggccggccagcgcttgcaaggccagcggatgcaccgctgccagttcgtcggcgcggaccttcgtcatgccgatttcaccggggcgcgcctcgccggctgcaacttccagcgcgcgaagctgacgggcgcgcggctggacggcgtcgacgcgccgaacaccgtctttttcgaggccgacgcgccggatgcgacgtgccgtgacgcggcgctgcgcggcagcatctgggtgcaggccgacgcccggcgcatcgatttcaccggctcggaactggacggcgcggtatttcagcgcgcgacgtgcacgggtgcgcgcttttcgcgggcgaagctcgaaggcgcggatttttcgtacgcggatctgaccggagccgtgttcgacgaggccggtttcgcgcgaaccgcgtttcacggcgcgatggcgccggcgattgcgtggcgcgatcatccgggcgccgtcgcgtgcgatgcggaattgtcggatgcgcaggcgtggtcgcggcaaagggacgagcaggcgcggcgtgaagaatgt

SEQ ID NO: 13926 - DNA, 2244 bp, Burkholderia mallei
atgcccggctccgatgccgggccccgcaggcggggcgtacacgaacaaaggagaaatcgcatgtcgaatgaagcgaagtgcccgttccatcaagccgcaggcaacggcacgtcgaaccgggactggtggcccaatcagctggacctgagcatcctgcatcggcactcgtcgctgtccgatccgatgggcaaggatttcaactacgcgcaggcgttcgagaagctcgacctcgcggcggtgaagcgcgacctccacgcgctgatgacgacgtcgcaggactggtggccggccgatttcggccactacggcggcctgttcatccgcatggcatggcacagcgcgggcacgtaccgcacggccgacggccgcggcggcgcgggcgaagggcagcagcgcttcgcgccgctcaacagctggcccgacaacgcgaacctcgacaaggcgcgccggctgctgtggccgatcaagcagaagtacggccgcgccatctcgtgggccgacctgctgatcctgacgggcaacgtcgcgctcgaatcgatgggcttcaagaccttcggcttcgcgggcggccgcgcggacacgtgggagcccgaggacgtctactggggctcggaaaagatctggctggaactgagcggcggcccgaacagccgctattcgggcgaccgccagctcgagaacccgctcgccgccgtgcagatgggcctcatctacgtgaatccggaaggcccggacggcaatcccgatccggtcgccgcggcgcgcgacattcgtgacaccttcgcgcgcatggcgatgaacgacgaagagacggtcgcgctgatcgcgggcggccacacgttcggcaagacgcacggcgcggggcccgcgtcgaacgtcggcgccgagccggaggccgcgggcatcgaagcgcagggcctcggctggaagagcgcgtaccgcacgggcaagggcgcggacgcgatcacgagcgggctcgaagtcacgtggacgacgacgccgacgcagtggagccacaacttcttcgagaacctgttcggctacgagtgggagctgacgaagagcccggcgggcgcgcaccagtgggtcgcgaagggcgccgacgcggtgattcccgacgcgttcgatccgtcgaagaagcatcgtccgacgatgctcacgaccgacctgtcgctgcgcttcgatccggcgtacgaaaagatctcgcgccgcttccacgagaacccggagcagttcgccgacgcgttcgcgcgcgcctggttcaagctcacgcaccgcgacatgggcccgcgcgcgcgctatctcggcccggaagtgccggccgaggtgctgctgtggcaggacccgattccggccgtcgaccatccgctgatcgacgccgcggacgccgccgagctgaaggcaaaggtgctcgcgtcgggtctgaccgtgtcgcagctcgtttccaccgcgtgggctgcggcgtccaccttccgcggctcggacaagcgcggcggcgcgaacggcgcgcgcattcgccttgcgccgcagaaggactgggaggcgaaccagcccgagcagctcgcggcggtgctcgagacgctcgaggcaatccgcacggcgttcaacggcgcgcagcgcggcggcaagcaagtgtcgctcgccgatctgatcgtgctggccggctgcgcgggcgtcgagcaggcggcgaagaacgcgggccacgcggtgaccgtgccgttcgcgccgggccgcgcggacgcatcgcaggagcagaccgacgtcgaatcgatggccgtgctcgagccggtggccgacggttttcgcaactacctgaagggcaagtaccgggtgcccgccgaggtgctgctcgtcgacaaggcgcaactgctgacgctgagcgcgccggagatgacggtgctgctgggcggcctgcgcgtgctgggcgcgaacgtcgggcagagccggcacggcgtgttcaccgcgcgcgagcaggcattgaccaacgacttcttcgtgaacctgctcgacatgggcaccgagtggaagccgacggcggccgacgcggacgtgttcgaagggcgcgaccgcgcgacgggcgcgctcaagtggacgggcacgcgcgtcgatctcgtgttcggctcgcattcgcagttgcgcgcgctcgcggaggtctacggcagcgcggacgcgcaggagaagttcgtgcgcgacttcgtcgcggtctggaacaaggtgatgaacctcgaccgcttcgatctcgcg

SEQ ID NO: 13927 - DNA, 843 bp, Burkholderia mallei
atgaccagcaggctcgaaaccgtcgcgctgcccggcggcgaacgcgtaccgaagctcgggcagggcacctgggaaatgggcgagcggcccgcgaagcgcgcagccgagatcgccgcgctgcgcgagggcgtcgatctcggcatgacgctcatcgataccgcggagatgtacggcgacggcgcgaccgagacgcttgtcggcgacgcgctcgccgacgtgcgcgagcgcttgttcatcgtcagcaaggtgctgccgcatcatgcgagccgcggcggtgtcgtcgccgcatgcgaggcgacgctcaagcgcttgcgcaccgatcgcgtggatctgtatttgctgcactggcgcggctcgattccgctcgcggagacgatcgcgggcttcgaggcgctgcgcgacgcgggcaagatccgctactggggcgtcagcaatttcgatgtcgacgacatggaggcgctcgtcgccgaagcgggcggcgccgtctgcgcgaccgaccagatcctctacaacctcgcgcgccgcggcccggagttcgatttgctgccgtggctcgcgcggcgcgagatgccggcgatagcgtacagcccgatcgatcacatgcgattgcccaagcgcaccgcgctcgacgagatcgcgcgcgagcgcggcgtatcgccgacgcgcgtcgcgcttgcgtgggtgctcgggcagccgaacgtgctggcgattccgaaggcgggcagcgtcgagcacgtgcgcgacaatcgcgcggcgctcgatctcgtgctcggcgaagaagagctcgcacggctcgacgcgcagttcaaatcgccgcgggggaagcggccgcttgaaatgctg

SEQ ID NO: 13928 - DNA, 648 bp, Burkholderia mallei
atgaacgcacctcgctttgcggcgcccgcccgccgcacgaagaaactcccgcccctgcgcgtcggcatcggcggcccggtcggctccggcaagacgacgctcctcgaaatgctttgcaagggcatgcgcgagcgctacgacctcgtcgcgatcacgaacgacatctacacgaaggaagaccagcgccttctgacgatcgcgggcgcgctgcccgaagcgcggatcatgggcgtcgagacgggcggctgcccgcacacggcgatccgcgaggacgcatcgatcaatctggaggcggtcgagcggatgctcgcgcgcttcccggacgcggacatcgtgttcatcgaatcgggcggcgacaatctcgcggcaacgttcagccccgaactgtcggacctgacgatctacgtgatcgacgtcgcgggcggcgagaagattccgcgcaagggcggcccgggcatcacgaaatcggatctgctcgtgatcaacaagacggacctcgcgccgctcgtcggcgcgaacctcgaggtgatggcctccgatacgaggaagatgcgcggcgagcgcccgtacgtgatgtgcaacctgaaggcgctcgacggcgtggccgacgtgatcgcgttcatcgagaacaaaggattgctgacggtc

SEQ ID NO: 13929 - DNA, 2430 bp, Burkholderia mallei
atgcaattccctgaatcctggttgagaacctttgtcgacccgcaactgacgacggacgagctgtcgcacgcgttgacgatggcggggctcgaggtcgagtcgctgcgcccggccgcgccgccgaccgagaagatcgtcgtcggccgcgtgctcgaggtggtcaagcatccggatgccgacaagctcaacgtttgccaggtcgacgccggcaccggcgcgacgctgcagatcgtctgcggcgcgccgaatgtcgcgccgggcatcaaggtgccggtcgcgctcgtcggcgcgaagctgccgcccgccgaagaaggcggcgcgcccttcgcgatcaagctgtcgaagctgcgcggcgtcgagagccaggggatgctctgctcggcgcgcgagctgaagctttccgaagaccacagcggcctgatgatcctgcccgaaggcacgcccgtgggccaggacatccgggaggcgctgaacctcgacgacacggtcttcgaaatcaagctgacgccgaacaaggccgattgcctgtccgtgttcggcatcgcgcgcgagaccgccgcgattaccggtgcgccgctcgccgcgcccgacattcgccccgtcttggccgaactgaccgagacgctgcccgttaaaatttccgcgcccgatctgtgcggccgcttctccggccgcgtgattcgcggcgtgaacgcgcgcgcgaagacgccgcactggatggtcgagcgcctcgagcgcgcgggccagcgcagcgtgtcggcgctcgtcgacatctcgaactacgtgatgttcgagctgggccgcccgtcgcacgtattcgatctcgacaagatccacggcggcatcgacgtgcgctggggcaagcgcggcgagtcgctcaagctcttgaacggcaacacgatcgagctcgacgagacggtcggggtgatttccgacggcgctcaggtcgagagcctcgcgggcatcatgggcggcgacagcacggccgtcacgctcgacacgacgaacatctatctcgaagccgcgttctggtggccggacagcatccgcggccgcgcgcgcaaatacaacttctcgaccgacgcggcgcatcgcttcgagcgcggcgtcgattactcgacgaccgtcgagcacgtcgagcgcatcacgcagctgattctcgacatctgcggcggccaggcgggccccgtcgacgaccagatcgtgagcctgccgcagcgcgcgccggtttcgatgcgcgcgtcgcgcgcgaaccggatcatcggcgtcgagatcggcgaggacgaaatcgcgcagatcttcacgcgtctcggcctcgcgttcgagcgcgacggcgacgtgttccgcgtgacgccgccgccgcaccgcttcgacatcgagatcgaggaggatctgatcgaagaagtggcgcggatttacggtttcgagaagatccccgcgcgtccgcccgttgcgaagagcgagatgcgcgcgaccgacgagacgcgccgctcggttcacgcgatccgccacgcgctcgccgcgcgcgactatgcggaaacagtcaacttcagtttcgtcgatgccgagtgggagcgcgatttcgccggcaacgacaacccggtgcgcctgctgaacccgatcgcgagccaactgtcggtgatgcgcacgacgctgttcggcagcctcgtcggcgtgctgcgccacaacctgaaccgccgcgccgagcgcgtgcgcgtgttcgaggccgggcgcgtgttcgtcgccgatccgtcggtgaaagcgggcgagctcgcggtcgagggctatgcgcagccgaagcgcatcggcgcgctcgcatacgggccggtcgtcgaagagcaatggggcacggcgacgcgccaggtcgattacttcgacgtgaagggcgatctcgaggcgctgctcgcgcctgttcccgcgcgtttcgtgaaggccgagcatccggcgctgcacccgggccgcagcgcgcggatcgaagtcgacggccatgcggtcggctggatcggtgagctgcatccgcgcctcatgcagaagtacgagctgccgcatgcgcccgtgatgttcgagatcgatacggatgcgctcgtcgcgcgtgcgttgccggcgccgtcggaggtatcgaagttcccgccggtgcgccgcgacatcgcggtggtcgtcgaccagaaggtcgaagtgcaggcgcttttcgacgagatgaagaaggcgctcgccgacgacgcgtgcaaattcgtccagagagttgcactcttcgacgaatttcgtgcaaaatcaaatacttccggtgggttgtcagcccatgagaaaagccttgcgttccgcgtcacgctgcaggatgcggccggaaccctgcaggacgagacggtcgatcaggcgattcagaccctcgtggaccgcatggctcgagtctatggcgcgcgtttgcgcgga

SEQ ID NO: 13930 - DNA, 816 bp, Burkholderia mallei
atgacgcgcgcgatcaaagccgcaagcgccgcgaccgaggccggcgcgctcggcgccgcgggccggcgcgcgcccgtcatgctcgcgcgcgtcgccgcgctggccgcgctcgccgtgatgctcgcgcggccckgctggctcgagccccttttcgcgccgttcgccgacaacggcgcgcccgcgatctaccggcgcgcgagccttctcgatttgacgctgtcgcatctcgcgatcgtcggcgcggcgagcgcggcgggcgcggtcgtcgcgctcgcggccgggattttcgtcacgcggcgcgcgggcgcggaattcctgccggtcgcgcgcagcgtcgtgcatatcgggcagacctttccgcccgtcgcggtgctcgcgctcgcggtgccggccgtcggcttcggcgtgaagcccgtgctgatcgcgctgatcctgtacgggctgctgccgatcttcgaaagcacgatcgcggggctgcaggacgtgcccgccggcgccgtcgacgcggcgcgcgcaatgggcatgagcgcgctgcagcggctcgcgtggatcgagctgccgctcgcgtttccggtggtcctgaacggcatccggctcgcggtcgtcatcaatctcggcacggcgacgatcggctcgaccgtcgcggcgaaggggctcggcgacgtgatcatcgcggggctgcagacatcgaacaccgcgttcgtgctgcaaggcgggctcgtcgtcgcgctgctcgcggtgctgatctacgacgcgctcggcgtgatcggccgatggctcgcgccggcgagcgcggcgcgcgaagaaggcggcgcg

SEQ ID NO: 13931 - DNA, 2796 bp, Burkholderia mallei
atgtacagtttatacgccgcgcccgtcacgccacctctttgcgcgcgccgggcgccggctcgacggtcacaacctgactcaggcgtcgccgccctccaccgcatcgtcgtcggcatcggcgtccgcctcggcgatctgctgcagacccgaaagcttggtgccttcatcgagactgatgagtgtaacaccttgcgtcgcccgccccatctcgcgaatctccgacacgcgcgtgcggatcagcacgcccgccgtcgtgatcagcatgatctgatcctcggggtcgacgagcgtcgcggcaacgacgcggccgttgcgctcggaggtctggatcgcgatcatccccttcgtgccacgcccgtggcgcgtgtactcggtgatcggcgtgcgcttgccgtagccgttctcggtcgcggtcagcaccgactgttcctcgctgcccgcgacgagcatcgcgatcacctgctgggcgtcgtcgagctgcatcccgcgcacgccgcgcgcctcgcggcccatcggccgcacgtcgttctcgtcgaaacgcaccgccttgccggcgtcggagaacagcatcacgtcgtgcgcgccgtcggtgatcgccgcgccgatcaggtaatcgccgtcgtcgaggccgaccgcgatgatgcccttcttcatcgggcggctgaacgcttcgagcggcgtcttcttgaccgtgcccaaagccgtcgtcatgaacacgtacttgtcggccgagaattccctcacgggcagcacgacattgatcttctcgccgtcctgcagcgggaacatgttgacgatcggacggccgcgcgagttgcgcgagccctgcggcacctcgtacaccttgacccagtacacgcggccgcggttcgagaagcacaggatgtagtcgtgcgtgttcgcgatgaacagcgtctcgatccagtcgtcttccttcatctgcgtcgcctgcttgccgcggccgccgcgcttttgcgcacggtactcggacagcggctgcgacttcacgtagcccgcgtgcgacatcgtgaccaccatgtcctgcggcgtgatcaggtcttcggtgttcagctcggtcgcgttcagctcgatcttcgagcggcgcgcatcgccgaactccgccttcacctgcgtcagttcgtcgccgatcagcgtcgtgatccgctcgggccgcgcgagaatgtcgagcagatcggcgatctgcgccatcacgtcgcgatattcgccgatgatcttgtcctgctcgaggcccgtgaggcgctgcaggcgcatctgyaggatttcctgcgcctgcgtgtcggacagccggtacaggccgtcgccctgcatcccgaacgccggactcaggccctccggacggtacgcgtcgcgcccgccggccgccgcgttctcggtttccgcgcgcgtgagcatgtcgcgcacgagcgacgaatcccacgatttcgccatcagctcctgcttcgcgatcggcggcgtcggcgcggccttgatgatcgcgatgaactcgtcgatgttcgcgagcgcgacggcgaggccttcgagcacgtggccgcgctcgcgcgccttgcgcagttcgtagacggtgcgccgcgtcagcacttcgcgccgatgcgacaggaagcactgcaggatctcccgcagattcaggagcttcggctggttgtcgacgagcgcgaccatgttcatgccgaacgtgtcctgcagctgagtcgccttgtacaggttgttcagcaccacctcgggcacttcgccgcgcttgagctcgatcacgacgcgcatgccgctcttgtcggattcgtcgcggatgtcggagatgccctcgagcttcttctcgttgacgagctccgcgatccgctcgagcagcgagcgcttgttgacctggtacggcagttcgtcgacgatgatcgccatgcgctggccgcggtcgatctcctcgaagtgcgtggccgcgcgcatcacgacgcgcccgcgcccggtgcgatagccgtcgcgcacaccggcgacgccgtagatgatgccggccgtcgggaaatcgggcgcggggatgatctcgatcagttcgtcgacgctcgcctgcggattgttcagcaggtaaaggcaggcgtcgacgacctcgttcaggttgtgcggcgggatgttggtcgccatgccgaccgcgatccccgacgaaccgttgatgaggaggttcggaatccgcgacggcaggatgagcggctgcatctcgctgccgtcgtagttcgggccgaagtcgacggtttccttgtcgatgtccgcgagcagttcgtggccgatcttggccatccggatttcggtgtagcgcatcgcggccgcgttatcgccgtcgaccgagccgaagttgccctggccgtcgacgagcatgtaacgcagcgagaaatcctgagccatccggacgatcgtgtcgtagaccgcggtgtcgccgtgcggatggtacttaccgatcacgtcgccgacgatacgcgcggacttcttgtacggccggttccagtcgttgttcagctcgtgcatcgcgaacagcacgcgccggtgcacgggcttcaagccatcgcggacatccggaagggcacggccgacgatcacgctcatggcgtaatcgagatacgacttgcgcatttcctcctcgagggaggtgggcagggtctctttggcgaattgatccatgtatccgtatcttttcggagcgaagacggggccgcctttcgcgtgggcgccgctcgcgcgacgcaacgtgcgattctaacatgcgccccaacccgccccaacgcgggcccctctata

SEQ ID NO: 13932 - DNA, 939 bp, Burkholderia mallei
atggatacgctccaaaacatgcgcgtgttcgtccgcgtggtcgatgcgggcagtttcacggcggccgcgcagcagctcaattcgacgaccgcgtacgcatcgcgcgcggtgtccgatctcgaggcgcacttgcgcacgcgtcttctgaaccggacgacgcggcgcatcgcgctcaccgaggcgggcgagcgttatctgcagcgctgcgagcagatcctcgcgtacgtcgagcaggcggaggccgaggcaagcgacgcgcacgcgcgcccgtccggcaagctgaaagtgcactgcatgacgagcctcggccagcactacacggtgcccgcggtgtcgcgctaccggcagcgctatccggaagtccaggtcgacctgacgctcgcgcagcggctgccggatctgctcgacgaaggcttcgacgtgtcgctcgtcgtcggccgggagctgcccgattcggggctcgtgtcgcagcggctcggcgagacgttcagcgtcgtctgcgcgtcgcgcggctacatcgagcagcacggcgcgccgcagcggccgcaggatcttgccggccacgtctgcctcgggatggtcgcgccgggcctgtactgggacgaatggaagctggtggggccgcagggcgagcagagcgtgacgctcgcgccgccgccgtttcgcgtgaacgtcgccgaggcgctcgcggccggcattcgcgagggcatgggcatcggcgtgctgccgctctattcggcgatcgccgggttgcgcaacggcgatttcgtgcgcgtgatgcccgaataccggtcgcacgtgatgaacatctacgcgctctacgcgtcgcgccagtatctcgacgcgaagatccgcacgtgggtcgatttcctgcgcgacgagttgccgtcgatcctcgaagccgacgaggcggcgctcgagcgcttcaccgtgcagacc

SEQ ID NO: 13933 - DNA, 843 bp, Burkholderia mallei
atgcgtcgcgctcgaggcggtgcgccgcttcttcagcacataaccggcgatcacgacgaagagcgcgcccgcgacgctcgcgccatagatcgcggcgggcgtgtcgagcagcggccagcggtcgcccgccggatcgttgaccatcagcccgcccgcgatccagccgagcagcgccgcgccgaacgtgatgaagatcggaaagcggtcgagcagcttgaggacgagcgtgctgccccagacgatgatcggaatgctgacgagcaggccgaagatcacgagcgcgatccggtggcccggatccgcctgctcggccgcgccggcgatcgcgatcacgttgtcgaggctcatcaccgcgtcggcgatcacgatcgtcttcaccgcctcccacagcttgtcggcgggcttgacgttctcgtgcgcgtcctcggcgggcgccatcagccgcacgccgatccacagcagcagcacgccgcccgcgaacttcaggagcggcacgtcgagcagcagcaccgcgaacgcgatcagcacgacgcgcaacaggatcgcgccggccgtcccccacagcacgccgcgcacgcgctgctgcgccggcaggttacggcaggcgagcgcgatcacgaccgcgttgtcgccgccgagcaggatatcgatgacgacgatctgggcgactgcgccccaatggagcgaagcaaagaattcgaacatggaagccaagcaaaggaaatgagaccggcgggcgtcggcatgcgttccgctcttgccggccagcccgacgcggggctgacgaaaggattgcgcgagcataacaaaaaacgccggcggaaccggcgttttttgcggcga

SEQ ID NO: 13934 - DNA, 1209 bp, Burkholderia mallei
atgctcaactgggatgacgagaagactgccgtaactcccgcgagcggagcgcagcacaatgcgatgcgcgaccccgcaggaatggctgtcggattgcaggcggcgcctgccgctcatcaagcttcgtcggcccgcgacatcttcgcaggcgatttcgccgtggcgccgaatgcgtcggccgccgtcgcttcggaagcgcgggtcaacgtcgccgacaagcgcatcatcaacggcaagaccgacgtcaaccagctcgtcccgttcaagtacaagtgggcgtgggagaagtacctggccggctgcgcgaatcactggatgccgcaggaaatcaacatgtcccgcgacatcgcgctctggaaggatccgaacggcctgacggaggacgagcgccggatcgtcaagcgcaacctcggtttcttcgtgacggccgattcgctcgcggcgaacaacatcgtgctcggcacgtaccgccacatcacggcgcccgagtgccggcagttcctgctgcgccaggcgttcgaagaggcgatccacacgcacgcgtaccaatatattgtggaatcgctcggcctcgacgaaggcgagatcttcaacgcgtaccacgaggtgccgtcgatccgcgcgaaggacgagttcctgattccgttcatccatacgctgaccgacccggccttcacgacgggcacgctggaagccgatcagaagctgctgaaatcgctgatcgtgttcgcgtgcatcatggagggcctgttcttctacgtcggcttcacgcagattctcgcgctcggccgtcagaacaagatgacgggcgcggcggagcaatatcagtacatcctgcgcgacgagtcgatgcactgcaacttcgggatcgacctgatcaaccagatcaagctcgagaacccgcacctgtggacggccgagttccgcgccgagatccgcgagctgttcaagcacgccgtcgatctcgagtaccgctacgcggaggacacgatgccgcgcggcgtgctgggcctgaacgcgtcgatgttcaagagctatctgcgcttcatcagcaaccgccgttgccagcagatcggcctcgacccgctgttcccgaacgaggaaaacccgttcccgtggatgagcgagatgatcgacttgaagaaggagcgcaacttcttcgagacgcgggtgatcgagtatcagacgggcggcgcgctgtcgtgggaa

SEQ ID NO: 13935 - DNA, 2778 bp, Burkholderia mallei
atgcctgaagaacgaaatctggaaggtaagaccctgctattggttgacggttcgagctatctgtatcgggcttaccatgcgatgcctgatttgcgcggccctggcggggagccgaccggagcgctctacggaatcgtcaatatgttgcgccgcatgcgcaaggatgtcagtgcagagtatagcgcgtgcgtgttcgacgccaagggcaaaaccttccgcgacgatctgtatgccgactacaaggcgcaccgcccgccgatgccgcccgatctcgcgctgcagatcgagccgatccatacggccgtgcgcgcgctcggctggccgctgttgatgatcgagggcgtcgaggccgacgacgtgatcggcacgcttgcgaagcaggccgaacaacacggcatgaacgtgatcgtctcgacgggcgacaaggatctcgcgcaactcgtcaccgatcgcgtcacgctcatcaacacgatgacgaacgaggcgctcgaccgcgacggcgtgctcgcgaagttcggcgtgccgccggagcggatcgtcgattacctgtcgctcatcggcgacaccgtcgacaacgtgccgggcgtcgagaagtgcgggccgaagacggccgtcaagtggctcacgcagtacggctcgctcgacggcgtcgtcgaacatgcgggcgagatcaagggcggcgtcggcgacaacctgcgccgtgcgctcgatttcctgccgctcgcgcgcaagctggtgacggtcgagaccggctgcgagctcgcgccgcacgtcgaatcgttcgacgcgtcgctcgcgacggacggcgagggccgcgacgcgctgcgcgagatcttcgcgaagtacggcttcaagacgtggctgcgcgagctcgacagcgaacccgccgccgcggccggtgcggccggtgcggccgccgccggcgccgcgccggatccggcgagcggcgcgacggccgaactgccgctcgccacggcgcgcaactacgcgaccgtgcagacgtgggagcagttcgacgcgtggctcgcgaagatctccgccgcagagctgaccgcgttcgacaccgagacgacgtcgctcgacccgatgcgcgcagagatcgtcggcctgtcgttctcggtggagccgggccatgccgcgtacgtgccggttgcgcaccgcgggccggacatgcccgcgcaactgccgcgcgacgaagtgctcgcgaagctcacgccgtggctcgaggatgcgggcaagaagaagctcggccaacacctgaagtacgacgcgcaggtgctcgcgaactacggcatcgcgctgaacggcatcgagcacgacacgctgctcgaatcgtatgtgctcgaatcgcaccgcacgcacgacatggacagcctcgcgctgcgccatctcggcgtgaagacgatcaagtacgaggacgtggcgggcaagggcgcgcagcagatcggcttcgacgaggtgccgctcgcgcaggcgtccgagtatgcggcggaagacgccgacatcacgctgcagctgcatcacgcgctgtatccgcagatcgcgcgcgagccgggcctcacgcgcgtgtatcgcgacatcgagctgccggtgtcgctcgtgttgcgcaagatggagcgcaccggcgtgctgatcgacggcgacaggctgagccgccagagcggcgagatcgcgacgcggctcgtcgcgctcgagcaggaggcgtacgcgctcgcgggcggcgaattcaatctcggctcgccgaagcagatcggccagattttcttcgagcggctgcaattgcccgtcgtcaagaagacgccgagcggcgcgccgtcgaccgacgaggaggtgctgcaaaagctcgccgaggactatccgctgccgaagctgttgcttgagcaccgcggcctgtcgaagctgaaatcgacctataccgacaagctgccgcgcatggtcaatccggacacgggccgcgtgcacacgaactatgcgcaggcggtggcggtcaccgggcggctcgcgtcgaacgatccgaacctgcagaacatcccggtgcgcacgaccgaagggcggcgcatccgcgaggcgttcgtcgcgccgccgggcagcaagatcgtgtccgccgactactcgcaaatcgagctgcgcatcatggcgcacatctcggaggacgaatcgttgctgcgcgcgttcgcgcacggcgaggacattcaccgcgcgaccgcggcggaggtgttcggcgtgacgccgctcgaagtgacgtccgatcagcggcgcatcgcgaaggtgatcaacttcggtctgatctatgggatgagttcgttcggcctcgcgtcgaatctcggcatcacgcgcgatgcggcgaagctctatatcgaccgctacttcctccgctatccgggcgtcgcccgctacatggaggaaacgcgcatgcgggcgaaggagaagggctacgtcgaaaccgtgttcggccgccgcctgtggctgcccgagatcaacggcggcaacgggccgcgccgccaggccgccgagcgcgcggcgatcaacgcgccgatgcagggcacggccgccgatctgatcaagctgtcgatgatcgcggtcgacgactggctcgagcgcggcggcttgcgcgcgcgaatgatcatgcaggtgcacgacgaactcgtgctcgaggtgccggaggacgagctgtccatcgtgcgcgagaagctgccggagatgatgtgcggcgtcgcgaaactgaaggtgccgctcgtcgccgaggtcggcgtcggcgagaactgggaagaggcgcac

SEQ ID NO: 13936 - DNA, 2139 bp, Burkholderia mallei
atgaccgatcacacgccgcactcgtcgccgcccgcctcgccgacgccgcctcaggggcccgcgccgaagcgccgccgctatttccgcacgctcgcgggcctcgtgctcggcgcggcgatcgcggtcggcgcggtcggcacgtggacgctgcatcgcatctggacggcgctgccgtccgtcgagccgctcgccgtctatcgtccggcgctgccgctgcggatcttttcgcgcgaaggcgagctgctcgccgaatacggcgtcgagcgtcgcgagttcgtgccgctcgaccgcatcccgccgctcgtgcggcacgcgctgctcgcggccgaggatgcgcagttctacacgcacggcgcggtcgacatcggcgggctcgcgcgcgcgacggtggcgaacgtcgtcaccggccagcccgggcagggcggcagcacgatcacgatgcaggtcgcgcgcaatttctttctgacgcgcgagaaggtgctgagccgcaagctcgccgagatcctgatgtcgtacaagctcgaacgcgcgtacagcaaggacaagctgctcgagctgtacatgaacgagatctatctcggcgagcgcgcgtacgggttcgcggcggccgcgtcggtgtacttcggcaagccgctcgatgcgctcacgcccggcgaggcggcggtgctcgcgggcctgccgaaggcgccgtccgcgttcaatccggtcgtcaatccggcgcgggcgacgatgcgccgcaactacgtgctcggccgcatgcgcgcgctcgggtatctggacgaggccgcgtaccggcaggccgccgacgcgccgatcgcgctcgcgaccacgccgccgcccggcatcctcgccgcgccgtacgtcgccgagcgcgcgcgccggatgatggtcgagcgcttccatgacgacgcctacacgctcggcctggacgtgacgacgacgatcgcgatgcgcgagcagcgcgcggccgacgcggcgctcgcgcgcgggctcgcgcaggtcggccggcgcgacgcgaaggacgcgctcgaaggcgcgctcgtgtcgatcgacgcggcgacgggcgacattctcgcgctcgtcggcggcgcggacttctcgcacaacgtgttcgatcatgcgttgcaggcgtatcggcaaccgggttcgagcttcaagccgttcgtctattcggccgcgctggagaaagggatgttccccggcgtgctgatcgacgacacgcagcgcacgctgtcgcgtgacgaaaccggcgcgaacccgtggcggccgcgcaatttcggcaaccactacgaaggcttcattccggtgcggcgcgggctgatgcgctcgaagaacctcgtcgcggtgagcctgatgcaggtcgcgcggccggatttcgtccagcagcacgcggcgcgcttcggcttcgagccgctgcgcaaccccgcgtcgctgccgctcgcgctcggcgcgggctcggcgacgccgctggaggtggcgagcgcctacggcgtgttcgccaacggcggcgtgcgcatggagccgcgcctcatcgaatcggtgcggcagcggcacggcggcgcgctgttcgacgcgcagctcgcgcccggcgtgcgcgtcatctcggcgcgcaacgcgttcgtgatggacagcatgctgcgcgacgtcgtcgcgcacggcaccgcgcgccgcgcggtcgcgctcaagcgcgcggacgcggcgggcaagaccggcacgtcgaacggctcgaaggacgtgtggttcgccggctattcgtcgggcgtcgtatcggtcgtctggatgggctacgacgcgccgcgcagcctcggccgcgcgacgggctcgtcggccgcgctgcccgtgtgggtcgactacatgaagaccgcggtcgacggccgcggcgcgatcgagcgcacgccgcccgcggacgtcgcgctcgtcgacggcgatttcgtctatgccgaatacgcgaacggcgacaagtgcgcgccgtcgctgccgccgttcgtgcgcagcccgttcgcgtgcggcgcggcgcgcggtgcgccggcggacggcggcgcgccggcgagcgcggcaggggcggcgggtgcgccgacgccggccgccgtcgatgcggccgagcgcgcgcgcgtgctcgagctgtttcgcaccgaagac

SEQ ID NO: 13937 - DNA, 825 bp, Burkholderia mallei
atgtcgaacagcagacagcaccaagggcatttcgcgcgcaagcgcttcgggcagaactttctcgtcgatcacggcgtgatcgatgcgatcgtcgcggcgattcgtcccgagcgcggcgagcggatggtcgagatcgggccgggcctcggcgcgctcaccgggcccgtgatcgcgcggctcgcgacgcccggctcgccgctgcacgcggtcgagctcgaccgcgacttgatcggccgcctcgagcagcgcttcggcgagctgctcgagctgcacgcgggcgacgcgctcacgttcgacttcggctcaatcgcgcggccgggcgacgagccgtcgctgcggatcatcggcaacctgccgtacaacatctcgagcccgctgctgttccatctgatgtcgttcgcgcccgtcgtgatcgatcagcacttcatgctgcagaacgaggtggtcgagcggatggtcgccgaaccgggcacgaaggcgttcagccggctgtcggtgatgcttcagtaccgctacgtgatggacaagctgatcgacgtgccgccggagtcgttccagccgccgccgaaggtcgattcggcgatcgtgcggatgatcccgcatgcgccgcacgagttgccggccgtcgatccggcggtgctcggcgaagtcgtgacggctgcgttctcgcagcgccgcaagatgctgcgcaacacgctcggcgggtatcgcgatctcgtcgatttcgatgcgctcggcttcgatctcgcgcgccgcgcggaagacatcggtgtcgacgagtacgtgcgcgtcgcacaggcggtggcttcggcgcgggcgagcggc

SEQ ID NO: 13938 - DNA, 1260 bp, Burkholderia mallei
atgcatttatccgagctcaagtctctgcacgtctccgaattgatcgaaatggccaatggtctggagatcgaaaacgcgaaccgcctgcgcaagcaggagttgatgttcgccattctcaaaaagcgcgccaagacgggagaaacgatcttcggcgacggcacgctcgaagtgctgccggacggtttcggcttcctgcgctcgccggaaatgtcgtatctcgcgagcacggacgacatctacatcagcccgtcgcagatccgccgcttcaatctgcacaccggcgacacgatcgaaggtgaagtccgcacgccgaaggacggcgagcgctacttcgcgctggtgaaggtcgacaaagtcaacgggcagccgcccaaggcctcgaaacacaagatcatgttcgagaacctcacgccgctgcacccgaacaagccgctgtcgctcgagcgcgaaatgcgcggcgaggaaaacgtcacgggccgtatcatcgacatgatcgccccgatcggcaagggccagcgcggcctgctcgtcgcgtcgccgaagtccggcaagaccgtgatgctccagcacatcgcgcacgcgatcaagcagaaccatccggacgtgatcctgttcgtgctgctgatcgacgagcgccccgaggaagtgaccgaaatgcagcgctcggtcgccggcgaagtgatcgcgtcgacgttcgacgaaccggccacgcgccacgtgcaggtcgccgaaatggtgatcgagaaggccaagcgcctcgtcgagatgaagcacgacgtcgtgatcctgctcgactcgatcacgcgtctcgcgcgcgcctacaacaccgtgatcccggcgtccggcaaggtgctgacgggcggcgtcgacgcgaacgcgctgcagcgcccgaagcgcttcttcggcgcggcgcgcaacatcgaggaaggcggctcgctcacgatcatcggcaccgcgctgatcgaaaccggcagccgcatggacgacgtgatctacgaagaattcaagggcaccggcaacatggaagtgcacctcgagcgccgtctcgcggaaaagcgcgtctacccgtcgatcaacctgaacaagtcgggcacgcgccgcgaggaaatgctgatcaagcccgagatcctccagaagatctgggtgctgcgcaaattcatccacgacatggacgaagtcgaggcgatggaattcctgctcgacaagatccgccagacgaagaacaacgccgagttcttcgatctgatgcgccgcggcggc

SEQ ID NO: 13939 - DNA, 915 bp, Burkholderia mallei
atggccgatcgcgacggcaagatttggatggacggcaagctgatcgaatggcgcgacgccaagatccacgtgctgacccacacgctgcattacggcatgggcgtcttcgagggcgtgcgcgcatacaagacggccgacggcggcacggcgatcttccgcctgaaggagcacacgaagcgcctgctgaactcggcgaagatcttccagatggacgtgccgttcgaccaggaaacgctcgaagccgcgcagcgcgacgtcgtgcgcgagaacaagctcgaatcgtgctatctgcgcccgatcatctggatcggctcggagaagctcggcgtgtcggccaagggcaacacgatccacgtcgcgatcgccgcatggccgtggggtgcgtacctcggcgaggaaggcctcgcgaagggcatccgcgtgaagacctcgtcgttcacgcgccatcacgtgaacgtgtcgatggtgcgcgcgaaggcctccggctggtacgtgaactcgatcctcgcgaaccaggaagcgacggccgacggctacgacgaggcgctgctgctcgacgtcgacggctacgtgtccgaaggctccggcgagaacttcttcctcgtgaaccgcggcaagctctacacgccggatctcgcgtcgtgcctcgacggcatcacgcgcgacacggtcatcacgctcgcgaaggaagccggcatcgaggtgatcgagaagcgcatcacgcgcgacgaggtctacacggccgacgaggcgttcttcaccggcaccgcggccgaggtcacgccgatccgcgagctcgacaaccgcacgatcggcggcggcgcgcgcggcccgatcaccgaaaagctgcaaagcgcgttcttcgacgtcgtcaacggcaagagcgcgaagcacgcggactggctcacgaagatc

SEQ ID NO: 13940 - DNA, 855 bp, Burkholderia mallei
atgagcaccgctgaagcttcatcgccgcaaggccgcacgccgcaaccgggccgcgagcgcgagatggcggcgaagccgcgcgacgaggccgccggctacgtcggcagcggccgcctcgacggcaaggtcgcgctcgtgacgggcggcgacagcggcatcgggcgcgcggtcgcggtcggcttcgcgaaggaaggcgcggacgtcgcgatcgtctatctgaacgaatcggacgacgccgcgcacacgaagcacctgatcgagcagacgggccggcgctgcgagacgatcgcgctcgacatcggcgagcgcgcgaacgcgcacgtcgcgctcaggcgcgccgtcgagcgcttcggccgcctcgacgtgctcgtgaacaacgcgggcgagcagcacgtgcagaccgacatcgggcagatcagcgaagcgcagctcacgcacacgtttcgcaccaatatcttcgcgatgttcttctgcacgcaggcggcgctcacgcacatgaaggcgggcgcgcgcatcgtcaacacggcgtccgtcaccgcgtaccacggcaatccggtgctcatcgactactcggcgacgaagggcgcgatcgtatcgttcacacgctcgctcgcgctcaatctcgcgagccgcggcattcacgtgaacgcggtcgcgccggggccgatctggacgccgttgatccagtcgacgttcgacgacgagcagcgcgcgcgcttcggcgccaacgtgccgctcaagcggcccggccagccggacgagctgatcggctgttacgtgctgctcgcgtcggacggcgcggactacatgacgggccagacgctgcacccgaacggcgggacgatcgtcaacggc

SEQ ID NO: 13941 - DNA, 1008 bp, Burkholderia mallei
atgaacatgcatgaccggacggccgcgccgtctgcctcttgcgcgcccgccgccgcgagccccgctcgggccacgggccccgcgctcgccgcgctgcggcgctcgacgacgttctacccgctcgtcgggctcgtcgccgtgtgcgtcgcgatggtgttcgcgagcgacagcttcctgagcgcggcgaacctcgagaacgtgctgcggcaggtgtcgatcaacgcgatcatcggcgtcgggatgacctgcgtgatcctgacgggcggcatcgacctgtcggtcggctcggtgatggcgctgtccggcacgctcgcggcgggccttctcgtcgcgggcgcgaacggcgcggcggcgcttgccgcgggcatcggcgtcggggtcgcgctcggcgcggcgaacggcctgttcgtcgcgttcgccggcatgccgcccatcatcgtcacgctcgcgacgatgggcatcgcgcgcggcctcgcgctcatctacacgggcggctacccgatcgacgggctgcccgactgggtccgcttcttcggcagcggcaaggtgctcggcgtgcaaatgcccgtgctgacgatgctcgcggtctacgcgctcgcgtggctgatgctcgagcgcatgccgttcggccgctacgtctacgcgatcggcggcaacgagcacgcgacgcggctctcgggcgtgcgcgtgtcgcgcgtgaagctggccgtctatacgttcgcggggctcacgtccgcgctcgccgcgctcgtgctgacgggccgcctgatgagcgggcagccgaacgcggggggcggcttcgagctcgacgcgatcgccgccgtcgtgatgggcggcacgtcgatcgcgggcggccgcggctcgatcgtcggcacgcttgtcggcgcgctgctgctcggcgtgctgaacaacggcctgaacatgatcggcgtgaatccctacgtgcagaacgtgatcaagggcgccatcatcctgctcgcgatctacatcggccgcgagcgccgcacg

SEQ ID NO: 13942 - DNA, 1131 bp, Burkholderia mallei
atgttgatcagcaatgcgcgcgtcgtcacgcgcgacgacgttttcatcggcaccgtgcagatcgacggcgaatcgatccgcgcggtgtcgcgcggaacgaccgccgcgcgcgacgccgacgattggggcggcgactatctgctgcccgggctcgtcgagctgcataccgacaacctggagaagcatctcgcgccgcggccgggcgtgtactggaacgtcgatgcggcgttcgtcacgcacgacgcgcaggtcgcggcggcaggcatcacgacggtattcgacgcgctcgcgatcggcacgcggctgaacgtcggcgtgcgcgggcgcgacgtgcagacgcagtgcgcggacgcgctcgcgcgcttcgcgtcgcacgggctgctgcgcgccgagcacttcctgcacctgcgctgcgagatcgcgacggaggacgtcgtcgacgtgttcgattcgctcgcgcgccatccgcgcctgcggctcgcgtcggtgatggaccatacgccggggcagcggcagtggaaggatccgcagcaatggcgccactatcaggagcggcatcgcaagtggtccgacgaggaggcggcgacgacgatcgccgagctggccgacgagcagcagcgctacgcggacgcgcaccggcgcgcgatcgtcgcgcgctgccgcgcgctcggcgtgcccgtcgcgagtcatgacgacacggtgatcgagcacgtcgagcaggcggcgcgggagggcatcgcgctcgccgagtttccgacgacgcacgcggcggccgaagcggcgcgcgcgcgcggcatcgcgacggtgatgggcgcgccgaacctcgtgcgcggcggctcgcattcgggcaatgtgtcggcgctcgcgctcgcgcgggcggggctcctcgacatcctgtcgtccgactacgtgccgtcgagcctgctatgcgcggcgttcgacctcgtgcaccaggcgcactggagcctgccgcgcgcgatcgacacggtgtcgggctcgccggcgcgccatacggggcttcgcgatcgcggcgaaatcgcgccggggctgcgtgcggatttcgtgcgtgtcgcgctgcacggcacgctgcccgtgccgcgcgcgacatatgttcgcgggcgtcgcgtcgtg

SEQ ID NO: 13943 - DNA, 782 bp, Burkholderia mallei
atgacgaccgttcgcaagaatttcctgctgctgatgacgctgcagatctccacctatgtcgtgccgctcgtcacgctgccgctgctcacgcgcgtgctcgggcccgaagcgtacggacagctgtcgttcgtgctcgccgtcatcacctacttcatcaatttcacgaactacagcttcgatctgaccgcgacgccgcgcatcgcgctcgcgcacgacgatctcgccgcgcgctcgaagatcttctgggcgaccttcgccgcgcaggccgcgatcacggtggcgggcttcgcgatcctgctcgcgctcacgttcgcgatcgagcggttcgcgatcgaccgcacgctgctcgtgatcggcttcggcatgacggtgggcgccgcgctcacgccgggctggtatttccagggcatccagaagctgcgcatctacagcatgacgctgttcgcgtgccgcgcgctcagcgtgcccgcgatgtatctgtgcgtgcgctcgcccgccgacctgatcgacgcggtcgcgatcaacgcggccgtgccgctcgtgtgcggcgtgctcgtgttcggctacctgatcgtgcagcgcgaagtcgtgttcgttcgcatcggcgcggccgacgtcgccgcgtcgctcaagggcggctggcaggtgtttctcgcgtcgacgtcagtcgcgttctacgcgtcgacgaacaccgtgctgctcggcttcgtgtcgggcaacgtcgcggcgggctacttcgccgcgggcgacaagctgatccggctcgggcattcagcctgctg

SEQ ID NO: 13944 - DNA, 1698 bp, Burkholderia mallei
ccgcgtgcgtcgggcgtggcgcgcatcgcacggcggcccgcaccgccggggcacgcgtgttcgcccgcgcgccgcacgctatcgcgccccgcccgctacatccgtctcgcctcctcccccgcgccgcccgacctcgcccgtcttcccgaccgcttcggggccacccgtcgacggcctcgcggccgactcgcactccgggcgttcgtgcggctcgaacgaacctcgcgcccccgcccgccggccgccgccgcgcccggctcgcccggctgcccagccgcgccggacggggcccgcatgctagaatggccagcttcgaactctccctacgaaactggcgccatgaatatcgtgattttggcggcaggcaccggcaagcgcatgcgttcggcgctgccgaaagtgcttcatcctctggccggcaggccccttctctcccacgtgatcgataccgcccgcgcactcgcgccgtcccggctcgtcgtcgtgatcggccatggcgccgagcaggtgcgcgcggccgtcgccgcgcccgacgtgcagttcgcggtgcaggagcagcagctcggcaccgggcacgcggtgcgccaggcgctgccgctgctcgacccgtcgcagccgacgctcgtgctgtacggcgacgtgccgctcacgcgcacggcgacactcaagcgcctcgccgacgccgcgaccgacgcccgctacggcgtgctgaccgtcacgctcgacgatccgacgggctacgggcgcatcgtgcgcgatcaggccgggtgcgtgacgcgcatcgtcgagcagaaggacgcgtcgcccgacgagttgcgcatcgacgagatcaacacgggcatcgtcgtcgcgccgaccgcgcagctttcgatgtggctcggcgcgctcggcaacgacaacgcgcagggcgagtactatctgaccgacgtcgtcgagcaggcgatcgaagcgggcttcgagatcgtcacgacgcagccggacgacgagtgggagacgctcggcgtgaacagcaaggcgcagctcgccgagctcgagcgcattcatcagcgcaacctcgccgacgcgctgctcgccgcgggcgtgacgctcgccgatccggcgcgcatcgacgtgcgcggcacgctcgcgtgcgggcgcgacgtgtcgatcgacgtgaattgcgtgttcgaaggcgacgtgacgctcgccgacggcgtgacgatcggcgcgaactgcgtgatccgccacgcggcgatcgccgcgggcgcgcgcgtggacgcgttctcgcatctcgacggcgcgacggtcggcgcgaacgcggtcgtcggcccgtacgcgcggctgcgcccgggcgcggtgctcgccgccgacgcgcacgtcggcaacttcgtcgaggtgaagaacgcgacgctcggccaaggctcgaaggcgaaccatctgacctatctcggcgacgcggacatcggcgcgcgcgtgaacgtcggcgcgggcacgatcacgtgcaactacgacggcgcgaacaagttccgcacggtcatcgaggacgacgtgttcgtcggctcggacacgcagttcgtcgcgccggtgcgcgtcggccgcggcgtgacggtggcggcgggcacgaccgtatggaaggacgtcgccgcggacatgctcgtgctcaacgacaagacgcagaccgcgaagagcggctacgtgcgccccgtcaagaagaagagc

SEQ ID NO: 13945 - DNA, 501 bp, Burkholderia mallei
atggccgcgcccatggcgactcctttttcgcgtgcatcggcacgcgccacatcgacatcgagacccgacatgcgctattcggtaaacgaaggacatctggaattgcccggccagtggctggaccgcagcgtcaatgcgttgctgccggccatggcggaagtcacgggaagcaacctcgtgctcacgcgcgatgaactgccttatggcgtcgagttcgccgattacgtcgacgtgcagcgcgcgaaataccgcaaggagctgagcggcctgcagatgcagcgcgacgagccgggcgtgctggacgggcggccctgccagtttctcgccttcacctggaacaaggacgacctgctcatccaccagatggcggtgatcgttctcgatgcgccgctggtgctgacctacacgagccccggccggttgcccgacggcgtacgtgacgcgatcggcgcggcgttggcgagcttccgatttcaccgcggcgcgcaacttcccgcttcg

SEQ ID NO: 13946 - DNA, 831 bp, Burkholderia mallei
atgacatcctccttcaccaccatcggcggcagcggtacgaccgtcaacagcctgccgtacgacacgatgagctcgaacgggcagtcgtcgggcacgtcgggcgcgaacacgacgaacggcactgccggcacgaacggcacgagcggcgcgaactcgggcatcaacgtcgcgagctcgctgtcgacgacgtccgctgccgatctgcagacgacgttcctcaagctgctcgtcacgcagttgcagaaccaggatccgacgagccccgtcgacagctcgcagatgacctcgcagctcgcgcagatcaacaccgtgagcggcatcgcgcagttgaacaccgcgctcacgtcgctgtcgtcgcagctcaccgcgggccagcagacgcaggcggcgatgctgatcggctctaacgtgctcgcgccgggcaacaccgtgcccgtcaagagcggcgcggcttcgccgttcggcgtgcagctcacgagcgccgtgtcgaacctcacgatcaccgtgaagaacgcgtcgggcgtcgtcgtcaacacgatcaacgcgggcgcgcaatcggcgggcaccgtgccgttcaactggacgccgaccgatacggcgggcaacaagctgcccgacggcacctacacgatcagcgcgagctacaccgacacgtccggcaagcagtacgcgccgaccacgctgtcggtgctgagcgtcatcaagcaggcggacggcacgccggggctcgtgctgtcgaacggctcgacggtcggcttcagccaggtcgcgtcgatcttcccgaacaccacgaagagcgcgtcgacgggcaacgcctcgtcttccaccaac

SEQ ID NO: 13947 - DNA, 987 bp, Burkholderia mallei
atggcgctactcgaagtcaaggacctcggcgtgcgcttcacgcgccgtaaaggcgagcccgtcgacgcggtatcgggcgtgtcgttctcgctagaggcgggcaggacgctcggcatcgtcggcgaatcgggctccggcaagagccagacggtgatggcgctgctcgggctgctcgcgggcaacggatcgacctcgggcgaggcgctgttcgacggcgagaacctgctgcggatgaacacgcggcagctgaacgcggtgcgcggcgaccggatcgggatgatctttcaggacccgatgacctcgctcaatccgttcctgacgatcgagcggcagatgaccgagagcctgcagcttcaccggaagatgtcgcgcaagcacgcgctcaagcgggcgatcgacgcgctcgaggtggtcaggattcccgatgcggcgcgccggatccggatgtatccgcacgagttctcgggcggcatgcgccagcgcgtgatgatcgcgatggcgctgctgctcgaaccggagatcctgatcgccgacgagccgaccaccgcgctcgacgtcaccgtgcaggcgcagatcatcgagctgctgcgcgagctgaaccgcgagcgcggcacgtcgatcgtgctgatcacgcacgacatgggcgtggtcgcggggctcgccgacgacgtgatggtgatgtacgcgggccgcacggtcgaatacgcgagcgccgacgcgatcttctccgcgccgtcgcatccgtacacgatcggcctgttgaacgcgttgccgcgtctcgacgcgcccgacgacgcgccgctcgtcgcgattcccggcaatccgccgctgcccggccaggggctgctcggctgcgcattcgcgaagcgctgcgctcatgcatcggagcgatgcggcgtcgagcgccccgatctgatcgcctattcggacgcgggcgccgtgcgcgcgtgtcatcggcccattgcggaaatcacgggagggctgcga

SEQ ID NO: 13948 - DNA, 1335 bp, Burkholderia mallei
atgaaaccggtcattgccctcgttgggcgccccaatgtggggaaatccacgctgttcaaccggctcacgcgctcgcgcgatgcgctggtcgccgatctgcccggcctcacgcgcgatcgccattacggcgaggggcgggttggcgcacggccgtacctcgtcgtcgacacgggcggcttcgagcccgtcgcgaaggacggcatcctgcacgagatggcgcgccagacgcgccaggcggtcgaggaggcggacgtcgtcgtgttcatcgtcgacggccgcaacggcctcgcgccgcaggacaagtcgatcgccgattatctgcgcaagaccggccggccgatcttcctcgtcgtcaacaaggccgaggggatgaaatacacggcggtcgcgtcggatttctacgagctcggcctgggcgatccgcgcgcgatctcggccgcgcacggcgacggcgtgaacgacatgatcaacgaggcgctcgaagtcgcgtacgcgggcgagccgcaggagagcgaggaggccgccgccgcgcgcggcatcaagatcgcgatcgtgggccggccgaacgtcggcaagtcgacgctcgtcaacacgttgatcggcgaagaccgcgtgatcgcgttcgatatgcccggcacgacgcgcgattcgatctacgtcgacttcgagcgcaacggcaagcactacacgctgatcgacacggcgggcctgcgccggcgcggcaaggtgttcgaggcgatcgagaagttctcggtcgtgaagacgttgcagtcgatctccgacgcgaacgtggtgattcttctgctcgatgcgcgccaggatatttccgatcaggacgcgcacatcgcgggcttcgtcgtcgagcagggccgcgcgctcgtcgtcggcgtgaacaaatgggacgggctcgatccgcacgtgcgcgagcggacgaaggcggatctcgcgcgcaagctgaaattcctcgagttcgcgaagttccatttcatctcggccgcggagaaaaccggcatcggcgcgctgatgcgttcggtcgacgacgcctacgcggccgcgatgaagaagctgccgacgccgaagctcacgcgcgcgctgatcgaggcggtcgagttccagcagccgcgccgccgcggcccggtgcggccgaagctgcgctatgcgcaccagggcggacagaatccgcccatcatcgtgatccacggcaacgcgctcgacgccgtgacggaaacgtacaagcgctatctcgagaatcgctttcgcgaaactttctcgctgacgggcactccattgcgcatagagttccgctcgtcgacgaacccgtacgccgacaaggac

SEQ ID NO: 13949 - DNA, 792 bp, Burkholderia mallei
atggacgaagccacgcagagcgcgatccagttcgacgtcgtcacactctttccggagatgtttcgcgcgttgaccgactggggcatcacgagccgcgcggtgaagcaggggcggttcggcttgcgcacgtggaatccgcgcgatttcacgaccgacaactaccgcaccgtcgacgatcgcccgtacggcggcggccccggcatggtgatgctcgcgaaaccgctcgaggcggcgatcggcgcggcgaaggccgcgcaggcggcgcaaggcgtcgcgacgtcgcgcgtcgtgatgatgtcgccgcagggcgcgccgctcacgcacgagcgcgtcgcgcggatggcggcggagcccggcgtcgtgctgctgtgcggacgttacgaggcgatcgatcaacggttgatcgaccgttgtgtcgacgaggaactgagcctcggcgatttcgtgctgtcgggcggcgaattgccggcgatggcgctgatggacgccgtcgtgcgactgctgcccggtgtgctgaatgatgcgcaatcggcggtgcaggacagcttcgccgatgggttgctcgattgcccgcattacacgcggcccgaggagtacgagggcgtgcgcgtgccggacgtgctgctcggcgggcatcatgcggagatcgagcgctggcgtcggcaggaagcgttgagaaacaccatcgcgaagcgccccgacttgatcgcgcgggcgcgtcgcgaaaagttgctgagccgggccgacgaggcatggcttgcaagtctcgcgaaagaagcgaagcaggcctcc

SEQ ID NO: 13950 - DNA, 1308 bp, Burkholderia mallei
atgacgtcccttcacgatcgtcacatcaaaccgctgatcctcgccggcctgaccggcgagaactggcatctcgaagactacgtcgcgcgcggcggctacaagcagttgcgccgcatcctcgaagaaaagattccgcccgagcaggtgatcgccgacgtgaaggcgtcggggctgcgcggccgcggcggcgcgggcttcccgaccggcctgaagtggagcttcatgccgcgccagttcccgggccagaagtatctcgtctgcaactcggacgagggcgagccgggcacgttcaaggatcgcgacatcctgcgctggaacccgcatgcgctgatcgaaggcatggcgatcggcgcgtacgcgatgggcatcaccgtcggctacaactacatccacggcgagatcttcgaagtgtatcggcgcttcgaggcggcgctcgacgaagcgcgccgcgcgggcttcctcggcgagaagatcatgggctcggatttctcgttccagttgcatgcgcaccacggctacggcgcgtacatctgcggcgaggaaaccgcgctgctcgagtcgctcgaaggcaagaagggccagccgcgcttcaagccgccgttcccggcgagcttcggcgtatacggcaagccgacgacgatcaacaacaccgagacgttcgcggcggtgccgttcctgctggcggtcggcccgcagaactacctcgagatgggcaagccgaacaacggcggcacgaagatcttctcggtgtcgggcgacgtcgagcgtccgggcaactacgagattccgctcggcacgccgtttgcgacgctgatggagctcgcgggcgggatgcgcggcggcaagaagatcaaggcggtgatcccgggcggttcgtccgcgccggtgatcccgggcgacatcatgatgcagaccgatatggactacgactcgatcgcgaaggcgggctcgatgctcggctccggcgcggtgatcgtgatggacgagacgcgctgcatggtgcgctcgctgctgcgcctgtcgtacttctattacgaagagtcgtgcggccagtgcacgccgtgccgcgaaggcacgggctggctgtatcgcgtcgtgaaccgcatcgagcacggcgaggggcgccaggaagacctggacctgctgaactcggtcgcggagaacatcatgggccgcacgatctgcgcgctcggcgacgcggcggtgatgccggtgcgcgggatgctcaagcactactgggacgaattcgcgtaccacgtcgagcacaagcactgcatggtcggcggccacgcgcatgcggccgtcgcc

SEQ ID NO: 13951 - DNA, 606 bp, Burkholderia mallei
atgaaattaatcggttcgctcagcagcccgttcgtccgcaaggcgcggatcgtgctcgctgaaaagaagatcgactacaagctggagctcgaaaacgtctgggcgccggacacgaacatccatgcgtcgaatccgatcggcaaggtgccgtgcctcgtgatggaggacggcgcggccgtgttcgattcgcgcgtgatctgcgaatacgtcgacacgctttcgcccgtcggcaagctgattccgccgtcggggcgcgagcgcgtcgaggtgcggtgctgggaggcgctcggcgacggcgtgctcgacgcggcggtcgcgattcgcatcgagcacacgcagcgcgagccgcagcatcgcagcgatgcgtggatcgcgcgccagcagcgcaaggtcgacgacggcctcgtcgcgatgtcgcagggcctcgccggcaagacgtggtgcgtcggcaaccactacacgctcgccgacatcgcgctcgggtgcacgctcggctacctcgatttccggatgcccgagatcaactggcgcgaacgccatccgaatctcgacaagcatttcgcgaagctggcgcagcgccagccgttcgtcgacacggtgccccag

SEQ ID NO: 13952 - DNA, 660 bp, Burkholderia mallei
atgcgtttgatcctgttgggcgcgcccggcgcgggaaagggcacccaggcaaacttcatcaaggagaagttcggcatcccgcaaatctcgacgggcgacatgctgcgtgccgccgtgaaggccggcacgccgctcggcgtcgaggcgaagacgtacatggacgaaggcaagctcgtgccggattcgctgatcatcggcctcgtcaaggaacgtctgaaggaagcggactgcgcgaacggctatctgttcgacggcttcccgcgcacgatcgcgcaggccgacgcgatgaaggaagcgggcgtcgcgatcgactacgtgctggagatcgacgtgccgttctcggaaatcatcgaacgcatgagcggccgccgcacgcatccggcgtcgggccgcacgtatcacgtgaagttcaacccgccgaaggtcgagggcaaggacgacgtcacaggcgagccgctggtccagcgcgacgacgacaaggaagagacggtgaagaaacgcctcgacgtgtacgaggcgcagacgaagccgctcatcacgtactacggcgactgggcgcggcgcggcgcggaaaacggcctgaaggcgcccgcttaccggaagatctccggcctcggcgccgtcgaggaaatccgcgcgcgcgtgttcgacgcgctgaag

SEQ ID NO: 13953 - DNA, 1047 bp, Burkholderia mallei
atgacttccagcgctgattccggccgcgacgccgcgtggctcgacgatttcctcgcgctgacgctcgcgggcgacgcgccgcccgcggaggcgggcgagtgcgcggcgcgcgcggtgcgctggcgctggcttggcgacggcttgctgcggctcgagcccgccgacgcggcgcagcgcatgcagagcgtgctcgtgtcggcgggcgtgcacggcgacgagaccgcgccgatcgaactgctgtcgacgctcgtgcgcgacatcgcgcgcggtgcgttgccgctgcgctgccgcctgctcgtcgcgctcggcaatccgggcgcgatgcgagcgggcgagcgctatctcgacgacgatctgaaccggctgttcggcggccgccacgcgcagctcgcggcgagccgcgaggcgccgcgcgccgcgcaactggaggccgccgcggcgttgttcttctcgacggcgggccgcgcgcgcggcgcgcgctggcacatcgacatgcacacggcgattcgcacgtcggtgttcgagcagttcgcgctgctgccgcacacgggcgagccgccgacgcgcacgatgttcgagtggctcggcgaggcgcagatcgccgcggtgctgctgcataccacgaagggcagcacgttctcgcatttcaccgcgcaagcctgcggcgcgctcgcctgcacgctcgagctcggcaaggtgatgccgttcggcgcgaatgatctgtcgcgcttcgcgcccgccgacgcggcggtgcgccgcctcgtgtccggccgccgcgacgcgccgcgcggcgcgctgccgcgcgcgttcacggtcgtcgaccagatcacgaagcaaagcgatgcgctcgaactgttcgtcgcgaacgacgtgccgaatttcacgccgttcgcgcgcggcacgctgctcgcgcgcgacggcgactatcgctacgcggtgcggcacgagcaggagcgcatcgtgtttccgaatccgtcggtgaagcccggcttgcgcgcggggctgctcgtgatcgagacgacgcgcgacacccacgcggcgctcgcg

SEQ ID NO: 13954 - DNA, 1236 bp, Burkholderia mallei
gtgagccgccgtcgtgttgttgttacaggccttgggctgatttcgcctgttggcaataatgttgccgacggctgggccaatctcgtggccggcaagtccggcatcgtcaatatcacgaagttcgacgcgacgaacttctcgacccgcttcgcgggcgaggtgaagggcttcaacgtcgaggagtacatcccggcgaaggaagcgcgccacatggatacgttcatccattacggcatcgcggccggcatgcaggcgatgcaggacagcggcttccaggtcaccgacgaaaacgcggagcgcgtcggcgtcgtggtcggctcgggcatcggcgggctgccgatgatcgaagtcacgcagaccgagctgctcaaccgcggcccgcgccggatctcgccgttcttcgtgccggcgtcgatcatcaacatgatctccggccacctgtcgatcaagttcggcatcaagggcccgaatctcgcgatcgtcaccgcgtgcacgaccggcctgcactgcatcggcgaggcggcgcgtctgatcgaatacggcgacgccgacgtgatgatcgcgggcggcgcggaagcgaccgtgtcgccgctcggcatcggcggcttcgcggcggcgcgcgcgctgtcgcagcgcaacgacgatccggcgacggcgagccgtccgtgggacaaggatcgcgacggcttcgtgctcggcgagggcgcgggcgtgatggtgctcgaggagtacgagcacgcgaaggcgcgcggcgcgaagatctacgcggaagtcgcgggctacgggatgagcggcgacgcgtaccacatgacggcgccgctcgagaacggcgacggcgcacgccgctgcatgctggccgcgctgcgcaacgcgggcgtgaacgccgatcaggtgaattacctgaacgcgcacggcacgtcgacgccgctcggcgatctggcggagaccgtcgcgatcaagcgcgcgttcggcgatcactcgaaggacatcgtcgtcaactcgaccaagtcgatgacggggcacttgctcggcggcgccggcgggctcgaatcggtgttcacggtccttgccgtccacaaccaggtgtcgccgccgacgatcaacatcttcaaccaggaccccgagtgcgatctcgactattgcgcgaacgaagcgcgcgagatgaagatcgacgtcgcgttgaagaactccttcggcttcggcgggactaacggcacgctggtcttcaagcgcgcc

SEQ ID NO: 13955 - DNA, 786 bp, Burkholderia mallei
gtgattgcgctggggcaccgcgaatcgtcgattccgttctcgtactatgaccagaatcagcaggtcgtcggctattcgcgcgacttccagatgaaagtcgtcgacgcggtcaagaagaagctgaatctgcccaacctgcaggtgaagaatattccggtgacgtcgcagaaccggattccgctcgtgcagaacggcacggtcgacatcgagtgcggctcgaccacgaacaacctcgatcgccagaagcaggcggcgttctccgacacgatcttcgtgatcggcacgcgcctcatgacgaagaaggattcgggcatcaaggatttcgccgatctgaagggcaagaccgtcgtcacgacggcgggcacgacgtccgagcgcctgctgcgcgagatgaacaacaagaaccagatgggcatgagcatcatcagcgcgaaggaccacggcgagtcgttccagacgctcgagacgggccgcgcggtcgcgttcatgatggacgacgcgctgctcgcgggcgagcgcgcgaaggcgaagcagccgggcgagtgggtgatcgtcggcaagccgcagtctcaggaagcgtacggctgcatgatgcgcaaggacgatccggcgttcaagaaggtggtcgacgacgcgatcgtgcaggtcgagaagtcgggcgaagccgcgaagatctattcgaagtggttcgagaatccgattccgccgaagggcctgaatctgaacttcccgctctccgacgagatgaagaagctctacgcgaacccgaacgacaaggcgctcgac

SEQ ID NO: 13956 - DNA, 1047 bp, Burkholderia mallei
atgcgtcaactgctggatcacgccgcggagaacggctacggcctgcccgcgttcaacgtgaacaacctggaacaggtgcaggcgatcatggcggccgccgacgaagtcggcgcgcccgtgatcatgcaggcatcggcgggcgcccggaagtacgcgggcgaggcgttcctgcgccacctgatcgaggcggcggtggaatcgtacccgcacattcccgtcgtgatgcaccaggatcacggccagtcgcccgccgtgtgcatggcggcgatccgcagcggcttcacgagcgtgatgatggacggctcgctcgaggccgacggcaagacggtcgcatcgtacgaatacaatgtcgacgtgtcccgcaaggtcgtcgagatggcgcactcgatcggcgtgacggtcgaggccgagctcggcgtgctcggctcgctcgagacgatgaagggcgacaaggaagacggccacggcgccgaaggcacgatgacgcgcgagcaactgctgacggaccccgagcaggccgccgacttcgtcaagctcacgcagtgcgacgcgctcgcgatcgcgatcggcacgtcgcacggtgcgtacaagttcacgaagaagccgacgggcgacatcctgtcgatccagcggatcaaggagattcacgcgcgcattccgaacacccacctcgtgatgcacgggtcgtcgtcggtgccgcaggatctgctcgcggaaatccgcgaattcggcggcgacatgaaggaaacctacggcgtgcccgtcgaggaaatccaggaaggcatcaagcacggcgtgcgcaaggtcaacatcgacaccgacctgcgtctcgcgatcacgggcgcgatccgccgctacatgttcgagaatccgggcaagttcgatccgcgcgattacctgaagcccgcgcgcgaagcggcgaagaagatctgcgtcgcgcgctatctggcgttcggctgcgagggccaggcggcgaagatcaagccggtgccgctcgagaagatcgccgagaagtacaaggcgggcgacctcgcgcaagtggtgcgt

SEQ ID NO: 13957 - DNA, 1143 bp, Burkholderia mallei
atgaatctgctgaaacgttacgctgcacccgttgcctgcgcggcggccgtcctggttttcgcggcctgttcgtcaacgaaggacgcgcgccgcgtgccgacgccgctcaccgagttcaaacccgtgctcgacgtgcagcaggtgtggacggcgagcgtcggcaagggcggccgctactcgttctcgcccgtcgcggtgggcgacgccgtgtatgtcgccggcgcgaacggttcggtcgagaagatcgacgcgaagacgggccagcaagtctggcgtacgaagatcggctcggacttgtcggcgggcgtcggcagcgacggcaacctgaccgcggtcggcgcgctgaagggcggcgtgttcgtgctcggcccggacggcaagcagttgtggaaagccaccgtgcaaggcgagatcttctcgccgccgctcgtcggcaacggtctcgtgatcgtgcgcacgatcgacggccaggtgatcgcgttcgccgcgcagacgggcgagcagaagtggacttaccgcaaccgcgcggtgccgctgaacctgcgcgtgtcggccggcatgacgttcgcgggcgacgccgcggtgctcgcgggcttcccgggcggcggcctcgtcgcgctgaacctgcagacgggcgagccgttctggcagacgcccgtgtcgtttccgaaaggcgtgaccgaagtcgagcggatcaacgacgtgacgggcgcgccgacgctcgtcggcgccgagacgtgcgcggtgacgttccaggggcagctcggctgcttcgatgcgaactcgggccgcccgttgtgggaaaagccgttttcgagccgcagcggcgtcgcgcaggacgatacggtcgtcgtgggcggcgacgactggtcggtcgtgtcggcttacgacgtcgcgacgggcaaggcgctctggcgcaacgacaagctgaagagccgcgacgtcggcgtgccgtacctgctcggccacgcggtcgtgctcggcgactacaagggcttcgtgcatttcctgtcgcgcgatgacggcacgttcgtcgcccggatgaagacggacggcagcgcgatcgccgccgcgcccgtgcttgccggcaacacgctcgtcgtcctgacgcaggacggcggcgtatacggtttccgtccgcgc

SEQ ID NO: 13958 - DNA, 948 bp, Burkholderia mallei
gtgagcgaccagttacaaaaattcatgttcaacgcagccccggtgcgcggcgagatcgtctcgctgcgcagcacgtggcaagaggtgctcacgcgccgcgactacccgacgcccgtgcgcaacgtgctcggcgagatgatggcggcgtgcgcgctgctgtcggcgaacctgaagttcgacggcacgctcatcatgcagatcttcggcgacgggccggtgaagatgctcgtcgtccagtgcagctcggatctcgcgatgcgcgcgaccgcgaaattctcgggcgacgccgcgcgaaccgtcggcgacggcacttcgttcgccgaactgatcaatgcgagcggccacggccgttgcgtgatcacgctcgatccggccgacaagcgtcccggccagcagccctatcagggcatcgtgccgctgaacggcgaagacggcccgctcgcgtcgatcgccgacgtgctcgagcactacatgcgccattccgagcagctcgacacgcgcctctggctcgccgccgaccacgatcgcgcggtcggcgtgctgctgcagaagctgccgggcgacggcggcatcgtgccgcgcgtcgagcaaaccgatacggatacatgggagcgcgtgtgcacgctcggcggcacgctgtcgtcgaaagagctgctcgaagtggaacccgagaccgtgtttcggcgtctgttctggcaggagaatgtgcagcacttcgaaccgacgtccacgcgcttccagtgcacgtgctcgcgcgagaaagtcggcgggatgctgcgcatgctcgggcgcgtcgagatcgacggcgtgatcgaagagcgcggacacgtcgagatccactgcgaattctgcaatcagcgctacgaattcgatccggtcgacgtcgcccagctgttctcgacgcccgagctcggcaccggggtcgcgcccgctgccgcgcaacggcat

SEQ ID NO: 13959 - DNA, 825 bp, Burkholderia mallei
atggcaatcgtcaaagtcaagccgacatcgccgggtcgccgcgcgatggtcaaggtggtcaacaaggacctgcacaagggcaagccgcacgccgcgctgctcgatacgcagagctccaaggctggccgcaacaacaacggtcgcatcacgacgcgccaccagggcggcggtcacaagcagcattaccgcgtgatcgatttccgtcgcacgaaggacggcatcccggcgaaggtcgagcgtctcgagtacgacccgaaccgcagcgcgaacatcgcgctcgtgctgtacgcagacggcgaacgccgctacatcatcgcgccgaagggcgtgacggtgggccagcagctgatgtcgggctcggaagcgccgatccgcgcgggcaacacgctgccgatccgcaacatcccggtcggtacgacgatccactgcatcgaaatgctgccgggcaagggcgcacagatggcgcgttcggccggtacgtcggcaatgctgctcgcacgcgaaggcctgtacgcgcaggttcgtctgcgttcgggcgaaatccgccgtgtgcatatcgagtgccgcgcgacgatcggcgaagtcggtaacgaagagcacagcctgcgccagatcggcaaggccggtgcgaaccgctggcgcggtatccgcccgacggtgcgtggcgtcgcaatgaacccgatcgaccacccgcacggtggtggtgaaggccgtaccgctgcgggccgcgacccggtgagcccgtggggcacgccgacgaagggcttccgtacgcgtcgcaacaagcgcacgacgacgatgatcgtccagcgccgtcacaagcgt

SEQ ID NO: 13960 - DNA, 1305 bp, Burkholderia mallei
atggccgattcctatttcccgcggtggcgcgcgcagccgcgcgacgacgcggcccgcgtcatcgcccccgacgagcgcctgccgtggccgcagacgttcgcgatgggcgtgcagcacgtcgtcgcgatgttcggctcgacggtgctcgcgccgctgctgatgggcttcgatccgaatctctgcatcctgatgtccgggatcggcacgctgctgttcttcgtgctcgtcggcgggcgcgtgccgagctacctcggttcgagcttcgcgttcatcggcctcgtgatcgcggtgacgggctatgcgggcggcggcgcgaatccgaatgtgccggtcgcgctcggcgggatcgtcgcgtgcggcgtcgtctatgcgctgatcgggctcgtcgtggcggccgtcggcacgcgctggatcgagacgctgatgccgcccgtcgtcaccggcgcgatcgtcgccgtgatcgggctgaacctcgcgccgatcgcggtgaagggcgtgtccgcatcgactttcgacgccacgctcgcgctcgtgaccgtgctgtgcgtcggcggtgtcgcggtgttcgcgcgcggcatgctgcagcgcctgctgatcctcgtcggcgtgctgatcgcgtacgtgatctacgcggtgctcacgaacggcatggggctcggcaagccgatcgatttcgcgatcgtcgcgcaggctgcatggttcggcgtgccgacgttgcaccggcccgtgttcgatccgcacgcgatgctgctgatcgcgcccgtcgcggtgatcctcgtcgcggaaaatctgggtcacatcaaggcggtgagcgcgatgacgggccgcaatctcgaccgctacgtcggccgcgcgttcatcggcgacggcctggcgacggtcgtctcggccagcatgggcggcacgggcgtgacgacgtatgcggagaacatcggcgtgatggcggtgacgaggatctactcgacgctcgtgttcgtcgcggccgcgctgatcgcgatcgcgctcggcttctcgccgaagttcggcgcggtgatccagacgattccggggccggtgctgggcggcgtgtcgatcgtcgtgttcggcctgatcgcggtgacgggcgcgcggatctgggtcgtgaaccgcgtcgatttctcggacaaccggaacctgatcgtcgccgccgtcacgctcgtgctcggcgcgggcgacttctcgctgaaactgggcggcttcgcgctcggcgggatcggcaccgcgacgttcggcgcgatcctcctctacgcgctgctgcgcaaggagaaggagccggggccgatggtg

SEQ ID NO: 13961 - DNA, 1638 bp, Burkholderia mallei
atgaaagcatccgatctgttcgtgaaggcgctggaggcggaaggcgtccagtatgtgttcggcattcccggcgaggaaaacctcgatctgctcgaatcgctgcggcgatcccgcatcaagctcgtgttgacccgccacgagcaggcggcgggcttcatggcggccacctatgggcggctgaccggcaagacgggcgtgtgcctcgcgacgctcgggcccggcgcgacgaacttcgtcaccgcggccgcgtatgcgcagctcggcggcatgccgatgctgatgatcaccgggcaaaagccgatcaagtcgagcaagcaggggcacttccagatcgtcgacgtcgtcgggatgatgcagccgctcacgaagctcacgcggcagatcgtgtcgatcggcaatattccgtcggcggtgcgcgaggcgttccggcgcgcggaggaggaacgccccggcgcgacgcatctcgaattgcccgaggacatcgcgcacgaggagggcgacggcaagccgattccggcgagttacagccgccggccgatcgccgaggaaaaggcgctcgcgcgcgcggtggacgcgatccaggcggcgcgccacccgctgctgatgatcggcgcgggcggcaatcgcaagacgacctgcaggatgctcaaggagttcgtcgacacgacgggcattccgttcttcacgacgcagatgggcaagggcgtgatcgacgagacgcatccgctgtggctcggcaacgcgacgctgtcggacggcgatttcgttcaccgcgcgatcgagcacgccgattgcatcgtcaatgtcggccacgacgtgatcgagaagccgccgttcttcatgcgcgccgacgacaagaccgtgatccacgtgaacttcctcggcgcgcaggtcgaccccgtctactttccgcagatcgaagtcgtcggcgacatcgcgaacgcggtgtggcagatgaaggagaagctcgcgcggcagccgcactgggatttctcgcgcttcatgctgatcaaggcgcacttcgacgcgcacctgaagaaggggcaggacgacccgcgctttccgatgtacccggtgcgcatcgtcaacgatctgtaccggtcgctgccggaggacggcatcgtatgcctcgacaacggtatgtacaagatctggttcgcgcgctactggcgcgcgcacgagccgaattcgctgctgctcgacaacgcgctcgcgtcgatgggcgcggggctgccgtcggcgatcgcgacgaagatcgtgcatccgcagcgcaaggtgatcgccgtgtgcggcgacggcggcttcatgatgaattctcaggagctcgaaacggcggtgcggctcaagctcgatctcgtcgtgatgatcctgcgcgacgatgcgttcgggatgatccgctggaagcaggagaacatgaattttcccgattacgcgatgacgctcgcgaacccggatttcgtcgcgtatgcgcagagctacggcgcgcacgggcaccggatcgcgtcggccgacgcgctcgagccgctcgtgcgcgagtgcttcgcgtcgccgggcgtgcacctgatcgacgtgccgatcgactactcggacaacgagcgcgtgctcaatcgcgaaatcaagcgcctgtcggcgcagctg

SEQ ID NO: 13962 - DNA, 1152 bp, Burkholderia mallei
atgactctctcgattacgagcaatttcgatgcgggcgcgatcgacgtcgtatcgtgcgagcgcgcggacgcgatccggctgcgcgtgcgcggcgacaatcgctccgaattcgcgcagtggttctacttccggctgacgggcgcgcgcggcgagcgttgcgtgatgacattcgagaacgcgaacgactgcgcgtatccggccggctggcgcgactatcgcgcggtcgcgagctacgaccgggtcaactggttccgcgtgccgacgtcgtacgacgggcagatgctgacgatcgaccatacgcccgaattcgacagcatccattacgcgtatttcgagccgtacagcgaagagcgccattccgaatttctcggcgcggtgcagcagatgccgcaggcgagtgtcgtcgagctggggcgcacggtcgaagggcggccgatgtcgctcgtcgtgctcggcacacccgacgaagcgggcgccgcgaagaagaaagtgtggatcatcgcgcgccagcatccgggcgaatcgatggcggaatggtttatcgaggggctcgtgaagcggctcgtcggctggggcgactggtcgggcgatccggtcgcgcgcaagctgtacgaccatgcgacgttctacatcgtgccgaacatgaatccggacggcagcgtgcacggcaacttgcgcacgaacgccgccggcgcgaacctgaatcgcgagtggatggagccggatgccgagcgcagccccgaagtgctcgtcgtgcgcgatgcgatccacgcgatcggctgcgatctgtttttcgacatccacggcgacgaggatctgccgtacgtgttcgcggcgggctcggagatgctgcccggcttcaccgagcagcagcgcgtcgagcagagcgcgttcatcgattcgttcaagcgcgcgagccccgatttccaggacgagcacggctatccgcccggcaagtacagggaggacgcgttcaagctcgcgtcgaagtacatcggccatcggttcggctgcctgtcgctgacgctcgagatgccgttcaaggacaacgcgaatctgcccgacgagcacatcggctggaacggcgcgcgcagcgcgtcgctcggcgcggcgatgctgggcgcgatcctcgagcacgtgcgggcctttgcc

SEQ ID NO: 13963 - DNA, 1946 bp, Burkholderia mallei
cgcgccgtcgtcttcgcgtatcacaacgtcggcgtgcgctgcctgcaggtactgctcgcgcgcggcgtggacgtcgcgctcgtcgtcacgcacgaagacagcccgaccgagcacatctggttcggcagcgtcgcggcggtcgcggccgagcacggcatcgcggtcatcacgcccgccgatccggccggcgccgacgtgcgcgcggcgctcgcgagcgcgaagcccgatttcatcttctcgttctattaccggcacatgctgcccgtcgacctcctcgcgctcgccgcgcgcggcgcgtacaacatgcacggctcgctgctgccgaagtaccgcggccgcgtgccgacgaactgggcggtgctcaacggcgagaccgaaaccggcgcgacgctgcacgaaatggccgcgaagcccgatgcgggcgcgatcgtcgggcagaccgcggtgccgatcctgcccgacgacaccgccgcgcaggtgttcgacaaggtcaccgtcgccgcggagcagacgctctggcgcgtgctgcccgcgctgctcgcgggcgaagcgccgcacctgccgaacgatctgtcgcagggcagctactacggcgggcgcaagcccgaggacgggcgcatcgactggacgcagccggccgcgaacgtgtacaacctgatccgcgcggtcgcgccgccgtatccgggcgcgttcaccgatctcggcggcacgcgcttcgtgatcgcgcgcgcgcggctcgccgcgcccggcacggccgccgcgcgcgcggccgtcgatttgccgccgggcctgcacgtaagcgataatgcgctgttcggcgtttgcggcgacagccgcgccgtctccattctcgaactgcgccggccgcacgacggcggcgaagccgtcgtttccccggcgcaattcgcgcagttcattcattcttcccgtcattcatgaaagcaaaaaaagtcctgatcctgggtgtgaacggcttcatcggtcatcacctgtccaagcgcattcttgaaaccaccgattgggaagtgttcggcatggacatgcagaccgatcggctcggcgatctcgtcaagcacgagcggatgcatttcttcgaaggcgacatcacgatcaacaaggagtgggtcgagtatcacgtgaagaagtgcgacgtgatcctgccgctcgtcgcgatcgcgacgcccgccacctacgtcaaacagccgctgcgcgtgttcgagctcgacttcgaggcgaacctgccgatcgtgcgctcggccgtcaagtacggcaagcatctcgtgtttccgtcgacgtccgaggtctatggcatgtgcgcggacgagcagttcgacccggatgcgtccgccctcacctacggcccgatcaacaagccgcgctggatctacgcgtgctcgaagcaactgatggaccgcgtgatctggggctacgggatggaaggcctgaacttcacgctgttccgcccgttcaactggatcggcccgggcctcgactcgatctacacgccgaaggaaggcagctcgcgcgtcgtcacgcagttcctcggccacatcgtgcgcggcgagaacatcagcctcgtcgacggcggctcgcaaaagcgcgcgttcacgtacgtcgacgacggcatcagcgcactgatgaagatcatcgagaattcgaacggcgtcgcgacgggcaagatctacaacatcgggaatccgaacaataacttctcggtgcgcgaactcgcgaacaagatgctcgagctcgcggcggagttccccgagtacgccgattcggccaagcgcgtgaagctcgtcgagacgacctcgggcgcgtactacggcaacggctatcaagacgtgcagaaccgcgtgccgaagatcgagaacacgatgcaggagctcggctgggcaccgcagttcacgttcgacgacgcgctgcgccagatcttcgaggcgtaccgc

SEQ ID NO: 13964 - DNA, 519 bp, Burkholderia mallei
atggaaatcggacaatatcaaccgaacctcgaaggcgacggcctgcgtatcggcatcgttcaatcgcgcttcaacgagcccgtgtgcaacggcctcgcggatgcatgcgtcgaagagctggagcgtctcggcgtctccggcgaggacgtgctgctcgtgaccgtgccgggcgcgctcgaaatcccgctcgcgctgcaaaagctcgcggagagcaaccagttcgacgcgctgatcgcgctcggcgcggtgatccgcggcgagacgtatcacttcgaactcgtgtcgaacgagagcggtgcgggcatcacgcgcatcgcgctcgatttcaacacgccgatcgcgaacgccgtgctcaccaccgagaccgacgaacaggcgatcgcacggatgaccgaaaagggccgcgacgccgcgcgcgtggccgtcgagatggcgaacctcacgatgacgctcgatcagttgagcgacgacgaagaggacgaggaagacgaggacgacgaagacgaagaggagcgcgca

SEQ ID NO: 13965 - DNA, 723 bp, Burkholderia mallei
atgcacgccaccgacgaccgtctcccccgctaccagcgcctgcgcgacgaactggccgcgctgatcgcggcccggcactggcggccgggcgaagcgatcccgaccgagcaggcgctcgcgaagcgctatgacgtcgcgatcggcacggtgcgcaaggcggtcgatctgctcgtcgccgacggcatgctcgaacgcttccaggggcgcggcacgttcgtgcggcgcgcgagcttcgacagctcgctgttccgtttcttccgcttccagggcaggcacggcgagcgccggataccggagagccggatcctgcgccgcgaggtcgtcgaagcgccgtccgcggtggcggccgcgctgcagattccggcccgcgcgtcggtgatcgagatgacgcgggtgcgcctgatcgacggcgcgccgatgctcgccgaggaaatctggctgccctacgaccgcttcgccgcattcgcgcggctcgagctcgcttcgatcggcgatctgctgtatccggtctacgaagcgcattgcaaccagatcgtcgcctcggccaccgagacgctgaccgtcgaggcgatcggccccgtgcacgcgcggctgctgcgcatcgagccgggcacgcccgccgtcgtgatcgagcggctcgcgtacggctacgaccgccggccgctcgaatggcggcgctcgcgcggccccgcgagcgaattcatctatcaggcggaaatccgc

SEQ ID NO: 13966 - DNA, 1479 bp, Burkholderia mallei
gtgactggcgatacgacctttcggggtcaaggtggagcatcccaccgtgaagcgcagggcgtcgtttttgccgttcgcctgggcagccgttgtgcgccgcgttgcgtgctttgccggtggctgtcccgcctcgcgttcctcggaatccctccgccacgtcgagccggttgcgctgccggctgcgcgacgtatccggccacttcggtcaacctgtacacacttaacggaaaccgtatgtttgacagagcccaaagcaccattgcgaacgtcgatcccgagatctggcaagcgattcagcaggaaaacgtccgtcaggaagagcacatcgagctgatcgcgtcggagaattacacgagcccggccgtgatggcggcgcaaggctcgcaactgacgaacaagtacgcggaaggctatccgggcaagcgctattacggcggctgcgaatacgtggacatcgtcgagcagctcgcgatcgatcgcgtgaaggcgctgttcggcgccgaagcggcgaacgtgcagccgaactcgggctcgcaggcgaaccagggcgtgttcttcgcgatgctcaagccgggcgacacgatcatgggcatgagcctcgcgcacggcggccacctcacgcacggctcgccggtgaacatgtcgggcaagtggttcaacgtcgtgagctacgggctgaacgaggctgaagacatcgattacgaagcggccgagcagctcgcgcacgagcacaagccgaagctgatcgtcgcgggcgcgtcggcgttcgcgctgaagatcgatttcgagcgcctcgcgaagatcgccaaggcagtgggcgcgtacctgatggtcgacatggcgcactacgcgggcctgatcgcggcgggtgtctatccgaacccggtgccgcacgcggatttcgtcacgacgacgacgcacaagagcctgcgcggcccgcgcggcggcgtgatcctgatgaaggccgagtacgagaagcagatcaactcggcgatcttcccgggcatccagggcggaccgctgatgcacgtgatcgccgcgaaggccgtcgcgttcaaggaagcgctgtcgccggaattcaaggaataccagcagaaggtggtcgagaacgcccgcgtgctggcgcaaacgctcgtcaagcgcggcctgcgcatcgtgtcgggccgcaccgagagccatgtgatgctggtcgacctgcgcgcgaagaacatcacgggcaaggcggcggaagcggcgctcggcaatgcgcacatcacggtcaacaagaacgcgatcccgaacgatccggagaagcccttcgtgacgagcggcgtgcgcctgggctcgccggcgatgacgacgcgcggcttcggcccgcaggaagcggagctcgtcggcaacctgatcgccgacgtgctcgagcatcccgaagacgcggcgacgatcgagcgcgtgcgtgcgcaggtcgccgagctgacgaagcgtttcccggtctatcgc

SEQ ID NO: 13967 - DNA, 918 bp, Burkholderia mallei
atgagcgcacccgacatccgtatcggcatcaacccgctgtcgtggatgaacgacgatctgccgtcgctcggcggcgagacgccgctcgccgtcgcgctgaccgagggccgcgagatcggctacgagggcttcgagctcggcaacaagtttccgcgcgagccgcaggcgctgaaggcgctcctcgcgcagtacgacctgtcgctcgtgtccggctggtattcgggccggctcgccgagcgcggcgtgcaggaggagatcgacgcggtcggcccgcatctggaattgctcgcgaagaacggcgcgacggtgatggtctacggcgaagtggccggcacgatccagggctcgcccgcgccgctctaccagcgcccgcgcttcgtcgacgacgcgcaatgggacgcgtacgccgagcgcgtcgacgcgttcgcgcgctacacgcgcgcgcaaggcgtgcggctcggctatcaccatcacatgggcgcgtacgtcgaatcccccgccgacgtcgaccgcctgatggcgagcacgagcgacgcggtgggcctgctgttcgacgccggccacatgacgttcggcggcggcgacccggtggccgagctcgcgaagcacatcggccgcgtgtgccatgttcactgcaaagacgtgcgcccggccgtgatccggctcgcgcgcaaccgcaactggagctttctcgacgcggtgatcgcgggcgcgttcaccgtgccgggcgacggctcgatcgatttcccgacgatcgtcgacatgctcaagcgccacggctaccgcggctggctcgtcgtcgaggccgagcaggacccggccgtcgcgccgagctacgcgtatgcgcaaaagggctatcggacgctgcgcgcgctcgtcgacgcgccgctcccgcccgtcggtcacaaggaggcggcg

SEQ ID NO: 13968 - DNA, 2853 bp, Burkholderia mallei
attcgtatccgtggggcgcgcacccacaacctgaagaacgtcaatctcgaccttccgcggcacaagctgatcgtgatcaccgggctctcgggctccggaaaatcctcgctcgcgttcgacacgctgtacgccgaagggcagcggcgctacgtcgaaagcctgtcggcctatgcgcgccagttcctgcagttgatggagaagcccgacgtcgacctgatcgagggcctgtcgcccgcgatctcgatcgagcagaaggcgacgtcgcacaatccgcgctcgacggtcggcaccgtcaccgagatccacgactacctgcggcttttgtacgcacgggtcggcacgccctactgcccggatcacgaaattccgctcgaggcgcaaagcgtgtcgcagatggtggacgcggcgctcgcgctgcccgaggaaacccggctgatgatcctcgcgcccgtcgtcgcgaaccgcaagggcgagcacgcggagctgttcgacgagatgcaggcgcagggcttcgtgcgctttcgcgtgcgctcgggcggcggcgcggcgaacgaaggcgccgcgaagatctacgaagtcgattcgctgccgaagctcaagaagaacgacaagcacacgatcgacgtcgtcgtcgaccgcctgaaggtgcgcccggacatgaagcagcggctcgccgaatcgttcgagaccgcgctgcgcctggccgatggccgcgcgatcgcgctcgagatggataccgaccgcgagcacctgttcagctcgaagttcgcgtgcccgatctgctcgtactcgctgcaggagctcgagccgcgcctgttctcgttcaacaacccgatgggcgcgtgcccggaatgcgacggcctcggccagatcaccttcttcgatccgaagcgggtcgtcgcgcacccgtcgctgtcgctcgccgcgggcgcggtcaagggctgggaccgccgcaaccagttctacttccagatgctgcaaagcctcgcggcgttctacgatttcgacatcgacaccgcgttcgaggatctgcccgagaagatcaggaagatcctgctgtacggctccggcaagcagacgatcctgttctcgtacatcaacgagcgcggccgcacgacgatccgcgagcacgtgttcgaagggatcattccgaacctcgagcgccgctaccgcgaaaccgattcggccgccgtgcgcgaggaactcgcgaagtaccagaacaaccagccgtgcccgtcgtgcgacggcacgcgcctgcgccgcgaggcgcgcttcgtgcgcgtcggccagggcgactacgcgcgcgcgatcttcgaggtgagcagctggccgctgcgcgacgcgctcggctacttcgacggcttgacgctcgacggcgcgaagcgcgagatcgccgacaaggtgatcaaggaaatcgtcgcgcggctcacgttcctgaacaacgtcggcctcgattacctgtcgctcgagcgcagcgccgagacgctctccggcggcgaggcgcagcgcatccggctcgcgtcgcagatcggttcggggctgaccggcgtgatgtacgtgctcgacgagccgtcgatcggcctgcaccagcgcgacaacgatcgcctgatcggcacgctcaagcatctgcgcgacctcggcaactcggtgatcgtcgtcgagcacgacgaggacatgatccgcacggccgactatgttgtcgacatgggccccggcgcgggcgagcacggcggcatgatcgtcgccgaaggcacgccgaagcaggtccaggcgaacggcgattcgctcacgggccagtatctcgtcggcaagcgcacgatcgaatacccggacgagcggatctcgcccgatccgcagcgcatgctgcgcatcgtcgacgcgcacggcaacaacctgaagcacgtcgatctcgatctgccggtcggcctgctgacctgcatcaccggcgtgtcgggctccggcaagtcgacgctcatcaacgatacgctgtacaacgcggtcgcgcgccacctgtacggctcggcgacggagccggcgccgcacgagtcgatcgagggcctcgagcacttcgacaaggtcatcaacgtcgatcaatcgccgatcggccgcacgccgcgctcgaacccggccacctacacgggcctgttcacgccgatccgcgagctgttcgcgggcgtgcccgcatcgaaggagcgcggctacgatccgggccgcttctcgttcaacgtgaagggcggccgctgcgagtcgtgccagggcgacggcgtgctgaaggtcgagatgcacttcctgcccgacgtctacgtgccgtgcgacgtgtgccacggcaagcgctacaaccgcgagacgctcgaagtgcaatacaagggcaggaacatcagcgaagtgctcgacatgacggtcgagcacgcgtacgagttcttcagcgcggtgcccgtggtcgcgcgcaagctgaagacgctgctcgacgtcggcctcggctacatccgcctcggccagtcggcgacgacgctctcgggcggcgaggcgcagcgcgtgaagctgtcgctggagctctccaagcgcgacacgggcagaacgctctacatcctcgacgagccgacgaccggcctgcacttccacgacatcgcgctgctgctcgaggtgatccaccggctgcgcgaccagggcaacacggtcgtgatcatcgagcacaacctcgacgtgatcaagacggcggactgggtgatcgacctggggccggaaggcggcgcgggcggcggccagatcatcgcgcagggcacgcccgagcaggtcgcgaaaacgaaggcgagcttcaccggcaaatacctcgcgccgctcctgaagcgcaaa

SEQ ID NO: 13969 - DNA, 429 bp, Burkholderia mallei
atggcgatctacggcatcggcaccgatctcgcgcaggtgagccgcatcgccgcggtgctcgagcgcacgggcgggcgctttgccgagaaggtgctcggtcccgacgaactgcgcgtgttccatgcgcggcgcgcgcgctccgaggcgcgcggcatcgcgtttctcgcgacgcgcttttccgcgaaggaagcgttctcgaaggcgatcggtctcggcatgcactggccgatgacgtggcgcgcgctgcagacgctcaaccggccgagcggcgagccctacgtcgtcgcatcgggcgagcttgccgcatggctcgacgcgcgcggcatcaccgcgcgcgtgacggtgagcgacgagcgcgattacgcggtcacgttcgtcgtcgccgaggcgccggacgacgtcgccgccgcgcgctcgggcgccgcttcc

SEQ ID NO: 13970 - DNA, 1329 bp, Burkholderia mallei
atggcggattgcgggggcgcggcgtttcggcgcggcgccgcgccgcattcgggtaacatgcgtcaaccggagggcgggcgcgcgaggcgcgcaaacgctcgggctccgtttcgattttggcagtctggaatcatgatcatcacttcgctgctcgataccgacctgtacaaattcacgatgatgcaggtcgtcctgcatcatttcccggccgcaagcgtcgaatatcgcttcaagtgccgcacgcccggcgtcgatctcgtgccgtacatcgacgagatccgcgccgaggttcgctcgctctgcgagctgcgcttcaccgattccgagctcgactatctgcgccggctgcgcttcgtcaagagcgatttcgtcgattttctcgcgctctttcacctgaacgagaagtacatctcgatcacgccgtcgcaaaagggcggcggcgagatcgacatcgagatcaaggggccgtggctgcacacgatccttttcgagattccggtactcgcgatcgtcaacgaggtgtacttccgcaacacgcagcgccggccggattaccgcgaagggcgcggccggctgcgcgagaagatcaagctgctcggcgcgaagcccgaattcgccgattgcaagatcgccgattacggcacgcgccgccgcttctcgaaggtctggcacgaggaggtgctgcgcacgctgcaggacgggctcgggccgcagttcgccggcacgagcaacgtctattacgcgatgacgcacgagatcacgccgctcggcacgatggcgcacgaatatctgcaggcgtgccaggcgctcggcccgcggctgcgcgattcgcagacctacggtctcgagatgtgggcgaaggaatatcgcggcgatctcggcatcgcgctgtccgacgtctacgggatggacgcgttcctgcgcgacttcgacatgtacttctgcaagctcttcgacggcgcgcgccacgattcgggcgatccgttcgactggggcgagcggctcatcaagcactacgaggagaaccgctgcgacccgcgcacgaaggtgctcgtgttctccgacgcgctcgatatcccgaaggtcatgcagctgtacgcacgctttcgcggacgctgcaagctcgcgttcggcgtcggcacgaacctcaccaacgatctcggctatcagccgttgcagatcgtcatcaagatggtgcgatgcaacgggcagccggtcgcgaagctgtcggattcgccgggcaagagcatgtgcgacgacaaggcctacctcgcgtatctgcgccaggtgttcgggatcacgcagccgcccgacgacgacgcgggcaag

SEQ ID NO: 13971 - DNA, 1659 bp, Burkholderia mallei
atgaccaaatatgttttcgtcaccggcggcgtagtttcctccctcggcaagggcattgccgccgcctctctcgccgcgatcctcgaatcgcgcggtctcaaagtcaccctcctcaaactcgatccttacatcaacgtcgaccccggcacgatgagcccgtttcagcacggcgaagtgttcgtgacggaagacggcgcggaaacggatctcgacctcggccattatgagcgcttcatcagcacgaagatgcgcaaggccaacaatttcacgaccggtcagatctacgaatcggtgatccgcaaggagcgccgcggcgactacctcggcaagacggtccaggtgattccgcacatcacgaacgagatccaggcgttcatcgagcgcggcgcggcgtcggccacttgcggcgagccggacgtggcgatcgtcgagatcggcggcacggtgggcgacatcgagtcgctgccgttcctcgaggcggcgcgccagatgagcctgcgcctcggccgcaacagcgcatgcttcgttcacctgacgctcgtgccgttcatcgcgacggcgggcgagctgaagacgaagccgacccagcacagcgtgcagaagctgcgcgagatcggcatttcgccgcacgtgctgctctgccgcgccgatcgcccgatccccgacgacgaatcgaagaagatctcgctcttctcgaacgtgccggaagacgcggtgatctcggtgtgggacgtcgacagcatctacaagattccgcagatgctgcacgatcaggggctcgaccgcctcatctgcgaggaactgcgcctcgatccgcagccggccgacctgcgcatgtgggcggcgctcgtcgagaagctgcagaatccgaagcacgaggtgacgatcgggatggtcggcaagtacgtggacctcacggaatcgtacaagtcgctgatcgaggcgctgcgccatgcgtcgatccacacgtcgacgaaggtcaacatcgagtacatcgattcggaagagctcgagacgaacggcaccgcgagcctcgcgcatctcgacgccgtgctcgtgccgggcggcttcggccggcgcggcaccgagggtaagatcgcggccgtgcgctacgcgcgcgaagcgaaggtgccgtatctcggcatctgcctcggcatgcagctcgccgtcatcgaattcgcgcgcgacgtcgtcggcctcaagcaggcgaacagcaccgaattcgatccgaacacgccggagcgcgtcgtcgcgctgatcaccgagtggtacgaccgcgaaggcaaggtcgagaagcgcaccgaggattccgatctcggcggcacgatgcggctcggctcgcagcgctgcccgatcaagccgggcacgctcgccgaggcgatctacggcaaggacgtgaacgagcgccaccgtcaccgctatgaagtcaacaaccgtttcgtgccgcaactcgaagcgggcggcctcgtgatcagcgcgcgcacgccgagcgaggatctgccggaaatgatggaactgccgagcacgatgcacccgtggttcgtcggcgttcagttccacccggaattcacgtcgacgccgcgcgacggccatccgctgttcaagtcgttcgtgcaggccgcgctcgcgtgccagcagacgcgcgccggagcgaaggca

SEQ ID NO: 13972 - DNA, 840 bp, Burkholderia mallei
atgggtcagatcttgttcatcgtctggcgggagagcgtcgaggcgttgctcgtcgtcggcatcctctacgcgtggctgaagaacggcgacgacgaagcgcgccgcggcctgccttacctgtgggcgggcgtcggcgccggcctgctgatggcggtgggcctgggcgccgcgctcgtcggcttcaccgaggtgctgtcgggcgacgcgcaggactactttcagaccgcgatggtgctgatcgcgtgcgtgctgatcgtgcagatggtgctgtggatgaagcagcacgggcgcacgctcaagcgcgacatggagcgctctttgcagaagagcacgcaggacgcgaactggtggggcgtcgcggtgcttgtcgcgctcgcgatcgcgcgcgagggcagcgagacggcgatcttcctctacgggctcggcttcggccagtctggccacgtcgacggcagccagatgctcgccgtgctgatcggcctgggcctcgcgttcctgacgttctacgtgctgcagctcggtggcaagtatttctcgtggcggcacttttttcgcgtcaccgaaatcatgctgctgtttcttggcgcgggcctgttccagacgggtatcgacaagctgatcgacaaggaaatcctgccgctcggcatcgcgcaattgtgggatacgtcggcgatcctcgacgattcgagcacgttcggctcgctcgtgtcgacgttgaccggctatcgcgcgcatccgtcgttgaccaatctcgtcgcctacgtggcctactgggcgatcgtctatctgctgctcaagcgcgccgcgcgccgcccggcggcgactgcggggcggccggca

SEQ ID NO: 13973 - DNA, 1647 bp, Burkholderia mallei
atgagcgccgcgcagatcgcgcgcggcgccggcgcgccgccgtcgccgtcgacgccgccgcatgagccgttgctgtcgatcgagcggctgcgcgtgcgcttcggcggcacgctcgccgtcgacgacgtatcgcttgcgatcggccgcggcgagcgcgtcgcgctcgtcggcgaatcgggctccggcaagagcgtcaccgcgctggcgatcctgcgcctgctgcgcgacgccgacgtgagcggcgcgatccgcttcgcgggcgagacgctcgccgacaagagcgagcgcgagatgcgcgcgctgcgcggcgcggacatcgcgatgatcttccaggagccgatgaccgcgctcaatccgctcttcacgatcggcgagcagatcggcgagacgatcgagttgcacgatggcgtatcgaagcgcgacgcgcgcgcgcgggcgatcgcgctgctcgcgcgcaccgggatcgaccggccggacgagcgcgtcgacagctacccgcaccagttgtcgggcggccagcggcagcgcgcgatgatcgcgatggcgctcgcatgccggccgcgcctgttgctcgccgacgagccgaccaccgcgctcgacgtgacgatccgcgcgcagatcgtcgagctgctgctcgaactgcagcgtgacgcgscggccgagcgcgggatgscggtgctgctcatcacgcacgatctgaatctcgtgcggcgcttcgccgagcgggtcgcggtgatggagaagggccggctcgtcgagtgcgggccggtcgagcggatcttcgatgcgcccgagcacccgtacacgcagcgcctgttgcacagccggccgcagcgcacggtgtcgcccgtgttgccgatcgcgcccgtcgtgctcgacgcgcgcggggtcaccgtgcagttcaggcagaagctgccgggcttcgcgggctggctccgctcggggcgcttcaccgcggtgtcggacgcgagcgtgtcggtgcggcagggcgagacgctcggcatcgtcggcgaatcgggctccggcaagtcgacgctcgcgatggcgctcctcgggctgcagcgggtcgcgcacggcgacatcgaattcgagggccgttcgctcgcgagctttcgcgggcgcgagcgcgtcgcgctgcgcgcgaacatgcaggtggtatttcaggatcccttcagctcgctttcgccgcggcagacgatcgggcggatcgtgtccgaagggctcgaactgcatcgccctcggctcacggccgacgcgcgccgcgacaaggtgatcgcggtgctgcgcgaagtcggcctcgatcggacggtgctgcatcgctatccgcacgagttctcgggcggccagcgccagcggatcgcgatcgcgcgcgcgctcgtgctggagccgcgcgtgctcgtgctcgacgagccgacgagcgcgctcgacgtgtcgatccaacaacaagtgttgaagctgctgtcgaatctgcaacgaaagtacaacctgggctacgtgttcatcagccacgatctggaggtgatcggcgcgatggcgcaccgggtggcggtgatgcagggcggggcgatcgtcgagacgggcgacgtcgagcgcatcttcaccgaaccggtgcatccttacacgcaaaaattgctgaaagccgttcgt

SEQ ID NO: 13974 - DNA, 1257 bp, Burkholderia mallei
atgccgtatcagcacatcaaggttccggaaggcggtgacaagatcaccgtcaacaaggatttctcgctcaacgtttccgatcagccgatcatcccttacatcgagggcgacggcacgggcttcgacatcacgccggtgatgatcaaggtcgtcgacgcggcggtcgagaaggcgtacggcggcaagaagaagattcactggatggagatctacgccggcgagaaggcgacgaaggtctacggcccggacgtgtggctgccggaagagacgctgcaggtgctgaaggaatacgtcgtgtcgatcaaggggccgctcacgaccccggtcggcggcggcatccgctcgctgaacgtcgcgctgcgtcaggagctcgacctgtacgtctgcctgcgcccgatccagtacttcaagggcgtgccttcgcccgtgcgcgagccggagaaaaccaacatggtcatcttccgcgagaactcggaagacatctacgccggcatcgaatgggcggccgaatccgagcaggcgaagaaggtcatcaagttcctgcaggaagagatgggcgtgaagaagatccgcttcccgcagacctcgggcatcggcatcaagcccgtgtcgaaggaaggcaccgagcgcctcgtgcgcaaggcgatccagtacgcgatcgacaacgaccgcaagtcggtcacgctcgtccacaagggcaacatcatgaagttcacggaaggtgcgttccgtgacgccggctatgcgctcgcgcagaaggaattcggcgccgagctgatcgacggcggcccgtggatgaagttcaagaacccgaagacgggcaacgagatcgtggtcaaggattcgatcgccgacgcgttcctgcagcagatcctgctgcgcccggccgaatacgacgtgatcgcgacgctgaacctgaacggcgactacatctcggacgcgctcgccgcgcaagtcggcggcatcggcatcgcgccgggcgcgaacctgtcggattcggtcgcgatgttcgaagcgacgcacggcacggcgccgaagtacgcgggcaaggattacgtgaacccgggttcggaaatcctgtcggccgaaatgatgctacgccacctcggctggaccgaagcggccgacgtgatcatttccgcgatggagaagtcgatcaagcagaagcgcgtcacgtacgacttcgcgcgcctgatggaaggcgcgacgcaagtgtcgtgctcgggcttcggtcaggtgctgatcgaaaacatggag

SEQ ID NO: 13975 - DNA, 393 bp, Burkholderia mallei
atggacaagagcatgaagattctggtggtggacgattttccgacgatgcgtcggatcgtccgcaacttgctgaaagagttgggctattcgaacgtcgacgaggcggaggacggcctggccggcctcgcgcggctgcgcggcggcggctacgacttcgtgatctccgactggaacatgccgaacctcgacggtctcgcgatgttgaaggagatccgcgcggacgcgtcgctcacgcacctgccggtgctgatggtgacggccgagtcgaagaaggagaacatcatcgcggctgcgcaggcgggcgcgagcggctacgtcgtgaaaccgtttacggcggcgacgctcgacgagaagctcaacaagattctggaaaagatggcgaaagcggggagc

SEQ ID NO: 13976 - DNA, 297 bp, Burkholderia mallei
atgacgaacgagattttgacggtcgacgtcgcgatcgtcggcgcggggccggcgggcctcgccgccgcgcgcgcggcggcgcgcagcggctgcacggtcgcgatcgtcgacgacaacccgcgcgccggcggacaggtgtggcgacacgggccgcacgccgcgcccggcgcgctcgcgcgcgcgagcttcggcgtgctgcggcagccgaacgtgcgccatctggcggctacacgcgtcgtcgccgcgccgcggcccggcgcgctgctcgtcgaggacgagcagcgcgcgctcgtgctc

SEQ ID NO: 13977 - DNA, 1140 bp, Burkholderia mallei
atgtccgtcccgatcacctgcatcgaagatcttcgcgttctcgcgaaaaaacgcatcccgcgaatgttctatgactatgtcgatacgggctcctacacggaatcgacgtatcgcgcgaatgaggccgatttccggaagatcaggctgcgccagcgcgtgggcgtcgacatctcgaaccgcaacctgcgcacgacgatggcggggcaggatgtggcgatgccggtggcgctcgcgccgacgggcctcgtcggcatgatgcgcgcggacggcgagatcctcgccgcgcgcgccgcgcggcatttcggcgtgccgttcacgctgtcgacgatgagcatctgctcgatcgaggacatcgtcgcgcacgtgggcggcccgttctggttccagttgtacatgatgcgcgatcgcgcgttcatcgagcggctgatcgagcgcgcgagcgcggcgggctgccccgcgctcgtgctgacgatggacctgcagatcgccggccagcgccacaaggacgtgaagaacggcctgtcggcaccgccgcgcatcacgctgccgaacctgctcgacatgatgcgcaagccgggctggtgcctcggcatggcgcgcacgcgtcgccgccatttcggcaacatcgtcgggcacgtgaagggcgtgaccgacatgtggtcgctcgattcgtggacccgcgagcagttcgatccgacgatcggctggcgcgatgccgaatgggtccggcggcggtggaacggcaagctgatcgtcaagggcgtgctcgatgcggacgatgcgctccgcgcggccgatgcgggcgcggacgcgatcgtcgtgtcgaaccacggcggccgccagctcgacggcgcgatgtcgtcgatcgaggcgctgcccgccatcgtcgaggcggccggcaagcgcgtcgaagtgtggctcgacggcggcgtgcgcacggggcaggacgtgctgaaggcggtggcgctcggcgcgcgcggcacgatgatcggccgcgcgttcctctacggcgtcgccgcgctcggcgagcaaggcgcgcggcgcgccctcgagctcatcgcgcgcgagctcgatacgacgatggcactgtgcggctgcaccgacattcgatcggtgaacgccgatgtgctcgcgcggcgc

SEQ ID NO: 13978 - DNA, 1026 bp, Burkholderia mallei
atgaacatcggcatcgtcaacgacttgccgctcgccgtcgaggcgctgcgccgcacgatcgcactgcggcccgagcaccgcgtgctgtgggtcgcgacggacggcgcgcaggcgctcgacttctgcgtcgcgcagccgccggacctcgtcctgatggatctcgtgatgccgcgcatcgatggcgtatcggcgacgcgcagcatcatggagcgctcgccgtgcgcgatcctcatcgtcaccgcgaacgtcggcgcgaacgcgtcgtacgtctacgaggcgatgggcgcgggcgcgctcgacgcggtcgacacgccgacgcttgagcagggcggcagcgccgatccgtcgcagccgctgctcgcgaagatcgaccagatcggccggctgctcgcgacgcgcatgccgctcgccgcgcccgccgccgccgcgcccgcgccgcagggcgcgttgccgccgctcgtcgcgatcggcgcgtcggcgggcgggccgaccgcgctgaccgcgctgctgcggcggctgccggacgattttccggcggcgctcgtgatcgtccagcatgtcgaccaggcgttcgcgatcggcatggcgcagtggctcgacggctattcgccgttgccggtgcgcatcgcgcggcagggcagcgtgccgcaggcgggcgaggtgctgctcgcggcgaccaacgatcacctgcatctgacgtcgcgcggggtgctcgcgtacacgcggcgtccggaagagacgccgtaccggccgtcggtcgacgtgttctttcacagcgtcgtcgatcactggaagggcgaggcgatcggcgtgctgctcacgggcatggggcgcgacggcgcgctcggcctgaaggcgatgcgcacgaaggggcattacacgatcgcgcaggacgaagcgacgagcgcggtgtacgggatgccgaaggccgcggccgcgatcggcgcggcgagcgcggtgctgccgctcgagcggatcgccgatcagttgatctcgctcgttcagcgcaacaggcagcgctggcgc

SEQ ID NO: 13979 - DNA, 984 bp, Burkholderia mallei
atgtcgagcccttctcttccgagcgcggataagcgcgcatcgcttgccgcgaccgcgcgcgcggtgtcgcgcgagcagatcgcgaagtcgcgcgtgcttgtcgtcggcgacgtgatgctcgatcgctactggttcggcaacgtcaaccggatctcgcccgaggcgcccgtgcccgtcgttcacgtgcagcggcaggaggagcgcctgggcggcgcggcgaacgtcgcgcgcaatgcggtgacgctcggcggccaggcgggcctgctgtgcgtcgtcgggcgcgacgagccgggcgagcgcatcgtcgagctgctcggcgagagcggcgtgacgccgtatctcgagcgcgatccgtcgctgccgaccacgatcaagctgcgcgtgctcgcgcagcagcagcaattactgcgcgtggacttcgaggcgtcgccgacgcacgaggtgctgctcgcgggcctcgcgcgcttcgacgcgctgctgccgtcgtacgacgtcgtgctgatgtccgactacgcgaagggcggcctcacgcacgtgacgacgatgatcgcgaaggcgcgcgcggcgggcaagcccgtgctcgtcgatccgaagggcgccgactgggcgcgttatcgcggcgcgtcgctgatcacgccgaaccgcgcggagctgcgcgaggtcgtcgggcggtggacgtccgaggacgatctgcgcgcgcgcgtcacgaagctgcgcgaagcgctcgcgttcgacgcgctgctgctcacgcgctcggaagaggggatgacgctcttctcgcacgaaggcgagctgcacgtgagcgcgctcgcgcgcgaagtgtacgatgtgtcgggcgcgggcgacacggtgatcgcgaccgtcgcgacgatgctcggcgcgggattgccgctcgtcgaggcggtggtgctcgcgaatcgcgcggcgggcatcgtgatcggcaagctcggcaccgcgaccgtcgagtacgacgaactgtttcat

SEQ ID NO: 13980 - DNA, 489 bp, Burkholderia mallei
atgagacacatcatttccgtcctgctggaaaatgaaccgggcgcgctgtcgcgcgtcgtcggtctgttctcggcacgcggctacaacatcgaaaccttgacggtggcgccgaccgaagaccagtcgctgtcgcgcctgaccatcgtctccatcggctccgacgacgtgatcgaacagatcacgaagcatctgaaccgcctgatcgaggtggtgaaagtggtggacctgaccgacggtgcacacatcgagcgggagctgatgctcatcaaggtgagggcagtgggcaaggagcgcgaagaaatgaagcggatggcggacattttccgcggccgcatcatcgacgtgaccgaaaagacctacacgatcgaattgacgggggcgagcgacaagctcgacgcattcattcaggcgctggacgcgggctcgattctcgaaaccgtgcgcaccggcagctcgggcatcgggcgcggcgagcgcattctgaaggtc

SEQ ID NO: 13981 - DNA, 2988 bp, Burkholderia mallei
gtgatccggccgggccgcgggcggcccggatgccttttcggcggacgcgatggggcgttcgcccgctcgcgcgcctcggaggggccgatgtccgaatacaaggaaacgctgaacctgctgcagacgccttttccgatgaagggcgacctgccgcgccgcgagcccgcgctcgtcgagcgctgggcggcgcagcgcgtgtacgcgcggatgcgcgcggcggcggcggggcgcccgccgttcgtgctgcacgacgggccgccgtacgcgaacggcgacatccatatcgggcacgcggtcaacaaggtgttgaaggacatcgtgctgaagagccgcttcgccgcgggctacgatgcgcagtggattcccggctgggactgtcacggcatgccgatcgagcatcggatcgagcagttgcacggccgcggcctgccgccggcggccgtgcagcggctttgccgcgaatacgcgttcgagcagaccgagcggcagcggcgcgatttcctgcggctcggcctgctcggcgactggccgcacgcgtttcggacgatggatttccgcaccgaggcgaacgagctgcgctttctcgagcgcatccgcgcgcgcgggctgctgtatcgcgggcagaagccggtgaactggtgcgtcgattgccagtcggcgctcgcggaggccgaactcgaatacgcgcggaaaacgtcggtcgcgattcacgccgggctgcgcgtgcgcgacccggtcgatttcgcgtcgcgctttcgccgccgtccggttctcgacaagccggcgatgctcgtcgtgtggacgacgacgccgtggacgattcccggcaacgcggcggccggcgtgcgcgccgacgcgccatacgggctgtacgacacgcccggggcgctcatcgtcgtcgcgcagccgttggccgacgcgctgttcgcgtcgctcggcgtcgatcacgcgctgtgcgcgctcgcgcgggggcgagagctcgtcggtctcgcgctcgggcagccgtttttcgccgggcgcgacgtgcccgtcgtcgaggcggagttcgtcacgctcgacgcgggcacgggcatcgtccatctcgcgcccgcgcacggcgccgaggacgcggaactgtgccgccggctcggcatcgcgggcgagaacgtcgtcgacggcgcgggccggttcgccgccgatctgccggagatcggcgggctgccgctcgccgacggcatcgcgcgcatcgtcgcgaagctgcgcgcggacggcacgctcgtgcgcgaggcggcgttcgagcatgcgtatccgcactgctggcggcacaagacgccgatcctgttccgctcgacgccgcaatggttcatcggcatggatatcgagtgcgagcagggcgaagcagatccgggacgcgcggccgtaacggaagaagcgggtgcaacgggcgaggcgaggaaggtggggaaagcggaagaagcggaagaagcggggcccgcgaagacgctgcgcgcgagcgcgcgcgacgcgattgccgacgtgccgttctatccgccgtccgcgcggcagcggatggaagcgatgatcgacggccggcccgactggtgcgtgtcgcggcagcggacctggggcgtgccgctgccgtacttcgtccggcgcgacgaccggtcgctgcatccgcggagcgcgcgcctcgtcgaggcggtggccgcgcgcgtcgagcgcgacggcatcgccgcatggtcgcggctgcggccggccgagctcggcgtcgacgagaacgcatacgagaaactgtccgatacgctcgacgtatggttcgattcgggctcgatccacgccaccgtctatcgcgacgccgcgcgcgcggacacgggcggctatccggcggacctgtatctggaaggcgcggatcagcatcgcggctggttcggcgcgtcgctgatgacgggatgcgcggcggacggccgcgcgccgtttcgcgcgatcctcacgcacggcttcgtcgtcgacggcgcggggcgcaagatgagcaagtcgctcggcaacacggtgagcccgcagcggatcgcggacacgcgcggtgcggacatcctgcgtctctggatcgcgagcaccgactatgcggccgagatgtcgatctccgacgagatcctcgagcgcgtcgtggagacgtaccggcgcatgcgcaacacgctgcgcttcctgctgcagaacgtcgccgatttcgatccgcgcgacgatgcggtgccggccgggcagttgctcgacgtcgatcgctacgcgctcgcgcgctgccgcgagttcgtcgacgcgtgccgaagcgcgtacgcgcgctacgacttcgtcgcggtgacgcggctcgcgcacggctactgcgcggaggagctcggcggcttctatctcgacgcgctgaaggaccggctgtacgcgagcgtcgccgacggcgtcgagcggcgcgccgcgcagacggcgctgcacagcgtgctcgcgaacctgttgatctcgatcgcgccgatcctcagcttcacggccgaggaagcgtggacggtgttcgcgggcgacgagcgcgacagcgtgttcctgcacacgtgggacgagcacgcgccgccgcccgacgacgcggcgctcgcgcgctgggcgcacgtgcgcgcgctgcggcctcacgtgacgaaggcgctcgaggaggcgcgcggcgcggcgctcatcgggcgctcgagcgaggcggagctcgtcgtgcgcgcgccgcgcgacgtgctcgacgcgctggcgccgctgcacggcgagctggccgcggtcttcatcgtcgcgggcgtgacgctcgagacggccgatcagatcgcggtggcggtggcgcgcacgccactcgcgcgctgcgagcgctgctggcggcacgagccgagcgtcgccgcgcacgctagcggcgacgcgctctgcgcacgctgtcggcatgcgctgtcgcggcgagcgcgcgccgagcgctcggagccgcgcgccgccgtcggatcgcgg

SEQ ID NO: 13982 - DNA, 1185 bp, Burkholderia mallei
gtggcaaacgattatctcttcacgtccgaatccgtttccgaaggccatccggacaaggtcgccgaccaaatctccgacgcgatcctcgacgcaatcctcgcgcaagacaagtactcccgtgtcgcggccgaaacgctgtgcaacaccggtctcgtcgtgctcgccggcgaaatcacgaccacggcgaatatcgactacatccagatcgcgcgcgacacgatcaagcgcatcggctacgacaataccgattacggcatcgactaccgcggctgcgcggtgctcgtcgcgtacgacaagcagtcgccggacatcgcgcaaggcgtcgaccgcgcgcacgacaacaacctcgatcagggcgcgggcgatcagggcctgatgttcggctacgcgtgcgacgaaacgcccgagctgatgccgctgccgatccacctgtcgcaccggctcgtcgagcgccaggcgaacctgcgccgcgacggccgcctgccgtggctgcgcccggacgcgaagtcacaggtgacggtgcgctacgtcgacggcaagccgcactcgatcgacaccgtcgtgctgtcgacgcagcacgcgccggagatcgatctgcccgcgctgcgcgaagcggtgatcgaagaggtcatcaagccgacgctgcccgccgacctgatcaagggcgacatcaagttcctcgtgaacccgaccggccgcttcgtgatcggcggcccgcaaggcgattgcgggctgaccggccgcaagatcatcgtcgacacctacggcggcgcggcgccgcacggcggcggcgcgttctcgggcaaggatccgtcgaaggtcgaccgctcggccgcctacgcgggccgctacgtcgcgaagaacatcgtcgccgcgggcctcgcgtcgcgcgcgctgattcaggtgtcgtacgcgatcggcgtggccgagccgacctcggtgatggtcaacacgttcggcacgggccgcgtgtccgacgagacgatcacgaagctcgtgcgcgagcacttcgacctgcgtccgaagggcatcatccagatgctcgacctgctgcgcccgatctacgagaagaccgccgcttacggccacttcggccgcgaagaaccggagttctcgtgggaagccgccgacaaggcgctcgcgctcgccgaagcggcgggcgtcgagccggccgtgcaagtggcc

SEQ ID NO: 13983 - DNA, 618 bp, Burkholderia mallei
atggcgcgtggcaaattcatcacgttcgaagggatcgacggcgcgggcaagaccacgcatctgcagtggttctgcgaccggctccaggaaaggctcgggccgaccggcaggcacgtcgtcgtcacccgcgagccgggcggcacgcagctcggcgagacgctgcgcgagattctgctgaaccagccgatggacctcgagaccgaggcgctgctgatgttcgccggccggcgcgagcatctcgcgctcgtgatcgagcccgcgctcgcgcgcggcgattgggtcgtgtcggaccgcttcaccgatgcgacgttcgcctatcagggcggcggccgcgggctgccgcgcgacaagctcgaggcgctcgagcgctgggtgcagggcggcttccagccggatctgacggtgctgttcgacgtgcagccgcaggtggcgagcgcgcggcgcggcgccgtgcggatgccggacaagttcgagagcgaatcggacgccttcttcgcgcgcacccgcgccgagtacctgcgccgcgcgcacgaggcgccgcatcgtttcgcgatcgtcgattcgagcgagtcgattccgcagatccgcaagcagctcgaaggcgtgctcgccgcactg

SEQ ID NO: 13984 - DNA, 480 bp, Burkholderia mallei
atgaagcccgccgcccagcgttcgacgaagcccaccgatgccgcgcgcgacgcggccaaaacacgcgcgccgcagcggctcacgtacgtcatcggcaatctcgaccggctgctgcgccgccacatgaccgatgcgctcgcgccgctcggcatcacgctcgcgcagtacaccgcgctgtcggtgctcgaggcgcgcggcccgtcgtcgaacgcgaaggtcgccgagcgctcgttcatcacgccgcagtcggcgaacgaggtgacgagcgcgatggcgggccgcggctggatcatgcgcgaagccgatccgaatcacgggcgcgtgatcctgttgcgcctcacgccggaaggcgcggcgatgctgcgcgaatgcgaggcggcattgcggccgctcgaaagccggatgctcgacggcgtgccccgcgccgatgccgacgccgcgcagcactggctcgagatcttcgtgcgcaacctgcgcggc

SEQ ID NO: 13985 - DNA, 777 bp, Burkholderia mallei
atgcgcttcgtccgctccctgctgctgttcgtctatttcatcgtctatacggtgccgtacgccaccgcatgcttcatcgcgttcccgttcatgcggccgaacgcgcgctactggatggcggtcggctggtgcaaatcgacgctgttcgtcgcgcgctggctcacgggtatccggtaccgcgtcgaaggctacgagaacctgcccgacggcccggccgtgctgctgccgaagcatcagtccgcatgggagacgatcgcgctgcccgcgctgatgcccaagccgctctgctacgtgttcaagcgcgagctgctgtacgtgccgttcttcggctgggcgctcgggatgctgcacatggtccacatcaaccgcaaggacggcaagaacgcattcgattcggtgatccgccagggccgcaagcggatggcggaaggcgcgtgggtcatcatgttccccgaggggacgcgcacgccggtcggcagccagggcaagtacaagacgggcggcgcgcgcttcgcgatcggcgccggcgcgcccgtcgtgccgatcgcgcacaacgccgggcgcgtgtggccgcgcaactcgttcacgaagtaccccggcaccgtcacggtgtcgatcggccagccgatcgacacgcaaggcctcacccccgaccaattgaacgaacgcgtcgaaaactggatcgaagcggaaatgcgccgcatcgatccgcacgcgtaccggcacgagcgcgacggcgcacgcggcgccgcccgcgcgtccgacgccgcgcatccc

SEQ ID NO: 13986 - DNA, 2235 bp, Burkholderia mallei
atgacagccgattccgcttccaccgctgcggcgccgtcgctcgacgacgtgctcgcgttcgtgcgcgagcacgcgggcgacgcgcgcttgtcgtcgggagagcggctcgccgatcatgcggcgggcacgtcgacgatcatgcagcggctgaacgtcgatccgcccgcgacgcaggcggccgcgctgttcgcgctcgcgccgtatctgagcgatcctgacaagcagatcgccgagcacttcggcgacgaggtcgcgcacctcgtcgccgacgtgcgcaagctgctgcgcctcggtaccgtgagcctgcgcgctgtgcagagcgcgcctgtcgatgcgggccgcgacgcacaggcggagcgccgcgcgcagatcgaagcgctgcgcaagatgctgctcgcgttcgcgcaggacatccgcgtcgtgctgatccggctcgcgtcgcggctgcaatcgttgcgctactatgcggccgcgaaaatcgagccgccgcccgacgtcgcgcgcgagacgctcgaaatctacgcgccgctcgcgaaccggctcggcatctggcaactgaagtgggagctcgaggatctcgcgttccgcttcgaggatcccgtcacctacaagcgcatcgcgaagctgctcgacgagaagcgcgtcgagcgcgaggcgtacgtcgccggcgcgatcgagcggttgcagcacgaactggcggccgcgcacatccaggccgaagtgagcggccggccgaagcacatctacagcatctggcgcaagatgcgcggcaaggagctcgacttctccgagctctacgacgtgcgcgcgtttcgcgtcatcgtgccggacatcaaggattgctacacggtgctcggcatcgtccaccacctgtggcagccggtgccgaaggaattcgacgattacatctcgcggccgaagccgaacggctacaaatcgctgcatacggtcgtgatcggcgacgacggtcgcgcgttcgaagtgcagatccgcacgcaggagatgcaccgcttcgccgagtacggcatcgccgcgcactggcggtacaaggaggcgggcgcgcgcggctacggcggccagttctccgcgagcgagaaatacgacgagaagatcgcgtggctgcgccaactgctcgcgtggaaggacgagatcgcggacggcggcggcgcggaggtgagcggtcagcaggcatgggcgcaactgcgcgaggcgacgctcgacgacgaccacatttacgtgctgacgccgcaggcgcgcgtgatcgcgctgccgcagggcgcgacgcccgtcgatttcgcttaccacctgcacagcgaactggggcaccgttgccgcggcgcgcgtgtcgacggcgcgatggtgccgctcaacacgcagcttgcgaacggccagacggtcgagatcgtcgcggtgaaggagggcggcccgtcgcgcgactggctcaacccgcagctcggctatctgcacagctcacgggcgcgccagaaggtgcgcgcatggttcaacgcggtcgatcagcaggagaacgtcgcgcacggccgcgcgctcgtcgaaaagacgttgcagcgcgaaggcaagacgtcggtgaatctcgagcatctcgcggcgaagctcggcttcaagtcgccggacgaactgttttcggtcgtcggcaaggaagagttcagcctgcgcaacgtcgagcaggcgctgtccgatgcgccggcgcccgaacccgagccggaggcgcccgcgaacttcgagaagcgcgcgagcggcgcgaacgtcgcgcacggcgcgtcggcgggggtgctcgtcgtcggcgtcgacgcgcttctcacccagctcgcccgctgctgccggccggcgccgcccgatccgatcagcggcttcgtcacgcgcggcaaggggatgtcgatccatcgcagcgattgcgcgaccttccgccggatggccgagcgcgcgcccgagcgcgtgctgcagaccacctggtccgccgacgtgctgggcgggcggggcgcgtccgtctacccggtcgacctgatgatcgaggcgaccgaccggcaagggctgttgcgcgacatctccgaagtgttcgcgcgcgagaagatgaacgtgatcggcgtgaagacgcaaagtcgccgcaacgcggccttcatgcaattcacggtcgaggtgtcgagtgcgtcgcaggtgcagcgcgcgtgcacgctgcttggcgagattcagggcgtcgttcgggcggcccgcaaggcg

SEQ ID NO: 13987 - DNA, 435 bp, Burkholderia mallei
atgaagaagagcgcccgccgacaatcgcgcgagctggcgacgcagggcctgtatcagtggctgctgtcgaacgcggcgccgggcgagatcgacgcgcaattgcgcggcgcgctgggttacgacaaggccgacaagacgctgctcgacacgattctgcacggcgtgatccgcgagcatgcgacgcttgccgaggcgatctcgccgagcctcgaccgtccgatcgatcagctctcgcccgtcgaacgggcggtgctgctgatcgcgacgtacgagctcacgcatcagatcgaaacgccgtaccgcgtgatcatcaatgaagccgtcgagctcgcgaagacgttcggcggctcggacggctacaagtacgtcaacggcgtgctcgacaagctggccgtcaagctgcgcccggccgagacgcaagcgcgacgcggcgcg

SEQ ID NO: 13988 - DNA, 651 bp, Burkholderia mallei
atgccggatcgccgcccggattccgtagatcgaacgggcgcgccgcggcggcgggccggcggtatcggttgcgcgcgaccgttcgctttcgacgacatcgccatgaccgacagcattatcgacaccgcgccgcacgacgcgcgcgcgaaacccctgatcgacgcgctgatcgacgaatacgcgacgcgctatcacgcgtatcggcccgacagccgcgcttcggcgcaagcggagctcgcgcgctatccggccgagctgttcgcgccgcccgagggcgcgttcatcctgctgatccgcggcggcgagacgatcggcagcggcgccttcaagcgatacgacgcgcaaacggcggagctcaagcggatctggacgcgcgccgatctgcggcggcaagggcttgcgcggcgcgtggttcgcgagctcgagctgcgcgccgcgcgccagggctatcggcgcgtctatctgacgacgggcttccgccagccggaggcgtgggcgctgtatctcgacacgggctatgcggcgctgttcgatcgcgatgtcgacccgcagatctacgtgcatttgccgttcggcaaggatctgatcgagccgggccgcatcggcgcgctcgacgacctgcgcgcgcccgtgccggccgcgccggtcgag

SEQ ID NO: 13989 - DNA, 768 bp, Burkholderia mallei
atgcgcaacagccccgtttcgcccggcccgggttacgcgccggcgcgcggctcggaacgcgcgcgccggcgcggcgtcgcgcgctggctcgcgtatgtgggcggcgtgttcgcgggcgcatggctcgccacgcagctctattacgccgtgcagatcgcgatgtggtcggtgttcgatccggggtcgagcgcgttcatgcgcgcggacgcgtggcgcctgtcgaacgcgcagcccgcgacgacgatccggcatcgctgggtaccctacgaccagatcgcgcgaaccctgaaacgggcggtgatcgcgtccgaagacgccgatttcgcgaacaattcgggctacgaagtggatgcgatcctgcaggcatgggaaaagaaccgcgcgcgcggacgcatcgtatcgggcggctcgacgatcacgcagcagctcgcgcgcaatctgttcctgtccggcgagcgcagctacattcgcaaggggcaggagctcatcatcacgtggatgctcgaaacgctgctcgacaaggagcgcatcttcgagatctatctgaattcggtcgagttcggctgcggcgtgtacggcgcgcaggccgccgcgcagtactactaccggattcccgcgagccggctttccgcatggcaatcggcgcggctcgcggtgatgctgcccaatcccaagtatttcgacgcgcatcgcggctcgccttacctcgcgcagcgcgccggcgtgattgcgcggcggatgggcgcggcggaattgcccgcgtcgcag

SEQ ID NO: 13990 - DNA, 759 bp, Burkholderia mallei
atgacgaacctgcaaacctggccttatccgcgcgtggtcgcgcaccgcggcggcggcgcgctggctcccgagaacacgctcgccgcgctcgacgccggcgcgcactacgggcacaagatggtcgaattcgatgcgaagctgtcggcggacggcgtcgcgttcctgctgcacgacgacacggtcgagcgcacgtcgaacggcgcgggtgccgcgcgcgacatgcgctacgcggcgctcgaggcgctcgacgccggcgcgtggtatgacgcgcgcttctcgggcgagcggatgccgacgctcgcgcaggcggcggcgcgctgcctcgcgctcggcctcgcggcgaacgtcgagatcaagccgtgcccggagcgcgatgcggaaacgggcagcgtcgtcgcggcgctggcggccgagctctggcgcgacgccgccgtgccgccgctgctgtcgtcgttttcggccgccgcgctcgacgcggcgcgcgaggccgcgccggcgctgccgcgcgggatgctgtacgaggagattccggccggctggctggaacagacgcaacggctcggctgcgtgtcgctgcacgcgcaccatgcgcaattcaacgcggcgctcgtgcgcgacttgaaggcgtcggggttgcgccttctcgcgtacacggtgaacgaccccgttcgcgcgcgcgaactcgccgattggggcgtggacctcatttgcacggaccggatcgacctgatcggcgcggatttcgccgatcgggaagga

SEQ ID NO: 13991 - DNA, 1206 bp, Burkholderia mallei
atgcttagacgcttctggctgttcttcgcccaagcggtgacggtgctgctcgcactgatgttcatcgtggcgacgctcaagccgcaatggctccaacggcagggccagctcggcaagcagctcgcggcgccgatcgtcgcgctgcgggaagtcgcgcccggcgtcggcggcgcgcccgctcaatcctcgtatgcggacgccgcgcaaaaggcgatgcccgcggtcgtcaacgtgttctccagcaaggacggttcgctgccgcccgatccgcgcgcgaaggatccgctgtttcgctatttcttcggcgaccgcaacgcgcgccggcagcaggaggaacccgcggccaatctggggtcgggcgtcatcgtaagctcggagggttacattctaacgaaccagcacgtcgtcgacggcgcggaccagatcgaagtcgcgctcgccgacggccgcacggccaccgcgaaggtgaccggcagcgatccggaaaccgacctcgcggtgctcaagatcaacatgacgaacctgccgacgatcacgctcggccgctccgaccagtcgcgcgtgggcgacgtcgtgctcgcgatcggcaacccgttcggggtcggccagacggtcacgatggggatcatcagcgcgctcgggcgcaaccacctcggcatcaacacgttcgagaacttcatccagaccgacgcgccgatcaacccgggcaattcgggcggcgcgctcgtcgacgtaaacggcaacctgctcggcatcaatacggcgatctactcgcgctcgggcggctcgctcggcatcggcttcgcgatccccgtgtcgaccgcgcgcaacgtgctcgagagcatcatcacgacgggcaccgtcacgcgcggctggatcggcgtcgagccgcaggacgtgacgccggagatcgccgaatcgttcagccttgcgcaaaaatcgggcgcgatcgttgcgggcgtgctgcaaggcggcccggccgacaaggcgggcatcaagccgggcgatattctgatgtcgatcgacggcgaggacatcaccgatacgacgaagctgctgaacgtcgtcgcgcagatcaagcccggcacgccggcgaaggttcacgtggtgtgcaagggcaaggagctcgacgtcaccgtcgtgatcggcaagcggccgccgccgccgaagcaggcgctcgacgaccagaacagcgacgaggaggag

SEQ ID NO: 13992 - DNA, 270 bp, Burkholderia mallei
atgaacgatagcgtgaaaacctcgctgaagcggacgctcgtcggtaaggtcgtcagcaacaagatggacaagaccgtcaccgtgctggtcgagcaccgcgtcaagcacccgatctacggcaagtatgtcgtgcgctcgaagaagtaccacgcgcacgatgaagcgaacacgtacaacgaaggcgatctcgtcgaaatccaggaaacccgtcctgtttcgaagacgaaggcctgggcggtttcgcgtctcgtcgaggcggcccgcgtgatc

SEQ ID NO: 13993 - DNA, 2952 bp, Burkholderia mallei
atgacctcttccgcattcgattcgtcccggcaaggctgcggctccggccagtgcgcgtgccggcgcgccgcgcagatgcggcgcgccgatccgttcgacgacaccgactacggcaccccgacgcgccacgcggacaccgacgtcacgctcgatatcgacggccgcgcggtcaccgtgccggcgggcacgtcggtgatgcgcgcggcgatcgaagccggcatcaacgtgccgaagctctgcgcgaccgattcgctcgagccgttcggctcgtgtcgcctgtgcctcgtcgagatcgaaggccggcgcggctatccggcctcgtgcacgacgcccgtcgaggccggcatgaaggtgcgcacgcaaagcgaccggctgcaggcgctgcgccgcaacgtgatggagctctacatctccgatcatccgctcgactgtctcacgtgcgcggcgaacggcgattgcgagctgcaggacatggcgggcgcggtcggcctgcgcgaggtgcgctacggcttcgacggcaagaaccatctgagcgacgcgaaggacgaatcgaacccgtacttcagctacgatccgtcgaaatgcatcgtttgcaatcgctgcgtgcgcgcgtgcgaggagacgcagggcacgttcgcgctgacgatcgcctcgcgcggcttcgaatcgcgggtcgcggcgagcgcgggcgaggcgttcatggattcggaatgcgtatcgtgcggcgcatgcgtcgccgcgtgcccgaccgcgacgctcatcgagaaaagtgtcgcgcggctcggtcagcccgagcacgagatcgtgacgacctgcgcgtactgcggcgtcggctgcgcgctgaaggcggaaatgaagggcgagcaggtcgtgcggatgacgccgcacaagaacggcctcgcgaacgaaggccacgcgtgcgtgaaaggccgcttcgcgtggggctatgcgacgcacaaggaccgcatcacgaagccgatgatccgcgagaagatcaccgacgcgtggcgcgaagtgagctgggacgaagcaatcggctacgcggccgcgcgctttcgccgcatccaggacgagcacggccgcgattcgatcggcggcatcacgtcgtcgcgctgcacgaacgaagagacgtatctcgtgcagaagctcgtgcgcgcggcgttcggcaacaacaatgtcgacacttgcgcgcgcgtgtgtcattcgccgacgggctacggcctgaaaaccacgctcggcgaatcggccggcacgcagacgttcgcgtcggtcggctcggccgacgtgatcgtcgtgatcggcgcgaatccgaccgacggccatccggtgttcggctcgcgcctgaagcgccgcgtgcgcgagggcgcgcagctgatcgtcgtcgatccgcgccggatcgatctcgtcgacggcccgcacgtgaaggccgtccatcatctgcaactgcgccccggcacgaacgtcgcgctcgtcaacgcgctcgcgcacgtgatcgtcaccgagggcctcgtcgacgaagcgttcgtcgacgagcgctgcgagccgcaggcgttcgacgtatggcgcgcgttcgccgcgcggcccgagaattcgcccgaggcgacggcggacatcacgggcgtgccggccgacgcggtgcgcgccgccgcgcgcctgtacgcgacgggcgggcgcgcggcgattttctacgggctcggcgtgaccgagcacgcgcagggctcaacgatggtgatgggcatcgcgaacctcgcgatggcgacgggcaatctcggcatcgaaggcgcgggcgtgaacccgctgcgcgggcagaacaacgtgcagggctcgtgcgacatgggttcgttcccgcacgagctgcccggctaccggcacatcggcgacgccgcggtgcgcgcgcgcttcgacgaagcgtggtcgacgacgctgcagcccgagcccggcctgcgcattccgaacatgttcgatgcggcgctcgacggcagtttcaaggggctctattgccagggcgaggacatcgtccagtccgatccgaacacgcagcacgtcgcggccgcgctggcgtcgctcgactgcctcgtcgtgcaggacatcttcctgaacgaaaccgcgaagtacgcgcacgtattcctgccgggcgcgaccttcctcgagaaggacggcacgttcacgaacgcggagcgccggatctcgcgcgtgcgccgcgcgatgcggccgctttccggctacgcggactgggaagtgacgctgatgctgtcgcgcgcgctcggctacgacatgcattacgcgcatccgtccgagatcatggacgagatcgcgcgcctcacgccgacgttcgcgggcgtgtcgtatgcgctgctcgacgagctgggcagcgtccagtggccgtgcaacgacgcggcgccgcaaggcacgccgacgatgcacgtcgatcagttcgtgcgcggcaagggcaagttcgtcatcacgcagtacatcgcgtcgccggagaaggtgacgccgcgctatccgctcatcctgacgacgggccgcattctgtcgcagtacaacgtcggcgcgcagacgcgccgcacggagaacgtccgctggcacggcgaggatcggctcgagatccatccgcacgacgcgaacgatcgcggcatccggacaggcgactgggtcggcgtcgcatcgcgcgccgggcagacggtgctgcgcgcgctcgtcaccgagcggatgcagccgggcgtcgtctacacgacgttccacttcccggaatcgggcgcgaacgtgatcacgaccgacagctcggactgggcgaccaactgccccgagtacaaggtgacggccgtgcaggtcgcgcccgtcgcgcagccgtccgaatggcagcgcgcgtacacgcgctttcgcgcggagcagctcgcgctgctcgagcagcgcacggccgagcgggcgccggccatcgccacgggcaag

SEQ ID NO: 13994 - DNA, 720 bp, Burkholderia mallei
atgcgagtcggattgttcgtcacgtgcgtcgtcgacctgatgcggcccgagatcggcttctccgcgctcaagctgctgaagcaggcgggctgcgacgtcgtcgtgccgcccgcgcagacgtgctgcggccagcccgcgtacaactcgggcgagcgcgcgatcgcgcgcgatctcgccgaaaagacgctggccgaattcgaatcgctcgactatgtcgtcgtgccgtcgggctcgtgcggcggaatgatccgggtccattacggcgagctctttcgcgacgatcccgaactgatggcgcgctatgggcgcctgcgcacgaaggtctacgagctgaccgacttcctcgtcaacgtcgcgcgggtcacgctcgagccgggcgcgttcaaggggcccgtcacgtaccacgattcgtgctccggcctgcgcgagctcggcgtgaaggcgcagccgcgcgcgctgctcgcgcagcgcggcgtagccgtcgccgagatgaaggattgcgagcactgctgcggcttcggcggcacgttcgcggtgaaatacggcgacatctcgaccgcgatcgtcgacgagaagtgcgcgaacgtgcgcgcgacgggcgcgggcgcggtcgtgctcggcgatctcggctgcatgctgaacatcgaagggcggctgcgccgcacgggcgatcgcgacacgcgcgtgctgcacgtcgcgcaagtgctcgcgggcgacgtt

SEQ ID NO: 13995 - DNA, 717 bp, Burkholderia mallei
atggaactgcgctggcaagacgcctatcttcaatttagcgccgcggagaacgagcagcagctcttccaacagatcgccgcgtatacgaagcggctcggcttcgaatattgctgctatggcatacgcgtgccgttgccgatctcgaagccggtcgtcgcgattttcgacacctatccgaacggctggatggagcgctaccaggaaatgaactacctggaggtcgatccgaccgtacgcgagggcgcgctcagctcgaacatgatcgtctggccggaggcgagcgcgagcgacgcgacgacgctctggagcgacgcgcgcgatcacgggctggcggtcggcgtcgcgcagtcgagctgggcctcgcgcggggtgttcggtctcctgacgatcgcgcggcacacggaccgcctgacgtccgccgagatcaaccatctgacgttgcaggcgaactggctcgcgaacatgtcgcactcgctgatgagccgttttctcgtgccgaagctcgcgcccgaatcgggcgtggcgctcacgcaccgcgagcgggaggtgctgtgctggacgggagagggcaagaccgcgtgcgagatcgggcagatcctcagcatctccgagcgcacggtgaactttcacgtcaacaacatcctcgacaagctcggcgcgacgaacaaggtgcaggccgtcgtgaaggcgatcgcgatggggctcatcgacgcgccg

SEQ ID NO: 13996 - DNA, 1170 bp, Burkholderia mallei
atgcctctaccgttactcgcgctcgcgatcagcgcgttcgccatcggcaccaccgagttcgtcatcatgggcctgttgcccgacatcgcgcgcgagctcgccgtcacgctgccgtccgccggccttctcgtgagcggctacgcgctcggcgtcgccgcgggcgcgccgctgctcgccgtgctgacgagccgcatgccgcgcaaggccgcgttgcagctgctgatggcgatcttcatcgccggcaacgtgctgtgcgcgctcgcgcagagctacgggatgctgatggtcgcgcgcgtcgtcacgtcgttcgcgcacggttcgtttttcggcatcggcgcggtggtcgccgcatcgctcgtgagcgccgacaagcgcgcgagcgcgatcgcgctgatgttcacggggctcacgctcgcgaacgtgctcggcgtgccgttcggtaccttcgtcggccagacgctcggctggcgcgcgacgttctggatcgtcgcggcgctcggtgtcgcgtcgttcgccggcgtcgccgcgctcgtgccgaaacggcgcgacgcggcgggcgcggcgcttagccgcgagctgcgcgtgctcaggcagccgcaggtgtggctcgcgctcgcgatgacggtgctcggtttcggcggcgtattcgtcgtgttcacctacatcgcgccgattctcgaggatgtgacgggcttcgcgccgcgtgcggtgtcgctcgtgctcgtgctgttcggcgccgggctcacgatcggcaacacgatcggcggccggctcgcggaccgcgcgctgatgccttcgctggtcgcgattctcgtcgcgctgatcgccgtgatggcggcgttcgcgaagacgagccacatgcccgccgcggccgccgtcaccgtatttgtctgggggatcgctgcttttgcgacggttcctccgctacagtcgcgggtcgtcgagaaggccgcgcatgcgccgaatctcgcgtcgacgctgaacatcggggcgttcaacgtcggcaatgcgggcggcgcgtggctgggcggcgtcgcgctgtcgcacggggtgccgctcgacgcgctgccttgggtggcggccgtcgtcacgctcgccgcgctcgccgtcacggcgctcgccgcgcggctcgatacgcgcgtctcatcgggcgcggctacagcggcgcaa

SEQ ID NO: 13997 - DNA, 915 bp, Burkholderia mallei
ttggccaacccattgcggcaagccgcggtgcccggcgggcatgcccgcggtgtcgtcaacaacgctcggcaccgcgagcagcgaaaactgccgcgcgacgacgcgcagcgcctgcacgcccggactgttcatcagcactttgaccgacggcacgcgccaggtcagccggtcgacgagatcgttcgccttgtacggcacgtcgccgacgccgcggccgcgccggtcccagccgaggtagttgctccagtagttgccgggccacgcgacgtcgctcgccgcgacgtagcggatctgctcgcggttgtccgcgaaatcgttgcccgtcacgtcgttgtggatcgagccgccccacagatgcacgccgatcttgttgtcgacgacgaggttgccgcggatcgtgttgtattcggcgtcgtagatgaacaggccgcgctggttgccggcgacgacgttgttctcgatcagcgaatcctggatcgtgcgcagcatgatgccgtgatcggtgttgccccatacccggttgccgcgcacgatctggtcgcgcgcctccatgatcgcgaggccgccgcggttgtgatagacgtcgttgccgtcccagacgttgtagtacgagttcatgtaatgcgtgccgtagcgcacgtcgtggatcgtgttgtgctcgaagcgcgcgtgatgcgacacgtcgacatagatgccgtcgcgcgtgtagctgatcgtgttgccggcgatgcgcgcgcccgtcgtgttgtagagctggatgccgttgccgcgcctgggcgacagcaaatcgcgcttgccgacgatcacgttgcccgtgacgcgcacgtcggccgagcgctcgatccagaggccgaacaaggtggagacaaacttcccgcggcttcgatcccgtgccatccgggcccggggcccccc

SEQ ID NO: 13998 - DNA, 993 bp, Burkholderia mallei
gtgggaaaccgcgcgcgcgtcgttcgacggcatcgccgccgcgatcgggctcgcgctcgggttcgccgccggcgcgtgccatttcgtgtcgctcggctggaacagccggctgttcgtcgcgggccgcgcgggcgtggcgctcgcgctgcagttcgcgcgcgtcgcgctcgcggtggcggtgctcgtcgtgctggcgcgggcgggcttcggcatgctcgttgcgggctccgcggggtttttcgccgcgcgggcgatcgcggtccgccgcgcggccgcgttgacgggagcgcggcgatgaacgcgtcgccgctatcgaccgtgccgctgttctcggtcggccccgtcggcatctcggcgcccgtgctcgcgacgtgggcgatcatggccgtgctcgtcgcgctcgcgctcgtcgcgcgccggcggctgagcgtcgatgcgccgtcgcggctgcaaagcgtgctcgagctgttcgtcgcgaccgtcgacgcgcagatcgccgacacgatgcagacgccgcccgcgcgctatcgcgcgctgatcggtacgatcttcgtgctcgtgttctgcgcgaacggcgcgtcgctcgtgccgggcgtcgagccgccgaccgcgcatctcgagaccgacgccgcgctcgcgctcgtcgtgctcgcggcgacgctctattacggcgtgcgcgcgcgcggcgtgcgcggctatctggcgacgttcgccgagccgacctgggtgatgattccgttgaacgtcgtcgagcagctcacgcgcacgttctcgctgatcgtgcgcctgttcggcaacgtgatgagcggcgtgttcgtgatcggcatcgtgctgtcgctcgccggcctgttcgtgccgattccgctgatggcgctcgatctgctgacgggcacggtgcaggcgtacattttcatggtgctgtcgatggtgttcatcggcgcggccgtatccggtgacgaaacttccgcgccgcggcgcgggcaggagaacaca

SEQ ID NO: 13999 - DNA, 1230 bp, Burkholderia mallei
atgagccagtacgggccattgcgattgcatgtgccggagcctaccgggcgtccgggatgcaagaccgatttttcttacctgcgcctgtcgccagccggcaaggtgcgcaaaccccccatcgacgtcgcccccgccgacacgagcgacttggcctatggcctcgtgcgcgtgctcgacgagcacggacgagcggtcgggccatgggcgcccgacctcgatcccgacatcttgcgcaaaggcatccgcgcgatgctgaagacgcgcatcttcgacgcgcgcatgcagatcgcgcagcgccagaagaagatctcgttctacatgcagtgcctcggcgaggaagcgatcgcggtcgcgcacacgctcgcgctcgagcgcggcgacatgtgctttccgacgtatcggcagcaagggatcctgatggtgcgcgagtatccgctcgtcgacatgatgtgccagctgatgtcgaacgagcgcgatccgctgaagggccgccagttgccggtgatgtactcgacgcgcgacgcgggcttcttctcgatctcgggcaatctcgcgacgcagttcatccaggcggtcggctgggcgatggcctcggcgatcaagggcgacacgcgcatcgcttccgcgtggatcggcgacggcgcgacggccgaagccgatttccataccgcgctcacgttcgcacacgtgtaccgcgcgcccgtgatcctgaacgtggtcaacaaccagtgggcgatctcgacgttccaggcgatcgcgggcggcgagggcgcgaccttcgccgggcgcggcgtcggctgcggcatcgcttcgctgcgcgtggacggcaacgatttcctcgcggtctacgccgcgtcccgctgggcggccgaacgcgcgcgccgcaacctcgggccgacgctgatcgagtgggtcacgtaccgcgcgggcccgcactcgacgtccgacgatccgaccaagtaccgccccggcgacgactggacgaactttccgctcggcgatccgctcgagcgcctgaagcgccacatgatcggcatcggcgtgtggtccgagcaggaccacgaggacacgaaggccgcgctcgaggccgaggtgctcgccgcgcagaaggaagcggagcgctacggcatgctggccgacgagcacgtgccgaacgtcgcgagcattttcgaggacgtctacaaggagatgcccgcgcacctgcgccggcagcgccaacagctcggggtt

SEQ ID NO: 14000 - DNA, 1359 bp, Burkholderia mallei
atgggggctgtccaaggcagcatgctgctgatttacaccgtgatcgcgatcgcggtgctgatcctgatgatcgcgcgctacaaggtgtatccgttccttgtgctgatcatcgtgtcgctcggtctcggcctcgcggtcggcatgccgatggacaagatcgtgaaatcgttcgaggggggcacgggcggcacgctcggccacatcgcgatcgtcgtcggcctcggcacgatgctcggcaagatgatggccgaatcgggcggcgccgagcggatcgcgaccacgctgatcgactggttcggcgagaagaacatccactgggcgatgatgttcgtcgcgatcatcgtcgggctgccggtgttcttcgaagtcggcttcgtgctgctgatcccgatcgcgttcaacgtcgcgaaacgcaccggcaagtcgctgctcgtcgtcgggctgccgatggtggcgggcctgtcggtcgtgcacgggctgattccgccgcacccggcggcgctcctcgccgttcagcaatacggcgccgacatcggcaagacgatcgcgtacggcctcatcgtcggcgtgccgaccgcgatcgtcgcggggccgctgttcgcgctcacgatctcgaagttcgtgaagctgccggagcacaatccgctcgcgtcgcagttcgtcgagacgcgcgcggcgggcgagacgcgcgcgctgccgagcttcggcatcacgctgttcacgatcctgctgcccgtcgtgctgatgctcgtcggcagctgggccgatctcgtgttcgcgccgaaatcgctgccgaacagcctgctgcgcttcgccggcaattcggatgtcgcgctcctgatcgctgtgctcgtgagcttcttcacgttcggcaagctgcagggcttcaatcgcgagcagatccagaagttctgcggcgattgcctcgcgccgatcgcgggcatcacgctgatcgtcggcgcgggcggcggcttcggcggtattctgcgcgacagcggcatctcgcagcagatcgtcgcgaccgcgacgcacgcgcatctgtcgccgctgctgctcggctggttcgtcgcggcgctgatccgtctcgccacgggttcggccaccgtcgcgatgacgaccgcctgcgggatcgtcgcgccgatcgccgcggcctcgggcgtcacggtgcgcccggagctgctcgtgctcgcgacgggctcgggctcgctcatcttctcgcacgtgaacgacggcggcttctggctgatcaaggaatatttcgggatgaccgtggggcagacgttcaagacgtggacgctgctcgaaacgatcatctcggtgctcggtctcaccttcacgctggcgctgagcgcggttctg

SEQ ID NO: 14001 - DNA, 2550 bp, Burkholderia mallei
atgattcggcatcgtgtcgccgatgtcggcttctcgcgcatacgagtgaccatgctggccgccgcgctcacggcgctttcggcgaccgctcgcggccaacaggcgctggagttcgatcctgcctttctcgagttgggcggcggccagggcggagccgatctttccgtgtacgcgacatcgaaccgcgtgctgcccggcgtctatccggtatcggtcttcgtcaacggcgaggcgatcgagcggcgcgacatcacgttcgtgtccgaaagcgcgcgcgacgggcgggaagacgcgatcccctgcctgagcgcccggatgttcgacgaatggggcgtcgacatcgccgcgtttgcgaagctcgcgcaagccggcgaagacgcatgcgtcgacattgccgacagcgtgccccacgcgcgaaccgagttcgacagtcatcaactgcggttgaacgtaacggtgccccaggccgcgttgaagcggcgcgcgcgcggcgcggtggacccggcgcgctgggatcagggtatcgacgccgcgctgctcgactatcaactgagcgccgcccagtacgccggcggcaatttcgcgtccgcccgttcgcgcacgacgttgtatgcggggttgcgcggcgccgtcaatctgggcgcatggcggctgtcgcacacgtcgtcgtttctgcgcgggctcgacggccggaatcgctttcagatcgtcaatacgttcgtccagcgcgacatcgccggctggaacagccgcctcaccgccggggaaggcaccacgcccgcgaacattttcgacggatttcagtttctcggcgtgcaactcaataccgacgagaccatgctgcccgacagtctgcagggctacgcgcccaccgtgcacggcgtcgcgcagaccaatgcgcaggtgacgatcaggcagaatggtttcgtcatctacagcacctacgtgccgccggggccgtttacgatcgacgatctttatccgacgtcgtcgtcgggcaatctggaagtgacgattaccgaggccgacgggcacgtcacgacattcacgcaaccgtactccgcggtgccgatgttgctgcgcgacggttcgtggcggtataacgtcacggcgggccaataccgtgacggcatttcaggctcgcatccgagctttgcgatggcgacgctcgcgcgcgggctggcgggcgaattctcgttgtacggcgggttcatcggggccggcatgtatcaatcggtgctcgtcggaatcggcaagaacctgggcagcatcggcgcggtatcgctcgacgtgacgcacgcgcgcagcgcggtcgacctggccgacagcagcacggtgtcggggcatgcctttcgcgtgctttacgcgaaggccgtgggcagttggggcaccgatttccggttgctcgcataccgctactccaccgccggctatcgaagcttcgccgatgcggtgcaactgcgcgacggcagcgagcccgcggcgctgggcgcaaagcgccagcgcctcgagggcacggtgaaccagcgtctcggccgcctcggctcgatgtacgcgaccgtggccgtgcagacctactggggcagcgcggcgcgcagcaccgtgtatcagctcgggcacagcgggaattgggggcgcgccagctacggactctatgcggcctatagcaaaggaagcggcgtgccgtcgagctggaacgtctcgttgtcgctatcgatgccgctggaagtgtttttcggcggcgcgcgcgtgcgtgcgccggcgggcggcagtgcgaatgtctcgtacttcgtcagccggaacaacgagaaccacgtcaatcaacagatgacggccagcggcagcagcagcgagcagcgcctgaactacagcgtgggcgtcgcgcattccagcgagtcggacgtgagcggctcggtgtcggccagctacctcgcgccgttcggccgctacgacgcgtcgatcggcagcggccgcgggtacacgcaggccgcgttcactgccgccggcggcatgctgtggcatggcaccggagtgttgttcacgcaaccgctcggcgagaccgtggcggtcgtggacgtgccgaacgtgcggggcgtgcgtttcgaaatgcacccgggcgtgagcacggatcgggcgggcgaagcggtgattccgcggctgaacccctatcgggtcaaccgcatcgccgtcgaccagcgccggatgccgcaggacgtggagatccgcaacccggtgagcgaagtcgtgcccacccgggcggcggtcgttcaaacgcacttcgattccgtcgtcgggcttcgcgcgctgttcacgttgacgcgcgcggacggctcgtttccgccgcagggcgcgacggccgagaacgacgagggacaggtgctcggcgtcgtcgggatggacggcgagacgttcgtggcgggcttgcccgccgccgaagggcatttcgtcgttcgctggggggcggcgcggcagaatcgctgccgcgtgaattacgcgctgcccggaaaggcggcgatcggcgcgtacttggccgtggaggcgacatgcgat

SEQ ID NO: 14002 - DNA, 693 bp, Burkholderia mallei
atgagcacgcccgcctatcaggaaatcaaggatttcatccttgcgcgcattcacgccggcgaatgggcggagggcgatcaggtgccgtccgagaacgagctcgcgcgcgagttcaaggtcgcgcggatgaccgtcaaccgcgcgctgcgcgagctgacggccgagcaggtgctcacgcgcatccagggggcgggtacgttcgtcgcgcggccgaagtacgaatcgacgctcgtcgcgatccgcagcatctccgacgaagtcgctgcgcgcggccaccggcatcacgcgcgcgtgctcgacctcgtcacgatgaaggccgacgaagcgctcgccgacgagatgcaggtgccgcctcacacgaggctcttccgctcggtgatgctgcactacgagaacgacgagccggtgcagctcgaggagcgctgggtgaatccggccgtcgccgccgattacgcggatcaggatttctcggcgatcacgccgaaccagtacctgatgcgcgtcgcgccgctgcagcgcgtcgaataccggatcgaggcggcgatgcccgatcgcgcgatgcgcgaggcgctcgagatggccgataccgaaccgtgcctcgtgctgcatcggcgcacgtggtcgcagggcgttgtcgcatcggtcgtgaacctctggcatccgggcagccgctatcgcttcaccggccatttc

SEQ ID NO: 14003 - DNA, 819 bp, Burkholderia mallei
atgctgaagacccgtgtcatcacggcggtcgtgctgctggcggtgctgctgcccgtgacgctgttcgcgccgctcgccgcgttcggcgcgctgatcgcgttcgcgctcgtattcgccgcgtgggagtgggggcggctgttgaagctgggcggcgcgggcccgctcgcgtacgcggccgtcgcggcgctcgcgctcggcgcgagcacgcggctcggcatcggcgcggccgccgcgcggccgctgttcgcggccgcgggggtgttctggctgctggcgggcccgtacgcgctctggcgcaagcccgcgctcgccgagcgcgcgtggaagccgttcctgctcgtcgcgggtctcgtcgtcttctcggcgtgctggcacgcgctcgtcgccgcgcgcgcacaaggcgtacccttcgtgttgtcgctgttggtagtggtatggctcgccgatatcggcgcatacttcgccggaaaggcgttcggcaagcacaagctcgcgccgtcggtgagccccggcaaaacctgggaaggcgcggcgggcggctggctcgcggtgatgatcgtcgccggcgcggctgtcgcggcgcacgccttcgaaccgaccctttattcgacgttcgtcgcgcggtacggtgcggcgggcgcattcgcggcgctcacggtgctcgtcgcgttcagcgtggtcggcgacctgttcgagtcgctgctcaagcgccaggccggcgtgaaagattcgagcggtctcctgccgggccacggcggcgtgctcgaccgcgtcgacgcgctgctgcccgtgctgccgctcgcgatgctgctgctcggt

SEQ ID NO: 14004 - DNA, 729 bp, Burkholderia mallei
atgaaacaaaaaatggccattacgggggccgttgcgctcgctttcgcggcagccgcgacgggtgcgcacgcgcaatccgcaggcagcttctatgtgacgaccggctggttccatctcgcccctcaggacagcagcgatccgctgaagatcatgaacgtcggcggctcgccggtgaatcacgaggtgcccaacacgggcgcgggcatcgacaatgcggacaccatcggcctcgccgccggctacttcctgacggatcacatcgccactgaattggtcgccgggatcccgccaaggttcaatctgaacggcaaaggctcgctcgagcaattcggcgtgctcggtcatgcttatcaatggagcccggcgctcctcctcaagtattacttcaacgacgcgaaggcgaaattccggccctacgtcggcatcggcgcctcgtatatctggttcaccggcgcgaagatcacgaacaccgcattcgagcgcggcgcgctcggcgggccgaccagcgtgcagaccagcaatcagtgggcgcccgtcctcaacgcgggcttcacgtacaacttcaccgatcactggttcggcgggctgtcggtgtcgtacatccccgtcagcctgacggccacgctgacgacgcagcgcccgacgccgatcggcaacgtcacgcagacctcgcaagcgaagatcacgctgaatccgatcgtgacctacctgaacatcggctaccgtttc

SEQ ID NO: 14005 - DNA, 1830 bp, Burkholderia mallei
atgtgcgggattgtcggcgcagttgcgcaacgtaacatcgttccggtgctgatcgaagggctgcgccgtctcgagtatcgcggctacgactcatgcggcgtcgcggtgctcgacgccggcgcccccgcgccgggcacgcccaagcgcgcgcgcagcgtcgcgcgggtggccgatctcgacgcgcaggtgcgcgaatcgcatctcgaaggcgagacgggcatcgcgcacacgcgctgggcgacgcacggcgcgcccgtcacgcacaacgcgcatccgatcttctcgtcggacgcgctcgcgctcgtgcacaacggcatcatcgagaacttcgagccgctgcgcgaagcgctgcgcgcgaagggttacgcattcgtgtcgcagaccgacaccgaggtcatcgctcacctgatccacagcctctatcgcggcaacctgttcgcggccgttcagcaagccgtcaagcaactgcacggcgcctacgcgatcgcggtgacccacaaggacgagccgcataccgtcgtcggggcgcgccagggctcgccgctcgtcgtcggtttcggcgagcgcgagaatttcctcgcgtccgacgcgctcgcgctcgccggcagcaccgatcgcttcacgttcctcgaggaaggcgacgtctgcgagctcacgctcgagggcgtgactgtcgtcgatcgcgacggcgcgcgcgccgcgcgcgacgtgcgcgtcgtcgccgcatacggcggcgcggtcgagctcggcccgtaccggcatttcatgcagaaggagatcttcgagcagccgcgcgcgatcgccgacacgattgcgcaaacggacgcgttcgatccgccgctgttcggcgagcgtgcgagcagcgtgttcgcgggcatcgacagcctgctgatcctcgcatgcggcacgagctactactcaggcctcaccgcgaaatactggctcgaatcgatcgcgaagatcccgacgcaggtcgagatcgcgagcgaataccgctaccgcgaatcggtgccgaacccgcgcgcgctcgtcgtcgtgatctcgcaatcgggcgagacggccgatacgctcgccgcgctcaagcacgcgcaggcgctcggccatgcgcacacgctcgcgatctgcaacgtcgcgacgagcgcgatggtgcgccagaccgagctgcaattcctcacgcacgcgggcaccgagatcggcgtcgcgtcgacgaaggcgttcacgacgcagctcgtcgcgctgttcgtgctcgcggcgacgctcggcaagctgcgcggccacgtcgatgcggctcgcgaagccgattacctgaagcaactgcgccacctgcccgccgcgctcaacagcgtgctcgcgctcgagccgcagatcatcgcgtggtccgacgagttcgcgcgcaaggaaaacgcgctgttcctcggccgcgggctgcactatccgatctcgctcgaaggcgcgctgaagctcaaggagatctcgtacatccacgcggaagcgtacccggcgggcgaactgaagcacgggccgctcgcgctcgtgacggaggcgatgccggtcgtgacggtcgcgccgaacgacacgctgctcgagaagctgaagtcgaacatgcagraggtgcgcgcgcgcggcggcgaactgtacgtgttcgccgacgcggacacgcacatcgtcaacgacgaagggctgcacgtgatccgcatgcccgagcattacgggccgctgtcgccgatcctgcacgtcgtgccgctgcaactgctcgcgtatcacaccgcctgcgcacgcggcaccgatgtcgacaagccgcgcaatctcgcgaaatcggtgacggtggaa

SEQ ID NO: 14006 - DNA, 780 bp, Burkholderia mallei
atgacctataccagctctaccgttcgcgtgcctgacgtcgccgccgtgccgcgtcacatcgcgatcatcatggacggcaacggccgttgggcgaccgagcgccgcctgccgcgcgtcgcggggcacacgcgcggcgtcgacgcggtgcgctcggtcgtcgagggatgcgcacgcgcgggcgtcgaatatctgacgctcttcgcgttcagctccgagaactggcgccggccgaacgacgaagtgtcgttcctgatgcgcctgttcatcaccgcgctcgagcgcgaggtcggcaagctgcacgcgaacggcatccggctgcgcgtcgtcggcgatctgacgaagttcgagccgcgcatccaggcgctgattcgtcgcggcgagacgaagacggcgcgcaatacgcgcctcacgctcacgatcgccgcgaactacggcggccattgggacatcctgcaggcgacgcgcaagctcgtcgaagaggcggcgcgcgaagggcgcgcgcccgaaatcgacgaggacgcgttcgcccgccatctggcgatggcctatgcgcccgagccggatctcttcatccgcacgggcggcgagcagcgcatcagcaatttcctgctctggcagctcgcctataccgagttctacttcaccgacacgttctggccggatttcgacgccggcgcgctcgccgaagcgctcgcgtcgtacacgcaccgcgaacgccgcttcggccgcacgagcgcgcagctcgaaccccaggcccaggacgccgattccctttcatgc

SEQ ID NO: 14007 - DNA, 1599 bp, Burkholderia mallei
atgaacgatttctggcaacactgttccgcgctattggagcgtgaattgacgccccaacagtacgtgacgtggattaaacccttggccccggtcgccttcgatgccgccgcgaacacgctgtcgatcgccgcaccgaaccgcttcaagctcgactgggtcaagagccagttctcgggccggatctccgatctggcccgcgatttctggaacgcgccgatcgaagtgcaattcgtgctcgatccgaaggcgggccaacgcagtcccgccggcgcgacgccgcttgcgccccgcgcgccgctgccgagcgcgaatcccgcgccggttgcgcccggcccggcgtgcgcgcccgccgtcgacgcgcacgcgcccgcccccgccggcatgaacgccgccaccgcggccgccgtcgccgccgcgcaggccgcgcaagcggcccaggcgaacgccgccgcgctgaacgcggacgaggccgccgacctcgacctgccgagcctcaccgcgcacgaggcggcggcaggccgccgcacgtggcgcccgggcgcggcgaacgcgaacagcgaagccgccgattcgatgtacgagcgctcgaagctgaacccggtgctcacgttcgacaacttcgtcaccggcaaggcgaaccagctcgcacgcgcggcggcgatccaggtggccgataatccggggatttcgtacaacccgctgttcctgtacggcggtgtcggcctcggcaagacccacctgatccacgcgatcggcaaccagttgctgctcgacaaacccggcgcgcgcatccgctacatccacgcggaacagtacgtgtccgacgtcgtgaaggcgtaccagcgcaaggcgttcgacgatttcaagcgctactatcattcgctcgacctgctgctcatcgacgacatccaattcttctcgggcaagtcgcgcacgcaggaagagttcttctacgcgttcgaagcgctcgtcgcgaacaaggcgcaggtgatcatcacgagcgatacgtatccgaaggaaatctccggcatcgacgatcgcctgatctcgcgcttcgattcgggcctcactgtcgcgatcgagccgcccgagctggagatgcgcgtcgcgatcctgatgcgcaaggcgcaatcggaaggcgtgagcctgtcggaggacgtcgcgttcttcgtcgcgaagcacctgcgctcgaacgtgcgcgagctcgaaggcgcgctgcgcaagatcctcgcgtactcgaagttccacggccgggagatcacgatcgagctgacgaaggaagcgctgaaggatctgctcaccgtgcagaaccggcagatctcggtcgagaacatccagaagacggtggccgacttctacaacatcaaggtcgccgacatgtattcgaagaagcgccccgcgaacatcgcgcggcctcggcagatcgcgatgtatctcgcgaaggagctcacgcagaagagcctgcccgaaatcggcgagctgttcggcgggcgcgaccacaccaccgtgctgcacgcggtgcgcaagatcgccgacgaacgcggcaaggacgcgcagctcaatcacgagctgcacgtgctcgaacagacgctcaagggc

SEQ ID NO: 14008 - DNA, 1137 bp, Burkholderia mallei
atgcatatcggagtgcctgccgaaacgcgggcgaacgaggcgcgcgtggcggcgacgccggagacggtcaggaaatacgcggcggccggccaccgcgtgacggtcgagcgcggcgcgggcgcgggcgcgagctttccggacgacgcgtacgcggcggccggcgcggagctggccgacgcggccgccgcgttcggcgcggacatcgtgctgaaggtgcaggcgccgaccgacgcggaatgcgggcaactgaagcgaggctcggttctgatcggcatgctcgagccgttcaacgccgagcaggcggcgcggctggcggccgcgggcgtgacgggcttcgcgctcgaggccgcgccgcgcacgacgcgcgcgcagagcctcgacgtgctgtcctcgcaggccaacatcgccggctataaggcggtgctcgtcgccgcggcgctgtatccgcgcttctttccgatgctgatgacggccgcgggcacggtgaaggccgcgcgcgtgctcgtgctcggcgcgggcgtcgcgggcctgcaggcgatcgcgaccgcgaagcgcctgggcgcggtgatcgaggcgtccgacgtgcgcccggcggtcaaggagcagatcgaatcgctcggcgcgaaattcctcgacgtaccttacgaaacgcaagacgagcgcgacgcggcgcaaggcgtcggcggctacgcgcggccgatgccggcatcgtggctcgggcggcaggcggcgctcgtgcacgagcgcgcgaagcaggccgacatcgtgatcaccaccgcgctgattcccggccgccccgcgccgacgctgatctcggtcgaaaccgtgcagtcgatgaagccgggctcggtgctcgtcgatctcgcggcggggcgcggccccgaattcgacggcaggaagagcggcaactgcccgctcaccgtcgccgatcaggtgatcgtgcatcacggcgtgacgatcgccggccacacgaacctggccgcgatggtgcccgccgacgcgtcgtcgctctacgcgcgcaacctgttcgacttcctgaagctgatcgtcacgaaggaaggcgcgctcaacatcgatctttcggacgacatcgtcgccgcgacgctcttgtgccgcgacggcgaagtcgtgcgcaaa

SEQ ID NO: 14009 - DNA, 1119 bp, Burkholderia mallei
atgagcctcgccgcccgccgccattcggcccgcccgatatccgccgagcgcggttcgacctgcgcgtcgcgcgccctcgccgcactgcgccggcgacgcgcgcgatggacgctcgccacgctgatcgccgcgctcgccgccgcgtcgatcgccgcactctgcatcggcgcgtaccggctctcgcccgcgcagttgctcggcgcgctcaccgccaccgatgcgcagctcgcgggcgacgcggcgctgcgccaggcgcgcgcggtgctcgtcgacatccgcgcgccgcgcgtcgtgctcgcgctcttcgtcggcgcgggcttcggcgcggccggcgccgcgatgcaagcgctctttcgcaatccgctcgccgatccgggcctgatcggcgtatcgagcggcgcggcgctcggcgcatcggcgctgatcgtgctcggcccgctcttcgccgcgcggctcgcgctcggcttgctgcccgtcgccgcgttcgccggcgcgctcgcggtcgcggcgctcgtctaccggctcgccgtcgcgcgcggccggctcgcgctgccgctgctgctgctcgccggcatcgcgatcaacgcgctcgccggcgcggggatcgggcttctcacctacctcgccgacgatgcgcaactgcggtcgctgacgttctggagcctcggcagcgtcggcggcgcgcaatggcgcacgatcgccgccgtcgcgccgttcgcgctcgccggctgcgtgctgctcgcgcgcgagcgacacgcgctgaacgcgctgcagctcggcgaagccgaagcgatgcatctcggggtgccggtgccgcgcgtgaagcggcgcgtgctcgtcggcaccgcgatgtgcgtcggcgcgctcgtgtcgtgcaccggcgcgatcggtttcatcgggctcgtcgcaccgcattgcgtgcggctcgcggcgggcgccgatcagcgcatcgtgataccgggcgcggcgcttttcggcgcgctgctcgcggtggccgccgatctcgccgcgcgcacgctcgccgcgccggccgagattccgctcggcatcctgaccgcgctgatcggcgcgccgttctttctagcgctgctctggaagcggcgcggcgcgctgggagga

SEQ ID NO: 14010 - DNA, 1014 bp, Burkholderia mallei
atgaaagttttctacgacaaggatgccgacctctccctcatcaagggcaagcaggtgacgatcatcggttacggctcgcaaggccatgcgcacgcgctgaacctgaaggacagcggcgtgaacgtgacggtcggtctgcgccgcggcggcgcgtcgtggagcaaggccgagaacgccggcctcgcggtcaaggaagtcgccgaggcggtgaagggcgcggacgtcgtgatgatgctgctgcccgacgagcagatcgccgccgtctacgcgcaggaagtgcacgcgaacatcaaggaaggcgccgcgctcgcgttcgcgcacggcttcaacgtccactacggccaggtgatcccgcgcgcggatctcgacgtgatcatggtcgcgccgaaggcgccgggccacacggtgcgcggcacgtacgcgcagggcggcggcgtgccgcacctgatcgcggtcgcgcaggacaagtcgggcgcggcgcgcgacatcgcgctgtcgtacgcggcggccaacggcggcggccgtgccggcatcatcgagacgaacttccgcgaagagacggaaaccgatctgttcggcgagcaggccgtgctgtgcggcggcaccgtcgagctgatcaaggccggtttcgagacgctcgtcgaagcgggctacgcgccggaaatggcgtacttcgagtgcctgcacgagctgaagctgatcgtcgacctgatctatgaaggcggcatcgcgaacatgaactactcgatctcgaacaacgccgagtacggcgagtacgtgacgggcccgcgcgtcgtcaccgaagagacgaagaaggcgatgaagcaatgcctgaccgacatccagacgggcgagtatgcaaagagcttcattctcgagaacaaggcgggcgcgccgacgctgcagtcgcgccgccgcctgacggccgagcaccagatcgagcaggtcggctcgaagctgcgcgcgatgatgccgtggatcgcgaagaacaagctcgtcgaccagtcgaagaac

SEQ ID NO: 14011 - DNA, 1488 bp, Burkholderia mallei
atggtgctcgtgctggggctcggcgaatcgggcctcgcgatcgcgcggtggtgcgcgaggcacgggtgccggttgcgcgtcgccgatacgtgcgagacgccgcccaacctggccgcgctgacggcggcgggcgtcgatttcgaattcgtcggcggcgcgttttcgccggcgctcgtcgacggcgggatcgagcttgtcgcgctgagccccggcctgtcgccgctcgcggaggatctcgcgccgctcgtcgccgccgcacgcgagcgcggcattcccgtgtggggcgagctcgaattcttcgcgcaggcgctcgcggcgctcggcgcgaacggctacgcgccgaaggtgatcgcgatcaccggcacgaacggcaagacgacgacgacgagcctcgcgggcttgctgtgcgagcgcgcgggcaagaaggtcgcggtcgcgggcaacatcagcccggcgatgctcgacaagctgaccgaagcgatcgacgcggcggcgctgccggacgtgtgggtgctcgagctgtcgagctttcagctcgacaccgcgcacacgttcgcgcccgatgcggcaacgatcctcaacatcacgcaggaccatctcgactggcacggcggcttcgccgcgtatgcggccgcgaagggccgcgtcttcgggccgcgcacggtgcgcgtgctcaatcgcgacgatgccgaggtgatgcgcttcgcgccgcccgccgcggccgccgacgcgccgcgcgcggtcacgttcggcctgaacgagccggccgccgacggcgattacggcctgctgcgcgaaaacggcatcgcatggctcgtcgaggcgatcgatcgcgacggggccgatgcgcccgccgcgccgtcgcgccggcgcaagcaggaggcggcgaatccgcccgacatcgcgctcaagcggctgatgcccgccgacgcgttgcgcatccgcgggctgcacaacgcggcgaacgcgctcgccgcctatgcgctcgcgcgcgcgatcggcctgccggccgcgccgctcctgcacggcttgcgcgaataccgcggcgagccgcaccgcgtcgaagtgatcgcgacgctcgacggcgtcgactatgtcgacgacagcaagggcacgaacgtcggcgcgacggtcgcggcgctcgacggcctcgcgcagcgtgcggtgctgatcgcgggcggcgacggcaaggggcaggatttcgagccgctcgcggcgcccgtcgcgcgctggtgccgcgcggtgatgctgatcggccgcgacgcgcccgcgttgcgcgaggcgcttgccgacacgggcgtgccgcttgccgatcacgcgacgctcgaagccgcggtgcgcgcggcgagcgcgctcgcgcagccgggggacgcggtgctgctgtcgcccgcgtgcgcgagcctcgacatgttccgcaattacgcacaccgggccgacgtgttccgcagcgcggtcgaagatatcgccttggaaaaaggaacgacgcta

SEQ ID NO: 14012 - DNA, 210 bp, Burkholderia mallei
atgacgatcatccgcgttaaggaaaacgagcctttcgaagtcgcgatgcgccgcttcaagcgcacgatcgaaaagaacggtctgctgacggagttgcgcgcgcgcgagttctacgagaagccgactgcggagcgtaagcgcaagaaggccgctgcggtgaagcgccactacaagcgcatccgcagccagatgctgccgaagaagctctac
